United States Patent Application Publication US 2018/0126003 A1 - sequence listing, part 134

SEQ ID NO: 234185 - DNA, 3150 bp, Artificial Sequence
  derived and/or modified sequence
cggcgggtagtgcgaccctaggggcgggacttcatgtcccagcaggctccgggcggcgtgcgccgcggtgcctagtgtgggatgtaagcgcggaggtgggcgagggggaccgaggccaggactctccttggggtttgggggcttgacctgggtgcgctttctggacagactttacagccccgggggcacagtcgtagagagggggcggggcggccattggggctcctcattggggtgcttggggcgcaccccatcgggtaccgggcgtcccggaattgtgggggacaaaaaggctctgcagtctcggctgaggggtctcaccgacaaaagaggggaagccggtgagcagaggctgaagagggtggggaagcaggggagctgtgcgtgtgtcggggcgggtggaaccttagcggaccctgggaggaggctccccggccgaacctgcccgaccctccctcccccggcttgccttgcaggccgccgcccaccgcccgccgccatggggctgaaggccgcccagaagacgctgttcccgctgcgctccatcgacgacgtggtgcgcctgtttgctgccgagctgggccgagaggagccggacctggtgctcctttccttggtgctgggcttcgtggagcattttctggctgtcaaccgcgtcatccctaccaacgttcccgagctcaccttccagcccagccccgcccccgacccgcctggcggcctcacctactttcccgtggccgacctgtctatcatcgccgccctctatgcccgcttcaccgcccagatccgaggcgccgtcgacctgtccctctatcctcgagaagggggtgtctccagccgtgagctggtgaagaaggtctccgatgtcatatggaacagcctcagccgctcctacttcaaggatcgggcccacatccagtccctcttcagcttcatcacaggcaccaaattggacagctccggtgtggcctttgctgtggttggggcctgccaggccctgggtctccgggatgtccacctcgccctgtctgaggatcatgcctgggtagtgtttgggcccaatggggagcagacagctgaggtcacctggcacggcaagggcaacgaggaccgcaggggccagacagtcaatgccggtgtggctgagcggagctggctgtacctgaaaggatcatacatgcgctgtgaccgcaagatggaggtggcgttcatggtgtgtgccatcaacccttccattgacctgcacaccgactcgctggagcttctgcagctgcagcagaagctgctctggctgctctatgacctgggacatctggaaaggtaccccatggccttagggaacctggcagatctagaggagctggagcccacccctggccggccagacccactcaccctctaccacaagggcattgcctcagccaagacctactatcgggatgaacacatctacccctacatgtacctggctggctaccactgtcgcaaccgcaatgtgcgggaagccctgcaggcctgggcggacacggccactgtcatccaggactacaactactgccgggaagacgaggagatctacaaggagttctttgaagtagccaatgatgtcatccccaacctgctgaaggaggcagccagcttgctggaggcgggcgaggagcggccgggggagcaaagccagggcacccagagccaaggttccgccctccaggaccctgagtgcttcgcccacctgctgcgattctacgacggcatctgcaaatgggaggagggcagtcccacgcctgtgctgcatgtgggctgggccacctttcttgtgcagtccctaggccgttttgagggacaggtgcggcagaaggtgcgcatagtgagccgagaggccgaggcggccgaggccgaggagccgtggggcgaggaagcccgggaaggccggcggcggggcccacggcgggagtccaagccagaggagcccccgccgcccaagaagccagcactggacaagggcctgggcaccggccagggtgcagtgtcaggacccccccggaagcctcctgggactgtcgctggcacagcccgaggccctgaaggtggcagcacggctcaggtgccagcacccacagcatcaccaccgccggagggtccagtgctcactttccagagtgagaagatgaagggcatgaaggagctgctggtggccaccaagatcaactcgagcgccatcaagctgcaactcacggcacagtcgcaagtgcagatgaagaagcagaaagtgtccacccctagtgactacactctgtctttcctcaagcggcagcgcaaaggcctctgaactactggggacttcggaccgcttgtggggacccaggctccgcccttagtcccccaactctgagcccatgttctgcccccagcccaaaggggacaggcctcacctctacccaaaccctaggttcccggtcccgagtacagtctgtatcaaacccacgattttctccagctcagaacccagggctctgccccagtcgttagaatataggtctcttctcccagaatcccagccggccaatggaaacctcacgctgggtcctaattaccagtctttaaaggcccagcccctagaaacccaagctcctcctcggaaccgctcacctagagccagaccaacgttactcagggctcctcccagcttgtaggagctgaggtttcacccttaacccaaggagcacaggtcccacctccagcccgggagcctaggaccactcagcccctaggagtatatttccgcacttcagaattccatatcttgcgaatccaagctccctgccccaaataacttcagtcctgctccagaatttggaaatcctagtttcctctccttcgtatcccgagtctgggacacaaaactccgcccccagcctatgagcatcctgagccccgccctcttcctgacgaaactggccccggatcagagcaggacctcccttccgaccctctgggaacctcccagaggtccagcccatctcggagcatcccggaggaaatctgcagagggttaggagtgggtgacaagagcctgatctcttcctgttttgtacatagatttatttttcagttccaagaaagatgaatacattttgttaaaaaaaa

SEQ ID NO: 234186 - DNA, 870 bp, Artificial Sequence
  derived and/or modified sequence
gcgcggaggtgggcgagggggaccgaggccaggactctccttggggtttgggggcttgacctgggccgccgcccaccgcccgccgccatggggctgaaggccgcccagaagacgctgttcccgctgcgctccatcgacgacgtggtgcgcctgtttgctgccgagctgggccgagaggagccggacctggtgctcctttccttggtgctgggcttcgtggagcattttctggctgtcaaccgcgtcatccctaccaacgttcccgagctcaccttccagcccagccccgcccccgacccgcctggcggcctcacctactttcccgtggccgacctgtctatcatcgccgccctctatgcccgcttcaccgcccagatccgaggcgccgtcgacctgtccctctatcctcgagaagggggtgtctccagccgtgagctggtgaagaaggtctccgatgtcatatggaacagcctcagccgctcctacttcaaggatcgggcccacatccagtccctcttcagcttcatcacaggcaccaaattggacagctccggtgtggcctttgctgtggttggggcctgccaggccctgggtctccgggatgtccacctcgccctgtctgaggatcatgcctgggtagtgtttgggcccaatggggagcagacagctgaggtcacctggcacggcaagggcaacgaggaccgcaggggccagacagtcaatgccggtgtggctgagcggagctggctgtacctgaaaggatcatacatgcgctgtgaccgcaagatggaggtggcgttcatggtgtgtgccatcaacccttccattgacctgcacaccgactcgctggagcttctgcagctgcagcag

SEQ ID NO: 234187 - DNA, 816 bp, Artificial Sequence
  derived and/or modified sequence
tatatttatgtatatgcacatacacacaaaattaggcgggagtggtggcgcacgcctgtgatcacagctactcgggaggctgaggcacgagaatcgcttgagcccgtgaagtcgaggctgcagtgagcccagatcgagccactgcattccagcctgggcgaaagagaaagaccgtgtctcaaaacaaacaaacaaaagctactcttagcacgtgttagagtatctcgcgggcggaagtgggaaacgagtgctgcacacagacaacctgatctttttcctcataacttgccgaccgacccgtgacagcaaaaccggcagaagctcggcgacctcccaccccgagtctgcaggtagccgccgcccaccgcccgccgccatggggctgaaggccgcccagaagacgctgttcccgctgcgctccatcgacgacgtggtgcgcctgtttgctgccgagctgggccgagaggagccggacctggtgctcctttccttggtgctgggcttcgtggagcattttctggctgtcaaccgcgtcatccctaccaacgttcccgagctcaccttccagcccagccccgcccccgacccgcctggcggcctcacctactttcccgtggccgacctgtctatcatcgccgccctctatgcccgcttcaccgcccagatccgaggcgccgtcgacctgtccctctatcctcgagaagggggtgtctccagccgtgagctggtgaagaaggtctccgatgtcatatggaacagcctcagccgctcctacttcaaggatcgggcccacatccagtccctcttcagcttcat

SEQ ID NO: 234188 - DNA, 944 bp, Artificial Sequence
  derived and/or modified sequence
tatatttatgtatatgcacatacacacaaaattaggcgggagtggtggcgcacgcctgtgatcacagctactcgggaggctgaggcacgagaatcgcttgagcccgtgaagtcgaggctgcagtgagcccagatcgagccactgcattccagcctgggcgaaagagaaagaccgtgtctcaaaacaaacaaacaaaagctactcttagcacgtgttagagtatctcgcgggcggaagtgggaaacgagtgctgcacacagagtaggcatctttatatgttaacagacactgatacccagctaaagcggctgaacacatttactctctggcagtgtttaaaagtatctgtttttctcatattgttttattttaattttttctggatcaagcaacctgatctttttcctcataacttgccgaccgacccgtgacagcaaaaccggcagaagctcggcgacctcccaccccgagtctgcaggtagccgccgcccaccgcccgccgccatggggctgaaggccgcccagaagacgctgttcccgctgcgctccatcgacgacgtggtgcgcctgtttgctgccgagctgggccgagaggagccggacctggtgctcctttccttggtgctgggcttcgtggagcattttctggctgtcaaccgcgtcatccctaccaacgttcccgagctcaccttccagcccagccccgcccccgacccgcctggcggcctcacctactttcccgtggccgacctgtctatcatcgccgccctctatgcccgcttcaccgcccagatccgaggcgccgtcgacctgtccctctatcctcgagaagggggtgtctccagccgtgagctggtgaagaaggtctccgatgtcatatggaacagcctcagccgctcctacttcaaggatcgggcccacatccagtccctcttcagcttcat

SEQ ID NO: 234189 - DNA, 1107 bp, Artificial Sequence
  derived and/or modified sequence
gggcggcgtgcgccgcggtgcctagtgtgggatgtaagcgcggaggccgccgcccaccgcccgccgccatggggctgaaggccgcccagaagacgctgttcccgctgcgctccatcgacgacgtggtgcgcctgtttgctgccgagctgggccgagaggagccggacctggtgctcctttccttggtgctgggcttcgtggagcattttctggctgtcaaccgcgtcatccctaccaacgttcccgagctcaccttccagcccagccccgcccccgacccgcctggcggcctcacctactttcccgtggccgacctgtctatcatcgccgccctctatgcccgcttcaccgcccagatccgaggcgccgtcgacctgtccctctatcctcgagaagggggtgtctccagccgtgagctggtgaagaaggtctccgatgtcatatggaacagcctcagccgctcctacttcaaggatcgggcccacatccagtccctcttcagcttcatcacaggcaccaaattggacagctccggtgtggcctttgctgtggttggggcctgccaggccctgggtctccgggatgtccacctcgccctgtctgaggatcatgcctgggtagtgtttgggcccaatggggagcagacagctgaggtcacctggcacggcaagggcaacgaggaccgcaggggccagacagtcaatgccggtgtggctgagcggagctggctgtacctgaaaggatcatacatgcgctgtgaccgcaagatggaggtggcgttcatggtgtgtgccatcaacccttccattgacctgcacaccgactcgctggagcttctgcagctgcagcagaagctgctctggctgctctatgacctgggacatctggaaaggtaccccatggccttagggaacctggcagatctagaggagctggagcccacccctggccggccagacccactcaccctctaccacaagggcattgcctcagccaagacctactatcgggatgaacacatctacccctacatgtacctggctggctaccactgtcgcaaccgcaatgtgcgggaagccctgcaggcctgggcggacacggccactg

SEQ ID NO: 234190 - DNA, 922 bp, Artificial Sequence
  derived and/or modified sequence
gacttcatgtcccagcaggctccgggcggcgtgcgccgcggtgcctagtgtgggatgccgccgcccaccgcccgccgccatggggctgaaggccgcccagaagacgctgttcccgctgcgctccatcgacgacgtggtgcgcctgtttgctgccgagctgggccgagaggagccggacctggtgctcctttccttggtgctgggcttcgtggagcattttctggctgtcaaccgcgtcatccctaccaacgttcccgagctcaccttccagcccagccccgcccccgacccgcctggcggcctcacctactttcccgtggccgacctgtctatcatcgccgccctctatgcccgcttcaccgcccagatccgaggcgccgtcgacctgtccctctatcctcgagaagggggtgtctccagccgtgagctggtgaagaaggtctccgatgtcatatggaacagcctcagccgctcctacttcaaggatcgggcccacatccagtccctcttcagcttcatcacaggcaccaaattggacagctccggtgtggcctttgctgtggttggggcctgccaggccctgggtctccgggatgtccacctcgccctgtctgaggatcatgcctgggtagtgtttgggcccaatggggagcagacagctgaggtcacctggcacggcaagggcaacgaggaccgcaggggccagacagtcaatgccggtgtggctgagcggagctggctgtacctgaaaggatcatacatgcgctgtgaccgcaagatggaggtggcgttcatggtgtgtgccatcaacccttccattgacctgcacaccgactcgctggagcttctgcagctgcagcagaagctgctctggctgctctatgacctgggacatctggaaaggtaccccatggccttaggg

SEQ ID NO: 234191 - DNA, 1833 bp, Artificial Sequence
  derived and/or modified sequence
atgggtctgaaagctgcgcagaaaacgctcttccccctccggtccattgacgacgtagttaggttattcgccgctgaactggggcgagaggaaccggatctcgtgctgctgtccctcgttctggggttcgttgagcactttctagcagttaacagagtgattccgaccaatgtgcccgagctcacctttcagccatctcccgcaccggaccctccagggggtctgacctatttccctgttgctgatctgtcaataattgccgctctgtatgcccgatttactgcccagatccgcggagcggtcgatctctcgctgtacccaagggaagggggagtgtcttctcgcgagctggtcaaaaaggtgagtgatgtgatctggaattccctgtcaaggagctattttaaagaccgggcacacatacagtctcttttttctttcatcacaggaactaaactcgactcatcaggtgtagctttcgccgtggtcggtgcctgccaggccctgggcttaagagatgtccacctggccttgtccgaggatcacgcttgggtggtctttggtccaaacggggagcagaccgctgaagtaacttggcacggcaagggaaatgaagatcgtagggggcagacagttaatgctggggtagcggagcgatcgtggctgtatctgaagggttcgtatatgcggtgtgaccggaagatggaggtagcatttatggtgtgtgcgatcaacccttccatcgatctgcacacggatagcttggaattgctccaacttcagcagaagttactctggcttctgtacgatttgggccacctggaacggtatcccatggccttggggaacctggctgatctagaggagctcgagcccactccgggtaggcctgacccactcaccctctatcacaagggcattgcctcggcgaaaacatactatcgggacgagcacatttatccatatatgtatcttgctggataccactgtagaaacaggaacgtgcgagaggcactgcaggcctgggccgacactgcaacggtgatccaagactacaactactgtagagaagatgaagaaatatacaaagaattttttgaggtggctaacgacgttatcccaaacttgctaaaggaagcagcctcccttttggaggcaggggaagaacgacccggtgaacagtcacagggcacccaatcccaaggaagtgccctgcaggacccggaatgcttcgctcatcttcttcggttttatgatgggatctgtaagtgggaggaaggctcacccacgccagtcctacatgtcggatgggctacctttctagttcagagtttaggtagatttgagggccaggtgagacagaaggtgcgcatagtgagccgagaggcggaagctgctgaggcagaggagccttggggagaggaagcccgtgagggcagaagacggggacctagacgagagtcaaagcccgaggaacccccaccaccgaaaaaacctgctctcgacaagggacttggaacagggcagggagccgtttcaggccctccacggaagccccctggaaccgtggccggaactgctcgtgggccagagggcggatctacggctcaggtccctgcaccaacagcaagccccccacctgagggaccggtacttactttccagagtgaaaaaatgaagggcatgaaggagctcttagtggctacaaagatcaactcctctgccattaagctgcaactcacagcccagagccaggtccagatgaaaaagcaaaaggtaagcacacccagtgactataccctctcattccttaagcgccaacgcaagggcctatag

SEQ ID NO: 234192 - DNA, 1833 bp, Artificial Sequence
  derived and/or modified sequence
atgggtctgaaagcagcacagaaaaccctgttcccccttagatccatcgatgacgtggtgagattatttgccgcagagctgggccgtgaggagccggacttagtcctgctctcgttagtgctgggtttcgttgaacatttcttggcagtcaatcgggtgatacctaccaacgtgcctgagttaactttccagcccagtcccgcacccgacccccctggaggtctgacctactttcccgtggctgacctctccattattgcagccctctatgcacgctttactgcgcaaattagaggcgctgtggacttaagtctctaccccagagagggaggggtcagctccagggagcttgtgaagaaagtatccgatgtaatttggaattccctctctcgttcttacttcaaggatagagctcacatacagtctttattcagtttcattacagggactaagttagacagttctggggtggcctttgcagtggtcggtgcatgtcaggcgctgggcctgcgcgatgtgcacttggccctcagtgaggaccatgcctgggtcgtcttcgggccaaatggtgagcagactgcagaggtgacgtggcatggaaaaggcaacgaagataggcgtgggcaaacagtgaacgctggggtagctgaacggagttggctgtacctgaagggatcatatatgcgctgtgacaggaagatggaagttgctttcatggtatgtgcaataaatccatccatcgatttgcacacggattctctcgaattactgcagctccaacagaagttgctgtggctgctttatgatctgggacacttggaaaggtatcccatggcccttggcaatttggcagacctggaggagctggagcccaccccaggtcggcctgaccccttaactctttatcacaaagggatcgccagtgctaaaacttattatagagatgaacacatctatccatacatgtacttggccggttaccactgtaggaaccgaaatgtgcgcgaggctctgcaggcttgggccgatacggctactgtgatacaggattataattattgcagggaggacgaagaaatttacaaggagttctttgaggtggcaaatgacgtgatcccaaacctgcttaaggaggctgcctcactgcttgaagcgggtgaagaacgcccaggagaacaaagtcagggaacacagtcccaggggagtgcacttcaggaccctgaatgcttcgcacaccttctgagattctacgacggcatctgcaaatgggaggaaggcagtccaacaccagttttgcatgtcggttgggccactttcctcgtgcaatctttgggcaggtttgagggccaggttaggcagaaggttaggatagtctccagggaggcagaggcagcggaagctgaagagccctggggggaggaggcacgggaaggcagacgcaggggccctaggcgtgagtcgaagcctgaggaaccacctccaccgaagaaaccagccctagacaaaggactgggaactggccagggagccgtctccggaccccctcgtaagcctcccggtacagtggccggaacggccagaggcccagagggtggcagcacagcacaggttcctgcacctactgcctccccaccaccagaaggcccagtgttaacattccagtccgaaaagatgaaggggatgaaagaactgctggtagcaaccaagattaattcatccgcaatcaagctccagctgaccgcccagtcccaagtgcagatgaaaaaacaaaaagtatctacacctagtgattacacactgagttttttaaagcgccagcgcaagggtctctag

SEQ ID NO: 234193 - DNA, 1668 bp, Artificial Sequence
  derived and/or modified sequence
atgggcctaaaagccgctcagaaaacccttttccccctgcgtagtattgatgacgtggtgagactgttcgcggctgagctagggagagaagagcccgacctcgttctcctaagtctcgttctgggcttcgtggagcacttcttagctgttaacagagtaatccccaccaacgttcctgagctgacatttcagccaagcccagccccagatccacccggaggactcacctattttcctgtcgcagatctctctataatagccgctctgtatgctcgctttactgctcagatccgcggagccgtggacctgtccctctacccccgtgagggaggcgttagctcaagggagcttgttaagaaagtgagcgacgtgatttggaactccttgagtcgatcctatttcaaggaccgtgcccatattcaaagcctgttctcttttatcaccggcacgaagctcgactcttccggtgtggcctttgcagttgtgggtgcgtgtcaggcccttgggctgcgtgatgtacacctcgcactcagtgaggaccatgcctgggtcgtctttggacccaacggcgaacaaacagcagaggtaacctggcacggcaagggcaatgaggaccggaggggacagacagtgaacgcgggagtcgcagagagatcttggttatatctgaaggggtcatacatgcggtgtgacagaaagatggaagtggccttcatggtgtgcgccatcaacccctccatagacctgcacaccgactccctcgagctgctccagctgcagcagaaactactgtggctgttgtatgatctggggcatcttgaaaggtatcccatggctctgggaaatctggcagatctggaagagctagaacctacgccaggtcggcctgaccccctgacgctgtatcataaagggattgcatcagctaagacatactatcgtgatgaacacatctatccctatatgtacctggcagggtaccattgcagaaaccggaatgtgagggaggccctgcaagcctgggctgacaccgccaccgtgattcaagactacaattactgccgcgaggacgaagagatctacaaggaattctttgaggtggcaaacgacgtgattcctaaccttctcaaagaagcagcgagccttttggaggcaggggaggaacgacccggagaacagagccaggtccgtcaaaaagtccggatcgtatccagggaggcagaagctgccgaggcagaagagccatggggcgaagaagccagggagggccgacgccgtggtccaaggcgggagagcaagccggaggagccacctcctcctaagaagccagcactggacaaaggactcggcacaggacagggagcagtgtctggccctcctcggaagcctcctgggactgtggcaggcactgcaagaggccctgagggaggttcaactgctcaggtgcctgcccctacagcctcaccaccaccagagggaccagtcctgacgtttcaatcggagaaaatgaaaggaatgaaggagctccttgtcgcaactaagatcaatagcagcgctattaaactgcagttaactgcgcagtcacaggttcagatgaagaaacagaaggtttcaacaccgtccgactacacactcagcttcctaaaacggcaacgcaagggcctgtag

SEQ ID NO: 234194 - DNA, 1728 bp, Artificial Sequence
  derived and/or modified sequence
atgggactgaaagctgcgcagaagaccctcttccctctgcgctctatcgacgacgtggtgagactttttgccgctgaattaggacgggaagagccagatttggtgcttcttagccttgtcctgggcttcgtggaacacttcttggctgtgaaccgagtgataccaaccaatgtgccggaacttacgtttcagccctcaccagcacctgacccccctgggggactgacttactttccggtggccgacctgagcattatcgcagccttatacgctcgatttactgcccaaattcgtggagccgttgatttatccctctatcccagggagggaggcgtgtcatccagagagctcgttaaaaaggtgtccgatgtcatctggaacagtctgagcaggtcctatttcaaagaccgagcacacatccaaagcctgttctcctttatcacaggaacaaagctggatagttctggtgtcgccttcgccgtggtgggcgcatgtcaggcgctggggttacgggacgtacacctggctctgtccgaagaccacgcatggtcttggctttacctaaagggatcttacatgcggtgtgaccgcaaaatggaagtggcatttatggtgtgcgccataaacccctcgatagaccttcacacagattctctggaattgctacagcttcagcagaagctgctatggctactgtacgaccttggccacctcgaacggtaccccatggccctcggaaacctcgccgacttggaggaacttgagccgactcctggcagacccgaccccctcaccctttatcacaagggtatcgcctccgccaagacttactacagggatgaacacatctacccatacatgtacttagcaggataccattgtaggaaccgaaacgtaagggaggctctgcaggcctgggctgacacagccacagtgatccaagattataattactgccgggaagatgaggagatttataaagaattctttgaagtggccaatgatgtcatcccgaatctcttgaaagaggctgcttccttgctggaagccggagaggaacgccctggtgaacaaagccaggggacccagtcccaaggctcagcgcttcaggaccccgaatgtttcgctcacctgttaaggttctacgatgggatctgcaagtgggaagaagggtcccctacgccggttctacatgtgggttgggctaccttcctagtccagagcctgggtcgttttgagggtcaggtgcgacagaaagtgcgtatcgtttctagggaggcggaagctgctgaagccgaggaaccttggggggaagaggccagggaaggcagacggcgaggccctcgacgggagagtaagccagaggagccaccccctccaaagaagccagcattagacaaagggcttggaaccggacagggcgctgttagtggaccacccagaaagccccctgggaccgttgcagggactgcacggggaccggagggaggttccaccgctcaggttccggcacccacagcttccccccctcccgaggggcctgtcctgacgttccagagcgaaaagatgaaaggaatgaaagagctcctggtggcaacaaagatcaactcaagcgccattaagctgcagttgacagcccagagtcaagtgcagatgaaaaagcagaaggtgagcaccccgtctgattatacgttgagctttctgaaacgccagcgcaaaggtctatag

SEQ ID NO: 234195 - DNA, 1833 bp, Artificial Sequence
  derived and/or modified sequence
atgggcctgaaagcagcccaaaagaccctttttcccctccgctcgatagacgacgtggtgcgcctgtttgcagcggagctcggaagagaagaacctgatctggtgcttctttctcttgtcctcggctttgtcgaacattttctggctgttaatagagtcatcccaacgaacgtcccagaactgaccttccagcctagtcccgcaccggacccccctggtggcctgacctattttccagttgcggatctatccattatagctgctctgtatgctagatttactgcccagattagaggtgcagttgatctgagcctatatccgcgagaggggggtgtttccagccgcgaactggttaaaaaagtatcagacgtcatctggaactcactaagtcgaagctattttaaagaccgagcacatatccagtccttattctcatttattactggtacaaaactggactcctctggagtggcctttgcagtagtgggtgcgtgccaggcccttggcctacgcgacgtgcatctagccctttctgaggaccacgcctgggtagtctttggcccaaacggcgaacagaccgccgaagtgacttggcatgggaaggggaacgaagatcgacggggacaaacagtgaacgccggtgtggccgagagatcctggctctacctcaagggctcatacatgagatgtgatcgaaagatggaagtggcctttatggtttgtgcgatcaatccaagtattgatctgcatacagactctcttgagctgttacagcttcagcaaaaactgctgtggctcctgtacgacttgggccacctggagcgctatcctatggctcttgggaacttggcagaccttgaggaattagagccaacccccggtcggccagacccactgacactgtaccataaaggcatcgcctccgctaaaacgtactaccgagatgagcatatctatccttacatgtatcttgccggatatcactgtaggaacaggaatgttagggaagctctacaggcctgggcagacacagctactgtgatccaggactacaactactgcagagaagacgaggaaatctacaaagaattttttgaagttgccaatgacgttattccaaacttattgaaggaggcagcaagtctactcgaggcgggtgaagagcggcctggggagcagagccaaggaacccagtcacagggctctgcactgcaggatcctgaatgtttcgcgcatcttctgcggttttacgatggtatttgcaagtgggaggaggggagtccaactccggtgctacatgtgggatgggccaccttcctggtgcaatccttaggtaggttcgaagggcaggtgcggcagaaagtccggatcgtgagtagagaagcagaggcagccgaagctgaggagccatggggagaggaagcacgcgaaggacggaggcgcggaccacggagagagtcgaaacctgaggagccacctccacccaaaaaaccagcccttgacaaaggcctgggtaccggacaaggggctgtgagcggaccgcctcgcaaaccccctggaactgtggccggaaccgccaggggtcccgaagggggaagtaccgctcaggtacccgcacctaccgcttcgccccctcctgaagggccagtcttaacatttcagtccgaaaagatgaaaggaatgaaagaactgctcgtggccacaaaaattaatagctctgctattaaactgcagctcacagcccagtcacaggtacagatgaaaaaacagaaagtttcaacacccagtgactacactttatccttcctcaagagacagagaaagggattatag

SEQ ID NO: 234196 - DNA, 786 bp, Artificial Sequence
  derived and/or modified sequence
atgggcctgaaggcagctcagaagactttatttccccttaggtctatcgacgatgtcgtccgactgtttgccgcagagttgggcagggaggaacctgacctcgtacttttgagtcttgtactggggttcgtcgagcattttttggccgttaaccgagtgatacccaccaacgtgccagagcttacgtttcagcccagccctgcgcctgatccgccaggcggtctgacctatttcccagtggccgatctctcgatcatcgcagcgttgtacgcgagatttactgcccagatacgaggagctgtcgatctgagtctgtatcctcgggaagggggagtgagttcgagggaactagtgaagaaggtgagcgacgtgatttggaatagcctgagtcggtcctatttcaaggatcgcgctcacattcagagtttattcagtttcataactggtaccaaactcgactcatctggcgtggcttttgccgtggttggcgcttgtcaggctctgggtctccgcgacgtacatctggcactcagcgaagatcacgcgtgggtagtgtttgggccaaacggtgagcaaactgcagaggtgacctggcatggtaaggggaacgaggatcggagggggcagactgtgaacgccggagtggccgagagatcttggctgtacttgaaggggtcctacatgcgctgtgacaggaagatggaagttgcatttatggtgtgcgccattaatccttcaatagatttacatactgacagcttggaacttctgcagctgcagcagtag

SEQ ID NO: 234197 - DNA, 441 bp, Artificial Sequence
  derived and/or modified sequence
atggggttgaaggcggcacaaaagaccctgttcccccttcgatcaatcgatgatgtcgtcaggctgttcgctgccgagctaggaagagaagaaccagacttggtcctcctgtctctagtgctaggattcgtggaacatttcttggccgtcaatcgagtaattccgaccaacgtcccagaactgaccttccagccaagtccagctccagaccccccaggcggtctcacctattttccggttgctgacttgtctatcatcgcggcattgtatgctagattcacagcccaaatcaggggtgcagtggacctcagcttgtaccccagggaaggcggtgtaagttcccgcgaattagtgaagaaggtctcggacgttatttggaactccctgagtcgttcatattttaaagaccgggcacatatacagtccctattctccttctag

SEQ ID NO: 234198 - DNA, 441 bp, Artificial Sequence
  derived and/or modified sequence
atggggctgaaagctgcccagaagacactttttcctctgcggtccatcgatgatgttgtcaggctgttcgcggctgagttgggtagagaggagcccgacctggttcttctgagcttagtgctaggtttcgtggaacattttctcgcagtcaatagggttatccctaccaatgtgcctgaactgacattccagcctagccccgcaccggatcccccagggggactgacatacttcccagtcgccgacctgtccataatcgccgcactatacgctcggtttactgcccagatacggggtgcagttgatctgagcctgtatccaagggagggtggcgtcagtagccgggagctggtcaagaaggtctctgacgtgatctggaactctttgagtcgttcatactttaaagatcgtgctcacattcaatcactcttctccttttag

SEQ ID NO: 234199 - DNA, 1041 bp, Artificial Sequence
  derived and/or modified sequence
atgggtctgaaggcggctcagaaaacactgttccccctccggtccattgatgacgtcgtgcgactgttcgccgcagaactgggtagagaggaacccgatttggtcttactgtccctggtgctcggtttcgttgagcatttcctcgccgtcaatagggtgatacccaccaacgtgcccgaactaactttccaaccaagccccgcacccgaccctccaggcggactcacttacttccctgttgccgacctttcaatcatcgccgctctgtacgccaggtttaccgcccaaatccggggagctgtggacctctcactctaccctcgagaagggggagtctcctcacgcgagcttgttaaaaaagtgtccgatgtgatatggaactcgctttcgaggtcatatttcaaggaccgcgcacacattcagtcactctttagtttcatcacgggcactaagctcgattcttccggagtcgcgttcgccgtcgtgggggcatgccaggcattggggctgagggatgtgcatcttgcactctccgaagaccacgcctgggtggtttttggcccaaatggggaacagactgccgaagtcacatggcatggcaagggcaacgaggatcgcagggggcagacagttaacgcaggagtggccgaacggtcatggctctatctcaagggatcttacatgaggtgtgaccggaagatggaggtggcctttatggtctgtgccatcaatcctagcatcgaccttcacacagacagtcttgaactgctccagctacagcagaagctcctctggctgctgtatgatctgggccacctggaaaggtaccccatggccctggggaatctggccgacctggaagaattggagccaaccccaggcaggccagatcccctaaccctgtatcacaagggcattgctagtgctaagacctactatagggacgagcatatctacccttacatgtaccttgctggctatcactgtcggaacaggaatgtacgagaagctctacaggcttgggctgacaccgcgacatag

SEQ ID NO: 234200 - DNA, 846 bp, Artificial Sequence
  derived and/or modified sequence
atgggccttaaggctgctcagaagacactgttccctctgagaagcatagacgacgtggtaaggctctttgccgcagaactgggacgggaggaacccgatctggtacttttatccctggtgctaggttttgtagagcactttctggctgtgaaccgagtgattcccactaacgtgccagagctgactttccagcccagcccggcacctgatccaccaggcggactcacttacttccctgtagctgatctcagcataatcgcagcactttatgctaggtttacggcgcagattagaggtgcagtggatttatccctgtatcccagggagggtggagtgagcagtagagaactagtcaaaaaggtgtcagacgtgatctggaactcactgagccgatcctattttaaggaccgtgcccatattcagtcactctttagttttataaccgggacaaaattggacagctcgggagtggctttcgctgtggtcggggcttgccaagccctggggctgagggacgtgcacctcgctctcagcgaagatcacgcgtgggtggtattcgggccaaatggagagcagacagccgaagtcacctggcatggcaagggcaacgaagaccggagaggacaaacagtgaatgccggtgttgccgaaaggagttggctttatcttaaaggcagctacatgagatgtgaccggaaaatggaggtcgcatttatggtgtgcgccatcaacccttctatcgacctccacacagatagtctcgagctacttcagctccaacagaaactcctgtggctactatatgacctgggtcacctcgagcggtacccgatggccttaggatag

SEQ ID NO: 234201 - protein, 615 aa, Artificial Sequence
  derived and/or modified sequence
MGLKAAQKTLFPLRSIDDVVRLFAAELGREEPDLVLLSLVLGFVEHFLAVNRVIPTNVPELTFQPSPAPDPPGGLTYFPVADLSIIAALYARFTAQIRGAVDLSLYPREGGVSSRELVKKVSDVIWNSLSRSYFKDRAHIQSLFSFITGWSPVGTKLDSSGVAFAVVGACQALGLRDVHLALSEDHAWVVFGPNGEQTAEVTWHGKGNEDRRGQTVNAGVAERSWLYLKGSYMRCDRKMEVAFMVCAINPSIDLHTDSLELLQLQQKLLWLLYDLGHLERYPMALGNLADLEELEPTPGRPDPLTLYHKGIASAKTYYRDEHIYPYMYLAGYHCRNRNVREALQAWADTATVIQDYNYCREDEEIYKEFFEVANDVIPNLLKEAASLLEAGEERPGEQSQGTQSQGSALQDPECFAHLLRFYDGICKWEEGSPTPVLHVGWATFLVQSLGRFEGQVRQKVRIVSREAEAAEAEEPWGEEAREGRRRGPRRESKPEEPPPPKKPALDKGLGTGQGAVSGPPRKPPGTVAGTARGPEGGSTAQVPAPTASPPPEGPVLTFQSEKMKGMKELLVATKINSSAIKLQLTAQSQVQMKKQKVSTPSDYTLSFLKRQRKGL

SEQ ID NO: 234202 - DNA, 1848 bp, Artificial Sequence
  derived and/or modified sequence
atgggcctgaaggccgcccagaagaccctgttccccctgagaagcatcgacgacgtggtgagactgttcgccgccgagctgggcagagaggagcccgacctggtgctgctgagcctggtgctgggcttcgtggagcacttcctggccgtgaacagagtgatccccaccaacgtgcccgagctgaccttccagcccagccccgcccccgacccccccggcggcctgacctacttccccgtggccgacctgagcatcatcgccgccctgtacgccagattcaccgcccagatcagaggcgccgtggacctgagcctgtaccccagagagggcggcgtgagcagcagagagctggtgaagaaggtgagcgacgtgatctggaacagcctgagcagaagctacttcaaggacagagcccacatccagagcctgttcagcttcatcaccggctggagccccgtgggcaccaagctggacagcagcggcgtggccttcgccgtggtgggcgcctgccaggccctgggcctgagagacgtgcacctggccctgagcgaggaccacgcctgggtggtgttcggccccaacggcgagcagaccgccgaggtgacctggcacggcaagggcaacgaggacagaagaggccagaccgtgaacgccggcgtggccgagagaagctggctgtacctgaagggcagctacatgagatgcgacagaaagatggaggtggccttcatggtgtgcgccatcaaccccagcatcgacctgcacaccgacagcctggagctgctgcagctgcagcagaagctgctgtggctgctgtacgacctgggccacctggagagataccccatggccctgggcaacctggccgacctggaggagctggagcccacccccggcagacccgaccccctgaccctgtaccacaagggcatcgccagcgccaagacctactacagagacgagcacatctacccctacatgtacctggccggctaccactgcagaaacagaaacgtgagagaggccctgcaggcctgggccgacaccgccaccgtgatccaggactacaactactgcagagaggacgaggagatctacaaggagttcttcgaggtggccaacgacgtgatccccaacctgctgaaggaggccgccagcctgctggaggccggcgaggagagacccggcgagcagagccagggcacccagagccagggcagcgccctgcaggaccccgagtgcttcgcccacctgctgagattctacgacggcatctgcaagtgggaggagggcagccccacccccgtgctgcacgtgggctgggccaccttcctggtgcagagcctgggcagattcgagggccaggtgagacagaaggtgagaatcgtgagcagagaggccgaggccgccgaggccgaggagccctggggcgaggaggccagagagggcagaagaagaggccccagaagagagagcaagcccgaggagccccccccccccaagaagcccgccctggacaagggcctgggcaccggccagggcgccgtgagcggcccccccagaaagccccccggcaccgtggccggcaccgccagaggccccgagggcggcagcaccgcccaggtgcccgcccccaccgccagccccccccccgagggccccgtgctgaccttccagagcgagaagatgaagggcatgaaggagctgctggtggccaccaagatcaacagcagcgccatcaagctgcagctgaccgcccagagccaggtgcagatgaagaagcagaaggtgagcacccccagcgactacaccctgagcttcctgaagagacagagaaagggcctgtag

SEQ ID NO: 234203 - DNA, 1848 bp, Artificial Sequence
  derived and/or modified sequence
atgggtctcaaagcggcccagaaaacacttttccccttaaggagcatagacgacgtggtgcggctgtttgcggctgaattgggccgggaagaacccgaccttgtcttactgtcgctggtgttgggcttcgttgaacactttctggctgtaaaccgtgtgatccctaccaacgtaccagagcttacattccagccttcccccgcccccgatcctcctggcgggctaacctatttccccgtcgcagatctgtcaatcatagcggccctgtatgcaagattcaccgcccaaattcggggtgctgtggacctgagcctatatccaagagaaggaggtgtaagttcccgagagctagtcaagaaagtgagcgatgttatctggaatagcctaagcaggtcctacttcaaggaccgtgcacatatacaaagtcttttttccttcattaccggctggtcacccgtgggtactaaactcgattcctcgggcgtcgcctttgccgttgttggcgcatgtcaagcgctcggactgcgtgatgtgcacctggctctaagcgaggatcatgcttgggtcgtcttcggccccaatggtgagcagacagctgaagtgacctggcatggaaagggcaatgaagaccgcaggggtcagaccgtgaatgcaggcgtggcagaaagaagttggctatatttgaagggctcctacatgaggtgcgatcgaaaaatggaagtagctttcatggtttgtgctataaacccttctatcgatttacatacagattccttggaacttctgcaacttcagcagaaactgctgtggctgctgtatgatctcggacacctggaaagataccccatggcgctgggcaatctcgcagatttggaagagctggaacctacacccggccgccctgatcccctgaccctgtatcacaaaggaatcgcctcagccaagacctattatagagatgaacatatctatccctacatgtacctcgccggatatcactgtcgtaatcggaatgtgagggaggcactgcaggcctgggcggacactgccaccgtgattcaagactacaactattgtagagaggacgaagagatctataaggaattttttgaggtcgcaaacgacgtaattcccaacctgctgaaggaagcagcatctctccttgaagctggtgaagagcgcccaggcgagcagagccagggcacccagtcacaaggcagtgcactgcaggatcccgaatgtttcgcccacctcctccgcttctacgacggaatctgcaagtgggaggagggcagccctacacccgtcttacatgtgggttgggctacctttctggttcagagcctaggcaggtttgagggacaggtgagacagaaagtgaggattgtgagccgtgaggccgaggcagctgaggccgaagaaccatggggcgaggaggcccgcgaggggagacgtcggggtcctaggcgtgagtcaaaacctgaggagcctcccccacctaagaagccggcacttgacaagggactggggaccggacagggagccgtaagcgggcccccacggaaacctccaggcaccgttgccgggacggcgcgaggccccgaaggtggctccaccgcccaagtgccagcccccactgcgagccctccacctgagggaccagtgctgacttttcagagtgaaaagatgaaaggtatgaaagaattgctggtcgcaacgaagattaactccagtgccataaagctgcagttaacagcacagagtcaggtccagatgaagaagcagaaggtcagcaccccatcagattacacccttagctttttgaagaggcaaaggaaggggctctag

SEQ ID NO: 234204 - DNA, 1848 bp, Artificial Sequence
  derived and/or modified sequence
atggggttgaaggcagcccagaagaccctcttccctctgcggagcatcgatgacgtggtacggctctttgctgccgaactggggagggaagaaccggatctggtgttgctgtctctggtgttggggttcgtcgagcacttcctagccgttaacagagttattccaaccaatgttcccgaattgaccttccagccgtcacccgccccggatccaccaggcggcctgacatacttccccgtcgccgatttatcaatcatcgcagctctgtacgccagatttacagctcagatacggggagccgtagacctttccctctatccgcgagagggcggcgttagtagtcgggaacttgtgaagaaagtatcggacgttatttggaacagcttatcaagatcatatttcaaggatcgggcccatattcagtctctgttcagctttatcactggctggtcccccgtgggcaccaagcttgacagttccggtgtagcctttgccgtggtgggagcatgccaagcactggggctgagggacgtccacttagctttgagcgaagaccacgcttgggtggtgttcggcccaaacggcgaacagacggccgaggttacctggcacgggaaaggaaatgaagatcgaagaggtcagactgtgaatgccggagtagccgaacgaagctggctgtaccttaaaggcagctatatgcggtgcgatcgaaaaatggaggtagcctttatggtgtgtgccatcaatccctcaattgatcttcacactgatagtctagagctgctccaactccagcagaaactgctatggttactgtatgacctggggcacctggagcgctatccgatggctctgggcaacctggccgatctagaagagctggaacctacccctggaagacctgatcccctgactctgtaccataagggcattgctagcgcgaaaacttactacagggatgaacatatctacccttacatgtatctagcgggatatcactgcagaaacagaaatgtgcgggaagcgctgcaagcctgggctgacaccgccacagtgatacaggattacaattattgccgggaagatgaggagatctacaaagagtttttcgaggtggccaacgacgttattccaaacttactgaaagaggctgcctccctactcgaggccggtgaggaacgtcctggcgaacagtcccagggtacacagagtcagggctctgccctgcaagatccagaatgctttgcccatctgctcagattttacgacggaatctgcaagtgggaagagggctcccctacaccagtcctgcacgtcgggtgggcgacgtttcttgttcagtctctgggtcgctttgaggggcaggtgaggcagaaagtgcgcattgtcagcagagaagcagaggctgccgaagcggaggagccctggggtgaggaagcccgggagggccgccgccgcgggccccgtagagaaagcaagcctgaagagcctccacctccgaagaagcccgctctggacaaaggcctggggactgggcaaggggcagtttcaggccccccccgcaaacccccgggtactgtggccggaactgcccggggtccggaaggaggaagtacggcccaggtcccagcacccaccgcgtccccaccccctgagggtccagttctgactttccaaagtgagaaaatgaaaggcatgaaggagttgctggtggcaacaaagattaattcatccgcaattaaactccagctcacggcccagtcccaagttcaaatgaagaaacaaaaggtgtcaaccccttccgattacactctgagttttttaaagcgtcagagaaagggactctag

SEQ ID NO: 234205 - DNA, 1848 bp, Artificial Sequence
  derived and/or modified sequence
atggggcttaaagctgcccagaaaacactcttccctttgaggagtatagatgacgttgtccgtctgtttgccgcggaacttggacgggaagaacccgacctcgtgcttctgtctttggtgttagggttcgttgaacatttcttggcagtgaatcgcgtcatacctaccaatgtgccagagctgacctttcagcctagccccgctccagaccccccaggcggcttgacatacttcccagtggccgatctgtccataatcgccgccctttacgccaggttcactgcacaaatcaggggggccgtggacctctcactgtatccacgggaaggtggagtatcctctcgggaactggtgaaaaaagtctctgacgttatctggaattccttatcacgttcatattttaaggatagagctcacatacagtccctgtttagcttcatcacaggctggtccccagtggggactaaactcgacagttcgggtgttgcatttgccgttgttggagcgtgtcaagctctgggcctgagggacgtccatctggctcttagcgaagaccatgcatgggtagtgtttgggcccaacggcgaacagacggcagaagtgacttggcacggaaaggggaatgaggatagacgggggcaaaccgtgaacgccggggtggccgagaggagctggctttatctcaagggttcctacatgagatgtgacagaaagatggaggtggcctttatggtgtgtgcaattaatcctagcatcgatttacacaccgatagtttagaattgctgcaactgcagcagaaactgctgtggctcctctacgacctgggccatctcgaacggtacccaatggcccttggaaacctggccgacctcgaggagctggagcccacacctgggaggccagatcccctcactctctatcacaagggcatagcgtcggccaaaacctactatagggacgagcacatttacccatacatgtacctagccggataccattgccgaaaccgaaacgtgcgcgaggccctgcaagcctgggccgacactgccacggtcatacaagattacaattattgtcgggaggatgaggaaatctacaaggaattcttcgaggtggccaatgacgtcatcccaaatctactgaaagaagcggctagtcttctagaagcgggggaggagaggccaggcgaacagagccagggaacccagtcacagggctctgccctccaggatcctgagtgtttcgctcacctgctcaggttctatgacgggatctgcaagtgggaggagggaagtcccacccccgtcttacatgtgggctgggctaccttcctcgtgcagagtctgggtcggttcgagggccaggtgaggcagaaggttagaattgtgagtcgtgaagccgaggccgctgaggctgaggagccatggggagaggaagcgcgagagggccgacgcaggggtcccagacgcgagtcgaaacctgaggaaccccctcctcctaagaagccagctctggacaagggcctcggcacagggcagggagccgtcagcgggccacctaggaagcctcccggcaccgtagccggcacggcaaggggccccgaaggtgggtcaacagctcaggtccccgcaccaaccgcctcgccccctccagaaggtccagtgttaacgttccaatctgagaagatgaaaggcatgaaagaactccttgtcgccaccaagatcaatagttccgccatcaaattgcagctgaccgctcagagccaggttcaaatgaagaaacaaaaggtcagtactccttccgactatactctgagttttctgaaacgccagaggaagggcctgtag

SEQ ID NO: 234206 - DNA, 1848 bp, Artificial Sequence
  derived and/or modified sequence
atgggtttgaaggcggctcagaaaaccctgtttcccctgcgatcgattgatgatgtggtccggttatttgcagctgagttgggccgagaggaacctgatctggtattgctgtccctggtgctcggcttcgtcgaacacttcttggcagtgaatcgcgtcatacctacgaatgtccctgagcttactttccagccatctcccgcccctgacccccccggcgggctgacttactttccagtggcagatcttagtattatcgccgcactttatgcgaggtttacagcccagattcgcggtgccgtggatctctctctttaccctcgggagggaggcgtgtcctctcgagagctggtgaagaaagtttcagatgtgatctggaacagtctatctagaagttattttaaagatcgcgcccacattcagtcgctcttttcctttatcacgggatggagcccagtggggacaaaactcgattcttcgggtgtcgcttttgccgtcgtgggcgcatgccaggccctgggtcttcgtgacgtccatctagcactgagcgaagatcacgcctgggtggtattcgggccaaacggagaacagaccgccgaggttacctggcatgggaaaggtaacgaggatcggcggggtcagaccgtcaacgctggagtagctgagcgctcttggctgtatctgaaagggtcttatatgcggtgcgatcgcaagatggaggtggccttcatggtgtgcgctattaatccgagcatcgatctgcacaccgattcgctggagctcctgcaactgcaacagaaactcttgtggctgctctatgatctgggacatttggaaagatacccaatggccctggggaacctagccgacctcgaggagttggagcccaccccaggtcggcctgatccactcaccctgtatcacaaggggattgcgagcgccaagacctattaccgggatgaacatatctacccttacatgtacctcgcagggtatcactgtcgcaacagaaacgtgagagaggctctgcaggcctgggctgacaccgccacagtcatccaggattacaactattgccgcgaggacgaggaaatatacaaagagttcttcgaggtagcaaacgacgttataccaaatcttcttaaggaggccgctagcctgctagaagccggagaagagaggccgggcgaacaaagtcaggggacccagtcacaagggtctgcactgcaagacccagaatgcttcgcccaccttttacgcttctacgacgggatttgtaaatgggaagagggctccccaacccctgtgctgcacgttggctgggcgacttttctcgtgcaaagccttggtaggtttgagggacaggtacggcaaaaagtgcgtatcgtatctcgcgaagcggaagctgcggaggcagaggagccatggggtgaggaggcgagagagggcagaagaagaggaccacggcgcgagagcaagccggaggagccaccgccacccaagaagccagcactggataagggcctgggtactggccagggagccgtgtcaggtcccccccggaaaccacctgggacggtcgcggggacggcccgggggccagaaggcggctctactgcccaggtgcccgcgcccaccgctagtccaccccctgaaggtcccgtgctgacatttcaaagcgagaaaatgaaaggaatgaaggaactgttagtggctaccaagattaattcttccgccataaaactccagttgacagctcagtctcaagtgcagatgaagaagcagaaggtttcaaccccgtcagattataccctgtcatttcttaagcgccagaggaaaggtttgtag

SEQ ID NO: 234207 - DNA, 1848 bp, Artificial Sequence
  derived and/or modified sequence
atgggtctgaaagcagcgcagaagaccttgttccccctgagatcgatcgacgacgtagtgcggttgttcgccgcagagttaggaagggaggaacctgatctggtccttctttctctagtcctgggttttgttgaacacttcctagccgttaatagagtgattccgactaacgtcccagagctcactttccaaccatccccagcccctgacccccccggaggactaacctatttcccggtggcagacctttccatcattgccgcactctatgctagatttaccgctcagataaggggggccgtcgatctgagcctctacccacgggaagggggtgtaagctcccgggagcttgtgaaaaaagtaagtgacgtcatatggaatagtcttagccgttcatattttaaggatcgcgcgcatatccagtccttgttttcatttattactggatggtccccagtgggaaccaagttggatagttcaggcgtagcctttgccgtagtcggtgcatgccaagcgctcgggctgagagatgtccacttggccttgtccgaggaccatgcatgggtggtattcggacccaatggggagcagactgcagaggtaacgtggcacggcaaaggtaatgaggacagaagaggccaaactgtgaacgccggagtcgcagagaggagttggttatacttgaagggcagttacatgaggtgtgacagaaaaatggaggtggcatttatggtgtgcgcaataaatccttctattgatctccacacggacagcctggaattgctgcagctgcagcagaagttgctgtggctgctgtatgacctcggacatctcgaacggtatccgatggcccttggcaatctagcggacctcgaagagctggagcctactcccggccgtccagatccgctcactctgtaccacaagggaatcgcgtcagcaaagacgtactaccgggacgagcatatctacccctatatgtaccttgccggttaccactgtagaaatcgaaatgttcgggaagctctccaggcttgggcagacaccgctacggtgattcaggattacaattactgccgagaagatgaagagatctacaaagagttttttgaggtggccaacgacgttatccctaatctgttaaaggaggctgcgtctctgctggaggcaggagaggagcgacccggtgagcagagtcagggcacccagagtcagggatcggcgctgcaggatccagaatgtttcgcccacctgttgaggttctacgatggcatttgcaaatgggaggaggggagcccgacgcctgtgctgcacgtgggctgggccacgtttctggtgcagagcctaggacgttttgaaggacaggtgcggcaaaaagtccgcattgtgtctcgagaggctgaggccgcggaagccgaagaaccttggggtgaagaagcccgggagggcaggagacgaggcccaagaagagagagcaagcccgaggagcccccccctcctaaaaaaccagccttggacaagggtctgggcacaggtcagggggccgtgtccggaccaccccgaaagccacccggcaccgtggctggtacagcccgaggccctgagggggggtccaccgcccaagtccccgcgcccacagctagcccccctcctgaaggaccagtgctgacattccagagcgagaagatgaagggcatgaaggaactgctcgtggccaccaaaattaacagctctgccatcaagctgcagctgaccgctcagtcccaggtgcaaatgaaaaagcaaaaagtgtcgactccaagcgattacacactcagcttcctgaagcgacaaaggaaaggactgtag

SEQ ID NO: 234208 - DNA, 1848 bp, Artificial Sequence
  derived and/or modified sequence
atgggcctgaaggccgcccagaagaccctcttccccctgcggagcattgatgatgtggtgcggctgtttgctgctgagctgggccgggaggagccagacctggtgctgctgagcctggtgctgggctttgtggagcacttcctggccgtgaacagagtcatccccaccaacgtgcctgagctgaccttccagcccagccctgccccagaccccccaggcggcctgacctacttccctgtggccgacctgagcatcatcgccgccctgtatgcccgcttcaccgcccagatcagaggagctgtggacctgagcctgtacccccgggagggcggcgtgagcagccgggagctggtgaagaaggtgtctgatgtgatctggaacagcctgagccgcagctacttcaaggaccgggcccacatccagagcctcttctccttcatcaccggctggagccctgtgggcaccaagctggacagcagcggcgtggcctttgctgtggtgggcgcctgccaggccctgggcctgagagatgtgcacctggccctgtctgaggaccacgcctgggtggtgtttggccccaacggggagcagacagctgaggtgacctggcacggcaaaggaaatgaagatagaagaggccagacagtgaatgctggggtggccgagaggtcctggctgtacctgaagggcagctacatgagatgtgacaggaagatggaggtggccttcatggtgtgtgccatcaaccccagcattgacctgcacacagacagcctggagctgctgcagctgcagcagaagctgctgtggctgctgtatgacctgggccacctggagcgctaccccatggccctgggcaacctggccgacctggaggagctggagcccaccccaggccgcccagaccccctgaccctgtaccacaagggcatcgccagcgccaagacctactacagagatgagcacatctacccctacatgtacctggccggctaccactgcaggaacagaaatgtgcgggaggccctgcaggcctgggccgacacagccaccgtcatccaggactacaactactgcagagaagatgaggagatctacaaggagttctttgaggtggccaatgatgtgatccccaacctgctgaaggaggccgccagcctgctggaggccggggaggagaggcctggagagcagagccagggcacccagagccagggcagcgccctgcaggaccctgaatgttttgcccacctgctgcgcttctatgatggcatctgcaagtgggaggagggcagccccacccctgtgctgcacgtgggctgggccaccttcctggtgcagagcctgggccgctttgagggccaggtgcggcagaaggtgcgcatcgtgtcccgggaggccgaggccgctgaggccgaggagccctggggcgaggaggcccgggagggcagaagaagaggcccccggcgggagagcaagccagaggagcccccaccacccaagaagccagccctggacaagggcctgggcaccggccagggcgctgtgtctggcccccccaggaagcccccaggcaccgtggccggcacagcccggggccctgagggcggcagcacagcccaggtgcctgcccccacagccagccccccacctgagggccctgtgctgaccttccagagcgagaagatgaagggcatgaaggagctgctggtggccaccaagatcaacagcagcgccatcaagctgcagctgacagcccagagccaggtgcagatgaagaagcagaaggtgtccacccccagcgactacaccctgtccttcctgaagaggcagaggaagggcctgtag

SEQ ID NO: 234209 - DNA, 1848 bp, Artificial Sequence
  derived and/or modified sequence
atgggcctgaaggccgcccagaagaccctgttccccctgcggagcattgacgacgtcgtccgcctgttcgccgccgaattgggaagggaggaaccagacctggtgctgctgtctttggtgctcggatttgttgagcactttctcgcagtaaacagagttatcccaaccaatgtccccgagctgacgttccaaccatcaccagccccagatcctcctggagggttaacttacttccctgtcgctgacctgtctataatagccgccctctacgctagattcacagcgcagatcaggggagcagttgatctgagtttgtaccctcgagaaggtggagtatcatctcgggaattagtgaagaaggttagcgatgtgatctggaacagcttgtcgcggtcctatttcaaggaccgagcgcatatccagtcacttttcagtttcatcacaggctggtctcccgtcggcaccaagttggatagctctggagtagccttcgcagtagtcggtgcatgtcaggctttaggtctcagagatgtacatctagcgctttcagaagatcatgcctgggtcgtgtttggccctaacggagaacagaccgctgaagtaacctggcatggcaagggtaatgaagaccgacgtggccaaaccgtgaacgccggggtcgcagaaagaagctggctctatctaaaggggagttatatgcggtgtgaccgcaagatggaggtggcttttatggtctgcgccatcaaccctagtattgatctgcatacagactcccttgaactgttgcaactccagcaaaaactcctttggcttctgtatgatctgggacacctcgaacggtatcccatggcccttggaaacctggccgacctggaggaactggaaccaacccctggccggccggaccctcttactctctatcataaagggatagcttccgcaaaaacgtattatcgcgacgaacatatctacccatacatgtacctcgctggttaccactgtcgcaataggaacgtgagagaggctcttcaggcctgggccgacacagctaccgttatccaggactataactattgtcgtgaggatgaggagatttacaaagagttctttgaagttgccaatgatgtcattccaaatctccttaaggaggccgcctccctactggaggccggtgaagaacgacccggagaacagtcgcagggcactcagtcacaaggctctgcacttcaagaccccgagtgctttgcccacctgctgagattctacgacgggatatgcaaatgggaggaggggtcgccaactcctgtactgcatgtgggttgggcaaccttcctagtgcagtcacttgggcgctttgagggacaagtccgccagaaggtccgtattgtctcacgggaagcagaagcagccgaggctgaggaaccatggggcgaggaggctagagagggaagaaggcgaggccctcggcgggaatcgaaacccgaagagcccccgccccccaagaagcctgctcttgataagggtctagggaccgggcagggcgccgtgtctgggccccctcgcaagcctccaggcaccgttgccggcaccgccagaggtcctgaaggaggatctactgcacaagttcctgccccgacagcctctcctcctcctgagggtcccgtgcttacattccagagcgagaagatgaagggcatgaaagaactactggtggccacaaaaatcaacagttccgccattaagctgcagctgacggcccagtcccaggtgcagatgaaaaaacaaaaagtgagtaccccctcggattatactctgtccttcctcaagcggcagagaaaagggctttag

SEQ ID NO: 234210 - DNA, 1848 bp, Artificial Sequence
  derived and/or modified sequence
atgggcctgaaggccgcccagaagaccctgttccccctgcggagcatcgacgatgtcgtgaggttattcgctgcagaactcggccgggaagaaccggatttagtgctgctctccctcgtgctcggcttcgttgaacatttcctagctgtaaaccgcgtcattccaacaaatgtgccagaactaaccttccagccctctcctgccccggatccgcctggaggtctgacctattttccggtggctgatttgtccataatagcggcactttatgctcggtttacggcccagatccgcggagccgtggacctgtctttatatccgcgggaaggaggggtatcatcaagggagcttgttaagaaggtgagcgacgttatatggaattccttgtccagaagttacttcaaagatcgggcccacatccagagtctgtttagctttattactggatggtcaccggttggaacaaaactggactcttcgggtgtggctttcgccgtagtgggggcatgtcaggctcttggcctccgggatgtgcacctcgcactctcagaggaccacgcgtgggtggtattcggacccaacggggagcagactgcagaggtgacctggcacgggaagggcaatgaagatcggcggggccaaaccgttaatgccggcgtagcggaacgtagctggctttatctcaaagggagttatatgagatgtgacaggaaaatggaggtggctttcatggtctgcgcaatcaaccccagtatcgacctgcacaccgatagcctcgaactgttgcagctacagcagaagctgctctggttgctgtacgacctagggcatctcgaacggtaccctatggcccttggaaatctggccgacctagaagaactagaacctacacctggccgtccggaccccctcaccctctatcataagggcatcgcctcagcgaagacatactatcgagatgagcacatttacccttatatgtatcttgcaggataccattgtagaaaccggaacgtccgcgaggctctgcaggcgtgggccgacactgctacagttattcaggactacaattattgcagagaggacgaggaaatttacaaggaattctttgaggtagccaacgatgtcatcccgaacctgctgaaggaggcagctagcctgctggaagccggggaggagcggcccggcgaacagtctcagggaacacagtcccaggggtccgccctacaagaccctgagtgctttgcccatctgctgcgattctacgatggcatctgtaagtgggaggaagggagcccaacccctgtcctgcacgtcggctgggccactttcttggttcagtctctagggcgtttcgagggacaggttcgacagaaggtcaggattgtctcccgggaagcggaggctgctgaagctgaggagccctggggcgaggaggctcgggagggacgccgaagaggcccgaggagagagagcaagccagaggaaccccctcctccaaagaagcctgcgctagacaaagggttgggcaccggccagggcgccgtctctggcccacccagaaaacctcctgggacagtcgcagggactgctcgagggccagaaggggggtccaccgcacaggtccctgcccctacagccagccctcctcccgagggccctgtgctgactttccagtcagagaaaatgaagggcatgaaagagcttctggtggccacaaagattaacagttcagctataaagctccagctcacagctcagtctcaggtgcaaatgaagaagcagaaggtaagtaccccgtctgattacacactttcctttttgaagcgtcagagaaaaggactgtag

SEQ ID NO: 234211 - DNA, 1848 bp, Artificial Sequence
  derived and/or modified sequence
atgggcctgaaggccgcccagaagaccctgttccccctgcggagcattgacgacgttgttaggctgtttgctgctgagctgggtagggaggagcccgacctggtcttgctttccttagttttgggtttcgtcgaacatttccttgctgtgaacagagtgatccccacgaatgtgcctgagctcacatttcagcccagtcctgcaccagacccccctgggggcctcacctatttccctgtggctgatctctccatcatagctgcactatacgcacgatttaccgctcaaattagaggcgccgttgacctgtcactctatcccagggaaggtggggtgtcatcccgcgaactggtaaagaaagtgagcgacgtgatatggaatagtctctcaaggtcctacttcaaagaccgcgcacatatacagtcactgtttagtttcattaccgggtggtcacctgtgggtactaagttggactcatctggcgtggcctttgccgtcgtcggggcctgccaggccctgggtctgcgggatgtgcacctcgccctctctgaggatcatgcatgggtggtgttcggcccaaatggagaacagacagctgaagtgacctggcatggaaaagggaacgaagaccggaggggacagaccgtaaacgccggcgtagcagagaggagctggttatatctgaaaggctcttatatgcgctgtgataggaagatggaagtggctttcatggtgtgtgccatcaacccttccatcgacttacacaccgactctcttgagttgctccagttacaacagaagctcctgtggctcttgtatgatttgggccacctggagaggtatccaatggccctgggcaatctggccgatctcgaggaattggaacctacccctggacgtcccgaccctctcactctgtaccataaaggcatagctagcgccaaaacttattaccgagatgaacatatttacccttacatgtacttagcaggatatcattgccgcaacagaaatgtgcgcgaagcactacaggcatgggctgataccgcgacagtcatacaagattacaattactgcagagaggacgaggagatctataaggagttttttgaggtggccaatgatgtgatcccaaacctgctcaaagaagccgcttccctgctggaggcgggagaggagagaccgggcgagcaatcacaaggtacacagtcacaaggaagcgccctgcaggatcctgaatgcttcgcacatcttcttcgcttttacgacggcatttgcaagtgggaagaaggctcccccacccccgtattacatgtcggatgggccacctttctggtgcagagtctcgggcgcttcgaggggcaagttagacagaaagtgagaatcgtttctagagaggccgaggcagccgaagccgaggagccttggggtgaggaagcccgcgaaggaaggaggaggggcccacgcagggaatctaaaccagaagaacctccacctccaaaaaaacctgccctggataagggcctgggtacaggccagggagcagtgtcagggcctccacggaagccgcctggcaccgttgccgggacggctaggggcccagagggcgggtcaactgcacaggttccagctcccaccgcctctcctccaccagaaggcccggttttgacatttcaaagtgagaagatgaagggaatgaaagagctgctggttgctacaaagatcaattcaagcgccatcaagcttcagctcacggcccaatcgcaggtccagatgaaaaagcagaaggtctcaactccaagtgattacaccctcagcttcctgaaacgtcagcggaagggattatag

SEQ ID NO: 234212 - DNA, 1848 bp, Artificial Sequence
  derived and/or modified sequence
atgggcctgaaggccgcccagaagaccctgttccccctgcggagcatcgacgacgttgtccggctgttcgctgccgaactgggccgcgaggagcccgatctggtgttattaagcttagtcctgggcttcgtagagcactttttggccgtgaatagggtgattccaaccaacgtgccggagctcaccttccagccctccccagcccccgatcctcccggaggattgacctattttcctgtggccgatctgtcgatcatcgccgcactctacgcccgattcacagcccagattcggggcgccgtcgacctcagtctatatccaagagaagggggtgtcagctcgcgcgagctggtgaagaaggtttccgatgtcatttggaattcattgtcaaggtcctatttcaaggatcgcgcacacatacaatctctttttagctttattacaggatggtcccccgttggaaccaaattggacagctctggggttgcgtttgctgtcgtgggcgcctgccaggcgctgggcctgagggatgttcatttggctctaagtgaagatcacgcatgggtcgtgtttggacctaacggcgaacaaacggcggaagtgacctggcacgggaaagggaatgaagacaggagaggccagactgtgaacgctggtgtggcagagcgtagctggctgtatctcaaaggaagctacatgcggtgcgaccgcaaaatggaagttgcctttatggtgtgtgcgatcaatccttctatcgatctgcataccgactccctggaacttctacaattgcagcagaagctactgtggctgctgtacgacttgggtcacctggaacgctaccccatggctctcggcaatctggctgacctggaagagctagagccgacacctggtaggccagacccgctgactttgtatcataaagggatagccagcgcaaaaacttattacagagacgagcacatttatccctatatgtatttggcgggctaccactgtagaaatcgtaacgttcgggaggcattgcaggcctgggcggacaccgccaccgtgatacaggattataattactgtcgcgaggacgaggaaatttataaggagttctttgaagtggccaacgatgtaattccgaacctgctgaaagaagccgccagtttgctggaggctggagaagagaggcccggggagcaatcacagggtacacagtcccagggaagtgccctgcaggaccctgagtgttttgcccacttgctacgcttttatgacggtatttgcaaatgggaggaaggctcacctacccccgtgctgcacgtgggctgggcaacatttctagtccagtctctggggcgcttcgagggacaggtgcgtcagaaggttcggattgttagccgggaggctgaagcagcagaggctgaagaaccctggggcgaagaagctagagagggacgccggcgaggccccagaagagaatctaaacctgaagagccccctccgccgaagaagcctgcactcgataaggggctgggaactgggcaaggagctgtcagtgggcccccaagaaagcctcctggtacggtggccggaactgctagagggccggaaggaggaagcactgcgcaggttcccgcccctactgcctcaccccctcccgagggaccagttctcacctttcagtcagagaagatgaagggcatgaaggaactgttagtggccaccaaaatcaatagctccgcaataaaacttcagctgaccgcccagagccaggtccagatgaagaagcagaaagtctctactccctctgattataccctgtcatttctgaaacgccagagaaagggcttgtag

SEQ ID NO: 234213 - DNA, 1848 bp, Artificial Sequence
  derived and/or modified sequence
atgggcctgaaggccgcccagaagaccctgttccccctgcggagcattgatgacgtggtgcgtttgttcgcagctgaattagggagagaagaacccgatctggtgctcctatccctggtgcttggcttcgtggagcacttccttgctgtcaatagagttatcccaacaaatgttcctgagctgacattccagccaagtccagccccagaccccccagggggtctaacgtactttccagtggccgacctatccattattgctgccctgtatgctaggtttacggcccagattagaggggccgtcgatctctccctgtacccgcgggagggaggcgttagcagcagagaactggttaaaaaggtgtctgacgtcatatggaattctttgtcccggtcttactttaaagatagggcccatatccaaagtctgttttcattcataacaggctggagtccagttgggacaaagctcgattcaagcggtgtggccttcgccgtggtgggtgcatgtcaagctttaggactccgtgacgtgcatctggctctgtccgaagaccacgcttgggttgtcttcggacccaatggggagcagacggccgaagtgacgtggcacgggaaagggaacgaggatcgacgtggtcaaactgtaaatgcaggtgtcgctgaacggtcttggctatacctgaaagggtcctacatgaggtgcgatcggaaaatggaggtggccttcatggtctgcgccattaacccctccatcgacctgcatactgactctcttgaactcctacaactgcaacaaaagctgctctggcttctgtacgacctgggtcacctggagcggtacccgatggccctcggaaacctggcggacctggaggagctggaaccaacaccggggcggcctgaccctctgactctttatcataaggggatagcatcagccaaaacctactatcgagacgagcacatctatccatatatgtacctggccggctaccactgcaggaaccgtaatgttagagaagcgcttcaggcctgggctgacaccgctaccgtgatacaggactacaattactgccgcgaagacgaggagatctataaagagttcttcgaagtcgcaaatgacgtcatcccaaacctgctaaaagaggctgcctctttactggaggccggagaagaacggcctggagagcagtcgcaaggaacccagtcacaggggagcgcactgcaggacccggagtgctttgcccatttgttgcgcttctacgatgggatttgcaaatgggaagagggtagccccactccggtgttgcacgtggggtgggccacatttctcgtccaatccctgggccggttcgagggccaagtgaggcagaaggtcagaatcgtaagtcgcgaggcggaggccgctgaggccgaagaaccgtggggcgaggaagccagagagggccgacggcgcgggccccgccgcgaaagcaagcccgaagagccaccaccgcccaaaaaacctgctctggataaaggcctcgggaccgggcagggtgccgtgtctggccctccacgtaagccccctggaacagtagctggcactgctcgggggcccgaggggggttctacagcacaggtcccggctccaactgcctcgcctcctccggagggtccagtgctgacgttccagtccgaaaagatgaaggggatgaaggagctgctggtagcaactaaaatcaacagttcggcaattaagctgcagctgacggctcagtctcaagtccagatgaaaaagcagaaggtgtcaacaccgtctgattatactctcagcttcctgaagcggcagcggaagggcttgtag

SEQ ID NO: 234214 - DNA, 3162 bp, Artificial Sequence
  derived and/or modified sequence
tatatttatgtatatgcacatacacacaaaattaggcgggagtggtggcgcacgcctgtgatcacagctactcgggaggctgaggcacgagaatcgcttgagcccgtgaagtcgaggctgcagtgagcccagatcgagccactgcattccagcctgggcgaaagagaaagaccgtgtctcaaaacaaacaaacaaaagctactcttagcacgtgttagagtatctcgcgggcggaagtgggaaacgagtgctgcacacagagtaggcatctttatatgttaacagacactgatacccagctaaagcggctgaacacatttactctctggcagtgtttaaaagtatctgtttttctcatattgttttattttaattttttctggatcaagcaacctgatctttttcctcataacttgccgaccgacccgtgacagcaaaaccggcagaagctcggcgacctcccaccccgagtctgcaggtagccgccgcccaccgcccgccgccatggggctgaaggccgcccagaagacgctgttcccgctgcgctccatcgacgacgtggtgcgcctgtttgctgccgagctgggccgagaggagccggacctggtgctcctttccttggtgctgggcttcgtggagcattttctggctgtcaaccgcgtcatccctaccaacgttcccgagctcaccttccagcccagccccgcccccgacccgcctggcggcctcacctactttcccgtggccgacctgtctatcatcgccgccctctatgcccgcttcaccgcccagatccgaggcgccgtcgacctgtccctctatcctcgagaagggggtgtctccagccgtgagctggtgaagaaggtctccgatgtcatatggaacagcctcagccgctcctacttcaaggatcgggcccacatccagtccctcttcagcttcatcacaggttggagcccagtaggcaccaaattggacagctccggtgtggcctttgctgtggttggggcctgccaggccctgggtctccgggatgtccacctcgccctgtctgaggatcatgcctgggtagtgtttgggcccaatggggagcagacagctgaggtcacctggcacggcaagggcaacgaggaccgcaggggccagacagtcaatgccggtgtggctgagcggagctggctgtacctgaaaggatcatacatgcgctgtgaccgcaagatggaggtggcgttcatggtgtgtgccatcaacccttccattgacctgcacaccgactcgctggagcttctgcagctgcagcagaagctgctctggctgctctatgacctgggacatctggaaaggtaccccatggccttagggaacctggcagatctagaggagctggagcccacccctggccggccagacccactcaccctctaccacaagggcattgcctcagccaagacctactatcgggatgaacacatctacccctacatgtacctggctggctaccactgtcgcaaccgcaatgtgcgggaagccctgcaggcctgggcggacacggccactgtcatccaggactacaactactgccgggaagacgaggagatctacaaggagttctttgaagtagccaatgatgtcatccccaacctgctgaaggaggcagccagcttgctggaggcgggcgaggagcggccgggggagcaaagccagggcacccagagccaaggttccgccctccaggaccctgagtgcttcgcccacctgctgcgattctacgacggcatctgcaaatgggaggagggcagtcccacgcctgtgctgcatgtgggctgggccacctttcttgtgcagtccctaggccgttttgagggacaggtgcggcagaaggtgcgcatagtgagccgagaggccgaggcggccgaggccgaggagccgtggggcgaggaagcccgggaaggccggcggcggggcccacggcgggagtccaagccagaggagcccccgccgcccaagaagccagcactggacaagggcctgggcaccggccagggtgcagtgtcaggacccccccggaagcctcctgggactgtcgctggcacagcccgaggccctgaaggtggcagcacggctcaggtgccagcacccacagcatcaccaccgccggagggtccagtgctcactttccagagtgagaagatgaagggcatgaaggagctgctggtggccaccaagatcaactcgagcgccatcaagctgcaactcacggcacagtcgcaagtgcagatgaagaagcagaaagtgtccacccctagtgactacactctgtctttcctcaagcggcagcgcaaaggcctctgaactactggggacttcggaccgcttgtggggacccaggctccgcccttagtcccccaactctgagcccatgttctgcccccagcccaaaggggacaggcctcacctctacccaaaccctaggttcccggtcccgagtacagtctgtatcaaacccacgattttctccagctcagaacccagggctctgccccagtcgttagaatataggtctcttctcccagaatcccagccggccaatggaaacctcacgctgggtcctaattaccagtctttaaaggcccagcccctagaaacccaagctcctcctcggaaccgctcacctagagccagaccaacgttactcagggctcctcccagcttgtaggagctgaggtttcacccttaacccaaggagcacaggtcccacctccagcccgggagcctaggaccactcagcccctaggagtatatttccgcacttcagaattccatatcttgcgaatccaagctccctgccccaaataacttcagtcctgctccagaatttggaaatcctagtttcctctccttcgtatcccgagtctgggacacaaaactccgcccccagcctatgagcatcctgagccccgccctcttcctgacgaaactggccccggatcagagcaggacctcccttccgaccctctgggaacctcccagaggtccagcccatctcggagcatcccggaggaaatctgcagagggttaggagtgggtgacaagagcctgatctcttcctgttttgtacatagatttatttttcagttccaagaaagatgaatacattttgtt

SEQ ID NO: 234215 - DNA, 1871 bp, Artificial Sequence
  derived and/or modified sequence
gccgccgcccaccgcccgccgccatggggctgaaggccgcccagaagacgctgttcccgctgcgctccatcgacgacgtggtgcgcctgtttgctgccgagctgggccgagaggagccggacctggtgctcctttccttggtgctgggcttcgtggagcattttctggctgtcaaccgcgtcatccctaccaacgttcccgagctcaccttccagcccagccccgcccccgacccgcctggcggcctcacctactttcccgtggccgacctgtctatcatcgccgccctctatgcccgcttcaccgcccagatccgaggcgccgtcgacctgtccctctatcctcgagaagggggtgtctccagccgtgagctggtgaagaaggtctccgatgtcatatggaacagcctcagccgctcctacttcaaggatcgggcccacatccagtccctcttcagcttcatcacaggttggagcccagtaggcaccaaattggacagctccggtgtggcctttgctgtggttggggcctgccaggccctgggtctccgggatgtccacctcgccctgtctgaggatcatgcctgggtagtgtttgggcccaatggggagcagacagctgaggtcacctggcacggcaagggcaacgaggaccgcaggggccagacagtcaatgccggtgtggctgagcggagctggctgtacctgaaaggatcatacatgcgctgtgaccgcaagatggaggtggcgttcatggtgtgtgccatcaacccttccattgacctgcacaccgactcgctggagcttctgcagctgcagcagaagctgctctggctgctctatgacctgggacatctggaaaggtaccccatggccttagggaacctggcagatctagaggagctggagcccacccctggccggccagacccactcaccctctaccacaagggcattgcctcagccaagacctactatcgggatgaacacatctacccctacatgtacctggctggctaccactgtcgcaaccgcaatgtgcgggaagccctgcaggcctgggcggacacggccactgtcatccaggactacaactactgccgggaagacgaggagatctacaaggagttctttgaagtagccaatgatgtcatccccaacctgctgaaggaggcagccagcttgctggaggcgggcgaggagcggccgggggagcaaagccagggcacccagagccaaggttccgccctccaggaccctgagtgcttcgcccacctgctgcgattctacgacggcatctgcaaatgggaggagggcagtcccacgcctgtgctgcatgtgggctgggccacctttcttgtgcagtccctaggccgttttgagggacaggtgcggcagaaggtgcgcatagtgagccgagaggccgaggcggccgaggccgaggagccgtggggcgaggaagcccgggaaggccggcggcggggcccacggcgggagtccaagccagaggagcccccgccgcccaagaagccagcactggacaagggcctgggcaccggccagggtgcagtgtcaggacccccccggaagcctcctgggactgtcgctggcacagcccgaggccctgaaggtggcagcacggctcaggtgccagcacccacagcatcaccaccgccggagggtccagtgctcactttccagagtgagaagatgaagggcatgaaggagctgctggtggccaccaagatcaactcgagcgccatcaagctgcaactcacggcacagtcgcaagtgcagatgaagaagcagaaagtgtccacccctagtgactacactctgtctttcctcaagcggcagcgcaaaggcctctga

SEQ ID NO: 234216 - DNA, 3155 bp, Artificial Sequence
  derived and/or modified sequence
caatccctgagtatctcgggaaggaggtgtccggagccgcggacctagagatcccagaagccacagcgcagcggcccggcccgccactatttccaggctcagcggggcaggggtgggcccagactccacttcccggcgggtagtgcgaccctaggggcgggacttcatgtcccagcaggctccgggcggcgtgcgccgcggtgcctagtgtgggatgtaagcgcggaggtgggcgagggggaccgaggccaggactctccttggggtttgggggcttgacctgggtgcgctttctggacagactttacagccccgggggcacagtcgtagagagggggcggggcggccattggggctcctcattggggtgcttggggcgcaccccatcgggtaccgggcgtcccggaattgtgggggacaaaaaggctctgcagtctcggctgaggggtctcaccgacaaaagaggggaagccggccgccgcccaccgcccgccgccatggggctgaaggccgcccagaagacgctgttcccgctgcgctccatcgacgacgtggtgcgcctgtttgctgccgagctgggccgagaggagccggacctggtgctcctttccttggtgctgggcttcgtggagcattttctggctgtcaaccgcgtcatccctaccaacgttcccgagctcaccttccagcccagccccgcccccgacccgcctggcggcctcacctactttcccgtggccgacctgtctatcatcgccgccctctatgcccgcttcaccgcccagatccgaggcgccgtcgacctgtccctctatcctcgagaagggggtgtctccagccgtgagctggtgaagaaggtctccgatgtcatatggaacagcctcagccgctcctacttcaaggatcgggcccacatccagtccctcttcagcttcatcacaggttggagcccagtaggcaccaaattggacagctccggtgtggcctttgctgtggttggggcctgccaggccctgggtctccgggatgtccacctcgccctgtctgaggatcatgcctgggtagtgtttgggcccaatggggagcagacagctgaggtcacctggcacggcaagggcaacgaggaccgcaggggccagacagtcaatgccggtgtggctgagcggagctggctgtacctgaaaggatcatacatgcgctgtgaccgcaagatggaggtggcgttcatggtgtgtgccatcaacccttccattgacctgcacaccgactcgctggagcttctgcagctgcagcagaagctgctctggctgctctatgacctgggacatctggaaaggtaccccatggccttagggaacctggcagatctagaggagctggagcccacccctggccggccagacccactcaccctctaccacaagggcattgcctcagccaagacctactatcgggatgaacacatctacccctacatgtacctggctggctaccactgtcgcaaccgcaatgtgcgggaagccctgcaggcctgggcggacacggccactgtcatccaggactacaactactgccgggaagacgaggagatctacaaggagttctttgaagtagccaatgatgtcatccccaacctgctgaaggaggcagccagcttgctggaggcgggcgaggagcggccgggggagcaaagccagggcacccagagccaaggttccgccctccaggaccctgagtgcttcgcccacctgctgcgattctacgacggcatctgcaaatgggaggagggcagtcccacgcctgtgctgcatgtgggctgggccacctttcttgtgcagtccctaggccgttttgagggacaggtgcggcagaaggtgcgcatagtgagccgagaggccgaggcggccgaggccgaggagccgtggggcgaggaagcccgggaaggccggcggcggggcccacggcgggagtccaagccagaggagcccccgccgcccaagaagccagcactggacaagggcctgggcaccggccagggtgcagtgtcaggacccccccggaagcctcctgggactgtcgctggcacagcccgaggccctgaaggtggcagcacggctcaggtgccagcacccacagcatcaccaccgccggagggtccagtgctcactttccagagtgagaagatgaagggcatgaaggagctgctggtggccaccaagatcaactcgagcgccatcaagctgcaactcacggcacagtcgcaagtgcagatgaagaagcagaaagtgtccacccctagtgactacactctgtctttcctcaagcggcagcgcaaaggcctctgaactactggggacttcggaccgcttgtggggacccaggctccgcccttagtcccccaactctgagcccatgttctgcccccagcccaaaggggacaggcctcacctctacccaaaccctaggttcccggtcccgagtacagtctgtatcaaacccacgattttctccagctcagaacccagggctctgccccagtcgttagaatataggtctcttctcccagaatcccagccggccaatggaaacctcacgctgggtcctaattaccagtctttaaaggcccagcccctagaaacccaagctcctcctcggaaccgctcacctagagccagaccaacgttactcagggctcctcccagcttgtaggagctgaggtttcacccttaacccaaggagcacaggtcccacctccagcccgggagcctaggaccactcagcccctaggagtatatttccgcacttcagaattccatatcttgcgaatccaagctccctgccccaaataacttcagtcctgctccagaatttggaaatcctagtttcctctccttcgtatcccgagtctgggacacaaaactccgcccccagcctatgagcatcctgagccccgccctcttcctgacgaaactggccccggatcagagcaggacctcccttccgaccctctgggaacctcccagaggtccagcccatctcggagcatcccggaggaaatctgcagagggttaggagtgggtgacaagagcctgatctcttcctgttttgtacatagatttatttttcagttccaagaaagatgaatacattttgtt

SEQ ID NO: 234217 - DNA, 3034 bp, Artificial Sequence
  derived and/or modified sequence
tatatttatgtatatgcacatacacacaaaattaggcgggagtggtggcgcacgcctgtgatcacagctactcgggaggctgaggcacgagaatcgcttgagcccgtgaagtcgaggctgcagtgagcccagatcgagccactgcattccagcctgggcgaaagagaaagaccgtgtctcaaaacaaacaaacaaaagctactcttagcacgtgttagagtatctcgcgggcggaagtgggaaacgagtgctgcacacagacaacctgatctttttcctcataacttgccgaccgacccgtgacagcaaaaccggcagaagctcggcgacctcccaccccgagtctgcaggtagccgccgcccaccgcccgccgccatggggctgaaggccgcccagaagacgctgttcccgctgcgctccatcgacgacgtggtgcgcctgtttgctgccgagctgggccgagaggagccggacctggtgctcctttccttggtgctgggcttcgtggagcattttctggctgtcaaccgcgtcatccctaccaacgttcccgagctcaccttccagcccagccccgcccccgacccgcctggcggcctcacctactttcccgtggccgacctgtctatcatcgccgccctctatgcccgcttcaccgcccagatccgaggcgccgtcgacctgtccctctatcctcgagaagggggtgtctccagccgtgagctggtgaagaaggtctccgatgtcatatggaacagcctcagccgctcctacttcaaggatcgggcccacatccagtccctcttcagcttcatcacaggttggagcccagtaggcaccaaattggacagctccggtgtggcctttgctgtggttggggcctgccaggccctgggtctccgggatgtccacctcgccctgtctgaggatcatgcctgggtagtgtttgggcccaatggggagcagacagctgaggtcacctggcacggcaagggcaacgaggaccgcaggggccagacagtcaatgccggtgtggctgagcggagctggctgtacctgaaaggatcatacatgcgctgtgaccgcaagatggaggtggcgttcatggtgtgtgccatcaacccttccattgacctgcacaccgactcgctggagcttctgcagctgcagcagaagctgctctggctgctctatgacctgggacatctggaaaggtaccccatggccttagggaacctggcagatctagaggagctggagcccacccctggccggccagacccactcaccctctaccacaagggcattgcctcagccaagacctactatcgggatgaacacatctacccctacatgtacctggctggctaccactgtcgcaaccgcaatgtgcgggaagccctgcaggcctgggcggacacggccactgtcatccaggactacaactactgccgggaagacgaggagatctacaaggagttctttgaagtagccaatgatgtcatccccaacctgctgaaggaggcagccagcttgctggaggcgggcgaggagcggccgggggagcaaagccagggcacccagagccaaggttccgccctccaggaccctgagtgcttcgcccacctgctgcgattctacgacggcatctgcaaatgggaggagggcagtcccacgcctgtgctgcatgtgggctgggccacctttcttgtgcagtccctaggccgttttgagggacaggtgcggcagaaggtgcgcatagtgagccgagaggccgaggcggccgaggccgaggagccgtggggcgaggaagcccgggaaggccggcggcggggcccacggcgggagtccaagccagaggagcccccgccgcccaagaagccagcactggacaagggcctgggcaccggccagggtgcagtgtcaggacccccccggaagcctcctgggactgtcgctggcacagcccgaggccctgaaggtggcagcacggctcaggtgccagcacccacagcatcaccaccgccggagggtccagtgctcactttccagagtgagaagatgaagggcatgaaggagctgctggtggccaccaagatcaactcgagcgccatcaagctgcaactcacggcacagtcgcaagtgcagatgaagaagcagaaagtgtccacccctagtgactacactctgtctttcctcaagcggcagcgcaaaggcctctgaactactggggacttcggaccgcttgtggggacccaggctccgcccttagtcccccaactctgagcccatgttctgcccccagcccaaaggggacaggcctcacctctacccaaaccctaggttcccggtcccgagtacagtctgtatcaaacccacgattttctccagctcagaacccagggctctgccccagtcgttagaatataggtctcttctcccagaatcccagccggccaatggaaacctcacgctgggtcctaattaccagtctttaaaggcccagcccctagaaacccaagctcctcctcggaaccgctcacctagagccagaccaacgttactcagggctcctcccagcttgtaggagctgaggtttcacccttaacccaaggagcacaggtcccacctccagcccgggagcctaggaccactcagcccctaggagtatatttccgcacttcagaattccatatcttgcgaatccaagctccctgccccaaataacttcagtcctgctccagaatttggaaatcctagtttcctctccttcgtatcccgagtctgggacacaaaactccgcccccagcctatgagcatcctgagccccgccctcttcctgacgaaactggccccggatcagagcaggacctcccttccgaccctctgggaacctcccagaggtccagcccatctcggagcatcccggaggaaatctgcagagggttaggagtgggtgacaagagcctgatctcttcctgttttgtacatagatttatttttcagttccaagaaagatgaatacattttgtt

SEQ ID NO: 234218 - DNA, 2768 bp, Artificial Sequence
  derived and/or modified sequence
ggtgtccggagccgcggacctagagatcccagaagccacagcgcagcggcccggcccgccactatttccaggctcagcggggcaggggccgccgcccaccgcccgccgccatggggctgaaggccgcccagaagacgctgttcccgctgcgctccatcgacgacgtggtgcgcctgtttgctgccgagctgggccgagaggagccggacctggtgctcctttccttggtgctgggcttcgtggagcattttctggctgtcaaccgcgtcatccctaccaacgttcccgagctcaccttccagcccagccccgcccccgacccgcctggcggcctcacctactttcccgtggccgacctgtctatcatcgccgccctctatgcccgcttcaccgcccagatccgaggcgccgtcgacctgtccctctatcctcgagaagggggtgtctccagccgtgagctggtgaagaaggtctccgatgtcatatggaacagcctcagccgctcctacttcaaggatcgggcccacatccagtccctcttcagcttcatcacaggttggagcccagtaggcaccaaattggacagctccggtgtggcctttgctgtggttggggcctgccaggccctgggtctccgggatgtccacctcgccctgtctgaggatcatgcctgggtagtgtttgggcccaatggggagcagacagctgaggtcacctggcacggcaagggcaacgaggaccgcaggggccagacagtcaatgccggtgtggctgagcggagctggctgtacctgaaaggatcatacatgcgctgtgaccgcaagatggaggtggcgttcatggtgtgtgccatcaacccttccattgacctgcacaccgactcgctggagcttctgcagctgcagcagaagctgctctggctgctctatgacctgggacatctggaaaggtaccccatggccttagggaacctggcagatctagaggagctggagcccacccctggccggccagacccactcaccctctaccacaagggcattgcctcagccaagacctactatcgggatgaacacatctacccctacatgtacctggctggctaccactgtcgcaaccgcaatgtgcgggaagccctgcaggcctgggcggacacggccactgtcatccaggactacaactactgccgggaagacgaggagatctacaaggagttctttgaagtagccaatgatgtcatccccaacctgctgaaggaggcagccagcttgctggaggcgggcgaggagcggccgggggagcaaagccagggcacccagagccaaggttccgccctccaggaccctgagtgcttcgcccacctgctgcgattctacgacggcatctgcaaatgggaggagggcagtcccacgcctgtgctgcatgtgggctgggccacctttcttgtgcagtccctaggccgttttgagggacaggtgcggcagaaggtgcgcatagtgagccgagaggccgaggcggccgaggccgaggagccgtggggcgaggaagcccgggaaggccggcggcggggcccacggcgggagtccaagccagaggagcccccgccgcccaagaagccagcactggacaagggcctgggcaccggccagggtgcagtgtcaggacccccccggaagcctcctgggactgtcgctggcacagcccgaggccctgaaggtggcagcacggctcaggtgccagcacccacagcatcaccaccgccggagggtccagtgctcactttccagagtgagaagatgaagggcatgaaggagctgctggtggccaccaagatcaactcgagcgccatcaagctgcaactcacggcacagtcgcaagtgcagatgaagaagcagaaagtgtccacccctagtgactacactctgtctttcctcaagcggcagcgcaaaggcctctgaactactggggacttcggaccgcttgtggggacccaggctccgcccttagtcccccaactctgagcccatgttctgcccccagcccaaaggggacaggcctcacctctacccaaaccctaggttcccggtcccgagtacagtctgtatcaaacccacgattttctccagctcagaacccagggctctgccccagtcgttagaatataggtctcttctcccagaatcccagccggccaatggaaacctcacgctgggtcctaattaccagtctttaaaggcccagcccctagaaacccaagctcctcctcggaaccgctcacctagagccagaccaacgttactcagggctcctcccagcttgtaggagctgaggtttcacccttaacccaaggagcacaggtcccacctccagcccgggagcctaggaccactcagcccctaggagtatatttccgcacttcagaattccatatcttgcgaatccaagctccctgccccaaataacttcagtcctgctccagaatttggaaatcctagtttcctctccttcgtatcccgagtctgggacacaaaactccgcccccagcctatgagcatcctgagccccgccctcttcctgacgaaactggccccggatcagagcaggacctcccttccgaccctctgggaacctcccagaggtccagcccatctcggagcatcccggaggaaatctgcagagggttaggagtgggtgacaagagcctgatctcttcctgttttgtacatagatttatttttcagttccaagaaagatgaatacattttgtt

SEQ ID NO: 234219 - DNA, 1848 bp, Artificial Sequence
  derived and/or modified sequence
atgggattgaaggcagcacaaaaaacactgtttcccctgaggtcaatcgacgacgttgtaaggttattcgcggcagaattgggaagggaggaaccagacttagtccttctttctcttgttttgggttttgtagagcactttctggccgtcaaccgtgtgatccccacaaacgtgcctgagctcacctttcagcctagcccagctcctgaccctcctggtggactgacctatttcccagttgctgatctgagcatcattgcagcactctatgccaggttcaccgcgcagatccggggagccgtggatttgagcttataccctcgggaagggggagtatcatctcgggagctggttaaaaaggttagcgacgtcatttggaacagcctgtcgcggagctatttcaaggaccgagctcacattcagtccctgttttcctttatcacgggttggtcccctgtgggcaccaagctggactcatcgggggtggctttcgccgtggtgggcgcatgccaggcattaggcctccgagacgtgcacttggccctgtccgaagaccacgcatgggtggtgttcgggcctaacggagaacagacagccgaggtgacttggcatggcaaggggaatgaggatcgacgcggacagactgtcaacgccggagtggccgagcggtcatggctttatttgaagggttcatacatgcgctgcgataggaagatggaagtggcatttatggtgtgcgccatcaatccgagcatcgatctgcacacagacagtctggaactgctgcaattgcagcagaagctgctgtggctgctgtatgatctcggccacttggaacgctatccgatggctcttgggaatctcgccgatctggaggagctggaaccaacaccagggagacctgatcccctgaccctctatcataaggggattgcatccgcaaaaacttactacagagatgaacacatctacccttatatgtacttggctggctaccattgccgaaaccgcaacgttagggaggccctccaagcctgggccgataccgccacggttatccaggactacaattattgtcgggaagacgaagaaatatacaaggaattttttgaggtagctaatgacgtgattccaaacctcttgaaagaagccgcttccctattagaggcaggagaggaaagacctggagagcaatctcagggaacgcagagccagggaagtgccctccaagatcccgaatgttttgctcatttacttagattctacgacggcatctgtaagtgggaggagggttcacccacacccgtgctccacgtgggctgggccaccttcttggtacagtccctgggccgatttgagggccaggttcgtcagaaggtgcgcatcgtctccagggaggcggaggcggctgaggccgaggaaccatggggcgaggaagccagagaaggtcgacggagagggccaagaagggaaagtaagcccgaagaacctccccctcctaaaaaacccgcactggacaagggacttgggacaggccagggcgcagtatcggggcctcccaggaagcctcctggaactgtggcaggcaccgcaagagggccagaagggggatccaccgcccaggtacctgctcctactgcatcccccccacctgaagggccagtcctcacatttcaaagcgaaaaaatgaagggcatgaaggaacttttagtggcgacaaaaattaattcatcagccatcaagctgcagcttaccgcccagtcccaggtgcagatgaaaaaacagaaagtgagcacaccctctgattatacactgagcttcctaaaacgccaaaggaagggactttag

SEQ ID NO: 234220 - DNA, 1848 bp, Artificial Sequence
  derived and/or modified sequence
atggggctgaaagctgcccagaagaccttgttcccacttcgatcgattgacgacgtagtgcgtctgtttgccgctgaactggggagggaggaaccagacctggttcttctctccctggtgcttggtttcgtggaacatttcctcgccgttaatagagtgatacccaccaacgtgcctgagctgacctttcaaccctcaccagccccagatccaccgggaggcctgacctatttccctgtggccgatctgtctatcatagctgcactgtatgcaaggttcacagcccaaatccgaggtgcggtggatctgagtctctacccgagagaaggtggggtctctagtcgcgagctggttaagaaggtatcggacgttatctggaattcactctcgagaagctatttcaaagaccgtgcccacatccaaagcctgtttagcttcatcacaggatggtccccagtcgggacgaaattagactcctcgggggttgcattcgcggtcgtaggcgcatgtcaggccctgggtctgcgtgacgtgcatctagccctgagtgaggatcatgcttgggtggtattcggtccaaatggcgagcaaacagcagaagtgacgtggcatggaaagggtaacgaggacaggagagggcagaccgttaatgccggagtcgcggaacggagctggctctatttaaagggctcctatatgagatgcgatcggaagatggaggtggcctttatggtgtgcgctataaacccgagcattgacctgcatacagactccctcgagttactccagttgcagcaaaaactgctgtggctgctatacgacttaggacacctggaacgttaccccatggccttgggcaatctggcagacctagaggaattggaaccaacccccggtagaccagatccactcactttataccacaaggggattgcatcagcaaagacttattatcgcgatgaacacatctacccatacatgtatctcgccggatatcactgcaggaataggaacgttagagaggccctgcaggcttgggccgacaccgctactgtaatccaggattacaactattgcagggaagacgaagaaatctataaggaattctttgaggtggccaacgatgtaatccccaacttgctgaaggaagctgcttctctactcgaggccggtgaggaacggccaggagaacagtctcagggaacccaatcccagggctcagcactccaagatccggaatgtttcgcccatctcttacgtttttacgatgggatttgcaagtgggaggaggggtctccaacccctgtgctgcacgtcggatgggcaaccttcctggtacagtcactcggacgattcgaggggcaagtgcggcaaaaagtccgcatagtatctcgagaggcggaagcagctgaagccgaggagccgtggggagaggaagccagggaagggagacgaaggggacctcgcagagagtcaaagcccgaggaaccacctcccccaaaaaagccagcattggacaaaggactagggactggacagggcgctgtgtcaggtccaccacgaaaacccccaggcacggtggctggtaccgcgagggggccagagggcggttctacagctcaagtcccagctccaacggcctcccccccacctgagggacccgtgctaacctttcagtcagagaagatgaaaggcatgaaagagttacttgtggccactaagatcaacagctctgctattaagcttcagctgacagcccagtctcaggttcaaatgaagaaacaaaaagtgtcgacacccagcgactacaccctgagcttcctgaagcgacagcgcaaaggtctgtag

SEQ ID NO: 234221 - DNA, 1848 bp, Artificial Sequence
  derived and/or modified sequence
atgggcctgaaagccgctcagaaaaccctgttccccctgagatccattgacgacgtggtacggctcttcgccgcagagctgggtagagaagagccagacctggtccttctgtcactagtcctcggcttcgtggagcatttcctcgctgtcaatcgcgtcattccaacgaacgtgcccgaacttaccttccaacccagccctgctcccgacccaccaggcggacttacctatttccccgtcgccgacctgagtattatcgccgcattatacgctaggtttactgcccagataagaggggcagtcgacctttcactttatcctagggaaggcggtgtatcctctagggagctggtgaagaaggtctccgacgtaatttggaattccttatcgaggtcttactttaaggatagggcacatatccagtccctgttctcgttcattaccggatggtcgcccgttgggaccaagctagactcctccggagtcgccttcgccgtggtgggagcatgtcaggcgctgggactgagagacgtgcacctcgctctgtccgaggaccatgcttgggtggtattcgggcctaatggagagcagactgccgaggttacttggcacggtaaggggaacgaggatagaagaggccaaacagtcaatgcaggtgtcgccgaacggtcgtggttgtatttgaagggctcttacatgcgctgtgacaggaaaatggaggttgcttttatggtgtgcgcaattaatccgagtattgacctacatacagactcactcgaactgctccagttacagcagaaattactgtggttgttatacgatctgggccacctggaacgctaccccatggcgctaggcaatctagcggatttggaggaactggagcccacacccggacgtcccgatcctctcacgctgtaccataaggggatagcgagcgctaagacctactatcgggatgagcacatctacccttacatgtatctggccggttaccattgccgaaaccggaacgtccgcgaggctctccaggcctgggccgacactgccactgtaatccaggattacaactattgcagagaggacgaggagatctacaaggaattcttcgaggtggcaaacgacgtcatccctaatctgcttaaagaagctgccagtctcttagaggctggcgaggagcggcctggtgagcagagtcagggaactcagtcccagggaagcgcccttcaggacccagaatgtttcgcccacttgctgagattttatgacggcatatgtaagtgggaggagggaagccccacccccgtgcttcatgtcggatgggcaaccttcttggttcaaagcctcggtagatttgaaggccaagtgaggcagaaggtacggatcgtctctagagaggcggaggctgccgaagctgaagagccatggggagaggaggccagggaaggcagaagaaggggaccacgcagggagtctaaaccggaggaaccacctccacccaagaagccagcactggataagggcctgggaactggccagggcgctgtatctggccctcccagaaagccaccaggaaccgtggccggtaccgccagaggaccagagggcggaagtacggcgcaggtgccagcaccaaccgcatccccccctccagaaggacctgtgctgacattccaatcagagaagatgaaggggatgaaggaactgctcgtggctacaaaaattaattccagcgcaatcaaactgcagcttaccgcacagagccaagtccagatgaagaaacagaaagtgagtactcctagcgactatacattaagttttctcaagcggcagcgcaaaggactttag

SEQ ID NO: 234222 - DNA, 1848 bp, Artificial Sequence
  derived and/or modified sequence
atgggacttaaggccgcacagaagacgctatttccactcagaagcatcgatgatgttgtgcgactattcgctgccgaattggggagagaagagccagatctggttcttttatccctcgtccttggctttgtggaacattttctcgccgtcaatcgcgtcatccccaccaacgtgcccgagctaacatttcagccatctcctgcacccgatccacctggtggattgacttactttccagtcgccgatctgagcatcatcgcggctttgtatgcccgtttcacagcccaaattcgcggagccgtagatctgtcgctgtatcccagggagggcggagtgagcagtcgggagcttgttaaaaaggtgtctgatgtgatctggaacagcctgagtcggtcgtacttcaaagatcgggctcacatccagtccctctttagcttcattaccggttggtctcccgttggtaccaagctcgattcctcgggagtcgcattcgccgtagtgggcgcttgccaggccctgggcttgagggatgtgcacctggccctgagtgaggaccacgcctgggtggtattcggtcctaacggggagcagacggctgaggtaacctggcacggaaagggcaacgaagaccgaagaggccagaccgtgaatgcgggagtagctgaacgctcatggctttatctaaaggggtcctacatgaggtgcgacagaaaaatggaagtcgcttttatggtatgcgctatcaatccaagtatcgacctacacacagacagcctggagctgctacagttgcagcagaagctgctttggctgctgtacgatctgggacatttagagcgttatcctatggccctgggtaatttggctgacttggaggaattagagcccaccccaggacgtcctgatcccctgaccctctaccataagggaatagctagcgcgaagacttattatagagatgaacacatttacccttatatgtatctcgccggttatcactgccgtaacagaaacgtgcgggaggcacttcaagcatgggccgacacagccacagtcattcaagactataactactgtcgcgaggacgaagagatctacaaagaatttttcgaagtagcaaatgatgttatccctaatctgctgaaagaggcagcctccttgctggaagcaggcgaagagaggcctggggagcagagccagggcactcagtctcagggatccgcccttcaagatccagagtgttttgctcatctgctgcgcttttacgacggtatttgtaagtgggaggagggttcacctaccccagtacttcacgtcggttgggccacattcctggtgcagagtctgggtcgcttcgaggggcaggtgcggcagaaagttcgcatagtttctcgcgaggctgaggccgctgaggccgaagagccttggggagaggaggccagggaggggagaagacggggtcctagaagggaatcaaagcctgaagagcccccacctccaaaaaaaccagcgctggataagggcctaggtacgggtcagggggctgtttcagggccaccacgtaaacctccaggaactgttgccggtacagccagaggcccagaaggaggcagtaccgcccaagtaccagccccaacggcaagtccccctcccgagggacctgtgctcacatttcagtctgagaagatgaagggcatgaaggagcttctagtcgcgacaaaaataaattcaagcgccattaaattgcagctcacagctcagagtcaggtgcaaatgaagaagcagaaagtctccacccctagcgactacaccctatccttcttgaaacgtcagagaaagggactttag

SEQ ID NO: 234223 - DNA, 1848 bp, Artificial Sequence
  derived and/or modified sequence
atgggactgaaggccgcacagaagacgctttttcccctcaggagcattgacgacgtggtgcgcttgttcgccgctgaactgggacgtgaagaaccagaccttgtcctgctcagccttgtgttggggttcgtggagcacttcctcgcagtgaatcgagtgatccccaccaatgtgcccgaactcacttttcagccctccccagctccagacccccctggagggctaacttatttccctgtggccgacctctccattatcgccgcactgtacgcccgatttactgcacagattcgcggtgccgtggatttgagcctttatcctagggaagggggagtgagcagcagagagttagtgaagaaagtgagtgatgtgatatggaactctctctctagatcctacttcaaggatcgagcccacatccaaagccttttttctttcatcactggatggagtccagttgggacaaagctagacagctccggggtggcctttgcagtggtgggggcatgccaggccctgggcctacgcgacgtccacctggctctcagcgaggaccacgcctgggtagtgtttgggcctaacggcgaacagacagcggaggtgacctggcacggaaaggggaacgaagacagaaggggacagacggtcaacgccggagtggcagaacgatcatggctgtatttgaaaggctcctacatgcggtgtgacagaaagatggaggtcgcctttatggtgtgcgccattaacccatctatagacctccacactgacagcctcgagctcctgcagctgcagcagaagctgctttggctgctatatgacctgggacacctggagcgttatcccatggccctcgggaacctcgctgatttggaggaactggaaccaacaccaggccgtccagaccctctcacactgtatcacaagggcatagccagcgccaaaacttattaccgcgacgaacatatttatccttatatgtatctggccggatatcactgtcgcaaccgcaacgtgcgggaggctctccaagcatgggcggacacggccactgtgatacaggactacaactactgtagagaggacgaggaaatttataaggagttctttgaggtcgcaaacgatgtaatacctaatttactgaaagaagccgcttctctgttggaggccggagaggaaaggcctggagaacaatcccagggaacacagagccaaggcagcgcactacaggacccagagtgcttcgcccacttgcttagattttacgatgggatatgtaagtgggaggaaggttccccgacaccagttctccatgttgggtgggccacatttctggtgcaaagtctgggaagatttgaggggcaagtcaggcaaaaagtccgtatcgtttctcgcgaggctgaagcagccgaagcagaagaaccatggggggaggaggcacgggagggaaggagaagggggcctcggagggagtcaaagccagaagagcccccacctccaaagaagccagccctggacaaaggcctggggactggacagggagccgtatctggtccaccgagaaagccacccggaaccgtggctggcacggcaaggggccctgagggaggtagcaccgcacaggtcccagctccaaccgcatccccacctcccgagggacctgttctgacattccagtccgaaaaaatgaagggaatgaaagaactgctggtggcaactaaaatcaacagtagcgcaattaaacttcagctgaccgcccaatcccaggtccagatgaagaaacaaaaggtcagtactcccagcgattacaccctcagcttcctgaagcgtcagaggaaagggctgtag

SEQ ID NO: 234224 - protein, 754 aa, Artificial Sequence
  derived and/or modified sequence
MIVFLVFKHLFSLRLITMFFLLHFIVLINVKDFALTQGSMITPSCQKGYFPCGNLTKCLPRAFHCDGKDDCGNGADEENCGDTSGWATIFGTVHGNANSVALTQECFLKQYPQCCDCKETELECVNGDLKSVPMISNNVTLLSLKKNKIHSLPDKVFIKYTKLKKIFLQHNCIRHISRKAFFGLCNLQILYLNHNCITTLRPGIFKDLHQLTWLILDDNPITRISQRLFTGLNSLFFLSMVNNYLEALPKQMCAQMPQLNWVDLEGNRIKYLTNSTFLSCDSLTVLFLPRNQIGFVPEKTFSSLKNLGELDLSSNTITELSPHLFKDLKLLQKLNLSSNPLMYLHKNQFESLKQLQSLDLERIEIPNINTRMFQPMKNLSHIYFKNFRYCSYAPHVRICMPLTDGISSFEDLLANNILRIFVWVIAFITCFGNLFVIGMRSFIKAENTTHAMSIKILCCADCLMGVYLFFVGIFDIKYRGQYQKYALLWMESVQCRLMGFLAMLSTEVSVLLLTYLTLEKFLVIVFPFSNIRPGKRQTSVILICIWMAGFLIAVIPFWNKDYFGNFYGKNGVCFPLYYDQTEDIGSKGYSLGIFLGVNLLAFLIIVFSYITMFCSIQKTALQTTEVRNCFGREVAVANRFFFIVFSDAICWIPVFVVKILSLFRVEIPDTMTSWIVIFFLPVNSALNPILYTLTTNFFKDKLKQLLHKHQRKSIFKIKKKSLSTSIVWIEDSSSLKLGVLNKITLGDSIMKPVS

SEQ ID NO: 234225 - DNA, 2265 bp, Artificial Sequence
  derived and/or modified sequence
atgatcgtgttcctggtgttcaagcacctgttcagcctgagactgatcaccatgttcttcctgctgcacttcatcgtgctgatcaacgtgaaggacttcgccctgacccagggcagcatgatcacccccagctgccagaagggctacttcccctgcggcaacctgaccaagtgcctgcccagagccttccactgcgacggcaaggacgactgcggcaacggcgccgacgaggagaactgcggcgacaccagcggctgggccaccatcttcggcaccgtgcacggcaacgccaacagcgtggccctgacccaggagtgcttcctgaagcagtacccccagtgctgcgactgcaaggagaccgagctggagtgcgtgaacggcgacctgaagagcgtgcccatgatcagcaacaacgtgaccctgctgagcctgaagaagaacaagatccacagcctgcccgacaaggtgttcatcaagtacaccaagctgaagaagatcttcctgcagcacaactgcatcagacacatcagcagaaaggccttcttcggcctgtgcaacctgcagatcctgtacctgaaccacaactgcatcaccaccctgagacccggcatcttcaaggacctgcaccagctgacctggctgatcctggacgacaaccccatcaccagaatcagccagagactgttcaccggcctgaacagcctgttcttcctgagcatggtgaacaactacctggaggccctgcccaagcagatgtgcgcccagatgccccagctgaactgggtggacctggagggcaacagaatcaagtacctgaccaacagcaccttcctgagctgcgacagcctgaccgtgctgttcctgcccagaaaccagatcggcttcgtgcccgagaagaccttcagcagcctgaagaacctgggcgagctggacctgagcagcaacaccatcaccgagctgagcccccacctgttcaaggacctgaagctgctgcagaagctgaacctgagcagcaaccccctgatgtacctgcacaagaaccagttcgagagcctgaagcagctgcagagcctggacctggagagaatcgagatccccaacatcaacaccagaatgttccagcccatgaagaacctgagccacatctacttcaagaacttcagatactgcagctacgccccccacgtgagaatctgcatgcccctgaccgacggcatcagcagcttcgaggacctgctggccaacaacatcctgagaatcttcgtgtgggtgatcgccttcatcacctgcttcggcaacctgttcgtgatcggcatgagaagcttcatcaaggccgagaacaccacccacgccatgagcatcaagatcctgtgctgcgccgactgcctgatgggcgtgtacctgttcttcgtgggcatcttcgacatcaagtacagaggccagtaccagaagtacgccctgctgtggatggagagcgtgcagtgcagactgatgggcttcctggccatgctgagcaccgaggtgagcgtgctgctgctgacctacctgaccctggagaagttcctggtgatcgtgttccccttcagcaacatcagacccggcaagagacagaccagcgtgatcctgatctgcatctggatggccggcttcctgatcgccgtgatccccttctggaacaaggactacttcggcaacttctacggcaagaacggcgtgtgcttccccctgtactacgaccagaccgaggacatcggcagcaagggctacagcctgggcatcttcctgggcgtgaacctgctggccttcctgatcatcgtgttcagctacatcaccatgttctgcagcatccagaagaccgccctgcagaccaccgaggtgagaaactgcttcggcagagaggtggccgtggccaacagattcttcttcatcgtgttcagcgacgccatctgctggatccccgtgttcgtggtgaagatcctgagcctgttcagagtggagatccccgacaccatgaccagctggatcgtgatcttcttcctgcccgtgaacagcgccctgaaccccatcctgtacaccctgaccaccaacttcttcaaggacaagctgaagcagctgctgcacaagcaccagagaaagagcatcttcaagatcaagaagaagagcctgagcaccagcatcgtgtggatcgaggacagcagcagcctgaagctgggcgtgctgaacaagatcaccctgggcgacagcatcatgaagcccgtgagctag

SEQ ID NO: 234226 - DNA, 2265 bp, Artificial Sequence
  derived and/or modified sequence
atgatcgtcttcttggtgtttaagcacctattttcactgaggttaattaccatgttttttctactgcactttattgtgctgatcaacgtcaaggatttcgcactgacgcaagggtctatgattacacccagctgtcaaaagggctatttcccatgcggaaatttgacaaaatgcctgcctagggcctttcactgcgatggcaaggacgattgtggcaacggcgccgatgaggagaactgcggagacaccagcggatgggctacgatctttgggaccgtccatggaaatgccaattcagttgctttaactcaagagtgttttttgaagcagtatccacagtgttgcgattgcaaggaaacagaactggagtgtgtcaacggcgacctcaagtccgtcccaatgatcagtaataatgtgactctcctctccttgaagaagaataagatccacagcctgcctgacaaagtgtttatcaaatataccaagcttaagaagatttttcttcagcacaactgcatccgtcacattagtcgcaaggctttcttcggtctgtgcaatctgcagatactctacctgaaccacaactgcattaccacacttcggcccggcatcttcaaagatctgcaccaacttacctggttgattctcgacgataaccctataaccagaattagtcaacggctgttcacgggactcaatagtctgtttttcctgtcgatggtaaacaactaccttgaggcccttccaaagcaaatgtgcgcccagatgccccagctgaattgggttgatctcgagggaaacagaattaagtatcttacgaattctacctttctgagctgcgactctctgacggtgctgttccttccccgcaaccagattgggttcgtaccagaaaagactttcagctcactcaagaatctgggagagctggacctgtcttcgaacaccatcaccgagctgagtcctcacctgttcaaagaccttaagctcctgcaaaaactgaaccttagctcaaatcctcttatgtatctgcataagaaccagttcgagtctctcaagcaactgcagagcctggaccttgaacgtattgaaatccccaatataaacacgcgaatgtttcagccgatgaagaatctttcccacatttacttcaagaacttccgctactgctcgtacgcaccacacgtgcgtatctgcatgcccctgacagatggcatctcatcctttgaagacctgttggccaacaacatcctaagaattttcgtttgggttatcgcctttattacctgtttcggaaacttgttcgtaattggcatgaggtcatttattaaggccgagaacaccacacatgccatgtcaattaagatcctgtgctgtgcagactgtctgatgggcgtctaccttttcttcgtgggcatcttcgatattaagtatcgcggacagtatcaaaagtatgctctgctgtggatggaaagtgtacagtgccggttgatgggcttcctggcaatgctatccactgaggtgagtgtcctgctactcacttatctcactctggagaagtttctggtaatcgtctttccatttagtaacatcagaccaggtaaacgtcagacatccgttatccttatatgtatttggatggcaggtttcctgatcgctgttattcccttctggaacaaagattattttgggaacttctatggaaaaaatggcgtgtgcttccccctgtattatgaccaaaccgaggacattgggtccaaaggctatagccttggcattttcctgggggtgaatctgttggcattccttataattgtgttctcttacataaccatgttctgctctattcagaagactgcactccagactaccgaggtaagaaattgctttggtcgagaggtagcggtagcgaaccggtttttctttatcgtcttctctgacgccatatgttggatacctgtgttcgttgtcaagatcctgtctctttttagggtcgaaattccagacaccatgaccagttggatcgtcatctttttcctgcctgttaattcagcccttaaccctattctgtacaccctgacaacaaacttttttaaggataaacttaaacagctgttgcacaagcaccagcgcaagagcattttcaaaatcaaaaaaaagtccctctcaactagcatagtgtggattgaggattcctcttccctcaagctaggcgtcttaaacaagatcaccctgggtgacagcatcatgaaacctgtcagctag

SEQ ID NO: 234227 - DNA, 2265 bp, Artificial Sequence
  derived and/or modified sequence
atgattgtgttcctggtgttcaagcacctgttcagcctgcggctcatcaccatgttcttcctgctgcacttcatcgtgctgatcaacgtgaaggactttgccctgacccagggctccatgatcacccccagctgccagaagggctacttcccctgtggcaacctgaccaagtgcctgccccgggccttccactgtgatggcaaggatgactgtggaaatggagcagatgaggagaactgtggggacaccagcggctgggccaccatcttcggcaccgtgcacggcaatgccaacagcgtggccctgacccaggagtgcttcctgaagcagtacccccagtgctgtgactgcaaggagacagagctggagtgtgtgaatggagacctgaagtctgtgcccatgatcagcaacaacgtgaccctgctgagcctgaagaagaacaagatccacagcctgcctgacaaggtgttcatcaagtacaccaagctgaagaagatcttcctgcagcacaactgcatccgccacatcagcaggaaggccttcttcggcctgtgcaacctgcagatcctgtacctgaaccacaactgcatcaccaccctgcggcccggcatcttcaaggacctgcaccagctgacctggctgatcctggatgacaaccccatcacccgcatcagccagaggctcttcaccggcctgaacagcctcttcttcctgtccatggtgaacaactacctggaggccctgcccaagcagatgtgtgcccagatgccccagctgaactgggtggacctggagggcaaccgcatcaagtacctgaccaacagcaccttcctgagctgtgacagcctgactgtgctcttcctgcccaggaaccagattggatttgtgcctgagaagaccttcagcagcctgaagaacctgggggagctggacctgagcagcaacaccatcacagagctgagcccccacctgttcaaggacctgaagctgctgcagaagctgaacctgagcagcaaccccctgatgtacctgcacaagaaccagtttgagagcctgaagcagctgcagagcctggacctggagagaattgagatccccaacatcaacaccaggatgttccagcccatgaagaacctgagccacatctacttcaagaacttccgctactgcagctatgcccctcatgtgcgcatctgcatgcccctgacagatggcatcagcagctttgaggacctgctggccaacaacatcctgcgcatctttgtgtgggtgattgccttcatcacctgctttggaaacctgtttgtgattggcatgaggagcttcatcaaggccgagaacaccacccacgccatgagcatcaagatcctgtgctgtgccgactgcctgatgggcgtgtacctgttctttgtgggcatctttgacatcaagtaccggggccagtaccagaagtatgccctgctgtggatggagagcgtgcagtgccgcctgatgggcttcctggccatgctgagcacagaggtgtctgtgctgctgctgacctacctgaccctggagaagttcctggtgattgtgttccccttcagcaacatccggcctgggaagaggcagaccagcgtcatcctgatctgcatctggatggccggcttcctgattgctgtgatccccttctggaacaaggactactttggaaacttctacggcaagaatggagtgtgcttccccctgtactatgaccagacagaggacatcggcagcaagggctacagcctgggcatcttcctgggcgtgaacctgctggccttcctgatcatcgtgttctcctacatcaccatgttctgcagcatccagaagacagccctgcagaccacagaggtgaggaactgcttcggccgggaggtggccgtggccaaccgcttcttcttcatcgtgttcagtgatgccatctgctggatccctgtgtttgtggtgaagatcctgagcctcttccgggtggagatcccagacaccatgacctcctggatcgtcatcttcttcctgcctgtgaacagcgccctgaaccccatcctgtacaccctgaccaccaacttcttcaaggacaagctgaagcagctgctgcacaagcaccagaggaagagcatcttcaagatcaagaagaagagcctgagcaccagcatcgtgtggattgaggacagcagcagcctgaagctgggcgtgctgaacaagatcaccctgggggacagcatcatgaagcctgtgtcctag

SEQ ID NO: 234228 - DNA, 2265 bp, Artificial Sequence
  derived and/or modified sequence
atgatcgtgttcctggtgttcaagcacctgttcagcctgcggctgatcactatgtttttcttgctgcattttattgtgctgattaacgtgaaagacttcgccctcacccaggggagtatgatcactccaagctgccagaaggggtacttcccgtgcggcaacctgactaagtgcctgccccgtgcttttcactgcgatggtaaagatgattgtggtaacggagctgatgaggaaaattgcggtgacactagcggctgggctacgatctttggtacagtgcatgggaacgctaattctgtagccctcacgcaggaatgttttctgaagcagtacccacagtgctgtgattgtaaggagacggaactggagtgcgtcaacggtgatctgaaatcagtacccatgatatccaacaatgttacgttgctgagtctgaagaagaacaagatccacagcctgcctgacaaagtgtttatcaagtacaccaagttgaagaagatcttcttgcagcacaattgcatacgccatatcagcagaaaagcattcttcgggctgtgcaaccttcagatcctgtatctgaatcataactgtattacaacccttaggccgggaatctttaaggacttgcatcagctgacctggctgattctggatgacaatccaataacccggatctcacaacgcctcttcacaggcctgaactccctgtttttcctcagtatggtgaacaattatctggaagccttgcccaagcagatgtgcgctcaaatgcctcagctgaactgggtagatcttgagggcaacagaatcaaatatctcacaaatagcacttttctgagctgtgacagcctgaccgtcctatttttaccaagaaatcagattggatttgtccccgagaagacctttagcagcctgaaaaaccttggggagctggaccttagcagcaacaccatcacggaattgagcccgcatttattcaaggatttgaaactccttcagaaattgaatctgtctagcaatcctctcatgtacctacataagaaccagtttgaatcactcaagcaactccagagcctggaccttgagaggatagagatccccaatattaatacaaggatgttccagcccatgaagaatttgtcacacatctactttaagaactttcggtattgctcttatgcaccccatgtaaggatttgcatgccgctgaccgacggcatcagttcatttgaggatctgctggctaataatatacttcgaatcttcgtgtgggtcattgcctttattacatgctttggcaatctgtttgtcatcggaatgcgcagctttatcaaagcggagaacactactcatgccatgtcaataaagattctgtgctgtgcagattgccttatgggtgtgtacttgtttttcgtaggcattttcgatatcaaatacagggggcagtaccagaaatatgcactcttgtggatggaaagcgtacagtgcaggcttatgggatttttggctatgctcagtactgaggttagcgttcttttactgacatatttaacacttgagaaatttctcgtgattgtgttccctttctcaaatatccgccctgggaagcgccagacatcggtgatcttgatctgtatctggatggcagggttcctgatcgccgtgatccccttttggaacaaggactacttcggaaacttctacggtaagaacggagtttgttttcctttgtattatgatcagacagaagatatcggaagcaaggggtactctctggggattttccttggggtgaacctgctcgctttcctaataattgtgtttagttatatcactatgttttgttcaattcaaaaaacagccttgcaaactaccgaggttcgcaactgctttgggcgtgaggtggcagtggccaacaggttctttttcatagttttttccgacgccatttgctggattcctgtatttgtggtgaaaatcctgtctttattcagagtggaaattccagatacaatgacctcctggatagtcatttttttccttccagttaactctgcactcaatcccatactctacacccttaccacaaattttttcaaagataaacttaagcagctcctgcacaaacaccaaaggaagtcgatttttaaaatcaagaaaaagtctctctcaaccagtatagtgtggattgaggacagttcttcacttaaactcggcgtcttgaataaaattacattgggcgactcaattatgaagccagtgtcttag

SEQ ID NO: 234229 - DNA, 2265 bp, Artificial Sequence
  derived and/or modified sequence
atgattgtatttctcgtgtttaagcatcttttttccctccgcctgatcaccatgtttttcctgctgcattttatcgtgctgatcaatgttaaggactttgcattgacacagggaagtatgattacaccgtcttgccaaaaggggtacttcccatgtggaaaccttacaaaatgtcttccccgagcctttcattgtgacggcaaggatgactgtggcaacggggctgatgaggaaaattgtggtgacactagcggttgggctactatctttgggactgtgcacggtaatgcaaactcagtggccttaactcaggaatgcttcctcaaacaatatccacagtgctgtgattgcaaagagaccgagttagagtgcgtgaatggtgatttgaaatccgttcctatgatttcgaacaacgtaacgctgctgagcctgaaaaagaataagatccacagtttacctgacaaagtgtttattaagtatacaaaactaaagaagatctttctccagcacaactgtattaggcacattagtagaaaagcatttttcggcttgtgcaacctccagatactttacctcaaccataactgtattaccaccctgaggccagggatatttaaagacctacatcagttgacctggttgattttagacgataaccctatcacccgtatctcacagcgcctgtttaccggcctgaatagcctgtttttcctctccatggtgaataattatctagaggctttaccaaaacaaatgtgtgcccagatgccacagctgaattgggtagaccttgaaggaaatcgcattaagtatctgacaaatagcacgttcctgagctgcgattctttgaccgtacttttccttcctcggaaccagattggatttgtgccagaaaaaaccttcagctccctgaagaacctgggcgaactggatctgagtagtaacacaatcacggagctctcaccccatttgttcaaagacctgaagctgctccagaagctgaacctttcctctaaccctctgatgtatttgcacaagaatcagtttgaatcactcaagcagctacagtctctggatctggagcgtattgaaatacctaacatcaatacaagaatgtttcagccaatgaagaatctgagccatatctattttaagaatttcaggtactgttcctacgcccctcacgtgagaatttgcatgcccctgaccgatggcattagttcgtttgaagatctcctggctaacaatatcctccggattttcgtgtgggtaatcgctttcattacatgcttcggcaacctgttcgtgatcggaatgaggagtttcattaaagctgagaacactacacatgctatgagtattaaaatcctgtgttgtgccgactgtctcatgggagtatacctgttttttgtgggtatctttgatataaagtatcgaggtcaatatcaaaaatatgcgttgctttggatggagtctgtgcagtgcaggctgatgggctttctcgctatgttaagcacagaagtctcggtcctgctgctgacttacttaactctcgagaagttcctagtgattgtgttcccgttcagtaacattagaccaggcaagagacagacctccgtgatccttatctgcatatggatggcaggatttcttatagccgttattcccttttggaacaaggactacttcggcaatttctatgggaagaacggtgtatgtttcccactatattacgatcagacagaggacatcggcagtaagggatattcattgggaatcttccttggcgtgaaccttctggcctttctcatcatcgtctttagttacattacaatgttttgctcgattcagaaaaccgctttgcagactacagaagtacggaactgcttcggacgcgaggtggcagtggccaacagattttttttcatagttttttcagatgccatttgctggatcccggtgtttgtggtgaaaattctcagtcttttccgggtagaaatcccggacacaatgacctcttggatcgtgattttttttttgcctgtgaatagcgctctgaatccgattctgtacaccctgaccacaaatttcttcaaagacaagctaaaacagctgctccacaagcatcagagaaaatccatcttcaaaataaagaagaaaagtttgtcaaccagtattgtttggatagaagacagcagcagcctgaagctcggcgtgctaaataagatcactctcggagactcaataatgaaacccgtctcctag

SEQ ID NO: 234230 - DNA, 2803 bp, Artificial Sequence
  derived and/or modified sequence
tgaacttactacatcagaactcctgctgaggtataagaggatacgtctaataactcaattgctgtaaacctatgattgtttttctggtttttaaacatctcttcagcctcagattgattacaatgttctttctacttcatttcatcgttctgatcaatgtcaaagattttgcactgactcaaggtagcatgatcactccttcatgccaaaaaggatattttccctgtgggaatcttaccaagtgcttaccccgagcttttcactgtgatggcaaggatgactgtgggaacggggcggacgaagagaactgtggtgacactagtggatgggcgaccatatttggcacagtgcatggaaatgctaacagcgtggccttaacacaggagtgctttctaaaacagtatccacaatgctgtgactgcaaagaaactgaattggaatgtgtaaatggtgacttaaagtctgtgccgatgatttctaacaatgtgacattactgtctcttaagaaaaacaaaatccacagtcttccagataaagttttcatcaaatacacaaaacttaaaaagatatttcttcagcataattgcattagacacatatccaggaaagcattttttggattatgtaatctgcaaatattatatctcaaccacaactgcatcacaaccctcagacctggaatattcaaagacttacatcagctaacttggctaattctagatgacaatccaataaccagaatttcacagcgcttgtttacgggattaaattccttgtttttcctgtctatggttaataactacttagaagctcttcccaagcagatgtgtgcccaaatgcctcaactcaactgggtggatttggaaggcaatagaataaagtatctcacaaattctacgtttctgtcgtgcgattcgctcacagtgctgtttctgcctagaaatcaaattggttttgttccagagaagacattttcttcattaaaaaatttaggagaactggatctgtctagcaatacgataacggaactatcacctcacctttttaaagacttgaagcttctacaaaagctgaacctgtcatccaatcctcttatgtatcttcacaagaaccagtttgaaagtcttaaacaacttcagtctctagacctggaaaggatagagattccaaatataaacacacgaatgtttcaacccatgaagaatctttctcacatttatttcaaaaactttcgatactgctcctatgctccccatgtccgaatatgtatgcccttgacggacggcatttcttcatttgaggacctcttggctaacaatatcctcagaatatttgtctgggttatagctttcattacctgctttggaaatctttttgtcattggcatgagatctttcattaaagctgaaaatacaactcacgctatgtccatcaaaatcctttgttgtgctgattgcctgatgggtgtttacttgttctttgttggcattttcgatataaaataccgagggcagtatcagaagtatgccttgctgtggatggagagcgtgcagtgccgcctcatggggttcctggccatgctgtccaccgaagtctctgttctgctactgacctacttgactttggagaagttcctggtcattgtcttccccttcagtaacattcgacctggaaaacggcagacctcagtcatcctcatttgcatctggatggcgggatttttaatagctgtaattccattttggaataaggattattttggaaacttttatgggaaaaatggagtatgtttcccactttattatgaccaaacagaagatattggaagcaaagggtattctcttggaattttcctaggtgtgaacttgctggcttttctcatcattgtgttttcctatattactatgttctgttccattcaaaaaaccgccttgcagaccacagaagtaaggaattgttttggaagagaggtggctgttgcaaatcgtttcttttttatagtgttctctgatgccatctgctggattcctgtatttgtagttaaaatcctttccctcttccgggtggaaataccagacacaatgacttcctggatagtgatttttttccttccagttaacagtgctttgaatccaatcctctatactctcacaaccaacttttttaaggacaagttgaaacagctgctgcacaaacatcagaggaaatcaattttcaaaattaaaaaaaaaagtttatctacatccattgtgtggatagaggactcctcttccctgaaacttggggttttgaacaaaataacacttggagacagtataatgaaaccagtttcctagcaatcattttggatcactggactttcagtggactacctaaaacaggggacagcttttggaagatgacatctgcaatgcttttcatctttaccaacggcaagcctttctgcacagagagcacagcagaatggctcctgtcactgcattccaatggcagctgtactatctaccaaccatgctgaggacagcaccaaaggttcctctcctcaccccacatgcctgaaaagcacatgtgaattcgtgtatagtgggctgaggtgcagctgatctctagctaatcaacacaacccaccaacaaatgaccacaggttggcactgtgtggtctttcacatcgggttgcactgtccatgaaatagaaacactcacaacatctgattccagtgtggccataataacagaaatctaacaactctttccttgccttttcaatatcaaataaaaccatcagcatcctgctggattgata

SEQ ID NO: 234231 - DNA, 510 bp, Artificial Sequence
  derived and/or modified sequence
atgaagaagatgagcaacatctacgagagcgccgccaacaccctgggcatcttcaacagcccctgcctgaccaaggtggagctgagagtggcctgcaagggcatcagcgacagagacgccctgagcaagcccgacccctgcgtgatcctgaagatgcagagccacggccagtggttcgaggtggacagaaccgaggtgatcagaacctgcatcaaccccgtgtacagcaagctgttcaccgtggacttctacttcgaggaggtgcagagactgagattcgaggtgcacgacatcagcagcaaccacaacggcctgaaggaggccgacttcctgggcggcatggagtgcaccctgggccagatcgtgagccagagaaagctgagcaagagcctgctgaagcacggcaacaccgccggcaagagcagcatcaccgtgatcgccgaggagctgagcggcaacgacgactacgtggagctggccttcaacgccagaaagctggacgacaagtag

SEQ ID NO: 234232 - DNA, 561 bp, Artificial Sequence
  derived and/or modified sequence
agaagggtacaaatcttttttctttctccaaggagaatcttttgagcacaatgaatgaagaagatgagcaacatttatgagtccgctgccaacacactgggaatctttaacagcccctgcctgaccaaagttgagctgcgtgtggcgtgcaaaggcatttctgacagagatgccctttccaaaccagacccctgtgtcatcctcaagatgcagtctcatgggcagtggtttgaggttgacaggactgaggtgattcgcacctgcataaacccagtgtactcaaaactgtttactgtggacttttactttgaggaggtgcagcgcctgcggtttgaagtccatgacatcagcagcaaccacaatgggctgaaggaggccgacttccttggtggcatggagtgcacacttggccagattgtttcccagagaaagctgtccaaatccttgctgaagcatgggaacacagcagggaaatcttccatcacggtgattgctgaagaattatctggcaatgacgactatgttgagcttgcattcaatgcacggaaattggatgacaag

SEQ ID NO: 234233 - DNA, 510 bp, Artificial Sequence
  derived and/or modified sequence
atgaagaaaatgtctaatatatatgagagcgctgctaacaccctggggatctttaactcaccttgtctgaccaaagtagagttacgtgtcgcatgcaaaggcatttctgaccgagatgctctgtccaagcccgatccatgtgtgatcctgaagatgcagagtcacggccaatggtttgaggtggatagaaccgaggtaatccggacatgcattaacccagtctattccaagttattcactgtggatttttacttcgaggaggtgcagagacttcgctttgaggtgcatgatataagctctaaccacaatggactgaaggaagcagatttcttaggtggcatggaatgtaccctggggcagattgtttcacagagaaaactgtctaagtcactgcttaagcatggcaatactgctgggaaatccagcataacagtgatcgccgaagaactgtcagggaacgatgactacgtggagctcgcctttaacgcacggaaacttgatgataaatag

SEQ ID NO: 234234 - DNA, 510 bp, Artificial Sequence
  derived and/or modified sequence
atgaagaagatgagcaacatctatgagagcgctgccaacaccctgggcatcttcaacagcccctgcctgaccaaggtggagctgcgggtggcctgcaagggcatcagtgacagagatgccctgagcaagccagacccctgtgtgatcctgaagatgcagagccacggccagtggtttgaggtggacagaacagaggtgatccgcacctgcatcaaccctgtgtacagcaagctgttcaccgtggacttctactttgaggaggtgcagaggctgcgctttgaggtgcatgacatcagcagcaaccacaacggcctgaaggaggccgacttcctgggcggcatggagtgcaccctgggccagatcgtgtcccagaggaagctgagcaagagcctgctgaagcacggcaacacagctgggaagagcagcatcaccgtgattgctgaggagctgtctggaaatgatgattatgtggagctggccttcaatgccaggaagctggatgacaagtag

SEQ ID NO: 234235 - DNA, 510 bp, Artificial Sequence
  derived and/or modified sequence
atgaagaagatgagcaacatctacgagagcgccgccaacaccctggggatttttaacagcccgtgcctgactaaggttgaactccgcgtcgcatgcaagggaatctctgacagggatgccctaagcaagccggatccctgtgtcatcctcaagatgcagtctcatgggcagtggtttgaagtggaccgaaccgaggtgattcgaacatgtatcaatcctgtctactccaaactttttactgtagatttttatttcgaggaggtgcaacgtctgcgattcgaggtccacgacattagcagtaaccataacggtctaaaggaggcggattttctggggggcatggaatgcacactagggcaaattgtgtctcagcgcaaactgtccaagtcacttctaaaacacggtaacaccgcaggaaaatccagtatcacagttatcgctgaggagctgtctggtaacgacgattatgtggagctggccttcaatgcacgcaagctggacgataaatag

SEQ ID NO: 234236 - DNA, 510 bp, Artificial Sequence
  derived and/or modified sequence
atgaaaaagatgtctaacatatacgagagcgccgctaatactctaggaatatttaactccccatgtctgactaaggtggaattaagggtggcctgtaaagggatttccgatcgggatgcactttccaagcccgacccatgcgtcatacttaagatgcagagccacgggcagtggtttgaagtggaccgcacagaagtgataagaacatgcatcaatcctgtgtatagcaaactattcacagtcgacttctatttcgaggaagtccaacggctgcgcttcgaagtacacgacatctctagtaaccacaacgggctgaaagaggccgactttctgggaggaatggagtgcacactgggacaaattgttagccagagaaagcttagcaaaagtttactgaaacacggcaatacggccggaaagagttctataacagtgattgctgaggaattgtcagggaacgacgactacgttgagctcgcattcaacgctcgaaagctcgacgacaagtag

SEQ ID NO: 234237 - protein, 445 aa, Artificial Sequence
  derived and/or modified sequence
MMEESGIETTPPGTPPPNPAGLAATAMSSTPVPLAATSSFSSPNVSSMESFPPLAYSTPQPPLPPVRPSAPLPFVPPPAVPSVPPLVTSMPPPVSPSTAAAFGNPPVSHFPPSTSAPNTLLPAPPSGPPISGFSVGSTYDITRGHAGRAPQTPLMPSFSAPSGTGLLPTPITQQASLTSLAQGTGTTSAITFPEEQEDPRITRGQDEASAGGIWGFIKGVAGNPMVKSVLDKTKHSVESMITTLDPGMAPYIKSGGELDIVVTSNKEVKVAAVRDAFQEVFGLAVVVGEAGQSNIAPQPVGYAAGLKGAQERIDSLRRTGVIHEKQTAVSVENFIAELLPDKWFDIGCLVVEDPVHGIHLETFTQATPVPLEFVQQAQSLTPQDYNLRWSGLLVTVGEVLEKSLLNVSRTDWHMAFTGMSRRQMIYSAARAIAGMYKQRLPPRTV

SEQ ID NO: 234238 - protein, 464 aa, Artificial Sequence
  derived and/or modified sequence
MMEESGIETTPPGTPPPNPAGLAATAMSSTPVPLAATSSFSSPNVSSMESFPPLAYSTPQPPLPPVRPSAPLPFVPPPAVPSVPPLVTSMPPPVSPSTAAAFGNPPVSHFPPSTSAPNTLLPAPPSGPPISGFSVGSTYDITRGHAGRAPQTPLMPSFSAPSGTGLLPTPITQQASLTSLAQGTGTTSAITFPEEQEDPRITRGQDEASAGGIWGFIKGVAGNPMVKSVLDKTKHSVESMITTLDPGMAPYIKSGGELDIVVTSNKEVKVAAVRDAFQEVFGLAVVVGEAGQSNIAPQPVGYAAGLKGAQERIDSLRRTGVIHEKQTAVSVENFIAELLPDKWFDIGCLVVEDPVHGIHLETFTQATPVPLEFVQQAQSLTPQDYNLRWSGLLVTVGEVLEKSLLNVSRTDWHMAFTGMSRRQMIYSAARAIANPQRAVAVHGLVEARNFPAPGDLVSLLLGTV

SEQ ID NO: 234239 - protein, 311 aa, Artificial Sequence
  derived and/or modified sequence
MMEESGIETTPPGTPPPNPAGLAATAMSSTPVPLAATSSFSSPNVSSMESFPPLAYSTPQPPLPPVRPSAPLPFVPPPAVPSVPPLVTSMPPPVSPSTAAAFGNPPVSHFPPSTSAPNTLLPAPPSGPPISGFSVGSTYDITRGHAGRAPQTPLMPSFSAPSGTGLLPTPITQQASLTSLAQGTGTTSAITFPEEQEDPRITRGQDEASAGGIWGFIKGVAGNPMVKSVLDKTKHSVESMITTLDPGMAPYIKSGGELDIVVTSNKEVKVAAVRDAFQEVFGLAVVVGEAGQSNIAPQPVGYAAGLKGANR

SEQ ID NO: 234240 - protein, 418 aa, Artificial Sequence
  derived and/or modified sequence
MMEESGIETTPPGTPPPNPAGLAATAMSSTPVPLAATSSFSSPNVSSMESFPPLAYSTPQPPLPPVRPSAPLPFVPPPAVPSVPPLVTSMPPPVSPSTAAAFGNPPVSHFPPSTSAPNTLLPAPPSGPPISGFSVGSTYDITRGHAGRAPQTPLMPSFSAPSGTGLLPTPITQQASLTSLAQGTGTTSAITFPEEQEDPRITRGQDEASAGGIWGFIKGVAGNPMVKSVLDKTKHSVESMITTLDPGMAPYIKSGGELDIVVTSNKEVKVAAVRDAFQEVFGLAVVVGEAGQSNIAPQPVGYAAGLKGAQERIDSLRRTGVIHEKQTAVSVENFIAELLPDKWFDIGCLVVEDPVHGIHLETFTQATPVPLEFVQQVGFLLCFFIMLQRNLHYCFQNKNLFGFFVRNMFLILFQSFFF

SEQ ID NO: 234241 - protein, 445 aa, Artificial Sequence
  derived and/or modified sequence
MMEESGIETTPPGTPPPNPAGLAATAMSSTPVPLAATSSFSSPNVSSMESFPPLAYSTPQPPLPPVRPSAPLPFVPPPAVPSVPPLVTSMPPPVSPSTAAAFGNPPVSHFPPSTSAPNTLLPAPPSGPPISGFSVGSTYDITRGHAGRAPQTPLMPSFSAPSGTGLLPTPITQQASLTSLAQGTGTTSAITFPEEQEDPRITRGQDEASAGGIWGFIKGVAGNPMVKSVLDKTKHSVESMITTLDPGMAPYIKSGGELDIVVTSNKEVKVAAVRDAFQEVFGLAVVVGEAGQSNIAPQPVGYAAGLKGAQERIDSLRRTGVIHEKQTAVSVENFIAELLPDKWFDIGCLVVEDPVHGIHLETFTQATPVPLEFVQQAQSLTPQDYNLRWSGLLVTVGEVLEKSLLNVSRTDWHMAFTGMSRRQMIYSAARAIAESPKSSGSPWLG

SEQ ID NO: 234242 - DNA, 1338 bp, Artificial Sequence
  derived and/or modified sequence
atgatggaggagagcggcatcgagaccaccccccccggcacccccccccccaaccccgccggcctggccgccaccgccatgagcagcacccccgtgcccctggccgccaccagcagcttcagcagccccaacgtgagcagcatggagagcttcccccccctggcctacagcaccccccagccccccctgccccccgtgagacccagcgcccccctgcccttcgtgcccccccccgccgtgcccagcgtgccccccctggtgaccagcatgcccccccccgtgagccccagcaccgccgccgccttcggcaacccccccgtgagccacttcccccccagcaccagcgcccccaacaccctgctgcccgccccccccagcggcccccccatcagcggcttcagcgtgggcagcacctacgacatcaccagaggccacgccggcagagccccccagacccccctgatgcccagcttcagcgcccccagcggcaccggcctgctgcccacccccatcacccagcaggccagcctgaccagcctggcccagggcaccggcaccaccagcgccatcaccttccccgaggagcaggaggaccccagaatcaccagaggccaggacgaggccagcgccggcggcatctggggcttcatcaagggcgtggccggcaaccccatggtgaagagcgtgctggacaagaccaagcacagcgtggagagcatgatcaccaccctggaccccggcatggccccctacatcaagagcggcggcgagctggacatcgtggtgaccagcaacaaggaggtgaaggtggccgccgtgagagacgccttccaggaggtgttcggcctggccgtggtggtgggcgaggccggccagagcaacatcgccccccagcccgtgggctacgccgccggcctgaagggcgcccaggagagaatcgacagcctgagaagaaccggcgtgatccacgagaagcagaccgccgtgagcgtggagaacttcatcgccgagctgctgcccgacaagtggttcgacatcggctgcctggtggtggaggaccccgtgcacggcatccacctggagaccttcacccaggccacccccgtgcccctggagttcgtgcagcaggcccagagcctgaccccccaggactacaacctgagatggagcggcctgctggtgaccgtgggcgaggtgctggagaagagcctgctgaacgtgagcagaaccgactggcacatggccttcaccggcatgagcagaagacagatgatctacagcgccgccagagccatcgccggcatgtacaagcagagactgccccccagaaccgtgtag

SEQ ID NO: 234243 - DNA, 1395 bp, Artificial Sequence
  derived and/or modified sequence
atgatggaggagagcggcatcgagaccaccccccccggcacccccccccccaaccccgccggcctggccgccaccgccatgagcagcacccccgtgcccctggccgccaccagcagcttcagcagccccaacgtgagcagcatggagagcttcccccccctggcctacagcaccccccagccccccctgccccccgtgagacccagcgcccccctgcccttcgtgcccccccccgccgtgcccagcgtgccccccctggtgaccagcatgcccccccccgtgagccccagcaccgccgccgccttcggcaacccccccgtgagccacttcccccccagcaccagcgcccccaacaccctgctgcccgccccccccagcggcccccccatcagcggcttcagcgtgggcagcacctacgacatcaccagaggccacgccggcagagccccccagacccccctgatgcccagcttcagcgcccccagcggcaccggcctgctgcccacccccatcacccagcaggccagcctgaccagcctggcccagggcaccggcaccaccagcgccatcaccttccccgaggagcaggaggaccccagaatcaccagaggccaggacgaggccagcgccggcggcatctggggcttcatcaagggcgtggccggcaaccccatggtgaagagcgtgctggacaagaccaagcacagcgtggagagcatgatcaccaccctggaccccggcatggccccctacatcaagagcggcggcgagctggacatcgtggtgaccagcaacaaggaggtgaaggtggccgccgtgagagacgccttccaggaggtgttcggcctggccgtggtggtgggcgaggccggccagagcaacatcgccccccagcccgtgggctacgccgccggcctgaagggcgcccaggagagaatcgacagcctgagaagaaccggcgtgatccacgagaagcagaccgccgtgagcgtggagaacttcatcgccgagctgctgcccgacaagtggttcgacatcggctgcctggtggtggaggaccccgtgcacggcatccacctggagaccttcacccaggccacccccgtgcccctggagttcgtgcagcaggcccagagcctgaccccccaggactacaacctgagatggagcggcctgctggtgaccgtgggcgaggtgctggagaagagcctgctgaacgtgagcagaaccgactggcacatggccttcaccggcatgagcagaagacagatgatctacagcgccgccagagccatcgccaacccccagagagccgtggccgtgcacggcctggtggaggccagaaacttccccgcccccggcgacctggtgagcctgctgctgggcaccgtgtag

SEQ ID NO: 234244 - DNA, 936 bp, Artificial Sequence
  derived and/or modified sequence
atgatggaggagagcggcatcgagaccaccccccccggcacccccccccccaaccccgccggcctggccgccaccgccatgagcagcacccccgtgcccctggccgccaccagcagcttcagcagccccaacgtgagcagcatggagagcttcccccccctggcctacagcaccccccagccccccctgccccccgtgagacccagcgcccccctgcccttcgtgcccccccccgccgtgcccagcgtgccccccctggtgaccagcatgcccccccccgtgagccccagcaccgccgccgccttcggcaacccccccgtgagccacttcccccccagcaccagcgcccccaacaccctgctgcccgccccccccagcggcccccccatcagcggcttcagcgtgggcagcacctacgacatcaccagaggccacgccggcagagccccccagacccccctgatgcccagcttcagcgcccccagcggcaccggcctgctgcccacccccatcacccagcaggccagcctgaccagcctggcccagggcaccggcaccaccagcgccatcaccttccccgaggagcaggaggaccccagaatcaccagaggccaggacgaggccagcgccggcggcatctggggcttcatcaagggcgtggccggcaaccccatggtgaagagcgtgctggacaagaccaagcacagcgtggagagcatgatcaccaccctggaccccggcatggccccctacatcaagagcggcggcgagctggacatcgtggtgaccagcaacaaggaggtgaaggtggccgccgtgagagacgccttccaggaggtgttcggcctggccgtggtggtgggcgaggccggccagagcaacatcgccccccagcccgtgggctacgccgccggcctgaagggcgccaacagatag

SEQ ID NO: 234245 - DNA, 1257 bp, Artificial Sequence
  derived and/or modified sequence
atgatggaggagagcggcatcgagaccaccccccccggcacccccccccccaaccccgccggcctggccgccaccgccatgagcagcacccccgtgcccctggccgccaccagcagcttcagcagccccaacgtgagcagcatggagagcttcccccccctggcctacagcaccccccagccccccctgccccccgtgagacccagcgcccccctgcccttcgtgcccccccccgccgtgcccagcgtgccccccctggtgaccagcatgcccccccccgtgagccccagcaccgccgccgccttcggcaacccccccgtgagccacttcccccccagcaccagcgcccccaacaccctgctgcccgccccccccagcggcccccccatcagcggcttcagcgtgggcagcacctacgacatcaccagaggccacgccggcagagccccccagacccccctgatgcccagcttcagcgcccccagcggcaccggcctgctgcccacccccatcacccagcaggccagcctgaccagcctggcccagggcaccggcaccaccagcgccatcaccttccccgaggagcaggaggaccccagaatcaccagaggccaggacgaggccagcgccggcggcatctggggcttcatcaagggcgtggccggcaaccccatggtgaagagcgtgctggacaagaccaagcacagcgtggagagcatgatcaccaccctggaccccggcatggccccctacatcaagagcggcggcgagctggacatcgtggtgaccagcaacaaggaggtgaaggtggccgccgtgagagacgccttccaggaggtgttcggcctggccgtggtggtgggcgaggccggccagagcaacatcgccccccagcccgtgggctacgccgccggcctgaagggcgcccaggagagaatcgacagcctgagaagaaccggcgtgatccacgagaagcagaccgccgtgagcgtggagaacttcatcgccgagctgctgcccgacaagtggttcgacatcggctgcctggtggtggaggaccccgtgcacggcatccacctggagaccttcacccaggccacccccgtgcccctggagttcgtgcagcaggtgggcttcctgctgtgcttcttcatcatgctgcagagaaacctgcactactgcttccagaacaagaacctgttcggcttcttcgtgagaaacatgttcctgatcctgttccagagcttcttcttctag

SEQ ID NO: 234246 - DNA, 1338 bp, Artificial Sequence
  derived and/or modified sequence
atgatggaggagtctggaatcgagacaacaccaccggggacccctccccccaacccggccggtctggccgctactgccatgtcatctaccccagtaccccttgctgcaacctccagttttagctctcccaatgtgagctctatggagtccttcccccctcttgcctattctacaccgcagccacccctgccaccagtgagaccgtctgctcctctcccatttgttccaccacccgcagtgccctcggtaccacctttggtgactagtatgcccccgcccgtaagtcctagtaccgctgcagcatttggaaatccgcccgttagccattttcccccttctactagtgccccgaacacactgctgccagcccccccatccggccctcccatctccggattttcagtgggtagtacatatgatatcacgcgcgggcacgcgggcagagctccccagacaccgcttatgccttctttctcagcccctagcggtacaggccttctgccaaccccgattacgcagcaagcatctcttacttcattagctcagggtactggtaccacaagcgctatcacattcccagaagagcaagaggaccctcgaattactaggggccaggatgaagccagcgccggtggaatatggggattcatcaaaggcgtcgctggcaacccaatggttaaatcagtgctcgataaaacaaagcacagtgtagagagcatgatcaccaccctcgatccagggatggctccatatatcaagtcagggggagagctcgatattgtagtgacgtctaataaggaggtaaaagtggctgcggtacgcgacgccttccaggaggtttttggtttagcagtggtcgttggagaagccggccagagcaacatcgccccgcagccagtcggttatgctgccggcctaaagggcgcccaagaaagaatcgattctttaaggcggacgggagtcatccatgagaagcagaccgccgtaagcgttgagaacttcattgccgagttgcttcctgataagtggttcgacattgggtgcctcgtggtcgaggatcccgtgcacggcatccacttggagaccttcactcaggccactcctgtgcccctagagttcgttcaacaagctcagtcactgaccccacaagattacaacttacgctggagtggattgctcgtcaccgtgggcgaggtcctcgaaaaaagcctgttaaatgtctctagaaccgattggcacatggcctttactggcatgagccgtagacagatgatttacagcgcagcccgcgccatagccgggatgtacaaacagcggctgccccctcgcactgtgtag

SEQ ID NO: 234247 - DNA, 1395 bp, Artificial Sequence
  derived and/or modified sequence
atgatggaggaaagcggcatcgaaacgacccctccaggtaccccaccccccaacccggctgggctggctgccacagctatgagtagtactcctgtgcctctagcggctacctcaagcttctcctccccaaacgtgagctccatggagtcttttccccctctggcctacagcaccccccagccaccactcccgcctgtacgacccagcgccccactcccttttgttccacccccagcggtcccatccgtgccgcctctggtcacctctatgcctccccccgtttctccatccaccgccgctgctttcggaaatccccctgtgtctcactttcctcccagtacgagcgccccgaacacacttctccctgcaccgccaagcggcccccccatctccggtttctccgtcgggagcacttacgacatcaccagaggtcacgcaggtagggccccacagactcccctgatgccatctttttcagcgccatcgggcacaggcttgctgccgacacccataacccagcaggccagcctgaccagtttggcccagggtacaggcaccacatccgcaatcacattccctgaggagcaagaagatccaaggattacacgggggcaggacgaggccagcgcagggggaatttgggggttcatcaagggtgtggcaggaaatcccatggtgaagagtgttctggataaaacaaaacacagcgtagaatcgatgataacaactctggaccccgggatggcgccgtacatcaaaagcggaggagagctggacatcgtggtgacctccaacaaggaggtgaaggtcgcggcggtcagagacgcatttcaagaagtgtttggccttgccgttgtggtcggcgaagcaggccaatccaatatcgccccacagccagtaggttatgcggccggcctgaaaggagcccaggaaagaattgattctcttaggaggaccggagtcatccatgaaaagcagactgccgtgtctgttgaaaattttatcgctgaactcctccctgataagtggttcgacattggatgcctggtggtcgaagacccggtgcatggcatacatctggagaccttcacacaggccacccccgtgcctctggaattcgtgcagcaggcccagagcctgacgccacaggactacaatctgcggtggtccggtttactcgtcaccgtgggggaggttttggagaagagcctacttaatgtttctcgaaccgactggcacatggccttcactggcatgagtagaagacagatgatctattctgccgctcgcgcaatcgctaacccgcaacgtgcagtcgcggtgcacggcctcgtggaggcccgtaacttcccagcacctggggatctcgtgagtctcctgctgggaactgtctag

SEQ ID NO: 234248 - DNA, 936 bp, Artificial Sequence
  derived and/or modified sequence
atgatggaagaatctgggatcgagactacacccccaggcactccacctccaaatcctgccggacttgctgcgactgccatgagctccacacctgttcccctcgcagctacttcctcctttagctccccaaacgtgtcttctatggaatccttccctcctttagcctacagcactccgcagcccccactgccacctgttcgtccttctgcccccctcccattcgtacccccccctgcagttcctagcgtcccacctcttgtaacaagcatgccgcctccagtttcaccttcgacggctgccgcctttggtaaccctccagtcagtcatttcccaccatcaacatctgcacctaataccctcctgccggcccccccgtctgggcctcccatatctggcttctccgtggggagcacttacgacatcactcgaggccacgcggggcgtgctcctcagactcctctgatgccgagttttagcgccccaagcggtacaggattgctgccgacacctatcacacagcaagctagcctgacctcccttgcccaggggacaggcacaacctccgctatcaccttccccgaagaacaggaggacccccggatcacacgaggtcaggacgaggccagtgccggcggcatctgggggttcatcaagggcgtagcaggtaacccaatggtgaaatccgtgcttgataagaccaaacactctgtggaatcaatgatcacaacccttgatccggggatggccccatacatcaagtcaggtggcgaactggatatcgtggtcacatctaataaagaggtcaaagttgctgctgtgcgcgatgcgtttcaggaggtgttcggcctggccgttgtggtgggcgaagccggacagtctaatattgctccccagcccgtgggatacgctgcaggtctgaagggcgccaatcgctag

SEQ ID NO: 234249 - DNA, 1257 bp, Artificial Sequence
  derived and/or modified sequence
atgatggaggagtcgggaatagaaactacgccgcccggtacgcctccccccaatcccgcgggcctagcggccacggccatgagctccaccccggtgcccctagctgccactagctctttctctagcccgaacgtgtcttccatggaaagtttccctccgttagcatattcgacaccacaaccccccctgcctcctgtacggccatctgccccactaccattcgtacctccccccgcggtgccttctgtacctcctctagtgaccagcatgcctccccctgtctcaccttccactgcagccgcttttggaaatccaccagtgagccactttccaccttcaacgagcgccccaaataccctccttcccgcgcctccatctgggccccctatcagcggattttccgtcgggagcacctatgatatcactcggggccatgctgggcgggcaccccagactcctctcatgccatcattctctgcccccagtgggaccggactgctccccactccgatcactcagcaagcatctctgacatcactcgcccaggggacagggactactagcgcgatcacattccctgaagaacaggaagatcccagaatcactcgaggccaggacgaggcctctgctggcggcatttggggatttatcaagggagttgcaggtaatcccatggtgaaaagtgtgcttgataagactaagcattccgttgagtccatgattactaccttggatcccggcatggccccctatatcaagtctggcggggagctggacattgtcgtcacttccaataaggaagtgaaagtggctgcggttagagacgctttccaggaagtttttgggttggcagtagtggtgggggaggccgggcagagcaacattgctccccagcctgtggggtatgccgctggactcaaaggcgcgcaggaacgaatcgattcgttgagaagaaccggcgtaatacatgagaaacagacggcggtctcggttgaaaattttatcgccgaattactgcctgacaaatggtttgacatcggttgtctcgtcgttgaggatccagtccacggcatccaccttgaaacattcacccaagctacccccgtgcccctggagttcgtccagcaggtgggctttcttctctgcttttttattatgctgcagaggaatttgcattactgcttccagaacaaaaatttgtttggtttcttcgtaaggaacatgttccttattctcttccaatctttttttttttag

SEQ ID NO: 234250 - DNA, 1338 bp, Artificial Sequence
  derived and/or modified sequence
atgatggaggagagcggcatcgagaccaccccacctggcaccccaccacccaacccagctggcctggccgccacagccatgagcagcacccctgtgcccctggccgccaccagcagcttcagcagccccaacgtgtcctccatggagagcttcccccccctggcctacagcaccccccagccccccctgccccctgtgcggcccagcgcccccctgccctttgtgcccccacctgctgtgcccagcgtgccccccctggtgacctccatgcctcctcctgtgagccccagcacagctgctgccttcggcaacccccctgtgagccacttcccccccagcaccagcgcccccaacaccctgctgcctgccccacccagcggcccccccatcagcggcttctctgtgggcagcacctatgacatcacccggggccacgccggccgggccccccagacccccctgatgcccagcttcagcgcccccagcggcaccggcctgctgcccacccccatcacccagcaggccagcctgaccagcctggcccagggcaccggcaccaccagcgccatcaccttccctgaggagcaggaggacccccgcatcacccggggccaggatgaggccagcgctgggggcatctggggcttcatcaagggcgtggccggcaaccccatggtgaagtctgtgctggacaagaccaagcacagcgtggagagcatgatcaccaccctggaccccggcatggccccctacatcaagagcggcggggagctggacatcgtggtgaccagcaacaaggaggtgaaggtggccgctgtgagagatgccttccaggaggtgtttggcctggccgtggtggtgggggaggccggccagagcaacatcgccccccagcctgtgggctatgctgctggcctgaagggggcccaggagagaattgacagcctgcggaggactggagtcatccacgagaagcagacagctgtgtctgtggagaacttcatcgccgagctgctgcctgacaagtggtttgacatcggctgcctggtggtggaggaccctgtgcacggcatccacctggagaccttcacccaggccacccctgtgcccctggagtttgtgcagcaggcccagagcctgaccccccaggactacaacctgcgctggagcggcctgctggtgacagtgggggaggtgctggagaagagcctgctgaatgtgtccaggacagactggcacatggccttcaccggcatgagccggcggcagatgatctacagcgctgcccgggccatcgccggcatgtacaagcagaggctgccccccaggacagtgtag

SEQ ID NO: 234251 - DNA, 1395 bp, Artificial Sequence
  derived and/or modified sequence
atgatggaggagagcggcatcgagaccaccccacctggcaccccaccacccaacccagctggcctggccgccacagccatgagcagcacccctgtgcccctggccgccaccagcagcttcagcagccccaacgtgtcctccatggagagcttcccccccctggcctacagcaccccccagccccccctgccccctgtgcggcccagcgcccccctgccctttgtgcccccacctgctgtgcccagcgtgccccccctggtgacctccatgcctcctcctgtgagccccagcacagctgctgccttcggcaacccccctgtgagccacttcccccccagcaccagcgcccccaacaccctgctgcctgccccacccagcggcccccccatcagcggcttctctgtgggcagcacctatgacatcacccggggccacgccggccgggccccccagacccccctgatgcccagcttcagcgcccccagcggcaccggcctgctgcccacccccatcacccagcaggccagcctgaccagcctggcccagggcaccggcaccaccagcgccatcaccttccctgaggagcaggaggacccccgcatcacccggggccaggatgaggccagcgctgggggcatctggggcttcatcaagggcgtggccggcaaccccatggtgaagtctgtgctggacaagaccaagcacagcgtggagagcatgatcaccaccctggaccccggcatggccccctacatcaagagcggcggggagctggacatcgtggtgaccagcaacaaggaggtgaaggtggccgctgtgagagatgccttccaggaggtgtttggcctggccgtggtggtgggggaggccggccagagcaacatcgccccccagcctgtgggctatgctgctggcctgaagggggcccaggagagaattgacagcctgcggaggactggagtcatccacgagaagcagacagctgtgtctgtggagaacttcatcgccgagctgctgcctgacaagtggtttgacatcggctgcctggtggtggaggaccctgtgcacggcatccacctggagaccttcacccaggccacccctgtgcccctggagtttgtgcagcaggcccagagcctgaccccccaggactacaacctgcgctggagcggcctgctggtgacagtgggggaggtgctggagaagagcctgctgaatgtgtccaggacagactggcacatggccttcaccggcatgagccggcggcagatgatctacagcgctgcccgggccatcgccaacccccagagagctgtggccgtgcacggcctggtggaggccaggaacttccctgcccctggggacctggtgtccctgctgctgggcaccgtgtag

SEQ ID NO: 234252 - DNA, 936 bp, Artificial Sequence
  derived and/or modified sequence
atgatggaggagagcggcatcgagaccaccccacctggcaccccaccacccaacccagctggcctggccgccacagccatgagcagcacccctgtgcccctggccgccaccagcagcttcagcagccccaacgtgtcctccatggagagcttcccccccctggcctacagcaccccccagccccccctgccccctgtgcggcccagcgcccccctgccctttgtgcccccacctgctgtgcccagcgtgccccccctggtgacctccatgcctcctcctgtgagccccagcacagctgctgccttcggcaacccccctgtgagccacttcccccccagcaccagcgcccccaacaccctgctgcctgccccacccagcggcccccccatcagcggcttctctgtgggcagcacctatgacatcacccggggccacgccggccgggccccccagacccccctgatgcccagcttcagcgcccccagcggcaccggcctgctgcccacccccatcacccagcaggccagcctgaccagcctggcccagggcaccggcaccaccagcgccatcaccttccctgaggagcaggaggacccccgcatcacccggggccaggatgaggccagcgctgggggcatctggggcttcatcaagggcgtggccggcaaccccatggtgaagtctgtgctggacaagaccaagcacagcgtggagagcatgatcaccaccctggaccccggcatggccccctacatcaagagcggcggggagctggacatcgtggtgaccagcaacaaggaggtgaaggtggccgctgtgagagatgccttccaggaggtgtttggcctggccgtggtggtgggggaggccggccagagcaacatcgccccccagcctgtgggctatgctgctggcctgaagggggccaacagatag

SEQ ID NO: 234253 - DNA, 1257 bp, Artificial Sequence
  derived and/or modified sequence
atgatggaggagagcggcatcgagaccaccccacctggcaccccaccacccaacccagctggcctggccgccacagccatgagcagcacccctgtgcccctggccgccaccagcagcttcagcagccccaacgtgtcctccatggagagcttcccccccctggcctacagcaccccccagccccccctgccccctgtgcggcccagcgcccccctgccctttgtgcccccacctgctgtgcccagcgtgccccccctggtgacctccatgcctcctcctgtgagccccagcacagctgctgccttcggcaacccccctgtgagccacttcccccccagcaccagcgcccccaacaccctgctgcctgccccacccagcggcccccccatcagcggcttctctgtgggcagcacctatgacatcacccggggccacgccggccgggccccccagacccccctgatgcccagcttcagcgcccccagcggcaccggcctgctgcccacccccatcacccagcaggccagcctgaccagcctggcccagggcaccggcaccaccagcgccatcaccttccctgaggagcaggaggacccccgcatcacccggggccaggatgaggccagcgctgggggcatctggggcttcatcaagggcgtggccggcaaccccatggtgaagtctgtgctggacaagaccaagcacagcgtggagagcatgatcaccaccctggaccccggcatggccccctacatcaagagcggcggggagctggacatcgtggtgaccagcaacaaggaggtgaaggtggccgctgtgagagatgccttccaggaggtgtttggcctggccgtggtggtgggggaggccggccagagcaacatcgccccccagcctgtgggctatgctgctggcctgaagggggcccaggagagaattgacagcctgcggaggactggagtcatccacgagaagcagacagctgtgtctgtggagaacttcatcgccgagctgctgcctgacaagtggtttgacatcggctgcctggtggtggaggaccctgtgcacggcatccacctggagaccttcacccaggccacccctgtgcccctggagtttgtgcagcaggtgggcttcctgctgtgcttcttcatcatgctgcagaggaacctgcactactgcttccagaacaagaacctgtttggcttctttgtgaggaacatgttcctgatcctcttccagagcttcttcttctag

SEQ ID NO: 234254 - DNA, 1338 bp, Artificial Sequence
  derived and/or modified sequence
atgatggaggagagcggcatcgagaccaccccccccggcacccccccacccaaccccgccgggctggcggccaccgccatgagtagcactccagtacctttagcagcaacaagcagcttttcaagcccaaatgttagttccatggagagcttccctcccttggcgtatagcaccccgcagcctcccctcccgcccgtgcggcctagcgctcctctgcccttcgtcccgccaccggcagtgccgtccgtgccacccttagtgacttcaatgccacctcctgtcagtccctccaccgctgctgccttcggaaatcctcccgtctcgcatttccctccgtccacatccgccccaaacactctgcttccagcaccgccatccggccctcccatttcaggattcagtgtgggatctacttacgatattacaaggggccatgcagggcgggccccccaaacaccattaatgccatcattctctgcacctagcggcactgggctgttgcccactcccatcacacagcaggcctcactgacaagtctcgcccaggggaccggcaccacttccgccataacttttccagaggagcaggaggacccgagaattacgagaggtcaggatgaggccagcgccggaggtatatggggctttattaagggagttgccggcaaccccatggtgaaatccgttctggacaagaccaagcattctgtggaatcgatgataactacgctggatcctggaatggctccatacataaaaagcggcggggaactagacatcgttgttacatcaaacaaggaggtcaaggtcgcagcggtgagagacgccttccaggaggtcttcggcttggcagttgtcgttggcgaggccggacagagcaatattgcgccacaaccggttgggtacgcagctggcctgaaaggggcgcaagagcgaatagatagtctgcggcgcacaggcgtaatccacgagaaacagacagctgtgtcagtggaaaatttcatagcggagctgttgccagacaagtggtttgatatcgggtgtctagtcgtggaggaccctgtgcacgggatacacctagagactttcactcaagcaaccccagtgccgctcgaattcgtacagcaggctcagtcgctgaccccccaggactacaatctgcgttggtccggtttgctggtgacagtcggcgaagtgctcgagaagagcctgctcaatgtatccagaactgattggcatatggctttcaccggcatgtctaggaggcagatgatttatagcgccgctcgagccattgcaggaatgtataaacagagactaccccctcgcaccgtgtag

SEQ ID NO: 234255 - DNA, 1395 bp, Artificial Sequence
  derived and/or modified sequence
atgatggaggagagcggcatcgagaccaccccccccggcacccccccgcccaatcctgctggcctggctgcaactgctatgtcctccacgcccgtgccactcgccgccacctcgtcatttagttcaccaaatgtcagctccatggaatcatttcctccgctggcatatagcactcctcagcctcctctcccaccggtgagaccatccgccccactgccttttgttccccctcctgccgtgccaagcgtaccccctctagtgactagtatgccgccgccagtaagcccatcaactgccgctgctttcggcaacccgcctgtgtctcacttccccccctcaacttctgctcccaacacattactgccggctccaccatctggcccacccatttcagggtttagcgtcggtagcacgtatgatattacccgcggacacgccgggcgtgcccctcagaccccccttatgccaagttttagcgccccttctgggacgggcctgctcccaaccccaattacccaacaggccagcctgacctcactggcccagggtaccgggaccacgtctgccatcactttccctgaggaacaagaagatcctagaattacaaggggccaagatgaagcatcggccgggggaatctgggggtttatcaagggagtagccggcaaccctatggtgaaatccgttctggataagaccaagcacagtgttgagtctatgatcactaccctggaccctggcatggccccatatatcaagagtgggggggagttggacatcgttgtgacaagcaacaaagaggtgaaagttgcagctgtgcgagacgcctttcaggaagtcttcgggctcgccgtggtagtgggcgaagctggccagtcaaatatcgccccccaacccgtcggttatgcagctggtctgaaaggagcccaggagcggatcgattctctcaggcggacgggggtgatccatgagaagcagacggccgtgagcgtcgagaacttcattgccgaactgctgccggacaagtggtttgatatagggtgtctggtggtggaggatcctgtgcatggcatccacctggagacattcacacaggctacacctgtgcccctcgagttcgtacagcaagcccagtctctgacacctcaggattataacttacgatggtcaggactcctggtgactgttggggaggtcttggagaagagcttgctcaatgtcagccgtacagactggcacatggcatttaccggcatgagtcgccggcaaatgatctactccgcagcccgggctatcgctaatccgcaacgcgcggtggcagtgcacgggctggtggaggctcgaaatttcccagctcctggggatctggtaagtttgctcttggggacagtctag

SEQ ID NO: 234256 - DNA, 936 bp, Artificial Sequence
  derived and/or modified sequence
atgatggaggagagcggcatcgagaccaccccccccggcacccccccccctaaccctgctggcctggccgccaccgccatgtctagtacaccagtgcccctcgcagcaacctccagtttctctagccccaacgtgtccagtatggagtcatttcctccactcgcttatagtacacctcaaccacccctccccccagtgaggcctagcgcgcccctcccctttgtgcctcctcctgcagtgccctccgtcccccctctggtgactagcatgccacctcctgtgtcgccgagtacagccgccgcattcggtaatccaccagtgtcacacttcccaccttcaacgagtgcacccaatacccttctccctgcacctcctagtggacccccaatttccggcttttccgtggggagcacttacgatattacaaggggtcatgccgggcgtgccccacaaaccccacttatgccatcatttagcgcgcctagcgggaccggactgctgccgacccctataactcagcaggcatctctgacctcgctcgcccagggaacgggcaccacatctgccatcactttcccagaagagcaggaagatcccaggataactcggggccaggacgaggccagcgccgggggtatatggggcttcataaaaggggttgctggaaacccaatggttaaaagcgtgctggataagaccaaacattcagtagaaagcatgatcaccacactggatcctggcatggctccctatattaagtctgggggtgagctggatattgtcgtcacttctaacaaagaagtgaaagtggccgccgtgcgcgacgccttccaggaagtctttggactggcagttgtggtgggtgaggcaggacagtcaaacattgctcctcagccagtgggttacgccgctgggttgaagggggccaacagatag

SEQ ID NO: 234257 - DNA, 1257 bp, Artificial Sequence
  derived and/or modified sequence
atgatggaggagagcggcatcgagaccaccccccccggcaccccccctcctaatcccgccggtttagcagcgacagcgatgtcctccactccggttcctctcgctgctactagtagtttctccagccctaacgttagtagcatggagtccttcccccctctcgcttattcaacccctcagcccccccttcccccggtcagaccatctgccccgttacctttcgtgcccccccctgcagtcccatcggtcccgccattggtgactagcatgccaccccctgtgtcaccttccacagcggctgcctttggcaatccacccgtctcccactttcccccatcaaccagcgcacccaataccttactgcctgcacctcctagtggcccccccatatccggatttagcgtggggtccacatacgatataacacgaggacacgccggacgggcccctcagaccccactgatgccaagttttagtgcgcctagtgggaccggccttcttccgacccccatcacacaacaggccagtctcacatccctggcacaggggacgggtactacctctgccataacctttcccgaagaacaagaggatcccagaatcacgcggggacaagacgaagctagtgctggcggcatttgggggtttatcaaaggtgttgcgggtaatccaatggtaaagtcagtgttagacaagacaaagcattctgtggagtccatgataactacactggatcccggaatggccccctatatcaaaagtggtggggagctcgatattgtagtcacatcaaataaggaagtcaaagtggcagccgtgagagatgcctttcaggaagtatttggcctcgcggtggtggtaggagaggctggacagtcgaacatcgcccctcaacccgtggggtacgcagccggtctgaaaggcgcgcaggagaggatcgactccttgagacgcacaggcgtaattcatgaaaaacaaaccgccgtgtccgtggaaaactttattgcagaactgctaccggataagtggtttgatatcggctgtttggttgtggaagatcccgtgcacggtatacatttggaaactttcacccaggcaaccccggtgcccctagagtttgtccaacaagttggttttctattgtgttttttcattatgcttcaaaggaatcttcattactgtttccagaataagaacctatttggtttctttgtgcgcaacatgttcttgattctttttcagagcttttttttctag

SEQ ID NO: 234258 - DNA, 4699 bp, Artificial Sequence
  derived and/or modified sequence
gcagccgcaggagcatgcgccgcccgtggccatcttgtaggcggggacacgccgaggtaacttccagggtgcgccttcgttgtcttctccaagctgtagttctacgtcccgacctccctatcataccacactcttcagcgaccacgcaggcactttcccggtccccagtataccataattgaagaaaaatgatggaagagagtggaatagagacaacaccacctgggactcctccaccaaatcctgcagggctggctgctactgctatgtcttctacccctgttccattagcggcaaccagttctttttcttctccaaatgtatcctccatggagtccttcccaccactcgcatactctactcctcagccgccccttcctcctgtgaggccttcagcaccattaccttttgtgcctcctcctgcagttccttctgtcccaccacttgttacttctatgccacctcctgtttctccatcaactgctgctgccttcggtaatcctcctgtatctcacttcccaccttcaacttctgccccaaacactcttttacctgcacccccttcgggtcctcctatatcaggattttctgttggttcaacttatgacattacaaggggacatgctgggagagctccccagacacccctgatgccatcattttctgcaccttcaggaacaggtcttttgccaactcctattactcagcaagccagtttgacatctctggcacagggaactggaaccacatcagccattactttcccagaggagcaagaagaccctagaattactagaggtcaggatgaagcatctgctggtggaatctggggttttattaagggtgtggctgggaatcctatggtgaagtctgtgcttgataagacaaaacattcagtagaaagcatgattacaacgctggaccctggcatggctccctatatcaaatctggaggtgaactggatattgtagtgacctcaaataaagaagtaaaagttgctgctgtccgagatgccttccaggaggtctttggcttagctgtggttgtaggggaagctggacagtccaatattgccccacaaccagtgggctatgcagctggattaaaaggtgctcaggaacggatagatagcttgcgtcgaactggggtgatccatgaaaaacagacagctgtgtcagtagaaaacttcattgcagaattgctgcctgacaaatggtttgacattggttgtttggtggttgaagatcctgtccatggcattcatctagaaacatttacacaagccacaccagtgcctttggaatttgtacagcaggctcaaagtctaactccccaggactataatctgaggtggtcaggccttttggtgacagtgggtgaagtcctggaaaagagtttactgaatgtcagccggactgattggcacatggcatttactgggatgtcccgtcggcagatgatctacagtgcagccagagcgatagcgggcatgtataaacagcgcctgccacccaggacagtgtgagaggagacctacctgggagactgagactttcccccacttttagcttgatgttaaagaagtggttgtaccttcctaaatcgaatagtctaaatgaatccagtagtttttatcattttcctgtagcctgcaatttttctttctctagaaaggcatcatgtcattccaggagacaaaaagaaacaaatcctttttatagtcataccatttcacctatcatagtactcaaaaaagaaaatatacaaatctatttacagcacaatttaatataccagatttataaggtggaaattcatgtgcagagacatttaacttaatgccatgtacttgattattttgttctttaaagaagacattattaaagaacatgttggttgaatgtttataaaagcatgatttgctttggcttcatctcttttctgtcagtctttgactacttttgtatgtgcacacgatctcagggctggtgctgagcagcctgctcaacagtcactataagacacctacttgtcgggagatgttccacatttctgtgcatgttttcagtaatatgggccaaaataatggaattgattattttcctttttggccatcacgtacacatgtaatctggaaaatcatacctttgtcaattttaaacataacttttggcatttcccagatttatactatgaacattggggtaatacattttattttttcattgctatatgacagctaaggggcaaatgattcaagtatattttaaatcagaagtattcaaattatttttgtataatactgttcagtacttccaagaataagctctgacaacagccattgtttctgcttccactcatattctctacacattttaatacagaaatttttgagagggggttactttattgcttgtgggttagtatgtctcttacttcaattaaggttacttatttggtttgccttaagcattacttttttaactttgtgccatttggtctttactttttatggatgttttcaaagaaactattttatattcaatctagtttatttagtctactgtatttctatttcgtggaagccttttcccctcaaataatatattatatcatttttggacttatataaatgataattaaataaatttttttcttaatactgttggactttgtatatacaagttcaaataactttttcgaagatagtttcttatataaatgtaatttaatttttttactcttctatacagttctttagatgtaaaagaattagcacaatctctggcagttttataaaagctgttgaagctcttgtcctgcactgtctttaggtatcataggtatcaggtttgctttgtgttaatgccacttcaagtcattatttggtttctgctatttttttacctgaggataagaagaatgaatattaaatttgaatattaaatatatgttactttccaagcactgtataatgactgttcagtgaatatcagacttccgtgtcattaaaagtcatgagagacagcacagagaggttataggttgccttggtgtacttttgtccaggagtaacagggacagaatactttctttctttccttcaagtacaagaaggctttctctaccatttgcgtctacactttattttaaaagctatccttttctagtagtattttatcatggcaatggcatgatgacaacaacagtctttcattacagactgaagggaagcatgtccttacttaaaatagttctgctactttccctcctattataaggaaatcttacagattctaaaaataccttaatttttctttgatttttattttaccaagtcacaaatgtctttttgatgttttgagaattgttctcatagaatcacaaatactgacatttcattagatgattattttcctagaatccccaaagagcagtggcagtccatggcttggttgaagctagaaattttcctgcccctggtgacctggtaagcctcctgctcggaaccgtgtgagtgggtgaggaagatgagagatggtcagatggaagagagaaatacatgaactgctctggcctctctggttctgttcttggcccagagtttttgaaaagcagcggagcatgactgacttcacatgctcagctttctcagccttttgtttattttgttgtccttagatttccctgttgtaaaaggggcaagaaaagtaactcatcatctctaacacaccatggcagcttagccaggtagtcttagtggtggtgtttaggcataagatatgctgatcatcagtctcaggccacagtttccttcactaatcgtccagcttgagtgttctgttctcttcctgcccatttccttgaacctcctgctctagccttggcggagggagagtgctatttgcttttgttctccctctgtcttaggaaaagccatctttaatatagttcttcaccactgttggggttgttttgtgattttttttttcttccgaagaactcctggttgttattggattttgtattttaatacaaattattgaattttataagcttgtacacaatatttaattagtgtgaaaggaaacaaagaatgcaggaaaaataatttaatatcaacctcagttgacaaggtgctcagattattcaattcgggatcctccttttgttaggtttttgagacaaccctagacctaaactgtgtcacagacttctgaatgtttaggcagtgctagtaatttcctcgtaatgattctgttattactttcctattctttattcctctttcttctgaagattaatgaagttgaaaattgaggtggataaatacaaaaaggtagtgtgatagtataagtatctaagtgcagatgaaagtgtgttatatacatccattcaaaattatgcaagttagtaattactcagggttaactaaattactttaatatgctgttgaatctactctgttccttggctagaaaaaattataaacaggactttgtagtttgggaagccaaattgataatattctatgttctaaaagttgggctatacataaattattaagaaatatggatttttattcccaggatatggtgttcattttatgatattacgcaggatgatgtattgagtaaaatcagttttgtaaatatgtaaatatgtcataaataaacaatgctttgacttatttccaaa

SEQ ID NO: 234259 - DNA, 1541 bp, Artificial Sequence
  derived and/or modified sequence
ggggacacgccgaggtaacttccagggtgcgccttcgttgtcttctccaagctgtagttctacgtcccgacctccctatcataccacactcttcagcgaccacgcaggcactttcccggtccccagtataccataattgaagaaaaatgatggaagagagtggaatagagacaacaccacctgggactcctccaccaaatcctgcagggctggctgctactgctatgtcttctacccctgttccattagcggcaaccagttctttttcttctccaaatgtatcctccatggagtccttcccaccactcgcatactctactcctcagccgccccttcctcctgtgaggccttcagcaccattaccttttgtgcctcctcctgcagttccttctgtcccaccacttgttacttctatgccacctcctgtttctccatcaactgctgctgccttcggtaatcctcctgtatctcacttcccaccttcaacttctgccccaaacactcttttacctgcacccccttcgggtcctcctatatcaggattttctgttggttcaacttatgacattacaaggggacatgctgggagagctccccagacacccctgatgccatcattttctgcaccttcaggaacaggtcttttgccaactcctattactcagcaagccagtttgacatctctggcacagggaactggaaccacatcagccattactttcccagaggagcaagaagaccctagaattactagaggtcaggatgaagcatctgctggtggaatctggggttttattaagggtgtggctgggaatcctatggtgaagtctgtgcttgataagacaaaacattcagtagaaagcatgattacaacgctggaccctggcatggctccctatatcaaatctggaggtgaactggatattgtagtgacctcaaataaagaagtaaaagttgctgctgtccgagatgccttccaggaggtctttggcttagctgtggttgtaggggaagctggacagtccaatattgccccacaaccagtgggctatgcagctggattaaaaggtgctcaggaacggatagatagcttgcgtcgaactggggtgatccatgaaaaacagacagctgtgtcagtagaaaacttcattgcagaattgctgcctgacaaatggtttgacattggttgtttggtggttgaagatcctgtccatggcattcatctagaaacatttacacaagccacaccagtgcctttggaatttgtacagcaggctcaaagtctaactccccaggactataatctgaggtggtcaggccttttggtgacagtgggtgaagtcctggaaaagagtttactgaatgtcagccggactgattggcacatggcatttactgggatgtcccgtcggcagatgatctacagtgcagccagagcgatagcgaatccccaaagagcagtggcagtccatggcttggttgaagctagaaattttcctgcccctggtgacctggtaagcctcctgctcggaaccgtgtga

SEQ ID NO: 234260 - DNA, 1079 bp, Artificial Sequence
  derived and/or modified sequence
ggggacacgccgaggtaacttccagggtgcgccttcgttgtcttctccaagctgtagttctacgtcccgacctccctatcataccacactcttcagcgaccacgcaggcactttcccggtccccagtataccataattgaagaaaaatgatggaagagagtggaatagagacaacaccacctgggactcctccaccaaatcctgcagggctggctgctactgctatgtcttctacccctgttccattagcggcaaccagttctttttcttctccaaatgtatcctccatggagtccttcccaccactcgcatactctactcctcagccgccccttcctcctgtgaggccttcagcaccattaccttttgtgcctcctcctgcagttccttctgtcccaccacttgttacttctatgccacctcctgtttctccatcaactgctgctgccttcggtaatcctcctgtatctcacttcccaccttcaacttctgccccaaacactcttttacctgcacccccttcgggtcctcctatatcaggattttctgttggttcaacttatgacattacaaggggacatgctgggagagctccccagacacccctgatgccatcattttctgcaccttcaggaacaggtcttttgccaactcctattactcagcaagccagtttgacatctctggcacagggaactggaaccacatcagccattactttcccagaggagcaagaagaccctagaattactagaggtcaggatgaagcatctgctggtggaatctggggttttattaagggtgtggctgggaatcctatggtgaagtctgtgcttgataagacaaaacattcagtagaaagcatgattacaacgctggaccctggcatggctccctatatcaaatctggaggtgaactggatattgtagtgacctcaaataaagaagtaaaagttgctgctgtccgagatgccttccaggaggtctttggcttagctgtggttgtaggggaagctggacagtccaatattgccccacaaccagtgggctatgcagctggattaaaaggagctaataga

SEQ ID NO: 234261 - DNA, 5504 bp, Artificial Sequence
  derived and/or modified sequence
ggggacacgccgaggtaacttccagggtgcgccttcgttgtcttctccaagctgtagttctacgtcccgacctccctatcataccacactcttcagcgaccacgcaggcactttcccggtccccagtataccataattgaagaaaaatgatggaagagagtggaatagagacaacaccacctgggactcctccaccaaatcctgcagggctggctgctactgctatgtcttctacccctgttccattagcggcaaccagttctttttcttctccaaatgtatcctccatggagtccttcccaccactcgcatactctactcctcagccgccccttcctcctgtgaggccttcagcaccattaccttttgtgcctcctcctgcagttccttctgtcccaccacttgttacttctatgccacctcctgtttctccatcaactgctgctgccttcggtaatcctcctgtatctcacttcccaccttcaacttctgccccaaacactcttttacctgcacccccttcgggtcctcctatatcaggattttctgttggttcaacttatgacattacaaggggacatgctgggagagctccccagacacccctgatgccatcattttctgcaccttcaggaacaggtcttttgccaactcctattactcagcaagccagtttgacatctctggcacagggaactggaaccacatcagccattactttcccagaggagcaagaagaccctagaattactagaggtcaggatgaagcatctgctggtggaatctggggttttattaagggtgtggctgggaatcctatggtgaagtctgtgcttgataagacaaaacattcagtagaaagcatgattacaacgctggaccctggcatggctccctatatcaaatctggaggtgaactggatattgtagtgacctcaaataaagaagtaaaagttgctgctgtccgagatgccttccaggaggtctttggcttagctgtggttgtaggggaagctggacagtccaatattgccccacaaccagtgggctatgcagctggattaaaaggtgctcaggaacggatagatagcttgcgtcgaactggggtgatccatgaaaaacagacagctgtgtcagtagaaaacttcattgcagaattgctgcctgacaaatggtttgacattggttgtttggtggttgaagatcctgtccatggcattcatctagaaacatttacacaagccacaccagtgcctttggaatttgtacagcaggttggttttctcctttgctttttcattatgctccagagaaacttacactattgttttcagaataaaaatttgttcggtttttttgttagaaatatgttcttgattttgtttcagtcatttttcttttagtatttttctttgctttttaatttcctgatccttccatgttgttttagtaccttcctccttttgttttccaggtgtctttgaaaggtaatacattacatggttaatcattatttctctcatttttttctttgtttttactctgagttctggaaaagatttaccttttctagttgttttatgtccgcctttcgtttgctttcccttttatctcacatttcatttccactgttatctccatttcccttttccttgattgattgtcctcctgttcatctttagtgaaatcaacattagaaaccttataggcacgtgtctttaggtttttggctgaaaaatggacctaatagtgtacctatccacacagtttccaggagaatgtaagtataaatgataatccttattcctctttttttttttttttggtgtgttttctctaatcctttcatgaacaaaatggaatataaatatatacttgcattggaatctctgtgctcttaagtggtattctattgacttttttctgtcaatttcataaaatttttgttacagttgtagtttgtacattgttaaatatcatttcaaaactgcctttcaaacttatttgggacatgaagacatttgagaatctaagaaaactattgggctgtctcccaagaaaaatgcgtgtatgtgtactttcatagaactttggcatatgtgttcacataatccctaaaagtaacctctggcctacttattacagtttagaaagggggctaagaattgatgcttggaatttgaaattttactgaaacttttatttataccgtaatttcttttcataagttcaagaaaacctttttatagatattaacattacactcatttcaatatgaaggtgattaaaagactgtaagtgaatactatgcatactgttatgccaataaattagaaaaattaggtgaaagagtggattttctaggaaaatagaagttttgccatagttaagagtattaggttgaaccaaatgacgttgttgcctttgatggtcagaaatagttatatattgtcagtttcatatgattcagcttaattgaagcattaaaatggaagaactttatgtaactaaaaaaaaaaaaatcactgagtaccaatggtgttacaagtgagttctacaaaatgttcagagatgatttgctgtatgaggtatcaaaaatagaggtagagagttttccagttcattctgtgagactagcctcttttaactttaaatgaaattatagtccaaagaactaaatgtcaaaaccattggtaaaattaataaataaaattcagaaatgtattagatgaacattgtatcctgaccatgaaaaatttgtcccaagaacagcagaatggttcaacaatagtaaatttatgtaattcagtacatgaacatctgcattgaaaggagaaaaaagattttgataagagttgaaggtatttgctagaaataatcatactaatagctcttagtattagacgggtatgtgtgtactacaaaatcaaagcaaacttcagatctaataaataaaacactgaaaacgttataattatgaggatgctcctgtcactgccactgttaacattgctgtagatctggggtcagcaaacagtggctcacagccaaatctggcctgtcatctttttgtaattaagtttattggaacacacccatgccagtttgcttacttattgtttatagctgcttttgtactatagcagcagaaatgaatagttgcaacagagaatgtctggcccacaaagcctaaaatatttaccatctggctcttttcagaaaaagtttgctgacccctgtgttagatatctgaccattgcaaaggacaatttttatgttgtttttaggaatatatactggaaagaagtagacatgaaagaatgaagtggactcgtgtgtaccagtaccaaaagatagctattacatattgctgagtaaaagtcaaaaacagcacatctagtatgatcccatttactagcaggcgtgtgtatgtgtgtgctttaaaattttaataagaatagggaaaaaggcctggaaagataacacagcaaactgttaatagtggttaattctgaataatggtatttaaagggtgttatttgctttttactttgctttttattctgtttgttttattttgtgtcatttggttttaaaatttagaagatacaaaactgtgtgcattgaaatgtcttctttttatcctcagctattcagctctcctccctgtttctttttattcattctaaaatgttttatgcttttttattgttggaattttttaatttaaggtaatggaaatcagcccttcaggtaattagaattatcagtatatattagtaaaaatctggaaataaatttcatacaatttgtacttgttaaacttaaatataaatgattcctcacccccataaaaaaccccagctgttctggatttttgccaataatatagaataccttgtttctaaaaagtgtggtccttggcttaacatcataagcagcacctagaaatttgttaaaatgcagattctcgggtcctaacacaggactagtgaatcaggagctgcattttaacaagatattcaggggattcataggcatgccataatttgagaagcacagtgttactggtgtctctgaggacgttagtagtatatctgctgtttctctttgaaatatagtgaaatactgatactgtagtatacacattggaagagagtacttagagcaggggttcccaagtgctggactgtttgcatcagattgacttggaagctattttacgtacgtaatactgtactgtttctcttggaaccagctgtagagtttccaattcagttatcttggtgtctcagttatcttagtgggatgtgagaaactggatatcgttaaaaaagaaaaaagaaacaagagctcctcaggtgattgtaatacatggcacatttggtagtcatgtataactgtatagatccgttctagatgtggctatacttctctggactatacctaacaccctaaaacagaaaaaccacatcagtcttggatatcaagcaatgagtttattcttctgtcattcctttgtagatgaataaatgatttgaataggagcaaatatgagttgggtcaattaggaatgttgcatcagtggttgatgttgtccaggactggatattacttgatacatattaacatgtgaatcacatttccagagagaatttccataattgagcaattcttttctgaatggatttaagccttaattttcagttttcctctttctggttgaaattttactactataaaagataactttagcactgattttagtaccaatcttattattaacctgaagtgacacttaatttagaactagaactcaaaccttccgactgttagcctcgttaatggggatattttttaaaaaatagatgtgtgtaatgttacattgattgtgttctagccttgtaagttgatatagttggcagcctagctgtatttctcagagtttgtcataatctatatttaaaataacatgaaacactttgaaatgtcacttatagctagttccaatgatatttttaaatgtattataagtaatatcaatttcatctttccacaggctcaaagtctaactccccaggactataatctgaggtggtcaggccttttggtgacagtgggtgaagtcctggaaaagagtttactgaatgtcagccggactgattggcacatggcatttactgggatgtcccgtcggcagatgatctacagtgcagccagagcgatagcgggcatgtataaacagcgcctgccacccaggacagtgtgagaggagacctacctgggagactgagactttcccccacttttagcttgatgttaaagaagtggttgtaccttcctaaatcgaatagtctaaatgaatccagtagtttttatcattttcctgtagcctgcaatttttctttctctagaaaggcatcatgtcattccaggagacaaaaagaaacaaatcctttttatagtcataccatttcacctatcatagtactcaaaaaagaaaa

SEQ ID NO: 234262 - DNA, 1338 bp, Artificial Sequence
  derived and/or modified sequence
atgatggaagagtctggcatcgagacaacgcctccaggaacacctccaccaaatcccgcagggttggcagccacagccatgtcatctaccccagttcccctcgcggctaccagttcttttagttcccctaacgtttcatctatggagtccttcccgcctctagcctatagtacgccccaacctccactcccaccagttcgccctagtgccccactgccttttgttccacctccagccgtgccatccgtcccgccactggtgacctcaatgccccctcctgtgtctccaagcaccgccgctgcttttgggaatccccctgtttcgcatttcccaccgtccacaagcgcccctaataccttactccctgccccacccagtgggcctccaataagcggattctctgtggggtccacctacgatattactaggggccacgccggacgtgctccacagacccccctgatgccaagtttctccgcccctagcggaacaggcctactccctactcctatcacgcaacaggctagcctaacatccctcgcccaagggaccggaacaacctcggccataacattcccagaggaacaggaagatcccagaatcaccagggggcaagatgaagcctccgctgggggaatctggggattcattaagggcgtggccggtaatcccatggtgaagtccgtcctggacaaaaccaaacactcggtggaaagtatgatcaccacactggacccgggaatggcgccatacatcaagagtggcggagaactggatattgtggtgacatccaataaggaggttaaggtggccgctgttagggatgcatttcaggaggtgttcggtctcgccgtcgtggtcggagaagccggacaatccaatatcgcccctcagcctgtcggctacgctgccggacttaaaggagcacaggagagaatagatagtctgcgaagaaccggagtgatacatgagaaacagacagcggtttccgtggagaacttcatcgccgagctgctacctgacaaatggtttgatattggatgcctagtggttgaggatcctgtgcacgggatccacctagagacctttacacaagcgacacccgtgcctctggagttcgtgcaacaggctcagtccctgaccccgcaggattacaaccttagatggagtggattgctggtcaccgtgggagaagtcttagagaaatccctgctgaatgtgtcccgaacagattggcacatggcgttcaccggaatgtccagacggcagatgatctactccgccgcacgggctattgctggaatgtataaacaaaggctgccccctcggaccgtgtag

SEQ ID NO: 234263 - DNA, 1395 bp, Artificial Sequence
  derived and/or modified sequence
atgatggaagagtccggtatcgagactactcccccaggtaccccccctccaaacccagctggattggccgctaccgccatgtcttcaacacccgtgccccttgccgcaacatccagtttcagttcacctaacgtgtcatcaatggagtctttccctccactggcatactcaacaccacagccccctttacctcccgtgcgcccatcagctccactgcccttcgtgccacccccagcagtaccttccgtccctcccttggtgacttctatgccaccccctgtttctcccagcaccgcagccgcattcggcaacccccctgtaagccactttcctccctcaacgagcgcacctaatacactgcttccggcacctcccagcggaccgcctatctctggattttctgtgggatccacttatgatataacccgcggacatgcagggagagcacctcagacccctcttatgcccagcttcagcgctccttccggaaccggactcctacccactccgattacccagcaggccagcctgacctctctcgcacagggcactggcacaacctcggctatcacctttccggaagagcaggaagatccacgtatcaccaggggacaagatgaggccagcgctggtgggatatggggttttatcaaaggagtggccggaaaccctatggtaaagagcgtgttggataagaccaagcatagtgttgagtccatgatcacaaccctcgatcctggcatggctccatatatcaagtctggcggtgagttggacatcgtggtcacctcgaacaaagaggtcaaggtcgccgctgtgcgggacgcattccaggaggtcttcggcctggccgttgtggtgggtgaggcaggacagagcaatatcgccccacaacccgtgggatatgccgctggacttaagggtgcccaagagcgaattgactcgctccggaggacaggtgttattcatgagaaacagactgcagtaagtgtggagaattttatagcagagcttctcccggataaatggtttgacatcggatgcctggtggtcgaagaccctgtgcacggtattcatttggaaacctttactcaagcaacgccagtgcccctggagttcgtacagcaggctcagtcgttaacaccccaggattacaatttgcgttggagtgggctcttggttacggtaggtgaggtactcgaaaaaagcttactgaatgtgtctaggacggactggcatatggcttttaccggcatgtcccgaagacagatgatttattccgcagcaagagccattgcaaacccccagagggccgttgccgtgcacggactcgtagaagcaagaaattttccagcgccaggggatcttgtaagcctgctcctcggcacagtgtag

SEQ ID NO: 234264 - DNA, 936 bp, Artificial Sequence
  derived and/or modified sequence
atgatggaggaaagcggtatcgagacgacgcctccaggaacacctccacccaaccccgctggccttgctgccaccgctatgtcttctacaccagttcccctggctgctacaagcagcttctcaagccctaacgtaagcagcatggagtctttcccaccactggcatactcaaccccccaacccccactcccaccagtgcgaccaagcgctccgctgcccttcgtgcctccccctgcagtcccttccgtacctcctctggtgacctccatgccgcctcccgtctccccttcaaccgctgctgcctttggaaaccccccagtatcccacttcccaccgtccacaagcgccccaaatactctcttacccgcaccgccatcaggacctcccatctccggattttcagtgggatccacctacgatattacgagaggacatgccggtcgggctccacaaactcccctgatgccaagcttcagcgcaccaagcggcaccggtcttcttccaaccccaattacacagcaggcttctttgacttctctggcccagggtaccggcactactagcgcgataaccttcccagaagagcaggaggatccaaggatcactagaggccaggatgaagcctcggccggagggatttggggattcatcaaaggtgtcgccggtaatcccatggtgaagagtgttctggataagaccaagcactctgttgaaagcatgataaccaccctggatcccggtatggccccatatattaagtctgggggtgagcttgacatcgtggtgacgagcaacaaagaggtgaaggtcgccgcagtgagagacgcatttcaggaagtattcggactcgctgtcgtggtgggcgaagccggacagtccaacatcgcccctcagcccgtgggttatgccgcaggcttgaagggcgctaaccgctag

SEQ ID NO: 234265 - DNA, 1257 bp, Artificial Sequence
  derived and/or modified sequence
atgatggaagagagtgggatcgaaaccacacctccaggtactccccctcccaaccccgcagggcttgccgctacagcaatgagctctaccccagtgccgctcgccgcaactagttcgttcagcagtcctaatgtcagttctatggaatctttcccaccactggcgtattccaccccgcagcccccactgcctccagtacggccttcggcccctttgccctttgtgccccctccggcagtgccttcggtgcccccattggtcacaagcatgccgcctccagtgtctcctagcactgccgctgcgttcggtaatcccccagtctcacactttccaccgagcacctccgctcccaatacactgctcccagcgccaccgtctggccctccaatttcgggtttctctgtgggaagcacttacgatattacacgcggacacgcaggccgagctcctcagaccccattgatgccatcctttagcgccccatccgggactggactcctccctactccgattacacaacaggcttcgcttacatctttggctcaggggacaggaaccacttccgccattactttccctgaggagcaggaagaccccagaattacgagaggacaggacgaagcaagtgctggaggtatttggggttttatcaagggggtggctggtaacccgatggtgaaatcagtattggataagaccaaacatagtgtggaaagcatgattacgacgctggatcccggaatggcgccatatattaagtctggaggggagctggacatcgtcgtgacatcgaataaggaggttaaggtggcagctgtgagggacgcatttcaagaggtcttcggactcgccgttgtcgtcggcgaggcaggccagtccaacatagccccacagcctgtgggatatgccgcaggtctgaaaggagcacaggaaagaattgacagcctccggaggaccggcgttatccatgaaaagcagaccgccgtatctgtcgaaaacttcattgcagagttgctgccagataaatggttcgatatcggctgtctcgtagtcgaagacccagtgcacgggatccatctggagactttcacacaagccacgcccgtgcctttggagtttgtgcagcaggtcgggtttctcctgtgtttttttattatgcttcagcggaaccttcactattgcttccagaacaagaatctgttcggcttcttcgttaggaacatgtttttgatcttgttccagtctttcttcttttag

SEQ ID NO: 234266 - DNA, 756 bp, Artificial Sequence
  derived and/or modified sequence
atgacccagctgcccgagctgggcctgagaagccccaacaacaagagccccaccggcccccaccccctggagcacctgctggccagactgctgaagagaagaagaagaagcaccctgatgagcagccccagaagcctgctgtgcagcatcagcggccccggcagccacctgctgagcacccaccccatcctgtgccacagcgtgtaccagcccccccagcccgccagcagaccccaggccaagagataccagggcctgctgcccgtgcccctggccccccaccccctgtgcctgagcggccagctgtacctgcccaacatcccctgcaccgtgatcgacggctgcggccccgtgatcagccacctgaagctgaccatgtacccctggggcctgccccccagccacctgggcagcagcagccccttcagcgccaacatggagcagtgggactactacaagagccagaccagattcgcccccttcctgcccgagagcttctgcggcagccccctgcccagcgagcagagcagcagacccttcggcctggccttcaaggtgctgtgcgccgccacctgccagcccccccagttccagctgctgtggctgtgcccctacaagctggacctgcaccagagaatctgcctgccccccaacctggccctggtgctgctgggcgccctgtggaccagccccccccccggcagcttcctgcagcccccctacaacagaccctacaagctgtacaagaccaactag

SEQ ID NO: 234267 - DNA, 756 bp, Artificial Sequence
  derived and/or modified sequence
atgacacagttgccagagctggggttacgcagcccaaataataaatcacctaccgggccacacccactagagcatctgctcgcccggctgctgaaacggaggcgccgatctaccctaatgagttccccgcgatccctcctatgcagcatcagcggaccgggatcacatctcctgtctacccatcccatcctgtgtcactcagtgtaccagcccccgcagcccgcttcacgaccacaggccaaacggtatcagggccttcttcctgtccctctcgcaccacacccactctgcctctccgggcagttatacctgcccaacatcccatgcaccgtgatagacggatgtggccccgtgatctcccacttaaagcttacgatgtatccctggggcctccccccatcacacctcggcagctccagtcctttcagcgctaatatggaacagtgggactactacaaatcccaaactcgctttgccccattcttgccagagagtttttgtgggagcccgttgcccagcgaacagtcctcacgccctttcgggctcgcctttaaagttctgtgcgcagcaacatgtcagcctccacaatttcagctgctatggctctgcccatacaagctggatctacaccagcgtatatgtcttcctcccaatctggcactggtgttactgggagcgctgtggaccagtccacctccagggagcttccttcagccgccctataataggccttataaactctacaaaacaaattag

SEQ ID NO: 234268 - DNA, 756 bp, Artificial Sequence
  derived and/or modified sequence
atgactcaactcccagaactcgggcttcgttctcctaataacaagtctcctacaggaccacacccgcttgagcatttgctcgcgcggctgcttaaacgacggaggcgttccactctcatgagctcccctaggtctctactgtgctcaatcagcggcccggggagccaccttctgtccacgcaccctatcttatgccactcggtgtaccagccgccacagcctgcgtctagaccccaggcgaagcggtaccaggggctgctgccggtgccactagcccctcatccgctatgcctgtcagggcagctctatctgccaaacattccctgcaccgttatcgatggctgtggcccagtgatctctcatcttaaactgacaatgtatccctggggactccctcccagccacctgggttcttcctcccccttctccgccaacatggagcagtgggattactacaagtcccaaaccaggtttgctccctttctgccagagagcttttgcggatcgcctctgccatccgagcagtcttcccggcctttcggcctcgctttcaaggtactctgcgcagcaacctgtcagccgccacagttccaacttctgtggttatgcccttataagctggacctgcatcagcgaatctgtctccctcccaacctggcgctggtccttttgggggctctgtggacctctcctcctcctgggtcatttctccagcctccatacaatcgcccatacaaactctacaaaaccaactag

SEQ ID NO: 234269 - DNA, 756 bp, Artificial Sequence
  derived and/or modified sequence
atgacccagctgcctgagctgggcctgcggagccccaacaacaagagccccaccggcccccaccccctggagcacctgctggcccggctgctgaagagaagaagaagaagcaccctgatgagcagccccaggagcctgctgtgcagcatcagcggccctggcagccacctgctgagcacccaccccatcctgtgccacagcgtgtaccagcccccccagcctgccagccggccccaggccaagcgctaccagggcctgctgcctgtgcccctggccccccaccccctgtgcctgagcggccagctgtacctgcccaacatcccctgcaccgtgattgatggctgcggccctgtgatcagccacctgaagctgaccatgtacccctggggcctgccccccagccacctgggcagcagcagccccttcagcgccaacatggagcagtgggactactacaagagccagaccaggtttgcccccttcctgcctgagagcttctgtggcagccccctgcccagcgagcagagcagccggcccttcggcctggccttcaaggtgctgtgtgccgccacctgccagcccccccagttccagctgctgtggctgtgcccctacaagctggacctgcaccagaggatctgcctgccccccaacctggccctggtgctgctgggcgccctgtggaccagccccccacctggcagcttcctgcagcccccctacaaccggccctacaagctgtacaagaccaactag

SEQ ID NO: 234270 - DNA, 756 bp, Artificial Sequence
  derived and/or modified sequence
atgacccagctgcccgagctgggcctgcggagccccaacaacaagagcccaacagggccccaccccctggagcacctgctggcccggttacttaagaggaggaggcgctctacactgatgtcatcaccccggtccttgctgtgcagtatctcaggcccgggctcacacctcctcagtacccacccgattctgtgccactccgtgtaccagccgccgcagcctgctagcagaccccaggctaaacgttatcagggcctgctgcctgtgccgcttgcgcctcaccctttgtgtctgtctggccagctctacttacctaatattccatgtactgtcattgacggttgcggaccagtcattagccacctcaagctgaccatgtatccctggggtctacctccctctcacctgggctcctcctcccctttctcagctaacatggagcagtgggactactataagagtcagacccgcttcgcccccttcttgccggagagcttttgtggctcgcctctcccatctgagcaaagcagccgccccttcggcctggcatttaaggtactctgtgcagccacttgccagcctccccaatttcaactgttatggctgtgcccatataagctcgacctgcatcagaggatatgtctcccccctaatctagcgctagtgctattaggcgcactgtggacaagccccccacccggatcctttctgcagccaccatacaataggccatataagctgtataaaacaaactag

SEQ ID NO: 234271 - DNA, 756 bp, Artificial Sequence
  derived and/or modified sequence
atgacccagctgcccgagctgggcctgcggagccccaacaacaagtcaccgacaggcccgcacccactcgaacatcttttggcgagattgctgaagaggaggcgtcgctctaccctcatgtcatcaccgcgatccctcttatgcagcattagcggacccggctcacatctgctgagcactcaccccatcctctgtcattccgtctaccagccaccccagccagcatcccgacctcaggccaagcgctaccagggcctattgccagtgccattggccccccacccattatgcctctctgggcagctatatttacccaacattccctgtacagtcatcgacgggtgcggtcctgtcatcagccacctgaaattgaccatgtatccttggggcctgccccccagtcacctgggtagcagttctccattctcagctaacatggaacagtgggactactataagagccagacgcggtttgctccgtttctcccagagtcattttgcggctcaccacttccctcagagcaaagctcccgcccctttggtttagcatttaaggtgctgtgtgccgccacctgtcaacccccacagtttcagctgctgtggctgtgcccctataaactggatctgcatcagcgaatttgtctaccacctaatctcgccctggtgctgttgggcgctctctggacttcgccaccccctgggagctttctgcaaccaccctacaaccggccctacaagctctataaaactaactag

SEQ ID NO: 234272 - DNA, 756 bp, Artificial Sequence
  derived and/or modified sequence
atgactcaattgcccgaactgggcctcaggagcccaaacaacaaaagtccgaccggtccccaccctttggaacatcttttggctcggctcctgaagaggcggagaagatcaacactgatgtctagccctaggtccctcctctgctccatcagcgggccaggatcccatctgctctccacccaccccattctatgtcactctgtctaccaaccaccacaacccgcatcaagaccacaggctaagcgctaccaagggctgctgcctgtgccattagcccctcacccattgtgtctgagcggtcagctctatctccccaacatcccatgcactgtgatcgacggctgtggacccgtaatctctcatttgaaactgaccatgtacccttggggattacccccaagtcatcttggcagctcctcaccttttagtgctaatatggagcagtgggattattacaagagtcaaacacgattcgcgccattcctacccgagtctttctgtgggtcaccactgccttcagaacagagcagccggccttttggcctggcttttaaagtactctgtgccgctacctgccagcccccacagtttcaactgctttggctgtgtccatacaagcttgacctccatcaacgaatctgtctcccacctaatctggctttagtgttattaggggctctttggacgagccccccaccgggatccttcctacagccaccttataacaggccgtacaagctctacaagacaaattag

SEQ ID NO: 234273 - DNA, 756 bp, Artificial Sequence
  derived and/or modified sequence
atgactcaactgcccgaactcggactgcgttctcctaacaacaagagtcccaccggccctcatcccctggaacatctcttggctcggcttttgaagaggaggcgcaggtccactctcatgtcatctccaagatccctgttatgtagcatcagcgggccagggtcccatttgctgagcacgcacccaattttatgccactcagtataccaaccgcctcaaccagcttcgcgcccacaggcaaaacggtaccaaggcttgttgccggtccccctcgcaccacacccattatgcctttccgggcaactctacttgcctaacatcccttgcacggtcatcgacgggtgcgggccagtgattagtcacttaaagctgaccatgtacccttggggcctgcctcccagccatctcgggtcctcaagccctttctcagctaatatggagcagtgggattactacaagagtcaaacgcgctttgctcccttccttcccgaatcgttttgcggttccccactgccaagcgaacagtcttcaaggccctttggcctggcctttaaggtcctctgcgcagccacatgtcagccgccacagttccagctattatggctgtgcccttacaaactcgacctgcatcagcgcatttgcctgcctcccaatctggctcttgtgctacttggtgccctctggacatccccaccaccaggctcctttctgcagccaccttataatcgaccatacaaactttataagacaaactag

SEQ ID NO: 234274 - protein, 420 aa, Artificial Sequence
  derived and/or modified sequence
MPLQVSDYSWQQTKTAVFLSLPLKGVCVRDTDVFCTENYLKVNFPPFLFEAFLYAPIDDESSKAKIGNDTIVFTLYKKEAAMWETLSVTGVDKEMMQRIREKSILQAQERAKEATEAKAAAKREDQKYALSVMMKIEEEERKKIEDMKENERIKATKALEAWKEYQRKAEEQKKIQREEKLCQKEKQIKEERKKIKYKSLTRNLASRNLAPKGRNSENIFTEKLKEDSIPAPRSVGSIKINFTPRVFPTALRESQVAEEEEWLHKQAEARRAMNTDIAELCDLKEEEKNPEWLKDKGNKLFATENYLAAINAYNLAIRLNNKMPLLYLNRAACHLKLKNLHKAIEDSSKALELLMPPVTDNANARMKAHVRRGTAFCQLELYVEGLQDYEAALKIDPSNKIVQIDAEKIRNVIQGTELKS

SEQ ID NO: 234275 - DNA, 1263 bp, Artificial Sequence
  derived and/or modified sequence
atgcccttgcaggtcagcgactattcatggcaacaaaccaagacagccgtatttctgtcactacctctcaagggagtctgcgtcagagataccgatgttttctgtacagagaactacctgaaagttaatttccctccctttttgttcgaagcctttctgtacgcgcccatcgacgatgaatccagcaaggccaagatcggtaacgacaccattgtgttcacactttacaagaaagaggctgctatgtgggagaccctctccgtaaccggtgtggacaaggagatgatgcagagaatacgggaaaagtcaattctgcaggcccaagagcgcgctaaggaggctaccgaggccaaggccgctgctaagagagaggatcagaaatacgcactgagcgttatgatgaaaattgaagaagaagaaagaaaaaagattgaagatatgaaggaaaatgaaaggattaaggctactaaagccttagaggcgtggaaggagtatcagcgaaaggccgaggaacagaaaaagatccagcgcgaagagaagctctgccagaaggagaaacagatcaaggaggaacgcaaaaagataaaatacaagagtctgacccgcaacttggccagcagaaacctggcacccaaaggaagaaactctgagaacatttttaccgagaagctcaaggaagacagtatccctgcgccgagatctgtgggaagtatcaagataaacttcaccccgagggtgttcccaaccgcacttcgggagtcccaggtcgcagaggaggaggagtggctccacaagcaggcagaggccaggcgggccatgaacaccgacattgctgaactgtgtgacctcaaggaggaagagaaaaaccccgaatggcttaaagacaaggggaacaagctgttcgcaaccgaaaactatttggccgctatcaacgcctataacctggcgattaggctcaacaacaagatgcctcttctatacctcaatcgggcagcttgtcacttgaagcttaagaatctccacaaagccattgaggactcctccaaagctctggagcttctcatgccacctgtgactgataacgccaacgctcggatgaaggcgcacgttcgtagagggaccgcattttgccagctggagctgtacgtagaagggttgcaggactacgaagctgctttgaagattgatcctagtaataagattgtacagattgatgcagagaaaatcagaaacgtgatccagggaactgagttgaaatcgtag

SEQ ID NO: 234276 - DNA, 1263 bp, Artificial Sequence
  derived and/or modified sequence
atgcccctgcaggtgtctgactacagctggcagcagaccaagacagctgtgttcctgagcctgcccctgaagggcgtgtgtgtgcgggacacagatgtgttctgcacagagaactacctgaaggtgaacttcccccccttcctgtttgaggccttcctgtatgcccccattgatgatgagagcagcaaggccaagattggaaatgacaccatcgtgttcaccctgtacaagaaggaggccgccatgtgggagaccctgtctgtgactggagtggacaaggagatgatgcagaggatccgggagaagagcatcctgcaggcccaggagcgggccaaggaggccacagaggccaaggccgccgccaagcgggaggaccagaagtatgccctgtctgtgatgatgaagattgaggaggaggagaggaagaagattgaggacatgaaggaaaatgaaagaatcaaggccaccaaggccctggaggcctggaaggagtaccagaggaaggccgaggagcagaagaagatccagcgggaggagaagctgtgccagaaggagaagcagatcaaggaggagaggaagaagatcaagtacaagagcctgaccaggaacctggccagcaggaacctggcccccaagggcaggaacagcgagaacatcttcacagagaagctgaaggaggacagcatcccagcccccaggtctgtgggcagcatcaagatcaacttcacccccagggtcttccccacagccctgcgggagagccaggtggccgaggaggaggagtggctgcacaagcaggccgaggcccggcgggccatgaacacagacattgctgagctgtgtgacctgaaggaggaggagaagaaccctgagtggctgaaggacaagggcaacaagctgtttgccacagagaactacctggccgccatcaatgcctacaacctggccatccggctgaacaacaagatgcccctgctgtacctgaacagagctgcctgccacctgaagctgaagaacctgcacaaggccatcgaggacagcagcaaggccctggagctgctgatgcctcctgtgacagacaatgccaatgccaggatgaaggcccacgtgagaagaggaacagccttctgccagctggagctgtatgtggagggcctgcaggactatgaagctgccctgaagattgaccccagcaacaagatcgtgcagattgatgctgagaagatcagaaatgtcatccagggcacagagctgaagagctag

SEQ ID NO: 234277 - DNA, 1263 bp, Artificial Sequence
  derived and/or modified sequence
atgcccctgcaggtgagcgactacagctggcagcagaccaagaccgccgtatttctgtccctgccactgaaaggggtttgtgtcagagacacagacgtgttttgtactgagaactacctcaaagtgaacttccccccttttctgtttgaggccttcctgtacgcgcctatcgatgacgagtcttcaaaggccaaaataggtaatgatacaattgtgtttacactgtataaaaaggaggctgctatgtgggagacgttgtctgtcacaggcgttgacaaggagatgatgcagaggatccgggagaagtcaattctccaggcccaggagagggcgaaagaagcgactgaagctaaagccgcagctaagagagaggaccagaagtatgcgctgtctgtcatgatgaaaattgaggaggaggagagaaaaaagattgaggacatgaaagagaacgagaggattaaggcaactaaggcattagaggcttggaaagagtatcagaggaaggctgaggagcagaaaaaaattcaaagggaggaaaaactgtgtcaaaaggaaaagcagataaaagaggagcggaaaaaaatcaagtataaaagtctgactcgtaatctggcttcccgaaatctggcccccaagggccgtaacagtgaaaatatattcaccgagaaactgaaggaagacagcattccagcccccagatccgtgggcagcataaagatcaattttacgcctagggtgtttccaacagccctacgcgagagccaggttgcagaagaagaagagtggctgcataaacaagccgaggcacgcagagcaatgaacaccgacattgctgagctgtgcgacctgaaggaggaggagaagaaccccgagtggctgaaagacaagggcaacaaactatttgcaacagagaactacctcgccgccataaacgcatacaaccttgccatcaggctcaacaacaaaatgccactgctctatcttaatcgcgcagcctgccatctgaaactcaagaacctgcataaggccattgaagattcgtccaaagccctggagttactgatgccacctgttacagataatgctaatgccaggatgaaagcacacgtgcgccgcgggaccgccttctgccagttggagctgtacgtggaaggactgcaggactatgaggctgccctaaagattgacccctcgaacaaaatcgtgcagatcgatgcagagaagatcagaaacgtaatccaagggaccgaactgaagagctag

SEQ ID NO: 234278 - DNA, 1263 bp, Artificial Sequence
  derived and/or modified sequence
atgcccctgcaagtttctgattactcttggcagcaaaccaagacggctgtttttctctctttaccactcaagggcgtgtgcgttcgagatactgatgtattctgtactgaaaactacctcaaggtgaactttcccccattcctgttcgaagcctttctttacgctcctatagatgacgagtcttctaaagctaaaatcggcaatgatacaatcgtcttcactctgtataagaaagaggctgccatgtgggaaacgctgtcagttaccggtgtagataaggaaatgatgcaaaggattagggagaaaagcatcttgcaggcacaggagagagctaaggaggctacggaggccaaagccgctgccaagcgggaggatcagaaatacgctctttccgttatgatgaagatcgaggaggaagagcgtaagaaaattgaagacatgaaagagaacgagaggatcaaggcaaccaaggctcttgaagcctggaaagaatatcagagaaaggccgaggagcagaagaagattcagcgggaggaaaagctgtgtcagaaggaaaagcaaatcaaggaggagaggaagaagattaagtataagagtctcactcgaaatctggcctctaggaacttagcccctaagggcagaaattccgaaaatatattcacagaaaaactgaaagaggactccatcccagcccctcgctccgtgggatcaattaagatcaattttaccccacgagtgttcccaaccgcattacgtgaaagccaagtggccgaggaagaagagtggctgcacaaacaggcagaggctaggcgagccatgaataccgacattgctgagctgtgtgacctcaaagaggaggaaaaaaatcccgagtggctgaaagacaagggaaacaagctgttcgcgaccgaaaattacctggcagctatcaatgcctataacctcgcgattaggctgaataacaaaatgccactgctctaccttaacagggccgcatgccatctaaagcttaagaacttacacaaagccatagaggacagcagtaaggccctcgaattgctgatgcccccagtaactgataacgccaacgctcggatgaaggcacatgtgcgaaggggcacggccttctgccagttggagctctatgtcgaaggattacaggattacgaagccgcactgaagattgatccatcaaataagattgttcagattgatgctgagaaaatccgtaacgtgatccaggggacggaactgaagagttag

SEQ ID NO: 234279 - DNA, 1993 bp, Artificial Sequence
  derived and/or modified sequence
tcctctcctattatgcaaacccacaccatggatccagcagactactctggccccagcatgctgctccttgggatgatgggagaagggggaaacctgtgttttctcttggttttagggtatgggtctacttctttgaacattcgctcagatcgtaaggtaaccccaagaatcggcatcactctctggtctgggcgcctggatagtcacgcatggagtccgcgaggtgctggcgccggagcacgctgggaacgccgggctcccggccggcctgacccggaagggctggcgcatggtaaccccagcttccctagcaaccaagcaggcgcaagaagcaaccagccgcgctatccgctcccgttgctaccggaatgcctcttcaggttagcgattacagctggcagcagacgaagactgcggtctttctgtctctgcccctcaaaggcgtgtgcgtcagagacacggacgtgttctgcacggaaaactatctgaaggtcaactttcctccatttttatttgaggcatttctttatgctcccatagacgatgagagcagcaaagcaaagattgggaatgacaccattgtcttcaccttgtataaaaaagaagcggccatgtgggagaccctttctgtgacgggtgttgacaaagagatgatgcaaagaattagagaaaaatctattttacaagcacaagagagagcaaaagaagctacagaagcaaaagctgcagcaaagcgggaagatcaaaaatacgcactaagtgtcatgatgaagattgaagaagaagagaggaaaaaaatagaagatatgaaagaaaatgaacggataaaagccactaaagcattggaagcctggaaagaatatcaaagaaaagctgaggagcaaaaaaaaattcagagagaagagaaattatgtcaaaaagaaaagcaaattaaagaagaaagaaaaaaaataaaatataagagtcttactagaaatttggcatctagaaatcttgctccaaaagggagaaattcagaaaatatatttactgagaagttaaaggaagacagtattcctgctcctcgctctgttggcagtattaaaatcaactttacccctcgagtattcccaacagctcttcgtgaatcacaagtagcagaagaggaggagtggctacacaaacaagctgaggcacgaagagcaatgaatactgacatagctgaactttgcgatttaaaagaagaagaaaagaacccagaatggttgaaggataaaggaaacaaattgtttgcaacggaaaactatttggcagctatcaatgcatataatttagccataagactaaataataagatgccactattgtatttgaaccgggctgcttgccacctaaaactaaaaaacttacacaaggctattgaagattcttctaaggcactggaattattgatgccacctgttacagacaatgctaatgcaagaatgaaggcacatgtacgacgtggaacagcattctgtcaactagaattgtatgtagaaggcctacaggattatgaagcggcacttaagattgatccatccaacaaaattgtacaaattgatgctgagaagattcggaatgtaattcaaggaacagaactaaaatcttaatgactattagaagtaactaagtattgttataagttttttaaaaacaactggaggcatctttgtacatattatggccagttgtacagaatcgctttctgtttagtactttagttctgttgagggcaaaatattataaatctatagaaaataaactgtttgacttgaatcatttctgaataagtaaatctaaataagaatctattttaattccttatttcttcatattaatacatatgtatacttttttgtgttactgaattaagcttgcccttgtaacaaaatatgttttggtatagttaccaggacacttactgattaatttttaacaaggtagaattttaaaataaaagatttataaataa

SEQ ID NO: 234280 - DNA, 1263 bp, Artificial Sequence
  derived and/or modified sequence
atgcccctgcaggtgagcgactacagctggcagcagaccaagaccgccgtgttcctgagcctgcccctgaagggcgtgtgcgtgagagacaccgacgtgttctgcaccgagaactacctgaaggtgaacttcccccccttcctgttcgaggccttcctgtacgcccccatcgacgacgagagcagcaaggccaagatcggcaacgacaccatcgtgttcaccctgtacaagaaggaggccgccatgtgggagaccctgagcgtgaccggcgtggacaaggagatgatgcagagaatcagagagaagagcatcctgcaggcccaggagagagccaaggaggccaccgaggccaaggccgccgccaagagagaggaccagaagtacgccctgagcgtgatgatgaagatcgaggaggaggagagaaagaagatcgaggacatgaaggagaacgagagaatcaaggccaccaaggccctggaggcctggaaggagtaccagagaaaggccgaggagcagaagaagatccagagagaggagaagctgtgccagaaggagaagcagatcaaggaggagagaaagaagatcaagtacaagagcctgaccagaaacctggccagcagaaacctggcccccaagggcagaaacagcgagaacatcttcaccgagaagctgaaggaggacagcatccccgcccccagaagcgtgggcagcatcaagatcaacttcacccccagagtgttccccaccgccctgagagagagccaggtggccgaggaggaggagtggctgcacaagcaggccgaggccagaagagccatgaacaccgacatcgccgagctgtgcgacctgaaggaggaggagaagaaccccgagtggctgaaggacaagggcaacaagctgttcgccaccgagaactacctggccgccatcaacgcctacaacctggccatcagactgaacaacaagatgcccctgctgtacctgaacagagccgcctgccacctgaagctgaagaacctgcacaaggccatcgaggacagcagcaaggccctggagctgctgatgccccccgtgaccgacaacgccaacgccagaatgaaggcccacgtgagaagaggcaccgccttctgccagctggagctgtacgtggagggcctgcaggactacgaggccgccctgaagatcgaccccagcaacaagatcgtgcagatcgacgccgagaagatcagaaacgtgatccagggcaccgagctgaagagctag

SEQ ID NO: 234281 - protein, 206 aa, Artificial Sequence
  derived and/or modified sequence
MAEDADMRNELEEMQRRADQLADESLESTRRMLQLVEESKDAGIRTLVMLDEQGEQLERIEEGMDQINKDMKEAEKNLTDLGKFCGLCVCPCNKLKSSDAYKKAWGNNQDGVVASQPARVVDEREQMAISGGFIRRVTNDARENEMDENLEQVSGIIGNLRHMALDMGNEIDTQNRQIDRIMEKADSNKTRIDEANQRATKMLGSG

SEQ ID NO: 234282 - protein, 93 aa, Artificial Sequence
  derived and/or modified sequence
MAEDADMRNELEEMQRRADQLADESLESTRRMLQLVEESKDAGIRTLVMLDEQGEQLERIEEGMDQINKDMKEAEKNLTDLGKFCGLCVCPCN

SEQ ID NO: 234283 - DNA, 621 bp, Artificial Sequence
  derived and/or modified sequence
atggccgaggacgccgacatgagaaacgagctggaggagatgcagagaagagccgaccagctggccgacgagagcctggagagcaccagaagaatgctgcagctggtggaggagagcaaggacgccggcatcagaaccctggtgatgctggacgagcagggcgagcagctggagagaatcgaggagggcatggaccagatcaacaaggacatgaaggaggccgagaagaacctgaccgacctgggcaagttctgcggcctgtgcgtgtgcccctgcaacaagctgaagagcagcgacgcctacaagaaggcctggggcaacaaccaggacggcgtggtggccagccagcccgccagagtggtggacgagagagagcagatggccatcagcggcggcttcatcagaagagtgaccaacgacgccagagagaacgagatggacgagaacctggagcaggtgagcggcatcatcggcaacctgagacacatggccctggacatgggcaacgagatcgacacccagaacagacagatcgacagaatcatggagaaggccgacagcaacaagaccagaatcgacgaggccaaccagagagccaccaagatgctgggcagcggctag

SEQ ID NO: 234284 - DNA, 282 bp, Artificial Sequence
  derived and/or modified sequence
atggccgaggacgccgacatgagaaacgagctggaggagatgcagagaagagccgaccagctggccgacgagagcctggagagcaccagaagaatgctgcagctggtggaggagagcaaggacgccggcatcagaaccctggtgatgctggacgagcagggcgagcagctggagagaatcgaggagggcatggaccagatcaacaaggacatgaaggaggccgagaagaacctgaccgacctgggcaagttctgcggcctgtgcgtgtgcccctgcaactag

SEQ ID NO: 234285 - DNA, 621 bp, Artificial Sequence
  derived and/or modified sequence
atggctgaggacgcagacatgaggaacgagctcgaagagatgcaacgaagagcagatcagctcgcagatgaaagcctcgagtcaacaagaagaatgctgcagctggtcgaagagtcaaaagacgctggtatacgcacactggttatgctcgacgagcagggagagcagctcgagcgaatagaggagggaatggaccagatcaataaagacatgaaggaggccgaaaaaaatctcacagatctgggcaaattctgtggactgtgcgtgtgcccatgtaataaattgaagtcttcagatgcttataagaaggcctgggggaacaaccaggatggagtcgtggcctctcagcccgcaagggtggttgacgagagggaacaaatggctatttccggcggatttatcaggagagttacaaacgatgcacgcgagaatgagatggacgagaaccttgagcaggtatcaggcattatcggcaacctgcgacacatggcattggatatgggcaatgagattgatactcagaaccgacagatagaccggatcatggagaaggccgattccaacaagaccaggatagatgaagcaaaccagagagccaccaagatgttgggcagcgggtag

SEQ ID NO: 234286 - DNA, 282 bp, Artificial Sequence
  derived and/or modified sequence
atggcagaggatgctgacatgcgtaacgagttggaagaaatgcagcgacgggccgatcagttggctgatgagtcactggaaagtacacgccgtatgttacaactcgtggaggaatcgaaagacgcgggtatccggaccctggtgatgctggacgagcagggcgagcagctggagcgcatcgaagagggcatggaccagatcaacaaggacatgaaggaggccgagaaaaacttgaccgacttgggcaagttttgcggcctgtgtgtttgtccttgtaactag

SEQ ID NO: 234287 - DNA, 621 bp, Artificial Sequence
  derived and/or modified sequence
atggctgaagatgctgacatgagaaatgagctggaggagatgcagaggagagctgaccagctggctgatgagagcctggagagcaccaggaggatgctgcagctggtggaggagagcaaggatgctggcatccgcaccctggtgatgctggatgagcagggcgagcagctggagcgcatcgaggagggcatggaccagatcaacaaggacatgaaggaggccgagaagaacctgacagacctgggcaagttctgtggcctgtgtgtgtgcccctgcaacaagctgaagagcagtgatgcctacaagaaggcctggggcaacaaccaggatggagtggtggccagccagcctgcccgggtggtggatgagcgggagcagatggccatcagcggcggcttcatcagaagagtgaccaatgatgccagagaaaatgagatggatgagaacctggagcaggtgtctggcatcatcggcaacctgcggcacatggccctggacatgggaaatgaaattgacacccagaaccggcagattgaccgcatcatggagaaggctgacagcaacaagaccagaattgatgaggccaaccagagggccaccaagatgctgggcagcggctag

SEQ ID NO: 234288 - DNA, 282 bp, Artificial Sequence
  derived and/or modified sequence
atggctgaagatgctgacatgagaaatgagctggaggagatgcagaggagagctgaccagctggctgatgagagcctggagagcaccaggaggatgctgcagctggtggaggagagcaaggatgctggcatccgcaccctggtgatgctggatgagcagggcgagcagctggagcgcatcgaggagggcatggaccagatcaacaaggacatgaaggaggccgagaagaacctgacagacctgggcaagttctgtggcctgtgtgtgtgcccctgcaactag

SEQ ID NO: 234289 - DNA, 621 bp, Artificial Sequence
  derived and/or modified sequence
atggccgaggacgccgacatgcggaacgagctggaggagatgcagcgccgggccgatcagctcgctgacgagtccctcgagtctacccgtagaatgctgcaactcgtagaagaaagtaaagacgctggcatcaggaccctggtgatgttagatgagcagggtgagcaactcgaacgcattgaggaaggcatggatcaaatcaataaggacatgaaggaagcagaaaaaaatctgaccgaccttgggaagttctgcgggctttgtgtctgtccttgcaacaagttaaaatcctccgacgcatataaaaaggcatggggaaacaatcaggatggagtggtcgcatctcagcccgctcgcgtcgtagacgaaagagaacagatggcaatctctggtggctttattcggcgagtgacaaatgatgccagggaaaacgaaatggatgaaaatctggaacaagtttctggtattattgggaatttgcggcacatggctctagatatgggtaacgagattgacacccagaacagacagattgatcgtataatggagaaggccgattctaacaaaacacggatagatgaggctaaccagagggccactaaaatgcttggctcgggatag

SEQ ID NO: 234290 - DNA, 282 bp, Artificial Sequence
  derived and/or modified sequence
atggccgaggacgccgacatgcggaacgagctggaggagatgcagcgccgggctgatcagctcgccgacgagtcgttggaaagcacacgccggatgctgcagttggtggaggagtctaaggatgcaggaatacgaactcttgtaatgctggatgaacagggggagcaactcgagcggatcgaagagggaatggaccagatcaacaaggacatgaaagaagcggaaaaaaacctcacagatctcggtaaattctgtggcctatgtgtgtgcccttgtaactag

SEQ ID NO: 234291 - DNA, 621 bp, Artificial Sequence
  derived and/or modified sequence
atggccgaggacgccgatatgcggaacgagctggaagagatgcaaaggcgggcagatcagctggccgacgagtctttagagtccactcgcaggatgctccagcttgtagaggagtcaaaagatgcaggcatccgcaccctcgtgatgctggacgagcagggagagcagctcgaacgtatagaagaaggaatggatcagataaataaggacatgaaggaagccgagaaaaatctgactgacctcgggaaattctgtgggctctgtgtgtgcccatgcaataagttgaagtcttcagatgcctacaaaaaggcatggggcaataaccaagacggggtggttgcttcacaaccagctagagttgtggacgaacgagagcagatggcaatctcaggtggtttcattcggcgagttacgaacgacgctcgcgagaatgagatggatgaaaatctagaacaggtctcagggatcattgggaacttgagacacatggcccttgacatgggcaacgaaattgatactcagaatcgtcagatagaccggattatggagaaagccgattcaaataagaccagaatcgacgaggcaaatcagagggcaaccaaaatgctgggctccggatag

SEQ ID NO: 234292 - DNA, 282 bp, Artificial Sequence
  derived and/or modified sequence
atggctgaggacgcggacatgaggaatgagcttgaagaaatgcagcgtagggcggaccagctagcagacgagagtctggaaagcacaaggcggatgctacagttggtggaggaaagcaaagatgcgggtattaggaccctcgtgatgcttgacgagcaaggagagcagctggagagaattgaggagggtatggatcagatcaataaagatatgaaggaggcagagaagaacctgacagacctaggtaagttctgcggactttgtgtgtgcccctgcaactag

SEQ ID NO: 234293 - DNA, 2053 bp, Artificial Sequence
  derived and/or modified sequence
atctttgatgagggcagagctcacgttgcattgaagacgaaacctcggggaggtcaggcgctgtctttccttccctccctgctcggcggctccaccacagttgcaacctgcagaggcccggagaacacaaccctcccgagaagcccaggtccagagccaaacccgtcactgaccccccagcccaggcgcccagccactccccaccgctaccatggccgaagacgcagacatgcgcaatgagctggaggagatgcagcgaagggctgaccagttggctgatgagtcgctggaaagcacccgtcgtatgctgcaactggttgaagagagtaaagatgctggtatcaggactttggttatgttggatgaacaaggagaacaactggaacgcattgaggaagggatggaccaaatcaataaggacatgaaagaagcagaaaagaatttgacggacctaggaaaattctgcgggctttgtgtgtgtccctgtaacaagcttaaatcaagtgatgcttacaaaaaagcctggggcaataatcaggacggagtggtggccagccagcctgctcgtgtagtggacgaacgggagcagatggccatcagtggcggcttcatccgcagggtaacaaatgatgcccgagaaaatgaaatggatgaaaacctagagcaggtgagcggcatcatcgggaacctccgtcacatggccctggatatgggcaatgagatcgatacacagaatcgccagatcgacaggatcatggagaaggctgattccaacaaaaccagaattgatgaggccaaccaacgtgcaacaaagatgctgggaagtggttaagtgtgcccacccgtgttctcctccaaatgctgtcgggcaagatagctccttcatgcttttctcatggtattatctagtaggtctgcacacataacacacatcagtccacccccattgtgaatgttgtcctgtgtcatctgtcagcttcccaacaatactttgtgtcttttgttctctcttggtctctttctttccaaaggttgtacatagtggtcatttggtggctctaactccttgaggtcttgagtttcatttttcattttctctcctcggtggcatttgctgaataacaacaatttaggaatgctcaatgtgctgttgattctttcaatccacagtattgttcttgtaaaactgtgacattccacagagttactgccacggtcctttgagtgtcaggctctgaatctctcaaaatgtgccgtctttggttcctcatggctgttatctgtctttatgatttcatgattagacaatgtggaattacataacaggcattgcactaaaagtgatgtgatttatgcatttatgcatgagaactaaatagatttttagattcctacttaaacaaaaactttccatgacagtagcatactgatgagacaacacacacacacacaaaacaacagcaacaacaacagaacaacaacaaagcatgctcagtattgagacactgtcaagattaagttataccagcaaaagtgcagtagtgtcacttttttcctgtcaatatatagagacttctaaatcataatcatccttttttaaaaaaaagaattttaaaaaagatggatttgacacactcaccatttaatcatttccagcaaaatatatgtttggctgaaattatgtcaaatggatgtaatatagggtttgtttgctgcttttgatggctatgttttggagagagcaatcttgctgtgaaacagtgtggatgtaaattttataaggctgactcttactaaccaccatttcccctgtggtttgttatcagtacaattctttgttgcttaatctagagctatgcacaccaaattgctgagatgtttagtagctgataaagaaaccttttaaaaaaataatataaatgaatgaaatataaactgtgagataaatatcattatagcatgtaatattaaattcctcctgtctcctctgtcagtttgtgaagtgattgacattttgtagctagtttaaaattattaaaaattatagactcca

SEQ ID NO: 234294 - DNA, 492 bp, Artificial Sequence
  derived and/or modified sequence
gggtaaatacaagtattggtgcacttagggtgcggtattccgtgtgtgcacgtctggtgggggctttataaagtgttttcgaggtgagctgctggggaaaagggaaacgggagccctgcaaatggagcgacggggaggaagagcgagggtccagagccaaacccgtcactgaccccccagcccaggcgcccagccactccccaccgctaccatggccgaagacgcagacatgcgcaatgagctggaggagatgcagcgaagggctgaccagttggctgatgagtcgctggaaagcacccgtcgtatgctgcaactggttgaagagagtaaagatgctggtatcaggactttggttatgttggatgaacaaggagaacaactggaacgcattgaggaagggatggaccaaatcaataaggacatgaaagaagcagaaaagaatttgacggacctaggaaaattctgcgggctttgtgtgtgtccctgtaacaa

SEQ ID NO: 234295 - DNA, 927 bp, Artificial Sequence
  derived and/or modified sequence
gaacgcagcaagcccaggcggcggtggaaaggctggaggacacacctaaacatgtggaatcccaatgccggtgggccccctcatcctgtgccacagccagggtatccaggatgccaaccgttgggtccctaccctcctccatacccaccgcctgcccctggaatccctcctgtgaatcccttggctcctggcatggttggaccagcagtgatagtagacaagaagatgcagaagaaaatgaagaaagctcataaaaagatgcacaagcaccaaaagcaccacaagtaccacaagcatggcaagcattcctcctcttcctcctcctcttccagcagtgattctgactgaatacaggccctggacccttccctcaagtctcaccagttctgctctcccatcaagcttcagatgccatgttgtactgggggaatgtagcccttgtgctccccaccccctacctccacctgagcctcaccctgctgttgagccctgagtggctaggggaaatgggaagaggattgccatggcctggccatcttgttgctgcttggttagatcatatagctaatgaattaggcaggggagctattttttgaagatgatgaactaaatgttgaagacaagtttgagatctgtaaaatgtgattttttacttccacttataatacttgtgattggggaggtttgtggaaattcaattatgatgaaaaacctatcttttttgtaatgttggcatacttggggaatttagtggcaaatacattccccagcaggccttttgttggttgcactaactgcaaggttgctgggaagtagagtccatttggttgatgagctttgactgcggttttggaaccttacctctcctccttagcccaatatgctgtcttgggtcctattcaaataaagttatttctcctggtctca

SEQ ID NO: 234296 - DNA, 501 bp, Artificial Sequence
  derived and/or modified sequence
atgtggcgcctgcggagagctgctgtcgcatgcgaggtgtgccagagtcttgtgaaacatagcagcgggatcaagggatcattacctttgcagaagctgcatctggtatctcgcagcatttaccattcgcaccaccctacgctgaagttgcagcgcccacaacttaggacatcatttcagcagttctcctccctgactaacctgcctcttaggaaactgaagttcagtcctataaagtatggctaccaacctcgacggaacttctggccagcacgtcttgctacaagactgctaaagctacgatatctgatcttgggctcagcggtaggtgggggttatactgctaagaaaacttttgaccagtggaaggatatgataccagatctgtccgagtataaatggatcgtgccagacatagtctgggaaatcgacgagtatatcgacttcggatctccagaggagaccgcatttcgggctactgatagaggcagcgagtcctag

SEQ ID NO: 234297 - DNA, 501 bp, Artificial Sequence
  derived and/or modified sequence
atgtggaggctgcggcgggctgctgtggcctgtgaggtgtgccagagcctggtgaagcacagcagcggcatcaagggcagcctgcccctgcagaagctgcacctggtgagccgcagcatctaccacagccaccaccccaccctgaagctgcagaggccccagctgcggaccagcttccagcagttcagcagcctgaccaacctgcccctgaggaagctgaagttcagccccatcaagtatggctaccagcccaggaggaacttctggccagcccggctggccacccggctgctgaagctgcgctacctgatcctgggcagcgctgtgggcggcggctacacagccaagaagacctttgaccagtggaaggacatgatcccagacctgtctgagtacaagtggatcgtgcctgacatcgtgtgggagattgatgagtacatcgactttggcagccctgaggagacagccttccgggccacagaccggggcagcgagagctag

SEQ ID NO: 234298 - DNA, 501 bp, Artificial Sequence
  derived and/or modified sequence
atgtggcggctgcggcgggccgccgtggcctgcgaggtgtgccagagtttagtgaagcatagttcgggaatcaagggcagcctccccctgcaaaagctccatctcgtgagccgctccatctaccactcgcatcaccctactctcaaactccagaggccccagcttcgcacctcgttccagcagttcagttccctgactaacttgccgctgcgtaagcttaagtttagccctattaagtatgggtatcagcctagacgaaacttctggcctgctcggctggccacccgacttctcaaactgcgctatttgattcttggcagtgcagtgggtgggggctacactgctaagaagacctttgatcagtggaaagatatgatccccgatctctcagagtacaaatggattgtgcctgatatcgtatgggagatagacgagtacattgatttcggctccccggaagagactgccttcagagcaaccgatagggggagtgaaagctag

SEQ ID NO: 234299 - DNA, 631 bp, Artificial Sequence
  derived and/or modified sequence
ggccgcggctctgtgcccttgctgctgagggccacttcctgggtcattcctggaccgggagccgggctggggctcacacgggggctcccgcgtggccgtctcggcgcctgcgtgacctccccgccggcgggatgtggcgactacgtcgggccgctgtggcctgtgaggtctgccagtctttagtgaaacacagctctggaataaaaggaagtttaccactacaaaaactacatctggtttcacgaagcatttatcattcacatcatcctaccttaaagcttcaacgaccccaattaaggacatcctttcagcagttctcttctctgacaaaccttcctttacgtaaactgaaattctctccaattaaatatggctaccagcctcgcaggaatttttggccagcaagattagctacgagactcttaaaacttcgctatctcatactaggatcggctgttgggggtggctacacagccaaaaagacttttgatcagtggaaagatatgataccggaccttagtgaatataaatggattgtgcctgacattgtgtgggaaattgatgagtatatcgattttggttctccggaagaaacggcgtttagagcaacagatcgtggatctgaaagtga

SEQ ID NO: 234300 - DNA, 501 bp, Artificial Sequence
  derived and/or modified sequence
atgtggcgtctgcggagagccgctgtggcatgcgaagtgtgccaatctctcgtcaagcattcctccggaataaaagggtctctgcctttgcagaagctccacctcgtgagcaggtctatctaccacagccatcatccaaccctgaagctccagagaccacagctaagaacttccttccagcagttctctagccttacaaatcttccccttagaaaacttaagttctcaccaatcaagtatggctaccaacctagaaggaatttttggcctgctaggctcgctaccagattgcttaagttaaggtacttgatcctgggtagcgcagtgggcggagggtataccgctaagaagactttcgaccagtggaaggatatgatccccgacctgtcagagtataagtggattgtgcccgatattgtgtgggagattgacgaatatatagacttcggctcacctgaggaaactgctttcagagccacagatcgtggctccgagtcctag

SEQ ID NO: 234301 - DNA, 501 bp, Artificial Sequence
  derived and/or modified sequence
atgtggagactgagaagagccgccgtggcctgcgaggtgtgccagagcctggtgaagcacagcagcggcatcaagggcagcctgcccctgcagaagctgcacctggtgagcagaagcatctaccacagccaccaccccaccctgaagctgcagagaccccagctgagaaccagcttccagcagttcagcagcctgaccaacctgcccctgagaaagctgaagttcagccccatcaagtacggctaccagcccagaagaaacttctggcccgccagactggccaccagactgctgaagctgagatacctgatcctgggcagcgccgtgggcggcggctacaccgccaagaagaccttcgaccagtggaaggacatgatccccgacctgagcgagtacaagtggatcgtgcccgacatcgtgtgggagatcgacgagtacatcgacttcggcagccccgaggagaccgccttcagagccaccgacagaggcagcgagagctag

SEQ ID NO: 234302 - protein, 961 aa, Artificial Sequence
  derived and/or modified sequence
MWRLRRAAVACEVCQSLVKHSSGIKGSLPLQKLHLVSRSIYHSHHPTLKLQRPQLRTSFQQFSSLTNLPLRKLKFSPIKYGYQPRRNFWPARLATRLLKLRYLILGSAVGGGYTAKKTFDQWKDMIPDLSEYKWIVPDIVWEIDEYIDFGSPEETAFRATDRGSESDKHFRKGLLGELILLQQQIQEHEEEARRAAGQYSTSYAQQKRKVSDKEKIDQLQEELLHTQLKYQRILERLEKENKELRKLVLQKDDKGIHHRKLKKSLIDMYSEVLDVLSDYDASYNTQDHLPRVVVVGDQSAGKTSVLEMIAQARIFPRGSGEMMTRSPVKVTLSEGPHHVALFKDSSREFDLTKEEDLAALRHEIELRMRKNVKEGCTVSPETISLNVKGPGLQRMVLVDLPGVINTVTSGMAPDTKETIFSISKAYMQNPNAIILCIQDGSVDAERSIVTDLVSQMDPHGRRTIFVLTKVDLAEKNVASPSRIQQIIEGKLFPMKALGYFAVVTGKGNSSESIEAIREYEEEFFQNSKLLKTSMLKAHQVTTRNLSLAVSDCFWKMVRESVEQQADSFKATRFNLETEWKNNYPRLRELDRNELFEKAKNEILDEVISLSQVTPKHWEEILQQSLWERVSTHVIENIYLPAAQTMNSGTFNTTVDIKLKQWTDKQLPNKAVEVAWETLQEEFSRFMTEPKGKEHDDIFDKLKEAVKEESIKRHKWNDFAEDSLRVIQHNALEDRSISDKQQWDAAIYFMEEALQARLKDTENAIENMVGPDWKKRWLYWKNRTQEQCVHNETKNELEKMLKCNEEHPAYLASDEITTVRKNLESRGVEVDPSLIKDTWHQVYRRHFLKTALNHCNLCRRGFYYYQRHFVDSELECNDVVLFWRIQRMLAITANTLRQQLTNTEVRRLEKNVKEVLEDFAEDGEKKIKLLTGKRVQLAEDLKKVREIQEKLDAFIEALHQEK

SEQ ID NO: 234303 - protein, 166 aa, Artificial Sequence
  derived and/or modified sequence
MWRLRRAAVACEVCQSLVKHSSGIKGSLPLQKLHLVSRSIYHSHHPTLKLQRPQLRTSFQQFSSLTNLPLRKLKFSPIKYGYQPRRNFWPARLATRLLKLRYLILGSAVGGGYTAKKTFDQWKDMIPDLSEYKWIVPDIVWEIDEYIDFGSPEETAFRATDRGSES

SEQ ID NO: 234304 - DNA, 2886 bp, Artificial Sequence
  derived and/or modified sequence
atgtggaggcttcgccgcgccgccgtggcatgtgaagtgtgtcagagtcttgtcaaacatagttcaggtataaagggctccctgccgctccagaagctgcacttagtatcccggtcaatctatcattcacaccaccctacgctgaagttacagcgccctcaacttcggacatcttttcagcagttcagttctctcacaaaccttccgttgcggaagctgaagttttcgccgattaagtatgggtaccagcccaggagaaatttctggccggcacgcttagccacccggctgttgaaattgagatacctgatcctaggatcggccgttggtggcgggtacactgcgaagaaaacgtttgatcagtggaaagatatgattcccgatttgagcgagtataaatggatcgttcctgacattgtgtgggagatcgacgaatatattgatttcggaagtccggaggaaacagcatttcgagcaactgaccggggctctgagagcgataaacactttaggaaaggactcctaggcgagcttatccttttgcagcagcaaattcaagaacacgaagaggaagcgcgtcgggctgctggacaatactcgacatcctatgcccagcagaagaggaaggtgtccgataaggaaaaaatagaccagctgcaggaggaactgttacatacacagctcaagtatcaacggatactcgagaggctagagaaggagaacaaagaattgcggaaacttgtgctgcaaaaggacgacaaggggatccaccatcgaaaactgaaaaaatcactcatcgatatgtattcggaagtgctggacgtgctgtctgactacgatgcatcatacaatacacaggaccatctcccacgggttgtggtggtgggcgatcagtcagccgggaaaacttctgtcctcgaaatgatcgctcaggcccgcatcttccctaggggtagcggggaaatgatgacccgatcacccgtgaaagtgactctcagtgaaggtccgcaccacgtagcactttttaaagattcgtcacgcgaattcgatttgacaaaagaggaagacttggccgccttaagacacgagatcgaactgcggatgagaaaaaatgtcaaggaaggctgtactgtcagtccagagactatcagtctgaacgtgaagggccccggcttgcagagaatggtgctggtggatcttccgggggtgattaacaccgtcacatcagggatggcccctgatacaaaagagaccatcttctcgatctccaaagcatacatgcagaaccctaatgctatcattctatgtatccaggacggctccgtcgatgccgagcgatccatagtcactgatttggttagccagatggacccccacggccgaagaaccatttttgtgttaaccaaagtggacctggctgaaaagaatgtggcatcgccgtcacgaatccaacaaattatcgaagggaagttgttccccatgaaggccctgggctactttgccgtcgtgactggcaaagggaatagctccgagtcgatcgaagctatccgggagtacgaggaggagttctttcagaattcaaaattactgaagacatctatgttgaaggctcaccaggtgaccactaggaatttatctctcgcagtgagcgattgtttctggaagatggtcagagagagcgtagaacagcaggccgattcttttaaagctactagattcaacctggagacggaatggaaaaacaattacccaagacttagggaactagatcgaaacgaactcttcgaaaaggcaaagaacgagattctggacgaagtcattagcctgtctcaagtgacccccaaacattgggaggagatcctccagcagtctttatgggaaagggtgtcaactcacgtaattgagaacatctatctcccagcggcccaaacaatgaattctggcactttcaacaccacggtggatatcaagcttaaacagtggactgacaagcaattaccaaataaagccgtcgaagtcgcgtgggaaactctgcaggaagagttcagcagatttatgaccgagcccaaagggaaggagcacgatgacattttcgacaaattaaaggaagccgttaaggaagaatccattaaacgccataaatggaatgactttgcggaggactcccttagggtcatccaacacaacgctctcgaggatcggtctatttccgacaaacagcagtgggatgccgccatctattttatggaggaagccctgcaagcccggctcaaagatactgaaaatgcgattgagaatatggttggaccagactggaagaagaggtggctgtactggaaaaatcgaacacaggaacagtgcgtgcacaacgagaccaagaacgaattagaaaagatgttgaagtgcaacgaggaacatcctgcctacttggcctctgatgagattaccacggtccgcaaaaatctggagtctcggggcgtagaggttgacccttctcttatcaaagatacctggcaccaggtttatcgccggcacttcttgaaaactgctctgaatcattgtaatctgtgcagaaggggcttctattattatcaacgccatttcgtggattccgaacttgagtgtaacgatgtggtgctgttctggaggatacagcggatgctggcaataactgctaataccctgaggcagcagctgaccaatacagaggtccgccggctggaaaagaatgtgaaagaggttctggaggactttgccgaagatggagagaaaaaaattaaactattgacagggaagagagtgcaactagccgaagatctgaagaaagttagggagatccaggagaaactggatgccttcattgaggctttgcaccaagaaaaatag

SEQ ID NO: 234305 - DNA, 2886 bp, Artificial Sequence
  derived and/or modified sequence
atgtggaggctgcggcgggctgctgtggcctgtgaggtgtgccagagcctggtgaagcacagcagcggcatcaagggcagcctgcccctgcagaagctgcacctggtgagccgcagcatctaccacagccaccaccccaccctgaagctgcagaggccccagctgcggaccagcttccagcagttcagcagcctgaccaacctgcccctgaggaagctgaagttcagccccatcaagtatggctaccagcccaggaggaacttctggccagcccggctggccacccggctgctgaagctgcgctacctgatcctgggcagcgctgtgggcggcggctacacagccaagaagacctttgaccagtggaaggacatgatcccagacctgtctgagtacaagtggatcgtgcctgacatcgtgtgggagattgatgagtacatcgactttggcagccctgaggagacagccttccgggccacagaccggggcagcgagagtgacaagcacttcaggaagggcctgctgggggagctgatcctgctgcagcagcagatccaggagcacgaggaggaggccaggagagctgctggccagtacagcaccagctatgcccagcagaagaggaaggtgtctgacaaggagaagattgaccagctgcaggaggagctgctgcacacccagctgaagtaccagaggatcctggagcggctggagaaggagaacaaggagctgaggaagctggtgctgcagaaggatgacaagggcatccaccacaggaagctgaagaagagcctgattgacatgtacagcgaggtgctggatgtgctgagtgactatgatgccagctacaacacccaggaccacctgccccgggtggtggtggtgggggaccagagcgctgggaagacctctgtgctggagatgattgcccaggcccgcatcttcccccggggcagcggggagatgatgaccaggagccctgtgaaggtgaccctgtctgagggcccccaccacgtggccctcttcaaggacagcagccgggagtttgacctgaccaaggaggaggacctggccgccctgcggcatgaaattgagctgaggatgaggaagaatgtgaaggagggctgcaccgtgtccccagagaccatcagcctgaatgtgaagggccctggcctgcagaggatggtgctggtggacctgcccggggtcatcaacacagtgaccagcggcatggccccagacaccaaggagaccatcttcagcatcagcaaggcctacatgcagaaccccaatgccatcatcctgtgcatccaggacggctctgtggatgctgagaggagcatcgtgacagacctggtgtcccagatggacccccatggaagaaggaccatctttgtgctgaccaaggtggacctggccgagaagaatgtggccagccccagccgcatccagcagatcatcgagggcaagctgttccccatgaaggccctgggctactttgctgtggtgacaggcaagggcaacagcagcgagagcattgaggccatccgggagtatgaggaggagttcttccagaacagcaagctgctgaagacctccatgctgaaggcccaccaggtgaccaccaggaacctgagcctggccgtgtctgactgcttctggaagatggtgcgggagagcgtggagcagcaggccgacagcttcaaggccacccgcttcaacctggagacagagtggaagaacaactacccccggctgcgggagctggacagaaatgagctgtttgagaaggccaagaatgagatcctggatgaggtgatcagcctgagccaggtgacccccaagcactgggaggagatcctgcagcagagcctgtgggagcgggtgtccacccacgtgattgagaacatctacctgcctgctgcccagaccatgaacagcggcaccttcaacaccaccgtggacatcaagctgaagcagtggacagacaagcagctgcccaacaaggctgtggaggtggcctgggagaccctgcaggaggagttcagccgcttcatgacagagcccaagggcaaggagcatgatgacatctttgacaagctgaaggaggccgtgaaggaggagagcatcaagaggcacaagtggaatgactttgctgaggacagcctgcgggtcatccagcacaatgccctggaggacaggagcatcagtgacaagcagcagtgggatgctgccatctacttcatggaggaggccctgcaggcccggctgaaggacacagaaaatgccatcgagaacatggtgggccctgactggaagaagcgctggctgtactggaagaacagaacccaggagcagtgtgtgcacaatgagaccaagaatgagctggagaagatgctgaagtgcaatgaggagcacccagcctacctggccagtgatgagatcaccaccgtgaggaagaacctggagagccggggcgtggaggtggaccccagcctcatcaaggacacctggcaccaggtgtacagaagacacttcctgaagacagccctgaaccactgcaacctgtgccggcggggcttctactactaccagaggcactttgtggacagcgagctggagtgcaatgatgtggtgctcttctggaggatccagaggatgctggccatcacagccaacaccctgcggcagcagctgaccaacacagaggtgcggcggctggagaagaatgtgaaggaggtgctggaggactttgctgaagatggagagaagaagatcaagctgctgaccgggaagagggtgcagctggccgaggacctgaagaaggtgcgggagatccaggagaagctggatgccttcatcgaggccctgcaccaggagaagtag

SEQ ID NO: 234306 - DNA, 2886 bp, Artificial Sequence
  derived and/or modified sequence
atgtggcggctgcggcgggccgccgtggcctgcgaggtgtgccagagcctggtcaagcacagctcaggcatcaagggaagccttcccctgcagaagctgcatctggtgtccagatcaatctatcactcacaccaccctacccttaagcttcaacgcccccagctgagaactagttttcaacagtttagctcactgacgaaccttccactgcgtaagcttaaattcagtcccatcaagtatggataccagccccgtcggaatttttggcctgccaggctggccactcggctccttaagctgagataccttatactgggaagcgctgtgggaggaggatataccgctaagaagacctttgatcagtggaaggatatgatcccagacctgagcgaatacaaatggatcgtgccagatattgtgtgggagatcgatgagtatatagacttcggctcccccgaggagactgcattccgcgcaacagaccgtggttccgagtcagacaagcacttccggaagggactccttggtgaactcatcctgcttcaacagcagattcaggaacacgaagaggaggcccgtagggcggcaggccagtattctacaagctacgctcagcaaaaacgtaaagtatctgacaaagaaaagatcgaccagctacaggaggagctgcttcacacacagctaaagtaccaacgcatcctcgaacgactggagaaggaaaataaggaactgaggaagctggtactgcagaaggatgataaaggcattcatcaccgcaagttaaagaagtcattaattgacatgtatagtgaggtgctggatgtgctatctgactatgacgcctcatataacacgcaagatcacctaccacgggtcgtcgtggtaggtgatcagagcgctggaaagaccagcgttttggagatgatcgcacaggctaggatttttcccaggggatccggtgaaatgatgacccgcagtcccgtaaaagttaccttgtctgaagggccgcaccatgtggctctttttaaggactccagccgcgagttcgatctgaccaaagaggaagatctggccgctcttcggcacgaaattgaactgcggatgcggaaaaatgtgaaggaaggttgcacagtaagccctgagaccatttctctaaatgtcaaaggcccagggcttcagagaatggtcctggttgatctacccggtgtgatcaacacggttacttcaggcatggccccagacacaaaagaaacgatcttttctatctcaaaagcttacatgcagaaccccaatgccattattctttgtatccaagatggctctgtggatgccgaacgaagcattgtgaccgacctcgtgtcccagatggatccccacggacgaagaacaatcttcgtgcttacgaaggttgacctggcggagaaaaatgtagcctctccaagccggattcagcaaattattgagggaaaactgttcccaatgaaagcactggggtacttcgccgtcgtgaccggcaaggggaattcctctgaatcaatagaagctatacgagaatatgaggaggagttttttcaaaacagcaaactgctaaaaacttccatgctcaaggcacaccaggttacaaccaggaacctgagcctcgctgtgtctgactgtttctggaagatggtgagagagtccgtggagcagcaggccgattcatttaaggcaacgagatttaacttagagacagaatggaaaaataattacccaaggctgcgggagctcgaccgaaacgagttgttcgagaaggctaagaatgagatcttagacgaggtgatttctctgagtcaggtgacacctaaacattgggaggagattttgcaacagtccttgtgggagagggtgagcacccatgtcatcgagaatatatatcttcctgcagcacagactatgaacagtggaacgtttaacacaactgtagacatcaagctcaagcagtggacggataaacaactccctaataaggcagtagaggtcgcttgggagaccctacaagaggaattctcccgattcatgaccgagccgaagggcaaagaacacgatgacatctttgataagttgaaggaggccgtgaaggaggagagtatcaagcgccacaaatggaatgatttcgccgaggacagcctcagggtcatccaacacaatgccctggaggatcgaagtatttccgacaaacagcagtgggatgcggcaatctacttcatggaagaggcattacaggcacgtcttaaagacactgagaatgccatagaaaatatggtaggcccagactggaagaagaggtggctctactggaaaaaccgaacccaggagcaatgtgtacacaacgagacaaaaaacgaattggaaaaaatgctgaagtgcaacgaggagcaccccgcatacctggcatcggatgaaataacaacagtgaggaagaatctggagtccagaggcgtggaggttgatccgagtctgatcaaggacacgtggcaccaggtttacagacgtcattttctgaagaccgccctgaatcactgcaatctgtgtcgcagaggcttctattactaccaacggcactttgtcgacagcgagctggagtgcaacgacgtcgtgttattttggcgcatccagcggatgttagcaatcaccgccaacacgctgcgccagcagctgactaacactgaggtccggcgactcgaaaagaacgtgaaagaggtattggaggactttgccgaagatggcgagaaaaaaattaagctcctgacaggtaaacgggtccagcttgcagaagatctcaagaaagtgcgagagattcaggagaaactggatgctttcatcgaagctttgcaccaagaaaaatag

SEQ ID NO: 234307 - DNA, 6330 bp, Artificial Sequence
  derived and/or modified sequence
gtgctgcccgcctagaaagggtgaagtggttgtttccgtgacggactgagtacgggtgcctgtcaggctcttgcggaagtccatgcgccattgggagggcctcggccgcggctctgtgcccttgctgctgagggccacttcctgggtcattcctggaccgggagccgggctggggctcacacgggggctcccgcgtggccgtctcggcgcctgcgtgacctccccgccggcgggatgtggcgactacgtcgggccgctgtggcctgtgaggtctgccagtctttagtgaaacacagctctggaataaaaggaagtttaccactacaaaaactacatctggtttcacgaagcatttatcattcacatcatcctaccttaaagcttcaacgaccccaattaaggacatcctttcagcagttctcttctctgacaaaccttcctttacgtaaactgaaattctctccaattaaatatggctaccagcctcgcaggaatttttggccagcaagattagctacgagactcttaaaacttcgctatctcatactaggatcggctgttgggggtggctacacagccaaaaagacttttgatcagtggaaagatatgataccggaccttagtgaatataaatggattgtgcctgacattgtgtgggaaattgatgagtatatcgattttggttctccggaagaaacggcgtttagagcaacagatcgtggatctgaaagtgacaagcattttagaaagggtctgcttggtgagctcattctcttacaacaacaaattcaagagcatgaagaggaagcgcgcagagccgctggccaatatagcacgagctatgcccaacagaagcgcaaggtgtcagacaaagagaaaattgaccaacttcaggaagaacttctgcacactcagttgaagtatcagagaatcttggaacgattagaaaaggagaacaaagaattgagaaaattagtattgcagaaagatgacaaaggcattcatcatagaaagcttaagaaatctttgattgacatgtattctgaagttcttgatgttctctctgattatgatgccagttataatacgcaagatcatctgccacgggttgttgtggttggagatcagagtgctggaaagactagtgtgttggaaatgattgcccaagctcgaatattcccaagaggatctggggagatgatgacacgttctccagttaaggtgactctgagtgaaggtcctcaccatgtggccctatttaaagatagttctcgggagtttgatcttaccaaagaagaagatcttgcagcattaagacatgaaatagaacttcgaatgaggaaaaatgtgaaagaaggctgtaccgttagccctgagaccatatccttaaatgtaaaaggccctggactacagaggatggtgcttgttgacttaccaggtgtgattaatactgtgacatcaggcatggctcctgacacaaaggaaactattttcagtatcagcaaagcttacatgcagaatcctaatgccatcatactgtgtattcaagatggatctgtggatgctgaacgcagtattgttacagacttggtcagtcaaatggaccctcatggaaggagaaccatattcgttttgaccaaagtagacctggcagagaaaaatgtagccagtccaagcaggattcagcagataattgaaggaaagctcttcccaatgaaagctttaggttattttgctgttgtaacaggaaaagggaacagctctgaaagcattgaagctataagagaatatgaagaagagttttttcagaattcaaagctcctaaagacaagcatgctaaaggcacaccaagtgactacaagaaatttaagccttgcagtatcagactgcttttggaaaatggtacgagagtctgttgaacaacaggctgatagtttcaaagcaacacgttttaaccttgaaactgaatggaagaataactatcctcgcctgcgggaacttgaccggaatgaactatttgaaaaagctaaaaatgaaatccttgatgaagttatcagtctgagccaggttacaccaaaacattgggaggaaatccttcaacaatctttgtgggaaagagtatcaactcatgtgattgaaaacatctaccttccagctgcgcagaccatgaattcaggaacttttaacaccacagtggatatcaagcttaaacagtggactgataaacaacttcctaataaagcagtagaggttgcttgggagaccctacaagaagaattttcccgctttatgacagaaccgaaagggaaagagcatgatgacatatttgataaacttaaagaggctgttaaggaagaaagtattaaacgacacaagtggaatgactttgcggaggacagcttgagggttattcaacacaatgctttggaagaccgatccatatctgataaacagcaatgggatgcagctatttattttatggaagaggctctgcaggctcgtctcaaggatactgaaaatgcaattgaaaacatggtgggtccagactggaaaaagaggtggttatactggaagaatcggacccaagaacagtgtgttcacaatgaaaccaagaatgaattggagaagatgttgaaatgtaatgaggagcacccagcttatcttgcaagtgatgaaataaccacagtccggaagaaccttgaatcccgaggagtagaagtagatccaagcttgattaaggatacttggcatcaagtttatagaagacattttttaaaaacagctctaaaccattgtaacctttgtcgaagaggtttttattactaccaaaggcattttgtagattctgagttggaatgcaatgatgtggtcttgttttggcgtatacagcgcatgcttgctatcaccgcaaatactttaaggcaacaacttacaaatactgaagttaggcgattagagaaaaatgttaaagaggtattggaagattttgctgaagatggtgagaagaagattaaattgcttactggtaaacgcgttcaactggcggaagacctcaagaaagttagagaaattcaagaaaaacttgatgctttcattgaagctcttcatcaggagaaataaattaaaatcgtactcataatcagctctgcatacatctgaagaacaaaaacatcaacgtcttttgtccagcctctttttcttctgctgttccacctttctaaacatacaataaagtcatgggataaaaataatcgatgtatgttacgggcgctttaaccatcagctgcctctcgaatggaagaacagtggtaatggattaacatcctattttgttgtactaaagtgacaaatcggaataatataattggtatggccattaggttcagtccttgaagataagaaacttgttctctgtttgttgtcttatttgtggtggcactcgtttaatggattaactgaggttgctcaatgttcagtttcttttccagaaatacaatgctaggtgttttgaaataaaacttatatagcaattgtttaaagttatcaattgtatataaaatcacagtagcctgctaaatcattgtatgtgtctgtagtattctattcccagaaactatttgaccatgataattcagtttatattcaccacatgaaagaaaaatgggtaacagaagaacccttaaaacaggttaatttggattgtaacgttcagtgaaagaaatttcaacccttcatagccagcgaagaaatttgccttggaagccaagtcagtaccagcttacctatttgattcagttgctgttttctcactctctatatccatttgaaattgatttattttagatgttgtatacttacgttaggctttctgttaatagtggtttttctcctgttgacagagccaccggattatgacacaggatgaggaagattaaggataatcaattgactaatttcatttagaatattatcaaacatttcaactaggtatcagaaaaaggctttctttcataagactattttaaatagaaattatttcaacaattaaagtaatgttgaccatccccctctcagctgaataaagaaaaatttagttcaatttattgcaatttaattacaatactaccttcacaacattttcatgtgttttaaataaatattttttaattggctaaaggacattcaagcaaagaaatgctttctttacttaaaatgtctatctcatttgctgccttttcactaagcctttactttgttaataaaagtgtccattgtgtgatgtttttgattttacagtttgctaaatcttattttcttggagttgctttttggtaacagccccattgctactccccattttattgttttacatcaatgcatgcttcgttgtgatccctcaagatgtaacacttggtatgctcggttgaggatatgaaaaaatacttccgaaaccaggaattcaatgtatgtttgttttatactgtttgataagaaaagtaggtccagccttaagcagcacagatgcgctggtagatgcatagtcaggaactttttttatttcttttaggtctagggacaggagtgaatagaaagggaggagagctctattatgttctatacacagattaggagatgaccttactgggtacacccctctaaccagtgcttacaggttaatgcatgttaatgaatatttttgcagttgtaaagcataacaattacaactacacatctatttctaaagaataaaacaggaccatatttatttacttctgtcaactatagaaagaaagaccttcagctgtatttccacagatttctcccaaggaaaaggctaatattagtcactactgttatcacatccctttgtataagttttaaaaagagatggagggagatcttcatttctttgaggagatcagtattgtaacgtatgtgaatagatgataacaattaatattactaaaagtcccacatgagagtcctgacgccctctccatgccccacagtaatgtggcttctttcatgggtttttttttcttctttttagctgatctcatcctaagcatgctttatttttccttgaaagctaggtatttatcaactgcagatgttattgaaagaaaataaaattcagtctcaagagtaaaccctgtgtcttgtgtctgtagttcaaaagtcagaaatgattctaatttaaacaaaaagatactaaatatacagaagttaaattcgaactagccacagaatcatttgtttttatgtcagaatttgcaaagagtggagtggacaaagctctgtatggaagactgaacaactgtaaatagatgatatccaaacttaatttggctaggacttcaattttaaaaatcagtgtacctaggcagtgcacagcacgaaataagtggcccttgcagcttccccgtttaacccactgtgctatagttgcgggtggaacagtcaacctttctagtagtttatgatattgccctctttgtattcccattttctacagttttttccgcagacttctttctgcaaattattcagcctccaaatgcaaatgaatgatataaaaataagtagggaacatggcagagagtggtgcttcccagcctcacaatgtgggaatttgacataggatgagagtcagagtataggtttaaaagataaaatctttagttaataattttgtatttatttattctagatgtatgtatctgaggaaagaaatctggtatttttgctttccaataaaggggatcaaagtaatggtttttctctcagttctctaagctggtctatgttatagctctagcagtatggaaatgtgctttaaaatatgcttaccttttgaatgatcatggctatatgttgttgagatatttgaaacttaccttgttttcacttgtgcactgtgaatgaactttgtattatttttttaaaaccttcacattacgtgtagatattattgcaacttatattttgcctgagcttgatcaaaggtcatttgtgtagatgagtaattaaaaaatatttaaatcacattataattctattattggagagcatcttttaaatttttttctgttttaacgagggaaagagaaacctgtatacctagggtcattatttgaccccatagtataaccagattcatggtctaacaagctctcagtgtggcttttctctgaatgcttgaatttcacatgccttgcatttcacagttgtactccatggtcaaccggtgctttttttcacatcgtggtacttgtcaaaacattttgttattttccttggtaaaatatataaaaaaggttttctaatttc

SEQ ID NO: 234308 - DNA, 2886 bp, Artificial Sequence
  derived and/or modified sequence
atgtggcgcctgagaagagctgccgtggcatgtgaagtttgccagagcctggttaagcatagcagtgggatcaaaggaagcctgcctttacagaaactgcacctcgtttcccggtcaatctatcatagccatcaccctacactgaagttacagcgccctcagctgagaacctcctttcagcagttctccagcctgacaaacctgccattacgtaaactgaagtttagcccgatcaagtatgggtatcagccccgacgaaacttttggccagccaggctggccacacgcctcctaaaacttagatacttaattctgggctcagccgtgggtggaggctacactgcaaagaagacgtttgatcagtggaaagatatgatccccgacttaagcgaatacaagtggattgtgcctgacatcgtgtgggagatagatgaatacatagactttggctcgcccgaagagacagctttccgcgcaacggacagaggcagtgaatctgacaagcacttcaggaaaggactgttaggcgaattgatcctcctgcagcagcagattcaggagcacgaagaggaagccaggcgtgccgctggacagtactctacttcctacgcgcagcagaagagaaaggtttccgataaagagaagatagatcaactgcaggaggagttgctgcatactcaattgaagtaccaaaggatcctcgagcgtctagagaaggaaaacaaagagttacgtaagctcgtgctgcagaaagacgataagggaatccaccatcgcaagctgaagaaatcgctgatagacatgtattctgaagtgttggatgttctgagcgactacgacgcctcttataacacacaggaccatttaccccgtgtggtagtggtcggggatcaaagcgccggtaaaacgagtgtgctggagatgatcgcccaagcccgtattttcccgagaggtagcggtgagatgatgacccgctcccccgtgaaagtgacgctatcggaaggtcctcatcacgtcgcactgtttaaggactcttctcgagagttcgatcttactaaggaggaagatctcgccgctcttcgccacgaaatcgagcttaggatgcgcaagaacgtgaaagagggctgtaccgtctctccagaaacaatttccctgaacgtcaagggtcccggtttgcaacggatggttctggtggatctgcctggagtaattaatacagtgacgtctgggatggcacctgacactaaggagaccatatttagtatttctaaggcctatatgcagaacccaaacgcgataatcctctgtatccaggacggcagtgtcgatgcggagaggagcatcgttacagatctcgtgagtcagatggacccccatggtagacggaccattttcgtactcaccaaagtcgacctggctgaaaagaatgtggcctcaccatctcgcatccagcagatcatcgaaggaaaactgtttcctatgaaagcgctgggatatttcgcagtggttaccggcaagggaaactccagtgagtctattgaggctattcgtgaatatgaggaagaattttttcagaactcgaagcttctgaagacgagtatgcttaaagctcatcaggttacaactcgtaacctcagtctagccgtgtcagactgtttctggaagatggttagagagtctgttgagcagcaggcagactctttcaaggccacaagattcaacctggagacggagtggaaaaataattatcccagactgagagaattggatagaaatgaactgtttgagaaagctaaaaatgaaattttagacgaggtgatcagcctgtcacaggtaacacctaaacactgggaagagatcctacagcaatcactgtgggaaagagtgtccacccatgtgattgagaatatctacctgcccgctgcacagactatgaatagcggtaccttcaatacaacggtggatatcaagttgaagcagtggactgataagcagctccccaacaaagccgttgaggtggcctgggagactctacaggaggaattttctcgttttatgaccgaacctaaaggtaaggaacacgacgatatttttgataaactgaaggaagccgtgaaggaggagagcattaagagacacaagtggaacgatttcgcggaagacagtctgcgtgtgattcagcataatgctctggaggaccgaagcatctccgataagcagcagtgggacgcagctatttactttatggaagaggcgttgcaggcccgactgaaagacaccgaaaatgccatcgaaaacatggtgggcccagattggaaaaagcgttggctatactggaagaatcgcacacaagaacagtgtgttcacaacgaaactaagaatgagctggagaaaatgctgaaatgtaacgaagagcatcccgcttacctagcatccgatgaaattacgacagtgcgaaagaaccttgagagtagaggcgtggaggtcgacccatcgttaattaaggacacttggcatcaggtgtatagaagacactttttgaaaaccgctttgaaccattgtaatctctgccgcaggggtttctattactaccagagacacttcgtggattctgaactggagtgtaatgacgtggtgttgttttggagaatacagcgaatgttggctatcaccgccaatactctgaggcagcagctgactaacaccgaggtgcgcaggctcgaaaagaatgtgaaagaagtgcttgaagattttgcagaggacggagaaaagaagatcaagctgttgacaggtaagcgcgtgcagctggctgaagacctcaaaaaggtccgagaaatccaggagaaactcgatgcttttatcgaagcactacaccaggaaaaatag

SEQ ID NO: 234309 - DNA, 2886 bp, Artificial Sequence
  derived and/or modified sequence
atgtggagactgagaagagccgccgtggcctgcgaggtgtgccagagcctggtgaagcacagcagcggcatcaagggcagcctgcccctgcagaagctgcacctggtgagcagaagcatctaccacagccaccaccccaccctgaagctgcagagaccccagctgagaaccagcttccagcagttcagcagcctgaccaacctgcccctgagaaagctgaagttcagccccatcaagtacggctaccagcccagaagaaacttctggcccgccagactggccaccagactgctgaagctgagatacctgatcctgggcagcgccgtgggcggcggctacaccgccaagaagaccttcgaccagtggaaggacatgatccccgacctgagcgagtacaagtggatcgtgcccgacatcgtgtgggagatcgacgagtacatcgacttcggcagccccgaggagaccgccttcagagccaccgacagaggcagcgagagcgacaagcacttcagaaagggcctgctgggcgagctgatcctgctgcagcagcagatccaggagcacgaggaggaggccagaagagccgccggccagtacagcaccagctacgcccagcagaagagaaaggtgagcgacaaggagaagatcgaccagctgcaggaggagctgctgcacacccagctgaagtaccagagaatcctggagagactggagaaggagaacaaggagctgagaaagctggtgctgcagaaggacgacaagggcatccaccacagaaagctgaagaagagcctgatcgacatgtacagcgaggtgctggacgtgctgagcgactacgacgccagctacaacacccaggaccacctgcccagagtggtggtggtgggcgaccagagcgccggcaagaccagcgtgctggagatgatcgcccaggccagaatcttccccagaggcagcggcgagatgatgaccagaagccccgtgaaggtgaccctgagcgagggcccccaccacgtggccctgttcaaggacagcagcagagagttcgacctgaccaaggaggaggacctggccgccctgagacacgagatcgagctgagaatgagaaagaacgtgaaggagggctgcaccgtgagccccgagaccatcagcctgaacgtgaagggccccggcctgcagagaatggtgctggtggacctgcccggcgtgatcaacaccgtgaccagcggcatggcccccgacaccaaggagaccatcttcagcatcagcaaggcctacatgcagaaccccaacgccatcatcctgtgcatccaggacggcagcgtggacgccgagagaagcatcgtgaccgacctggtgagccagatggacccccacggcagaagaaccatcttcgtgctgaccaaggtggacctggccgagaagaacgtggccagccccagcagaatccagcagatcatcgagggcaagctgttccccatgaaggccctgggctacttcgccgtggtgaccggcaagggcaacagcagcgagagcatcgaggccatcagagagtacgaggaggagttcttccagaacagcaagctgctgaagaccagcatgctgaaggcccaccaggtgaccaccagaaacctgagcctggccgtgagcgactgcttctggaagatggtgagagagagcgtggagcagcaggccgacagcttcaaggccaccagattcaacctggagaccgagtggaagaacaactaccccagactgagagagctggacagaaacgagctgttcgagaaggccaagaacgagatcctggacgaggtgatcagcctgagccaggtgacccccaagcactgggaggagatcctgcagcagagcctgtgggagagagtgagcacccacgtgatcgagaacatctacctgcccgccgcccagaccatgaacagcggcaccttcaacaccaccgtggacatcaagctgaagcagtggaccgacaagcagctgcccaacaaggccgtggaggtggcctgggagaccctgcaggaggagttcagcagattcatgaccgagcccaagggcaaggagcacgacgacatcttcgacaagctgaaggaggccgtgaaggaggagagcatcaagagacacaagtggaacgacttcgccgaggacagcctgagagtgatccagcacaacgccctggaggacagaagcatcagcgacaagcagcagtgggacgccgccatctacttcatggaggaggccctgcaggccagactgaaggacaccgagaacgccatcgagaacatggtgggccccgactggaagaagagatggctgtactggaagaacagaacccaggagcagtgcgtgcacaacgagaccaagaacgagctggagaagatgctgaagtgcaacgaggagcaccccgcctacctggccagcgacgagatcaccaccgtgagaaagaacctggagagcagaggcgtggaggtggaccccagcctgatcaaggacacctggcaccaggtgtacagaagacacttcctgaagaccgccctgaaccactgcaacctgtgcagaagaggcttctactactaccagagacacttcgtggacagcgagctggagtgcaacgacgtggtgctgttctggagaatccagagaatgctggccatcaccgccaacaccctgagacagcagctgaccaacaccgaggtgagaagactggagaagaacgtgaaggaggtgctggaggacttcgccgaggacggcgagaagaagatcaagctgctgaccggcaagagagtgcagctggccgaggacctgaagaaggtgagagagatccaggagaagctggacgccttcatcgaggccctgcaccaggagaagtag

SEQ ID NO: 234310 - protein, 978 aa, Artificial Sequence
  derived and/or modified sequence
MWRLRRAAVACEVCQSLVKHSSGIKGSLPLQKLHLVSRSIYHSHHPTLKLQRPQLRTSFQQFSSLTNLPLRKLKFSPIKYGYQPRRNFWPARLATRLLKLRYLILGSAVGGGYTAKKTFDQWKDMIPDLSEYKWIVPDIVWEIDEYIDFEKIRKALPSSEDLVKLAPDFDKIVESLSLLKDFFTSGHKLVSEVIGASDLLLLLGSPEETAFRATDRGSESDKHFRKVSDKEKIDQLQEELLHTQLKYQRILERLEKENKELRKLVLQKDDKGIHHRKLKKSLIDMYSEVLDVLSDYDASYNTQDHLPRVVVVGDQSAGKTSVLEMIAQARIFPRGSGEMMTRSPVKVTLSEGPHHVALFKDSSREFDLTKEEDLAALRHEIELRMRKNVKEGCTVSPETISLNVKGPGLQRMVLVDLPGVINTVTSGMAPDTKETIFSISKAYMQNPNAIILCIQDGSVDAERSIVTDLVSQMDPHGRRTIFVLTKVDLAEKNVASPSRIQQIIEGKLFPMKALGYFAVVTGKGNSSESIEAIREYEEEFFQNSKLLKTSMLKAHQVTTRNLSLAVSDCFWKMVRESVEQQADSFKATRFNLETEWKNNYPRLRELDRNELFEKAKNEILDEVISLSQVTPKHWEEILQQSLWERVSTHVIENIYLPAAQTMNSGTFNTTVDIKLKQWTDKQLPNKAVEVAWETLQEEFSRFMTEPKGKEHDDIFDKLKEAVKEESIKRHKWNDFAEDSLRVIQHNALEDRSISDKQQWDAAIYFMEEALQARLKDTENAIENMVGPDWKKRWLYWKNRTQEQCVHNETKNELEKMLKCNEEHPAYLASDEITTVRKNLESRGVEVDPSLIKDTWHQVYRRHFLKTALNHCNLCRRGFYYYQRHFVDSELECNDVVLFWRIQRMLAITANTLRQQLTNTEVRRLEKNVKEVLEDFAEDGEKKIKLLTGKRVQLAEDLKKVREIQEKLDAFIEALHQEK

SEQ ID NO: 234311 - protein, 185 aa, Artificial Sequence
  derived and/or modified sequence
  misc_feature (1)..(1): Xaa can be any naturally occurring amino acid
XYLILGSAVGGGYTAKKTFDQWKDMIPDLSEYKWIVPDIVWEIDEYIDFEKIRKALPSSEDLVKLAPDFDKIVESLSLLKDFFTSGHKLVSEVIGASDLLLLLGSPEETAFRATDRGSESDKHFRKVSDKEKIDQLQEELLHTQLKYQRILERLEKENKELRKLVLQKDDKGIHHRKLKKSLIDM

SEQ ID NO: 234312 - DNA, 2937 bp, Artificial Sequence
  derived and/or modified sequence
atgtggcggcttcggagagccgcggtggcctgtgaggtctgccagtccctggttaagcattctagcgggatcaagggcagcctgcccctgcagaaactgcacctagtgtctaggagcatataccactcacatcacccaactcttaaactgcaacggccacaactgcgcacatccttccagcagtttagcagtttaactaatctgccactgcggaagctgaaattctctcctatcaagtacggctaccagcctagacgcaatttttggcccgcgcgattagctacacgcctcttgaagctgagataccttattctgggcagtgcagtcggtgggggctacacggctaaaaaaacatttgaccagtggaaagacatgatcccggaccttagcgaatataagtggatcgtccctgacatagtctgggaaatcgatgagtatattgactttgaaaaaatccgtaaagcattgccatcctccgaagatttagtcaagttagctcccgacttcgataagatcgtggagtctctcagccttctgaaagacttttttacaagcggccacaagctcgtctccgaggttatcggtgcttcagacctgctcctgctgctgggaagccctgaggagaccgcatttcgggcaacggatcggggctctgagagtgataagcacttccggaaagtctcagacaaggagaaaatcgatcagctccaggaagaactattacatactcagctgaagtaccagcgcatcctcgagcgcctggagaaggaaaataaggagctgaggaagctggtccttcaaaaggacgataaagggatccatcacagaaagctgaaaaaatcccttatagacatgtactccgaagtacttgacgtgctttcagactatgatgccagttacaacacacaagatcacctcccacgcgtggtggtggtcggcgaccaatccgccgggaaaacatctgtgctagagatgatcgcacaagcacgcattttcccacgtggcagcggggaaatgatgactaggagcccagtcaaggtgactctgagcgagggtcctcaccatgttgctttgtttaaggacagtagccgtgaattcgacttaactaaggaggaggatctagcagccctgcgtcacgaaatagagctccggatgcgtaagaatgtgaaggaaggctgtactgtgtcccccgagaccatcagtctcaatgtaaaggggcctggactgcaacgtatggtcctggttgatctccctggggtgattaacacagtgacatccggtatggctccagatactaaagaaactattttttcgattagcaaagcctatatgcagaaccccaacgccattatcctgtgcatacaggacggttctgtggacgcggagcgctctattgtgactgatttggtctcccagatggaccctcacggccgtcggactatcttcgtgctgactaaagtcgacttagcagaaaaaaatgtggcctccccctccaggatacagcagattatagaggggaaactctttccaatgaaagcgttggggtatttcgccgtggtgacgggtaaaggcaactcgagcgagagcatcgaagcaattagggagtacgaagaggagtttttccagaatagtaagctgcttaagacctctatgctgaaggcacaccaggtaacgacacgaaacctgagtttggctgtctctgactgtttttggaagatggtccgggagtcggtggaacagcaggctgactcattcaaggctacgcgattcaacctagagacagagtggaagaacaactacccgcgcctgagagagctggatcggaatgagctgttcgaaaaagccaagaatgagatccttgacgaggtgatctctctgtcacaggtcaccccaaagcactgggaggaaatcctgcaacaatcactgtgggaacgggtatctacacatgtcattgagaatatctatttgccagcggcccagaccatgaactcaggcactttcaacaccaccgtcgacataaaactcaagcagtggaccgacaagcagcttcccaacaaagctgtagaagttgcctgggagaccttgcaggaagagttctcccgttttatgaccgaacctaaaggcaaagagcatgatgacatcttcgataaactgaaggaggcggttaaggaagaatcgatcaagagacacaaatggaatgacttcgctgaggactccctgcgcgtcatacagcacaacgcactggaggacagatcaatttctgacaagcagcagtgggatgcagccatctatttcatggaggaagcactccaggcccggctgaaagacaccgaaaatgccattgagaatatggtcggaccagactggaagaagcggtggctctattggaagaaccgtacacaagaacagtgcgttcacaatgagacaaagaacgagttggaaaagatgctgaagtgcaatgaggagcaccctgcttacctggcttctgacgagattacaacagttcgaaaaaatttggagagtcggggcgtggaggtggatcccagtttgattaaagacacatggcaccaggtgtaccggcggcatttcctcaaaaccgccttgaaccactgcaacctgtgcagacggggattctattactaccaacgccatttcgtcgattccgaattggagtgcaacgacgtcgtgctgttttggagaattcagaggatgctcgccatcacagctaatacactgcgtcaacaactgacgaacacggaggttagacgactggagaagaacgtgaaagaagtgttggaagattttgcagaggacggcgaaaaaaaaatcaaattgcttaccggcaagcgcgtccagcttgctgaggacctgaaaaaggtacgcgagatacaggaaaaattagatgccttcattgaggccttacaccaggaaaaatag

SEQ ID NO: 234313 - DNA, 558 bp, Artificial Sequence
  derived and/or modified sequence
tgatatctgatcctggggagtgcagttgggggggggtacacagccaagaaaacttttgaccaatggaaggacatgatccccgatctgagcgaatataagtggatcgtcccggacatcgtctgggagattgatgagtatatcgacttcgagaagatcaggaaggcgctgccctccagtgaggacttggttaagctggctcccgacttcgataagatcgtcgagtcactctctctcctgaaagacttttttacgtctggacataagctagtttccgaagtaatcggcgccagtgatctccttttgttgttgggctcaccggaagaaactgcatttcgcgcaaccgatcgcggatctgagtccgacaagcactttcgcaaggttagcgacaaagaaaagattgatcagctgcaagaggagctgctccacactcaactgaagtaccagcgtatactggaaaggttggaaaaagaaaacaaagaattgcggaaactggtgctgcagaaagacgacaaaggaatacatcatcggaagctcaagaagtcactgatcgacatgtag

SEQ ID NO: 234314 - DNA, 2937 bp, Artificial Sequence
  derived and/or modified sequence
atgtggaggctgcggcgggctgctgtggcctgtgaggtgtgccagagcctggtgaagcacagcagcggcatcaagggcagcctgcccctgcagaagctgcacctggtgagccgcagcatctaccacagccaccaccccaccctgaagctgcagaggccccagctgcggaccagcttccagcagttcagcagcctgaccaacctgcccctgaggaagctgaagttcagccccatcaagtatggctaccagcccaggaggaacttctggccagcccggctggccacccggctgctgaagctgcgctacctgatcctgggcagcgctgtgggcggcggctacacagccaagaagacctttgaccagtggaaggacatgatcccagacctgtctgagtacaagtggatcgtgcctgacatcgtgtgggagattgatgagtacatcgactttgagaagatcaggaaggccctgcccagcagcgaggacctggtgaagctggccccagactttgacaagatcgtggagagcctgagcctgctgaaggacttcttcaccagcggccacaagctggtgtctgaggtgattggagccagtgacctgctgctgctgctgggcagccctgaggagacagccttccgggccacagaccggggcagcgagagtgacaagcacttcaggaaggtgtctgacaaggagaagattgaccagctgcaggaggagctgctgcacacccagctgaagtaccagaggatcctggagcggctggagaaggagaacaaggagctgaggaagctggtgctgcagaaggatgacaagggcatccaccacaggaagctgaagaagagcctgattgacatgtacagcgaggtgctggatgtgctgagtgactatgatgccagctacaacacccaggaccacctgccccgggtggtggtggtgggggaccagagcgctgggaagacctctgtgctggagatgattgcccaggcccgcatcttcccccggggcagcggggagatgatgaccaggagccctgtgaaggtgaccctgtctgagggcccccaccacgtggccctcttcaaggacagcagccgggagtttgacctgaccaaggaggaggacctggccgccctgcggcatgaaattgagctgaggatgaggaagaatgtgaaggagggctgcaccgtgtccccagagaccatcagcctgaatgtgaagggccctggcctgcagaggatggtgctggtggacctgcccggggtcatcaacacagtgaccagcggcatggccccagacaccaaggagaccatcttcagcatcagcaaggcctacatgcagaaccccaatgccatcatcctgtgcatccaggacggctctgtggatgctgagaggagcatcgtgacagacctggtgtcccagatggacccccacggccgccgcaccatctttgtgctgaccaaggtggacctggccgagaagaatgtggccagccccagccgcatccagcagatcatcgagggcaagctgttccccatgaaggccctgggctactttgctgtggtgactggaaaaggaaacagcagcgagagcattgaggccatccgggagtatgaggaggagttcttccagaacagcaagctgctgaagacctccatgctgaaggcccaccaggtgaccaccaggaacctgagcctggccgtgtctgactgcttctggaagatggtgcgggagagcgtggagcagcaggccgacagcttcaaggccacccgcttcaacctggagacagagtggaagaacaactacccccggctgcgggagctggacagaaatgagctgtttgagaaggccaagaatgagatcctggatgaagtcatcagcctgagccaggtgacccccaagcactgggaggagatcctgcagcagagcctgtgggagcgggtgtccacccacgtgattgagaacatctacctgcctgctgcccagaccatgaacagcggcaccttcaacaccaccgtggacatcaagctgaagcagtggacagacaagcagctgcccaacaaggctgtggaggtggcctgggagaccctgcaggaggagttcagccgcttcatgacagagcccaagggcaaggagcatgatgacatctttgacaagctgaaggaggccgtgaaggaggagagcatcaagaggcacaagtggaatgactttgctgaggacagcctgcgggtcatccagcacaatgccctggaggacaggagcatcagtgacaagcagcagtgggatgctgccatctacttcatggaggaggccctgcaggcccggctgaaggacacagaaaatgccatcgagaacatggtgggccctgactggaagaagcgctggctgtactggaagaacagaacccaggagcagtgtgtgcacaatgagaccaagaatgagctggagaagatgctgaagtgcaatgaggagcacccagcctacctggccagtgatgagatcaccaccgtgaggaagaacctggagagcagaggagtggaggtggaccccagcctcatcaaggacacctggcaccaggtgtaccgccgccacttcctgaagacagccctgaaccactgcaacctgtgcagaagaggcttctactactaccagaggcactttgtggacagcgagctggagtgcaatgatgtggtgctcttctggaggatccagaggatgctggccatcacagccaacaccctgcggcagcagctgaccaacacagaggtgcggcggctggagaagaatgtgaaggaggtgctggaggactttgctgaagatggagagaagaagatcaagctgctgaccgggaagagggtgcagctggccgaggacctgaagaaggtgcgggagatccaggagaagctggatgccttcatcgaggccctgcaccaggagaagtag

SEQ ID NO: 234315 - DNA, 558 bp, Artificial Sequence
  derived and/or modified sequence
tgatatctcatcctgggcagcgctgtgggcggcggctacacagccaagaagacctttgaccagtggaaggacatgatcccagacctgtctgagtacaagtggatcgtgcctgacatcgtgtgggagattgatgagtacatcgactttgagaagatcaggaaggccctgcccagcagcgaggacctggtgaagctggccccagactttgacaagatcgtggagagcctgagcctgctgaaggacttcttcaccagcggccacaagctggtgtctgaggtgattggagccagtgacctgctgctgctgctgggcagccctgaggagacagccttccgggccacagaccggggcagcgagagtgacaagcacttcaggaaggtgtctgacaaggagaagattgaccagctgcaggaggagctgctgcacacccagctgaagtaccagaggatcctggagcggctggagaaggagaacaaggagctgaggaagctggtgctgcagaaggatgacaagggcatccaccacaggaagctgaagaagagcctgattgacatgtag

SEQ ID NO: 234316 - DNA, 2937 bp, Artificial Sequence
  derived and/or modified sequence
atgtggcggctgcggcgggccgccgtggcctgcgaggtgtgccagagtctggtgaaacactccagcgggattaaaggatcgctgcctctgcaaaagctacacctagtaagcaggtccatatatcattcccaccacccgaccctgaagttgcagcgacctcagctgagaacgagtttccagcagttttctagccttacaaacttgccactacgaaaactgaaattttcccctatcaagtatggttatcagccacgaaggaacttttggcctgccaggctggccactcgcctactgaagttgcgctatctgatactgggaagcgccgtgggcggcggctacaccgccaagaaaactttcgatcagtggaaagacatgatacccgacctgagtgaatacaagtggattgtgcccgacatcgtttgggaaattgatgagtatatcgattttgagaaaatccgcaaagccctccctagctcggaggatctagtgaaactggctccagacttcgacaagattgtagagtcgctcagcttgctgaaggacttttttacttccggccataagttggtgtcggaggtgatcggggcttccgatctcctgctgttactgggaagtcctgaagaaaccgcattccgagcaacagatcgcggctcagagtccgacaagcattttaggaaagtctccgacaaggagaagattgaccagctgcaggaggagctactccacactcagctaaaatatcaaaggatcctggaaagactagagaaagagaataaggaactcagaaagctggtcttgcaaaaggacgacaagggtattcaccatcggaagttgaagaaatccctgattgacatgtatagcgaggttctcgatgttctttccgactatgacgcatcatataacacccaggaccatctcccgcgtgtggtggtggtcggtgatcagtctgctggtaagacaagcgtactagaaatgattgcacaggcaaggatctttcctcggggctcaggagaaatgatgacgaggagtcccgtgaaggttacgctgtctgagggccctcaccatgtcgccctgttcaaggactctagcagagagttcgacttgacaaaggaagaagacctagcggccctgcgacatgaaatagagctccgtatgcgaaaaaatgttaaggaagggtgcaccgtctctcctgagactatatcattgaacgtgaagggacccggcctccagaggatggtcttggttgacctgccaggagtcattaacaccgtgacatcgggcatggctcccgacacaaaagagaccatattctcaatctcgaaggcctacatgcagaaccccaacgccatcatcctgtgcatacaggacggatcagtcgacgcggagcgatctattgtaactgatctggttagccaaatggacccccatggcagacgcactatatttgtgctgacaaaagtcgatctcgccgaaaagaatgtggcttctccaagcagaattcaacagataatcgaggggaaactgtttcccatgaaagccctggggtacttcgctgtcgtcacgggaaaagggaatagctcggagtcgattgaagccatcagagaatatgaggaggaattctttcagaatagtaagctccttaaaacatcgatgcttaaagctcatcaggtgacaacgagaaaccttagcctggcagtttcagattgcttctggaagatggtgagggagtcagtggaacagcaagcagatagttttaaggctactagattcaacttggaaaccgaatggaaaaataactacccccggctgcgcgagttggaccgcaatgagttgttcgaaaaagccaagaatgagattctggacgaagttataagcctttctcaagtgactccaaagcactgggaggagatactccagcagagtctttgggagcgggtcagcacccatgtgatcgaaaatatttatctgcctgctgcccagacaatgaactctggcacattcaatacaactgtggatatcaaactgaaacagtggacagacaagcagctgcccaacaaggctgttgaagtggcatgggagacattgcaagaggagttctcccggtttatgaccgagcccaaaggaaaagaacatgacgatattttcgacaagctaaaagaggcagtgaaggaggaatctatcaagcggcacaagtggaatgacttcgctgaggattcgcttcgagttatccagcataatgctctagaggatagaagtatctccgacaaacaacagtgggacgccgcaatatattttatggaagaagccctgcaagctcgccttaaagacaccgagaacgccatagaaaacatggtgggccccgattggaagaaacggtggctgtactggaagaatcggacacaagagcagtgcgtgcacaatgaaacaaagaacgaattggagaaaatgcttaagtgtaacgaagagcacccggcatacctggcctcagacgagatcaccacagttcgcaagaaccttgaaagcaggggagtagaggtcgaccccagtctgatcaaagatacctggcaccaggtgtacaggcgtcactttctcaaaactgctcttaaccactgcaacctgtgtcgccgaggcttttattattatcaacgccactttgtcgactctgagctcgagtgtaacgacgtggtcctattttggaggatacagagaatgctggcgataactgctaatacactgcgacaacagctgaccaatacggaagtgcgacgcctggaaaagaatgtaaaggaagtcctggaggattttgccgaagacggagagaagaagatcaagctcctgaccggcaagcgtgtgcaacttgccgaggacctgaagaaagttagggagatccaagaaaagctggacgctttcatcgaggccctgcatcaggaaaaatag

SEQ ID NO: 234317 - DNA, 558 bp, Artificial Sequence
  derived and/or modified sequence
tgatacctgatcctgggcagcgccgtgggcggcggctacaccgccaaaaaaacattcgaccagtggaaggacatgatccctgacctgtcagagtataaatggatcgtcccggatatcgtctgggaaattgatgagtacattgacttcgaaaagataaggaaggctctgccgagttcagaggaccttgtgaagctcgcacccgatttcgataagattgtggaatccctatccctgctcaaggactttttcaccagcgggcataaactggtttccgaagtgattggtgcatcggatctactcttgctccttggcagccctgaggagaccgcgtttcgcgccacggatcgaggctctgaatccgacaaacacttccggaaggtatcagataaagaaaagattgaccaattacaggaggaactcctgcatacgcagctgaaataccaacgaatacttgagagactggaaaaggagaacaaggagctccggaagcttgtgttgcaaaaggatgacaagggtatacatcaccggaagcttaaaaaaagtcttattgatatgtag

SEQ ID NO: 234318 - DNA, 6381 bp, Artificial Sequence
  derived and/or modified sequence
gtgctgcccgcctagaaagggtgaagtggttgtttccgtgacggactgagtacgggtgcctgtcaggctcttgcggaagtccatgcgccattgggagggcctcggccgcggctctgtgcccttgctgctgagggccacttcctgggtcattcctggaccgggagccgggctggggctcacacgggggctcccgcgtggccgtctcggcgcctgcgtgacctccccgccggcgggatgtggcgactacgtcgggccgctgtggcctgtgaggtctgccagtctttagtgaaacacagctctggaataaaaggaagtttaccactacaaaaactacatctggtttcacgaagcatttatcattcacatcatcctaccttaaagcttcaacgaccccaattaaggacatcctttcagcagttctcttctctgacaaaccttcctttacgtaaactgaaattctctccaattaaatatggctaccagcctcgcaggaatttttggccagcaagattagctacgagactcttaaaacttcgctatctcatactaggatcggctgttgggggtggctacacagccaaaaagacttttgatcagtggaaagatatgataccggaccttagtgaatataaatggattgtgcctgacattgtgtgggaaattgatgagtatatcgattttgagaaaattagaaaagcccttcctagttcagaagaccttgtaaagttagcaccagactttgacaagattgttgaaagccttagcttattgaaggacttttttacctcaggtcacaaattggttagtgaagtcataggagcttctgacctacttctcttgttaggttctccggaagaaacggcgtttagagcaacagatcgtggatctgaaagtgacaagcattttagaaaggtgtcagacaaagagaaaattgaccaacttcaggaagaacttctgcacactcagttgaagtatcagagaatcttggaacgattagaaaaggagaacaaagaattgagaaaattagtattgcagaaagatgacaaaggcattcatcatagaaagcttaagaaatctttgattgacatgtattctgaagttcttgatgttctctctgattatgatgccagttataatacgcaagatcatctgccacgggttgttgtggttggagatcagagtgctggaaagactagtgtgttggaaatgattgcccaagctcgaatattcccaagaggatctggggagatgatgacacgttctccagttaaggtgactctgagtgaaggtcctcaccatgtggccctatttaaagatagttctcgggagtttgatcttaccaaagaagaagatcttgcagcattaagacatgaaatagaacttcgaatgaggaaaaatgtgaaagaaggctgtaccgttagccctgagaccatatccttaaatgtaaaaggccctggactacagaggatggtgcttgttgacttaccaggtgtgattaatactgtgacatcaggcatggctcctgacacaaaggaaactattttcagtatcagcaaagcttacatgcagaatcctaatgccatcatactgtgtattcaagatggatctgtggatgctgaacgcagtattgttacagacttggtcagtcaaatggaccctcatggaaggagaaccatattcgttttgaccaaagtagacctggcagagaaaaatgtagccagtccaagcaggattcagcagataattgaaggaaagctcttcccaatgaaagctttaggttattttgctgttgtaacaggaaaagggaacagctctgaaagcattgaagctataagagaatatgaagaagagttttttcagaattcaaagctcctaaagacaagcatgctaaaggcacaccaagtgactacaagaaatttaagccttgcagtatcagactgcttttggaaaatggtacgagagtctgttgaacaacaggctgatagtttcaaagcaacacgttttaaccttgaaactgaatggaagaataactatcctcgcctgcgggaacttgaccggaatgaactatttgaaaaagctaaaaatgaaatccttgatgaagttatcagtctgagccaggttacaccaaaacattgggaggaaatccttcaacaatctttgtgggaaagagtatcaactcatgtgattgaaaacatctaccttccagctgcgcagaccatgaattcaggaacttttaacaccacagtggatatcaagcttaaacagtggactgataaacaacttcctaataaagcagtagaggttgcttgggagaccctacaagaagaattttcccgctttatgacagaaccgaaagggaaagagcatgatgacatatttgataaacttaaagaggctgttaaggaagaaagtattaaacgacacaagtggaatgactttgcggaggacagcttgagggttattcaacacaatgctttggaagaccgatccatatctgataaacagcaatgggatgcagctatttattttatggaagaggctctgcaggctcgtctcaaggatactgaaaatgcaattgaaaacatggtgggtccagactggaaaaagaggtggttatactggaagaatcggacccaagaacagtgtgttcacaatgaaaccaagaatgaattggagaagatgttgaaatgtaatgaggagcacccagcttatcttgcaagtgatgaaataaccacagtccggaagaaccttgaatcccgaggagtagaagtagatccaagcttgattaaggatacttggcatcaagtttatagaagacattttttaaaaacagctctaaaccattgtaacctttgtcgaagaggtttttattactaccaaaggcattttgtagattctgagttggaatgcaatgatgtggtcttgttttggcgtatacagcgcatgcttgctatcaccgcaaatactttaaggcaacaacttacaaatactgaagttaggcgattagagaaaaatgttaaagaggtattggaagattttgctgaagatggtgagaagaagattaaattgcttactggtaaacgcgttcaactggcggaagacctcaagaaagttagagaaattcaagaaaaacttgatgctttcattgaagctcttcatcaggagaaataaattaaaatcgtactcataatcagctctgcatacatctgaagaacaaaaacatcaacgtcttttgtccagcctctttttcttctgctgttccacctttctaaacatacaataaagtcatgggataaaaataatcgatgtatgttacgggcgctttaaccatcagctgcctctcgaatggaagaacagtggtaatggattaacatcctattttgttgtactaaagtgacaaatcggaataatataattggtatggccattaggttcagtccttgaagataagaaacttgttctctgtttgttgtcttatttgtggtggcactcgtttaatggattaactgaggttgctcaatgttcagtttcttttccagaaatacaatgctaggtgttttgaaataaaacttatatagcaattgtttaaagttatcaattgtatataaaatcacagtagcctgctaaatcattgtatgtgtctgtagtattctattcccagaaactatttgaccatgataattcagtttatattcaccacatgaaagaaaaatgggtaacagaagaacccttaaaacaggttaatttggattgtaacgttcagtgaaagaaatttcaacccttcatagccagcgaagaaatttgccttggaagccaagtcagtaccagcttacctatttgattcagttgctgttttctcactctctatatccatttgaaattgatttattttagatgttgtatacttacgttaggctttctgttaatagtggtttttctcctgttgacagagccaccggattatgacacaggatgaggaagattaaggataatcaattgactaatttcatttagaatattatcaaacatttcaactaggtatcagaaaaaggctttctttcataagactattttaaatagaaattatttcaacaattaaagtaatgttgaccatccccctctcagctgaataaagaaaaatttagttcaatttattgcaatttaattacaatactaccttcacaacattttcatgtgttttaaataaatattttttaattggctaaaggacattcaagcaaagaaatgctttctttacttaaaatgtctatctcatttgctgccttttcactaagcctttactttgttaataaaagtgtccattgtgtgatgtttttgattttacagtttgctaaatcttattttcttggagttgctttttggtaacagccccattgctactccccattttattgttttacatcaatgcatgcttcgttgtgatccctcaagatgtaacacttggtatgctcggttgaggatatgaaaaaatacttccgaaaccaggaattcaatgtatgtttgttttatactgtttgataagaaaagtaggtccagccttaagcagcacagatgcgctggtagatgcatagtcaggaactttttttatttcttttaggtctagggacaggagtgaatagaaagggaggagagctctattatgttctatacacagattaggagatgaccttactgggtacacccctctaaccagtgcttacaggttaatgcatgttaatgaatatttttgcagttgtaaagcataacaattacaactacacatctatttctaaagaataaaacaggaccatatttatttacttctgtcaactatagaaagaaagaccttcagctgtatttccacagatttctcccaaggaaaaggctaatattagtcactactgttatcacatccctttgtataagttttaaaaagagatggagggagatcttcatttctttgaggagatcagtattgtaacgtatgtgaatagatgataacaattaatattactaaaagtcccacatgagagtcctgacgccctctccatgccccacagtaatgtggcttctttcatgggtttttttttcttctttttagctgatctcatcctaagcatgctttatttttccttgaaagctaggtatttatcaactgcagatgttattgaaagaaaataaaattcagtctcaagagtaaaccctgtgtcttgtgtctgtagttcaaaagtcagaaatgattctaatttaaacaaaaagatactaaatatacagaagttaaattcgaactagccacagaatcatttgtttttatgtcagaatttgcaaagagtggagtggacaaagctctgtatggaagactgaacaactgtaaatagatgatatccaaacttaatttggctaggacttcaattttaaaaatcagtgtacctaggcagtgcacagcacgaaataagtggcccttgcagcttccccgtttaacccactgtgctatagttgcgggtggaacagtcaacctttctagtagtttatgatattgccctctttgtattcccattttctacagttttttccgcagacttctttctgcaaattattcagcctccaaatgcaaatgaatgatataaaaataagtagggaacatggcagagagtggtgcttcccagcctcacaatgtgggaatttgacataggatgagagtcagagtataggtttaaaagataaaatctttagttaataattttgtatttatttattctagatgtatgtatctgaggaaagaaatctggtatttttgctttccaataaaggggatcaaagtaatggtttttctctcagttctctaagctggtctatgttatagctctagcagtatggaaatgtgctttaaaatatgcttaccttttgaatgatcatggctatatgttgttgagatatttgaaacttaccttgttttcacttgtgcactgtgaatgaactttgtattatttttttaaaaccttcacattacgtgtagatattattgcaacttatattttgcctgagcttgatcaaaggtcatttgtgtagatgagtaattaaaaaatatttaaatcacattataattctattattggagagcatcttttaaatttttttctgttttaacgagggaaagagaaacctgtatacctagggtcattatttgaccccatagtataaccagattcatggtctaacaagctctcagtgtggcttttctctgaatgcttgaatttcacatgccttgcatttcacagttgtactccatggtcaaccggtgctttttttcacatcgtggtacttgtcaaaacattttgttattttccttggtaaaatatataaaaaaggttttctaatttc

SEQ ID NO: 234319 - DNA, 554 bp, Artificial Sequence
  derived and/or modified sequence
gctatctcatactaggatcggctgttgggggtggctacacagccaaaaagacttttgatcagtggaaagatatgataccggaccttagtgaatataaatggattgtgcctgacattgtgtgggaaattgatgagtatatcgattttgagaaaattagaaaagcccttcctagttcagaagaccttgtaaagttagcaccagactttgacaagattgttgaaagccttagcttattgaaggacttttttacctcaggtcacaaattggttagtgaagtcataggagcttctgacctacttctcttgttaggttctccggaagaaacggcgtttagagcaacagatcgtggatctgaaagtgacaagcattttagaaaggtgtcagacaaagagaaaattgaccaacttcaggaagaacttctgcacactcagttgaagtatcagagaatcttggaacgattagaaaaggagaacaaagaattgagaaaattagtattgcagaaagatgacaaaggcattcatcatagaaagcttaagaaatctttgattgacatg

SEQ ID NO: 234320 - DNA, 2937 bp, Artificial Sequence
  derived and/or modified sequence
atgtggcggctgcggagagccgctgtcgcctgcgaggtctgccagtccctcgttaaacatagttccggaatcaagggcagtttgcccttacagaaactgcatctggtgagcaggtcaatatatcactctcatcatccaacccttaagctccagcgtccgcagctgcggactagcttccaacagttctccagcctgactaatttgccactccgcaaattgaagttctctccaattaagtatggctaccaacctagacgcaacttctggcccgctaggcttgcgacacgcctgttgaagctgcgctacctgatcctgggttcagctgtgggaggaggctacaccgccaagaaaacatttgatcaatggaaagatatgatccccgacctcagcgagtacaaatggattgtccccgatatcgtgtgggaaatcgacgagtatattgattttgagaaaattcggaaagccttgccatctagcgaggacctggtgaaattagcacccgactttgacaaaatcgtggagagcctgagcctgttgaaggacttcttcactagtggccacaagttagtatcggaagtcataggagcttcggaccttctcttattgctggggagcccagaagaaacggcgttccgtgctaccgatcggggttctgaaagtgataagcacttcagaaaagtgagtgataaggagaagatagaccagttgcaggaggagctgctgcacacccagctgaaatatcagaggattctggagcgccttgagaaagagaacaaagaactcagaaagcttgtactccagaaagacgataagggcattcaccacagaaaactgaagaagagcctgatcgacatgtattcggaggttctcgacgtcctgtccgactacgatgcgagctataacacccaggaccatctccccagagtcgttgttgttggagatcaatcagcaggaaagacttcagtcctcgagatgattgcccaggccagaatttttccacgcggttcaggcgagatgatgacacgatcccctgtaaaagttacgctctccgagggaccccaccacgtcgccctgtttaaggacagcagccgcgagtttgacctgacaaaagaggaggacctggccgcactgagacacgaaattgagttgaggatgcgaaagaatgtgaaggaggggtgtacggtttctccggaaacaatttctctgaatgttaaaggccctggcctccagcgaatggtcctggtggatttgccgggagtgatcaacaccgtgacgagcggcatggctccagacaccaaagaaactattttcagcatctctaaggcatatatgcagaaccccaacgcgattatcctctgtattcaggatggttcagtcgacgccgaacggagcatcgtgacggatctcgtcagtcagatggatccccatggacgtaggacaatcttcgttctgacaaaagtggatctagcggaaaaaaatgtggcgtcccccagtcgtatccagcagattatcgagggaaagctgtttcccatgaaggccctgggttatttcgccgttgtaaccggcaagggaaattcttcggagtctattgaggctatacgcgaatacgaggaagagttcttccagaacagcaaactcctcaaaacaagcatgctgaaagctcaccaagtcactacccggaatctgtcgctcgcggtgagtgattgtttttggaagatggtgcgggagtccgtagagcaacaggcagactcctttaaggcaacaagattcaatctggagactgagtggaagaataattacccacggttgagagaacttgataggaatgagctgttcgaaaaggcgaagaatgaaatccttgacgaagtaattagcttgtctcaggtgaccccaaagcactgggaagagatcttacagcagtctctgtgggagagggtttccacgcatgtgatcgaaaatatttatctcccagcggcacagacaatgaattctggtacgttcaacacaactgtggacatcaagttgaagcaatggacagataagcagctgcccaataaggccgtggaagtcgcgtgggagactcttcaggaagaattttcgaggttcatgaccgagcctaaggggaaagaacatgatgacatcttcgataagttgaaggaggccgtcaaggaggagtctatcaaaaggcacaagtggaatgacttcgccgaggactcactgagagtaatccaacacaacgctctggaggatcggagcattagcgataaacaacagtgggacgctgctatctattttatggaggaagccctgcaggccagactgaaagatacggaaaacgcgatagaaaacatggtgggacctgattggaaaaagaggtggctgtactggaagaatcggacccaagagcagtgcgtccataacgagacgaagaacgagttggagaagatgctgaagtgtaatgaggaacaccccgcttacttggcatccgacgagataacaaccgtcaggaaaaatctggagagtaggggcgtggaggtggaccccagcttgattaaggatacctggcatcaggtttatcggagacactttcttaagaccgctttgaatcactgcaatctgtgccgacggggattttactactatcagcgacattttgtggatagcgagctggagtgcaatgatgttgtcctgttctggaggattcagcggatgctggccattaccgctaacactcttaggcagcagctgacaaacacggaggtgaggagattagaaaaaaacgttaaagaggtactagaggattttgccgaagacggggagaagaagataaagctcctgacagggaagcgggtccagctggccgaagatctcaaaaaagtcagggagatacaggaaaagctggatgcttttatcgaggccctgcaccaggaaaaatag

SEQ ID NO: 234321 - DNA, 558 bp, Artificial Sequence
  derived and/or modified sequence
tgatacctgatcctgggctctgccgtagggggtggttatacagccaaaaaaacctttgaccaatggaaggacatgatacctgatttgagtgaatacaagtggatcgtgccggacattgtctgggagatagacgagtatatcgattttgagaagatccgtaaggccctgccctcatccgaggaccttgtcaagttagcgcctgattttgataagatcgtcgaatccctgtctttattgaaggacttctttacaagtggtcacaagctcgtgagtgaagtaattggcgctagcgacctgctgctccttcttgggagccccgaagaaacagccttcagggccacagaccggggatctgagtcagataagcactttcggaaagtgagcgataaggagaaaatagaccaattgcaggaagagctcctgcacacacagttaaaataccagcgaatcctggagaggctcgagaaggagaataaggaattacgtaagcttgttctgcaaaaggacgataagggaattcaccatagaaagttaaagaagtccctgatcgatatgtag

SEQ ID NO: 234322 - DNA, 2937 bp, Artificial Sequence
  derived and/or modified sequence
atgtggagactgagaagagccgccgtggcctgcgaggtgtgccagagcctggtgaagcacagcagcggcatcaagggcagcctgcccctgcagaagctgcacctggtgagcagaagcatctaccacagccaccaccccaccctgaagctgcagagaccccagctgagaaccagcttccagcagttcagcagcctgaccaacctgcccctgagaaagctgaagttcagccccatcaagtacggctaccagcccagaagaaacttctggcccgccagactggccaccagactgctgaagctgagatacctgatcctgggcagcgccgtgggcggcggctacaccgccaagaagaccttcgaccagtggaaggacatgatccccgacctgagcgagtacaagtggatcgtgcccgacatcgtgtgggagatcgacgagtacatcgacttcgagaagatcagaaaggccctgcccagcagcgaggacctggtgaagctggcccccgacttcgacaagatcgtggagagcctgagcctgctgaaggacttcttcaccagcggccacaagctggtgagcgaggtgatcggcgccagcgacctgctgctgctgctgggcagccccgaggagaccgccttcagagccaccgacagaggcagcgagagcgacaagcacttcagaaaggtgagcgacaaggagaagatcgaccagctgcaggaggagctgctgcacacccagctgaagtaccagagaatcctggagagactggagaaggagaacaaggagctgagaaagctggtgctgcagaaggacgacaagggcatccaccacagaaagctgaagaagagcctgatcgacatgtacagcgaggtgctggacgtgctgagcgactacgacgccagctacaacacccaggaccacctgcccagagtggtggtggtgggcgaccagagcgccggcaagaccagcgtgctggagatgatcgcccaggccagaatcttccccagaggcagcggcgagatgatgaccagaagccccgtgaaggtgaccctgagcgagggcccccaccacgtggccctgttcaaggacagcagcagagagttcgacctgaccaaggaggaggacctggccgccctgagacacgagatcgagctgagaatgagaaagaacgtgaaggagggctgcaccgtgagccccgagaccatcagcctgaacgtgaagggccccggcctgcagagaatggtgctggtggacctgcccggcgtgatcaacaccgtgaccagcggcatggcccccgacaccaaggagaccatcttcagcatcagcaaggcctacatgcagaaccccaacgccatcatcctgtgcatccaggacggcagcgtggacgccgagagaagcatcgtgaccgacctggtgagccagatggacccccacggcagaagaaccatcttcgtgctgaccaaggtggacctggccgagaagaacgtggccagccccagcagaatccagcagatcatcgagggcaagctgttccccatgaaggccctgggctacttcgccgtggtgaccggcaagggcaacagcagcgagagcatcgaggccatcagagagtacgaggaggagttcttccagaacagcaagctgctgaagaccagcatgctgaaggcccaccaggtgaccaccagaaacctgagcctggccgtgagcgactgcttctggaagatggtgagagagagcgtggagcagcaggccgacagcttcaaggccaccagattcaacctggagaccgagtggaagaacaactaccccagactgagagagctggacagaaacgagctgttcgagaaggccaagaacgagatcctggacgaggtgatcagcctgagccaggtgacccccaagcactgggaggagatcctgcagcagagcctgtgggagagagtgagcacccacgtgatcgagaacatctacctgcccgccgcccagaccatgaacagcggcaccttcaacaccaccgtggacatcaagctgaagcagtggaccgacaagcagctgcccaacaaggccgtggaggtggcctgggagaccctgcaggaggagttcagcagattcatgaccgagcccaagggcaaggagcacgacgacatcttcgacaagctgaaggaggccgtgaaggaggagagcatcaagagacacaagtggaacgacttcgccgaggacagcctgagagtgatccagcacaacgccctggaggacagaagcatcagcgacaagcagcagtgggacgccgccatctacttcatggaggaggccctgcaggccagactgaaggacaccgagaacgccatcgagaacatggtgggccccgactggaagaagagatggctgtactggaagaacagaacccaggagcagtgcgtgcacaacgagaccaagaacgagctggagaagatgctgaagtgcaacgaggagcaccccgcctacctggccagcgacgagatcaccaccgtgagaaagaacctggagagcagaggcgtggaggtggaccccagcctgatcaaggacacctggcaccaggtgtacagaagacacttcctgaagaccgccctgaaccactgcaacctgtgcagaagaggcttctactactaccagagacacttcgtggacagcgagctggagtgcaacgacgtggtgctgttctggagaatccagagaatgctggccatcaccgccaacaccctgagacagcagctgaccaacaccgaggtgagaagactggagaagaacgtgaaggaggtgctggaggacttcgccgaggacggcgagaagaagatcaagctgctgaccggcaagagagtgcagctggccgaggacctgaagaaggtgagagagatccaggagaagctggacgccttcatcgaggccctgcaccaggagaagtag

SEQ ID NO: 234323 - DNA, 558 bp, Artificial Sequence
  derived and/or modified sequence
tgatacctgatcctgggcagcgccgtgggcggcggctacaccgccaagaagaccttcgaccagtggaaggacatgatccccgacctgagcgagtacaagtggatcgtgcccgacatcgtgtgggagatcgacgagtacatcgacttcgagaagatcagaaaggccctgcccagcagcgaggacctggtgaagctggcccccgacttcgacaagatcgtggagagcctgagcctgctgaaggacttcttcaccagcggccacaagctggtgagcgaggtgatcggcgccagcgacctgctgctgctgctgggcagccccgaggagaccgccttcagagccaccgacagaggcagcgagagcgacaagcacttcagaaaggtgagcgacaaggagaagatcgaccagctgcaggaggagctgctgcacacccagctgaagtaccagagaatcctggagagactggagaaggagaacaaggagctgagaaagctggtgctgcagaaggacgacaagggcatccaccacagaaagctgaagaagagcctgatcgacatgtag

SEQ ID NO: 234324 - protein, 979 aa, Artificial Sequence
  derived and/or modified sequence
MWRLRRAAVACEVCQSLVKHSSGIKGSLPLQKLHLVSRSIYHSHHPTLKLQRPQLRTSFQQFSSLTNLPLRKLKFSPIKYGYQPRRNFWPARLATRLLKLRYLILGSAVGGGYTAKKTFDQWKDMIPDLSEYKWIVPDIVWEIDEYIDFGHKLVSEVIGASDLLLLLGSPEETAFRATDRGSESDKHFRKGLLGELILLQQQIQEHEEEARRAAGQYSTSYAQQKRKVSDKEKIDQLQEELLHTQLKYQRILERLEKENKELRKLVLQKDDKGIHHRKLKKSLIDMYSEVLDVLSDYDASYNTQDHLPRVVVVGDQSAGKTSVLEMIAQARIFPRGSGEMMTRSPVKVTLSEGPHHVALFKDSSREFDLTKEEDLAALRHEIELRMRKNVKEGCTVSPETISLNVKGPGLQRMVLVDLPGVINTVTSGMAPDTKETIFSISKAYMQNPNAIILCIQDGSVDAERSIVTDLVSQMDPHGRRTIFVLTKVDLAEKNVASPSRIQQIIEGKLFPMKALGYFAVVTGKGNSSESIEAIREYEEEFFQNSKLLKTSMLKAHQVTTRNLSLAVSDCFWKMVRESVEQQADSFKATRFNLETEWKNNYPRLRELDRNELFEKAKNEILDEVISLSQVTPKHWEEILQQSLWERVSTHVIENIYLPAAQTMNSGTFNTTVDIKLKQWTDKQLPNKAVEVAWETLQEEFSRFMTEPKGKEHDDIFDKLKEAVKEESIKRHKWNDFAEDSLRVIQHNALEDRSISDKQQWDAAIYFMEEALQARLKDTENAIENMVGPDWKKRWLYWKNRTQEQCVHNETKNELEKMLKCNEEHPAYLASDEITTVRKNLESRGVEVDPSLIKDTWHQVYRRHFLKTALNHCNLCRRGFYYYQRHFVDSELECNDVVLFWRIQRMLAITANTLRQQLTNTEVRRLEKNVKEVLEDFAEDGEKKIKLLTGKRVQLAEDLKKVREIQEKLDAFIEALHQEK

SEQ ID NO: 234325 - DNA, 2940 bp, Artificial Sequence
  derived and/or modified sequence
atgtggcggctaaggagggctgctgtggcctgtgaggtgtgtcagagtctggtgaaacatagttccggaatcaaaggatctttgccactccagaagttgcacttggtgtccagaagtatctaccactcccatcatccgacccttaaacttcaacgaccccagctcaggaccagttttcaacagttcagtagccttacaaatctccccctcaggaaactcaaattttctcctataaagtatggttatcagcctcgtcggaatttctggcctgcccgtctggcaacacgtctgttaaagctgagatacctgatcctgggctctgccgtgggtggggggtacaccgctaaaaaaacctttgatcaatggaaagacatgatcccagatctgagtgaatacaaatggattgtgccggatatcgtttgggaaattgacgaatacattgattttggccataaactcgtgtctgaagtgatcggcgcctcagacctgctgttgctgctgggatctccagaagagaccgcttttagagctactgataggggaagcgagtcagacaaacacttcaggaagggcttgctgggggagctgattctgttgcagcagcaaatccaggagcatgaggaagaagctcgccgcgctgccggacagtacagtacgagctacgcacagcagaaacgaaaagtttccgataaagagaagatcgatcaattacaggaggaactcctccacactcagttgaaataccagaggatccttgagcgcctcgaaaaggagaacaaggagttgcgtaaactggtgctgcagaaggacgacaaggggattcatcatagaaagctgaagaagtctctaattgacatgtattcggaagtcctggacgtcctttctgactacgatgccagctataacacacaggaccacttgccacgggtcgtagtcgtcggagatcagagcgccgggaaaacatccgtgctcgagatgatagcccaggcgcgcatcttccctcggggcagcggtgagatgatgacacggtcaccggttaaggtgacactctccgaggggccccaccatgtagcactgtttaaggattcctctcgcgagttcgatctgaccaaggaggaggatctggcagctctgcgccacgaaatcgaactacggatgagaaagaatgtgaaagaaggctgtacagtgtctcccgagaccattagtctgaatgtaaagggccctggtctgcagcgaatggttctggtggacctgcccggagtcatcaacactgtaacctccggaatggctcctgacactaaagagaccatcttttcaatctctaaggcatacatgcagaaccccaatgctatcatactatgcatccaggatggctcagtggacgccgagaggtcgatcgtcacagatttagtgtcccagatggatccccatggtaggcgcactattttcgttctgacgaaggtcgatcttgctgagaagaatgtggcttcaccctctagaatccagcagatcattgagggaaagttattcccaatgaaggccttaggttatttcgccgttgtcactggtaagggtaactccagcgaaagcatcgaagctatacgtgagtatgaagaggaatttttccaaaattctaagctgttgaaaacttctatgctgaaggctcatcaggttacaaccaggaatctgagtctcgccgtttcagattgcttttggaagatggtccgagaatccgtggaacagcaggctgatagtttcaaagccacccgctttaacttggaaacagagtggaagaataactaccccagacttcgcgagttggatcgcaacgaactctttgaaaaggcaaagaacgagattctggacgaagtcatcagcttgtcacaggttacccccaaacactgggaagaaatcttacaacagtctctgtgggagagggtttctacgcatgttattgagaacatttaccttcccgcagcacagacaatgaattccggcacctttaacacaactgttgacatcaagctgaaacagtggaccgacaagcagcttcctaataaggcagttgaggtggcttgggaaaccctccaggaagagttttcccgtttcatgaccgagcccaaggggaaggaacacgatgacatctttgacaaattaaaggaggcagttaaggaggagagcattaagaggcataagtggaatgactttgcggaggattcactaagggtaattcagcataacgccctggaagatcgctcgatcagcgacaagcaacagtgggatgccgccatttattttatggaggaagcactgcaagcccgactcaaggataccgaaaacgctatagaaaacatggtcggtccagattggaaaaagcgctggctgtattggaaaaatcgaacgcaggaacagtgcgtgcataacgaaaccaagaatgagctggagaaaatgctcaagtgcaacgaagagcatccagcatatctggcatcagatgagattactacagtgaggaagaatctagaatcgcgtggggttgaggtagaccctagcctgattaaagacacttggcaccaggtctatcgccgtcacttcctgaagactgcgctcaaccactgtaacctgtgccgtagaggattctattactatcagcgacactttgtggactcagagttagagtgcaacgacgtcgtcttattttggcgcatccagcgcatgctcgcgataacagcaaacaccttacgccagcagcttaccaacaccgaggtccgcagattggaaaagaatgtgaaagaggttttagaggattttgccgaggacggggagaagaaaataaaactactcaccggcaaaagggttcaactggctgaggatctgaaaaaggtgcgggagattcaggaaaagctcgacgcttttatcgaagcactgcatcaggagaaatag

SEQ ID NO: 234326 - DNA, 2940 bp, Artificial Sequence
  derived and/or modified sequence
atgtggaggctgcggcgggctgctgtggcctgtgaggtgtgccagagcctggtgaagcacagcagcggcatcaagggcagcctgcccctgcagaagctgcacctggtgagccgcagcatctaccacagccaccaccccaccctgaagctgcagaggccccagctgcggaccagcttccagcagttcagcagcctgaccaacctgcccctgaggaagctgaagttcagccccatcaagtatggctaccagcccaggaggaacttctggccagcccggctggccacccggctgctgaagctgcgctacctgatcctgggcagcgctgtgggcggcggctacacagccaagaagacctttgaccagtggaaggacatgatcccagacctgtctgagtacaagtggatcgtgcctgacatcgtgtgggagattgatgagtacatcgactttggccacaagctggtgtctgaggtgattggagccagtgacctgctgctgctgctgggcagccctgaggagacagccttccgggccacagaccggggcagcgagagtgacaagcacttcaggaagggcctgctgggggagctgatcctgctgcagcagcagatccaggagcacgaggaggaggccaggagagctgctggccagtacagcaccagctatgcccagcagaagaggaaggtgtctgacaaggagaagattgaccagctgcaggaggagctgctgcacacccagctgaagtaccagaggatcctggagcggctggagaaggagaacaaggagctgaggaagctggtgctgcagaaggatgacaagggcatccaccacaggaagctgaagaagagcctgattgacatgtacagcgaggtgctggatgtgctgagtgactatgatgccagctacaacacccaggaccacctgccccgggtggtggtggtgggggaccagagcgctgggaagacctctgtgctggagatgattgcccaggcccgcatcttcccccggggcagcggggagatgatgaccaggagccctgtgaaggtgaccctgtctgagggcccccaccacgtggccctcttcaaggacagcagccgggagtttgacctgaccaaggaggaggacctggccgccctgcggcatgaaattgagctgaggatgaggaagaatgtgaaggagggctgcaccgtgtccccagagaccatcagcctgaatgtgaagggccctggcctgcagaggatggtgctggtggacctgcccggggtcatcaacacagtgaccagcggcatggccccagacaccaaggagaccatcttcagcatcagcaaggcctacatgcagaaccccaatgccatcatcctgtgcatccaggacggctctgtggatgctgagaggagcatcgtgacagacctggtgtcccagatggacccccatggaagaaggaccatctttgtgctgaccaaggtggacctggccgagaagaatgtggccagccccagccgcatccagcagatcatcgagggcaagctgttccccatgaaggccctgggctactttgctgtggtgacaggcaagggcaacagcagcgagagcattgaggccatccgggagtatgaggaggagttcttccagaacagcaagctgctgaagacctccatgctgaaggcccaccaggtgaccaccaggaacctgagcctggccgtgtctgactgcttctggaagatggtgcgggagagcgtggagcagcaggccgacagcttcaaggccacccgcttcaacctggagacagagtggaagaacaactacccccggctgcgggagctggacagaaatgagctgtttgagaaggccaagaatgagatcctggatgaggtgatcagcctgagccaggtgacccccaagcactgggaggagatcctgcagcagagcctgtgggagcgggtgtccacccacgtgattgagaacatctacctgcctgctgcccagaccatgaacagcggcaccttcaacaccaccgtggacatcaagctgaagcagtggacagacaagcagctgcccaacaaggctgtggaggtggcctgggagaccctgcaggaggagttcagccgcttcatgacagagcccaagggcaaggagcatgatgacatctttgacaagctgaaggaggccgtgaaggaggagagcatcaagaggcacaagtggaatgactttgctgaggacagcctgcgggtcatccagcacaatgccctggaggacaggagcatcagtgacaagcagcagtgggatgctgccatctacttcatggaggaggccctgcaggcccggctgaaggacacagaaaatgccatcgagaacatggtgggccctgactggaagaagcgctggctgtactggaagaacagaacccaggagcagtgtgtgcacaatgagaccaagaatgagctggagaagatgctgaagtgcaatgaggagcacccagcctacctggccagtgatgagatcaccaccgtgaggaagaacctggagagccggggcgtggaggtggaccccagcctcatcaaggacacctggcaccaggtgtacagaagacacttcctgaagacagccctgaaccactgcaacctgtgccggcggggcttctactactaccagaggcactttgtggacagcgagctggagtgcaatgatgtggtgctcttctggaggatccagaggatgctggccatcacagccaacaccctgcggcagcagctgaccaacacagaggtgcggcggctggagaagaatgtgaaggaggtgctggaggactttgctgaagatggagagaagaagatcaagctgctgaccgggaagagggtgcagctggccgaggacctgaagaaggtgcgggagatccaggagaagctggatgccttcatcgaggccctgcaccaggagaagtag

SEQ ID NO: 234327 - DNA, 2940 bp, Artificial Sequence
  derived and/or modified sequence
atgtggcggctgcggcgggccgccgtggcctgcgaggtgtgccagtctctcgtcaagcattcctcaggtatcaagggctccctccctctccagaagctacatttggtcagccggtctatctaccatagtcaccatcctaccctgaagctacagcgtccacagttacgtacttcctttcaacaattcagctccctgaccaatctgcccctacggaagctgaagttcagtcccattaaatatgggtatcaaccccgccgcaatttctggcccgccagactggctacacgtctcctcaaactgaggtatcttatactgggtagcgccgttggggggggatatacagcaaagaaaaccttcgatcaatggaaagatatgatccccgacctgagtgagtacaaatggatcgtgcctgacatagtgtgggaaatcgatgagtatatagactttggacataagctggtatctgaagtgattggcgcatcagatcttctcttgctcctgggctctccagaggagaccgcctttcgggccacggaccgtggctctgaaagtgacaagcacttccggaagggtctgctgggggagctcatcctcttgcaacagcagatccaggaacatgaagaggaagccaggcgcgctgctggtcaatattctacgtcctatgcccagcaaaaacggaaggttagtgataaggagaagattgatcagcttcaggaggagctgcttcatacccagctaaagtaccagagaatcctcgagcgcttggagaaagaaaacaaggagctgagaaaacttgttctgcaaaaagatgacaaaggcatccaccaccggaaattgaagaagtctctgatcgacatgtactctgaggtccttgacgttctgtctgactacgacgcctcttacaatactcaggaccacttacctagagtggtggtggtgggagaccagagtgctgggaagaccagtgtccttgaaatgattgcccaggcgagaatttttcctaggggaagtggggagatgatgacgaggtccccggtcaaagtgactctgtccgaaggcccccatcacgtggcactctttaaagattcaagccgtgaatttgacctcacaaaggaggaagaccttgctgccctgcgccatgagattgaattgagaatgcggaaaaatgtgaaggagggatgtactgtaagccccgagacaatctcgctcaatgtgaaggggcctgggctgcagagaatggtcttagtggaccttcctggcgtaattaatacggtgacctccggaatggccccggatacaaaagagacgattttctccatcagtaaagcctacatgcagaaccccaacgcaatcattctttgtatccaggacggctctgttgacgcggaaagatctatcgtgacagacttggtatcccagatggatccacatggccggaggacgattttcgtcctcacgaaggtggaccttgctgaaaaaaatgtggcctcaccctcaagaatacaacagattattgaagggaaactctttcctatgaaggcgttgggttactttgccgttgtcactggaaaaggaaacagtagtgagtccatcgaggccattagagaatatgaggaggaattttttcagaattcaaaactgctcaaaacatcaatgttgaaagcccaccaggttacaacacgtaatttgagcttggcagttagtgattgtttctggaagatggtccgtgaatctgtggagcagcaagccgactccttcaaagctacccgattcaatctcgaaaccgagtggaaaaacaattatcctagactgagggagctggataggaatgaactctttgagaaagccaagaacgaaatcctggacgaggtcatctctctgtcacaggtcaccccaaaacattgggaagagattttacagcagtcactttgggagcgcgtgagcacccacgtaattgaaaacatctatctccctgctgcccagactatgaatagtggcacattcaatactacagtagatataaaactgaagcagtggaccgacaaacagctgcctaataaggccgttgaagtagcttgggagactcttcaggaggagttcagcagatttatgacggagcctaagggtaaggaacacgacgatatcttcgacaaactcaaggaggcagtaaaagaggagtccatcaagcgccacaagtggaacgatttcgccgaagactccctgcgagtcattcaacataatgcactggaggataggtcgatctcggataagcagcagtgggacgctgcgatttatttcatggaggaggctctgcaggccagacttaaggacacagagaatgccattgagaacatggtgggcccggattggaagaaacgctggctatactggaaaaacaggacccaggaacagtgcgtgcataacgagactaagaacgaactcgagaaaatgctgaaatgcaatgaagagcaccctgcttatctggcttctgacgagataaccacagtcaggaagaaccttgaatcacgtggggtcgaggttgatccttcactcatcaaggacacttggcatcaggtctatcggaggcattttctgaaaacagccttgaaccactgcaacttgtgccgtaggggcttctactactaccagcgccattttgtggacagcgaacttgaatgtaacgatgttgttctcttttggaggatccaacggatgctcgccatcaccgctaacacactgcggcaacaattgactaacacggaggtacggcgcctggagaagaacgtgaaagaggtgttggaagattttgctgaagatggggaaaagaaaatcaaactactcacagggaagagggtgcagctcgcagaagacctgaagaaggttagggagattcaggaaaaactggatgcattcattgaggcgctccaccaggagaagtag

SEQ ID NO: 234328 - DNA, 6384 bp, Artificial Sequence
  derived and/or modified sequence
gtgctgcccgcctagaaagggtgaagtggttgtttccgtgacggactgagtacgggtgcctgtcaggctcttgcggaagtccatgcgccattgggagggcctcggccgcggctctgtgcccttgctgctgagggccacttcctgggtcattcctggaccgggagccgggctggggctcacacgggggctcccgcgtggccgtctcggcgcctgcgtgacctccccgccggcgggatgtggcgactacgtcgggccgctgtggcctgtgaggtctgccagtctttagtgaaacacagctctggaataaaaggaagtttaccactacaaaaactacatctggtttcacgaagcatttatcattcacatcatcctaccttaaagcttcaacgaccccaattaaggacatcctttcagcagttctcttctctgacaaaccttcctttacgtaaactgaaattctctccaattaaatatggctaccagcctcgcaggaatttttggccagcaagattagctacgagactcttaaaacttcgctatctcatactaggatcggctgttgggggtggctacacagccaaaaagacttttgatcagtggaaagatatgataccggaccttagtgaatataaatggattgtgcctgacattgtgtgggaaattgatgagtatatcgattttggtcacaaattggttagtgaagtcataggagcttctgacctacttctcttgttaggttctccggaagaaacggcgtttagagcaacagatcgtggatctgaaagtgacaagcattttagaaagggtctgcttggtgagctcattctcttacaacaacaaattcaagagcatgaagaggaagcgcgcagagccgctggccaatatagcacgagctatgcccaacagaagcgcaaggtgtcagacaaagagaaaattgaccaacttcaggaagaacttctgcacactcagttgaagtatcagagaatcttggaacgattagaaaaggagaacaaagaattgagaaaattagtattgcagaaagatgacaaaggcattcatcatagaaagcttaagaaatctttgattgacatgtattctgaagttcttgatgttctctctgattatgatgccagttataatacgcaagatcatctgccacgggttgttgtggttggagatcagagtgctggaaagactagtgtgttggaaatgattgcccaagctcgaatattcccaagaggatctggggagatgatgacacgttctccagttaaggtgactctgagtgaaggtcctcaccatgtggccctatttaaagatagttctcgggagtttgatcttaccaaagaagaagatcttgcagcattaagacatgaaatagaacttcgaatgaggaaaaatgtgaaagaaggctgtaccgttagccctgagaccatatccttaaatgtaaaaggccctggactacagaggatggtgcttgttgacttaccaggtgtgattaatactgtgacatcaggcatggctcctgacacaaaggaaactattttcagtatcagcaaagcttacatgcagaatcctaatgccatcatactgtgtattcaagatggatctgtggatgctgaacgcagtattgttacagacttggtcagtcaaatggaccctcatggaaggagaaccatattcgttttgaccaaagtagacctggcagagaaaaatgtagccagtccaagcaggattcagcagataattgaaggaaagctcttcccaatgaaagctttaggttattttgctgttgtaacaggaaaagggaacagctctgaaagcattgaagctataagagaatatgaagaagagttttttcagaattcaaagctcctaaagacaagcatgctaaaggcacaccaagtgactacaagaaatttaagccttgcagtatcagactgcttttggaaaatggtacgagagtctgttgaacaacaggctgatagtttcaaagcaacacgttttaaccttgaaactgaatggaagaataactatcctcgcctgcgggaacttgaccggaatgaactatttgaaaaagctaaaaatgaaatccttgatgaagttatcagtctgagccaggttacaccaaaacattgggaggaaatccttcaacaatctttgtgggaaagagtatcaactcatgtgattgaaaacatctaccttccagctgcgcagaccatgaattcaggaacttttaacaccacagtggatatcaagcttaaacagtggactgataaacaacttcctaataaagcagtagaggttgcttgggagaccctacaagaagaattttcccgctttatgacagaaccgaaagggaaagagcatgatgacatatttgataaacttaaagaggctgttaaggaagaaagtattaaacgacacaagtggaatgactttgcggaggacagcttgagggttattcaacacaatgctttggaagaccgatccatatctgataaacagcaatgggatgcagctatttattttatggaagaggctctgcaggctcgtctcaaggatactgaaaatgcaattgaaaacatggtgggtccagactggaaaaagaggtggttatactggaagaatcggacccaagaacagtgtgttcacaatgaaaccaagaatgaattggagaagatgttgaaatgtaatgaggagcacccagcttatcttgcaagtgatgaaataaccacagtccggaagaaccttgaatcccgaggagtagaagtagatccaagcttgattaaggatacttggcatcaagtttatagaagacattttttaaaaacagctctaaaccattgtaacctttgtcgaagaggtttttattactaccaaaggcattttgtagattctgagttggaatgcaatgatgtggtcttgttttggcgtatacagcgcatgcttgctatcaccgcaaatactttaaggcaacaacttacaaatactgaagttaggcgattagagaaaaatgttaaagaggtattggaagattttgctgaagatggtgagaagaagattaaattgcttactggtaaacgcgttcaactggcggaagacctcaagaaagttagagaaattcaagaaaaacttgatgctttcattgaagctcttcatcaggagaaataaattaaaatcgtactcataatcagctctgcatacatctgaagaacaaaaacatcaacgtcttttgtccagcctctttttcttctgctgttccacctttctaaacatacaataaagtcatgggataaaaataatcgatgtatgttacgggcgctttaaccatcagctgcctctcgaatggaagaacagtggtaatggattaacatcctattttgttgtactaaagtgacaaatcggaataatataattggtatggccattaggttcagtccttgaagataagaaacttgttctctgtttgttgtcttatttgtggtggcactcgtttaatggattaactgaggttgctcaatgttcagtttcttttccagaaatacaatgctaggtgttttgaaataaaacttatatagcaattgtttaaagttatcaattgtatataaaatcacagtagcctgctaaatcattgtatgtgtctgtagtattctattcccagaaactatttgaccatgataattcagtttatattcaccacatgaaagaaaaatgggtaacagaagaacccttaaaacaggttaatttggattgtaacgttcagtgaaagaaatttcaacccttcatagccagcgaagaaatttgccttggaagccaagtcagtaccagcttacctatttgattcagttgctgttttctcactctctatatccatttgaaattgatttattttagatgttgtatacttacgttaggctttctgttaatagtggtttttctcctgttgacagagccaccggattatgacacaggatgaggaagattaaggataatcaattgactaatttcatttagaatattatcaaacatttcaactaggtatcagaaaaaggctttctttcataagactattttaaatagaaattatttcaacaattaaagtaatgttgaccatccccctctcagctgaataaagaaaaatttagttcaatttattgcaatttaattacaatactaccttcacaacattttcatgtgttttaaataaatattttttaattggctaaaggacattcaagcaaagaaatgctttctttacttaaaatgtctatctcatttgctgccttttcactaagcctttactttgttaataaaagtgtccattgtgtgatgtttttgattttacagtttgctaaatcttattttcttggagttgctttttggtaacagccccattgctactccccattttattgttttacatcaatgcatgcttcgttgtgatccctcaagatgtaacacttggtatgctcggttgaggatatgaaaaaatacttccgaaaccaggaattcaatgtatgtttgttttatactgtttgataagaaaagtaggtccagccttaagcagcacagatgcgctggtagatgcatagtcaggaactttttttatttcttttaggtctagggacaggagtgaatagaaagggaggagagctctattatgttctatacacagattaggagatgaccttactgggtacacccctctaaccagtgcttacaggttaatgcatgttaatgaatatttttgcagttgtaaagcataacaattacaactacacatctatttctaaagaataaaacaggaccatatttatttacttctgtcaactatagaaagaaagaccttcagctgtatttccacagatttctcccaaggaaaaggctaatattagtcactactgttatcacatccctttgtataagttttaaaaagagatggagggagatcttcatttctttgaggagatcagtattgtaacgtatgtgaatagatgataacaattaatattactaaaagtcccacatgagagtcctgacgccctctccatgccccacagtaatgtggcttctttcatgggtttttttttcttctttttagctgatctcatcctaagcatgctttatttttccttgaaagctaggtatttatcaactgcagatgttattgaaagaaaataaaattcagtctcaagagtaaaccctgtgtcttgtgtctgtagttcaaaagtcagaaatgattctaatttaaacaaaaagatactaaatatacagaagttaaattcgaactagccacagaatcatttgtttttatgtcagaatttgcaaagagtggagtggacaaagctctgtatggaagactgaacaactgtaaatagatgatatccaaacttaatttggctaggacttcaattttaaaaatcagtgtacctaggcagtgcacagcacgaaataagtggcccttgcagcttccccgtttaacccactgtgctatagttgcgggtggaacagtcaacctttctagtagtttatgatattgccctctttgtattcccattttctacagttttttccgcagacttctttctgcaaattattcagcctccaaatgcaaatgaatgatataaaaataagtagggaacatggcagagagtggtgcttcccagcctcacaatgtgggaatttgacataggatgagagtcagagtataggtttaaaagataaaatctttagttaataattttgtatttatttattctagatgtatgtatctgaggaaagaaatctggtatttttgctttccaataaaggggatcaaagtaatggtttttctctcagttctctaagctggtctatgttatagctctagcagtatggaaatgtgctttaaaatatgcttaccttttgaatgatcatggctatatgttgttgagatatttgaaacttaccttgttttcacttgtgcactgtgaatgaactttgtattatttttttaaaaccttcacattacgtgtagatattattgcaacttatattttgcctgagcttgatcaaaggtcatttgtgtagatgagtaattaaaaaatatttaaatcacattataattctattattggagagcatcttttaaatttttttctgttttaacgagggaaagagaaacctgtatacctagggtcattatttgaccccatagtataaccagattcatggtctaacaagctctcagtgtggcttttctctgaatgcttgaatttcacatgccttgcatttcacagttgtactccatggtcaaccggtgctttttttcacatcgtggtacttgtcaaaacattttgttattttccttggtaaaatatataaaaaaggttttctaatttc

SEQ ID NO: 234329 - DNA, 2940 bp, Artificial Sequence
  derived and/or modified sequence
atgtggaggctgcgtcgggcagctgtggcttgcgaggtgtgtcagtccctggtcaaacatagcagtggaatcaaaggtagcctccctctccaaaagctgcacctggtctcccgaagtatttatcacagccatcaccccaccctcaagttacagcggcctcagttgcgcactagctttcaacaattttcttcgctgacaaacctgccactcaggaaattgaaattctctccaataaaatacggttatcagccccgacgcaacttttggccagcacgcctcgctacccggctactcaaattgagatatctcattctggggagtgccgttgggggtggttatacggccaaaaaaaccttcgatcagtggaaggatatgataccggacctctcggagtataagtggatcgtgccagacattgtgtgggagatcgacgagtacattgattttggtcacaaacttgtgtccgaagttataggagcttcagacctgcttctgctgttaggttcacctgaagaaactgcattccgcgcaactgaccgcggaagcgagagtgacaagcactttagaaagggcctgctgggcgagctaatcttgttacagcaacagatccaggaacacgaagaagaagcacgccgagccgcaggccaatacagcaccagctacgcgcagcagaaacgtaaggtttctgacaaggagaagattgaccagctgcaggaggaacttctacatactcagctgaagtaccagcgaatcctggaacggttggaaaaagagaataaggaacttaggaagctcgtattgcagaaagatgacaaaggaatacatcaccggaagctcaagaaatcattgatagacatgtattccgaggtcttggacgtcctgtcagactatgatgcaagctacaacacccaggaccacctccctcgcgtggtggtcgtgggggaccagtccgcaggcaagacatctgtgctggagatgattgcccaggcaaggatcttccccaggggctcaggcgagatgatgacacgcagcccggttaaggtgactcttagcgaaggccctcatcatgtggccctgtttaaggactcctccagagaatttgacctgacgaaggaagaagacttggcggcactgcggcacgagatcgagcttagaatgcggaagaatgtgaaggagggctgtacggtctcccctgaaactatatctcttaatgtcaaagggcctggtctccagcgaatggtcttagtcgatctgcccggtgtcataaacactgtgacaagcggcatggcgccagacactaaagaaaccatcttcagcataagcaaagcttacatgcagaaccccaacgcaattatactttgtattcaagatggttccgtcgacgctgaacgttctatcgtgacagacctcgtgagccaaatggatccacacggtaggagaacgatatttgttttgaccaaagtagacctggcagagaaaaatgtcgcaagcccctcacggatccagcagatcatagaaggaaagctgttccccatgaaagcattgggctacttcgctgtcgttacaggaaagggcaatagcagtgagtcaatagaggctattcgcgagtatgaagaagaattcttccagaattcaaagttactgaagactagcatgctgaaggcacatcaggttaccactcggaatctctccctggctgtctccgactgtttctggaagatggtacgagagtctgtggagcagcaggcagattccttcaaagccactcgattcaatttggaaactgaatggaaaaacaattatcctcgactcagggagctcgaccgcaacgagctctttgagaaggccaagaatgagatactggatgaggtaatatcactgtctcaagtgacacctaagcattgggaggagatcctacaacaatctttgtgggaacgggtgagtacccatgttatcgaaaacatttacctgcccgctgctcagactatgaattcgggtacttttaatactaccgtagatattaagttgaaacagtggaccgataaacagttgccaaacaaggccgtggaggttgcttgggagactctacaggaagagtttagccggttcatgaccgagcctaagggtaaggagcacgacgatatctttgataagctgaaggaagccgtgaaggaggagtccattaaaagacacaagtggaatgacttcgctgaggacagcttaagagtgatccaacacaatgcgctggaagatcgctccatcagtgataagcagcaatgggacgctgctatctattttatggaagaggcgttgcaggcgagactgaaagacactgaaaacgccatcgaaaatatggtagggcctgactggaagaagcggtggctctactggaagaacagaactcaggagcaatgcgtccataatgaaactaaaaacgagctggagaagatgttgaagtgtaacgaggaacatcctgcctatttagcttccgacgaaatcactaccgtgcggaagaatctggaatctcgtggggtagaggtagatccatccctgatcaaggacacgtggcaccaggtttaccgccgacatttccttaagaccgccctgaaccattgcaatctgtgccgcagagggttctattactatcagaggcacttcgttgattccgagctcgagtgcaatgacgtagtactcttctggaggattcagcggatgctagccattacagccaacacattgagacagcaacttacgaataccgaagtgcgcaggcttgagaagaacgtcaaggaggtactcgaggacttcgcagaggatggagagaagaagatcaaactcctaaccggaaaacgcgtgcagctagccgaggatcttaagaaggtccgagagatccaggagaagcttgacgcattcatcgaggcccttcaccaggaaaaatag

SEQ ID NO: 234330 - DNA, 2940 bp, Artificial Sequence
  derived and/or modified sequence
atgtggagactgagaagagccgccgtggcctgcgaggtgtgccagagcctggtgaagcacagcagcggcatcaagggcagcctgcccctgcagaagctgcacctggtgagcagaagcatctaccacagccaccaccccaccctgaagctgcagagaccccagctgagaaccagcttccagcagttcagcagcctgaccaacctgcccctgagaaagctgaagttcagccccatcaagtacggctaccagcccagaagaaacttctggcccgccagactggccaccagactgctgaagctgagatacctgatcctgggcagcgccgtgggcggcggctacaccgccaagaagaccttcgaccagtggaaggacatgatccccgacctgagcgagtacaagtggatcgtgcccgacatcgtgtgggagatcgacgagtacatcgacttcggccacaagctggtgagcgaggtgatcggcgccagcgacctgctgctgctgctgggcagccccgaggagaccgccttcagagccaccgacagaggcagcgagagcgacaagcacttcagaaagggcctgctgggcgagctgatcctgctgcagcagcagatccaggagcacgaggaggaggccagaagagccgccggccagtacagcaccagctacgcccagcagaagagaaaggtgagcgacaaggagaagatcgaccagctgcaggaggagctgctgcacacccagctgaagtaccagagaatcctggagagactggagaaggagaacaaggagctgagaaagctggtgctgcagaaggacgacaagggcatccaccacagaaagctgaagaagagcctgatcgacatgtacagcgaggtgctggacgtgctgagcgactacgacgccagctacaacacccaggaccacctgcccagagtggtggtggtgggcgaccagagcgccggcaagaccagcgtgctggagatgatcgcccaggccagaatcttccccagaggcagcggcgagatgatgaccagaagccccgtgaaggtgaccctgagcgagggcccccaccacgtggccctgttcaaggacagcagcagagagttcgacctgaccaaggaggaggacctggccgccctgagacacgagatcgagctgagaatgagaaagaacgtgaaggagggctgcaccgtgagccccgagaccatcagcctgaacgtgaagggccccggcctgcagagaatggtgctggtggacctgcccggcgtgatcaacaccgtgaccagcggcatggcccccgacaccaaggagaccatcttcagcatcagcaaggcctacatgcagaaccccaacgccatcatcctgtgcatccaggacggcagcgtggacgccgagagaagcatcgtgaccgacctggtgagccagatggacccccacggcagaagaaccatcttcgtgctgaccaaggtggacctggccgagaagaacgtggccagccccagcagaatccagcagatcatcgagggcaagctgttccccatgaaggccctgggctacttcgccgtggtgaccggcaagggcaacagcagcgagagcatcgaggccatcagagagtacgaggaggagttcttccagaacagcaagctgctgaagaccagcatgctgaaggcccaccaggtgaccaccagaaacctgagcctggccgtgagcgactgcttctggaagatggtgagagagagcgtggagcagcaggccgacagcttcaaggccaccagattcaacctggagaccgagtggaagaacaactaccccagactgagagagctggacagaaacgagctgttcgagaaggccaagaacgagatcctggacgaggtgatcagcctgagccaggtgacccccaagcactgggaggagatcctgcagcagagcctgtgggagagagtgagcacccacgtgatcgagaacatctacctgcccgccgcccagaccatgaacagcggcaccttcaacaccaccgtggacatcaagctgaagcagtggaccgacaagcagctgcccaacaaggccgtggaggtggcctgggagaccctgcaggaggagttcagcagattcatgaccgagcccaagggcaaggagcacgacgacatcttcgacaagctgaaggaggccgtgaaggaggagagcatcaagagacacaagtggaacgacttcgccgaggacagcctgagagtgatccagcacaacgccctggaggacagaagcatcagcgacaagcagcagtgggacgccgccatctacttcatggaggaggccctgcaggccagactgaaggacaccgagaacgccatcgagaacatggtgggccccgactggaagaagagatggctgtactggaagaacagaacccaggagcagtgcgtgcacaacgagaccaagaacgagctggagaagatgctgaagtgcaacgaggagcaccccgcctacctggccagcgacgagatcaccaccgtgagaaagaacctggagagcagaggcgtggaggtggaccccagcctgatcaaggacacctggcaccaggtgtacagaagacacttcctgaagaccgccctgaaccactgcaacctgtgcagaagaggcttctactactaccagagacacttcgtggacagcgagctggagtgcaacgacgtggtgctgttctggagaatccagagaatgctggccatcaccgccaacaccctgagacagcagctgaccaacaccgaggtgagaagactggagaagaacgtgaaggaggtgctggaggacttcgccgaggacggcgagaagaagatcaagctgctgaccggcaagagagtgcagctggccgaggacctgaagaaggtgagagagatccaggagaagctggacgccttcatcgaggccctgcaccaggagaagtag

SEQ ID NO: 234331 - protein, 997 aa, Artificial Sequence
  derived and/or modified sequence
MWRLRRAAVACEVCQSLVKHSSGIKGSLPLQKLHLVSRSIYHSHHPTLKLQRPQLRTSFQQFSSLTNLPLRKLKFSPIKYGYQPRRNFWPARLATRLLKLRYLILGSAVGGGYTAKKTFDQWKDMIPDLSEYKWIVPDIVWEIDEYIDFEKIRKALPSSEDLVKLAPDFDKIVESLSLLKDFFTSGSPEETAFRATDRGSESDKHFRKGLLGELILLQQQIQEHEEEARRAAGQYSTSYAQQKRKVSDKEKIDQLQEELLHTQLKYQRILERLEKENKELRKLVLQKDDKGIHHRKLKKSLIDMYSEVLDVLSDYDASYNTQDHLPRVVVVGDQSAGKTSVLEMIAQARIFPRGSGEMMTRSPVKVTLSEGPHHVALFKDSSREFDLTKEEDLAALRHEIELRMRKNVKEGCTVSPETISLNVKGPGLQRMVLVDLPGVINTVTSGMAPDTKETIFSISKAYMQNPNAIILCIQDGSVDAERSIVTDLVSQMDPHGRRTIFVLTKVDLAEKNVASPSRIQQIIEGKLFPMKALGYFAVVTGKGNSSESIEAIREYEEEFFQNSKLLKTSMLKAHQVTTRNLSLAVSDCFWKMVRESVEQQADSFKATRFNLETEWKNNYPRLRELDRNELFEKAKNEILDEVISLSQVTPKHWEEILQQSLWERVSTHVIENIYLPAAQTMNSGTFNTTVDIKLKQWTDKQLPNKAVEVAWETLQEEFSRFMTEPKGKEHDDIFDKLKEAVKEESIKRHKWNDFAEDSLRVIQHNALEDRSISDKQQWDAAIYFMEEALQARLKDTENAIENMVGPDWKKRWLYWKNRTQEQCVHNETKNELEKMLKCNEEHPAYLASDEITTVRKNLESRGVEVDPSLIKDTWHQVYRRHFLKTALNHCNLCRRGFYYYQRHFVDSELECNDVVLFWRIQRMLAITANTLRQQLTNTEVRRLEKNVKEVLEDFAEDGEKKIKLLTGKRVQLAEDLKKVREIQEKLDAFIEALHQEK

SEQ ID NO: 234332 - DNA, 2994 bp, Artificial Sequence
  derived and/or modified sequence
atgtggagactgagaagggcagctgtggcctgcgaagtgtgtcagtctttggtgaaacattcgtccggcatcaagggttccttgcccctgcagaaactgcacctggtgtcacggtcgatctatcactctcaccaccctacattgaaactccagcggccacagctgaggacatcatttcaacagtttagttctctaactaatctgcctttgagaaagttaaaatttagtcctattaagtacgggtaccaaccccgccgtaatttttggcctgcccgtctagcaactaggctgctgaaactccgctacttaattttggggtccgccgtgggcggtgggtatacagcaaagaaaacttttgaccagtggaaggacatgataccagacctctcagaatacaagtggatcgtgcccgatatcgtctgggaaattgacgaatatatcgatttcgagaagattaggaaggctttacctagttctgaagatctggtgaagctggcccccgacttcgacaagattgtggaatcactttccctgctaaaagattttttcacaagcgggtccccggaagagacagcatttcgagccacagacagagggtcagaatcggacaaacacttccgtaagggtctgttgggcgaactgattctgctgcagcagcagatccaggagcacgaggaagaagcccggcgggcggcggggcaatacagtacttcttatgcacagcaaaaacggaaagtgagtgataaagagaaaatcgatcaattgcaagaggaactgttgcacacccagttgaaataccagaggatacttgagagactggaaaaagaaaataaagaacttagaaaactagtattgcaaaaagacgataagggcattcaccatcgcaagctgaagaaatctctcatcgatatgtactcggaagtgttggacgtgctttccgactacgacgcatcctacaatactcaagatcatctccccagagtagtggtcgtcggtgatcagagcgcaggtaaaacctcagtattggaaatgattgctcaggcaagaatttttccaaggggatccggggagatgatgactcgctctcctgttaaggtcactctgtcggaggggcctcatcatgtggctctgttcaaggattcctccagagagtttgatctgacaaaggaggaggacttagctgccctgcggcatgagatcgagctgcgcatgagaaaaaacgtaaaagaaggatgcaccgtctcacctgagactatatccctcaatgtgaaaggaccgggactccagcgcatggtgctggtcgacctcccaggcgtgattaacactgtgacgtcaggcatggctcctgatactaaagagacaatcttcagcatatccaaagcctacatgcagaatccaaatgctattatactctgtatccaagatggcagcgtcgacgctgaacgatcgatcgttactgacctggtctcccagatggatccgcatggacgccggaccatatttgttttaactaaggtcgatctggctgagaagaacgtggcaagcccttctagaatacagcaaattatagaggggaaactgtttcctatgaaagctctggggtactttgccgtggtaaccggtaaggggaattcatccgagtccattgaagctattcgtgaatatgaggaggagttctttcaaaatagcaagctgctgaaaacatccatgctgaaagcccaccaagtaacaacccgcaatctcagtctggccgtctctgattgtttctggaaaatggtgcgagaatctgtggagcaacaggcagactccttcaaagcaaccaggttcaacttggaaaccgaatggaaaaataattatccccggttgcgcgaactggaccgcaacgagttgttcgaaaaagcaaaaaatgagatactcgatgaagttatctcactttcacaggtgaccccaaagcactgggaggaaatactgcaacagagcctctgggaaagagtgtcaacccatgtgatagaaaacatctatcttcctgcagctcagactatgaattcaggtacctttaataccaccgtcgacattaagctcaaacagtggacagataaacagcttccaaacaaggccgttgaggtggcttgggagactttacaggaagagttctcaaggtttatgacagagcccaaggggaaggagcacgatgacatattcgacaaactgaaagaggctgttaaggaggaaagcatcaagcggcataaatggaatgacttcgctgaagactcgctgagagtgattcaacacaacgccttagaagatcgcagcatttctgacaagcagcagtgggacgctgccatttatttcatggaagaggcgctgcaggcaagacttaaagacaccgagaatgcaatcgagaatatggtgggcccggattggaagaagcgctggctctactggaagaatagaacccaggaacaatgtgtgcataatgagacaaagaatgaactggaaaagatgttaaaatgcaatgaggaacatcccgcatacttggcctctgacgagattaccacagttagaaagaatctggagtcacggggggtggaagtagatccaagcctcatcaaagatacatggcatcaggtttatcgccgccatttccttaaaacagccctcaaccactgtaacttgtgtaggagagggttctactactaccagagacacttcgttgatagcgaactcgaatgcaatgacgtggtcctcttctggcgaattcagagaatgttagccataactgccaatactcttcgacagcaactgacgaacaccgaagttcgcaggctcgaaaagaacgttaaagaggtgctcgaagacttcgcagaagatggtgaaaaaaagataaaactgctgacagggaaaagagtgcagctggcggaagacctaaaaaaggttcgggagattcaggagaagttggacgccttcattgaagcactgcaccaagaaaagtag

SEQ ID NO: 234333 - DNA, 2994 bp, Artificial Sequence
  derived and/or modified sequence
atgtggaggctgcggcgggctgctgtggcctgtgaggtgtgccagagcctggtgaagcacagcagcggcatcaagggcagcctgcccctgcagaagctgcacctggtgagccgcagcatctaccacagccaccaccccaccctgaagctgcagaggccccagctgcggaccagcttccagcagttcagcagcctgaccaacctgcccctgaggaagctgaagttcagccccatcaagtatggctaccagcccaggaggaacttctggccagcccggctggccacccggctgctgaagctgcgctacctgatcctgggcagcgctgtgggcggcggctacacagccaagaagacctttgaccagtggaaggacatgatcccagacctgtctgagtacaagtggatcgtgcctgacatcgtgtgggagattgatgagtacatcgactttgagaagatcaggaaggccctgcccagcagcgaggacctggtgaagctggccccagactttgacaagatcgtggagagcctgagcctgctgaaggacttcttcaccagcggcagccctgaggagacagccttccgggccacagaccggggcagcgagagtgacaagcacttcaggaagggcctgctgggggagctgatcctgctgcagcagcagatccaggagcacgaggaggaggccaggagagctgctggccagtacagcaccagctatgcccagcagaagaggaaggtgtctgacaaggagaagattgaccagctgcaggaggagctgctgcacacccagctgaagtaccagaggatcctggagcggctggagaaggagaacaaggagctgaggaagctggtgctgcagaaggatgacaagggcatccaccacaggaagctgaagaagagcctgattgacatgtacagcgaggtgctggatgtgctgagtgactatgatgccagctacaacacccaggaccacctgccccgggtggtggtggtgggggaccagagcgctgggaagacctctgtgctggagatgattgcccaggcccgcatcttcccccggggcagcggggagatgatgaccaggagccctgtgaaggtgaccctgtctgagggcccccaccacgtggccctcttcaaggacagcagccgggagtttgacctgaccaaggaggaggacctggccgccctgcggcatgaaattgagctgaggatgaggaagaatgtgaaggagggctgcaccgtgtccccagagaccatcagcctgaatgtgaagggccctggcctgcagaggatggtgctggtggacctgcccggggtcatcaacacagtgaccagcggcatggccccagacaccaaggagaccatcttcagcatcagcaaggcctacatgcagaaccccaatgccatcatcctgtgcatccaggacggctctgtggatgctgagaggagcatcgtgacagacctggtgtcccagatggacccccatggaagaaggaccatctttgtgctgaccaaggtggacctggccgagaagaatgtggccagccccagccgcatccagcagatcatcgagggcaagctgttccccatgaaggccctgggctactttgctgtggtgacaggcaagggcaacagcagcgagagcattgaggccatccgggagtatgaggaggagttcttccagaacagcaagctgctgaagacctccatgctgaaggcccaccaggtgaccaccaggaacctgagcctggccgtgtctgactgcttctggaagatggtgcgggagagcgtggagcagcaggccgacagcttcaaggccacccgcttcaacctggagacagagtggaagaacaactacccccggctgcgggagctggacagaaatgagctgtttgagaaggccaagaatgagatcctggatgaggtgatcagcctgagccaggtgacccccaagcactgggaggagatcctgcagcagagcctgtgggagcgggtgtccacccacgtgattgagaacatctacctgcctgctgcccagaccatgaacagcggcaccttcaacaccaccgtggacatcaagctgaagcagtggacagacaagcagctgcccaacaaggctgtggaggtggcctgggagaccctgcaggaggagttcagccgcttcatgacagagcccaagggcaaggagcatgatgacatctttgacaagctgaaggaggccgtgaaggaggagagcatcaagaggcacaagtggaatgactttgctgaggacagcctgcgggtcatccagcacaatgccctggaggacaggagcatcagtgacaagcagcagtgggatgctgccatctacttcatggaggaggccctgcaggcccggctgaaggacacagaaaatgccatcgagaacatggtgggccctgactggaagaagcgctggctgtactggaagaacagaacccaggagcagtgtgtgcacaatgagaccaagaatgagctggagaagatgctgaagtgcaatgaggagcacccagcctacctggccagtgatgagatcaccaccgtgaggaagaacctggagagccggggcgtggaggtggaccccagcctcatcaaggacacctggcaccaggtgtacagaagacacttcctgaagacagccctgaaccactgcaacctgtgccggcggggcttctactactaccagaggcactttgtggacagcgagctggagtgcaatgatgtggtgctcttctggaggatccagaggatgctggccatcacagccaacaccctgcggcagcagctgaccaacacagaggtgcggcggctggagaagaatgtgaaggaggtgctggaggactttgctgaagatggagagaagaagatcaagctgctgaccgggaagagggtgcagctggccgaggacctgaagaaggtgcgggagatccaggagaagctggatgccttcatcgaggccctgcaccaggagaagtag

SEQ ID NO: 234334 - DNA, 2994 bp, Artificial Sequence
  derived and/or modified sequence
atgtggcggctgcggcgggccgccgtggcctgcgaggtgtgccagtctctcgtcaaacactcctccggaatcaagggcagtctgcctctgcagaaattgcacctggtcagccggagcatctatcactcccatcatcctactctgaaacttcaacgaccacagctacgcacttcatttcagcagtttagcagtctcaccaaccttcccctccggaaactgaagttcagtcctattaaatacgggtaccaacctcgtcggaacttttggcccgcccgcctggcaacccggcttctgaaactgaggtatctgattcttggttcggcagtgggtgggggttacacagcaaaaaaaactttcgatcagtggaaggacatgattcccgacctgtcggaatataaatggatcgtacccgatatcgtctgggaaatcgacgagtatatcgattttgagaaaattcggaaggcacttccttcatccgaagacttagtcaaattggcccccgactttgataaaattgttgaaagtctgtcattgctgaaggatttctttacgtcaggcagtccagaagagacagcattccgcgctactgatagggggagtgaatcggacaagcattttagaaagggtttgctgggtgagctaattcttctgcagcaacaaatccaggaacacgaggaggaagccagaagagccgcaggccagtactccacaagttacgcccagcaaaagcgcaaagtcagcgataaggaaaagatcgatcagctgcaggaggagctgttacacacccagctgaagtaccagagaattctggagcggctggagaaggaaaacaaggagcttcgaaagctggtcctccaaaaggacgacaaaggaattcaccaccggaaactgaaaaagtctttgatcgacatgtactcagaagtcctggacgttctttctgattatgatgcatcctacaacacacaggaccacctgccacgggtggttgtagttggagaccagtcagccgggaagacctctgtactggagatgatcgctcaagcgcgcatctttcctaggggcagtggagagatgatgacgcggtccccagtgaaggtaacccttagcgagggaccacaccatgtggccctcttcaaagacagctccagggagttcgatctcactaaagaggaggacctggctgccttaaggcacgaaattgagctgcgaatgagaaagaacgtaaaggaaggttgtactgtcagccccgagaccatctcattgaacgtgaaaggacctggattacagagaatggtgctggtggatctccccggagtcattaatacggtaacctctggaatggccccagataccaaggaaaccattttcagcatctctaaggcctatatgcagaacccaaatgccattattctctgtattcaggacggtagcgtagatgcagagcgtagcatcgtgaccgacctcgtctctcagatggacccccacggaaggcggaccattttcgtgctgacgaaggtagatctggccgagaagaatgtagctagtccgagccggatacagcaaatcattgagggtaagttgttccccatgaaggctctggggtattttgcagtggttactggtaaagggaattccagcgagtccattgaggctatccgcgagtatgaagaagagtttttccagaacagtaagctgctcaagacgtccatgctaaaggcccaccaggtgactacacggaacttaagcctggctgtgtccgactgcttctggaaaatggtgcgggaatccgtagaacagcaggctgacagttttaaagcgacacggttcaacctggaaactgagtggaagaacaattatccccgactgcgtgagctcgatcggaacgagctgttcgaaaaggctaagaacgagatacttgatgaggtcattagtctgagccaggtcacccctaagcactgggaggagatcctacagcaatctctgtgggaaagagtatcaacacacgtgattgaaaacatttacctgcctgcggcacagaccatgaattctggaaccttcaacaccacagtggacatcaagttgaaacagtggacagataaacaacttcctaacaaggccgtggaggtagcttgggagacattacaagaagaatttagccggttcatgaccgagccaaagggcaaagaacacgacgacatttttgataagctgaaagaggccgtcaaagaggagagcatcaagagacacaagtggaacgactttgcggaagactcccttcgagtgatccagcacaacgctttagaagatagatccatcagcgataaacagcaatgggatgccgccatctactttatggaggaggccttgcaggcacgcctcaaagacaccgagaacgcaattgaaaatatggtgggcccagattggaaaaaacggtggctatattggaaaaatagaacccaagagcaatgtgtccataatgaaacaaagaacgagttagaaaaaatgttgaagtgcaatgaggaacaccccgcatatctggcctccgacgaaatcacgactgtccgcaagaatctcgagagtcggggcgtggaggttgacccctctctgattaaggacacctggcaccaggtgtatagacgtcatttcttgaaaacggctttaaaccactgcaatttatgtcgcaggggtttctactattatcaacgccactttgtggactctgaacttgagtgtaacgacgtcgttctgttttggcggatccagcgaatgttggcaatcactgccaacacgctgcggcagcagctgactaacactgaggtgagaaggctggagaagaacgttaaagaggttctggaggactttgccgaggacggagagaagaagatcaaactgctaacagggaaacgcgtccagctggctgaggacctgaagaaggtgcgcgaaatccaggaaaagctcgatgcctttattgaggcgcttcaccaggaaaaatag

SEQ ID NO: 234335 - DNA, 6439 bp, Artificial Sequence
  derived and/or modified sequence
gtgctgcccgcctagaaagggtgaagtggttgtttccgtgacggactgagtacgggtgcctgtcaggctcttgcggaagtccatgcgccattgggagggcctcggccgcggctctgtgcccttgctgctgagggccacttcctgggtcattcctggaccgggagccgggctggggctcacacgggggctcccgcgtggccgtctcggcgcctgcgtgacctccccgccggcgggatgtggcgactacgtcgggccgctgtggcctgtgaggtctgccagtctttagtgaaacacagctctggaataaaaggaagtttaccactacaaaaactacatctggtttcacgaagcatttatcattcacatcatcctaccttaaagcttcaacgaccccaattaaggacatcctttcagcagttctcttctctgacaaaccttcctttacgtaaactgaaattctctccaattaaatatggctaccagcctcgcaggaatttttggccagcaagattagctacgagactcttaaaacttcgctatctcatactaggatcggctgttgggggtggctacacagccaaaaagacttttgatcagtggaaagatatgataccggaccttagtgaatataaatggattgtgcctgacattgtgtgggaaattgatgagtatatcgattttgagaaaattagaaaagcccttcctagttcagaagaccttgtaaagttagcaccagactttgacaagattgttgaaagccttagcttattgaaggacttttttacctcaggttctccggaagaaacggcgtttagagcaacagatcgtggatctgaaagtgacaagcattttagaaagggtctgcttggtgagctcattctcttacaacaacaaattcaagagcatgaagaggaagcgcgcagagccgctggccaatatagcacgagctatgcccaacagaagcgcaaggtgtcagacaaagagaaaattgaccaacttcaggaagaacttctgcacactcagttgaagtatcagagaatcttggaacgattagaaaaggagaacaaagaattgagaaaattagtattgcagaaagatgacaaaggcattcatcatagaaagcttaagaaatctttgattgacatgtattctgaagttcttgatgttctctctgattatgatgccagttataatacgcaagatcatctgccacgggttgttgtggttggagatcagagtgctggaaagactagtgtgttggaaatgattgcccaagctcgaatattcccaagaggatctggggagatgatgacacgttctccagttaaggtgactctgagtgaaggtcctcaccatgtggccctatttaaagatagttctcgggagtttgatcttaccaaagaagaagatcttgcagcattaagacatgaaatagaacttcgaatgaggaaaaatgtgaaagaaggctgtaccgttagccctgagaccatatccttaaatgtaaaaggccctggactacagaggatggtgcttgttgacttaccaggtgtgattaatactgtgacatcaggcatggctcctgacacaaaggaaactattttcagtatcagcaaagcttacatgcagaatcctaatgccatcatactgtgtattcaagatggatctgtggatgctgaacgcagtattgttacagacttggtcagtcaaatggaccctcatggaaggagaaccatattcgttttgaccaaagtagacctggcagagaaaaatgtagccagtccaagcaggattcagcagataattgaaggaaagctcttcccaatgaaagctttaggttattttgctgttgtaacaggaaaagggaacagctctgaaagcattgaagctataagagaatatgaagaagagttttttcagaattcaaagctcctaaagacaagcatgctaaaggcacaccaagtgactacaagaaatttaagccttgcagtatcagactgcttttggaaaatggtacgagagtctgttgaacaacaggctgatagtttcaaagcaacacgttttaaccttgaaactgaatggaagaataactatcctcgcctgcgggaacttgaccggaatgaactatttgaaaaagctaaaaatgaaatccttgatgaagttatcagtctgagccaggttacaccaaaacattgggaggaaatccttcaacaatctttgtgggaaagagtatcaactcatgtgattgaaaacatctaccttccagctgcgcagaccatgaattcaggaacttttaacaccacagtggatatcaagcttaaacagtggactgataaacaacttcctaataaagcagtagaggttgcttgggagaccctacaagaagaattttcccgctttatgacagaaccgaaagggaaagagcatgatgacatatttgataaacttaaagaggctgttaaggaagaaagtattaaacgacacaagtggaatgactttgcggaggacagcttgagggttattcaacacaatgctttggaagaccgatccatatctgataaacagcaatgggatgcagctatttattttatggaagaggctctgcaggctcgtctcaaggatactgaaaatgcaattgaaaacatggtgggtccagactggaaaaagaggtggttatactggaagaatcggacccaagaacagtgtgttcacaatgaaaccaagaatgaattggagaagatgttgaaatgtaatgaggagcacccagcttatcttgcaagtgatgaaataaccacagtccggaagaaccttgaatcccgaggagtagaagtagatccaagcttgattaaggatacttggcatcaagtttatagaagacattttttaaaaacagctctaaaccattgtaacctttgtcgaagaggtttttattactaccaaaggcattttgtagattctgagttggaatgcaatgatgtggtcttgttttggcgtatacagcgcatgcttgctatcaccgcaaatactttaaggcaacaacttacaaatactgaagttaggcgattagagaaaaatgttaaagaggtattggaagattttgctgaagatggtgagaagaagattaaattgcttactggtaaacgcgttcaactggcggaagacctcaagaaagttagagaaattcaagaaaaacttgatgctttcattgaagctcttcatcaggagaaataaattaaaatcgtactcataatcagctctgcatacatctgaagaacaaaaacatcaacgtcttttgtccagcctctttttcttctgctgttccacctttctaaacatacaataaagtcatgggataaaaataatcgatgtatgttacgggcgctttaaccatcagctgcctctcgaatggaagaacagtggtaatggattaacatcctattttgttgtactaaagtgacaaatcggaataatataattggtatggccattaggttcagtccttgaagataagaaacttgttctctgtttgttgtcttatttgtggtggcactcgtttaatggattaactgaggttgctcaatgttcagtttcttttccagaaatacaatgctaggtgttttgaaataaaacttatatagcaattgtttaaagttatcaattgtatataaaatcacagtagcctgctaaatcattgtatgtgtctgtagtattctattcccagaaactatttgaccatgataattcagtttatattcaccacatgaaagaaaaatgggtaacagaagaacccttaaaacaggttaatttggattgtaacgttcagtgaaagaaatttcaacccttcatagccagcgaagaaatttgccttggaagccaagtcagtaccagcttacctatttgattcagttgctgttttctcactctctatatccatttgaaattgatttattttagatgttgtatacttacgttaggctttctgttaatagtggtttttctcctgttgacagagccaccggattatgacacaggatgaggaagattaaggataatcaattgactaatttcatttagaatattatcaaacatttcaactaggtatcagaaaaaggctttctttcataagactattttaaatagaaattatttcaacaattaaagtaatgttgaccatccccctctcagctgaataaagaaaaatttagttcaatttattgcaatttaattacaatactaccttcacaacattttcatgtgttttaaataaatattttttaattggctaaaggacattcaagcaaagaaatgctttctttacttaaaatgtctatctcatttgctgccttttcactaagcctttactttgttaataaaagtgtccattgtgtgatgtttttgattttacagtttgctaaatcttattttcttggagttgctttttggtaacagccccattgctactccccattttattgttttacatcaatgcatgcttcgttgtgatccctcaagatgtaacacttggtatgctcggttgaggatatgaaaaaatacttccgaaaccaggaattcaatgtatgtttgttttatactgtttgataagaaaagtaggtccagccttaagcagcacagatgcgctggtagatgcatagtcaggaactttttttatttcttttaggtctagggacaggagtgaatagaaagggaggagagctctattatgttctatacacagattaggagatgaccttactgggtacacccctctaaccagtgcttacaggttaatgcatgttaatgaatatttttgcagttgtaaagcataacaattacaactacacatctatttctaaagaataaaacaggaccatatttatttacttctgtcaactatagaaagaaagaccttcagctgtatttccacagatttctcccaaggaaaaggctaatattagtcactactgttatcacatccctttgtataagttttaaaaagagatggagggagatcttcatttctttgaggagatcagtattgtaacgtatgtgaatagatgataacaattaatattactaaaagtcccacatgagagtcctgacgccctctccatgccccacagtaatgtggcttctttcatgggtttttttttcttctttttagctgatctcatcctaagcatgctttatttttccttgaaagctaggtatttatcaactgcagatgttattgaaagaaaataaaattcagtctcaagagtaaaccctgtgtcttgtgtctgtagttcaaaagtcagaaatgattctaatttaaacaaaaagatactaaatatacagaagttaaattcgaactagccacagaatcatttgtttttatgtcagaatttgcaaagagtggagtggacaaagctctgtatggaagactgaacaactgtaaatagatgatatccaaacttaatttggctaggacttcaattttaaaaatcagtgtacctaggcagtgcacagcacgaaataagtggcccttgcagcttccccgtttaacccactgtgctatagttgcgggtggaacagtcaacctttctagtagtttatgatattgccctctttgtattcccattttctacagttttttccgcagacttctttctgcaaattattcagcctccaaatgcaaatgaatgatataaaaataagtagggaacatggcagagagtggtgcttcccagcctcacaatgtgggaatttgacataggatgagagtcagagtataggtttaaaagataaaatctttagttaataattttgtatttatttattctagatgtatgtatctgaggaaagaaatctggtatttttgctttccaataaaggggatcaaagtaatggtttttctctcagttctctaagctggtctatgttatagctctagcagtatggaaatgtgctttaaaatatgcttaccttttgaatgatcatggctatatgttgttgagatatttgaaacttaccttgttttcacttgtgcactgtgaatgaactttgtattatttttttaaaaccttcacattacgtgtagatattattgcaacttatattttgcctgagcttgatcaaaggtcatttgtgtagatgagtaattaaaaaatatttaaatcacattataattctattattggagagcatcttttaaatttttttctgttttaacgagggaaagagaaacctgtatacctagggtcattatttgaccccatagtataaccagattcatggtctaacaagctctcagtgtggcttttctctgaatgcttgaatttcacatgccttgcatttcacagttgtactccatggtcaaccggtgctttttttcacatcgtggtacttgtcaaaacattttgttattttccttggtaaaatatataaaaaaggttttctaatttca

SEQ ID NO: 234336 - DNA, 2994 bp, Artificial Sequence
  derived and/or modified sequence
atgtggaggctgcgacgcgcagctgtcgcatgtgaagtctgtcagtctctggtgaagcacagttctggaattaaagggagcttacccctccagaagctacacctcgtaagtagatcaatttaccatagtcaccatccaaccctgaaacttcagcggcctcagctgagaacctcatttcagcagttcagttcattgacaaacttgccactacgcaaattgaagttcagcccaattaaatacggctaccagcctcggaggaatttctggcctgccagactggccactcggcttcttaagttacgctatctaatcttaggaagcgccgttggagggggttataccgcaaaaaagaccttcgaccagtggaaagatatgattccggatcttagcgaatataagtggatcgtccctgacatcgtgtgggagatcgacgaatacattgactttgaaaagatcagaaaggcactaccgagcagtgaagacttggtgaagctggcgcctgactttgataagatcgtggagtctctgagtcttctgaaggacttcttcacaagtgggtctccagaggaaaccgcctttagagctacagatcggggaagcgagagcgacaagcacttcagaaaaggactcttgggcgagcttattctactgcagcagcagatccaggagcatgaggaggaggctagaagagccgcaggtcagtattcaacaagctatgcccagcagaagagaaaggtctctgataaagaaaaaatcgatcagctgcaagaggagctcttgcatacgcagctaaaatatcagagaatcctagaacggcttgagaaagagaataaggagctccgcaaattggtgctgcagaaggacgacaaaggtatacaccaccggaagctaaagaaatcccttattgatatgtatagtgaggttctggacgtcctcagtgattacgacgcttcttataacacccaggaccacttgcctcgtgtggtggtggtgggagaccaaagcgccggaaaaacttctgtgctggaaatgattgcacaggcacgtatttttcctaggggaagcggcgaaatgatgactaggagcccggtgaaggtaaccctgagcgaggggccacaccatgttgcactcttcaaagatagctctagagaattcgatttgactaaagaagaagacctcgcagcactaagacacgaaatagaacttaggatgagaaagaacgtgaaagaagggtgtaccgtcagccccgagactatttctctaaacgttaaaggtcctggcttgcaacgtatggtgctagtggatctgcccggagtgattaacaccgtgactagcggcatggcccctgacaccaaggaaaccattttcagcattagcaaagcatatatgcagaatcccaacgcgatcattctgtgtattcaagatggaagcgtcgacgctgagcgaagcatcgtgaccgatctggtgtcgcagatggaccctcacgggcgtagaactatatttgtacttacaaaggttgacctcgccgagaaaaatgtcgcaagccctagtcgcatccaacagatcatcgaaggaaaactgtttcccatgaaagccctcggctattttgctgtggtgactgggaaaggtaacagctcagagagcattgaagcgatccgagagtacgaggaagagttttttcaaaacagcaaacttctcaagacttccatgcttaaggcccatcaagtcaccacacgcaatctttccttggctgtgagcgactgcttctggaaaatggtacgagaatccgtggagcagcaagctgacagtttcaaggctaccaggttcaatctcgagacggagtggaaaaacaattatcctcgattacgggagcttgacaggaacgagctcttcgaaaaagcaaaaaacgagatcctggacgaggttattagtctgtcgcaggtgaccccaaagcactgggaagagatactccagcagagtctgtgggagagggtcagtacccatgtgatcgagaatatatacttgcccgcagcccaaacgatgaactcagggacctttaacaccaccgttgacatcaaactcaagcaatggaccgacaaacagctgcctaacaaggcggtggaggtcgcgtgggagaccttgcaggaagagttctcccggttcatgacggagccaaaaggcaaggagcacgacgatatcttcgataagctgaaggaagcagtcaaagaggagtccatcaagagacacaaatggaacgattttgccgaggatagcctgcgcgtgatccaacataacgccctcgaagatcgatccatcagtgataagcaacagtgggatgctgcaatttatttcatggaagaagctttgcaggctagacttaaggacactgaaaatgccattgaaaacatggttggccctgattggaagaagcgatggttgtattggaaaaataggactcaggaacagtgtgtacataacgagaccaaaaatgagctggagaaaatgttaaagtgtaatgaggaacacccagcatatcttgcctccgatgagatcaccacagtgagaaagaacttagagtcacggggagttgaagtcgacccctcactgattaaagatacctggcaccaagtctaccgcagacactttcttaaaaccgctcttaaccactgtaacctctgcagacgcggattttactattaccagcgtcattttgtcgactccgaactggagtgtaatgacgttgtgctattttggcggattcagcgcatgctggctatcaccgcaaacacactcagacagcaactcaccaatacagaggttaggagactggagaaaaacgtgaaagaagtattggaggacttcgctgaagatggggagaagaagatcaagctgttgactgggaaaagggttcagctagctgaggacctcaaaaaggtgagagagattcaggaaaaattagacgcttttattgaagccctacaccaggagaaatag

SEQ ID NO: 234337 - DNA, 2994 bp, Artificial Sequence
  derived and/or modified sequence
atgtggagactgagaagagccgccgtggcctgcgaggtgtgccagagcctggtgaagcacagcagcggcatcaagggcagcctgcccctgcagaagctgcacctggtgagcagaagcatctaccacagccaccaccccaccctgaagctgcagagaccccagctgagaaccagcttccagcagttcagcagcctgaccaacctgcccctgagaaagctgaagttcagccccatcaagtacggctaccagcccagaagaaacttctggcccgccagactggccaccagactgctgaagctgagatacctgatcctgggcagcgccgtgggcggcggctacaccgccaagaagaccttcgaccagtggaaggacatgatccccgacctgagcgagtacaagtggatcgtgcccgacatcgtgtgggagatcgacgagtacatcgacttcgagaagatcagaaaggccctgcccagcagcgaggacctggtgaagctggcccccgacttcgacaagatcgtggagagcctgagcctgctgaaggacttcttcaccagcggcagccccgaggagaccgccttcagagccaccgacagaggcagcgagagcgacaagcacttcagaaagggcctgctgggcgagctgatcctgctgcagcagcagatccaggagcacgaggaggaggccagaagagccgccggccagtacagcaccagctacgcccagcagaagagaaaggtgagcgacaaggagaagatcgaccagctgcaggaggagctgctgcacacccagctgaagtaccagagaatcctggagagactggagaaggagaacaaggagctgagaaagctggtgctgcagaaggacgacaagggcatccaccacagaaagctgaagaagagcctgatcgacatgtacagcgaggtgctggacgtgctgagcgactacgacgccagctacaacacccaggaccacctgcccagagtggtggtggtgggcgaccagagcgccggcaagaccagcgtgctggagatgatcgcccaggccagaatcttccccagaggcagcggcgagatgatgaccagaagccccgtgaaggtgaccctgagcgagggcccccaccacgtggccctgttcaaggacagcagcagagagttcgacctgaccaaggaggaggacctggccgccctgagacacgagatcgagctgagaatgagaaagaacgtgaaggagggctgcaccgtgagccccgagaccatcagcctgaacgtgaagggccccggcctgcagagaatggtgctggtggacctgcccggcgtgatcaacaccgtgaccagcggcatggcccccgacaccaaggagaccatcttcagcatcagcaaggcctacatgcagaaccccaacgccatcatcctgtgcatccaggacggcagcgtggacgccgagagaagcatcgtgaccgacctggtgagccagatggacccccacggcagaagaaccatcttcgtgctgaccaaggtggacctggccgagaagaacgtggccagccccagcagaatccagcagatcatcgagggcaagctgttccccatgaaggccctgggctacttcgccgtggtgaccggcaagggcaacagcagcgagagcatcgaggccatcagagagtacgaggaggagttcttccagaacagcaagctgctgaagaccagcatgctgaaggcccaccaggtgaccaccagaaacctgagcctggccgtgagcgactgcttctggaagatggtgagagagagcgtggagcagcaggccgacagcttcaaggccaccagattcaacctggagaccgagtggaagaacaactaccccagactgagagagctggacagaaacgagctgttcgagaaggccaagaacgagatcctggacgaggtgatcagcctgagccaggtgacccccaagcactgggaggagatcctgcagcagagcctgtgggagagagtgagcacccacgtgatcgagaacatctacctgcccgccgcccagaccatgaacagcggcaccttcaacaccaccgtggacatcaagctgaagcagtggaccgacaagcagctgcccaacaaggccgtggaggtggcctgggagaccctgcaggaggagttcagcagattcatgaccgagcccaagggcaaggagcacgacgacatcttcgacaagctgaaggaggccgtgaaggaggagagcatcaagagacacaagtggaacgacttcgccgaggacagcctgagagtgatccagcacaacgccctggaggacagaagcatcagcgacaagcagcagtgggacgccgccatctacttcatggaggaggccctgcaggccagactgaaggacaccgagaacgccatcgagaacatggtgggccccgactggaagaagagatggctgtactggaagaacagaacccaggagcagtgcgtgcacaacgagaccaagaacgagctggagaagatgctgaagtgcaacgaggagcaccccgcctacctggccagcgacgagatcaccaccgtgagaaagaacctggagagcagaggcgtggaggtggaccccagcctgatcaaggacacctggcaccaggtgtacagaagacacttcctgaagaccgccctgaaccactgcaacctgtgcagaagaggcttctactactaccagagacacttcgtggacagcgagctggagtgcaacgacgtggtgctgttctggagaatccagagaatgctggccatcaccgccaacaccctgagacagcagctgaccaacaccgaggtgagaagactggagaagaacgtgaaggaggtgctggaggacttcgccgaggacggcgagaagaagatcaagctgctgaccggcaagagagtgcagctggccgaggacctgaagaaggtgagagagatccaggagaagctggacgccttcatcgaggccctgcaccaggagaagtag

SEQ ID NO: 234338 - protein, 1015 aa, Artificial Sequence
  derived and/or modified sequence
MWRLRRAAVACEVCQSLVKHSSGIKGSLPLQKLHLVSRSIYHSHHPTLKLQRPQLRTSFQQFSSLTNLPLRKLKFSPIKYGYQPRRNFWPARLATRLLKLRYLILGSAVGGGYTAKKTFDQWKDMIPDLSEYKWIVPDIVWEIDEYIDFEKIRKALPSSEDLVKLAPDFDKIVESLSLLKDFFTSGHKLVSEVIGASDLLLLLGSPEETAFRATDRGSESDKHFRKGLLGELILLQQQIQEHEEEARRAAGQYSTSYAQQKRKVSDKEKIDQLQEELLHTQLKYQRILERLEKENKELRKLVLQKDDKGIHHRKLKKSLIDMYSEVLDVLSDYDASYNTQDHLPRVVVVGDQSAGKTSVLEMIAQARIFPRGSGEMMTRSPVKVTLSEGPHHVALFKDSSREFDLTKEEDLAALRHEIELRMRKNVKEGCTVSPETISLNVKGPGLQRMVLVDLPGVINTVTSGMAPDTKETIFSISKAYMQNPNAIILCIQDGSVDAERSIVTDLVSQMDPHGRRTIFVLTKVDLAEKNVASPSRIQQIIEGKLFPMKALGYFAVVTGKGNSSESIEAIREYEEEFFQNSKLLKTSMLKAHQVTTRNLSLAVSDCFWKMVRESVEQQADSFKATRFNLETEWKNNYPRLRELDRNELFEKAKNEILDEVISLSQVTPKHWEEILQQSLWERVSTHVIENIYLPAAQTMNSGTFNTTVDIKLKQWTDKQLPNKAVEVAWETLQEEFSRFMTEPKGKEHDDIFDKLKEAVKEESIKRHKWNDFAEDSLRVIQHNALEDRSISDKQQWDAAIYFMEEALQARLKDTENAIENMVGPDWKKRWLYWKNRTQEQCVHNETKNELEKMLKCNEEHPAYLASDEITTVRKNLESRGVEVDPSLIKDTWHQVYRRHFLKTALNHCNLCRRGFYYYQRHFVDSELECNDVVLFWRIQRMLAITANTLRQQLTNTEVRRLEKNVKEVLEDFAEDGEKKIKLLTGKRVQLAEDLKKVREIQEKLDAFIEALHQEK

SEQ ID NO: 234339 - DNA, 3048 bp, Artificial Sequence
  derived and/or modified sequence
atgtggcggctgaggcgcgcagcagtggcctgtgaagtgtgtcagtctctagtgaagcattcttcggggattaagggttcattaccactgcaaaaactgcatctggtcagccggtccatatatcactcacatcatcctactttgaagctgcagcgcccccaactgagaacctcatttcaacagttctcttccctcacaaacctgcccctgcgtaaacttaaattcagtccaattaaatacgggtatcagccacgacgtaatttctggcccgcccgcttggctactcgtttgctgaaactgcggtaccttatccttggctcagctgtcgggggcgggtacacggccaagaagaccttcgaccagtggaaagacatgatcccggacctgagcgagtacaaatggatcgtgccggacatcgtgtgggagatcgacgagtatatcgactttgagaagattaggaaggctctaccctccagcgaggacctggtcaagctcgcacctgacttcgacaagatcgtcgagtccctttcactgctcaaggatttcttcacaagcggtcataaattggtgagcgaagtcattggagcatctgatctcctgctcctcctgggatcccccgaggagacagcctttagagctaccgaccgcgggagtgaatctgataaacactttcgaaaaggcctactcggcgagttgatcttgctacagcagcagatacaagaacatgaggaggaagcccggcgcgctgctggacagtatagcaccagctacgcacagcagaaacgtaaagtgagcgacaaagagaaaatcgatcagttacaagaagagctgctgcatacccagctgaagtatcagcgcatcctggaaaggttagaaaaagagaataaggaactgaggaaactggtactccagaaagatgacaaaggcattcaccatcgcaaactcaagaagtccctcatagatatgtattctgaggtcctggatgtcctgagcgactatgatgcctcttataacacccaggaccaccttccgcgcgttgtcgtggtgggagatcagtccgcaggcaaaactagcgttctcgagatgattgcacaggcacggatattcccccgcggcagcggcgaaatgatgacaagatcccccgtgaaggtaactctgtccgaaggtccccaccacgtcgcgctgtttaaagattcttctcgggaattcgacttgaccaaggaggaagatctcgctgccctccggcacgaaatcgaactcagaatgaggaagaacgtaaaggagggctgtactgtgtcaccagaaaccatttcgctgaacgtgaaaggccccgggctacagcggatggttttggtagacctccccggggttataaacaccgtgaccagcggaatggcaccagacactaaagagacaattttctccatctccaaagcctatatgcagaatccaaatgctataattctgtgtattcaagatgggagcgttgacgccgagcgttccatcgtgacagacttggtgagccaaatggacccccatggaagacgcacaatctttgtgctcacaaaggtagacctggctgaaaaaaacgtggccagtcctagcaggatccagcagattatcgagggtaagctctttcctatgaaagctttagggtactttgctgtggtgaccggcaagggaaacagttctgagtcgattgaagccatccgagagtacgaagaggaatttttccagaattcaaaactcctaaaaactagtatgctgaaggcccaccaggtgaccacccggaatctgtcactcgcagttagcgattgtttctggaaaatggtgcgtgagagtgtagagcaacaagctgactcgttcaaagccactcgttttaatcttgagactgagtggaagaacaattaccccagattgagggagcttgataggaacgagttatttgagaaggccaaaaacgagatcctggacgaggtgattagcttgagccaggtcactccaaagcattgggaggaaatcctgcagcagtccctgtgggagcgcgtgtcaacacacgttatagagaatatttacctaccagccgcccagaccatgaattccgggacattcaataccaccgtggatattaaactcaagcaatggacagataagcagctgcccaataaggccgttgaggtcgcctgggagactctacaagaggagttctcgagatttatgaccgaacctaaaggcaaggaacatgacgatatttttgataagctgaaggaggctgtgaaagaggaatccattaagcgccataaatggaatgatttcgccgaggactctctgcgtgtcattcagcacaacgcactcgaagacaggtcaataagtgacaagcagcaatgggacgcagctatatactttatggaggaggccttacaagctcggctgaaggacacagaaaatgctatagaaaatatggtcggcccagattggaagaagaggtggctctattggaagaaccgaacccaagaacaatgtgtgcataacgagactaaaaatgaattggaaaagatgctaaagtgtaatgaggaacaccctgcctacctcgcaagcgacgagatcacgactgttcgaaagaatctagagtctcgaggtgtggaggtcgaccctagcctcataaaggacacttggcatcaggtgtatagaagacatttcttaaagaccgctctgaatcattgtaatctgtgtcgcaggggtttttattactaccagcgacattttgtggactctgagttggagtgcaacgatgttgttctgttctggcggatccagcgtatgctagcaataactgccaataccctgcgccagcagttaacaaataccgaggtaagaaggctggaaaagaatgtcaaggaggtcctggaggatttcgctgaagacggggagaaaaaaatcaagctgctgacaggtaaacgggtacaactggcagaggatctcaagaaggtcagggagattcaggaaaaattggatgcctttatcgaagctctacaccaggagaaatag

SEQ ID NO: 234340 - DNA, 3048 bp, Artificial Sequence
  derived and/or modified sequence
atgtggaggctgcggcgggctgctgtggcctgtgaggtgtgccagagcctggtgaagcacagcagcggcatcaagggcagcctgcccctgcagaagctgcacctggtgagccgcagcatctaccacagccaccaccccaccctgaagctgcagaggccccagctgcggaccagcttccagcagttcagcagcctgaccaacctgcccctgaggaagctgaagttcagccccatcaagtatggctaccagcccaggaggaacttctggccagcccggctggccacccggctgctgaagctgcgctacctgatcctgggcagcgctgtgggcggcggctacacagccaagaagacctttgaccagtggaaggacatgatcccagacctgtctgagtacaagtggatcgtgcctgacatcgtgtgggagattgatgagtacatcgactttgagaagatcaggaaggccctgcccagcagcgaggacctggtgaagctggccccagactttgacaagatcgtggagagcctgagcctgctgaaggacttcttcaccagcggccacaagctggtgtctgaggtgattggagccagtgacctgctgctgctgctgggcagccctgaggagacagccttccgggccacagaccggggcagcgagagtgacaagcacttcaggaagggcctgctgggggagctgatcctgctgcagcagcagatccaggagcacgaggaggaggccaggagagctgctggccagtacagcaccagctatgcccagcagaagaggaaggtgtctgacaaggagaagattgaccagctgcaggaggagctgctgcacacccagctgaagtaccagaggatcctggagcggctggagaaggagaacaaggagctgaggaagctggtgctgcagaaggatgacaagggcatccaccacaggaagctgaagaagagcctgattgacatgtacagcgaggtgctggatgtgctgagtgactatgatgccagctacaacacccaggaccacctgccccgggtggtggtggtgggggaccagagcgctgggaagacctctgtgctggagatgattgcccaggcccgcatcttcccccggggcagcggggagatgatgaccaggagccctgtgaaggtgaccctgtctgagggcccccaccacgtggccctcttcaaggacagcagccgggagtttgacctgaccaaggaggaggacctggccgccctgcggcatgaaattgagctgaggatgaggaagaatgtgaaggagggctgcaccgtgtccccagagaccatcagcctgaatgtgaagggccctggcctgcagaggatggtgctggtggacctgcccggggtcatcaacacagtgaccagcggcatggccccagacaccaaggagaccatcttcagcatcagcaaggcctacatgcagaaccccaatgccatcatcctgtgcatccaggacggctctgtggatgctgagaggagcatcgtgacagacctggtgtcccagatggacccccatggaagaaggaccatctttgtgctgaccaaggtggacctggccgagaagaatgtggccagccccagccgcatccagcagatcatcgagggcaagctgttccccatgaaggccctgggctactttgctgtggtgacaggcaagggcaacagcagcgagagcattgaggccatccgggagtatgaggaggagttcttccagaacagcaagctgctgaagacctccatgctgaaggcccaccaggtgaccaccaggaacctgagcctggccgtgtctgactgcttctggaagatggtgcgggagagcgtggagcagcaggccgacagcttcaaggccacccgcttcaacctggagacagagtggaagaacaactacccccggctgcgggagctggacagaaatgagctgtttgagaaggccaagaatgagatcctggatgaggtgatcagcctgagccaggtgacccccaagcactgggaggagatcctgcagcagagcctgtgggagcgggtgtccacccacgtgattgagaacatctacctgcctgctgcccagaccatgaacagcggcaccttcaacaccaccgtggacatcaagctgaagcagtggacagacaagcagctgcccaacaaggctgtggaggtggcctgggagaccctgcaggaggagttcagccgcttcatgacagagcccaagggcaaggagcatgatgacatctttgacaagctgaaggaggccgtgaaggaggagagcatcaagaggcacaagtggaatgactttgctgaggacagcctgcgggtcatccagcacaatgccctggaggacaggagcatcagtgacaagcagcagtgggatgctgccatctacttcatggaggaggccctgcaggcccggctgaaggacacagaaaatgccatcgagaacatggtgggccctgactggaagaagcgctggctgtactggaagaacagaacccaggagcagtgtgtgcacaatgagaccaagaatgagctggagaagatgctgaagtgcaatgaggagcacccagcctacctggccagtgatgagatcaccaccgtgaggaagaacctggagagccggggcgtggaggtggaccccagcctcatcaaggacacctggcaccaggtgtacagaagacacttcctgaagacagccctgaaccactgcaacctgtgccggcggggcttctactactaccagaggcactttgtggacagcgagctggagtgcaatgatgtggtgctcttctggaggatccagaggatgctggccatcacagccaacaccctgcggcagcagctgaccaacacagaggtgcggcggctggagaagaatgtgaaggaggtgctggaggactttgctgaagatggagagaagaagatcaagctgctgaccgggaagagggtgcagctggccgaggacctgaagaaggtgcgggagatccaggagaagctggatgccttcatcgaggccctgcaccaggagaagtag

SEQ ID NO: 234341 - DNA, 3048 bp, Artificial Sequence
  derived and/or modified sequence
atgtggcggctgcggcgggccgccgtggcctgcgaggtgtgccagagcttggtgaagcactcctctggcataaagggtagcctcccactgcagaagctgcaccttgtgagtaggtctatctatcacagtcaccaccctacactcaagctgcagagaccacagctgaggacctcttttcagcagttcagtagcctgacgaacctgcccctccgtaagctgaaattctccccaattaaatatggttaccaacctaggaggaacttctggccggccagacttgcaacaagactgttgaagctgcggtatctgatcctgggctccgccgtcgggggcggctacaccgccaaaaaaaccttcgatcagtggaaggatatgatccctgatttgagcgaatataagtggatcgtgcccgacatcgtgtgggagatcgacgagtacatagatttcgagaagatccgcaaggctctgccatcaagcgaggaccttgttaagctggcccctgattttgacaagattgtggagtccttgtccctccttaaagatttttttacctccggtcataaattggtgtccgaagtcatcggagcctccgatctcctcttgctgctgggttctcctgaagagacagcatttcgggccactgatagagggtccgagagcgacaaacactttaggaagggactgttaggggagctcatcttgctgcagcagcaaattcaggaacacgaggaagaagccagaagggcggccggtcagtactcgactagttatgcccaacaaaaaagaaaagtttccgacaaggagaagattgatcagctgcaggaagagctcctgcatactcagctgaaataccaaagaatcctcgaacgtctggagaaggagaacaaggaactgcgtaagctagtccttcaaaaggacgacaagggtattcaccaccgcaagcttaaaaaaagcttgatcgatatgtacagtgaggtcctcgacgttctgtccgactacgacgcctcctataacacacaggatcatctgccgcgtgttgtggttgtcggcgatcagtcagctggaaagactagtgtgctggagatgatcgctcaggctcgcatctttcctaggggaagcggagagatgatgacaaggagtcctgtaaaggtgactctgtcagagggccctcaccacgtcgcactgttcaaggactcctcaagagagtttgatctgactaaagaagaagacctggcggcactacggcatgagatagagttacgaatgaggaagaacgtgaaggagggctgtaccgtgtctcctgagacaatttctcttaacgtgaaggggcctggactgcaacgcatggtgcttgtagatctgcccggtgtgattaataccgtgacaagcggcatggcgccggatacaaaggagacaatcttttctatcagcaaagcttacatgcagaaccctaatgcaatcatactctgcatccaagacggatccgtcgatgctgaaaggagcatcgtgaccgatctggtatcacagatggacccacacggaagaaggacaatttttgtgttgactaaggtcgacctcgctgaaaagaacgtagctagcccttcacggatccagcagatcatcgagggcaaactgtttcccatgaaggctttaggctattttgccgtcgtaaccggtaaggggaactccagcgaaagcatcgaagcaataagggagtatgaggaggagttttttcagaactccaagttgctgaaaactagcatgctcaaggcccaccaggtcacaacacgaaatctgagcttagccgtgtctgactgtttttggaagatggttagggagtctgtggaacagcaggccgactctttcaaagcaactaggtttaacttggaaacagagtggaagaacaactacccacgtttaagggagttggatcgcaatgaactcttcgagaaggccaaaaatgaaattttggatgaggtgatatcactgagccaggtgacccccaagcactgggaggagattctgcagcaatcactgtgggagcgcgtgtctacacacgtgattgagaatatctacctgcccgccgctcaaactatgaatagtggaacctttaataccacagtagatattaaactgaagcaatggacagataaacagttgcctaacaaagccgtggaagtcgcttgggaaacactacaagaagagttctcacggttcatgacagaaccgaaaggcaaagagcatgacgacatatttgataaactcaaagaggccgtaaaagaggagtcgatcaaaaggcacaaatggaacgatttcgccgaggatagccttcgcgtgatacagcacaatgccctggaggatagatcaatctctgacaagcagcagtgggatgccgccatttatttcatggaggaagccctgcaggccagactgaaggatacggagaacgctatagagaatatggttggcccagactggaaaaaaagatggctctattggaaaaaccggactcaggagcaatgtgtccataacgaaaccaaaaacgagctcgaaaaaatgcttaagtgtaatgaagagcaccccgcatacttagcctcagacgagattaccactgtccgtaaaaacctggagagcagaggtgttgaggtggacccatcgctgatcaaagacacatggcaccaggtgtaccgacggcactttctgaagacggctcttaaccactgtaacttgtgccgacggggcttttactactaccagagacacttcgtcgactcggaactggagtgcaatgacgtcgtgctgttctggcgtattcagcggatgctggctatcactgctaatacactcaggcagcaactcacaaacacagaagtccggcgcctcgagaagaacgtcaaagaagtcttggaggacttcgctgaggatggggaaaagaaaatcaaactgctcaccgggaaaagagtgcagctggccgaagacctcaagaaagtgagagagatccaggagaaactcgatgcgtttatagaggccctccatcaggaaaagtag

SEQ ID NO: 234342 - DNA, 6492 bp, Artificial Sequence
  derived and/or modified sequence
gtgctgcccgcctagaaagggtgaagtggttgtttccgtgacggactgagtacgggtgcctgtcaggctcttgcggaagtccatgcgccattgggagggcctcggccgcggctctgtgcccttgctgctgagggccacttcctgggtcattcctggaccgggagccgggctggggctcacacgggggctcccgcgtggccgtctcggcgcctgcgtgacctccccgccggcgggatgtggcgactacgtcgggccgctgtggcctgtgaggtctgccagtctttagtgaaacacagctctggaataaaaggaagtttaccactacaaaaactacatctggtttcacgaagcatttatcattcacatcatcctaccttaaagcttcaacgaccccaattaaggacatcctttcagcagttctcttctctgacaaaccttcctttacgtaaactgaaattctctccaattaaatatggctaccagcctcgcaggaatttttggccagcaagattagctacgagactcttaaaacttcgctatctcatactaggatcggctgttgggggtggctacacagccaaaaagacttttgatcagtggaaagatatgataccggaccttagtgaatataaatggattgtgcctgacattgtgtgggaaattgatgagtatatcgattttgagaaaattagaaaagcccttcctagttcagaagaccttgtaaagttagcaccagactttgacaagattgttgaaagccttagcttattgaaggacttttttacctcaggtcacaaattggttagtgaagtcataggagcttctgacctacttctcttgttaggttctccggaagaaacggcgtttagagcaacagatcgtggatctgaaagtgacaagcattttagaaagggtctgcttggtgagctcattctcttacaacaacaaattcaagagcatgaagaggaagcgcgcagagccgctggccaatatagcacgagctatgcccaacagaagcgcaaggtgtcagacaaagagaaaattgaccaacttcaggaagaacttctgcacactcagttgaagtatcagagaatcttggaacgattagaaaaggagaacaaagaattgagaaaattagtattgcagaaagatgacaaaggcattcatcatagaaagcttaagaaatctttgattgacatgtattctgaagttcttgatgttctctctgattatgatgccagttataatacgcaagatcatctgccacgggttgttgtggttggagatcagagtgctggaaagactagtgtgttggaaatgattgcccaagctcgaatattcccaagaggatctggggagatgatgacacgttctccagttaaggtgactctgagtgaaggtcctcaccatgtggccctatttaaagatagttctcgggagtttgatcttaccaaagaagaagatcttgcagcattaagacatgaaatagaacttcgaatgaggaaaaatgtgaaagaaggctgtaccgttagccctgagaccatatccttaaatgtaaaaggccctggactacagaggatggtgcttgttgacttaccaggtgtgattaatactgtgacatcaggcatggctcctgacacaaaggaaactattttcagtatcagcaaagcttacatgcagaatcctaatgccatcatactgtgtattcaagatggatctgtggatgctgaacgcagtattgttacagacttggtcagtcaaatggaccctcatggaaggagaaccatattcgttttgaccaaagtagacctggcagagaaaaatgtagccagtccaagcaggattcagcagataattgaaggaaagctcttcccaatgaaagctttaggttattttgctgttgtaacaggaaaagggaacagctctgaaagcattgaagctataagagaatatgaagaagagttttttcagaattcaaagctcctaaagacaagcatgctaaaggcacaccaagtgactacaagaaatttaagccttgcagtatcagactgcttttggaaaatggtacgagagtctgttgaacaacaggctgatagtttcaaagcaacacgttttaaccttgaaactgaatggaagaataactatcctcgcctgcgggaacttgaccggaatgaactatttgaaaaagctaaaaatgaaatccttgatgaagttatcagtctgagccaggttacaccaaaacattgggaggaaatccttcaacaatctttgtgggaaagagtatcaactcatgtgattgaaaacatctaccttccagctgcgcagaccatgaattcaggaacttttaacaccacagtggatatcaagcttaaacagtggactgataaacaacttcctaataaagcagtagaggttgcttgggagaccctacaagaagaattttcccgctttatgacagaaccgaaagggaaagagcatgatgacatatttgataaacttaaagaggctgttaaggaagaaagtattaaacgacacaagtggaatgactttgcggaggacagcttgagggttattcaacacaatgctttggaagaccgatccatatctgataaacagcaatgggatgcagctatttattttatggaagaggctctgcaggctcgtctcaaggatactgaaaatgcaattgaaaacatggtgggtccagactggaaaaagaggtggttatactggaagaatcggacccaagaacagtgtgttcacaatgaaaccaagaatgaattggagaagatgttgaaatgtaatgaggagcacccagcttatcttgcaagtgatgaaataaccacagtccggaagaaccttgaatcccgaggagtagaagtagatccaagcttgattaaggatacttggcatcaagtttatagaagacattttttaaaaacagctctaaaccattgtaacctttgtcgaagaggtttttattactaccaaaggcattttgtagattctgagttggaatgcaatgatgtggtcttgttttggcgtatacagcgcatgcttgctatcaccgcaaatactttaaggcaacaacttacaaatactgaagttaggcgattagagaaaaatgttaaagaggtattggaagattttgctgaagatggtgagaagaagattaaattgcttactggtaaacgcgttcaactggcggaagacctcaagaaagttagagaaattcaagaaaaacttgatgctttcattgaagctcttcatcaggagaaataaattaaaatcgtactcataatcagctctgcatacatctgaagaacaaaaacatcaacgtcttttgtccagcctctttttcttctgctgttccacctttctaaacatacaataaagtcatgggataaaaataatcgatgtatgttacgggcgctttaaccatcagctgcctctcgaatggaagaacagtggtaatggattaacatcctattttgttgtactaaagtgacaaatcggaataatataattggtatggccattaggttcagtccttgaagataagaaacttgttctctgtttgttgtcttatttgtggtggcactcgtttaatggattaactgaggttgctcaatgttcagtttcttttccagaaatacaatgctaggtgttttgaaataaaacttatatagcaattgtttaaagttatcaattgtatataaaatcacagtagcctgctaaatcattgtatgtgtctgtagtattctattcccagaaactatttgaccatgataattcagtttatattcaccacatgaaagaaaaatgggtaacagaagaacccttaaaacaggttaatttggattgtaacgttcagtgaaagaaatttcaacccttcatagccagcgaagaaatttgccttggaagccaagtcagtaccagcttacctatttgattcagttgctgttttctcactctctatatccatttgaaattgatttattttagatgttgtatacttacgttaggctttctgttaatagtggtttttctcctgttgacagagccaccggattatgacacaggatgaggaagattaaggataatcaattgactaatttcatttagaatattatcaaacatttcaactaggtatcagaaaaaggctttctttcataagactattttaaatagaaattatttcaacaattaaagtaatgttgaccatccccctctcagctgaataaagaaaaatttagttcaatttattgcaatttaattacaatactaccttcacaacattttcatgtgttttaaataaatattttttaattggctaaaggacattcaagcaaagaaatgctttctttacttaaaatgtctatctcatttgctgccttttcactaagcctttactttgttaataaaagtgtccattgtgtgatgtttttgattttacagtttgctaaatcttattttcttggagttgctttttggtaacagccccattgctactccccattttattgttttacatcaatgcatgcttcgttgtgatccctcaagatgtaacacttggtatgctcggttgaggatatgaaaaaatacttccgaaaccaggaattcaatgtatgtttgttttatactgtttgataagaaaagtaggtccagccttaagcagcacagatgcgctggtagatgcatagtcaggaactttttttatttcttttaggtctagggacaggagtgaatagaaagggaggagagctctattatgttctatacacagattaggagatgaccttactgggtacacccctctaaccagtgcttacaggttaatgcatgttaatgaatatttttgcagttgtaaagcataacaattacaactacacatctatttctaaagaataaaacaggaccatatttatttacttctgtcaactatagaaagaaagaccttcagctgtatttccacagatttctcccaaggaaaaggctaatattagtcactactgttatcacatccctttgtataagttttaaaaagagatggagggagatcttcatttctttgaggagatcagtattgtaacgtatgtgaatagatgataacaattaatattactaaaagtcccacatgagagtcctgacgccctctccatgccccacagtaatgtggcttctttcatgggtttttttttcttctttttagctgatctcatcctaagcatgctttatttttccttgaaagctaggtatttatcaactgcagatgttattgaaagaaaataaaattcagtctcaagagtaaaccctgtgtcttgtgtctgtagttcaaaagtcagaaatgattctaatttaaacaaaaagatactaaatatacagaagttaaattcgaactagccacagaatcatttgtttttatgtcagaatttgcaaagagtggagtggacaaagctctgtatggaagactgaacaactgtaaatagatgatatccaaacttaatttggctaggacttcaattttaaaaatcagtgtacctaggcagtgcacagcacgaaataagtggcccttgcagcttccccgtttaacccactgtgctatagttgcgggtggaacagtcaacctttctagtagtttatgatattgccctctttgtattcccattttctacagttttttccgcagacttctttctgcaaattattcagcctccaaatgcaaatgaatgatataaaaataagtagggaacatggcagagagtggtgcttcccagcctcacaatgtgggaatttgacataggatgagagtcagagtataggtttaaaagataaaatctttagttaataattttgtatttatttattctagatgtatgtatctgaggaaagaaatctggtatttttgctttccaataaaggggatcaaagtaatggtttttctctcagttctctaagctggtctatgttatagctctagcagtatggaaatgtgctttaaaatatgcttaccttttgaatgatcatggctatatgttgttgagatatttgaaacttaccttgttttcacttgtgcactgtgaatgaactttgtattatttttttaaaaccttcacattacgtgtagatattattgcaacttatattttgcctgagcttgatcaaaggtcatttgtgtagatgagtaattaaaaaatatttaaatcacattataattctattattggagagcatcttttaaatttttttctgttttaacgagggaaagagaaacctgtatacctagggtcattatttgaccccatagtataaccagattcatggtctaacaagctctcagtgtggcttttctctgaatgcttgaatttcacatgccttgcatttcacagttgtactccatggtcaaccggtgctttttttcacatcgtggtacttgtcaaaacattttgttattttccttggtaaaatatataaaaaaggttttctaatttc

SEQ ID NO: 234343 - DNA, 3048 bp, Artificial Sequence
  derived and/or modified sequence
atgtggaggctgcgcagggccgcagtggcctgcgaagtgtgccagtcattagtcaaacacagctcgggaatcaaaggctcactgccacttcagaagttgcaccttgtgtctaggtctatctaccattcacatcacccgacactgaaattgcagagacctcagcttagaacctctttccagcagttctcttctttgacgaacttaccactgaggaagctgaagttctcacctatcaaatacggataccagccacggagaaacttctggcccgcacgtctggctacacggctcttgaaactgcggtacctgatccttggcagtgcagtgggtggtgggtacacggcaaaaaagaccttcgaccaatggaaggacatgatcccggatttgtctgagtacaaatggatcgttccagacatcgtctgggaaatcgatgaatacattgatttcgaaaagatccgaaaagcactgccatcctccgaagatcttgtgaaacttgccccagacttcgataaaatcgtggaaagcctctctctactgaaggacttcttcacgagcggccacaagctcgtttctgaggttataggtgcttccgatttactgctgcttctggggtctcccgaagaaacagccttcagagcaactgacaggggttcagagtctgataaacatttccgaaaggggctgctgggcgaattgattctccttcagcagcagattcaggagcacgaagaagaggcgaggcgcgcagcgggacaatactccacttcttacgcccaacagaaaagaaaggtgtccgacaaagagaaaattgaccagcttcaggaagagcttctccacacccagttaaagtatcaaagaatcctggagaggctggaaaaagagaataaggaactgcgcaaattggtcttacagaaggatgataaagggattcaccaccgtaaacttaagaaaagcttgatcgatatgtactcagaggtcctggatgtgctgagtgattacgacgcctcttacaacacccaagatcaccttcccagggtcgtggtggttggcgatcaaagtgcagggaaaacatcggtgttagagatgattgctcaagccaggatcttccctcggggaagtggtgagatgatgacccgaagtccggtcaaggttaccctctctgaaggtccgcaccacgtcgccttgtttaaggattccagccgggaatttgacctgaccaaggaggaggatctggctgccctgcggcatgagatagagctacgcatgaggaagaatgtgaaagaaggctgcacagtttctccagagactatctccctgaatgtgaagggccctgggcttcagaggatggtgttggtggatctgccgggtgtaataaacactgtgaccagtggcatggcccctgataccaaggagacaatcttctctatatccaaggcgtatatgcagaaccccaacgctataatcctgtgcatccaagatggctctgtcgacgcggaaagatccattgtcaccgatctggtgagtcagatggatcctcacgggcgaaggactattttcgtcttgactaaggtggatttagcggagaagaacgtggcgagccctagccggattcagcagatcatcgaaggtaaattattcccaatgaaagcactcgggtattttgcagtagttaccgggaaaggcaattcttccgaatccatcgaagccattcgagagtacgaggaggagttttttcagaacagcaagctgctgaagacaagcatgttgaaagctcatcaggtaaccacgcggaatttgtctctcgccgtgtccgattgcttctggaagatggtacgagaaagtgtcgaacagcaggcagattcatttaaggctacacgtttcaacttggagactgagtggaagaacaactacccccgattaagggagttggaccgcaacgagctgtttgaaaaagcaaaaaatgagatccttgacgaggtaatttcactctcccaggtcacaccaaagcattgggaggagatcctgcaacaatccctgtgggagagggtcagcacacatgtaattgaaaatatttacctgcccgcagcacagactatgaactcgggaaccttcaacactaccgtggatatcaagctgaagcagtggacggacaaacaactgccgaataaggcagttgaagtcgcctgggagacattgcaggaagaattctctaggtttatgaccgagcctaagggcaaagagcacgacgatatttttgataagttgaaagaggcggttaaagaggagagcattaagagacacaaatggaatgattttgccgaggactccttacgcgtgatccagcacaatgccctcgaggatcgaagtatctctgataaacaacagtgggatgcagcaatatattttatggaggaggcattgcaagcacgcctgaaggacacggagaacgccattgagaatatggtgggtcctgactggaaaaagcggtggctgtactggaaaaatcgtactcaagaacagtgcgttcacaacgaaaccaagaatgaactggaaaagatgctgaagtgtaacgaagaacatccagcgtacctcgcgagcgacgagatcactacagtgcgcaagaacctggagtctcgtggggtggaggttgatccttccctgataaaagatacctggcatcaggtgtatagaagacacttcctcaaaactgctctcaatcattgcaacctttgtcgtcggggattttactattaccaacggcactttgttgattccgaactggagtgcaacgatgtagtgctgttttggcgaatacagcgcatgctggctatcactgctaatactctgcgccaacagctgaccaacaccgaggtgcggaggttggaaaagaacgtgaaggaagtcctggaagattttgccgaggacggagagaaaaaaattaaactgcttactggcaagagggtgcaactcgcggaggacctgaagaaggtccgggaaattcaggaaaaactcgacgcgttcatcgaggctctacaccaggagaagtag

SEQ ID NO: 234344 - DNA, 3048 bp, Artificial Sequence
  derived and/or modified sequence
atgtggagactgagaagagccgccgtggcctgcgaggtgtgccagagcctggtgaagcacagcagcggcatcaagggcagcctgcccctgcagaagctgcacctggtgagcagaagcatctaccacagccaccaccccaccctgaagctgcagagaccccagctgagaaccagcttccagcagttcagcagcctgaccaacctgcccctgagaaagctgaagttcagccccatcaagtacggctaccagcccagaagaaacttctggcccgccagactggccaccagactgctgaagctgagatacctgatcctgggcagcgccgtgggcggcggctacaccgccaagaagaccttcgaccagtggaaggacatgatccccgacctgagcgagtacaagtggatcgtgcccgacatcgtgtgggagatcgacgagtacatcgacttcgagaagatcagaaaggccctgcccagcagcgaggacctggtgaagctggcccccgacttcgacaagatcgtggagagcctgagcctgctgaaggacttcttcaccagcggccacaagctggtgagcgaggtgatcggcgccagcgacctgctgctgctgctgggcagccccgaggagaccgccttcagagccaccgacagaggcagcgagagcgacaagcacttcagaaagggcctgctgggcgagctgatcctgctgcagcagcagatccaggagcacgaggaggaggccagaagagccgccggccagtacagcaccagctacgcccagcagaagagaaaggtgagcgacaaggagaagatcgaccagctgcaggaggagctgctgcacacccagctgaagtaccagagaatcctggagagactggagaaggagaacaaggagctgagaaagctggtgctgcagaaggacgacaagggcatccaccacagaaagctgaagaagagcctgatcgacatgtacagcgaggtgctggacgtgctgagcgactacgacgccagctacaacacccaggaccacctgcccagagtggtggtggtgggcgaccagagcgccggcaagaccagcgtgctggagatgatcgcccaggccagaatcttccccagaggcagcggcgagatgatgaccagaagccccgtgaaggtgaccctgagcgagggcccccaccacgtggccctgttcaaggacagcagcagagagttcgacctgaccaaggaggaggacctggccgccctgagacacgagatcgagctgagaatgagaaagaacgtgaaggagggctgcaccgtgagccccgagaccatcagcctgaacgtgaagggccccggcctgcagagaatggtgctggtggacctgcccggcgtgatcaacaccgtgaccagcggcatggcccccgacaccaaggagaccatcttcagcatcagcaaggcctacatgcagaaccccaacgccatcatcctgtgcatccaggacggcagcgtggacgccgagagaagcatcgtgaccgacctggtgagccagatggacccccacggcagaagaaccatcttcgtgctgaccaaggtggacctggccgagaagaacgtggccagccccagcagaatccagcagatcatcgagggcaagctgttccccatgaaggccctgggctacttcgccgtggtgaccggcaagggcaacagcagcgagagcatcgaggccatcagagagtacgaggaggagttcttccagaacagcaagctgctgaagaccagcatgctgaaggcccaccaggtgaccaccagaaacctgagcctggccgtgagcgactgcttctggaagatggtgagagagagcgtggagcagcaggccgacagcttcaaggccaccagattcaacctggagaccgagtggaagaacaactaccccagactgagagagctggacagaaacgagctgttcgagaaggccaagaacgagatcctggacgaggtgatcagcctgagccaggtgacccccaagcactgggaggagatcctgcagcagagcctgtgggagagagtgagcacccacgtgatcgagaacatctacctgcccgccgcccagaccatgaacagcggcaccttcaacaccaccgtggacatcaagctgaagcagtggaccgacaagcagctgcccaacaaggccgtggaggtggcctgggagaccctgcaggaggagttcagcagattcatgaccgagcccaagggcaaggagcacgacgacatcttcgacaagctgaaggaggccgtgaaggaggagagcatcaagagacacaagtggaacgacttcgccgaggacagcctgagagtgatccagcacaacgccctggaggacagaagcatcagcgacaagcagcagtgggacgccgccatctacttcatggaggaggccctgcaggccagactgaaggacaccgagaacgccatcgagaacatggtgggccccgactggaagaagagatggctgtactggaagaacagaacccaggagcagtgcgtgcacaacgagaccaagaacgagctggagaagatgctgaagtgcaacgaggagcaccccgcctacctggccagcgacgagatcaccaccgtgagaaagaacctggagagcagaggcgtggaggtggaccccagcctgatcaaggacacctggcaccaggtgtacagaagacacttcctgaagaccgccctgaaccactgcaacctgtgcagaagaggcttctactactaccagagacacttcgtggacagcgagctggagtgcaacgacgtggtgctgttctggagaatccagagaatgctggccatcaccgccaacaccctgagacagcagctgaccaacaccgaggtgagaagactggagaagaacgtgaaggaggtgctggaggacttcgccgaggacggcgagaagaagatcaagctgctgaccggcaagagagtgcagctggccgaggacctgaagaaggtgagagagatccaggagaagctggacgccttcatcgaggccctgcaccaggagaagtag

SEQ ID NO: 234345 - protein, 998 aa, Artificial Sequence
  derived and/or modified sequence
MGPPLPLLLLLLLLLPPRVLPAAPSSVPRGRQLPGRLDGVFGRCQKVPAMDFYRYEVSPVALQRLRVALQKLSGTGFTWQDDYTQYVMDQELADLPKTYLRRPEASSPARPSKHSVGSERRYSREGGAALANALRRHLPFLEALSQAPASDVLARTHTAQDRPPAEGDDRFSESILTYVAHTSALTYPPGSRTQLREDLLPRTLGQLQPDELSPKVDSGVDRHHLMAALSAYAAQRPPAPPGEGSLEPQYLLRAPSRMPRPLLAPAAPQKWPSPLGDSEDPSSTGDGARIHTLLKDLQRQPAEVRGLSGLELDGMAELMAGLMQGVDHGVARGSPGRAALGESGEQADGPKATLRGDSFPDDGVQDDDDRLYQEVHRLSATLGGLLQDHGSRLLPGALPFARPLDMERKKSEHPESSLSSEEETAGVENVKSQTYSKDLLGQQPHSEPGAAAFGELQNQMPGPSKEEQSLPAGAQEALSDGLQLEVQPSEEEARGYIVTDRDPLRPEEGRRLVEDVARLLQVPSSAFADVEVLGPAVTFKVSANVQNVTTEDVEKATVDNKDKLEETSGLKILQTGVGSKSKLKFLPPQAEQEDSTKFIALTLVSLACILGVLLASGLIYCLRHSSQHRLKEKLSGLGGDPGADATAAYQELCRQRMATRPPDRPEGPHTSRISSVSSQFSDGPIPSPSARSSASSWSEEPVQSNMDISTGHMILSYMEDHLKNKNRLEKEWEALCAYQAEPNSSFVAQREENVPKNRSLAVLTYDHSRVLLKAENSHSHSDYINASPIMDHDPRNPAYIATQGPLPATVADFWQMVWESGCVVIVMLTPLAENGVRQCYHYWPDEGSNLYHIYEVNLVSEHIWCEDFLVRSFYLKNLQTNETRTVTQFHFLSWYDRGVPSSSRSLLDFRRKVNKCYRGRSCPIIVHCSDGAGRSGTYVLIDMVLNKMAKGAKEIDIAATLEHLRDQRPGMVQTKEQFEFALTAVAEEVNAILKALPQ

SEQ ID NO: 234346 - DNA, 2997 bp, Artificial Sequence
  derived and/or modified sequence
atgggaccccctctgcccctgctcctgctcctcttgctgctcttgcccccccgagtcttgcctgcagctccttcaagcgtgcctcgtggtagacagctgcctgggcgtctggacggcgtttttgggagatgccaaaaggtgcctgcaatggacttttacagatacgaagtctccccagtggctctgcagcggctccgcgttgccttgcagaaactcagcggcactggttttacctggcaagacgactatactcagtacgtgatggatcaggagttggccgacctgcctaaaacttatctcagacggcccgaggccagcagcccggccaggccaagcaaacactccgtggggtctgagagaaggtactcgcgggagggcggagccgcacttgctaacgccttacggcgccatctcccttttctagaagcactgtctcaggcccccgcctctgacgtgcttgctcgtacacacaccgcacaagatagaccccctgccgaaggcgatgacaggttctccgagagcatactgacctatgtcgcccataccagcgcattgacttaccctccgggatcgaggacccagctgagggaggatctcctccctaggacccttggccagctgcaacctgatgaattatccccaaaagtcgattcaggggtggaccgccatcatctgatggctgcattgtccgcttatgccgctcaacggcctcctgctccacccggtgaaggctcattagagcctcaatacctactccgcgcaccctcacgcatgccgaggccactgttagctcctgctgccccccaaaagtggccgagtcctcttggtgattccgaagaccccagtagcactggcgacggtgcacgtatccacactctgctgaaggacctccagagacagcccgcggaagtgcgaggactcagcggtctggagctggatggtatggccgagcttatggccggactgatgcaaggcgttgatcatggggtggctagaggttcacccggaagagctgccttgggcgaatcgggtgagcaggctgatggacccaaggctacccttagaggcgattcctttcccgacgatggcgtacaggacgacgacgatcgactctatcaggaggtacatcgtctgtcagcaactttggggggcttactacaagatcatgggtctcgactgctgcctggcgcactgccctttgctaggcctctggacatggagcgtaagaaaagcgagcatcccgaaagctctctctctagcgaagaggaaacagccggcgtcgagaatgtgaagtcacagacatattcgaaggatctccttggccaacagccacactctgagccaggcgccgcagcttttggcgaattgcaaaaccagatgccaggaccctcgaaggaggaacagtcacttcctgccggcgctcaagaagccctgagcgacggacttcagttagaggtccaaccgagtgaagaggaggccagaggatatatagtgaccgacagggaccctctgaggcccgaggagggtcggcgcttggtggaggatgttgctaggctcctgcaagtgcctagctctgcctttgcagacgtggaggtccttggccccgccgtgactttcaaggtgagcgccaacgtgcagaacgtgacaaccgaagacgtcgagaaagccaccgttgataataaggataagctggaggaaactagtggtttaaagatactgcaaaccggggtgggcagtaaatctaaattgaagtttctacctccgcaggccgaacaggaggactctacgaagtttattgccctcacactggtcagcttggcctgtatactgggcgtcctccttgccagcggcctgatctactgcctacgacacagttcccagcatcggctgaaggagaagttaagtggtctgggcggcgatccgggtgctgacgctacagccgcataccaagaactctgccgacagagaatggcaacccggccacccgaccgcccagaaggtccgcatacatcaagaatttcatctgtatccagtcagttcagcgatgggccaatcccaagtccttccgcgaggagtagtgctagttcatggtccgaagagccagtgcagtcaaacatggatatctcaaccggacacatgatcctatcctacatggaggatcaccttaaaaacaaaaatcgcctggagaaggaatgggaggccttgtgtgcataccaagccgagcctaacagcagcttcgttgcacagcgggaggagaatgttcccaaaaatagaagccttgcggtattgacctacgatcactcccgagtgctccttaaggctgaaaattctcacagccacagtgactacattaacgctagcccaattatggatcatgaccctagaaatccagcttacatagccacgcaggggccactgccggcgactgtggcggacttttggcaaatggtgtgggagtctggctgcgtggttattgtgatgttaactcctctggccgagaacggcgtgagacaatgctaccactactggccagatgaggggagtaatttataccacatctacgaggtaaacctggtctcagaacatatctggtgcgaagactttctggtccgcagcttctaccttaagaacttgcaaacaaatgaaactcggacggtgacccagttccatttcctttcatggtatgatcgcggggtccccagctccagccgatcattgctggacttccggagaaaggtcaataagtgttatagggggcgttcgtgcccaatcatcgtacattgttctgatggggctgggcgtagtggaacttacgtgctgatagatatggttctgaataaaatggccaagggcgctaaggagatcgacattgcggcgaccctggaacacctcagggatcaaaggccagggatggttcagactaaggagcagtttgagttcgctttaacagcggtggctgaggaggtgaatgccattctcaaggccctgccacagtag

SEQ ID NO: 234347 - DNA, 2997 bp, Artificial Sequence
  derived and/or modified sequence
atgggcccccccctgcccctgctgctgctgctgctgctgctgctgcccccccgggtgctgcctgctgcccccagctctgtgccccggggccggcagctgcccggccgcctggatggagtgtttggccgctgccagaaggtgcctgccatggacttctaccgctatgaggtgtcccctgtggccctgcagaggctgcgggtggccctgcagaagctgtctggaacaggcttcacctggcaggatgactacacccagtatgtgatggaccaggagctggccgacctgcccaagacctacctgcggcggcctgaggccagcagccctgcccggcccagcaagcacagcgtgggcagcgagcggcgctacagccgggagggcggggccgccctggccaatgccctgcggcggcacctgcccttcctggaggccctgagccaggccccagccagtgatgtgctggcccggacccacacagcccaggaccggcccccagcagaaggagatgaccgcttcagcgagagcatcctgacctacgtggcccacaccagcgccctgacctacccacctggcagcaggacccagctgcgggaggacctgctgcccaggaccctgggccagctgcagccagatgagctgagccccaaggtggacagcggcgtggacagacaccacctgatggccgccctgagcgcctatgctgcccagaggcccccagcccctcctggagagggcagcctggagccccagtacctgctgcgggcccccagcaggatgccccggcccctgctggccccagctgccccccagaagtggcccagccccctgggggacagcgaggaccccagcagcactggagatggagcccgcatccacaccctgctgaaggacctgcagaggcagcctgctgaggtgcggggcctgagcggcctggagctggatggcatggccgagctgatggccggcctgatgcagggcgtggaccacggcgtggcccggggcagccctggccgggccgccctgggggagagcggggagcaggctgatggccccaaggccaccctgcggggggacagcttcccagatgatggagtgcaggatgatgatgaccggctgtaccaggaggtgcaccggctgagcgccaccctgggcggcctgctgcaggaccacggcagccggctgctgcccggggccctgccctttgcccggcccctggacatggagaggaagaagtctgagcaccctgagagcagcctgagcagcgaggaggagacagctggggtggagaatgtgaagagccagacctacagcaaggacctgctgggccagcagccccacagcgagcccggggctgctgcctttggagagctgcagaaccagatgcctggccccagcaaggaggagcagagcctgcctgctggggcccaggaggccctgagtgatggcctgcagctggaggtgcagcccagcgaggaggaggcccggggctacatcgtgacagaccgggaccccctgcggcctgaggagggccggcggctggtggaggatgtggcccggctgctgcaggtgcccagcagcgcctttgctgatgtggaggtgctgggccctgctgtgaccttcaaggtgtctgccaacgtgcagaatgtgaccacagaagatgtggagaaggccaccgtggacaacaaggacaagctggaggagaccagcggcctgaagatcctgcagacaggagtgggcagcaagagcaagctgaagttcctgcccccccaggccgagcaggaggacagcaccaagttcatcgccctgaccctggtgtccctggcctgcatcctgggcgtgctgctggccagcggcctcatctactgcctgcggcacagcagccagcaccggctgaaggagaagctgagcggcctgggcggggaccctggagcagatgccacagctgcctaccaggagctgtgccggcagaggatggccacccggcccccagacaggcctgagggcccccacaccagccgcatcagctctgtgagcagccagttcagtgatggccccatccccagccccagcgcccggagcagcgccagctcctggagcgaggagcctgtgcagagcaacatggacatcagcacaggccacatgatcctgagctacatggaggaccacctgaagaacaagaaccggctggagaaggagtgggaggccctgtgtgcctaccaggccgagcccaacagcagctttgtggcccagcgggaggagaatgtgcccaagaacagaagcctggccgtgctgacctatgaccacagccgggtgctgctgaaggccgagaacagccacagccacagcgactacatcaatgccagccccatcatggaccatgaccccagaaatcctgcctacatcgccacccagggccccctgcctgccaccgtggccgacttctggcagatggtgtgggagagcggctgtgtggtgattgtgatgctgacccccctggctgaaaatggagtgcggcagtgctaccactactggccagatgagggcagcaacctgtaccacatctatgaggtgaacctggtgtctgagcacatctggtgtgaggacttcctggtgcgctccttctacctgaagaacctgcagaccaatgagaccaggacagtgacccagttccacttcctgtcctggtatgaccggggcgtgcccagcagcagccgcagcctgctggacttccggaggaaggtgaacaagtgctaccggggccgcagctgccccatcatcgtgcactgcagtgatggagctggccgcagcggcacctacgtgctgattgacatggtgctgaacaagatggccaagggggccaaggagattgatattgctgccaccctggagcacctgcgggaccagaggcctggcatggtgcagaccaaggagcagtttgaatttgccctgacagctgtggccgaggaggtgaatgccatcctgaaggccctgccccagtag

SEQ ID NO: 234348 - DNA, 2997 bp, Artificial Sequence
  derived and/or modified sequence
atgggcccccccctgcccctgctgctgctgctgctgctgctgctgcctccccgtgtgctcccagctgctccttcctcggtgccgagaggacggcagttgccgggtcgcctcgatggcgtttttggaagatgccagaaagtgcccgctatggacttctataggtacgaggttagtcccgtcgccctgcagcggctgagggtggcactccaaaagctcagtggtactggttttacatggcaggatgactatacacagtatgtgatggatcaggagctggccgacctgcctaaaacatatctgcgcagacctgaggcttccagccccgcccgcccatccaagcactccgtcggctctgaaaggcggtactcccgggaaggtggggccgccttagcgaatgctttgagacgccatttacccttcctggaggctctcagccaggctccagcctctgacgttctggcaaggacgcatacagcacaggacaggccacctgcagagggggacgatcggttcagtgagtcaattcttacctacgtggctcacaccagcgctcttacctacccccccggttcccggacacagctacgcgaagatctgctgccacggacattaggtcagctgcagcccgatgagcttagtccgaaggtggattccggagtcgatcgccaccatctcatggcagctctgagtgcctatgctgcccaaagacctcccgcgccaccaggagaagggagtctggaacctcagtacctcctaagagctccctcccgtatgccaaggcctcttttggcaccagctgcaccgcagaagtggccaagccccttaggagacagcgaagacccatccagcactggggacggcgcccgcatacataccctgctgaaagacttgcagcgtcagcccgccgaggtccgggggctgtccggcctcgagttggacggcatggccgagcttatggcaggactcatgcagggcgtggatcacggggtggccagaggtagtcccgggcgcgcagctctgggtgagtctggcgagcaagcagatggtccaaaggccacactgagaggagattcctttccagacgatggcgtccaagacgacgacgacaggctctaccaggaggtccatcgcttgagtgcgacactaggcgggttgctgcaggatcatggctctaggctgctgccaggagcacttcccttcgccagaccgctggacatggagcgcaagaaaagtgagcatccagagtcctccctgtcctctgaggaggaaaccgccggtgtcgagaacgtgaaatctcagacctactctaaagatctcctgggtcagcaaccgcattctgagccaggagccgccgcattcggcgagcttcagaatcagatgcctgggccttcaaaagaggagcagtccctgcccgctggagctcaagaggccctgtccgacggcctccagctggaagtgcagccttccgaagaggaggcacggggctatattgtgaccgacagagaccctcttaggccagaagagggcagaaggctggtagaagatgttgctagactgcttcaggtacccagctcagcgtttgctgacgtagaagtgctcggtccagccgtcactttcaaagtctcagccaatgtgcagaatgtcacaaccgaagatgttgagaaagcaacggtcgacaacaaggacaagttagaggagacctcgggattgaaaatcctccagacaggggtaggatctaaatctaaattgaaatttcttcctccccaggccgagcaggaagactccaccaaatttattgccctaacccttgtcagcctcgcatgtattttgggagtgctgctggccagtggtcttatttattgtctgagacatagctcacagcacaggttaaaagagaagctgagcgggcttggcggcgatcctggcgccgatgccacagccgcctaccaggaactctgcaggcagcggatggccaccaggccaccagatcgcccagaaggcccacatacgtctagaatcagctccgtgagcagccagttcagtgatgggcctattcctagccctagtgctaggagttctgcttcgagctggagcgaggagcccgttcagagcaatatggacatctccaccggtcacatgatcctatcctatatggaagatcacctgaagaacaagaatcgattagagaaggagtgggaagcactgtgtgcataccaggcagagccaaattcctcattcgtcgcacagagagaggaaaatgttcctaagaatagaagcctggccgtgctgacttacgaccacagccgggtgctcctgaaggcagagaactcccacagtcacagcgactacatcaatgctagcccaatcatggatcatgatcctaggaatccagcttacattgcgacacaaggacccttacctgccactgtagctgacttttggcagatggtctgggagtccggatgcgttgttatcgtgatgctgactccactggctgaaaatggcgtacgccagtgttaccactattggccagacgaagggtccaacctctaccacatttatgaggtgaatctagtatctgagcacatctggtgtgaagacttcttggtcagaagtttttacctgaagaatctgcagacaaatgaaactaggactgtgactcagtttcacttcctgagctggtatgatcgaggggtgccctcatccagtagatccttgctggacttccggcgtaaagtaaacaagtgttatagagggagatcctgtcctattattgtccattgcagtgacggggccggccgtagcggtacctacgtgcttatcgacatggttcttaacaagatggcaaagggcgccaaagagattgatatagctgcaaccttagaacacctgcgcgaccagcggcctggcatggtgcagacgaaggagcagtttgagtttgcgctgactgccgtcgccgaagaggtgaatgcgattctgaaggccctcccgcagtag

SEQ ID NO: 234349 - DNA, 2997 bp, Artificial Sequence
  derived and/or modified sequence
atgggtcctcctctccccctactcctgctgctcctgcttctgctaccaccgagagtgttgcctgccgcacccagcagcgttcctcgcggtaggcagctgccaggtagactggacggggttttcggcaggtgccagaaggtcccagctatggacttttatagatacgaggtgtccccagtcgccctgcagagattgcgggtggctctccagaaactgagcggcaccggcttcacttggcaggatgattacactcaatacgtcatggaccaggaactggccgacttgcctaaaacgtacctgagacgccctgaggcctcttccccggctaggccatcaaagcactcggtggggtctgaaaggcgatatagccgtgagggaggagctgccctggcaaatgctctcagacggcatcttcccttcctagaggccctttctcaggccccagccagtgatgttctcgcaagaacgcacacggcacaagatcggcctcctgcggaaggagacgatcggttctctgagtccattttaacctatgtggctcacaccagtgccttgacctatcctccagggtcccggacccagttacgagaggacctactaccgaggaccctgggccagctacagccagatgaactgagcccgaaggttgattccggcgtcgataggcaccacctgatggccgcactcagcgcctatgcggctcaaagaccacctgcgcctcccggagaaggcagtcttgagccccagtatctgctcagagcccctagcaggatgcctcggcctctcctggccccagccgcaccccaaaaatggccttcacctctaggtgacagcgaggatcccagttccacgggggatggggctcgtatccatacacttctaaaagatcttcagcgacaacctgcagaagtgagaggcctgagcggtctcgaactagatggaatggcagagctcatggctggattaatgcagggagttgatcacggcgtggccagaggttctccaggccgagctgccctaggggagagcggggaacaagcagatggccctaaagcaactctgagaggcgatagcttccctgatgacggagtgcaggacgatgatgatagactgtatcaggaggtgcataggctgagcgcgaccctgggtggtttgctccaggaccacggatccaggctactcccgggtgcgctcccgtttgccaggcctctcgatatggagaggaaaaagagtgagcacccagagtcaagtctaagcagcgaggaagaaactgccggtgtagaaaacgtaaaatcccagacttactcaaaggacctgctcggtcagcagccacactcagagccaggggctgccgcattcggtgagctacaaaatcagatgccgggaccctcaaaggaagagcaaagcctccctgctggagcgcaggaggctttatctgacggattgcagcttgaagtgcagccttccgaagaagaggcacgcggttatattgtcacggaccgagaccccctccggcctgaggagggacgtaggcttgtcgaagacgtggcgagactcctgcaagtcccgtctagcgcatttgcagatgtagaggtcttaggccctgccgtgacctttaaagtatccgctaatgtccagaatgtgacaacagaggacgttgagaaggccaccgtcgataacaaagacaaactggaagaaaccagcgggttgaaaatcttgcagacaggcgtggggagcaagagtaaattgaagttcctccctccccaagctgagcaagaggacagcaccaagttcattgcgcttaccctggtcagtctggcatgtatcttgggcgtcctgttagcctccggactgatctactgcctccgtcacagctcccagcataggctgaaagaaaaactttccggacttggaggggaccctggcgcagacgcgaccgcagcttaccaggaactgtgtcgtcagaggatggcaacgagacctcctgacaggcctgaagggccacatacatccaggatttcctcagtttcgtcgcagttctctgacggcccaatccccagcccctccgctcggagttcagcctcttcctggtccgaggagcccgtacagagcaacatggacatttccactggtcacatgattctatcttacatggaggatcacctcaaaaataagaacagactggaaaaggaatgggaggccttgtgcgcctatcaggctgagccgaacagttcctttgtggcccagcgggaagagaatgtacccaaaaatagaagcctggcagtgttgacttacgatcacagcagggtgttactgaaggccgagaacagccacagtcattctgactatattaatgcatcacccatcatggaccacgatccaaggaacccagcctatatagcaactcaggggcctctgcccgcaactgtggcggacttttggcagatggtatgggagtcaggttgcgtggtcattgtgatgcttaccccgctagcagaaaatggtgtccgccagtgctaccactactggcctgacgagggcagcaacctgtatcatatttatgaggtgaacctggtctccgagcacatttggtgcgaggattttctggtgcgctctttctatctcaagaacctccagaccaacgagacgcgaaccgtgactcagtttcattttctcagctggtatgatagaggagtgcccagcagtagcagaagcctgctcgatttcaggcgcaaggtgaacaagtgttatagaggtcgcagttgccctatcatagtccactgttcggatggcgcaggccgatccggcacctacgtgctcatagatatggtcctgaacaaaatggccaagggggctaaagaaatcgatatcgccgcaacactcgagcatctcagggaccagcgcccaggcatggtccagaccaaggaacagtttgagttcgcccttaccgccgttgcagaggaggtgaacgcaatcctgaaagctctgccacagtag

SEQ ID NO: 234350 - DNA, 4692 bp, Artificial Sequence
  derived and/or modified sequence
ccgcgcggccatggactgagcgccgccggccaggccgcggggatggggccgccgctcccgctgctgctgctgctactgctgctgctgccgccacgcgtcctgcctgccgccccttcgtccgtcccccgcggccggcagctcccggggcgtctggatggagtgtttggaaggtgccagaaggttccggcaatggacttttaccgctacgaggtgtcgcccgtggccctgcagcgcctgcgcgtggcgttgcagaagctttccggcacaggtttcacgtggcaggatgactatactcagtatgtgatggaccaggaacttgcagacctcccgaaaacctacctgaggcgtcctgaagcatccagcccagccaggccctcaaaacacagcgttggcagcgagaggaggtacagtcgggagggcggtgctgccctggccaacgccctccgacgccacctgcccttcctggaggccctgtcccaggccccagcctcagacgtgctcgccaggacccatacggcgcaggacagaccccccgctgagggtgatgaccgcttctccgagagcatcctgacctatgtggcccacacgtctgcgctgacctaccctcccgggtcccggacccagctccgcgaggacctcctgccgcggaccctcggccagctccagccagatgagctcagccctaaggtggacagtggtgtggacagacaccatctgatggcggccctcagtgcctatgctgcccagaggcccccagctccccccggggagggcagcctggagccacagtaccttctgcgtgcaccctcaagaatgcccaggcctttgctggcaccagccgccccccagaagtggccttcacctctgggagattccgaagacccctccagcacaggcgatggagcacggattcataccctcctgaaggacctgcagaggcagccggctgaggtgaggggcctgagtggcctggagctggacggcatggctgagctgatggctggcctgatgcaaggcgtggaccatggagtagctcgaggcagccctgggagagcggccctgggagagtctggagaacaggcggatggccccaaggccaccctccgtggagacagctttccagatgacggagtgcaggacgacgatgatagactttaccaagaggtccatcgtctgagtgccacactcgggggcctcctgcaggaccacgggtctcgactcttacctggagccctcccctttgcaaggcccctcgacatggagaggaagaagtccgagcaccctgagtcttccctgtcttcagaagaggagactgccggagtggagaacgtcaagagccagacgtattccaaagatctgctggggcagcagccgcattcggagcccggggccgctgcgtttggggagctccaaaaccagatgcctgggccctcgaaggaggagcagagccttccagcgggtgctcaggaggccctcagcgacggcctgcaattggaggtccagccttccgaggaagaggcgcggggctacatcgtgacagacagagaccccctgcgccccgaggaaggaaggcggctggtggaggacgtcgcccgcctcctgcaggtgcccagcagtgcgttcgctgacgtggaggttctcggaccagcagtgaccttcaaagtgagcgccaatgtccaaaacgtgaccactgaggatgtggagaaggccacagttgacaacaaagacaaactggaggaaacctctggactgaaaattcttcaaaccggagtcgggtcgaaaagcaaactcaagttcctgcctcctcaggcggagcaagaagactccaccaagttcatcgcgctcaccctggtctccctcgcctgcatcctgggcgtcctcctggcctctggcctcatctactgcctccgccatagctctcagcacaggctgaaggagaagctctcgggactagggggcgacccaggtgcagatgccactgccgcctaccaggagctgtgccgccagcgtatggccacgcggccaccagaccgacctgagggcccgcacacgtcacgcatcagcagcgtctcatcccagttcagcgacgggccgatccccagcccctccgcacgcagcagcgcctcatcctggtccgaggagcctgtgcagtccaacatggacatctccaccggccacatgatcctgtcctacatggaggaccacctgaagaacaagaaccggctggagaaggagtgggaagcgctgtgcgcctaccaggcggagcccaacagctcgttcgtggcccagagggaggagaacgtgcccaagaaccgctccctggccgtgctgacctatgaccactcccgggtcctgctgaaggcggagaacagccacagccactcagactacatcaacgctagccccatcatggatcacgacccgaggaaccccgcgtacatcgccacccagggaccgctgcccgccaccgtggctgacttttggcagatggtgtgggagagcggctgcgtggtgatcgtcatgctgacacccctcgcggagaacggcgtccggcagtgctaccactactggccggatgaaggctccaatctctaccacatctatgaggtgaacctggtctccgagcacatctggtgtgaggacttcctggtgaggagcttctatctgaagaacctgcagaccaacgagacgcgcaccgtgacgcagttccacttcctgagttggtatgaccgaggagtcccttcctcctcaaggtccctcctggacttccgcagaaaagtaaacaagtgctacaggggccgttcttgtccaataattgttcattgcagtgacggtgcaggccggagcggcacctacgtcctgatcgacatggttctcaacaagatggccaaaggtgctaaagagattgatatcgcagcgaccctggagcacttgagggaccagagacccggcatggtccagacgaaggagcagtttgagttcgcgctgacagccgtggctgaggaggtgaacgccatcctcaaggcccttccccagtgagcggcagcctcaggggcctcaggggagcccccaccccacggatgttgtcaggaatcatgatctgactttaattgtgtgtcttctattataactgcatagtaatagggcccttagctctcccgtagtcagcgcagtttagcagttaaaagtgtatttttgtttaatcaaacaataataaagagagatttgtggaaaaatccagttacgggtggaggggaatcggttcatcaattttcacttgcttaaaaaaaatactttttcttaaagcacccgttcaccttcttggttgaagttgtgttaacaatgcagtagccagcacgttcgaggcggtttccaggaagagtgtgcttgtcatctgccactttcgggagggtggatccactgtgcaggagtggccggggaagctggcagcactcagtgaggccgcccggcacacaaggcacgtttggcatttctctttgagagagtttatcattgggagaagccgcagggacagaactgaacgtcctgcagcttcggggcaagtgagacaatcacagctcctcgctgcgtctccatcaacactgcgccgggtaccatggacggccccgtcagccacacctgtcagcccaagcagagtgattcaggggctccccgggggcagacacctgtgcaccccatgagtagtgcccacttgaggctggcactcccctgacctcacctttgcaaagttacagatgcaccccaacattgagatgtgtttttaatgttaaaatattgatttctacgttatgaaaacagatgcccccgtgaatgcttacctgtgagataaccacaaccaggaagaacaaatctgggcattgagcaagctatgagggtccccgggagcacacgaaccctgccaggcccccgctggctcctccaggcacgtcccggacctgtggggccccagagaggggacatttccctcctgggagagaaggagatcagggcaactcggagagggctgcgagcatttccctcccgggagaggagatcagggcgacctgcacgcactgcgtagagcctggaagggaagtgagaaaccagccgaccggccctgcccctcttcccgggatcacttaatgaaccacgtgttttgacatcatgtaaacctaagcacgtagagatgattcggatttgacaaaataacatttgagtatccgattcgccatcaccccctaccccagaaataggacaattcacttcattgaccaagatgatcacatggaaggcggcacagaggcagctgtgtgggctgcagatttcctgtgtggggttcagcgtagaaaacgcacctccatcccgcccttcccacagcattcctccatcttagatagatggtactctccaaaggccctaccagagggaacacggcctactgagcggacagaatgatgccaaaatattgcttatgtctctacatggtattgtaatgaatatctgctttaatatagctatcatttcttttccaaaattacttctctctatctggaatttaattaatcgaaatgaatttatctgaatataggaagcatatgcctacttgtaatttctaactccttatgtttgaagagaaacctccggtgtgagatatacaaatatatttaattgtgtcatattaaacttctgatt

SEQ ID NO: 234351 - DNA, 2997 bp, Artificial Sequence
  derived and/or modified sequence
atgggcccccccctgcccctgctgctgctgctgctgctgctgctgccccccagagtgctgcccgccgcccccagcagcgtgcccagaggcagacagctgcccggcagactggacggcgtgttcggcagatgccagaaggtgcccgccatggacttctacagatacgaggtgagccccgtggccctgcagagactgagagtggccctgcagaagctgagcggcaccggcttcacctggcaggacgactacacccagtacgtgatggaccaggagctggccgacctgcccaagacctacctgagaagacccgaggccagcagccccgccagacccagcaagcacagcgtgggcagcgagagaagatacagcagagagggcggcgccgccctggccaacgccctgagaagacacctgcccttcctggaggccctgagccaggcccccgccagcgacgtgctggccagaacccacaccgcccaggacagaccccccgccgagggcgacgacagattcagcgagagcatcctgacctacgtggcccacaccagcgccctgacctacccccccggcagcagaacccagctgagagaggacctgctgcccagaaccctgggccagctgcagcccgacgagctgagccccaaggtggacagcggcgtggacagacaccacctgatggccgccctgagcgcctacgccgcccagagaccccccgccccccccggcgagggcagcctggagccccagtacctgctgagagcccccagcagaatgcccagacccctgctggcccccgccgccccccagaagtggcccagccccctgggcgacagcgaggaccccagcagcaccggcgacggcgccagaatccacaccctgctgaaggacctgcagagacagcccgccgaggtgagaggcctgagcggcctggagctggacggcatggccgagctgatggccggcctgatgcagggcgtggaccacggcgtggccagaggcagccccggcagagccgccctgggcgagagcggcgagcaggccgacggccccaaggccaccctgagaggcgacagcttccccgacgacggcgtgcaggacgacgacgacagactgtaccaggaggtgcacagactgagcgccaccctgggcggcctgctgcaggaccacggcagcagactgctgcccggcgccctgcccttcgccagacccctggacatggagagaaagaagagcgagcaccccgagagcagcctgagcagcgaggaggagaccgccggcgtggagaacgtgaagagccagacctacagcaaggacctgctgggccagcagccccacagcgagcccggcgccgccgccttcggcgagctgcagaaccagatgcccggccccagcaaggaggagcagagcctgcccgccggcgcccaggaggccctgagcgacggcctgcagctggaggtgcagcccagcgaggaggaggccagaggctacatcgtgaccgacagagaccccctgagacccgaggagggcagaagactggtggaggacgtggccagactgctgcaggtgcccagcagcgccttcgccgacgtggaggtgctgggccccgccgtgaccttcaaggtgagcgccaacgtgcagaacgtgaccaccgaggacgtggagaaggccaccgtggacaacaaggacaagctggaggagaccagcggcctgaagatcctgcagaccggcgtgggcagcaagagcaagctgaagttcctgcccccccaggccgagcaggaggacagcaccaagttcatcgccctgaccctggtgagcctggcctgcatcctgggcgtgctgctggccagcggcctgatctactgcctgagacacagcagccagcacagactgaaggagaagctgagcggcctgggcggcgaccccggcgccgacgccaccgccgcctaccaggagctgtgcagacagagaatggccaccagaccccccgacagacccgagggcccccacaccagcagaatcagcagcgtgagcagccagttcagcgacggccccatccccagccccagcgccagaagcagcgccagcagctggagcgaggagcccgtgcagagcaacatggacatcagcaccggccacatgatcctgagctacatggaggaccacctgaagaacaagaacagactggagaaggagtgggaggccctgtgcgcctaccaggccgagcccaacagcagcttcgtggcccagagagaggagaacgtgcccaagaacagaagcctggccgtgctgacctacgaccacagcagagtgctgctgaaggccgagaacagccacagccacagcgactacatcaacgccagccccatcatggaccacgaccccagaaaccccgcctacatcgccacccagggccccctgcccgccaccgtggccgacttctggcagatggtgtgggagagcggctgcgtggtgatcgtgatgctgacccccctggccgagaacggcgtgagacagtgctaccactactggcccgacgagggcagcaacctgtaccacatctacgaggtgaacctggtgagcgagcacatctggtgcgaggacttcctggtgagaagcttctacctgaagaacctgcagaccaacgagaccagaaccgtgacccagttccacttcctgagctggtacgacagaggcgtgcccagcagcagcagaagcctgctggacttcagaagaaaggtgaacaagtgctacagaggcagaagctgccccatcatcgtgcactgcagcgacggcgccggcagaagcggcacctacgtgctgatcgacatggtgctgaacaagatggccaagggcgccaaggagatcgacatcgccgccaccctggagcacctgagagaccagagacccggcatggtgcagaccaaggagcagttcgagttcgccctgaccgccgtggccgaggaggtgaacgccatcctgaaggccctgccccagtag

SEQ ID NO: 234352 - protein, 986 aa, Artificial Sequence
  derived and/or modified sequence
MGPPLPLLLLLLLLLPPRVLPAAPSSVPRGRQLPGRLGCLLEEGLCGASEACVNDGVFGRCQKVPAMDFYRYEVSPVALQRLRVALQKLSGTGFTWQDDYTQYVMDQELADLPKTYLRRPEASSPARPSKHSVGSERRYSREGGAALANALRRHLPFLEALSQAPASDVLARTHTAQDRPPAEGDDRFSESILTYVAHTSALTYPPGSRTQLREDLLPRTLGQLQPDELSPKVDSGVDRHHLMAALSAYAAQRPPAPPGEGSLEPQYLLRAPSRMPRPLLAPAAPQKWPSPLGDSEDPSSTGDGARIHTLLKDLQRQPAEVRGLSGLELDGMAELMAGLMQGVDHGVARGSPGRAALGESGEQADGPKATLRGDSFPDDGVQDDDDRLYQEVHRLSATLGGLLQDHGSRLLPGALPFARPLDMERKKSEHPESSLSSEEETAGVENVKSQTYSKDLLGQQPHSEPGAAAFGELQNQMPGPSKEEQSLPAGAQEALSDGLQLEVQPSEEEARGYIVTDREVLGPAVTFKVSANVQNVTTEDVEKATVDNKDKLEETSGLKILQTGVGSKSKLKFLPPQAEQEDSTKFIALTLVSLACILGVLLASGLIYCLRHSSQHRLKEKLSGLGGDPGADATAAYQELCRQRMATRPPDRPEGPHTSRISSVSSQFSDGPIPSPSARSSASSWSEEPVQSNMDISTGHMILSYMEDHLKNKNRLEKEWEALCAYQAEPNSSFVAQREENVPKNRSLAVLTYDHSRVLLKAENSHSHSDYINASPIMDHDPRNPAYIATQGPLPATVADFWQMVWESGCVVIVMLTPLAENGVRQCYHYWPDEGSNLYHIYEVNLVSEHIWCEDFLVRSFYLKNLQTNETRTVTQFHFLSWYDRGVPSSSRSLLDFRRKVNKCYRGRSCPIIVHCSDGAGRSGTYVLIDMVLNKMAKGAKEIDIAATLEHLRDQRPGMVQTKEQFEFALTAVAEEVNAILKALPQ

SEQ ID NO: 234353 - DNA, 2961 bp, Artificial Sequence
  derived and/or modified sequence
atgggacctccgttacccctcctcctcctgttactgctcctcctaccccctcgcgtgctccccgccgcccccagttccgtcccgagggggcgccagctccccgggcggctggggtgcctgctggaggagggcttatgcggggcgtccgaggcctgtgttaacgacggagtgtttgggagatgtcagaaggtgcctgccatggacttctatcggtatgaggtctcacctgtcgcacttcagcggctgcgagtggctctacagaaactgtctggtaccgggtttacatggcaggatgattacactcaatatgtgatggaccaggaactcgccgacctgcctaagacatacttaaggagaccggaggcttcctctccagctcggcctagtaagcacagcgtgggctcggagcgcaggtattcccgtgagggcggcgcagcactcgccaacgcattgcgtcgccatctgcctttcctggaagccttgagtcaggcaccagcatccgacgtcttggctcggactcatactgcccaggacagaccgcccgcggagggggatgaccgcttcagcgagtctatacttacctatgtagctcatactagcgcattgacgtatcccccaggcagcaggacacaactgcgcgaagatctgctgcctcgtaccctgggccagcttcagcccgatgagctgtcccctaaagttgattcaggggtcgacaggcaccatcttatggctgcattgtccgcctacgccgcacagaggccaccagccccaccaggtgagggatccctggaacctcaatatctgcttagggccccatctcgaatgcctcgcccactactggcccccgcagcgcctcagaagtggcctagccctttaggcgactctgaggacccaagctctactggcgacggggcacgcatccacactctcctcaaggatctgcaacggcagcctgctgaagtacgtgggctctcagggctggaactggatggaatggctgagctgatggccgggctaatgcagggcgtcgatcacggcgtggcgcggggctcccctgggagggccgcactgggtgagtctggcgaacaagctgatggtcccaaggctacattgaggggagactcattcccggatgatggcgtccaggacgacgacgaccgactctatcaggaagtgcacagactgagcgctaccctgggaggcctacttcaggatcacggcagcagattactacccggtgcattgccctttgctcggcctctggatatggaaaggaaaaagagcgaacacccagagagctctctgtcgtccgaagaggagactgcaggcgtagagaacgttaaaagccagacgtattctaaggatctgcttgggcagcagccacactccgaacccggcgccgccgcttttggagaactccaaaatcagatgcccgggccctccaaagaggaacaatccctccctgcaggagctcaggaagccctgagcgacggacttcagctggaggtgcagccctctgaggaggaagcccggggctatatagtgaccgacagagaggtgttaggacccgctgttacatttaaagtctctgcaaacgtgcagaatgtgacaaccgaggacgttgaaaaagccactgtggataataaagacaaactcgaggagacctctgggctgaaaatcctgcagaccggtgtgggcagcaagtctaaactcaagtttcttcccccacaagcggaacaggaagactctaccaagtttatagcactgactcttgtgagcctggcctgcattctgggtgtcttgctagccagtggccttatttactgcctgcggcatagcagccaacatcgcctcaaagagaaactgtccggccttggcggggacccaggcgctgatgctacggccgcctatcaggaactatgcagacagaggatggcaactaggcccccggacaggccagaagggccacacactagcagaataagtagtgtttctagccagttttctgacggtcccatccccagtccctcggcccgcagttctgcctcgagctggtctgaggagcccgttcagagcaatatggacattagcactgggcacatgattctgagctatatggaggatcatctgaaaaacaaaaatcgtctggagaaagaatgggaagcactgtgcgcttatcaggcagaaccaaattcctcattcgtcgcacagcgggaagagaacgtccctaagaatagatccttggcagtgctcacctatgaccacagtagggtcctgttaaaggcagagaattcccatagccacagcgattacatcaatgcatctcccatcatggatcacgatccaaggaatcctgcatatattgctacacaggggcctcttcctgcaacagtggctgatttctggcaaatggtatgggaaagtggctgtgtggtgattgtcatgttgacacctctggcagagaacggggtcaggcagtgctatcattactggcctgacgagggatctaatttgtaccacatctatgaagttaacctagtctccgagcacatctggtgtgaagacttcctggtgcgctctttttacctgaagaacctgcagaccaatgaaactcggaccgtaactcagttccatttcctgtcttggtacgaccgaggcgtgccatcatcgagcagaagcctgctggactttcggaggaaagtaaataagtgttatagagggcggagttgccccattatagtgcattgcagtgacggtgccggccgtagtggaacctatgtgcttatcgatatggtcctcaacaaaatggccaagggggcaaaagaaatagacatcgcggcgacccttgaacacctcagagaccagcggccaggtatggttcagaccaaggagcagtttgagtttgccctgacagctgtggcagaggaggtgaacgccatacttaaggccctgcctcaatag

SEQ ID NO: 234354 - DNA, 2961 bp, Artificial Sequence
  derived and/or modified sequence
atgggcccccccctgcccctgctgctgctgctgctgctgctgctgcccccccgggtgctgcctgctgcccccagctctgtgccccggggccggcagctgcccggccgcctgggctgcctgctggaggagggcctgtgtggggccagcgaggcctgtgtgaatgatggagtgtttggccgctgccagaaggtgcctgccatggacttctaccgctatgaggtgtcccctgtggccctgcagaggctgcgggtggccctgcagaagctgagcggcaccggcttcacctggcaggatgactacacccagtatgtgatggaccaggagctggccgacctgcccaagacctacctgcggcggcctgaggccagcagccctgcccggcccagcaagcacagcgtgggcagcgagcggcgctacagccgggagggcggggccgccctggccaatgccctgcggcggcacctgcccttcctggaggccctgagccaggccccagccagtgatgtgctggcccggacccacacagcccaggaccggcccccagcagaaggagatgaccgcttcagcgagagcatcctgacctacgtggcccacaccagcgccctgacctacccacctggcagcaggacccagctgcgggaggacctgctgcccaggaccctgggccagctgcagccagatgagctgagccccaaggtggacagcggcgtggacagacaccacctgatggccgccctgagcgcctatgctgcccagaggcccccagcccctcctggagagggcagcctggagccccagtacctgctgcgggcccccagcaggatgccccggcccctgctggccccagctgccccccagaagtggcccagccccctgggggacagcgaggaccccagcagcactggagatggagcccgcatccacaccctgctgaaggacctgcagaggcagcctgctgaggtgcggggcctgagcggcctggagctggatggcatggccgagctgatggccggcctgatgcagggcgtggaccatggagtggcccggggcagccctggccgggccgccctgggggagagcggggagcaggctgatggccccaaggccaccctgcggggggacagcttcccagatgatggagtgcaggatgatgatgaccggctgtaccaggaggtgcaccggctgagcgccaccctgggcggcctgctgcaggaccacggcagccggctgctgcccggggccctgccctttgcccggcccctggacatggagaggaagaagtctgagcaccctgagagcagcctgagcagcgaggaggagacagctggggtggagaatgtgaagagccagacctacagcaaggacctgctgggccagcagccccacagcgagcctggagctgctgccttcggggagctgcagaaccagatgcctggccccagcaaggaggagcagagcctgcctgctggggcccaggaggccctgagtgatggcctgcagctggaggtgcagcccagcgaggaggaggcccggggctacatcgtgacagaccgggaggtgctgggccctgctgtgaccttcaaggtgtctgccaacgtgcagaatgtgaccacagaagatgtggagaaggccaccgtggacaacaaggacaagctggaggagaccagcggcctgaagatcctgcagacaggagtgggcagcaagagcaagctgaagttcctgcccccccaggccgagcaggaggacagcaccaagttcatcgccctgaccctggtgtccctggcctgcatcctgggcgtgctgctggccagcggcctcatctactgcctgcggcacagcagccagcaccggctgaaggagaagctgagcggcctgggcggggaccctggagcagatgccacagctgcctaccaggagctgtgccggcagaggatggccacccggcccccagacaggcctgagggcccccacaccagccgcatcagctctgtgagcagccagttcagtgatggccccatccccagccccagcgcccggagcagcgccagctcctggagcgaggagcctgtgcagagcaacatggacatcagcacaggccacatgatcctgagctacatggaggaccacctgaagaacaagaaccggctggagaaggagtgggaggccctgtgtgcctaccaggccgagcccaacagcagctttgtggcccagcgggaggagaatgtgcccaagaacagaagcctggccgtgctgacctatgaccacagccgggtgctgctgaaggccgagaacagccacagccacagcgactacatcaatgccagccccatcatggaccatgaccccagaaatcctgcctacatcgccacccagggccccctgcctgccaccgtggccgacttctggcagatggtgtgggagagcggctgtgtggtgattgtgatgctgacccccctggctgaaaatggagtgcggcagtgctaccactactggccagatgagggcagcaacctgtaccacatctatgaggtgaacctggtgtctgagcacatctggtgtgaggacttcctggtgcgctccttctacctgaagaacctgcagaccaatgagaccaggacagtgacccagttccacttcctgtcctggtatgaccggggcgtgcccagcagcagccgcagcctgctggacttccggaggaaggtgaacaagtgctaccggggccgcagctgccccatcatcgtgcactgcagtgatggagctggccgcagcggcacctacgtgctgattgacatggtgctgaacaagatggccaagggggccaaggagattgatattgctgccaccctggagcacctgcgggaccagaggcctggcatggtgcagaccaaggagcagtttgaatttgccctgacagctgtggccgaggaggtgaatgccatcctgaaggccctgccccagtag

SEQ ID NO: 234355 - DNA, 2961 bp, Artificial Sequence
  derived and/or modified sequence
atgggcccccccctgcccctgctgctgctgctgctgctgctgctgccgccacgagtgttgcccgctgccccaagctcagtgccccgtggcaggcagctgcccggcagactaggatgtctcctggaggaggggctctgcggagcgtccgaggcttgcgtgaatgacggggtatttggcaggtgccagaaggttcccgccatggatttttacagatacgaggtttctcctgttgccctacaacggttacgggtggcacttcagaaactgtcaggaacaggttttacctggcaagatgactacactcagtacgtcatggaccaggaactggctgacctccctaaaacatatctccggaggcctgaggccagttcccccgctagacccagtaagcacagcgttgggtctgaacggaggtacagtcgcgaaggcggcgcagccctagccaacgctttgaggaggcacctaccctttctggaagctctttcccaggctcccgcctccgatgtgctagcccgaactcacaccgcccaggaccgcccacctgccgagggggacgatcggttcagcgagtccatcctcacttacgttgcccacacgagtgcccttacataccctccagggagtcggacacaactccgagaggatctactccctcgcaccctgggacagctgcagcccgacgaactcagcccaaaggtagactcaggcgttgatcgccatcatttgatggcggcactgtccgcttacgccgcccagagaccccctgccccgccaggagagggatcactagaaccacagtaccttctgagagctccttcaagaatgccaagacctctgctggccccggcggcaccacagaaatggccttcacctttgggagatagcgaggacccatcaagcacaggcgatggcgctaggattcacacactgctgaaagacctgcagagacagcctgcggaggtccggggactgagcggcctggaactcgacggcatggccgagctgatggccggtcttatgcagggcgtcgatcacggcgtggctagaggctctccgggcagagctgctctaggcgagtcaggggaacaggctgacgggcctaaggctactctcagaggagactcctttccggatgatggtgtgcaggatgacgatgacaggttgtaccaggaggttcaccgccttagcgctacgctgggggggctgctgcaggaccacggctcgcgcctcctcccaggagctctaccattcgcccgcccactcgatatggaacggaagaaaagcgaacatcccgagtcatcactcagtagtgaggaggagactgccggcgtagaaaacgtgaagtctcagacatatagcaaggacctcctgggacagcagccacatagcgaacctggcgccgctgcattcggcgaacttcagaaccagatgccaggcccatccaaagaggaacaatctctcccagccggtgcccaggaggcactgtctgacggtctccagctggaggtccagccctctgaggaggaagccaggggatatatcgttaccgatagggaggtcctagggcctgcagtgacatttaaggtctcagcgaacgtccaaaacgttactacagaggacgtggagaaagccaccgtggataacaaggacaaactggaggagacctcaggccttaagatcctccagacaggcgtggggtcaaagtcaaaattgaagttcctgccgccccaggccgagcaagaagactctaccaaattcattgccctcaccctcgtgtccttggcctgtatccttggcgtgctcctcgctagcggcctaatttactgtctgcgccacagtagccagcaccgacttaaagaaaaactgtccggcctaggcggagaccccggcgcagacgctactgcagcctatcaggagctgtgcaggcagcgaatggcaactcggcctcccgaccgaccagagggcccacataccagcaggatctccagcgtttcatcacagttctctgacggtcctataccttcaccttctgctcgttcctcggcctcctcgtggtctgaagagccggtgcaatccaatatggatatctctacaggacacatgatcctctcatacatggaggatcacctgaaaaacaagaatcggctggagaaggagtgggaggctctctgtgcttaccaagctgagcccaacagttctttcgtcgctcagcgcgaggaaaacgtccctaaaaaccggagccttgccgtgctaacctacgaccattcacgcgtccttctgaaggccgagaacagtcacagtcactccgactacatcaatgcctctcctatcatggatcacgatccacgcaaccccgcttatatcgccacccaggggcccctgcctgcaacggtagccgacttctggcagatggtctgggaaagcggttgtgtcgtcattgtaatgctcacaccactggctgaaaatggagtgagacagtgttatcactactggcctgacgaaggctccaacctgtatcatatctacgaggtaaatctggtgagcgaacatatctggtgtgaagactttctggtgaggtcattttacctcaagaatctgcagacgaacgagacacgtacagtgacccagttccacttcctgagttggtatgaccgcggagttccaagctctagtcgctctttgctcgacttcaggcgtaaggtgaataagtgctacaggggccgatcgtgtcctattatcgttcactgttctgacggtgcagggagaagcggaacgtacgtgcttatcgatatggtgctcaacaagatggccaaaggggccaaggaaattgatattgcggccactctcgaacatctgagggatcagcgacccggcatggtccaaacaaaagaacagttcgaattcgctctgactgcggtagccgaggaagtgaatgccatcctgaaggcattgccacagtag

SEQ ID NO: 234356 - DNA, 2961 bp, Artificial Sequence
  derived and/or modified sequence
atgggcccacccctgcccctgttgctgctgctgctgctgctcctgcctccaagagtcctgccggctgctcccagctcagtgcccagggggaggcaactccccggaaggttgggatgtctgcttgaagaagggctgtgtggagcttcagaggcctgcgtgaacgacggcgtgtttggcagatgccagaaggtgccagctatggacttttacaggtacgaagtatctcctgtcgcgctacagaggctccgagtggctcttcagaaactatcaggcacaggatttacatggcaggatgattacactcaatatgtgatggatcaggaactcgcagacctgccgaaaacctatcttagaagacctgaagcctcctccccggctagacctagtaaacactcagttggaagtgaacgacgctatagcagggaaggaggggctgcgctcgctaatgccttgcggcgacatctgccctttctggaagccctgagtcaagcaccagcctcggatgtgcttgcccgaacccatactgcccaggatcgaccaccagctgagggtgacgatcggttcagtgagagcatcttaacctacgtagcccacacctcagccctgacctacccgccaggcagtcgcacacagcttagggaagacctgcttccacgaaccctcgggcagttacagccggacgagctgtctccaaaagtggactcaggggtggaccgccaccatctaatggctgctctgtcggcatatgctgctcagagaccgccagcccctccgggtgaaggatccctagagcctcagtacctcctgagagccccttcccgcatgcccaggcccctattggcgccagcggcaccccagaagtggccttctcccctgggggattcagaggaccccagtagcacaggggacggtgctagaattcacaccctgctgaaagatcttcagaggcagcctgctgaagttagagggctctctggactcgagctggacgggatggcagagttgatggcaggattgatgcagggtgtggaccacggcgtggcaagagggagtccgggacgagcagccctcggggaatcaggggagcaggccgatggccctaaagctactctccggggtgattctttccccgatgacggggttcaggatgatgacgaccgactttaccaggaagtgcataggctctcagcaacactgggcggactactacaggaccatggttctcggctactccctggggctctacctttcgcacgccctctggacatggaacgaaagaagagtgagcaccctgaatctagcctgtcatcagaggaagagaccgctggggtcgagaacgtgaagagccaaacatactcaaaggaccttttgggccagcaaccgcattcagagccgggtgcggctgccttcggtgagcttcagaatcagatgcctgggccaagcaaggaagagcaatctttgcctgcaggagcccaggaagccctgagcgatggtttgcagttggaggtgcagccgtcagaggaagaagcccgagggtacatcgtcaccgatcgtgaggtcctaggccctgccgtgacattcaaagtctctgcaaatgtccagaatgtcaccaccgaggacgtcgaaaaagccactgtggataataaagataagctggaagagacctccgggctgaaaattctgcaaacaggggtaggttctaaatccaaactcaagtttctgcccccacaggcagagcaagaagattctaccaagttcatagcactgaccctggtgtccctggcttgcattttaggcgtgctcctggcatccggtctgatttattgtctaaggcattcttcacaacaccggttgaaggagaaactgtcaggtttggggggtgatcccggtgctgacgcaacggccgcttaccaggagctatgcagacagagaatggcgaccaggccaccagaccgtccagagggccctcatacctcccgaatcagctccgtgtcctcgcaattctccgacgggccaatcccaagcccctccgcacgaagcagtgccagtagctggtctgaagagcccgttcaaagcaatatggacattagcaccggacacatgatcctctcctacatggaagaccacctcaagaacaaaaacagactggagaaggagtgggaggctctgtgtgcatatcaggctgagccgaactccagcttcgtggctcagcgcgaagagaacgtaccaaaaaatcggtcacttgcagttctgacctatgaccacagtcgcgttctcctcaaggccgagaattcacattcacattcagattacatcaacgcctcccctatcatggaccatgaccctcgtaatcccgcttacatcgctactcagggcccactcccagcaacagtcgctgatttttggcagatggtttgggagagcggctgcgtggtgatcgtgatgctcacccccctcgcagaaaacggggttcgccagtgctatcattactggcccgatgaaggtagtaatctgtaccacatttacgaagtgaacttagtgagtgaacacatctggtgcgaggacttcctggtgcgcagcttctacctgaagaatctacagacaaacgagactcggaccgtgacccaatttcacttcctttcctggtacgacaggggggttccttcctccagtaggtctctgctagattttcggagaaaggtgaacaaatgttacagagggcgatcatgccccataatcgtgcattgtagtgatggtgccggaagaagtgggacttatgtactgatagacatggtgctgaataaaatggctaaaggggctaaagaaatcgatatcgccgcaactctcgagcatctcagggatcagcgcccaggaatggtgcagacgaaagagcagttcgaattcgcccttactgctgtggctgaggaggttaatgctatcttaaaagcactgccacagtag

SEQ ID NO: 234357 - DNA, 4723 bp, Artificial Sequence
  derived and/or modified sequence
ggcgggaggagccggcggcgcgcgcctccctgggcccggactcggccgcctcccgccgcctcccgcgcggccatggactgagcgccgccggccaggccgcggggatggggccgccgctcccgctgctgctgctgctactgctgctgctgccgccacgcgtcctgcctgccgccccttcgtccgtcccccgcggccggcagctcccggggcgtctgggctgcctgctcgaggagggcctctgcggagcgtccgaggcctgtgtgaacgatggagtgtttggaaggtgccagaaggttccggcaatggacttttaccgctacgaggtgtcgcccgtggccctgcagcgcctgcgcgtggcgttgcagaagctttccggcacaggtttcacgtggcaggatgactatactcagtatgtgatggaccaggaacttgcagacctcccgaaaacctacctgaggcgtcctgaagcatccagcccagccaggccctcaaaacacagcgttggcagcgagaggaggtacagtcgggagggcggtgctgccctggccaacgccctccgacgccacctgcccttcctggaggccctgtcccaggccccagcctcagacgtgctcgccaggacccatacggcgcaggacagaccccccgctgagggtgatgaccgcttctccgagagcatcctgacctatgtggcccacacgtctgcgctgacctaccctcccgggtcccggacccagctccgcgaggacctcctgccgcggaccctcggccagctccagccagatgagctcagccctaaggtggacagtggtgtggacagacaccatctgatggcggccctcagtgcctatgctgcccagaggcccccagctccccccggggagggcagcctggagccacagtaccttctgcgtgcaccctcaagaatgcccaggcctttgctggcaccagccgccccccagaagtggccttcacctctgggagattccgaagacccctccagcacaggcgatggagcacggattcataccctcctgaaggacctgcagaggcagccggctgaggtgaggggcctgagtggcctggagctggacggcatggctgagctgatggctggcctgatgcaaggcgtggaccatggagtagctcgaggcagccctgggagagcggccctgggagagtctggagaacaggcggatggccccaaggccaccctccgtggagacagctttccagatgacggagtgcaggacgacgatgatagactttaccaagaggtccatcgtctgagtgccacactcgggggcctcctgcaggaccacgggtctcgactcttacctggagccctcccctttgcaaggcccctcgacatggagaggaagaagtccgagcaccctgagtcttccctgtcttcagaagaggagactgccggagtggagaacgtcaagagccagacgtattccaaagatctgctggggcagcagccgcattcggagcccggggccgctgcgtttggggagctccaaaaccagatgcctgggccctcgaaggaggagcagagccttccagcgggtgctcaggaggccctcagcgacggcctgcaattggaggtccagccttccgaggaagaggcgcggggctacatcgtgacagacagagaggttctcggaccagcagtgaccttcaaagtgagcgccaatgtccaaaacgtgaccactgaggatgtggagaaggccacagttgacaacaaagacaaactggaggaaacctctggactgaaaattcttcaaaccggagtcgggtcgaaaagcaaactcaagttcctgcctcctcaggcggagcaagaagactccaccaagttcatcgcgctcaccctggtctccctcgcctgcatcctgggcgtcctcctggcctctggcctcatctactgcctccgccatagctctcagcacaggctgaaggagaagctctcgggactagggggcgacccaggtgcagatgccactgccgcctaccaggagctgtgccgccagcgtatggccacgcggccaccagaccgacctgagggcccgcacacgtcacgcatcagcagcgtctcatcccagttcagcgacgggccgatccccagcccctccgcacgcagcagcgcctcatcctggtccgaggagcctgtgcagtccaacatggacatctccaccggccacatgatcctgtcctacatggaggaccacctgaagaacaagaaccggctggagaaggagtgggaagcgctgtgcgcctaccaggcggagcccaacagctcgttcgtggcccagagggaggagaacgtgcccaagaaccgctccctggccgtgctgacctatgaccactcccgggtcctgctgaaggcggagaacagccacagccactcagactacatcaacgctagccccatcatggatcacgacccgaggaaccccgcgtacatcgccacccagggaccgctgcccgccaccgtggctgacttttggcagatggtgtgggagagcggctgcgtggtgatcgtcatgctgacacccctcgcggagaacggcgtccggcagtgctaccactactggccggatgaaggctccaatctctaccacatctatgaggtgaacctggtctccgagcacatctggtgtgaggacttcctggtgaggagcttctatctgaagaacctgcagaccaacgagacgcgcaccgtgacgcagttccacttcctgagttggtatgaccgaggagtcccttcctcctcaaggtccctcctggacttccgcagaaaagtaaacaagtgctacaggggccgttcttgtccaataattgttcattgcagtgacggtgcaggccggagcggcacctacgtcctgatcgacatggttctcaacaagatggccaaaggtgctaaagagattgatatcgcagcgaccctggagcacttgagggaccagagacccggcatggtccagacgaaggagcagtttgagttcgcgctgacagccgtggctgaggaggtgaacgccatcctcaaggcccttccccagtgagcggcagcctcaggggcctcaggggagcccccaccccacggatgttgtcaggaatcatgatctgactttaattgtgtgtcttctattataactgcatagtaatagggcccttagctctcccgtagtcagcgcagtttagcagttaaaagtgtatttttgtttaatcaaacaataataaagagagatttgtggaaaaatccagttacgggtggaggggaatcggttcatcaattttcacttgcttaaaaaaaatactttttcttaaagcacccgttcaccttcttggttgaagttgtgttaacaatgcagtagccagcacgttcgaggcggtttccaggaagagtgtgcttgtcatctgccactttcgggagggtggatccactgtgcaggagtggccggggaagctggcagcactcagtgaggccgcccggcacacaaggcacgtttggcatttctctttgagagagtttatcattgggagaagccgcagggacagaactgaacgtcctgcagcttcggggcaagtgagacaatcacagctcctcgctgcgtctccatcaacactgcgccgggtaccatggacggccccgtcagccacacctgtcagcccaagcagagtgattcaggggctccccgggggcagacacctgtgcaccccatgagtagtgcccacttgaggctggcactcccctgacctcacctttgcaaagttacagatgcaccccaacattgagatgtgtttttaatgttaaaatattgatttctacgttatgaaaacagatgcccccgtgaatgcttacctgtgagataaccacaaccaggaagaacaaatctgggcattgagcaagctatgagggtccccgggagcacacgaaccctgccaggcccccgctggctcctccaggcacgtcccggacctgtggggccccagagaggggacatttccctcctgggagagaaggagatcagggcaactcggagagggctgcgagcatttccctcccgggagaggagatcagggcgacctgcacgcactgcgtagagcctggaagggaagtgagaaaccagccgaccggccctgcccctcttcccgggatcacttaatgaaccacgtgttttgacatcatgtaaacctaagcacgtagagatgattcggatttgacaaaataacatttgagtatccgattcgccatcaccccctaccccagaaataggacaattcacttcattgaccaagatgatcacatggaaggcggcacagaggcagctgtgtgggctgcagatttcctgtgtggggttcagcgtagaaaacgcacctccatcccgcccttcccacagcattcctccatcttagatagatggtactctccaaaggccctaccagagggaacacggcctactgagcggacagaatgatgccaaaatattgcttatgtctctacatggtattgtaatgaatatctgctttaatatagctatcatttcttttccaaaattacttctctctatctggaatttaattaatcgaaatgaatttatctgaatataggaagcatatgcctacttgtaatttctaactccttatgtttgaagagaaacctccggtgtgagatatacaaatatatttaattgtgtcatattaaacttctgatttcaca

SEQ ID NO: 234358 - DNA, 2961 bp, Artificial Sequence
  derived and/or modified sequence
atgggcccccccctgcccctgctgctgctgctgctgctgctgctgccccccagagtgctgcccgccgcccccagcagcgtgcccagaggcagacagctgcccggcagactgggctgcctgctggaggagggcctgtgcggcgccagcgaggcctgcgtgaacgacggcgtgttcggcagatgccagaaggtgcccgccatggacttctacagatacgaggtgagccccgtggccctgcagagactgagagtggccctgcagaagctgagcggcaccggcttcacctggcaggacgactacacccagtacgtgatggaccaggagctggccgacctgcccaagacctacctgagaagacccgaggccagcagccccgccagacccagcaagcacagcgtgggcagcgagagaagatacagcagagagggcggcgccgccctggccaacgccctgagaagacacctgcccttcctggaggccctgagccaggcccccgccagcgacgtgctggccagaacccacaccgcccaggacagaccccccgccgagggcgacgacagattcagcgagagcatcctgacctacgtggcccacaccagcgccctgacctacccccccggcagcagaacccagctgagagaggacctgctgcccagaaccctgggccagctgcagcccgacgagctgagccccaaggtggacagcggcgtggacagacaccacctgatggccgccctgagcgcctacgccgcccagagaccccccgccccccccggcgagggcagcctggagccccagtacctgctgagagcccccagcagaatgcccagacccctgctggcccccgccgccccccagaagtggcccagccccctgggcgacagcgaggaccccagcagcaccggcgacggcgccagaatccacaccctgctgaaggacctgcagagacagcccgccgaggtgagaggcctgagcggcctggagctggacggcatggccgagctgatggccggcctgatgcagggcgtggaccacggcgtggccagaggcagccccggcagagccgccctgggcgagagcggcgagcaggccgacggccccaaggccaccctgagaggcgacagcttccccgacgacggcgtgcaggacgacgacgacagactgtaccaggaggtgcacagactgagcgccaccctgggcggcctgctgcaggaccacggcagcagactgctgcccggcgccctgcccttcgccagacccctggacatggagagaaagaagagcgagcaccccgagagcagcctgagcagcgaggaggagaccgccggcgtggagaacgtgaagagccagacctacagcaaggacctgctgggccagcagccccacagcgagcccggcgccgccgccttcggcgagctgcagaaccagatgcccggccccagcaaggaggagcagagcctgcccgccggcgcccaggaggccctgagcgacggcctgcagctggaggtgcagcccagcgaggaggaggccagaggctacatcgtgaccgacagagaggtgctgggccccgccgtgaccttcaaggtgagcgccaacgtgcagaacgtgaccaccgaggacgtggagaaggccaccgtggacaacaaggacaagctggaggagaccagcggcctgaagatcctgcagaccggcgtgggcagcaagagcaagctgaagttcctgcccccccaggccgagcaggaggacagcaccaagttcatcgccctgaccctggtgagcctggcctgcatcctgggcgtgctgctggccagcggcctgatctactgcctgagacacagcagccagcacagactgaaggagaagctgagcggcctgggcggcgaccccggcgccgacgccaccgccgcctaccaggagctgtgcagacagagaatggccaccagaccccccgacagacccgagggcccccacaccagcagaatcagcagcgtgagcagccagttcagcgacggccccatccccagccccagcgccagaagcagcgccagcagctggagcgaggagcccgtgcagagcaacatggacatcagcaccggccacatgatcctgagctacatggaggaccacctgaagaacaagaacagactggagaaggagtgggaggccctgtgcgcctaccaggccgagcccaacagcagcttcgtggcccagagagaggagaacgtgcccaagaacagaagcctggccgtgctgacctacgaccacagcagagtgctgctgaaggccgagaacagccacagccacagcgactacatcaacgccagccccatcatggaccacgaccccagaaaccccgcctacatcgccacccagggccccctgcccgccaccgtggccgacttctggcagatggtgtgggagagcggctgcgtggtgatcgtgatgctgacccccctggccgagaacggcgtgagacagtgctaccactactggcccgacgagggcagcaacctgtaccacatctacgaggtgaacctggtgagcgagcacatctggtgcgaggacttcctggtgagaagcttctacctgaagaacctgcagaccaacgagaccagaaccgtgacccagttccacttcctgagctggtacgacagaggcgtgcccagcagcagcagaagcctgctggacttcagaagaaaggtgaacaagtgctacagaggcagaagctgccccatcatcgtgcactgcagcgacggcgccggcagaagcggcacctacgtgctgatcgacatggtgctgaacaagatggccaagggcgccaaggagatcgacatcgccgccaccctggagcacctgagagaccagagacccggcatggtgcagaccaaggagcagttcgagttcgccctgaccgccgtggccgaggaggtgaacgccatcctgaaggccctgccccagtag

SEQ ID NO: 234359 - DNA, 1239 bp, Artificial Sequence
  derived and/or modified sequence
atgatcctgtacagactgaaggagagattccagctgagcctgagacaggacaaggagaagaaccaggagatccacctgagccccatcaccctgcagcccgccctgagcgaggccaagaccgtgcacagcatggtgcagcccgagcaggcccccaaggtgctgaacgtggtggtggacccccagggcagaggcgcccccgagatcaaggccaccaccgccaccagcgtgtgccccagccccttcaagatgaagcccatcggcctgcaggagagaagaggcagcaacgtgagcctgaccctggacatgagcagcctgggcaacatcgagcccttcgtgagcatccccacccccagagagaaggtggccatggagtacctgcagagcgccagcagaatcctgaccagaagccagctgagagacgtggtggccagcagccacctgctgcagagcgagttcatggagatccccatgaacttcgtggaccccaaggagatcgacatccccagacacggcaccaagaacagatacaagaccatcctgcccaaccccctgagcagagtgtgcctgagacccaagaacgtgaccgacagcctgagcacctacatcaacgccaactacatcagaggctacagcggcaaggagaaggccttcatcgccacccagggccccatgatcaacaccgtggacgacttctggcagatggtgtggcaggaggacagccccgtgatcgtgatgatcaccaagctgaaggagaagaacgagaagtgcgtgctgtactggcccgagaagagaggcatctacggcaaggtggaggtgctggtgatcagcgtgaacgagtgcgacaactacaccatcagaaacctggtgctgaagcagggcagccacacccagcacgtgaagcactactggtacaccagctggcccgaccacaagacccccgacagcgcccagcccctgctgcagctgatgctggacgtggaggaggacagactggccagccagggcagaggccccgtggtggtgcactgcagcgccggcatcggcagaaccggctgcttcatcgccaccagcatcggctgccagcagctgaaggaggagggcgtggtggacgccctgagcatcgtgtgccagctgagaatggacagaggcggcatggtgcagaccagcgagcagtacgagttcgtgcaccacgccctgtgcctgtacgagagcagactgagcgccgagaccgtgcagtag

SEQ ID NO: 234360 - DNA, 597 bp, Artificial Sequence
  derived and/or modified sequence
atgatcctgtacagactgaaggagagattccagctgagcctgagacaggacaaggagaagaaccaggagatccacctgagccccatcaccctgcagcccgccctgagcgaggccaagaccgtgcacagcatggtgcagcccgagcaggcccccaaggtgctgaacgtggtggtggacccccagggcagaggcgcccccgagatcaaggccaccaccgccaccagcgtgtgccccagccccttcaagatgaagcccatcggcctgcaggagagaagaggcagcaacgtgagcctgaccctggacatgagcagcctgggcaacatcgagcccttcgtgagcatccccacccccagagagaaggtggccatggagtacctgcagagcgccagcagaatcctgaccagaagccagctgagagacgtggtggccagcagccacctgctgcagagcgagttcatggagatccccatgaacttcgtggaccccaaggagatcgacatccccagacacggcaccaagaacagatacaagaccatcctgcccaaccccctgagcagagtgtgcctgagacccaagaacgtgaccgacagcctgtag

SEQ ID NO: 234361 - DNA, 1239 bp, Artificial Sequence
  derived and/or modified sequence
atgattttatatcgcctgaaagaacgcttccagctcagcctgcgacaggacaaggagaagaatcaggagattcacctctccccgatcaccttgcagcccgctcttagtgaagcaaaaaccgtacatagcatggtacagccggagcaggcccccaaagtgcttaacgtggtggtggacccgcagggccggggcgccccggaaatcaaggccacaactgcaacatccgtctgtccttctcctttcaaaatgaaacctatcggcctgcaggaacgcagggggtccaatgtttcattaactctggatatgagtagcttaggtaacattgagccatttgtctccatcccgacacccagggaaaaagtcgcgatggagtacctgcagtcagcctcgagaatcctcactcggtcgcagctgagggacgttgtggcgtctagccacctgctccagtcagagttcatggaaatccccatgaattttgtcgaccccaaggagatagatataccgcgtcacggcacgaaaaatagatacaagactatcctgccaaacccactgtccagagtgtgtctacgcccgaagaacgtaacagatagtctatccacctacattaatgcgaactatattcggggctacagcggcaaggagaaagcgttcatcgccacacagggacctatgattaatacggtcgatgacttctggcaaatggtttggcaggaggatagccctgtcattgtcatgattaccaagctaaaagaaaagaacgaaaagtgcgtgctgtactggccggaaaagcgaggaatctatgggaaggtcgaagtactggtaatctccgtgaatgaatgtgacaactatacaattcggaacttggtccttaagcagggttcccacacccagcacgttaagcactactggtacacgtcatggcctgatcataaaacgccagactcggcacagcccctgttgcagctgatgcttgacgtggaggaggacagactggccagccagggaaggggaccggtggttgtacattgctctgctggaatagggaggaccgggtgcttcattgctacctcaatcggatgccagcagctgaaggaggagggggtcgtcgacgctctaagcattgtttgtcagttgagaatggaccgcggtggcatggtgcagacttccgagcagtacgagtttgtccaccacgccttatgtttgtatgagtcccgtcttagcgccgagacggtacagtag

SEQ ID NO: 234362 - DNA, 1239 bp, Artificial Sequence
  derived and/or modified sequence
atgatcctttaccgcctgaaggagagatttcagttgtcactgcggcaggataaagagaagaatcaggagatccacctctcaccgattaccttacagcccgcactttcagaggctaagactgtgcactctatggtccagcccgaacaagcccctaaggtactgaacgtcgttgtggaccctcagggcaggggcgcccccgaaataaaggcaaccactgcaacgagcgtctgcccatcccctttcaaaatgaagcctataggactacaggaacgtcgagggtctaatgtcagtctgaccctggacatgtcaagtctggggaatattgaacccttcgtcagtattcctacaccacgagagaaggtggccatggaatatctccagtcggccagccgaatactcactcgtagtcaactacgagatgtggtggctagttcccacctgcttcagtcggagttcatggagattcctatgaattttgttgatccaaaggaaatcgacatacccagacacggaacgaagaacaggtataagaccatactcccaaatccactttcacgagtgtgccttcggcctaagaacgtgacggattctctgagtacttatatcaatgccaactatatccggggatactctggcaaagaaaaagcatttattgctacacaaggccctatgatcaacaccgtggacgacttttggcagatggtgtggcaagaagacagtccagttattgtgatgattacaaagctgaaggaaaaaaatgaaaaatgcgttctgtattggccggagaagagaggcatatatgggaaggtagaagtgcttgtgatcagtgttaatgaatgcgataattacaccatccggaacttggtcctgaaacagggcagtcacacgcagcatgtgaaacattattggtacacctcgtggccggaccataaaacgccagactctgctcagccgctgcttcaacttatgctggatgtcgaagaagaccgactggcatcacaaggtagaggccctgtggtcgtgcactgttccgccgggatcggtcggaccgggtgcttcatcgctacctccatcgggtgtcagcagctcaaggaagagggcgtggtggacgccctgtcaatagtgtgccagctgcgaatggaccggggggggatggttcagacttctgaacaatatgaattcgtgcaccacgcactttgtctttatgagagccgcctgagcgccgaaaccgtgcagtag

SEQ ID NO: 234363 - DNA, 597 bp, Artificial Sequence
  derived and/or modified sequence
atgattttgtatcgcctgaaggagcgctttcagttgtcgctccggcaagataaagagaaaaaccaggaaattcatttgtccccaatcacgctgcagcctgccctgtcagaggccaaaactgttcactctatggtccagcctgaacaggcacccaaagtgctgaacgtggtcgttgatcctcagggacgtggcgcacccgagatcaaagctaccaccgccacttcagtgtgcccttcacccttcaagatgaaacccataggattgcaggagaggagggggtccaacgttagcttgaccctcgatatgtcatctctgggtaatatcgagccattcgtaagcatccccacacccagagagaaggtcgctatggagtatttgcagagcgccagtcggatcttgaccaggtcccagctcagggacgtggtcgcttcatctcatctgctgcagtctgaattcatggagatcccaatgaactttgtggaccctaaggaaattgacataccccgccacggcaccaaaaaccgttataagactatcctacctaacccgttatccagggtttgtctccggcctaaaaacgttactgacagtctgtag

SEQ ID NO: 234364 - DNA, 1239 bp, Artificial Sequence
  derived and/or modified sequence
atgatcctgtaccgcctgaaggagcgcttccagctgagcctgcggcaggacaaggagaagaaccaggagatccacctgagccccatcaccctgcagcctgccctgtctgaggccaagacagtgcacagcatggtgcagcctgagcaggcccccaaggtgctgaatgtggtggtggacccccagggccgcggggcccctgagatcaaggccaccacagccacctctgtgtgccccagccccttcaagatgaagcccatcggcctgcaggagcggcggggcagcaatgtgtccctgaccctggacatgagcagcctgggcaacatcgagccctttgtgtccatccccaccccccgggagaaggtggccatggagtacctgcagagcgccagccgcatcctgaccaggagccagctgagagatgtggtggccagcagccacctgctgcagagcgagttcatggagatccccatgaactttgtggaccccaaggagattgacatccccaggcatggcaccaagaaccgctacaagaccatcctgcccaaccccctgagccgggtgtgcctgcggcccaagaatgtgacagacagcctgagcacctacatcaatgccaactacatccggggctacagcggcaaggagaaggccttcatcgccacccagggccccatgatcaacacagtggatgacttctggcagatggtgtggcaggaggacagccctgtgattgtgatgatcaccaagctgaaggagaagaatgaaaaatgtgtgctgtactggccagagaagaggggcatctacggcaaggtggaggtgctggtgatctctgtgaatgaatgtgacaactacaccatccggaacctggtgctgaagcagggcagccacacccagcacgtgaagcactactggtacacctcctggccagaccacaagaccccagattctgcccagcccctgctgcagctgatgctggatgtggaggaggaccggctggccagccagggccggggccctgtggtggtgcactgcagcgctggcattggaagaacaggctgcttcatcgccaccagcatcggctgccagcagctgaaggaggagggcgtggtggatgccctgagcatcgtgtgccagctgaggatggacagaggaggcatggtgcagaccagcgagcagtatgaatttgtgcaccacgccctgtgcctgtatgagagccggctgtctgctgagaccgtgcagtag

SEQ ID NO: 234365 - DNA, 597 bp, Artificial Sequence
  derived and/or modified sequence
atgatcctgtaccgcctgaaggagcgcttccagctgagcctgcggcaggacaaggagaagaaccaggagatccacctgagccccatcaccctgcagcctgccctgtctgaggccaagacagtgcacagcatggtgcagcctgagcaggcccccaaggtgctgaatgtggtggtggacccccagggccgcggggcccctgagatcaaggccaccacagccacctctgtgtgccccagccccttcaagatgaagcccatcggcctgcaggagcggcggggcagcaatgtgtccctgaccctggacatgagcagcctgggcaacatcgagccctttgtgtccatccccaccccccgggagaaggtggccatggagtacctgcagagcgccagccgcatcctgaccaggagccagctgagagatgtggtggccagcagccacctgctgcagagcgagttcatggagatccccatgaactttgtggaccccaaggagattgacatccccaggcatggcaccaagaaccgctacaagaccatcctgcccaaccccctgagccgggtgtgcctgcggcccaagaatgtgacagacagcctgtag

SEQ ID NO: 234366 - DNA, 1239 bp, Artificial Sequence
  derived and/or modified sequence
atgatcctgtaccggctgaaggagcggttccagctgagcctgcggcaagacaaagagaagaaccaggagatccatttgagcccgatcactcttcagccagccctcagtgaggcgaaaacagtccattccatggtccaacccgagcaagctcccaaggttttaaatgtggtggtggacccccaaggcagaggtgccccagaaattaaagccaccaccgccacttcagtatgcccatctcccttcaaaatgaagcccattggtctgcaggagcgccgggggtccaacgtgtctttgacactggacatgtcttctctgggtaacattgagccattcgtgtctattcctaccccccgagagaaggtggcaatggagtacctgcagtccgccagccggatccttacccggtcacagctacgggatgtcgttgccagcagtcacctgttgcagagtgaatttatggagatccctatgaacttcgtcgaccccaaagagatcgacatcccacggcacggcacaaaaaaccgctacaagacaattttgccgaaccctctgagccgtgtgtgcttacgacccaagaatgttactgactccctctcaacctatatcaacgcaaactacatcagaggatacagtgggaaggaaaaagcgtttattgctactcaaggccccatgataaacacagtggatgacttctggcaaatggtttggcaggaggactccccggtaatcgtgatgatcactaaactcaaagagaaaaacgagaaatgcgtgctgtattggcctgagaaacgtgggatttatggtaaggtggaggtcctggtaatctcagtcaacgagtgcgataactacaccatccgtaatctcgttctgaaacaagggtcgcacacacagcacgtcaagcattattggtacacttcttggccagaccataagacccccgacagtgcgcagcctttacttcaacttatgcttgacgttgaggaagataggcttgcatcacaggggcgtggtcctgtggtcgtccactgttccgccggaatcggcaggaccggatgcttcatcgccacctctattggctgccagcaactgaaggaggagggagtcgtagatgccttgtctattgtatgccagctgcgcatggacaggggaggtatggttcagacatctgagcagtacgagtttgtacaccatgcactgtgtctgtacgagagtcggctgtctgcggagacggttcagtag

SEQ ID NO: 234367 - DNA, 1239 bp, Artificial Sequence
  derived and/or modified sequence
atgatcctgtaccggctgaaggagcggttccagctgagcctgcggcaggataaggagaaaaaccaggagatccacttgagtcccatcaccctgcagcctgctttaagtgaggccaaaactgtccattcaatggtacagcctgagcaggcccctaaagtgctcaacgttgtggtggatccccagggccgcggtgccccggaaataaaagctactacagccacatctgtatgtccgagccccttcaaaatgaagccgataggactgcaggagaggaggggatctaatgtgtctttgacgttggatatgagctcccttggaaatatcgaaccattcgtgagcatcccgacaccacgcgaaaaggtggccatggagtacctgcaatccgcatccagaattctaacccggagtcagctccgcgacgtagtggcatcgtcacacctgcttcagagcgaattcatggagatccctatgaattttgtggatccaaaggaaattgacattccacggcacggaacaaaaaatcggtataagactatcttgcccaaccctctgagcagagtctgtctgcgaccaaagaacgtgaccgattctctatcaacgtatatcaatgccaattacattaggggctattcaggcaaggaaaaagctttcattgccacacagggtcccatgattaataccgttgatgatttctggcagatggtctggcaagaagacagccctgttatcgtgatgatcactaagctaaaagagaaaaatgaaaagtgcgtattgtactggccagagaagagagggatctatggaaaagtggaggtcctcgtgattagcgtcaacgagtgtgataactataccatccgcaaccttgttttaaaacagggatcccacacacagcatgtcaagcattactggtacacaagctggccggatcacaaaactccggatagcgcccagccactgctccagctcatgcttgacgtggaggaggatcgtctggcatctcaaggccggggtcctgttgtcgtgcactgctccgctggcattggacgcacaggatgcttcatcgctacctccatcggctgccagcaactcaaggaagagggcgtggtcgacgctctgagcatcgtgtgccaactgagaatggacagaggggggatggtgcagacttcagagcagtacgagttcgttcatcatgccctctgtctctacgaaagtaggctgtcagcggagaccgttcaatag

SEQ ID NO: 234368 - DNA, 597 bp, Artificial Sequence
  derived and/or modified sequence
atgatcctgtaccggctgaaggagcggttccagctgagcctgcggcaggacaaggaaaagaaccaggagatccacctctcacccatcaccttgcagccggccctgtccgaagccaagactgtccattcaatggtgcagcctgaacaggctcctaaggtcctaaacgtcgtggtagaccctcagggacggggcgccccggaaattaaggccacaacagcaacgtctgtgtgcccgtccccattcaaaatgaaaccgattgggcttcaagagaggaggggtagtaacgtctccctgaccctggacatgtccagcctgggcaatattgagccattcgtcagtatccccactccacgggagaaagttgccatggagtatctccagtcagcctcacgtattctgacccgctcccaacttcgggatgtagtggcctccagccatctgctgcagtcagaatttatggagatcccaatgaattttgtggatcccaaggagattgacatccctcggcatggtaccaagaaccggtacaagacaattctgcccaatcccctcagtcgggtgtgtctccgccccaaaaacgtgacagactcactgtag

SEQ ID NO: 234369 - DNA, 1239 bp, Artificial Sequence
  derived and/or modified sequence
atgattctgtatcgacttaaggagcgcttccagctgagcctgcggcaagataaagagaaaaatcaggaaatccacctcagcccaattacgctgcagcccgcattgagcgaagcaaaaactgttcatagcatggttcagcccgagcaggctccaaaagtccttaatgtcgtggtggacccacagggtcgaggcgctccggagattaaggccaccacagccacttccgtgtgtccatcaccatttaagatgaagcccattggactgcaagagcgcaggggctccaacgtatccttaacactggacatgagctccctagggaatattgagccatttgtaagcatcccaacccccagagagaaagtggcaatggagtacctgcagagtgcgtcccgtatccttacaagatcccagttgagagatgtggtcgctagctctcatctgttgcagtctgaatttatggaaatacctatgaactttgtggatccgaaggaaatcgacatacctcgccacggcactaagaacagatacaagaccatcctgcctaatccgctaagtcgcgtgtgcctgcgacctaagaacgtaactgacagcctttcaacttacataaacgccaactacattaggggctattccggcaaggagaaagccttcattgccacacaggggccaatgatcaacactgtggacgatttttggcagatggtttggcaggaggactcccctgtcatcgtgatgatcaccaaacttaaagagaaaaatgagaagtgtgttttatactggcctgagaagaggggtatttatggtaaagtggaagtgctggtcatctctgtcaacgagtgtgacaattacacgatccgaaatctcgttcttaagcagggtagtcacactcagcatgtcaagcattactggtacacatcgtggcccgaccacaaaactccagatagcgcacaacccctgctgcagctgatgctggacgttgaagaagacagactggcatctcagggccgtggtcccgttgtcgttcactgcagcgcgggaatagggaggacaggttgtttcatcgccacaagcattggttgtcagcaactaaaggaagagggcgtagtcgacgcattatctatcgtatgccagcttcgcatggatagaggagggatggtgcagacctccgaacagtatgaattcgtacatcacgccctttgtctgtatgagtccaggctctcggctgaaacagtccagtag

SEQ ID NO: 234370 - DNA, 1239 bp, Artificial Sequence
  derived and/or modified sequence
atgatcttatataggctaaaagagagatttcagctgagcctccgtcaggataaggaaaaaaatcaagagatccacctgtcaccaatcacgcttcagccagcgctatccgaggccaaaactgtgcacagtatggtacagcccgaacaggccccaaaggtgctgaatgtagtcgtcgatccccaggggaggggggcacctgaaatcaaggctaccactgccacatccgtgtgcccgagcccattcaagatgaaaccaattggcctgcaggagagacggggttctaacgtatcgcttactcttgacatgtccagcctgggcaacattgagccatttgtatccatacctaccccaagggaaaaggttgcaatggagtatttgcagtccgcctctcggattctcaccaggtcccagctgagggatgtggtggctagctcccacctgcttcagtccgaatttatggagatccctatgaactttgtggatccaaaggagattgatatccctcgccacggaactaagaatcgttacaagaccattctgcctaacccactgtcacgggtgtgcctcaggccaaaaaatgtcaccgactctctatccacttacattaacgccaactacataaggggatactcaggaaaggagaaagccttcatcgccacacaggggcctatgattaatacggtcgatgatttttggcagatggtctggcaggaggattcaccggttattgtgatgattactaaactgaaggaaaagaacgagaagtgtgtcctgtactggcctgagaagagggggatctatgggaaagtagaagtgttggtgattagcgtgaatgagtgtgataactacacaatcaggaacctggtgctgaagcaagggtcacacacccaacatgtcaagcactattggtacacttcctggcctgatcataaaacaccagactccgcccagccactgttgcaacttatgctggacgtggaagaggatagactagcatcccaagggcgtggtcccgtggttgtgcactgctctgcaggcatcggacgtacaggctgctttatagccaccagcattggctgccaacaactcaaggaagagggggtcgtcgatgcgctgagcattgtgtgccagctaagaatggacaggggcggaatggtacagaccagcgaacagtacgaatttgtgcaccacgctttatgtctttatgagagccgcctttccgcggaaacggtgcagtag

SEQ ID NO: 234371 - DNA, 597 bp, Artificial Sequence
  derived and/or modified sequence
atgatcctgtatcgattaaaagaacggtttcagctgagcctgcggcaggataaagagaagaatcaggagattcacctgagcccaatcactctgcagcctgcgctttccgaggctaagaccgtgcattccatggtgcagcctgaacaggcccctaaagtactgaacgtagttgtggaccctcaaggacggggtgctcctgagattaaagctaccaccgccacttccgtctgccccagtccgttcaagatgaaaccaattggtctccaagaaagaagaggaagcaatgtctctttgactctggatatgtccagcctcgggaatatcgagcccttcgtgagtattcccacccctagggagaaggtagccatggagtatctgcagagtgcatcccgcattctcaccagatcccagctccgggacgtggtggctagtagtcacctactacagtctgagttcatggaaatccccatgaattttgtcgaccctaaagagatagatatccctagacacggaactaagaaccgatataagacgattctcccaaatcccttatcacgggtatgcctgcgccctaagaatgtgacagattccctctag

SEQ ID NO: 234372 - protein, 543 aa, Artificial Sequence
  derived and/or modified sequence
MWRAKLRRGTCEPAVKGSPSACYSPSSPVQVLEDSTYFSPDFQLYSGRHETSALTVEATSSIREKVVEDPLCNFHSPNFLRISEVEMRGSEDAAAGTVLQRLIQEQLRYGTPTENMNLLAIQHQATGSAGPAHPTNNFSSTENLTQEDPQMVYQSARQEPQGQEHQVDNTVMEKQVRSTQPQQNNEELPTYEEAKAQSQFFRGQQQQQQQQGAVGHGYYMAGGTSQKSRTEGRPTVNRANSGQAHKDEALKELKQGHVRSLSERIMQLSLERNGAKQHLPGSGNGKGFKVGGGPSPAQPAGKVLDPRGPPPEYPFKTKQMMSPVSKTQEHGLFYGDQHPGMLHEMVKPYPAPQPVRTDVAVLRYQPPPEYGVTSRPCQLPFPSTMQQHSPMNFRTSLTSSQLAEEKKEEKTWKGSIGLLLGKEHHEHASAPLLPPPPTSALSSIASTTAASSAHAKTGSKDSSTQTDKSAELFWPSMASLPSRGRLSTTPAHSPVLKHPAAKGTAEKLENSPGHGKSPDHRGRVSSLLHKPEFPDGEMMEVLI

SEQ ID NO: 234373 - protein, 956 aa, Artificial Sequence
  derived and/or modified sequence
MWRAKLRRGTCEPAVKGSPSACYSPSSPVQVLEDSTYFSPDFQLYSGRHETSALTVEATSSIREKVVEDPLCNFHSPNFLRISEVEMRGSEDAAAGTVLQRLIQEQLRYGTPTENMNLLAIQHQATGSAGPAHPTNNFSSTENLTQEDPQMVYQSARQEPQGQEHQVDNTVMEKQVRSTQPQQNNEELPTYEEAKAQSQFFRGQQQQQQQQGAVGHGYYMAGGTSQKSRTEGRPTVNRANSGQAHKDEALKELKQGHVRSLSERIMQLSLERNGAKQHLPGSGNGKGFKVGGGPSPAQPAGKVLDPRGPPPEYPFKTKQMMSPVSKTQEHGLFYGDQHPGMLHEMVKPYPAPQPVRTDVAVLRYQPPPEYGVTSRPCQLPFPSTMQQHSPMSSQTSSASGPLHSVSLPLPLPMALGAPQPPPAASPSQQLGPDAFAIVERAQQMVEILTEENRVLHQELQGYYDNADKLHKFEKELQRISEAYESLVKSTTKRESLDKAMRNKLEGEIRRLHDFNRDLRDRLETANRQLSSREYEGHEDKAAEGHYASQNKEFLKEKEKLEMELAAVRTASEDHRRHIEILDQALSNAQARVIKLEEELREKQAYVEKVEKLQQALTQLQSACEKREQMERRLRTWLERELDALRTQQKHGNGQPANMPEYNAPALLELVREKEERILALEADMTKWEQKYLEESTIRHFAMNAAATAAAERDTTIINHSRNGSYGESSLEAHIWQEEEEVVQANRRCQDMEYTIKNLHAKIIEKDAMIKVLQQRSRKDAGKTDSSSLRPARSVPSIAAATGTHSRQTSLTSSQLAEEKKEEKTWKGSIGLLLGKEHHEHASAPLLPPPPTSALSSIASTTAASSAHAKTGSKDSSTQTDKSAELFWPSMASLPSRGRLSTTPAHSPVLKHPAAKGTAEKLENSPGHGKSPDHRGRVSSLLHKPEFPDGEMMEVLI

SEQ ID NO: 234374 - protein, 611 aa, Artificial Sequence
  derived and/or modified sequence
TSHDRLMWRAKLRRGTCEPAVKGSPSACYSPSSPVQVLEDSTYFSPDFQLYSGRHETSALTVEATSSIREKVVEDPLCNFHSPNFLRISEVEMRGSEDAAAGTVLQRLIQEQLRYGTPTENMNLLAIQHQATGSAGPAHPTNNFSSTENLTQEDPQMVYQSARQEPQGQEHQVDNTVMEKQVRSTQPQQNNEELPTYEEAKAQSQFFRGQQQQQQQQGAVGHGYYMAGGTSQKSRTEGRPTVNRANSGQAHKDEALKELKQGHVRSLSERIMQLSLERNGAKQHLPGSGNGKGFKVGGGPSPAQPAGKVLDPRGPPPEYPFKTKQMMSPVSKTQEHGLFYGDQHPGMLHEMVKPYPAPQPVRTDVAVLRYQPPPEYGVTSRPCQLPFPSTMQQHSPMSSQTSSASGPLHSVSLPLPLPMALGAPQPPPAASPSQQLGPDAFAIVERAQQMVEILTEENRVLHQELQGYYDNADKLHKFEKELQRISEAYESLVKSTTKRESLDKAMRNKLEGEIRRLHDFNRDLRDRLETANRQLSSREYEGHEDKAAEGHYASQNKEFLKEKEKLEMELAAVRTASEDHRRHIEILDQALSNAQARHQAGRGVTREASIC

SEQ ID NO: 234375 - DNA, 1632 bp, Artificial Sequence
  derived and/or modified sequence
atgtggagagccaagctgagaagaggcacctgcgagcccgccgtgaagggcagccccagcgcctgctacagccccagcagccccgtgcaggtgctggaggacagcacctacttcagccccgacttccagctgtacagcggcagacacgagaccagcgccctgaccgtggaggccaccagcagcatcagagagaaggtggtggaggaccccctgtgcaacttccacagccccaacttcctgagaatcagcgaggtggagatgagaggcagcgaggacgccgccgccggcaccgtgctgcagagactgatccaggagcagctgagatacggcacccccaccgagaacatgaacctgctggccatccagcaccaggccaccggcagcgccggccccgcccaccccaccaacaacttcagcagcaccgagaacctgacccaggaggacccccagatggtgtaccagagcgccagacaggagccccagggccaggagcaccaggtggacaacaccgtgatggagaagcaggtgagaagcacccagccccagcagaacaacgaggagctgcccacctacgaggaggccaaggcccagagccagttcttcagaggccagcagcagcagcagcagcagcagggcgccgtgggccacggctactacatggccggcggcaccagccagaagagcagaaccgagggcagacccaccgtgaacagagccaacagcggccaggcccacaaggacgaggccctgaaggagctgaagcagggccacgtgagaagcctgagcgagagaatcatgcagctgagcctggagagaaacggcgccaagcagcacctgcccggcagcggcaacggcaagggcttcaaggtgggcggcggccccagccccgcccagcccgccggcaaggtgctggaccccagaggccccccccccgagtaccccttcaagaccaagcagatgatgagccccgtgagcaagacccaggagcacggcctgttctacggcgaccagcaccccggcatgctgcacgagatggtgaagccctaccccgccccccagcccgtgagaaccgacgtggccgtgctgagataccagcccccccccgagtacggcgtgaccagcagaccctgccagctgcccttccccagcaccatgcagcagcacagccccatgaacttcagaaccagcctgaccagcagccagctggccgaggagaagaaggaggagaagacctggaagggcagcatcggcctgctgctgggcaaggagcaccacgagcacgccagcgcccccctgctgccccccccccccaccagcgccctgagcagcatcgccagcaccaccgccgccagcagcgcccacgccaagaccggcagcaaggacagcagcacccagaccgacaagagcgccgagctgttctggcccagcatggccagcctgcccagcagaggcagactgagcaccacccccgcccacagccccgtgctgaagcaccccgccgccaagggcaccgccgagaagctggagaacagccccggccacggcaagagccccgaccacagaggcagagtgagcagcctgctgcacaagcccgagttccccgacggcgagatgatggaggtgctgatctag

SEQ ID NO: 234376 - DNA, 2871 bp, Artificial Sequence
  derived and/or modified sequence
atgtggagagccaagctgagaagaggcacctgcgagcccgccgtgaagggcagccccagcgcctgctacagccccagcagccccgtgcaggtgctggaggacagcacctacttcagccccgacttccagctgtacagcggcagacacgagaccagcgccctgaccgtggaggccaccagcagcatcagagagaaggtggtggaggaccccctgtgcaacttccacagccccaacttcctgagaatcagcgaggtggagatgagaggcagcgaggacgccgccgccggcaccgtgctgcagagactgatccaggagcagctgagatacggcacccccaccgagaacatgaacctgctggccatccagcaccaggccaccggcagcgccggccccgcccaccccaccaacaacttcagcagcaccgagaacctgacccaggaggacccccagatggtgtaccagagcgccagacaggagccccagggccaggagcaccaggtggacaacaccgtgatggagaagcaggtgagaagcacccagccccagcagaacaacgaggagctgcccacctacgaggaggccaaggcccagagccagttcttcagaggccagcagcagcagcagcagcagcagggcgccgtgggccacggctactacatggccggcggcaccagccagaagagcagaaccgagggcagacccaccgtgaacagagccaacagcggccaggcccacaaggacgaggccctgaaggagctgaagcagggccacgtgagaagcctgagcgagagaatcatgcagctgagcctggagagaaacggcgccaagcagcacctgcccggcagcggcaacggcaagggcttcaaggtgggcggcggccccagccccgcccagcccgccggcaaggtgctggaccccagaggccccccccccgagtaccccttcaagaccaagcagatgatgagccccgtgagcaagacccaggagcacggcctgttctacggcgaccagcaccccggcatgctgcacgagatggtgaagccctaccccgccccccagcccgtgagaaccgacgtggccgtgctgagataccagcccccccccgagtacggcgtgaccagcagaccctgccagctgcccttccccagcaccatgcagcagcacagccccatgagcagccagaccagcagcgccagcggccccctgcacagcgtgagcctgcccctgcccctgcccatggccctgggcgccccccagcccccccccgccgccagccccagccagcagctgggccccgacgccttcgccatcgtggagagagcccagcagatggtggagatcctgaccgaggagaacagagtgctgcaccaggagctgcagggctactacgacaacgccgacaagctgcacaagttcgagaaggagctgcagagaatcagcgaggcctacgagagcctggtgaagagcaccaccaagagagagagcctggacaaggccatgagaaacaagctggagggcgagatcagaagactgcacgacttcaacagagacctgagagacagactggagaccgccaacagacagctgagcagcagagagtacgagggccacgaggacaaggccgccgagggccactacgccagccagaacaaggagttcctgaaggagaaggagaagctggagatggagctggccgccgtgagaaccgccagcgaggaccacagaagacacatcgagatcctggaccaggccctgagcaacgcccaggccagagtgatcaagctggaggaggagctgagagagaagcaggcctacgtggagaaggtggagaagctgcagcaggccctgacccagctgcagagcgcctgcgagaagagagagcagatggagagaagactgagaacctggctggagagagagctggacgccctgagaacccagcagaagcacggcaacggccagcccgccaacatgcccgagtacaacgcccccgccctgctggagctggtgagagagaaggaggagagaatcctggccctggaggccgacatgaccaagtgggagcagaagtacctggaggagagcaccatcagacacttcgccatgaacgccgccgccaccgccgccgccgagagagacaccaccatcatcaaccacagcagaaacggcagctacggcgagagcagcctggaggcccacatctggcaggaggaggaggaggtggtgcaggccaacagaagatgccaggacatggagtacaccatcaagaacctgcacgccaagatcatcgagaaggacgccatgatcaaggtgctgcagcagagaagcagaaaggacgccggcaagaccgacagcagcagcctgagacccgccagaagcgtgcccagcatcgccgccgccaccggcacccacagcagacagaccagcctgaccagcagccagctggccgaggagaagaaggaggagaagacctggaagggcagcatcggcctgctgctgggcaaggagcaccacgagcacgccagcgcccccctgctgccccccccccccaccagcgccctgagcagcatcgccagcaccaccgccgccagcagcgcccacgccaagaccggcagcaaggacagcagcacccagaccgacaagagcgccgagctgttctggcccagcatggccagcctgcccagcagaggcagactgagcaccacccccgcccacagccccgtgctgaagcaccccgccgccaagggcaccgccgagaagctggagaacagccccggccacggcaagagccccgaccacagaggcagagtgagcagcctgctgcacaagcccgagttccccgacggcgagatgatggaggtgctgatctag

SEQ ID NO: 234377 - DNA, 1836 bp, Artificial Sequence
  derived and/or modified sequence
accagccacgacagactgatgtggagagccaagctgagaagaggcacctgcgagcccgccgtgaagggcagccccagcgcctgctacagccccagcagccccgtgcaggtgctggaggacagcacctacttcagccccgacttccagctgtacagcggcagacacgagaccagcgccctgaccgtggaggccaccagcagcatcagagagaaggtggtggaggaccccctgtgcaacttccacagccccaacttcctgagaatcagcgaggtggagatgagaggcagcgaggacgccgccgccggcaccgtgctgcagagactgatccaggagcagctgagatacggcacccccaccgagaacatgaacctgctggccatccagcaccaggccaccggcagcgccggccccgcccaccccaccaacaacttcagcagcaccgagaacctgacccaggaggacccccagatggtgtaccagagcgccagacaggagccccagggccaggagcaccaggtggacaacaccgtgatggagaagcaggtgagaagcacccagccccagcagaacaacgaggagctgcccacctacgaggaggccaaggcccagagccagttcttcagaggccagcagcagcagcagcagcagcagggcgccgtgggccacggctactacatggccggcggcaccagccagaagagcagaaccgagggcagacccaccgtgaacagagccaacagcggccaggcccacaaggacgaggccctgaaggagctgaagcagggccacgtgagaagcctgagcgagagaatcatgcagctgagcctggagagaaacggcgccaagcagcacctgcccggcagcggcaacggcaagggcttcaaggtgggcggcggccccagccccgcccagcccgccggcaaggtgctggaccccagaggccccccccccgagtaccccttcaagaccaagcagatgatgagccccgtgagcaagacccaggagcacggcctgttctacggcgaccagcaccccggcatgctgcacgagatggtgaagccctaccccgccccccagcccgtgagaaccgacgtggccgtgctgagataccagcccccccccgagtacggcgtgaccagcagaccctgccagctgcccttccccagcaccatgcagcagcacagccccatgagcagccagaccagcagcgccagcggccccctgcacagcgtgagcctgcccctgcccctgcccatggccctgggcgccccccagcccccccccgccgccagccccagccagcagctgggccccgacgccttcgccatcgtggagagagcccagcagatggtggagatcctgaccgaggagaacagagtgctgcaccaggagctgcagggctactacgacaacgccgacaagctgcacaagttcgagaaggagctgcagagaatcagcgaggcctacgagagcctggtgaagagcaccaccaagagagagagcctggacaaggccatgagaaacaagctggagggcgagatcagaagactgcacgacttcaacagagacctgagagacagactggagaccgccaacagacagctgagcagcagagagtacgagggccacgaggacaaggccgccgagggccactacgccagccagaacaaggagttcctgaaggagaaggagaagctggagatggagctggccgccgtgagaaccgccagcgaggaccacagaagacacatcgagatcctggaccaggccctgagcaacgcccaggccagacaccaggccggcagaggcgtgaccagagaggccagcatctgctag

SEQ ID NO: 234378 - DNA, 1632 bp, Artificial Sequence
  derived and/or modified sequence
atgtggagagccaaactgcgacggggtacatgcgaacccgcggtgaagggttccccttcggcgtgttattcaccaagtagtccagtccaggtgttggaggacagtacatacttttccccggactttcagctctattctggccgtcatgagacttccgccctgacagttgaggcaacatcaagcattcgcgagaaagtagtggaagatcccctgtgcaatttccactctccaaacttccttcggatctcggaagtagagatgaggggcagcgaggatgctgctgctggaaccgttctccaacggctgatccaagaacagctgcggtacggcaccccaactgagaatatgaatctgctggccattcagcaccaagccaccggtagcgcgggacccgcacacccaaccaataattttagttctacagaaaacctgacacaggaggatccccagatggtctatcagtctgctcgacaggagcctcagggccaggagcaccaggtggacaatactgtcatggagaaacaagtgagatctacccagccacagcaaaataatgaagaactgcctacgtacgaagaggccaaagctcagtcccagttctttaggggtcagcagcaacagcaacagcagcagggggcggtgggccatggctattacatggcagggggaactagtcagaaatccaggaccgaggggagaccaactgtcaatcgtgccaattccggccaggcccacaaagacgaggcactaaaggaactcaagcaaggacacgtgcgcagtctcagtgagagaataatgcagctgtcattggagcggaacggcgcaaaacaacacctgcctggaagcggaaatggtaaggggttcaaggtgggcggtggtccaagtcctgcacagcctgcaggcaaagtcttggatcctagaggcccacccccggagtacccgttcaagaccaaacaaatgatgtcacccgtgagtaagacacaggaacacggactgttttacggtgatcaacatcctggcatgttgcacgaaatggtgaagccataccccgcgccccagcctgtgcgaacagacgtggcagttttgcggtatcaaccacctcccgagtatggagtgactagcagaccttgccaactcccttttccttcaactatgcagcagcattcacccatgaatttcaggacgagcctaaccagtagtcagctcgccgaagaaaagaaagaggaaaagacttggaagggctcaattggtttactgctgggcaaggaacaccacgaacacgcaagcgctcctctgcttcctcccccaccaacgagcgccctctcttcaatcgcatccactacggcggcatccagcgcacacgctaaaacgggatctaaggactcctcaacgcaaacagacaagagtgctgagctgttctggccatcgatggcttccctgccatctcgaggccgcctgagtacaacacctgcccatagccctgtgctcaagcaccctgcagcgaagggcactgccgaaaagcttgagaacagtccaggtcacggtaaatcaccagaccaccggggtagagtgagctccctcctgcataagcccgagttcccggatggcgaaatgatggaagtgcttatctag

SEQ ID NO: 234379 - DNA, 2871 bp, Artificial Sequence
  derived and/or modified sequence
atgtggagggctaaactgcgcagaggcacctgtgaacccgccgttaagggaagcccgagtgcatgttattctccctcatcacctgtccaagtcctcgaggactccacttatttttccccggacttccagttgtatagcggccggcacgagacaagcgccctgacagtagaggctacttcttctatccgcgaaaaggtggttgaggaccccttgtgtaactttcacagtccaaacttcctgcggatcagcgaggtcgaaatgcgaggatcggaggatgccgcggccggtaccgtgctccaaaggctgattcaggaacagcttagatatggcacgcctactgaaaacatgaacctcttagctatacagcaccaggccaccggctctgccggccccgcccaccccactaataatttttcctctaccgaaaacctgactcaagaggacccacaaatggtgtatcagagcgcgagacaggaaccccagggccaggaacaccaggtggataacaccgtaatggagaagcaggttcggtctacgcagccccagcagaacaacgaagaactgccaacatacgaagaggctaaagcccagtcccagtttttcagaggccagcagcagcagcagcagcaacagggggcagtgggtcatggatactacatggccggtggcacgagccagaagtcccgcactgagggaagacccacagtaaacagggccaattccggccaggcccacaaggacgaggctctcaaggagctcaagcaagggcacgttcgctcactgtccgaacgcattatgcagctctcgctggagcgcaacggagcgaagcagcacctgccaggaagcggaaacggcaagggattcaaagttggcggtgggccctccccagctcagccggccgggaaggtgctggatcccagaggccccccccccgagtatccctttaaaactaagcagatgatgagccctgtatccaaaactcaggaacatggtctgttttacggtgatcaacatccagggatgcttcacgagatggtcaagccgtatcccgctccacaaccggttcgcaccgacgtggctgtccttaggtatcagccacctcccgagtacggtgtgacgagccggccctgtcaacttccctttccttccactatgcaacagcattcccctatgtctagccagacaagcagtgcgagcggccctctgcattcggtcagtctgcccctgcccctccccatggcccttggcgccccacagccaccgcccgcagcctctccatctcagcagctggggccagatgcctttgcaattgtcgaaagggcccagcagatggtggaaatattgacggaagagaacagggtgcttcatcaagaactgcaaggctattatgataacgccgacaaactccataaattcgagaaggaactgcagagaatttcggaagcctacgaatcactggtgaaaagcacaacgaaaagggaatctctcgacaaggccatgcgtaataagctggagggtgaaattcgacgcctgcacgacttcaaccgcgacctgcgggaccgcctagagaccgcaaataggcagctatcgtctagagagtacgagggccatgaagacaaggccgccgagggacactacgcatcacagaataaagaattcctgaaagagaaagagaagttggaaatggaattggccgcagtgagaactgcctccgaggaccacaggcgccacatagaaatactggaccaggcactttccaatgcacaagcccgggtaattaagcttgaagaagagctccgagaaaaacaagcatacgtcgaaaaggtggaaaaattacagcaggccttaacacagctgcaaagtgcctgcgaaaagcgcgagcagatggagcgccggctaagaacctggctggagagggagctggacgcactaagaactcagcagaagcatggtaacggacagcctgctaacatgcccgagtacaacgcccctgcccttttggaactagttcgcgagaaggaagaacgaattctggcgcttgaggccgacatgactaagtgggaacagaaatacttggaggagagcaccatacgccattttgccatgaatgccgccgccaccgctgccgcagagcgagatacaaccatcataaatcactccaggaatggttcctatggcgaatcttcactggaggctcatatttggcaggaggaagaagaggtggtccaagctaatcgtcgttgccaggatatggaatacactattaagaatctacacgctaaaatcattgagaaagacgccatgattaaggtcctgcagcagcgcagccgcaaagacgccgggaaaacagactctagttcgctgcgcccggcccgttctgtgccgagtattgctgcagcaacaggaacccatagtcgacagacatctttgaccagcagtcagctggccgaagaaaagaaggaagaaaaaacctggaagggaagcataggcctgcttctgggaaaggagcaccacgaacacgcttcagcacccctgctccctccacctcccacctccgcactctcctcaatcgctagcacgacagctgcatcttcagcccacgctaagacaggaagcaaagactcatccacccagacagacaaaagcgcagagttattttggccaagtatggcgtcgctaccctctaggggcagactcagcactactcctgcacacagtccggttctgaaacatcctgctgctaagggcactgcggaaaagctggagaattcacctggccacgggaagtcccccgaccatagaggccgtgtaagctctcttctgcacaaaccggagtttcctgatggtgaaatgatggaggtgcttatctag

SEQ ID NO: 234380 - DNA, 1836 bp, Artificial Sequence
  derived and/or modified sequence
acaagccatgatcgactcatgtggcgagccaagctgagacggggcacatgtgagccagccgtcaagggctcgccaagtgcgtgctatagccctagctctccagtccaggtactggaagattccacctacttttcccctgattttcagttatactccggacgccacgaaacaagcgctctaacagtggaggccacctcctccattcgcgaaaaggtcgttgaggaccctctctgcaatttccacagccctaatttcctgagaataagcgaagttgagatgagggggtccgaagatgccgctgcgggtactgtgctgcaacggttgatccaggagcagctgaggtacgggacccctaccgagaatatgaatcttctggccatccagcaccaggccactgggtcagccgggccagctcaccccaccaacaattttagttcgaccgaaaatctcacacaggaagatccccagatggtttaccagagcgcccgacaggaaccacagggtcaggaacaccaagtggataacaccgtaatggaaaagcaagttcgaagcacacaacctcaacagaacaacgaggaattgcctacttacgaagaggctaaagcccagagtcagttctttaggggccagcagcagcagcaacaacagcagggcgccgtcggacacggttattatatggccggaggaaccagccaaaagagcagaacagaaggcagacccaccgtgaaccgcgccaacagcggccaggcccataaagacgaggccctgaaagaattaaagcagggccatgtaaggtccctgtccgaaaggattatgcagctttccctggaacggaatggcgctaagcagcatctgcctggatcagggaatggaaaggggttcaaggtgggcggtggccccagccctgcccagcctgctggcaaagtgttggacccaagaggaccacccccagagtatccattcaagaccaaacagatgatgtccccggtgagcaagactcaggaacacggtctgttttacggggaccagcatccaggcatgttgcacgagatggtgaaaccctatcccgctcctcagcctgtgaggactgacgttgccgtgttgcggtaccagccccctcccgagtacggggttacctctcgaccatgccaactgccattcccttctactatgcagcagcattcacctatgagcagtcaaacctccagtgcctcaggaccactccatagcgtctcccttcctctacccctccccatggctctgggcgccccgcagccacctcccgccgccagccccagccagcagctgggccccgacgcatttgcaatcgtggaaagagcacagcaaatggtggaaatcctgacagaggagaacagagtgcttcaccaggaattacaaggatattacgataacgccgacaagctgcacaagtttgagaaagagcttcaaagaatttccgaggcctacgagtctctcgtcaagagcaccaccaagagagaatctctggacaaggctatgcgaaacaaactcgagggggaaataaggcggttgcatgacttcaatagagacctcagagatagattggaaactgccaaccgacagctctccagccgcgaatatgagggtcacgaggataaggctgctgagggacattacgcatcccagaataaggaattccttaaggagaaagagaagctcgaaatggaactcgcagcagtaagaactgctagcgaagatcataggcgccatattgagatcctagaccaggctctctctaacgcccaggccagacaccaagcgggaagaggagtgacccgggaggcatccatctgttag

SEQ ID NO: 234381 - DNA, 1632 bp, Artificial Sequence
  derived and/or modified sequence
atgtggagggccaagctgcggcggggcacctgtgagcctgctgtgaagggcagccccagcgcctgctacagccccagcagccctgtgcaggtgctggaggacagcacctacttctccccagacttccagctgtacagcggcagacatgagaccagcgccctgactgtggaggccaccagcagcatccgggagaaggtggtggaggaccccctgtgcaacttccacagccccaacttcctgcgcatcagcgaggtggagatgaggggctctgaagatgctgctgctggcaccgtgctgcagaggctcatccaggagcagctgcgctatggcacccccacagagaacatgaacctgctggccatccagcaccaggccaccggcagcgctggccctgcccaccccaccaacaacttcagcagcacagagaacctgacccaggaggacccccagatggtgtaccagagcgcccggcaggagccccagggccaggagcaccaggtggacaacacagtgatggagaagcaggtgcgcagcacccagccccagcagaacaatgaggagctgcccacctatgaggaggccaaggcccagagccagttcttccggggccagcagcagcagcagcagcagcagggcgctgtgggccacggctactacatggccggcggcaccagccagaagagcaggacagagggccggcccaccgtgaacagagccaacagcggccaggcccacaaggatgaggccctgaaggagctgaagcagggccacgtgcgcagcctgtctgagcgcatcatgcagctgagcctggagagaaatggagccaagcagcacctgcccggcagcggaaatggcaagggcttcaaggtgggcggcggccccagccctgcccagcctgctgggaaggtgctggacccccggggccccccacctgagtaccccttcaagaccaagcagatgatgagccctgtgtccaagacccaggagcacggcctcttctacggggaccagcaccctggcatgctgcacgagatggtgaagccctacccagccccccagcctgtgaggacagatgtggccgtgctgcgctaccagcccccaccagaatatggagtgaccagccggccctgccagctgcccttccccagcaccatgcagcagcacagccccatgaacttccgcaccagcctgaccagcagccagctggccgaggagaagaaggaggagaagacctggaagggcagcatcggcctgctgctgggcaaggagcaccatgaacatgccagcgcccccctgctgcccccaccacccaccagcgccctgagcagcatcgccagcaccacagctgccagcagcgcccacgccaagacaggcagcaaggacagcagcacccagacagacaagtctgctgagctgttctggcccagcatggccagcctgcccagccggggccgcctgagcaccaccccagcccacagccctgtgctgaagcaccctgctgccaagggcacagctgagaagctggagaacagccctggccacggcaagagcccagaccaccggggccgggtgagcagcctgctgcacaagccagagttcccagatggagagatgatggaggtgctgatctag

SEQ ID NO: 234382 - DNA, 2871 bp, Artificial Sequence
  derived and/or modified sequence
atgtggagggccaagctgcggcggggcacctgtgagcctgctgtgaagggcagccccagcgcctgctacagccccagcagccctgtgcaggtgctggaggacagcacctacttctccccagacttccagctgtacagcggcagacatgagaccagcgccctgactgtggaggccaccagcagcatccgggagaaggtggtggaggaccccctgtgcaacttccacagccccaacttcctgcgcatcagcgaggtggagatgaggggctctgaagatgctgctgctggcaccgtgctgcagaggctcatccaggagcagctgcgctatggcacccccacagagaacatgaacctgctggccatccagcaccaggccaccggcagcgctggccctgcccaccccaccaacaacttcagcagcacagagaacctgacccaggaggacccccagatggtgtaccagagcgcccggcaggagccccagggccaggagcaccaggtggacaacacagtgatggagaagcaggtgcgcagcacccagccccagcagaacaatgaggagctgcccacctatgaggaggccaaggcccagagccagttcttccggggccagcagcagcagcagcagcagcagggcgctgtgggccacggctactacatggccggcggcaccagccagaagagcaggacagagggccggcccaccgtgaacagagccaacagcggccaggcccacaaggatgaggccctgaaggagctgaagcagggccacgtgcgcagcctgtctgagcgcatcatgcagctgagcctggagagaaatggagccaagcagcacctgcccggcagcggaaatggcaagggcttcaaggtgggcggcggccccagccctgcccagcctgctgggaaggtgctggacccccggggccccccacctgagtaccccttcaagaccaagcagatgatgagccctgtgtccaagacccaggagcacggcctcttctacggggaccagcaccctggcatgctgcacgagatggtgaagccctacccagccccccagcctgtgaggacagatgtggccgtgctgcgctaccagcccccaccagaatatggagtgaccagccggccctgccagctgcccttccccagcaccatgcagcagcacagccccatgagcagccagaccagcagcgccagcggccccctgcacagcgtgtccctgcccctgcccctgcccatggccctgggcgccccccagcccccacctgctgccagccccagccagcagctgggcccagatgcctttgccatcgtggagcgggcccagcagatggtggagatcctgacagaagaaaatagagtgctgcaccaggagctgcagggctactatgacaatgctgacaagctgcacaagtttgagaaggagctgcagaggatcagcgaggcctatgagagcctggtgaagagcaccaccaagcgggagagcctggacaaggccatgaggaacaagctggagggggagatccggcggctgcatgacttcaacagagacctgcgggaccggctggagacagccaaccggcagctgagcagccgggagtatgagggccacgaggacaaggctgctgagggccactacgccagccagaacaaggagttcctgaaggagaaggagaagctggagatggagctggccgctgtgaggacagccagcgaggaccacagaagacacatcgagatcctggaccaggccctgagcaatgcccaggcccgggtcatcaagctggaggaggagctgcgggagaagcaggcctacgtggagaaggtggagaagctgcagcaggccctgacccagctgcagagcgcctgtgagaagcgggagcagatggagcggcggctgcggacctggctggagcgggagctggatgccctgcggacccagcagaagcacggcaatggccagcctgccaacatgcctgagtacaatgccccagccctgctggagctggtgcgggagaaggaggagcgcatcctggccctggaggccgacatgaccaagtgggagcagaagtacctggaggagagcaccatccgccactttgccatgaatgctgctgccacagctgctgctgagcgggacaccaccatcatcaaccacagcagaaatggcagctatggagagagcagcctggaggcccacatctggcaggaggaggaggaggtggtgcaggccaacagacgctgccaggacatggagtacaccatcaagaacctgcacgccaagatcatcgagaaggatgccatgatcaaggtgctgcagcagaggagcaggaaggatgctgggaagacagacagcagcagcctgcggcctgcccggtctgtgcccagcattgctgctgccaccggcacccacagccggcagaccagcctgaccagcagccagctggccgaggagaagaaggaggagaagacctggaagggcagcatcggcctgctgctgggcaaggagcaccacgagcacgccagcgcccccctgctgcccccaccacccaccagcgccctgagcagcatcgccagcaccacagctgccagcagcgcccacgccaagacaggcagcaaggacagcagcacccagacagacaagtctgctgagctgttctggcccagcatggccagcctgcccagccggggccgcctgagcaccaccccagcccacagccctgtgctgaagcaccctgctgccaagggcacagctgagaagctggagaacagccctggccacggcaagagcccagaccaccggggccgggtgagcagcctgctgcacaagccagagttcccagatggagagatgatggaggtgctgatctag

SEQ ID NO: 234383 - DNA, 1836 bp, Artificial Sequence
  derived and/or modified sequence
accagccatgaccggctgatgtggagggccaagctgcggcggggcacctgtgagcctgctgtgaagggcagccccagcgcctgctacagccccagcagccctgtgcaggtgctggaggacagcacctacttctccccagacttccagctgtacagcggcagacatgagaccagcgccctgactgtggaggccaccagcagcatccgggagaaggtggtggaggaccccctgtgcaacttccacagccccaacttcctgcgcatcagcgaggtggagatgaggggctctgaagatgctgctgctggcaccgtgctgcagaggctcatccaggagcagctgcgctatggcacccccacagagaacatgaacctgctggccatccagcaccaggccaccggcagcgctggccctgcccaccccaccaacaacttcagcagcacagagaacctgacccaggaggacccccagatggtgtaccagagcgcccggcaggagccccagggccaggagcaccaggtggacaacacagtgatggagaagcaggtgcgcagcacccagccccagcagaacaatgaggagctgcccacctatgaggaggccaaggcccagagccagttcttccggggccagcagcagcagcagcagcagcagggcgctgtgggccacggctactacatggccggcggcaccagccagaagagcaggacagagggccggcccaccgtgaacagagccaacagcggccaggcccacaaggatgaggccctgaaggagctgaagcagggccacgtgcgcagcctgtctgagcgcatcatgcagctgagcctggagagaaatggagccaagcagcacctgcccggcagcggaaatggcaagggcttcaaggtgggcggcggccccagccctgcccagcctgctgggaaggtgctggacccccggggccccccacctgagtaccccttcaagaccaagcagatgatgagccctgtgtccaagacccaggagcacggcctcttctacggggaccagcaccctggcatgctgcacgagatggtgaagccctacccagccccccagcctgtgaggacagatgtggccgtgctgcgctaccagcccccaccagaatatggagtgaccagccggccctgccagctgcccttccccagcaccatgcagcagcacagccccatgagcagccagaccagcagcgccagcggccccctgcacagcgtgtccctgcccctgcccctgcccatggccctgggcgccccccagcccccacctgctgccagccccagccagcagctgggcccagatgcctttgccatcgtggagcgggcccagcagatggtggagatcctgacagaagaaaatagagtgctgcaccaggagctgcagggctactatgacaatgctgacaagctgcacaagtttgagaaggagctgcagaggatcagcgaggcctatgagagcctggtgaagagcaccaccaagcgggagagcctggacaaggccatgaggaacaagctggagggggagatccggcggctgcatgacttcaacagagacctgcgggaccggctggagacagccaaccggcagctgagcagccgggagtatgagggccacgaggacaaggctgctgagggccactacgccagccagaacaaggagttcctgaaggagaaggagaagctggagatggagctggccgctgtgaggacagccagcgaggaccacagaagacacatcgagatcctggaccaggccctgagcaatgcccaggcccggcaccaggccggccggggcgtgacccgggaggccagcatctgctag

SEQ ID NO: 234384 - DNA, 7760 bp, Artificial Sequence
  derived and/or modified sequence
cggacggcggcgggagcgcgcgagaagctctaggacccagcagcggttgtcgggtttggggctggaggtgaagccctgtgtgaatggggttgattgtccggcgccacttccccgcgctgcccggcagccgtcttccccagccgagggactgaactagccatgatcgcctcatgtggagggcaaagttgcgccggggaacttgtgagcctgcggtgaaagggtccccttctgcttgttatagccccagtagtcctgtccaggttctagaagactccacctacttttccccagactttcagctctattctgggaggcatgaaacatctgctttgacggtggaggcaaccagtagcatcagggaaaaagttgttgaagatcctctttgtaacttccactccccaaacttcctgaggatctcagaggtggaaatgagaggttccgaggatgcggcagctggaacagtattgcagcggctgatccaggaacaactgcggtatggcaccccaaccgagaacatgaacttgctggccattcagcaccaggccacagggagtgcaggaccagcccatcctacaaacaacttttcttccacggaaaacctcactcaagaagacccacaaatggtctaccagtcagcacgccaagaaccgcagggtcaagaacaccaggtggacaatacggtgatggagaaacaggtccggtccacgcagcctcagcagaacaacgaggaactgcccacttacgaggaggccaaagcacagtcgcagttcttcagggggcagcagcagcagcaacagcagcagggggcggtgggccatggttactacatggcagggggcaccagtcagaagtcccgaactgaggggaggcccactgtgaaccgtgccaacagtggacaggcgcataaggacgaggcgctgaaggaactgaagcagggccacgtccgctcgctcagcgagagaatcatgcagctgtccctggagaggaatggggccaagcaacaccttcccggctcggggaatggaaagggcttcaaagtaggaggggggccctcccctgcccagcctgcaggtaaagtgctggaccctcggggtcctccacctgagtaccccttcaagaccaagcaaatgatgtccccagtcagcaagacccaggagcacggacttttttatggtgaccagcaccccgggatgctccacgagatggtcaagccctaccctgctcctcagcctgtgagaacagatgtggccgtcctgcggtaccagccaccccctgagtatggggtaacgagccgcccatgccaacttccgttcccatcaaccatgcagcagcacagccccatgaacttcaggacctctcttaccagcagccagctggctgaggaaaagaaggaagagaagacctggaaggggagcataggattgctgctggggaaggagcaccatgagcatgcctctgccccactgctgccacccccacccacctcagcactgtcctccatagcctccactacggcagccagcagtgcccacgccaagacaggcagcaaggacagcagcacacagactgacaagagtgccgagctcttctggcccagcatggcctcccttcccagccgcggccggctgagcacgacccctgctcacagccccgtcctgaaacacccagcggccaaagggaccgcagagaaactggagaactctcctggccatgggaagtcgcctgaccacagaggccgggtcagcagcttgctgcacaagcccgagttccctgatggagagatgatggaagtcctcatctaactgccatccctgtggaatttcagtacagaacactgacaaacaaggaaagcggcagagaaagaagaaagacctagaaggttgtagatgggaaatcaggaatgatttgaactgataaagatttcagactcataagaacacattttataaatgttaaacacaaaaactacatgactgaagatagaagagaatgcgatggattttattacacatggtggaagagagaagaggcgtgtaggtttgcaaacaaagttaagaaataggaaactgaatttttcattgtacagaaaatgtatctcttggggagggcctgtgtacccccattctctgattataaacagataaacccaaatgtggatcatccttggaatacccccattctccttgcctcttagcatgtttgatttaagaaaagcctccaggaaatcttgagagcctgtcttggcataatgcagtgtcacctgtgccaaccatggggtgtcccgtgagtgtgagtgtggcagtgagaagaagcatcgagggcgaggggaatatgaaagttggtcttcacctaattacctgtttggtttggattttcaagagatgattgggcttcttagcttttctgaattctgcagtattttctaaacaggatagattatgatctcggtccccatccatcctaacttctgagttcatctctgtctctgctttacagtctttaattttttgttgttccttcatttttttctttttaataagacatagcagaattccttaggtatgggatttatgagaccagtacctgaactgtcatcattcctactgtgtttgatagtgaccagtaggacaaagccacgtgccgacttcctggctgcttcacctttgcatagctgggttgcagctgcgaacctcattctgactgtgaactaagcaagctttgaggaggcaggagattccgtgggtccctgtgacatattgcattaagatcgtggcacttgcttttttgtctttcacatcggctgtcttgcaaggagcttgacatttccaaattccattgctctgtttggggaagacttaggacagcactccaggaaacagatgacaatttacagacagttgtctcagtggtttccagaatctcaccagcctcccgtatagcttcttgtattgaggctcatgagcgtattcacactctttcctcccccgcgcacgcctctgcttgctctcgatcagcatccagacctccgtggcaccaggttgcctctgttgtgaacttcttttgtaacctaccaggccagttgtatatacagtgttgtcaggtttttccgggtttcagttttgaggcagtttattcaaagtgagacagaagtgccacggaaaagaggcaggagtgtgttaggtggtgggtccattagacctctgctgtgacattgcatattcagctctgcagacactggcttcctttacaaatctaagagatgctggattagaaaagaggagaagctcatcgggccatcagagagatgctcctacagggtcctgatgtttttgtacctccaggtcagctggatcgctgttttcccagttccctttgctcatgcttacttagaggaagaaagaaaggggggtacctcttccaagtaccttctaaatgaaacactcaagagagtgctactcaggaaactttgcttggatcctaaaatggactggtcttgggtgtgtaaccccggtgaagttatagcctccccaaattgaggtgacagaaggaagacaagaggtgtaagctggagagggaagggaagaaatcagtggctttggccagcctctgtgccacccagtacgacagaggagtgggaactggccctctggggctctgcttggccataggcactgcacattgtgccacctgctcatcacctcctctagtctcacactgagcatcggagtacctgttgtgcagacaggaaaactgaggagctctgagaggctgagcatggagctcaccccatgccatagggtgtgggaagagggcacaggaggcctcatccatgggggaaagggttgaggatggacatgggtggggagagggcatagacatcccttcctaatctctgttcccaccacatttcataggagatgagttaggagatgacagctaactctcttaaggacattttgaccccagtttatgttggggatggaccagaaaggaaaatgtctagagataggaaggtaaatcaactctgccagcccctaccatcaggtctgggccaccccaaacttgggctgcctcccttagacataggttagagtgagagacccagctgtttctcccgaagcctcgtcttcatgccccagacacctgattgccccaatcaggtgtcagacttgcttgctcttcgaggtccccctgagctgccaagtgttttcattgtaaacagacacatcgccatgtttcagggcttcaacggcattgtattttggactttgaccgtattttttttctcttaacctactgagactcttccttaagaacaggatctatagctttaaaatgtcttcttctatgggaaatttcctgccaagccagggcactaaattctttcatcattagagctttcctgaagtccggccatatactgagtacctgctctgagttctgggcagcttacaatatcttaaacagattttcagaaaaataatgcaactatattttctagtgtcaactgtatgcaaacagtgtggtaaataccttttaattagtcctccacccacctggagtacagggggtgcgtttattattctgatttcactgatgaggaaatgggctcagaaaggttaagtcccttcctgaaatctcacagccaggagaagctaggatgatttaaaacaaagtttggagaggcactgggcatagaccctggctgtacagcctctaacatgcggcactgcatcttggcagtctctatgcctgtctgtgatgtgtgtgtgcacgtgtaactacacacacacacacacacacacacacacacacacacagctatcacacatctcagagcctaagaaataggactaagcccagaactcctagaatcacctataaatgctaggcatagatggaaattattgtgttccaccagaagcacagctccaaactatacctaaaaaatatttctgcacttcccagagacctggacttcaaactttcccagtggagcctgattatagaacttgagggtcctatctcaggatgaaggggagaggccctggcttcacgggaaggtattccagcattgttctgcttcacccttgactgcgttgtctggcagtttctgtgtgctgccaggatattatatggaactggagaagttggagtcaggtctctgaagctagagtttcactaattagatgcctctgtacatgagaactattactgtctgcaggtccatatagctaagctgccaggaaaaacacattatcttccaaaactttcagagcatgtgcagaaccctttcttagcgttttcttctcagcattttctctgcctcccagaggctggcagccagtgacactgcagagttcagcatgttctaaccatgcacgcagggcaggggctgccttggccctcctcaggctttcgttgggagagcaggcagtggtggagcccttctgggtgcagtcctctggggttgctctttggaactcatgtatgagtttgactccacaaggcttggcatggataccaaaacagttgcaacaaattagttctgaacctggaacagagaattcagtgcttctgttactcaggaaggaggtgttcagaatgccccgtgcagagcagccagtcattactcttgtttgttctcacctgggtgcgcaccctcatgatgcagtggctgtagcaccttcatgccaggtgctgagagaatgggaaattcttcctccccattgacctgagtcccagagacttagggacacagacttcaggtgaggctgcggacctcagaagcagtggataatagattggggcattaaaagcttttgaggcagggggctcatgttttgactgcagggagttatgctgagcaaagagatgtgtttttcaaaaccagggttcaaaaccagtgtccacgctggagtaagtggagcatgcttctctgtgttctctgaatgatcttgcactcctcttaagcaaaggagtaccatgaccatagtcagtgggatcccacaaatgttcttaaatgggtaaggctttaagtagccagagagtatccagcctaccattggcttctccacatcctaaaacctgagacagccttggtatatgctttataaatgtttcttttcttgttgtttaagtaattaaagtgtttaaaatgtcttcattagatgtgacgattgtttaatgagtttgcctctgacgtgtggctccatgggagataggcaaagtaattaagaagttaccagaaattggtcggctggggaaatgcaaaagttagcatttcagtagtgaatttctcctggaacaaatgagcaatttttcctctttctcttaagtagtatacccttttctcacttagtaatttaatggtatataaagacatgtgtataagtgagtgcatacatatgaggtatgactatagggttgtttgtgggaatttcttttcctaacatacagaagatcaaagtgttcatctcaccccgccctccttaaaaggtgtcttttgggagactatgtgctcattgactatagtgctgccaagtaaaaatatcttgggaactcttctactagaatggccttcagggcttggcatgttcctttggtttacccttagagatgagaaatcctcctcctttgaggatggatttaagttctggaaataatctcaagtgcttgatagcacagttggatgaaaaaagatggcaattaaggtaagttacaccatttttgtttctaaaaaaatccctaagaaatttcttggaatgagtctttggcctcagagcctctcaaagtgtccacttcaaggggggatcatcctcattagcacacagatttttaaaaatcaattctcttgccatgcctcctatgtgttcacatctctgcatacactacagatataagtgcataatcattcatataaacatctggtaggtattctgtaaaactgtgtttactttagtgcatgttattgtcatgttatgatgtgactggggtgtttctttgtcatgaaactttgcttcttcacagaattagaatactgctctctctatattgaactacatatacagcgttttcttgtatcagcccccaaagtctggatgcccggtgttgtgtttacatgtgattgtgcctaggagtctgttcacatagagacacctgtaagtatttattacaaaacggaatgtaagcaaatatatccacattggttttatttgaatcaaggtgtttttttgttttttgttttttttccttttgaggaggaacagggagcctcctcctccatgagcacttacagaattgtgtaaaattctgtgaaacagtggtaagcatgggcacccgatttcagctgtcctgctgccgctgccctccaacctgctctgtgtgtgtgtgtcgctgtgcttggtggcagtgtgccgtgctcgtgccggctcttcccagcagactggtatctggctgtaacgtttgacgtcttcatattgccagtctgtattgaggggtgatgtacatggccatacagccaaatgggtctgtgtaccagtgtggggattccaagaacactgcctgtcccccacagcaaatattgatgctgttggtcagccaaagattttcctctcctttgctgcttaaacttgtgccttaatattgtacataataaatggataaaatggcaaaatgactcttttctctcgcttgctcctttcttccttaaagaacttataaactgatgctcaataaatgtttcatttcattgtacccca

SEQ ID NO: 234385 - DNA, 8970 bp, Artificial Sequence
  derived and/or modified sequence
ctaggacccagcagcggttgtcgggtttggggctggaggtgaagccctgtgtgaatggggttgattgtccggcgccacttccccgcgctgcccggcagccgtcttccccagccgagggactgaactagccatgatcgcctcatgtggagggcaaagttgcgccggggaacttgtgagcctgcggtgaaagggtccccttctgcttgttatagccccagtagtcctgtccaggttctagaagactccacctacttttccccagactttcagctctattctgggaggcatgaaacatctgctttgacggtggaggcaaccagtagcatcagggaaaaagttgttgaagatcctctttgtaacttccactccccaaacttcctgaggatctcagaggtggaaatgagaggttccgaggatgcggcagctggaacagtattgcagcggctgatccaggaacaactgcggtatggcaccccaaccgagaacatgaacttgctggccattcagcaccaggccacagggagtgcaggaccagcccatcctacaaacaacttttcttccacggaaaacctcactcaagaagacccacaaatggtctaccagtcagcacgccaagaaccgcagggtcaagaacaccaggtggacaatacggtgatggagaaacaggtccggtccacgcagcctcagcagaacaacgaggaactgcccacttacgaggaggccaaagcacagtcgcagttcttcagggggcagcagcagcagcaacagcagcagggggcggtgggccatggttactacatggcagggggcaccagtcagaagtcccgaactgaggggaggcccactgtgaaccgtgccaacagtggacaggcgcataaggacgaggcgctgaaggaactgaagcagggccacgtccgctcgctcagcgagagaatcatgcagctgtccctggagaggaatggggccaagcaacaccttcccggctcggggaatggaaagggcttcaaagtaggaggggggccctcccctgcccagcctgcaggtaaagtgctggaccctcggggtcctccacctgagtaccccttcaagaccaagcaaatgatgtccccagtcagcaagacccaggagcacggacttttttatggtgaccagcaccccgggatgctccacgagatggtcaagccctaccctgctcctcagcctgtgagaacagatgtggccgtcctgcggtaccagccaccccctgagtatggggtaacgagccgcccatgccaacttccgttcccatcaaccatgcagcagcacagccccatgtcctcccagacctcttccgccagcgggccactgcactctgtctccctgccgcttccactcccgatggccctgggtgctccacagcccccgcctgccgcctcccccagccagcagcttggtccagatgcctttgcgattgtggagcgagcccagcaaatggtggagatattaacagaggagaaccgggtgcttcaccaggaacttcagggttactacgacaatgccgacaagctccacaagtttgaaaaagaacttcagagaatttcggaagcctatgaaagtctggtcaagtctaccaccaagcgagaatcgctggacaaggccatgagaaacaaattggaaggcgagattagaagacttcatgatttcaacagagacctccgagatcgactagagactgctaacaggcaactatccagcagggaatacgaagggcatgaagacaaagctgcagaggggcattatgcttcccagaacaaagaattcttgaaggaaaaggagaaattagaaatggagttagcagcagtgcggactgcaagtgaggaccatcggagacacatcgagatcctggaccaggctttgagcaacgcccaggccagggtcatcaagctggaagaggagttacgagagaagcaagcatatgttgagaaagttgagaagctgcagcaggccctgacccagctgcagtctgcatgtgagaagcgagaacagatggagcggagactgcggacttggctggagagagagctggatgcactgagaacccagcagaaacatggaaatggccagccagccaacatgccggaatacaatgccccagccctcctggaacttgtgcgggagaaggaggagcggatcctggccctggaggccgacatgacaaagtgggagcagaagtacctggaggagagcaccatccgacactttgccatgaatgccgcagccactgcagcagctgagagggacaccacgatcatcaaccactcacggaatggcagctacggagagagctcgctggaggcccacatctggcaagaggaggaggaggtggtgcaggccaacagaaggtgtcaggacatggaatacactattaaaaatctccatgccaaaatcatagagaaagatgctatgattaaggtcctgcagcagcgatctcgtaaagatgccgggaagacagactcctccagcctacgtcctgcccgctccgttccatccatagcagcagctactgggacacactctcgccagacctctcttaccagcagccagctggctgaggaaaagaaggaagagaagacctggaaggggagcataggattgctgctggggaaggagcaccatgagcatgcctctgccccactgctgccacccccacccacctcagcactgtcctccatagcctccactacggcagccagcagtgcccacgccaagacaggcagcaaggacagcagcacacagactgacaagagtgccgagctcttctggcccagcatggcctcccttcccagccgcggccggctgagcacgacccctgctcacagccccgtcctgaaacacccagcggccaaagggaccgcagagaaactggagaactctcctggccatgggaagtcgcctgaccacagaggccgggtcagcagcttgctgcacaagcccgagttccctgatggagagatgatggaagtcctcatctaactgccatccctgtggaatttcagtacagaacactgacaaacaaggaaagcggcagagaaagaagaaagacctagaaggttgtagatgggaaatcaggaatgatttgaactgataaagatttcagactcataagaacacattttataaatgttaaacacaaaaactacatgactgaagatagaagagaatgcgatggattttattacacatggtggaagagagaagaggcgtgtaggtttgcaaacaaagttaagaaataggaaactgaatttttcattgtacagaaaatgtatctcttggggagggcctgtgtacccccattctctgattataaacagataaacccaaatgtggatcatccttggaatacccccattctccttgcctcttagcatgtttgatttaagaaaagcctccaggaaatcttgagagcctgtcttggcataatgcagtgtcacctgtgccaaccatggggtgtcccgtgagtgtgagtgtggcagtgagaagaagcatcgagggcgaggggaatatgaaagttggtcttcacctaattacctgtttggtttggattttcaagagatgattgggcttcttagcttttctgaattctgcagtattttctaaacaggatagattatgatctcggtccccatccatcctaacttctgagttcatctctgtctctgctttacagtctttaattttttgttgttccttcatttttttctttttaataagacatagcagaattccttaggtatgggatttatgagaccagtacctgaactgtcatcattcctactgtgtttgatagtgaccagtaggacaaagccacgtgccgacttcctggctgcttcacctttgcatagctgggttgcagctgcgaacctcattctgactgtgaactaagcaagctttgaggaggcaggagattccgtgggtccctgtgacatattgcattaagatcgtggcacttgcttttttgtctttcacatcggctgtcttgcaaggagcttgacatttccaaattccattgctctgtttggggaagacttaggacagcactccaggaaacagatgacaatttacagacagttgtctcagtggtttccagaatctcaccagcctcccgtatagcttcttgtattgaggctcatgagcgtattcacactctttcctcccccgcgcacgcctctgcttgctctcgatcagcatccagacctccgtggcaccaggttgcctctgttgtgaacttcttttgtaacctaccaggccagttgtatatacagtgttgtcaggtttttccgggtttcagttttgaggcagtttattcaaagtgagacagaagtgccacggaaaagaggcaggagtgtgttaggtggtgggtccattagacctctgctgtgacattgcatattcagctctgcagacactggcttcctttacaaatctaagagatgctggattagaaaagaggagaagctcatcgggccatcagagagatgctcctacagggtcctgatgtttttgtacctccaggtcagctggatcgctgttttcccagttccctttgctcatgcttacttagaggaagaaagaaaggggggtacctcttccaagtaccttctaaatgaaacactcaagagagtgctactcaggaaactttgcttggatcctaaaatggactggtcttgggtgtgtaaccccggtgaagttatagcctccccaaattgaggtgacagaaggaagacaagaggtgtaagctggagagggaagggaagaaatcagtggctttggccagcctctgtgccacccagtacgacagaggagtgggaactggccctctggggctctgcttggccataggcactgcacattgtgccacctgctcatcacctcctctagtctcacactgagcatcggagtacctgttgtgcagacaggaaaactgaggagctctgagaggctgagcatggagctcaccccatgccatagggtgtgggaagagggcacaggaggcctcatccatgggggaaagggttgaggatggacatgggtggggagagggcatagacatcccttcctaatctctgttcccaccacatttcataggagatgagttaggagatgacagctaactctcttaaggacattttgaccccagtttatgttggggatggaccagaaaggaaaatgtctagagataggaaggtaaatcaactctgccagcccctaccatcaggtctgggccaccccaaacttgggctgcctcccttagacataggttagagtgagagacccagctgtttctcccgaagcctcgtcttcatgccccagacacctgattgccccaatcaggtgtcagacttgcttgctcttcgaggtccccctgagctgccaagtgttttcattgtaaacagacacatcgccatgtttcagggcttcaacggcattgtattttggactttgaccgtattttttttctcttaacctactgagactcttccttaagaacaggatctatagctttaaaatgtcttcttctatgggaaatttcctgccaagccagggcactaaattctttcatcattagagctttcctgaagtccggccatatactgagtacctgctctgagttctgggcagcttacaatatcttaaacagattttcagaaaaataatgcaactatattttctagtgtcaactgtatgcaaacagtgtggtaaataccttttaattagtcctccacccacctggagtacagggggtgcgtttattattctgatttcactgatgaggaaatgggctcagaaaggttaagtcccttcctgaaatctcacagccaggagaagctaggatgatttaaaacaaagtttggagaggcactgggcatagaccctggctgtacagcctctaacatgcggcactgcatcttggcagtctctatgcctgtctgtgatgtgtgtgtgcacgtgtaactacacacacacacacacacacacacacacacacacacagctatcacacatctcagagcctaagaaataggactaagcccagaactcctagaatcacctataaatgctaggcatagatggaaattattgtgttccaccagaagcacagctccaaactatacctaaaaaatatttctgcacttcccagagacctggacttcaaactttcccagtggagcctgattatagaacttgagggtcctatctcaggatgaaggggagaggccctggcttcacgggaaggtattccagcattgttctgcttcacccttgactgcgttgtctggcagtttctgtgtgctgccaggatattatatggaactggagaagttggagtcaggtctctgaagctagagtttcactaattagatgcctctgtacatgagaactattactgtctgcaggtccatatagctaagctgccaggaaaaacacattatcttccaaaactttcagagcatgtgcagaaccctttcttagcgttttcttctcagcattttctctgcctcccagaggctggcagccagtgacactgcagagttcagcatgttctaaccatgcacgcagggcaggggctgccttggccctcctcaggctttcgttgggagagcaggcagtggtggagcccttctgggtgcagtcctctggggttgctctttggaactcatgtatgagtttgactccacaaggcttggcatggataccaaaacagttgcaacaaattagttctgaacctggaacagagaattcagtgcttctgttactcaggaaggaggtgttcagaatgccccgtgcagagcagccagtcattactcttgtttgttctcacctgggtgcgcaccctcatgatgcagtggctgtagcaccttcatgccaggtgctgagagaatgggaaattcttcctccccattgacctgagtcccagagacttagggacacagacttcaggtgaggctgcggacctcagaagcagtggataatagattggggcattaaaagcttttgaggcagggggctcatgttttgactgcagggagttatgctgagcaaagagatgtgtttttcaaaaccagggttcaaaaccagtgtccacgctggagtaagtggagcatgcttctctgtgttctctgaatgatcttgcactcctcttaagcaaaggagtaccatgaccatagtcagtgggatcccacaaatgttcttaaatgggtaaggctttaagtagccagagagtatccagcctaccattggcttctccacatcctaaaacctgagacagccttggtatatgctttataaatgtttcttttcttgttgtttaagtaattaaagtgtttaaaatgtcttcattagatgtgacgattgtttaatgagtttgcctctgacgtgtggctccatgggagataggcaaagtaattaagaagttaccagaaattggtcggctggggaaatgcaaaagttagcatttcagtagtgaatttctcctggaacaaatgagcaatttttcctctttctcttaagtagtatacccttttctcacttagtaatttaatggtatataaagacatgtgtataagtgagtgcatacatatgaggtatgactatagggttgtttgtgggaatttcttttcctaacatacagaagatcaaagtgttcatctcaccccgccctccttaaaaggtgtcttttgggagactatgtgctcattgactatagtgctgccaagtaaaaatatcttgggaactcttctactagaatggccttcagggcttggcatgttcctttggtttacccttagagatgagaaatcctcctcctttgaggatggatttaagttctggaaataatctcaagtgcttgatagcacagttggatgaaaaaagatggcaattaaggtaagttacaccatttttgtttctaaaaaaatccctaagaaatttcttggaatgagtctttggcctcagagcctctcaaagtgtccacttcaaggggggatcatcctcattagcacacagatttttaaaaatcaattctcttgccatgcctcctatgtgttcacatctctgcatacactacagatataagtgcataatcattcatataaacatctggtaggtattctgtaaaactgtgtttactttagtgcatgttattgtcatgttatgatgtgactggggtgtttctttgtcatgaaactttgcttcttcacagaattagaatactgctctctctatattgaactacatatacagcgttttcttgtatcagcccccaaagtctggatgcccggtgttgtgtttacatgtgattgtgcctaggagtctgttcacatagagacacctgtaagtatttattacaaaacggaatgtaagcaaatatatccacattggttttatttgaatcaaggtgtttttttgttttttgttttttttccttttgaggaggaacagggagcctcctcctccatgagcacttacagaattgtgtaaaattctgtgaaacagtggtaagcatgggcacccgatttcagctgtcctgctgccgctgccctccaacctgctctgtgtgtgtgtgtcgctgtgcttggtggcagtgtgccgtgctcgtgccggctcttcccagcagactggtatctggctgtaacgtttgacgtcttcatattgccagtctgtattgaggggtgatgtacatggccatacagccaaatgggtctgtgtaccagtgtggggattccaagaacactgcctgtcccccacagcaaatattgatgctgttggtcagccaaagattttcctctcctttgctgcttaaacttgtgccttaatattgtacataataaatggataaaatggcaaaatgactcttttctctcgcttgctcctttcttccttaaagaacttataaactgatgctcaataaatgtttcatttcattgtacccca

SEQ ID NO: 234386 - DNA, 8997 bp, Artificial Sequence
  derived and/or modified sequence
cggacggcggcgggagcgcgcgagaagctctaggacccagcagcggttgtcgggtttggggctggaggtgaagccctgtgtgaatggggttgattgtccggcgccacttccccgcgctgcccggcagccgtcttccccagccgagggactgaactagccatgatcgcctcatgtggagggcaaagttgcgccggggaacttgtgagcctgcggtgaaagggtccccttctgcttgttatagccccagtagtcctgtccaggttctagaagactccacctacttttccccagactttcagctctattctgggaggcatgaaacatctgctttgacggtggaggcaaccagtagcatcagggaaaaagttgttgaagatcctctttgtaacttccactccccaaacttcctgaggatctcagaggtggaaatgagaggttccgaggatgcggcagctggaacagtattgcagcggctgatccaggaacaactgcggtatggcaccccaaccgagaacatgaacttgctggccattcagcaccaggccacagggagtgcaggaccagcccatcctacaaacaacttttcttccacggaaaacctcactcaagaagacccacaaatggtctaccagtcagcacgccaagaaccgcagggtcaagaacaccaggtggacaatacggtgatggagaaacaggtccggtccacgcagcctcagcagaacaacgaggaactgcccacttacgaggaggccaaagcacagtcgcagttcttcagggggcagcagcagcagcaacagcagcagggggcggtgggccatggttactacatggcagggggcaccagtcagaagtcccgaactgaggggaggcccactgtgaaccgtgccaacagtggacaggcgcataaggacgaggcgctgaaggaactgaagcagggccacgtccgctcgctcagcgagagaatcatgcagctgtccctggagaggaatggggccaagcaacaccttcccggctcggggaatggaaagggcttcaaagtaggaggggggccctcccctgcccagcctgcaggtaaagtgctggaccctcggggtcctccacctgagtaccccttcaagaccaagcaaatgatgtccccagtcagcaagacccaggagcacggacttttttatggtgaccagcaccccgggatgctccacgagatggtcaagccctaccctgctcctcagcctgtgagaacagatgtggccgtcctgcggtaccagccaccccctgagtatggggtaacgagccgcccatgccaacttccgttcccatcaaccatgcagcagcacagccccatgtcctcccagacctcttccgccagcgggccactgcactctgtctccctgccgcttccactcccgatggccctgggtgctccacagcccccgcctgccgcctcccccagccagcagcttggtccagatgcctttgcgattgtggagcgagcccagcaaatggtggagatattaacagaggagaaccgggtgcttcaccaggaacttcagggttactacgacaatgccgacaagctccacaagtttgaaaaagaacttcagagaatttcggaagcctatgaaagtctggtcaagtctaccaccaagcgagaatcgctggacaaggccatgagaaacaaattggaaggcgagattagaagacttcatgatttcaacagagacctccgagatcgactagagactgctaacaggcaactatccagcagggaatacgaagggcatgaagacaaagctgcagaggggcattatgcttcccagaacaaagaattcttgaaggaaaaggagaaattagaaatggagttagcagcagtgcggactgcaagtgaggaccatcggagacacatcgagatcctggaccaggctttgagcaacgcccaggccaggcatcaagctggaagaggagttacgagagaagcaagcatatgttgagaaagttgagaagctgcagcaggccctgacccagctgcagtctgcatgtgagaagcgagaacagatggagcggagactgcggacttggctggagagagagctggatgcactgagaacccagcagaaacatggaaatggccagccagccaacatgccggaatacaatgccccagccctcctggaacttgtgcgggagaaggaggagcggatcctggccctggaggccgacatgacaaagtgggagcagaagtacctggaggagagcaccatccgacactttgccatgaatgccgcagccactgcagcagctgagagggacaccacgatcatcaaccactcacggaatggcagctacggagagagctcgctggaggcccacatctggcaagaggaggaggaggtggtgcaggccaacagaaggtgtcaggacatggaatacactattaaaaatctccatgccaaaatcatagagaaagatgctatgattaaggtcctgcagcagcgatctcgtaaagatgccgggaagacagactcctccagcctacgtcctgcccgctccgttccatccatagcagcagctactgggacacactctcgccagacctctcttaccagcagccagctggctgaggaaaagaaggaagagaagacctggaaggggagcataggattgctgctggggaaggagcaccatgagcatgcctctgccccactgctgccacccccacccacctcagcactgtcctccatagcctccactacggcagccagcagtgcccacgccaagacaggcagcaaggacagcagcacacagactgacaagagtgccgagctcttctggcccagcatggcctcccttcccagccgcggccggctgagcacgacccctgctcacagccccgtcctgaaacacccagcggccaaagggaccgcagagaaactggagaactctcctggccatgggaagtcgcctgaccacagaggccgggtcagcagcttgctgcacaagcccgagttccctgatggagagatgatggaagtcctcatctaactgccatccctgtggaatttcagtacagaacactgacaaacaaggaaagcggcagagaaagaagaaagacctagaaggttgtagatgggaaatcaggaatgatttgaactgataaagatttcagactcataagaacacattttataaatgttaaacacaaaaactacatgactgaagatagaagagaatgcgatggattttattacacatggtggaagagagaagaggcgtgtaggtttgcaaacaaagttaagaaataggaaactgaatttttcattgtacagaaaatgtatctcttggggagggcctgtgtacccccattctctgattataaacagataaacccaaatgtggatcatccttggaatacccccattctccttgcctcttagcatgtttgatttaagaaaagcctccaggaaatcttgagagcctgtcttggcataatgcagtgtcacctgtgccaaccatggggtgtcccgtgagtgtgagtgtggcagtgagaagaagcatcgagggcgaggggaatatgaaagttggtcttcacctaattacctgtttggtttggattttcaagagatgattgggcttcttagcttttctgaattctgcagtattttctaaacaggatagattatgatctcggtccccatccatcctaacttctgagttcatctctgtctctgctttacagtctttaattttttgttgttccttcatttttttctttttaataagacatagcagaattccttaggtatgggatttatgagaccagtacctgaactgtcatcattcctactgtgtttgatagtgaccagtaggacaaagccacgtgccgacttcctggctgcttcacctttgcatagctgggttgcagctgcgaacctcattctgactgtgaactaagcaagctttgaggaggcaggagattccgtgggtccctgtgacatattgcattaagatcgtggcacttgcttttttgtctttcacatcggctgtcttgcaaggagcttgacatttccaaattccattgctctgtttggggaagacttaggacagcactccaggaaacagatgacaatttacagacagttgtctcagtggtttccagaatctcaccagcctcccgtatagcttcttgtattgaggctcatgagcgtattcacactctttcctcccccgcgcacgcctctgcttgctctcgatcagcatccagacctccgtggcaccaggttgcctctgttgtgaacttcttttgtaacctaccaggccagttgtatatacagtgttgtcaggtttttccgggtttcagttttgaggcagtttattcaaagtgagacagaagtgccacggaaaagaggcaggagtgtgttaggtggtgggtccattagacctctgctgtgacattgcatattcagctctgcagacactggcttcctttacaaatctaagagatgctggattagaaaagaggagaagctcatcgggccatcagagagatgctcctacagggtcctgatgtttttgtacctccaggtcagctggatcgctgttttcccagttccctttgctcatgcttacttagaggaagaaagaaaggggggtacctcttccaagtaccttctaaatgaaacactcaagagagtgctactcaggaaactttgcttggatcctaaaatggactggtcttgggtgtgtaaccccggtgaagttatagcctccccaaattgaggtgacagaaggaagacaagaggtgtaagctggagagggaagggaagaaatcagtggctttggccagcctctgtgccacccagtacgacagaggagtgggaactggccctctggggctctgcttggccataggcactgcacattgtgccacctgctcatcacctcctctagtctcacactgagcatcggagtacctgttgtgcagacaggaaaactgaggagctctgagaggctgagcatggagctcaccccatgccatagggtgtgggaagagggcacaggaggcctcatccatgggggaaagggttgaggatggacatgggtggggagagggcatagacatcccttcctaatctctgttcccaccacatttcataggagatgagttaggagatgacagctaactctcttaaggacattttgaccccagtttatgttggggatggaccagaaaggaaaatgtctagagataggaaggtaaatcaactctgccagcccctaccatcaggtctgggccaccccaaacttgggctgcctcccttagacataggttagagtgagagacccagctgtttctcccgaagcctcgtcttcatgccccagacacctgattgccccaatcaggtgtcagacttgcttgctcttcgaggtccccctgagctgccaagtgttttcattgtaaacagacacatcgccatgtttcagggcttcaacggcattgtattttggactttgaccgtattttttttctcttaacctactgagactcttccttaagaacaggatctatagctttaaaatgtcttcttctatgggaaatttcctgccaagccagggcactaaattctttcatcattagagctttcctgaagtccggccatatactgagtacctgctctgagttctgggcagcttacaatatcttaaacagattttcagaaaaataatgcaactatattttctagtgtcaactgtatgcaaacagtgtggtaaataccttttaattagtcctccacccacctggagtacagggggtgcgtttattattctgatttcactgatgaggaaatgggctcagaaaggttaagtcccttcctgaaatctcacagccaggagaagctaggatgatttaaaacaaagtttggagaggcactgggcatagaccctggctgtacagcctctaacatgcggcactgcatcttggcagtctctatgcctgtctgtgatgtgtgtgtgcacgtgtaactacacacacacacacacacacacacacacacacacacagctatcacacatctcagagcctaagaaataggactaagcccagaactcctagaatcacctataaatgctaggcatagatggaaattattgtgttccaccagaagcacagctccaaactatacctaaaaaatatttctgcacttcccagagacctggacttcaaactttcccagtggagcctgattatagaacttgagggtcctatctcaggatgaaggggagaggccctggcttcacgggaaggtattccagcattgttctgcttcacccttgactgcgttgtctggcagtttctgtgtgctgccaggatattatatggaactggagaagttggagtcaggtctctgaagctagagtttcactaattagatgcctctgtacatgagaactattactgtctgcaggtccatatagctaagctgccaggaaaaacacattatcttccaaaactttcagagcatgtgcagaaccctttcttagcgttttcttctcagcattttctctgcctcccagaggctggcagccagtgacactgcagagttcagcatgttctaaccatgcacgcagggcaggggctgccttggccctcctcaggctttcgttgggagagcaggcagtggtggagcccttctgggtgcagtcctctggggttgctctttggaactcatgtatgagtttgactccacaaggcttggcatggataccaaaacagttgcaacaaattagttctgaacctggaacagagaattcagtgcttctgttactcaggaaggaggtgttcagaatgccccgtgcagagcagccagtcattactcttgtttgttctcacctgggtgcgcaccctcatgatgcagtggctgtagcaccttcatgccaggtgctgagagaatgggaaattcttcctccccattgacctgagtcccagagacttagggacacagacttcaggtgaggctgcggacctcagaagcagtggataatagattggggcattaaaagcttttgaggcagggggctcatgttttgactgcagggagttatgctgagcaaagagatgtgtttttcaaaaccagggttcaaaaccagtgtccacgctggagtaagtggagcatgcttctctgtgttctctgaatgatcttgcactcctcttaagcaaaggagtaccatgaccatagtcagtgggatcccacaaatgttcttaaatgggtaaggctttaagtagccagagagtatccagcctaccattggcttctccacatcctaaaacctgagacagccttggtatatgctttataaatgtttcttttcttgttgtttaagtaattaaagtgtttaaaatgtcttcattagatgtgacgattgtttaatgagtttgcctctgacgtgtggctccatgggagataggcaaagtaattaagaagttaccagaaattggtcggctggggaaatgcaaaagttagcatttcagtagtgaatttctcctggaacaaatgagcaatttttcctctttctcttaagtagtatacccttttctcacttagtaatttaatggtatataaagacatgtgtataagtgagtgcatacatatgaggtatgactatagggttgtttgtgggaatttcttttcctaacatacagaagatcaaagtgttcatctcaccccgccctccttaaaaggtgtcttttgggagactatgtgctcattgactatagtgctgccaagtaaaaatatcttgggaactcttctactagaatggccttcagggcttggcatgttcctttggtttacccttagagatgagaaatcctcctcctttgaggatggatttaagttctggaaataatctcaagtgcttgatagcacagttggatgaaaaaagatggcaattaaggtaagttacaccatttttgtttctaaaaaaatccctaagaaatttcttggaatgagtctttggcctcagagcctctcaaagtgtccacttcaaggggggatcatcctcattagcacacagatttttaaaaatcaattctcttgccatgcctcctatgtgttcacatctctgcatacactacagatataagtgcataatcattcatataaacatctggtaggtattctgtaaaactgtgtttactttagtgcatgttattgtcatgttatgatgtgactggggtgtttctttgtcatgaaactttgcttcttcacagaattagaatactgctctctctatattgaactacatatacagcgttttcttgtatcagcccccaaagtctggatgcccggtgttgtgtttacatgtgattgtgcctaggagtctgttcacatagagacacctgtaagtatttattacaaaacggaatgtaagcaaatatatccacattggttttatttgaatcaaggtgtttttttgttttttgttttttttccttttgaggaggaacagggagcctcctcctccatgagcacttacagaattgtgtaaaattctgtgaaacagtggtaagcatgggcacccgatttcagctgtcctgctgccgctgccctccaacctgctctgtgtgtgtgtgtcgctgtgcttggtggcagtgtgccgtgctcgtgccggctcttcccagcagactggtatctggctgtaacgtttgacgtcttcatattgccagtctgtattgaggggtgatgtacatggccatacagccaaatgggtctgtgtaccagtgtggggattccaagaacactgcctgtcccccacagcaaatattgatgctgttggtcagccaaagattttcctctcctttgctgcttaaacttgtgccttaatattgtacataataaatggataaaatggcaaaatgactcttttctctcgcttgctcctttcttccttaaagaacttataaactgatgctcaataaatgtttcatttcattgtacccca

SEQ ID NO: 234387 - DNA, 1632 bp, Artificial Sequence
  derived and/or modified sequence
atgtggcgggccaagctgcggcggggcacctgcgagcccgccgtgaaagggtccccatctgcttgttactcaccatcgtcacctgttcaggtcctggaggattccacatatttctccccagactttcaactctactctggacgccacgagacatctgcgcttacagttgaggctacgagctcaatccgcgagaaagtagttgaggatccgctctgtaactttcacagccccaactttcttcgaattagtgaagttgaaatgagaggatccgaggacgccgccgcgggcactgtgctgcagcgtcttattcaggagcaactccggtatggaactccaactgagaatatgaatctgctggctattcaacaccaagccacagggagtgccggcccagcccatcccacaaataatttcagttcaacagagaatctcacacaggaggacccccagatggtgtaccagagtgcccgtcaggagccgcagggtcaggaacaccaggtagataacaccgtcatggagaagcaggtccggtcaacgcaaccacagcagaacaacgaagagttgcctacctatgaagaggccaaggctcaaagccagttctttcgcgggcaacagcagcagcaacagcaacagggagctgtgggtcacggatactatatggctgggggcaccagccaaaaaagtagaacggaagggagaccgaccgttaacagagcgaattccgggcaggcccacaaagatgaggctttgaaggaactcaaacaggggcacgtccggtccctctcagagcggatcatgcaactttcacttgagcgtaatggggcaaagcagcaccttcccggaagcgggaacggcaagggattcaaggtaggaggcgggccttccccagcccagccggccggaaaggtgctggacccccgaggcccccctcccgagtatccctttaagaccaaacagatgatgtctcccgtcagtaaaacccaggaacacggtctattctacggggaccagcacccaggcatgctccatgagatggttaaaccttatccagcaccgcagcccgtacgcaccgacgtggcggtgttgcgctatcagcctcccccagagtacggtgtgacttcacgcccatgccagcttccctttccatcaaccatgcagcagcacagccccatgaatttcaggactagtctaacaagttctcagctcgcggaggaaaaaaaagaagaaaaaacctggaaaggaagcatcggacttctgctggggaaagagcatcacgagcacgctagtgccccattgttgcctcccccacccaccagcgccctgagcagtattgcatccacaactgctgcctcttccgcccacgccaagactggctccaaggatagttcaacgcagactgataaaagcgctgaactgttctggccttccatggcatcactgcccagtcgtggaagactgagcactacaccagcccactctccagttctaaagcatcctgcagccaaaggcacagccgaaaagttagagaattcacccgggcacggcaagtccccggatcacagagggcgggtgagttctttactgcacaaacccgaattcccagacggagaaatgatggaagtgttgatctag

SEQ ID NO: 234388 - DNA, 2871 bp, Artificial Sequence
  derived and/or modified sequence
atgtggcgggccaagctgcggcggggcacctgcgagcccgccgtgaaggggagtccttccgcctgttactctccctcctccccagttcaagttttagaggactccacctattttagtcctgatttccagctgtactctggccgccacgagacctcagctctgaccgtggaggcaacctcttctatccgggagaaagtcgtggaggaccccctgtgtaatttccacagtcctaatttcttaagaatatccgaagttgagatgagaggaagcgaagatgcagctgcagggacagtcctgcaaaggctaatccaggaacagctgcgttacgggactcccactgagaacatgaatctgcttgctatccagcatcaagcgaccggctctgcaggtccagctcatccaactaataatttcagctccacagagaacctgacccaggaggacccccagatggtgtatcagtcggcacgtcaggaaccacaaggccaggagcatcaggttgacaacactgtgatggagaagcaggtgcgaagcactcagccccagcagaacaatgaggaactgccaacatatgaagaggccaaagcccagtcgcagttcttcaggggccagcagcaacagcagcagcaacagggagccgtggggcacgggtactacatggcagggggtacatcgcagaagtctaggaccgaaggccggccgaccgtcaatagggctaacagcggacaggcacataaagatgaggccctgaaagaactgaagcagggacatgtgcgctccctaagcgaacggatcatgcagctgagccttgagcgtaacggtgccaaacagcacttgcctggcagtggtaacgggaaaggcttcaaggtggggggcggccccagcccggcccagcctgccggcaaagtgctggaccccagggggccaccccccgaataccctttcaagactaagcagatgatgagtcctgtgtccaaaacacaagaacacggcctgttctatggcgatcaacatcctggtatgctccatgaaatggtgaagccctatccagcgcctcagccagtgagaaccgacgtggccgttctgcgatatcagccacctccagagtacggggtgacttcccgtccctgtcagctcccgttcccttcaaccatgcagcagcactctccaatgagtagccaaacttcctcagccagtgggcccctccacagcgtctccctgccactccccttgcccatggcactgggggcccctcagccccccccagccgccagtcctagccagcagttgggtcccgacgctttcgcaatagttgaaagggctcaacagatggtggaaatcctcacggaagaaaaccgcgtgttacatcaggagctgcaaggttactatgataacgccgacaaactgcataagttcgaaaaggaactccagaggattagtgaggcctacgagtcactggtgaaatctaccacgaaaagagaatccctggataaggccatgagaaacaagttagaaggcgagattagacgcctgcacgacttcaaccgcgacttgcgcgatcgcctggaaaccgccaacagacagctatcctcccgcgaatatgaagggcatgaagacaaggctgctgagggtcattacgccagccagaataaagaatttctcaaggagaaagagaagttggaaatggaattggcggcagtccggactgcttccgaggaccatcggcggcacattgagattctcgaccaggcactgtccaacgcccaggccagggtgattaagttggaggaagaattgcgtgagaagcaagcatacgtcgagaaagtcgaaaagctgcagcaggccctgactcagctccagagcgcttgcgagaagcgagagcagatggaaagaaggttgcgtacatggctagaacgcgagttggatgccctgaggacccagcagaagcacggcaacgggcagccagccaatatgcctgagtataatgccccggctttgttagagctcgtcagggaaaaagaggaaagaatcctggcgctggaggcagatatgactaagtgggagcaaaaatacctagaggaaagtaccattcggcacttcgctatgaatgctgctgccacggctgctgccgagagagacacgaccattatcaaccactcccggaacggctcttatggcgaatcctctctggaagcccatatatggcaggaagaagaggaagtcgttcaggccaataggcggtgccaggacatggagtataccataaaaaatttgcacgctaagatcattgagaaagacgccatgataaaagtgttgcagcagaggagtcggaaagatgccggcaaaactgactcctccagccttaggcccgccagaagcgtgccctcaattgcggcagccactggaacccactcgcgacagacatccctgacctcttcccagctcgcagaagagaaaaaagaggagaaaacatggaagggttccatcggattgctgctcggtaaggaacatcacgaacacgcctccgcaccactcctgccgccgccccccaccagcgcactcagttctatcgcatccactactgcagcctccagtgcgcatgcaaaaactggaagtaaggattcgagcacacagaccgacaagagtgcggagctcttctggcccagcatggcttctttaccttcacgtggacgcctgtccacaacacccgcacactcaccggttttaaaacaccccgcggctaagggcaccgcagagaaactcgagaatagccccggacacggaaaaagccccgaccacaggggacgagtgtcttcactgttgcacaagccggaattccccgatggagagatgatggaagtgctcatctag

SEQ ID NO: 234389 - DNA, 1836 bp, Artificial Sequence
  derived and/or modified sequence
accagccacgaccggctgatgtggcgggccaagctgcggcggggcacttgtgagcctgcggtgaaggggtcgccctccgcttgttattctccatccagccccgtccaggtcctggaagactcgacttacttctcacctgactttcaactctactccgggaggcatgaaaccagcgccctgactgtggaagcaaccagctccattagagaaaaagtggtcgaagaccctctatgcaattttcatagtcctaactttctacgaatttctgaagtggaaatgcgaggttccgaggatgcggccgccggaactgtgcttcaacgactcatccaggagcaactgagatatggtaccccaactgaaaacatgaacctgcttgccatacaacatcaggcaacgggatctgcaggtcctgcccacccgacaaacaatttcagctctactgagaatttgactcaggaagatccccagatggtctaccagtccgcaaggcaagaaccccaggggcaagaacaccaggtggacaacacagtgatggaaaaacaggtacgtagcacacagccacagcaaaataacgaggagttgcccacctacgaggaggccaaggctcagtcacagttcttccgcggtcagcagcagcagcagcagcagcagggtgccgtagggcacggctactacatggccggaggaacaagccagaagtccaggacagaaggtaggcctactgtgaacagagccaacagcgggcaagcccataaagatgaagccctgaaggagctgaaacaggggcatgtgaggagcctctctgagcgcatcatgcagctcagcctggagagaaatggcgcaaaacaacacctcccaggctccggaaacgggaaaggattcaaggtcggtggggggccttctccggcacaaccggctggcaaggttctggatccaaggggtcccccgcccgagtatcctttcaagaccaaacagatgatgagccccgtttcaaagacccaggagcacggactgttctatggagatcagcaccccggtatgctacacgagatggtaaagccttaccctgctccacagccggtccgcacggacgtggccgtgttgaggtaccagcccccccccgaatatggcgttactagccgcccttgtcagctcccctttcctagcaccatgcaacagcacagtcctatgagctcccaaaccagtagcgcgtctggtccgctgcactcggtaagtctgcctcttccattacccatggctctcggtgccccgcagcctccccctgccgcttctccctcccagcaactaggtcccgacgcctttgcaatcgtagaacgtgcccagcagatggtggaaatcctcactgaagaaaaccgcgtactccatcaggaactccagggttattatgataacgctgacaagctgcacaagtttgaaaaagaactgcagcgtatttctgaagcttatgagtccctggtaaagagcactaccaaacgcgagagcctcgacaaggccatgcgaaacaagttggaaggagagatccgtaggctacatgacttcaatcgcgacctgagggatcgcctggaaaccgccaatagacagctttcctctagggaatatgaaggacacgaagataaagccgcggagggccattatgcgtcccagaacaaggagttccttaaggagaaggaaaaactggagatggagttggcagcagtgcgcacagcctccgaagaccaccggcggcatatcgagatactggaccaggccctctcgaacgcacaggctcgacatcaagccggtaggggcgtcacacgcgaggcctccatttgctag

SEQ ID NO: 234390 - DNA, 1632 bp, Artificial Sequence
  derived and/or modified sequence
atgtggcgggcaaaactgagacgtggcacatgtgaacccgcagtcaaaggttctcctagcgcctgttattctccctcttcaccagtgcaggtcttggaagatagcacttacttctccccagatttccaattgtactctggtaggcacgagacctccgcactgactgtagaggccacaagtagtatccgagagaaggttgtcgaggacccgctgtgtaattttcactcccccaactttctaaggatttcagaagtagaaatgcgtggcagcgaggatgccgcagctggaaccgtgctgcagcgcctgatccaagaacagcttcggtacggaacacctactgagaatatgaatcttctggcaattcaacaccaggcaacaggcagtgcgggacccgctcatcccactaacaacttttcctctacagagaacctcacacaggaggaccctcagatggtgtaccagagcgcccgacaggagcctcagggccaggaacatcaggtcgataacaccgtcatggagaagcaggtgcgcagcactcagccacagcagaataatgaagaactccctacctacgaggaagctaaagcccagtctcagtttttccggggacagcagcagcagcaacagcagcagggagctgtgggccacgggtattatatggcgggaggtacaagccagaaaagtaggactgaagggcgacctaccgttaaccgcgcaaactctggtcaggctcacaaagatgaggccctgaaggagctgaaacaaggtcacgtgcgtagtctgagcgaacgtattatgcaactttcactcgagagaaacggggcaaagcagcatttgcccggatctggtaacgggaaggggtttaaagttggcggagggcctagccccgctcagccagctggcaaagtgctcgatccccgtggtccacctcctgagtatcctttcaagacaaaacagatgatgtcacctgtaagcaagacgcaggagcatggattgttctacggagaccagcacccgggaatgttgcacgagatggtgaagccttatcctgcaccccaaccagtcaggaccgatgtcgctgtcctccggtatcagccaccacctgaatatggggtgacatcccgaccttgtcagctcccttttccatcaactatgcagcagcactcgccgatgaactttcgcacctccctcacctcctcccaacttgccgaggagaagaaagaagagaagacttggaaaggttctattggcctcctgctgggtaaagagcaccatgagcatgctagcgcgccactgttgcccccacctccgacatccgcactgtcctctattgccagcacgactgcggcttcttctgcacacgcaaagacgggcagcaaggactcgtccacacagacagataagtcggcagagctgttctggccatcgatggcaagcctgcccagtcggggtcgtctgtccaccaccccagctcactcacctgttctcaagcaccctgccgcaaaagggaccgctgagaagcttgagaattcaccaggccacgggaagtcaccggatcatagaggtagggtatcaagcctgctgcacaaacctgaattccccgacggagagatgatggaagtgttaatatag

SEQ ID NO: 234391 - DNA, 2871 bp, Artificial Sequence
  derived and/or modified sequence
atgtggagagcaaagctaaggagaggcacatgcgagccagccgtgaagggatctcccagtgcctgttatagcccaagtagccctgtccaggtgctcgaggatagcacctacttctcaccggatttccagctttactccggaaggcatgagactagcgcgctgacagtagaggctaccagctcaatcagagagaaagtcgtggaggatcccctgtgcaacttccactcccctaactttcttcgaatatccgaggtggaaatgagaggttccgaagatgcagccgctggcaccgtgctccagcgcctgattcaggaacaactgagatatgggactcccactgagaatatgaatctcttggctatccagcatcaagcaaccggctctgccggacccgctcaccccacaaataacttctcatccaccgagaacctaacacaggaagaccctcagatggtgtaccagtccgcacgccaagagcctcaaggccaagagcatcaggtggacaatactgtgatggaaaaacaagtgcggagcacccagccccagcagaataatgaggagctgcccacttacgaagaggccaaggcacagagccaatttttccgaggacagcagcaacagcagcagcaacaaggagctgtcgggcacggttattatatggcgggaggaacgtcccaaaaatcacggacagaagggagacctacagtaaacagggccaacagtggtcaggcccataaagacgaagctcttaaggagctcaaacaagggcacgtgcgctccctctcggagagaatcatgcagctgtccctagagaggaatggagctaagcagcatcttcccggatctggaaacggaaaggggttcaaggtgggcggtgggccatcaccggctcagccagctgggaaagtgcttgaccccaggggtcctcccccagaatacccatttaagaccaaacagatgatgtccccggtgagcaaaacacaggagcacggtctgttctacggagaccagcaccctggcatgctgcacgagatggtaaagccttatcccgcaccccagcctgttcgaactgatgtagctgtcttaagataccagcctccccctgaatatggagtcaccagccgcccatgtcaactacccttcccatcaactatgcagcagcacagtcctatgtcttcccagacctctagtgctagtgggcctctccactctgtctcactccctctgcctcttccaatggccttgggcgctccacaacctcccccagccgcatctccctctcaacagctaggtcctgatgccttcgctattgtggagcgggctcagcagatggttgaaattctgaccgaggagaaccgcgttttgcatcaggagctgcagggctactacgataacgctgacaagctccacaaatttgaaaaggagctgcagaggatatcggaagcatatgaatcactagttaagtcaactacgaaacgcgagtctctcgataaggccatgcgcaataagctggagggggaaatccggcgactccatgattttaatcgtgacctgagggacaggctcgaaacagctaatagacagttatcatctagagagtatgaggggcacgaggacaaggctgccgagggccattacgcctcccaaaataaggagtttctcaaagaaaaggaaaaattggaaatggaactggcagcagtccgtaccgcatccgaggatcataggaggcacatcgagatattggaccaagctcttagcaacgcccaagcgagagtaatcaagctcgaggaggaacttagggaaaaacaggcctatgtcgaaaaggtggagaagctccagcaggcactcacccagcttcaatcggcctgtgaaaagcgggaacagatggaaaggagactacgtacttggctggagagggaattggatgctttacgcacccagcagaaacacgggaatgggcagccagcaaacatgccagagtacaacgctccggcacttcttgagctggttagggagaaagaggagcgcatcttggctctcgaggccgatatgacgaaatgggagcagaaatacctggaggaaagcactatcaggcactttgccatgaatgcagccgctactgctgccgctgagcgcgatacaaccataatcaatcactctaggaacggctcatatggagagagttctctggaggcccacatctggcaggaggaagaggaggtagtacaggctaatcggaggtgtcaagacatggagtatactattaaaaatctgcacgccaaaataattgagaaggatgctatgataaaagtgctgcaacagcggagcaggaaagatgccggaaagacggactccagcagtctgaggccagctcgcagcgtgcctagcatcgccgcagccaccggcacacatagccgacagaccagtctgacttctagtcagcttgccgaagagaagaaggaggaaaagacctggaagggatcaatagggctgttattaggcaaggaacaccacgaacatgcttccgcgcctcttctgcctccaccaccaacaagcgctctgagctctattgccagcaccactgccgctagttctgcacacgccaaaactgggagcaaggattcaagtacccagacagataaatcagctgaactcttttggccgagcatggcttctctcccatcacgagggcgtctcagcactacgcccgctcacagccctgtgttaaagcacccagctgccaagggaaccgccgagaagctagagaatagtcccggacacgggaagagtccggaccacaggggtcgagtctcttccctgttgcacaagcctgagttccccgacggtgagatgatggaggttctcatctag

SEQ ID NO: 234392 - DNA, 1836 bp, Artificial Sequence
  derived and/or modified sequence
acgagccacgatcggttgatgtggcgggcaaaattaaggagaggcacctgtgaacccgctgtaaaagggtcaccaagtgcttgttactctccatccagccccgtacaggtcctggaggattccacgtattttagcccggacttccagctgtatagcgggaggcacgaaacttcagccctgacggtggaggctacaagcagcattcgcgaaaaagtggtggaagaccctctgtgcaacttccactccccgaacttcctgagaatcagcgaagttgaaatgcgcggttctgaagatgccgcagcagggaccgtcctgcaaagattgatccaggaacagttacgctatggtactccgaccgagaacatgaacttgttggcaatccagcatcaggctacagggagcgccggacccgcacatcctactaacaacttctcttcaacagaaaatttgactcaggaggatccccagatggtctaccaaagcgctcgacaggagccgcaggggcaggagcaccaggttgacaatacagttatggagaaacaagttagatccacacaaccccagcagaacaacgaagagcttcccacatatgaggaagcaaaagcccagtctcagtttttccggggtcagcaacagcagcaacagcaacagggcgcagtcggacacgggtactacatggccggaggaacatcccagaagtccaggaccgagggaagaccaaccgtcaacagggctaacagcgggcaggcccataaggacgaggcactaaaagaattaaagcagggccatgtgcgcagcctgagtgagagaatcatgcagttgagcctagagcgaaacggtgccaagcagcatctcccaggctcgggcaacggcaagggctttaaagtggggggtggccctagccctgcccagcccgcaggcaaagtgctggaccctagggggccaccaccagagtatccgtttaagaccaagcagatgatgtcccccgtttcgaaaacacaggagcacggattgttttatggagaccagcaccccggtatgctacatgaaatggtgaagccctacccagctcctcagcctgtgcgaacagatgtcgccgtgctccgctaccagcctccaccagaatacggcgtaacttcaagaccttgccaactgcctttcccgtccacaatgcagcagcattcccctatgagctcgcagacaagctccgcgagcggcccacttcacagcgtgtcactgcccctgcctcttccaatggccctcggggcacctcagcctccgccagccgcaagccctagtcagcaattgggccctgatgcgttcgctatcgtcgaacgcgctcagcagatggtcgagatcctgactgaggagaaccgcgtgttacaccaagagctacagggctactacgataacgccgataaacttcacaagtttgagaaggagctgcagaggattagtgaagcctacgagtctttagttaagagcacgaccaagcgggagtccttggataaagccatgaggaacaagctagagggcgaaatccgccgactgcatgattttaatagggacctgcgtgacagactggaaacagccaaccgtcagctaagctcccgcgaatacgagggacacgaggacaaagccgcagaaggtcattacgcaagccagaataaggagttcctaaaagagaaagaaaagctcgaaatggagttagccgcagtaaggactgcctctgaggaccatagacggcatatagagatcttggaccaggcgctgagcaatgcccaggctaggcaccaggccggtcgaggagtcacaagggaggcgagcatatgctag

SEQ ID NO: 234393 - protein, 244 aa, Artificial Sequence
  derived and/or modified sequence
MHYGAATHIQNSRSHGLETVPGHQRLERGAGGETPEFPGCHSPAPPENFGNELLPLSAPLQGLSEGLYPPGRNKTLPAGVLREGAVQFLHRGLCNSNLSSEASARPSGTQDELHSSRRKTGQTRREGARKHLVCSFRLYPFTVHTVSPGNSHLALYQVFKAVKLCPSETSFFLSRKSLKSSDPWHPPSLSPNSWNRQAGFRAWSSHLISLSLTCSDSQSRRVSSSQQPPLHSLSSHRRAAHVPE

SEQ ID NO: 234394 - DNA, 735 bp, Artificial Sequence
  derived and/or modified sequence
atgcattacggcgccgccacgcatattcagaactcgaggagccatgggctggagacggtacctgggcatcagagattagaacgcggcgcggggggcgagacccccgaattccccgggtgccacagtcccgcaccgcctgaaaattttggcaatgagctcctcccacttagcgccccactgcaaggccttagcgagggcctgtacccgcctggacgaaacaagactttacctgcaggcgttctacgagagggggccgtgcagtttctgcatcgcggcttgtgtaactccaacctctcatccgaggccagcgctcgaccgtctggtacacaggacgagttacactcctctcgcagaaaaaccggccagacccggagagagggcgcccgcaagcatctcgtttgcagctttcggctatatccgttcacagtgcataccgtgagccccggaaactctcatctagctctgtaccaggtgtttaaagccgtcaaattgtgcccaagtgagactagcttctttctttcccgcaaaagcttaaagagttctgacccatggcacccaccaagcctttcccctaactcctggaacaggcaagccgggtttcgagcatggtccagccatctcattagcctgtcactgacctgttctgattcacagtcgcggcgcgtgtcctctagccagcagccacctctccacagcctttcctcacacagacgggctgcacacgtccctgaatag

SEQ ID NO: 234395 - DNA, 735 bp, Artificial Sequence
  derived and/or modified sequence
atgcactatggagctgccacccacatccagaacagccgcagccacggcctggagaccgtgcccggccaccagaggctggagcggggggccggcggggagaccccagagttccctggctgccacagccctgcccccccagaaaattttggaaatgagctgctgcccctgagcgcccccctgcagggcctgtctgagggcctgtacccacctggcaggaacaagaccctgcctgctggggtgctgcgggagggcgctgtgcagttcctgcaccggggcctgtgcaacagcaacctgagcagcgaggccagcgcccggcccagcggcacccaggatgagctgcacagcagcaggaggaagacaggccagacccggcgggagggcgccaggaagcacctggtgtgcagcttccggctgtaccccttcaccgtgcacacagtgtccccaggcaacagccacctggccctgtaccaggtgttcaaggctgtgaagctgtgccccagcgagaccagcttcttcctgagcaggaagagcctgaagagcagtgacccctggcacccccccagcctgagccccaacagctggaaccggcaggccggcttccgggcctggagcagccacctgatcagcctgagcctgacctgcagcgacagccagagccggcgggtgagcagcagccagcagccccccctgcacagcctgagcagccacagaagagctgcccacgtgcctgagtag

SEQ ID NO: 234396 - DNA, 735 bp, Artificial Sequence
  derived and/or modified sequence
atgcactacggcgccgccacccacatccagaacagccggagccacggattagaaaccgtcccaggacatcagaggcttgagcgaggggcaggaggtgagacccctgaattccctggatgccatagccctgctccccccgagaatttcggcaatgagctcctgcccctgtccgctccgcttcagggtcttagcgaaggactgtaccccccagggcgaaacaagaccttacctgccggcgtactccgtgaaggcgcagtgcagtttctgcacaggggactctgcaactcaaatctcagctctgaagctagcgcccggccatcaggcacccaagatgagcttcacagtagccgcaggaaaacaggccagactagacgtgagggggccagaaagcacttagtgtgttcattccggctatatcccttcacagtccacaccgtgagccccggaaactctcacctagctttgtaccaggtgttcaaggcagtcaaactctgcccatctgagacctccttcttccttagccgaaagtccctcaagtcttccgatccctggcaccctccttctctcagccccaatagctggaacaggcaagccggattccgcgcctggagtagccatctgatctctctgagccttacatgcagtgattcccagagccgccgagtgtcctcttctcagcagccaccgttacactctttaagttctcacaggagggctgcacatgttcctgagtag

SEQ ID NO: 234397 - DNA, 735 bp, Artificial Sequence
  derived and/or modified sequence
atgcactacggggctgcgacgcacatccagaacagtcgcagccacggtcttgagacggtgcccggtcatcaacgtttggagcgaggagccggtggcgagactccagagtttcctggctgtcatagccccgcaccacctgaaaactttggcaacgagcttctgcctctcagtgcaccccttcagggtctgtcagaaggcctttacccgcctggacggaacaaaacactccccgctggcgtcctcagggagggtgcagtgcaattcttgcaccggggtctatgcaacagcaatctcagttccgaggcaagcgccagaccttcaggtacccaggacgagttgcattccagcaggcgaaaaacgggccagactcgtcgcgaaggagcgcgtaagcacttggtgtgctcctttagactgtacccctttacagtgcacacagtgtcacctggcaattcccatttagctctctaccaggtgtttaaggccgtgaaactctgccctagtgaaacaagcttttttctctcacggaagtcattaaaaagtagcgacccatggcacccaccgagtttgtcccccaactcctggaatcgccaggctgggttccgcgcttggagctctcatctgataagcctgtccctcacctgctcagacagtcagtccaggcgggtgagctcttcccaacagcctccgcttcactcactgtcatctcatcgcagagcggcacacgttcctgagtag

SEQ ID NO: 234398 - DNA, 5923 bp, Artificial Sequence
  derived and/or modified sequence
ctgcaatgaaaaattacacttctattttctttcctaaagggaaaaaggaagaatgcaacaaaactgaagtatgttctgccacgttcctgaactgcagccataggagccctcccagccctacccaaaccagcctactccctctcaagagctcacagctgcaggactagagccagatgtgccccggcaataaggacttcttccatggagaagcccctcaccgtcctgcgagtgagcctgtaccatcccacgctgggcccatctgcctttgccaatgtcccaccacggctgcagcatgataccagccctctgcttctcggacgggggcaggacgcccacctccagctgcagctccctcgcctctcccgccgtcacctgtccctggagccctacctggagaaaggcagtgccctgctggccttctgcctcaaggccctgagccgcaagggctgtgtgtgggtcaatgggctgacgctgaggtacctggagcaggtccccctgagcaccgtcaacagggtctccttctcaggcatccagatgctggttcgcgtagaagaaggcacatccctggaggcttttgtctgctatttccatgtcagcccttcacccctgatttacagacctgaggctgaggaaactgacgaatgggaaggcatctcccaggggcagcctccccctggttcagggtagcagatccaggttgcctggggtttctccacggcccttcccagacttgggacagccctctccagccaagacctggaggaggaacagaaatacagctccagagggaacccccagacagtgcactctgctagccctgccactagagcaagcctttgctagatgaaacaggatttgaaatacttgagctgcatcatgcaaggttgacaagcaaaacccactggctgccttgctcataatgaaccaattctgcaaacaccgaacaaacagcccaggggggagaagcaccctctgtggccagagctatgcaatgtaatgggaacatcatatacttttagaggccctgaggggttctggggagcctctctcagcatttccacacatttctccctgttgtctgactaggagttactttatgtggttcattttgtgtgctgcttaagagcaggagtttgaggttgcaccaggaatgcgtggacacatgtaacaattacatttgtggtagcttggggttaccttcagctttcaaatacccacaggcacgcggggcttaggaaagcctgagtgtaataaactgcaagtatttcattaagctggcatacccaataggattccctgatccccagatgggccacatgcacgccacgctgtcatgcagacgtgggggtgggaaatatagacgaggtgtaagaggaaattggaaaggtgggactcacatttctggaaaggatgcaggcagggctcagggtttcctgaggatgggagctgggagctgggcctgcctggaaattcattgtcccccttatcatcctcatcctcacactccgcattctctgtcacttctggatcaaggccttggttgacttgagggcaaggtctttagggaatgaggggatggggtgggggtttgtgtaagaactcagcccagcagttatttcgctcagggtgagtcacacaccaatgggggtgggggaattccttccaaataagggactcgttaggagccaggtacgccaagggcaggaggattttctcggtgaacaagggcagcagctatttgccacgccatgctgagaaggggagagtgtggtttagaaacaacgttcactagtgtgatgcagggagggatctacatggtcaccatgatcccagaccccactctccagggaatctgaggcaccaagggcacagccctgttcccctggctgactcgaatctctgggtctgtagctgtcaacaatttctgttttctgcccaaaaggatgatcgttttgcacccagggcaagctacaaggaggtccaacttcactcacaggccctgagcatcttctccatcaggaaaacagaggtgggcaagacccaggcttgccctggtgtgggaagcttcctctccaatagggatgaagcaaaaacactcagatcacagccacaaggcagggagagcagggctgctaggaaggggctctctgatgctgtgaatgaccccttgggacccccaaagcagttcctcattcattcagcaaaccttcaccaagcacccaccttgtgccagatctgtgcaaagccacggaactgaaccagaagtgaataaggcaaactccctcagggagtttaccttgcactcaggaaagtcaagcattcaggagtgcattacttatttgatcactactatgattagtgctatagtcattgtatttttctctctcctccagctgggctcacattctcttgttaagtggccttgcctgttgagtgcctaccatgtgcttagcactctgctaggtgctgtgtgtattaactgcacttaacagataaggaaactgagacttggaaaggttacatatcttgcccaacatcacaccatcagtagctatgcgatttgggcaagtgatttagtctgctcttgcctctatttctcccgctggaaaatgggtaagataatagtactacctgctagagttacgagggtcttagaaggtgacacctgtaaagcattcaatcagtgcccagcacacacttaataagggttagctactatcatgagacctgagagaggagggctcaccatccacacggagctaaggaagactcacaccccagtaagctggctccagaacccaagggcttacctgtgctctgtgattccccaactagggatttagttgtagccacggacctggtaggcaacagggaggggattttaatctgctccttgcatcagaaggtccaataggcagggttagtataatgggagatgccctggtagggctggcaaggagaagaagccacatgtattttggtctgatgaaaagcagcagtgatctgtcactgaccaaaatggtcccccaactatgcattacggagcagcaacccacatacagaactcgagaagccacggcctggagactgtacctggacaccaaagactggagagaggagctggtggggaaaccccagagttcccagggtgccactccccagctccaccagagaactttgggaatgagctgctgcccctgagtgcccctctccagggcctcagtgagggtctctaccctccagggaggaacaaaaccttgccagctggggtcctgcgagagggggcagttcaattcctccacaggggactctgcaactccaatctttcgagtgaagcatctgcgaggccctcagggacccaggatgaactgcatagcagcagaaggaagacaggccagaccaggcgggagggagcccggaaacatctggtttgtagtttcagactctacccgttcacagttcacacagtctcaccgggaaactcacaccttgccctgtaccaagtttttaaggcagttaagctctgcccatccgagacttcatttttcttgagtagaaaatcactgaaatcatcagatccatggcacccaccttcactttctcctaacagctggaaccgtcaggctggcttcagggcctggtcttcgcacttgatatcactatccctcacctgctcagacagccagagcaggcgggtgagttcctcccaacaacctccactgcattctctcagctcccaccgcagggcagcccacgtgcctgagtgaacatgtgtgcgtgtgcacacacgcaagtatgcacagacatacactaaacacgaacatacagtgcacatgaacgctgctcccagctagggccctctggtcagactgctgcctgggttagaattcttgtccccacccccacttactatagttctgtgatcctggacaagtaactgaatctctccgtgccacagtttcttcttgtagaaaacgggaaagttcacagtacttacctccttagagtcattgtgaaggtcagtttgaggcatcacaaatttaaggcacccagacataagggtcaacagggttagctatcactgtccagtttggtgggaggaactgaatgcatgtaggcacatggacccagtctacactcaggcacaaaaggagctacattagttacattcaggcataccccagagcactacaattctctgagacattgtctggaaatctagaaatcatctccttgccctttaaggtattttaaccctcgcattcctctgcttttccaagaatgtgaatcttgccaagctgtccgtgagagacacgggctcccctcgagggagacttgcaaatgctccataaacagccacagtgtggggctctgccatgaggaagtcacagcagacacgctagacagcatagtcctggatgcaacctggaggaagggaggcccatggtggagcactcactccgtgcctgtctgcccggtgagacctcaagttccttgcagacaaaggccatgggttgttggctcttgtgttcccggtggcctttccagagctgaacagaggacagatgcacagacgggggggctctggtggtcaaggcagcagtccccttggatactaaagtctgagccaggcccctcaggcccggcatgggcagtgcgaggcccatagtggtgggaagccagttggccagctggggtgagaaggccgcgaagccatgggcagacaggaagtggaggtgaatgtctctgcctcctgtaggcctcagcagggacagcacagaccctctggctggggcagcgcagaccctctagctggggcagaacaaggctggtgcttccttctagtccttgagactttgtagctctaactcaagcagaaccctggggttttgggattctgtgtggtgactgctgaggaaggtttatggatttgacagggtgcatgtcacagagagacagttctcagtcagcacttcctgtcccctgcagaggctcataggggacagcccctgccaaggagaccctggaggggctctgaggatagcaatcagaggttgggctggctggactgagcccaggcctgttgcccaccaagtctccataggttctagtctgacccctctctccacccctgggctatgcaggccagcccgtgcagaccacccccgacgcgtccacttgcaacacccgcctcactgtgccaacactccatccacacaggaaaggactgagaacgtgatgcttaacccaaaggagtgagtttcataggatgggtggctttaacagtttcacagcaggacactgagggaatatttccctatcccttcaaatggacggtcactacagaaacgtgtagagcaagactttgtcaaggggctgtttccaggtctcccggtgtctaaatagcagagctggaatgggaactgagaaccgattctttccacaaccgcccactgagcagcaaggctgcagccagcaaagaggtgcggaggcaagcaagctccatgtggtggggacagcgcattgcgacctccaccacccctgcagtgggctgccagctgagccacctgtcttccactgtatctactgtacgaacttctccagctctgctctgttttctcttcctcagcatccaccccgtgacacgtagtggtggctgatgtcgccacagtaccatgaggttaacaggtcctccctccagcttccctcatggtggcagcctaacctgcattgcagccgttcaccggacaccgcaccagaccctcaaaacccatccaagactgtgggaggagtaaacaacccagcccagttaagaggagatgccgaatttaatgaaccctatttgaattgcagggctgtgattcctcttacctttaacgtgaactcacaggcggattaaagtgaaataaaacctaccatttga

SEQ ID NO: 234399 - DNA, 3135 bp, Artificial Sequence
  derived and/or modified sequence
cagaacccaagggcttacctgtgctctgtgattccccaactagggatttagttgtagccacggacctggtaggcaacagggaggggattttaatctgctccttgcatcagaaggtccaataggcagggttagtataatgggagatgccctggtagggctggcaaggagaagaagccacatgtattttggtctgatgaaaagcagcagtgatctgtcactgaccaaaatggtcccccaactatgcattacggagcagcaacccacatacagaactcgagaagccacggcctggagactgtacctggacaccaaagactggagagaggagctggtggggaaaccccagagttcccagggtgccactccccagctccaccagagaactttgggaatgagctgctgcccctgagtgcccctctccagggcctcagtgagggtctctaccctccagggaggaacaaaaccttgccagctggggtcctgcgagagggggcagttcaattcctccacaggggactctgcaactccaatctttcgagtgaagcatctgcgaggccctcagggacccaggatgaactgcatagcagcagaaggaagacaggccagaccaggcgggagggagcccggaaacatctggtttgtagtttcagactctacccgttcacagttcacacagtctcaccgggaaactcacaccttgccctgtaccaagtttttaaggcagttaagctctgcccatccgagacttcatttttcttgagtagaaaatcactgaaatcatcagatccatggcacccaccttcactttctcctaacagctggaaccgtcaggctggcttcagggcctggtcttcgcacttgatatcactatccctcacctgctcagacagccagagcaggcgggtgagttcctcccaacaacctccactgcattctctcagctcccaccgcagggcagcccacgtgcctgagtgaacatgtgtgcgtgtgcacacacgcaagtatgcacagacatacactaaacacgaacatacagtgcacatgaacgctgctcccagctagggccctctggtcagactgctgcctgggttagaattcttgtccccacccccacttactatagttctgtgatcctggacaagtaactgaatctctccgtgccacagtttcttcttgtagaaaacgggaaagttcacagtacttacctccttagagtcattgtgaaggtcagtttgaggcatcacaaatttaaggcacccagacataagggtcaacagggttagctatcactgtccagtttggtgggaggaactgaatgcatgtaggcacatggacccagtctacactcaggcacaaaaggagctacattagttacattcaggcataccccagagcactacaattctctgagacattgtctggaaatctagaaatcatctccttgccctttaaggtattttaaccctcgcattcctctgcttttccaagaatgtgaatcttgccaagctgtccgtgagagacacgggctcccctcgagggagacttgcaaatgctccataaacagccacagtgtggggctctgccatgaggaagtcacagcagacacgctagacagcatagtcctggatgcaacctggaggaagggaggcccatggtggagcactcactccgtgcctgtctgcccggtgagacctcaagttccttgcagacaaaggccatgggttgttggctcttgtgttcccggtggcctttccagagctgaacagaggacagatgcacagacgggggggctctggtggtcaaggcagcagtccccttggatactaaagtctgagccaggcccctcaggcccggcatgggcagtgcgaggcccatagtggtgggaagccagttggccagctggggtgagaaggccgcgaagccatgggcagacaggaagtggaggtgaatgtctctgcctcctgtaggcctcagcagggacagcacagaccctctggctggggcagcgcagaccctctagctggggcagaacaaggctggtgcttccttctagtccttgagactttgtagctctaactcaagcagaaccctggggttttgggattctgtgtggtgactgctgaggaaggtttatggatttgacagggtgcatgtcacagagagacagttctcagtcagcacttcctgtcccctgcagaggctcataggggacagcccctgccaaggagaccctggaggggctctgaggatagcaatcagaggttgggctggctggactgagcccaggcctgttgcccaccaagtctccataggttctagtctgacccctctctccacccctgggctatgcaggccagcccgtgcagaccacccccgacgcgtccacttgcaacacccgcctcactgtgccaacactccatccacacaggaaaggactgagaacgtgatgcttaacccaaaggagtgagtttcataggatgggtggctttaacagtttcacagcaggacactgagggaatatttccctatcccttcaaatggacggtcactacagaaacgtgtagagcaagactttgtcaaggggctgtttccaggtctcccggtgtctaaatagcagagctggaatgggaactgagaaccgattctttccacaaccgcccactgagcagcaaggctgcagccagcaaagaggtgcggaggcaagcaagctccatgtggtggggacagcgcattgcgacctccaccacccctgcagtgggctgccagctgagccacctgtcttccactgtatctactgtacgaacttctccagctctgctctgttttctcttcctcagcatccaccccgtgacacgtagtggtggctgatgtcgccacagtaccatgaggttaacaggtcctccctccagcttccctcatggtggcagcctaacctgcattgcagccgttcaccggacaccgcaccagaccctcaaaacccatccaagactgtgggaggagtaaacaacccagcccagttaagaggagatgccgaatttaatgaaccctatttgaattgcagggctgtgattcctcttacctttaacgtgaactcacaggcggattaaagtgaaataaaacctaccatttgagtta

SEQ ID NO: 234400 - DNA, 735 bp, Artificial Sequence
  derived and/or modified sequence
atgcactacggcgccgccacccacatccagaacagcagaagccacggcctggagaccgtgcccggccaccagagactggagagaggcgccggcggcgagacccccgagttccccggctgccacagccccgccccccccgagaacttcggcaacgagctgctgcccctgagcgcccccctgcagggcctgagcgagggcctgtacccccccggcagaaacaagaccctgcccgccggcgtgctgagagagggcgccgtgcagttcctgcacagaggcctgtgcaacagcaacctgagcagcgaggccagcgccagacccagcggcacccaggacgagctgcacagcagcagaagaaagaccggccagaccagaagagagggcgccagaaagcacctggtgtgcagcttcagactgtaccccttcaccgtgcacaccgtgagccccggcaacagccacctggccctgtaccaggtgttcaaggccgtgaagctgtgccccagcgagaccagcttcttcctgagcagaaagagcctgaagagcagcgacccctggcacccccccagcctgagccccaacagctggaacagacaggccggcttcagagcctggagcagccacctgatcagcctgagcctgacctgcagcgacagccagagcagaagagtgagcagcagccagcagccccccctgcacagcctgagcagccacagaagagccgcccacgtgcccgagtag

SEQ ID NO: 234401 - protein, 647 aa, Artificial Sequence
  derived and/or modified sequence
MASLVSLELGLLLAVLVVTATASPPAGLLSLLTSGQGALDQEALGGLLNTLADRVHCANGPCGKCLSVEDALGLGEPEGSGLPPGPVLEARYVARLSAAAVLYLSNPEGTCEDARAGLWASHADHLLALLESPKALTPGLSWLLQRMQARAAGQTPKTACVDIPQLLEEAVGAGAPGSAGGVLAALLDHVRSGSCFHALPSPQYFVDFVFQQHSSEVPMTLAELSALMQRLGVGREAHSDHSHRHRGASSWDPVPLISSSNSSSVWDTVCLSARDVMAAYGLSEQAGVTPEAWAQLSPALLQQQLSGACTSQSRPPVQDQLSQSERYLYGSLATLLICLCAVFGLLLLTCTGCRGVTHYILQTFLSLAVGALTGDAVLHLTPKVLGLHTHSEEGLSPQPTWRLLAMLAGLYAFFLFENLFNLLLPRDPEDLEDGPCGHSSHSHGGHSHGVSLQLAPSELRQPKPPHEGSRADLVAEESPELLNPEPRRLSPELRLLPYMITLGDAVHNFADGLAVGAAFASSWKTGLATSLAVFCHELPHELGDFAALLHAGLSVRQALLLNLASALTAFAGLYVALAVGVSEESEAWILAVATGLFLYVALCDMLPAMLKVRDPRPWLLFLLHNVGLLGGWTVLLLLSLYEDDITF

SEQ ID NO: 234402 - DNA, 1944 bp, Artificial Sequence
  derived and/or modified sequence
atggcctcactcgtatctctggagctcggattgctgttggccgttctcgtcgttaccgcaacagctagtccccctgctgggcttctcagcttactaacctcaggacagggtgctctggatcaggaggctcttggaggactgctgaataccctcgcagatagagttcattgcgccaatggaccctgtgggaaatgtctgagtgtcgaggacgcccttggtctaggtgagccagagggcagcggactgccccccggcccagtgctggaagcccgttacgtcgcccgactgtccgccgcggctgtcctgtacctgtctaatcctgaagggacttgcgaggatgcacgtgcagggctctgggcttcccatgctgaccatttattagctttgctagagagccctaaagccctcacgcctggtctgtcctggctgctccagcggatgcaagcgcgcgccgccggccagacccccaaaaccgcctgtgtggacatcccccagctcctggaggaggccgttggagcaggagcccctgggtctgctggtggagttttggctgccttactggaccacgtcagaagtggtagttgcttccacgctctgccttcgccccaatattttgtggattttgtattccagcaacactcatccgaggtccccatgacactggccgaactgagcgccctcatgcagcggcttggggtggggagagaggctcactccgaccactcacataggcaccgtggagcaagctcttgggaccccgtgccactcatctcaagttccaactcgtctagtgtttgggacacagtctgcttatcagccagggatgttatggccgcatacggtttgtccgagcaggcaggcgtaacccctgaggcctgggcccagctcagcccagctctcttgcagcaacaacttagcggagcatgcacatcccagagccgtccacccgtgcaggatcagctaagccagtcagaacggtacctttatggatctctcgccaccttgctcatatgcctctgtgctgtatttgggctgctcttgctcacatgcacaggttgccgaggggtgactcactatatactccagacctttctaagtctggcggttggtgctctgacgggggatgcggtgctgcacttgacgccaaaagtactgggattgcacacacatagtgaggagggattgtcccctcagcccacttggaggctgctggctatgctggccggcctttatgcattctttctgtttgaaaacctgttcaacctgttgctgccacgagacccagaagatctggaggatggaccatgtgggcacagttcacactcccatggaggccatagccatggagtatccctccagctggctccttctgagctccgtcagcccaaaccccctcacgaggggtctagggcagatctggtggcggaggaatctcctgagctgttgaacccggagccccgtcggctctcacctgaactgcggctgttgccatatatgattacccttggcgatgctgtacacaatttcgcagacgggttggcagttggtgcagccttcgcctcaagttggaaaaccggactcgcaacgtccctggcagtcttttgccacgagttacctcatgagctgggtgatttcgccgccctcctgcacgctgggctgtccgtaaggcaggccctgctgctgaacctggctagtgccctgacagcttttgccgggctatacgtcgccttggcagtaggcgtctcggaagagtctgaagcctggatcctagccgtagccacgggactgtttctgtacgtcgctctctgcgacatgttgcccgctatgctgaaagtacgcgaccccaggccctggcttctgttccttctgcacaacgtgggcctccttggaggatggaccgtgctgctacttctcagcctctatgaagatgacattaccttctag

SEQ ID NO: 234403 - DNA, 1944 bp, Artificial Sequence
  derived and/or modified sequence
atggccagcctggtgtccctggagctgggcctgctgctggccgtgctggtggtgacagccacagccagccccccagctggcctgctgagcctgctgaccagcggccagggcgccctggaccaggaggccctgggcggcctgctgaacaccctggccgacagagtgcactgtgccaacggcccctgtgggaagtgcctgtctgtggaggatgccctgggcctgggggagcctgagggcagcggcctgcccccaggccctgtgctggaggcccgctacgtggcccggctgtctgctgctgctgtgctgtacctgagcaaccctgagggcacctgtgaagatgcccgggccggcctgtgggccagccatgctgaccacctgctggccctgctggagagccccaaggccctgaccccaggcctgtcctggctgctgcagaggatgcaggcccgggccgccggccagacccccaagacagcctgtgtggacatcccccagctgctggaggaggccgtgggcgctggggcccctggcagcgctggaggagtgctggccgccctgctggaccacgtgcgcagcggcagctgcttccacgccctgcccagcccccagtactttgtggactttgtgttccagcagcacagcagcgaggtgcccatgaccctggccgagctgagcgccctgatgcagaggctgggcgtgggccgggaggcccacagcgaccacagccaccgccacagaggagccagctcctgggaccctgtgcccctcatcagcagcagcaacagcagctctgtgtgggacacagtgtgcctgagcgccagagatgtgatggccgcctacggcctgtctgagcaggccggcgtgaccccagaggcctgggcccagctgagccctgccctgctgcagcagcagctgagcggggcctgcaccagccagagcaggcctcctgtgcaggaccagctgagccagagcgagcgctacctgtatggcagcctggccaccctgctgatctgcctgtgtgctgtgtttggcctgctgctgctgacctgcaccggctgccggggcgtgacccactacatcctgcagaccttcctgagcctggccgtgggcgccctgactggagatgctgtgctgcacctgacccccaaggtgctgggcctgcacacccacagcgaggagggcctgagcccccagcccacctggaggctgctggccatgctggccggcctgtatgccttcttcctgtttgaaaatctcttcaacctgctgctgccccgggaccctgaggacctggaggatggcccctgtggccacagcagccacagccatggaggccacagccacggcgtgtccctgcagctggcccccagcgagctgcggcagcccaagccccctcatgagggcagcagagctgacctggtggccgaggagagccctgagctgctgaaccctgagccccggcggctgagccctgagctgcggctgctgccctacatgatcaccctgggagatgctgtgcacaactttgctgatggcctggccgtgggcgccgcctttgccagctcctggaagacaggcctggccaccagcctggccgtgttctgccacgagctgccccatgagctgggggactttgctgccctgctgcatgctggcctgtctgtgcggcaggccctgctgctgaacctggccagcgccctgacagcctttgctggcctgtatgtggccctggccgtgggcgtgtctgaggagagcgaggcctggatcctggccgtggccaccggcctcttcctgtatgtggccctgtgtgacatgctgcctgccatgctgaaggtgcgggacccccggccctggctgctcttcctgctgcacaacgtgggcctgctgggcggctggacagtgctgctgctgctgagcctgtatgaagatgacatcaccttctag

SEQ ID NO: 234404 - DNA, 1944 bp, Artificial Sequence
  derived and/or modified sequence
atggccagcctggtgagcctggagctgggcctgctgctggccgtgctggtagtgaccgccaccgcctccccaccggccgggttactgagtctgttaacctctggacaaggtgcgttagaccaggaggcgctgggaggcctgctgaacaccctggccgatagggtgcactgtgctaatggcccatgtggtaagtgcctgagtgttgaggacgcccttgggttaggtgagccggagggtagtgggcttcctccaggacctgtcttggaagctcgatatgttgccaggctgtcagctgctgcagtgctttacttaagtaatccagaaggaacctgtgaggacgcgcgggcaggtctgtgggcctcacacgctgaccacttgctcgccctcctagagtcacctaaggcgcttacccccggcctgtcctggctgttgcaaagaatgcaggcgagggccgctggacagactcccaagactgcatgcgtggatattccgcaactcttagaggaggcagttggcgccggagctcctggctcagcaggaggggtgctggctgctctcctcgatcacgtgcgctccggctcatgtttccacgcattgccgtccccacagtactttgtggactttgtgtttcagcagcacagcagcgaagttcccatgacactagccgaactgtccgcgctgatgcaaaggctgggagtaggaagagaggcccactctgatcattctcaccggcataggggtgcaagctcctgggatcctgttcctctgatatctagttctaattcctcctctgtctgggacacagtgtgccttagcgccagagacgtgatggctgcttacgggctctccgagcaagcaggagtcacaccggaggcatgggcccagctgtcccccgcccttttgcagcagcagctgagtggcgcatgcacctcccaatcccggccgcccgtacaagaccaattaagccaatcagagcgctacttatacggatccctagcaaccctcctgatatgcctttgcgcagtcttcggcctgctcctgttaacttgcaccggctgtcgcggggttactcattacatcttgcagaccttcctgtccctggcagtcggggcactcacgggcgacgccgtactgcatctgacgcccaaagttctcgggctccatactcactccgaggagggcctgtctcctcagcccacctggaggctgctcgcaatgctggccggattgtacgctttttttctgttcgaaaacctgttcaacctgctgctgccaagagacccagaggacctcgaggacggtccatgcgggcactcctctcattcccatggcggtcactcacacggagtcagtttgcagctggctcctagcgaattacgccagccgaagcccccccacgaagggtcccgcgcagacctggtggccgaggagtcccccgagctgttaaaccccgagcccagaaggctgtcacccgaactgcgactactgccttatatgatcaccctcggcgatgccgtgcataactttgccgatggactcgccgtgggagccgctttcgcatcctcatggaagacaggcctggctacaagtttagcggtcttctgccatgagttgccccatgaactcggggacttcgctgccctactgcatgctgggctgtccgtcaggcaggcactgctgctgaacctcgcctctgcactgactgcatttgcaggcctctatgtggccctggccgttggcgtgagtgaagagtccgaggcctggattcttgctgtcgccaccgggcttttcttgtacgtggctctgtgtgacatgctgcctgcgatgttgaaagtgcgagatccacggccgtggctgttatttctgttgcacaacgttggccttttgggcggctggactgtgctcctgttactttccttgtacgaagacgatatcaccttctag

SEQ ID NO: 234405 - DNA, 1944 bp, Artificial Sequence
  derived and/or modified sequence
atggctagtttggtgtcactcgagctggggcttctgttggctgtgctggtagtcacagctacggccagcccacctgcgggtttgctgtcactactcaccagcggacagggggctctggaccaagaggctctgggtggcctccttaacaccctcgccgaccgcgtgcactgcgctaacggcccatgtggtaagtgtttgtccgtggaggatgcactaggtctgggagaacctgaaggctccggtcttccaccgggaccagtactggaggctaggtacgttgcccgattgagtgctgctgccgtgctttacctgagcaatcctgaaggcacatgtgaagatgccagggccggactatgggcatcacacgctgatcatctacttgccttgctggagtcacctaaagcccttaccccgggactgtcatggctactgcaacggatgcaggcgagagccgctggtcaaactcctaagactgcgtgtgttgacataccccagctgctggaggaagccgtgggggctggcgcaccaggcagcgccggaggggttctcgccgctctgctggaccacgtcagatctggatcctgctttcacgccctcccttctccacagtatttcgtggatttcgtattccagcagcactcctccgaggtaccgatgacgttagctgaactgtctgccctgatgcaacggttaggtgttggccgtgaagcccattccgatcacagtcatcgccacaggggcgctagttcatgggatcccgttccacttatctcctccagtaacagtagcagcgtctgggacaccgtgtgcctatcagccagagacgttatggccgcttacggattgtctgagcaggctggtgttacgcctgaggcctgggctcaactctctccagctttactgcaacagcagttgtctggggcatgcaccagccaatccagacccccagtgcaagatcagctgtctcagagcgagcgttatctctatggctccctggcgacactgctcatttgcctgtgtgcagtctttggactattacttttaacatgcacgggctgtcggggtgtgacacactacattttacaaacgttcttgtctctggccgttggagcgctgaccggtgacgctgttctacaccttactccgaaggttctggggcttcacacacatagcgaagaaggcctttccccacaacccacatggaggttgttggccatgcttgcaggtctctatgcttttttcctgtttgagaatttgttcaatctgctgttacctcgggatcccgaagatctggaggatggcccatgtggccactcctctcatagccacgggggtcactctcatggggtcagcctgcagttggctccctcagagcttcgacagcccaagcccccacatgaaggcagccgcgctgatttggtcgcggaggaatcccccgagctgcttaacccagagccccgacggctcagtcccgaactgcgcctgctgccctacatgataacactgggcgacgctgtccacaactttgccgatggcctggccgtgggagctgcctttgcctcatcctggaagactggcctcgcgacgagtctggcagtgttctgccatgaactcccgcatgagttgggagattttgccgctctgttgcatgccggactgtccgtgaggcaggctctgctgctcaacctggcaagtgcactgacagctttcgcaggtttgtacgttgccctagccgttggcgtgtcggaagagtccgaggcctggatcctagccgttgccacaggcctttttctttacgtggctttgtgtgatatgctccctgcaatgctgaaagttagagatccacgtccatggctgctgttcctgctgcacaacgtggggctgctgggaggctggactgttctccttctgctgtctttgtacgaagacgatatcacgttttag

SEQ ID NO: 234406 - DNA, 2174 bp, Artificial Sequence
  derived and/or modified sequence
agccccagtctggccctggacaaccccagcaaagccgccctcagccagcccagaagcactgggccttggccacagcaacacccactgagcacgctgggagctgagtatggcgtccctggtctcgctggagctggggctgcttctggctgtgctggtggtgacggcgacggcgtccccgcctgctggtctgctgagcctgctcacctctggccagggcgctctggatcaagaggctctgggcggcctgttaaatacgctggcggaccgtgtgcactgcgccaacgggccgtgtggaaagtgcctgtctgtggaggacgccctgggcctgggcgagcctgaggggtcagggctgcccccgggcccggtcctggaggccaggtacgtcgcccgcctcagtgccgccgccgtcctgtacctcagcaaccccgagggcacctgtgaggacgctcgggctggcctctgggcctctcatgcagaccacctcctggccctgctcgagagccccaaggccctgaccccgggcctgagctggctgctgcagaggatgcaggcccgggctgccggccagacccccaagacggcctgcgtagatatccctcagctgctggaggaggcggtgggggcgggggctccgggcagtgctggcggcgtcctggctgccctgctggaccatgtcaggagcgggtcttgcttccacgccttgccgagccctcagtacttcgtggactttgtgttccagcagcacagcagcgaggtccctatgacgctggccgagctgtcagccttgatgcagcgcctgggggtgggcagggaggcccacagtgaccacagtcatcggcacaggggagccagcagctgggaccctgtgcccctcatcagctccagcaacagctccagtgtgtgggacacggtatgcctgagtgccagggacgtgatggctgcatatggactgtcggaacaggctggggtgaccccggaggcctgggcccaactgagccctgccctgctccaacagcagctgagtggagcctgcacctcccagtccaggccccccgtccaggaccagctcagccagtcagagaggtatctgtacggctccctggccacgctgctcatctgcctctgcgcggtctttggcctcctgctgctgacctgcactggctgcaggggggtcacccactacatcctgcagaccttcctgagcctggcagtgggtgcactcactggggacgctgtcctgcatctgacgcccaaggtgctggggctgcatacacacagcgaagagggcctcagcccacagcccacctggcgcctcctggctatgctggccgggctctacgccttcttcctgtttgagaacctcttcaatctcctgctgcccagggacccggaggacctggaggacgggccctgcggccacagcagccatagccacgggggccacagccacggtgtgtccctgcagctggcacccagcgagctccggcagcccaagcccccccacgagggctcccgcgcagacctggtggcggaggagagcccggagctgctgaaccctgagcccaggagactgagcccagagttgaggctactgccctatatgatcactctgggcgacgccgtgcacaacttcgccgacgggctggccgtgggcgccgccttcgcgtcctcctggaagaccgggctggccacctcgctggccgtgttctgccacgagttgccacacgagctgggggacttcgccgccttgctgcacgcggggctgtccgtgcgccaagcactgctgctgaacctggcctccgcgctcacggccttcgctggtctctacgtggcactcgcggttggagtcagcgaggagagcgaggcctggatcctggcagtggccaccggcctgttcctctacgtagcactctgcgacatgctcccggcgatgttgaaagtacgggacccgcggccctggctcctcttcctgctgcacaacgtgggcctgctgggcggctggaccgtcctgctgctgctgtccctgtacgaggatgacatcaccttctgataccctgccctagtcccccacctttgacttaagatcccacacctcacaaacctacagcccagaaaccagaagcccctatagaggccccagtcccaactccagtaaagacactcttgtccttgga

SEQ ID NO: 234407 - DNA, 1944 bp, Artificial Sequence
  derived and/or modified sequence
atggccagcctggtgagcctggagctgggcctgctgctggccgtgctggtggtgaccgccaccgccagcccccccgccggcctgctgagcctgctgaccagcggccagggcgccctggaccaggaggccctgggcggcctgctgaacaccctggccgacagagtgcactgcgccaacggcccctgcggcaagtgcctgagcgtggaggacgccctgggcctgggcgagcccgagggcagcggcctgccccccggccccgtgctggaggccagatacgtggccagactgagcgccgccgccgtgctgtacctgagcaaccccgagggcacctgcgaggacgccagagccggcctgtgggccagccacgccgaccacctgctggccctgctggagagccccaaggccctgacccccggcctgagctggctgctgcagagaatgcaggccagagccgccggccagacccccaagaccgcctgcgtggacatcccccagctgctggaggaggccgtgggcgccggcgcccccggcagcgccggcggcgtgctggccgccctgctggaccacgtgagaagcggcagctgcttccacgccctgcccagcccccagtacttcgtggacttcgtgttccagcagcacagcagcgaggtgcccatgaccctggccgagctgagcgccctgatgcagagactgggcgtgggcagagaggcccacagcgaccacagccacagacacagaggcgccagcagctgggaccccgtgcccctgatcagcagcagcaacagcagcagcgtgtgggacaccgtgtgcctgagcgccagagacgtgatggccgcctacggcctgagcgagcaggccggcgtgacccccgaggcctgggcccagctgagccccgccctgctgcagcagcagctgagcggcgcctgcaccagccagagcagaccccccgtgcaggaccagctgagccagagcgagagatacctgtacggcagcctggccaccctgctgatctgcctgtgcgccgtgttcggcctgctgctgctgacctgcaccggctgcagaggcgtgacccactacatcctgcagaccttcctgagcctggccgtgggcgccctgaccggcgacgccgtgctgcacctgacccccaaggtgctgggcctgcacacccacagcgaggagggcctgagcccccagcccacctggagactgctggccatgctggccggcctgtacgccttcttcctgttcgagaacctgttcaacctgctgctgcccagagaccccgaggacctggaggacggcccctgcggccacagcagccacagccacggcggccacagccacggcgtgagcctgcagctggcccccagcgagctgagacagcccaagcccccccacgagggcagcagagccgacctggtggccgaggagagccccgagctgctgaaccccgagcccagaagactgagccccgagctgagactgctgccctacatgatcaccctgggcgacgccgtgcacaacttcgccgacggcctggccgtgggcgccgccttcgccagcagctggaagaccggcctggccaccagcctggccgtgttctgccacgagctgccccacgagctgggcgacttcgccgccctgctgcacgccggcctgagcgtgagacaggccctgctgctgaacctggccagcgccctgaccgccttcgccggcctgtacgtggccctggccgtgggcgtgagcgaggagagcgaggcctggatcctggccgtggccaccggcctgttcctgtacgtggccctgtgcgacatgctgcccgccatgctgaaggtgagagaccccagaccctggctgctgttcctgctgcacaacgtgggcctgctgggcggctggaccgtgctgctgctgctgagcctgtacgaggacgacatcaccttctag

SEQ ID NO: 234408 - protein, 1501 aa, Artificial Sequence
  derived and/or modified sequence
MAPTWGPGMVSVVGPMGLLVVLLVGGCAAEEPPRFIKEPKDQIGVSGGVASFVCQATGDPKPRVTWNKKGKKVNSQRFETIEFDESAGAVLRIQPLRTPRDENVYECVAQNSVGEITVHAKLTVLREDQLPSGFPNIDMGPQLKVVERTRTATMLCAASGNPDPEITWFKDFLPVDPSASNGRIKQLRSGALQIESSEETDQGKYECVATNSAGVRYSSPANLYVRVRRVAPRFSILPMSHEIMPGGNVNITCVAVGSPMPYVKWMQGAEDLTPEDDMPVGRNVLELTDVKDSANYTCVAMSSLGVIEAVAQITVKSLPKAPGTPMVTENTATSITITWDSGNPDPVSYYVIEYKSKSQDGPYQIKEDITTTRYSIGGLSPNSEYEIWVSAVNSIGQGPPSESVVTRTGEQAPASAPRNVQARMLSATTMIVQWEEPVEPNGLIRGYRVYYTMEPEHPVGNWQKHNVDDSLLTTVGSLLEDETYTVRVLAFTSVGDGPLSDPIQVKTQQGVPGQPMNLRAEARSETSITLSWSPPRQESIIKYELLFREGDHGREVGRTFDPTTSYVVEDLKPNTEYAFRLAARSPQGLGAFTPVVRQRTLQSISPKNFKVKMIMKTSVLLSWEFPDNYNSPTPYKIQYNGLTLDVDGRTTKKLITHLKPHTFYNFVLTNRGSSLGGLQQTVTAWTAFNLLNGKPSVAPKPDADGFIMVYLPDGQSPVPVQSYFIVMVPLRKSRGGQFLTPLGSPEDMDLEELIQDISRLQRRSLRHSRQLEVPRPYIAARFSVLPPTFHPGDQKQYGGFDNRGLEPGHRYVLFVLAVLQKSEPTFAASPFSDPFQLDNPDPQPIVDGEEGLIWVIGPVLAVVFIICIVIAILLYKNKPDSKRKDSEPRTKCLLNNADLAPHHPKDPVEMRRINFQTPGMLSHPPIPIADMAEHTERLKANDSLKLSQEYESIDPGQQFTWEHSNLEVNKPKNRYANVIAYDHSRVILQPIEGIMGSDYINANYVDGYRCQNAYIATQGPLPETFGDFWRMVWEQRSATIVMMTRLEEKSRIKCDQYWPNRGTETYGFIQVTLLDTIELATFCVRTFSLHKNGSSEKREVRQFQFTAWPDHGVPEYPTPFLAFLRRVKTCNPPDAGPIVVHCSAGVGRTGCFIVIDAMLERIKPEKTVDVYGHVTLMRSQRNYMVQTEDQYSFIHEALLEAVGCGNTEVPARSLYAYIQKLAQVEPGEHVTGMELEFKRLANSKAHTSRFISANLPCNKFKNRLVNIMPYESTRVCLQPIRGVEGSDYINASFIDGYRQQKAYIATQGPLAETTEDFWRMLWENNSTIVVMLTKLREMGREKCHQYWPAERSARYQYFVVDPMAEYNMPQYILREFKVTDARDGQSRTVRQFQFTDWPEQGVPKSGEGFIDFIGQVHKTKEQFGQDGPISVHCSAGVGRTGVFITLSIVLERMRYEGVVDIFQTVKMLRTQRPAMVQTEDEYQFCYQAALEYLGSFDHYAT

SEQ ID NO: 234409 - DNA, 4506 bp, Artificial Sequence
  derived and/or modified sequence
atggctcccacctgggggccagggatggtcagcgtagtagggccaatgggccttttggtggttctgctggttggcggctgtgcggccgaagagccccccagattcatcaaggagcccaaggaccagattggagtttctggcggggtcgccagtttcgtgtgtcaagctaccggcgacccgaagccccgagtgacatggaataaaaaagggaaaaaggtcaattcacagcgttttgagaccatagaatttgacgagtctgcgggggctgtgttgcggatccagccacttcggacaccgagagatgaaaatgtctatgaatgtgtcgctcaaaactctgttggtgagataacggtccatgcaaagcttactgtgttgcgcgaggatcagctaccctctggatttcccaacatcgacatggggccccagcttaaggtggtcgagcggacccggacagccactatgctgtgcgcggccagtggcaatcccgacccggagatcacgtggtttaaagactttttgcccgtagatccctccgccagtaatggccggatcaaacaactcaggagcggtgcgctgcaaattgagtcttcagaggaaactgaccagggtaaatatgaatgcgtggccacaaacagtgcgggtgttaggtactccagccccgccaacctgtatgtccgggttcgtagggttgcccccaggttcagcatcctgcccatgtctcacgagataatgcctggcggcaatgtgaatatcacctgtgtggctgtgggttctccaatgccttatgttaagtggatgcaaggagcggaggacctgactcctgaagatgacatgcccgtgggaaggaacgtcctcgaactgacagacgtgaaagacagcgccaattacacgtgtgtagccatgtcatcgctcggggttatcgaggctgtcgctcagattactgtcaagagcctgcccaaagcacccggcacccctatggtgacagaaaatactgcgacctccattacaatcacctgggatagcgggaatccagatcccgtgtcttattatgtgattgagtataagagcaaaagccaagacggtccataccagataaaagaagacatcaccacaacacgttactccattggcggcctcagccccaacagtgagtacgaaatatgggttagcgccgtgaattccattggacagggacctccaagcgagagcgtagtcacacgcacaggagaacaggctcctgcctccgccccccggaatgtgcaggcacgcatgctgtccgcaaccaccatgatcgtgcagtgggaggaaccagttgaacctaacggcttaatccggggataccgcgtgtattacacgatggagcccgagcatccggtggggaattggcagaagcataacgttgatgactcactgctcacaacggtcggctctctcctggaagacgaaacatacactgtacgggtgctggctttcacatccgtgggtgacggcccactgtccgacccaatccaggtcaagactcagcagggggtgcctggacagccgatgaacctccgtgcagaagctcgttcagaaacgtccatcacattgtcttggtcccctccaagacaggagagcatcatcaagtatgagctgctgtttcgggaaggtgatcacggccgtgaggtgggtagaacttttgatccaaccacctcttatgtggtcgaagatctgaaacccaatacagagtatgcctttcgtctcgccgcccgttcacctcaaggcttgggcgccttcacacccgtcgtgcggcaaaggactctacagagtatttcccccaaaaacttcaaagtgaaaatgatcatgaaaacgagcgtcctgctgagttgggaatttccggataactacaacagcccaaccccatacaagattcagtataacgggctaaccctggacgtggacggacgcaccaccaagaagttgatcacccatcttaagcctcacacattttacaacttcgtgttgaccaacagaggctcatccctcggcggcctccaacagaccgtgaccgcctggacagcctttaatctgctgaatgggaagccatctgtggcaccaaagcctgatgccgacggtttcatcatggtgtacctacctgacggtcagagtcccgtccccgtccagtcctactttatagttatggtaccacttagaaagagtcggggtggccagttcctcactcccttgggctcccccgaagatatggacctggaagagctcatccaggacatttcccggctgcagaggcgcagcctgagacacagtcgccagttggaggtgcctcgcccttacattgctgcacggttctcggtattaccccctacatttcaccctggcgaccagaaacaatacggcgggtttgacaatcgcgggctggagcccggccaccggtatgtccttttcgtgctggctgtactgcagaagtccgaaccaactttcgctgcttccccatttagtgatccattccaattggacaatcccgatccacagcctatcgtggacggggaagagggcctgatttgggtaattgggcctgtcctagccgtagtcttcattatttgcattgtcattgccatacttctctacaaaaacaaacctgactcaaagcgcaaggatagtgagccccggaccaagtgtctcttaaacaacgccgatctcgctcctcatcaccctaaagacccggtggagatgaggcgcattaatttccagacccctggaatgctcagtcacccacctatcccaattgctgatatggcagagcatactgaacggctgaaagcaaatgacagcttgaaattatcccaagaatatgagtcaatcgaccctggtcagcagtttacctgggagcacagtaaccttgaggtgaataagccaaagaatcggtacgccaacgttattgcatatgatcactcacgggttatactgcagccaatagaaggcataatgggaagcgactacatcaatgctaactatgtagatggctataggtgccagaacgcttatattgccacgcaggggccattgcctgaaacatttggggatttctggcgtatggtatgggaacagaggtccgccaccatcgtcatgatgacccgattggaggaaaaatcgcgtatcaagtgcgatcagtactggcccaatagagggacagaaacctacggttttattcaggtaactcttttagatacaattgaactggctacattctgcgtcaggacttttagtttgcacaagaacggcagcagcgaaaagcgggaagtccggcagtttcagtttaccgcctggcctgatcacggcgtgccggaatatcccactccatttcttgcctttctaaggagagtgaaaacttgcaatcctccagacgctggtcccattgttgtacattgttctgccggagttggcaggacagggtgcttcattgttatcgatgccatgctcgaacgtatcaagcccgagaaaacagtcgatgtgtatgggcacgtcaccttgatgcggtcacagcgcaattacatggtacagactgaggatcaatactccttcatccatgaagccttgctggaggccgtaggctgcgggaacacagaggtacctgcccgaagcttgtacgcctatattcagaaactcgcccaagttgaaccaggcgagcatgtaacagggatggaactggaattcaaaaggctcgccaatagtaaggctcatacatcacggttcatatccgccaatctgccatgcaataagtttaagaatcgattggtaaacattatgccctacgagtctacccgcgtatgtctgcagccgattcgcggcgtggagggtagtgattacataaacgcatccttcattgacgggtaccgacagcagaaggcctacatcgctacacaggggccactcgccgagactactgaggacttctggcgtatgctctgggaaaataatagtacaatcgttgtgatgttaaccaaattgcgtgagatgggacgggagaagtgtcaccaatattggcctgccgagagatccgcacggtaccaatacttcgtggttgaccccatggctgaatacaacatgccccagtatatcctgcgcgagttcaaggtgacggatgctcgtgacgggcaatctcgcacagtgcggcagttccagttcaccgattggcccgagcagggggtgcccaagagtggggaggggtttatcgactttatcgggcaagtgcataagactaaggagcagttcggccaggacggaccaatctccgtgcactgttctgctggggtcggcagaaccggcgtgtttattacattgtctatcgtgttggagcggatgcgttatgaaggagtggtagatatctttcaaacagttaaaatgctacgcacccagaggcctgcaatggtacagacagaagacgagtatcagttctgttatcaggcggccttggaatatttaggctccttcgaccactacgcaacctag

SEQ ID NO: 234410 - DNA, 4506 bp, Artificial Sequence
  derived and/or modified sequence
atggcccccacctggggccctggcatggtgtctgtggtgggccccatgggcctgctggtggtgctgctggtgggcggctgtgccgctgaggagcccccacgcttcatcaaggagcccaaggaccagattggagtgtctgggggcgtggccagctttgtgtgccaggccactggagaccccaagccccgggtgacctggaacaagaagggcaagaaggtgaacagccagagatttgagaccattgaatttgatgagagcgctggagctgtgctgcgcatccagcccctgcggaccccaagagatgaaaatgtgtatgaatgtgtggcccagaacagcgtgggggagatcaccgtgcacgccaagctgactgtgctgcgggaggaccagctgcccagcggcttccccaacatcgacatgggcccccagctgaaggtggtggagaggaccaggacagccaccatgctgtgtgccgccagcggcaacccagaccctgagatcacctggttcaaggacttcctgcctgtggaccccagcgccagcaatggccgcatcaagcagctgcggagcggggccctgcagatcgagagcagcgaggagacagaccagggcaagtatgaatgtgtggccaccaacagcgctggggtgcgctacagcagccctgccaacctgtatgtgcgggtgcggcgggtggccccccgcttcagcatcctgcccatgagccatgagatcatgcctggaggaaatgtgaacatcacctgtgtggccgtgggcagccccatgccctacgtgaagtggatgcagggcgctgaggacctgaccccagaagatgacatgcctgtgggcagaaatgtgctggagctgacagatgtgaaggacagcgccaactacacctgtgtggccatgagcagcctgggcgtgattgaagctgtggcccagatcaccgtgaagagcctgcccaaggcccctggcacccccatggtgacagaaaatacagccaccagcatcaccatcacctgggacagcggcaacccagaccctgtgtcctactacgtgattgagtacaagagcaagagccaggacggcccctaccagatcaaggaggacatcaccaccacccgctacagcatcggcggcctgagccccaacagtgaatatgagatctgggtgtctgctgtgaacagcatcggccagggccccccatctgagagcgtggtgaccaggactggagagcaggccccagccagcgcccccagaaatgtgcaggccaggatgctgagcgccaccaccatgattgtgcagtgggaggagcctgtggagcccaacggcctcatccggggctacagagtgtactacaccatggagcctgagcaccctgtgggcaactggcagaagcacaacgtggatgacagcctgctgaccaccgtgggcagcctgctggaggatgagacctacacagtgcgggtgctggccttcacctctgtgggagatggccccctgagtgaccccatccaggtgaagacccagcagggcgtgcccggccagcccatgaacctgcgggcagaggcccggtctgagaccagcatcaccctgtcctggagccccccccggcaggagagcatcatcaagtatgagctgctcttccgggagggggaccacggccgggaggtgggccgcacctttgaccccaccaccagctatgtggtggaggacctgaagcccaacacagaatatgccttccggctggccgcccggagcccccagggcctgggcgccttcacccctgtggtgcggcagaggaccctgcagagcatcagccccaagaacttcaaggtgaagatgatcatgaagacctctgtgctgctgtcctgggagttcccagacaactacaacagccccaccccctacaagatccagtacaacggcctgaccctggatgtggatggccgcaccaccaagaagctgatcacccacctgaagccccacaccttctacaactttgtgctgaccaacagaggcagcagcctgggcggcctgcagcagacagtgacagcctggacagccttcaacctgctgaatggcaagcccagcgtggcccccaagccagatgctgatggcttcatcatggtgtacctgcctgatggccagagccctgtgcctgtgcagagctacttcatcgtgatggtgcccctgaggaagagcagaggaggccagttcctgacccccctgggcagccctgaggacatggacctggaggagctgatccaggacatcagccggctgcagaggaggagcctgcggcacagccggcagctggaggtgccccggccctacatcgccgcccgcttctctgtgctgccccccaccttccaccctggggaccagaagcagtatggaggctttgacaacagaggcctggagcccggccacagatatgtgctgtttgtgctggccgtgctgcagaagtctgagcccacctttgctgccagccccttcagtgaccccttccagctggacaacccagacccccagcccatcgtggatggagaggagggcctcatctgggtgattggccctgtgctggccgtggtgttcatcatctgcatcgtcatcgccatcctgctgtacaagaacaagccagacagcaagaggaaggacagcgagcccaggaccaagtgcctgctgaacaatgctgacctggccccccaccaccccaaggaccctgtggagatgaggcgcatcaacttccagaccccaggcatgctgagccacccccccatccccatcgctgacatggccgagcacacagagcggctgaaggccaatgacagcctgaagctgagccaggagtatgagagcattgatcctggccagcagttcacctgggagcacagcaacctggaggtgaacaagcccaagaacagatatgccaacgtgattgcctatgaccacagcagggtcatcctgcagcccatcgagggcatcatgggcagtgactacatcaatgccaactacgtggatggctaccgctgccagaatgcctacatcgccacccagggccccctgcctgagacctttggagacttctggaggatggtgtgggagcagaggtctgccaccatcgtgatgatgacccggctggaggagaagagccgcatcaagtgtgaccagtactggcccaacagaggaacagagacctacggcttcatccaggtgaccctgctggacaccatcgagctggccaccttctgtgtgaggaccttcagcctgcacaagaatggcagcagcgagaagcgggaggtgcggcagttccagttcaccgcctggccagaccatggagtgcctgagtaccccacccccttcctggccttcctgcggcgggtgaagacctgcaaccccccagatgctggccccatcgtggtgcactgcagcgctggggtgggccgcacaggctgcttcatcgtgattgatgccatgctggagcgcatcaagccagagaagacagtggatgtgtatggccacgtgaccctgatgaggagccagaggaactacatggtgcagacagaggaccagtacagcttcatccacgaggccctgctggaggccgtgggctgcggcaacacagaggtgcctgcccggagcctgtatgcctacatccagaagctggcccaggtggagcccggggagcacgtgacaggcatggagctggagttcaagaggctggccaacagcaaggcccacaccagccgcttcatcagcgccaacctgccctgcaacaagttcaagaaccggctggtgaacatcatgccctatgagagcaccagggtgtgcctgcagcccatccggggcgtggagggcagtgactacatcaatgccagcttcattgatggctaccggcagcagaaggcctacatcgccacccagggccccctggccgagaccacagaggacttctggaggatgctgtgggagaacaacagcaccatcgtggtgatgctgaccaagctgcgggagatgggccgggagaagtgccaccagtactggccagctgagaggtctgcccgctaccagtactttgtggtggaccccatggccgagtacaacatgccccagtacatcctgcgggagttcaaggtgacagatgccagagatggccagagcaggacagtgcggcagttccagttcacagactggccagagcagggcgtgcccaagtctggagagggcttcatcgacttcatcggccaggtgcacaagaccaaggagcagtttggccaggacggccccatctctgtgcactgcagcgctggggtgggccgcactggagtcttcatcaccctgagcatcgtgctggagaggatgagatatgaaggagtggtggacatcttccagacagtgaagatgctgcggacccagaggcctgccatggtgcagacagaagatgagtaccagttctgctaccaggccgccctggagtacctgggcagctttgaccactacgccacctag

SEQ ID NO: 234411 - DNA, 4506 bp, Artificial Sequence
  derived and/or modified sequence
atggcccccacctggggccccggcatggtgagcgtggtgggccccatggggctccttgtcgtccttttggtcgggggttgcgccgctgaagagccccctaggttcatcaaagagccgaaggatcagatcggggtgtccggaggagtcgccagcttcgtgtgccaggccacaggggatccaaaaccccgggtcacttggaataagaagggcaagaaggttaatagccagcggttcgagactattgagttcgacgagagcgctggagcagtcctccgcattcagccacttaggaccccgcgcgacgagaatgtctacgaatgcgtggcacaaaatagtgttggggagatcaccgtgcacgccaagctcaccgtgctgcgggaagaccaactccccagtggctttcccaatatagacatgggcccgcaattaaaagtggtcgaaaggactcggacagccacaatgctgtgtgccgctagtggcaaccccgatcccgaaatcacctggttcaaagatttcctacctgttgacccctccgcttcaaatgggcgaataaagcagctccggtctggggccttgcagattgaatccagcgaggagaccgaccaggggaagtacgagtgcgtggccacgaattctgccggggttcgatattcaagcccagcgaatctgtatgttcgtgtccgtagagtggctccacgattttccatcctgccgatgtcacacgagatcatgcccggagggaatgttaacattacttgcgtggccgtaggaagtccaatgccttacgtgaagtggatgcagggggccgaagatctgacaccagaggacgatatgcctgtggggcggaatgttctggagctcaccgatgtaaaggacagcgcaaattacacttgtgtagccatgtcctcactgggcgtgatagaagcggtcgcacagatcacagtcaagtccttgcctaaggcccctgggacgcccatggtgaccgagaatacggccacctcaattacaatcacatgggatagcggtaatccagaccccgtgagttattacgtaattgagtacaaatcgaagtcccaggacggcccttatcagatcaaagaggacatcacaacaacgcgctacagcatcgggggtctctcccccaacagcgagtatgagatctgggtgagcgccgtcaattctattggacagggcccaccgtctgagagcgtcgtgactcgtacgggcgagcaggcgccagcctctgcccctcgcaacgtgcaggcaagaatgttgtccgctacaactatgatcgtgcagtgggaagagccggtggagcccaacggactcatacggggctatcgcgtctactacactatggaacccgaacatcccgtgggaaactggcagaaacataatgtcgacgactccttactgaccacagtgggaagcctcctcgaggacgaaacctacaccgtgagagtcctcgcttttacctccgtcggtgatggacctctctcagatcctatccaagttaagactcagcagggagtccctgggcaaccaatgaatctgagggcggaggcccgctctgaaaccagcataaccctttcatggtcgcctccacggcaggagagcataatcaagtacgagttgctgttcagggagggggaccacggacgagaagtggggaggacatttgacccaactacatcttacgtggttgaggacctgaagcctaacactgagtatgccttcagactggcagcgcgctctccccagggcctgggagccttcactcctgtggtccggcaacgtacacttcagtccatttcgcccaaaaacttcaaagtcaagatgattatgaaaacatctgtcctgctgtcatgggagttcccggataattacaacagccccacgccttataagattcagtacaacgggttgacgctggacgttgatggacgtactacaaagaaactgataactcatctcaagccccacactttctacaattttgtcctgaccaacagggggtctagcttaggtggactgcagcaaacggtgaccgcctggaccgcctttaacctcctgaatggcaagccatccgtcgcacccaaaccagacgcagatggcttcattatggtgtacctgccagatggccagagccccgtgcctgtgcagtcttatttcattgtgatggttccacttcgtaagagtagaggcggtcagtttctaactcctttgggcagtcctgaggatatggacctcgaggaactgattcaggacatttcccgactgcagagaagatcactgcgccattccaggcagttggaggtgcctcggccatacattgctgcaagattctctgtgttaccccctacctttcaccccggagatcagaagcagtacgggggattcgacaacagaggcctggaaccagggcaccggtacgtactttttgtgctggccgtgttacagaaatccgaaccaacgtttgccgcatcaccgttttcggatcccttccagctggacaatcctgatccacagcctattgttgatggtgaagaggggttgatctgggtgatcggtccagtgttggcggtggtgtttatcatatgcatagtgatagccattctgctttacaagaataaacccgacagtaaacggaaggacagcgaaccacgcaccaaatgcttactaaataacgccgacctggctcctcaccaccccaaagatcctgttgaaatgcgccggattaattttcagacccccggtatgctatcccacccaccaatccctatagctgatatggcagagcatactgagagactgaaggccaacgactccctgaagctgagccaggaatatgagtctatcgacccaggccagcagtttacttgggaacattcgaacctggaggtcaataaacccaagaaccgatacgcaaacgtcattgcatatgatcatagtagggttatactgcagcctattgaaggaatcatgggaagcgactacataaatgccaactatgtggacggatatcgctgtcagaacgcttacatcgccacccaggggccactgcccgagacctttggagatttctggagaatggtgtgggaacaacgcagcgccaccatcgtgatgatgactagattggaggagaaatcccggattaaatgcgaccaatactggcctaatcggggcaccgagacatacgggttcatccaggttacactgcttgatacaattgagctggcaacattttgcgtgaggactttttccctccataagaatggctcctccgaaaagcgagaggtgcgtcagttccagtttaccgcatggcccgaccacggcgtccccgagtaccccactccctttctggccttcttgagacgtgtaaaaacatgcaacccccctgatgctggacccattgtagttcactgttctgctggagtgggtcgaaccggctgttttatcgtgattgatgcgatgctggagcgaattaagccggagaagacagtggatgtctacggccacgtcacactcatgaggtcccaaagaaactacatggttcaaaccgaggaccagtattcttttattcacgaggcattgctcgaggcggtcggctgcggcaacacagaagtgccagcaaggtccctttacgcatacatacaaaagcttgcacaggtcgaacctggtgaacacgtcactggaatggagttggagttcaagaggctggcaaactctaaggctcacactagtaggttcattagcgctaacttgccttgtaataaattcaaaaaccgcctagtcaatattatgccatacgagtccacccgtgtctgtctccagcccattcgtggcgtcgaggggagcgattacatcaacgcatcatttatcgatggataccgccagcagaaggcctatatcgcgacacagggacctctcgccgagaccactgaagatttctggcggatgctgtgggaaaacaatagcactatagttgtgatgctcacaaagttgcgtgaaatgggtagagaaaaatgtcaccagtattggccagcggaacggtcagcccgataccaatactttgtggtcgatcccatggcagaatataacatgccccagtacattttacgtgaattcaaagtgactgacgcccgggatggccagtccagaaccgtgagacagtttcaattcactgattggcccgagcaaggagttcctaagagcggcgagggctttatagacttcatcgggcaggtgcacaagacaaaggaacagttcggtcaggatggccctatctcagtgcactgttctgctggggtcggccggacaggtgtgttcattaccctgagcattgtgctcgaacgaatgaggtatgaaggagtggtagatattttccagactgtgaaaatgctcaggacacagcgtcctgcaatggtgcagacagaagacgaatatcagttttgctaccaggctgctttagagtacttaggatctttcgaccattacgccacttag

SEQ ID NO: 234412 - DNA, 4506 bp, Artificial Sequence
  derived and/or modified sequence
atggcaccaacctggggtcctggtatggtctctgtcgtaggaccaatgggactcttagtcgtgctcctggtggggggatgcgccgcagaggagccccctcgatttattaaggaacccaaggaccaaataggcgtatctgggggagtggcttcgttcgtgtgtcaagcaactggtgaccccaagcctcgggtcacctggaataagaaaggcaaaaaggtgaactcccagagattcgagactatcgaattcgacgagtccgctggcgcagttttacggattcaaccactgcggactccacgggacgagaatgtgtacgagtgcgtcgcccagaacagtgtgggtgaaatcacagtgcacgctaaactgaccgtccttagggaggatcagctcccgtctgggtttccaaatatagatatgggacctcagctcaaggtggttgagcgcactcgaactgcaacaatgttgtgtgctgcgtccggcaaccctgatcccgaaatcacctggttcaaagattttctgccagtggatccctctgcatctaatggcagaattaaacagctgcgctcgggtgctttacaaatcgaatcaagcgaagagacagatcaaggaaagtatgaatgtgtggcgacgaattcagccggagttaggtattctagccccgctaatctttatgtgcgggttaggcgtgtggctcccaggttctccatcctaccaatgagtcatgaaattatgccgggtgggaacgttaacataacgtgcgtggccgtaggttcaccgatgccctacgttaaatggatgcagggcgcagaagatctgactcccgaggacgatatgcctgtgggtcggaacgtgctggaactgaccgatgtgaaagattcagcaaactacacctgcgtggccatgagcagtctgggggttatcgaagccgtcgcacagatcaccgttaaaagtttgccgaaggctcctggaaccccaatggttaccgaaaatacggcaacctccatcaccattacttgggatagcggaaacccagacccagtctcctactacgtcattgagtacaagagcaaaagccaggatggtccataccagatcaaagaagacatcacgacgactcgctactcaataggcggactgagccctaatagtgagtacgagatctgggtgagtgccgtgaactctattggccaaggtccgccttctgagagcgtggtgacccgaactggcgagcaggcaccagcttcggcacccagaaacgttcaggcccgaatgctgtccgccaccaccatgattgtgcagtgggaggagcccgttgaacccaatggtctgattcggggatacagggtttactacactatggagccggagcacccggtcggtaactggcagaaacacaatgtagacgattccttgttaactactgtgggctccctcctcgaggacgagacctatacggtaagggtcctggcatttacaagtgtaggagacggacccctgtcagatcccattcaggtaaagactcaacaaggtgtcccaggtcagcccatgaatctaagggcagaagctcgttctgaaaccagcatcacactgagttggtcaccaccccgacaggagtccataatcaagtacgaactattatttcgggagggtgaccatggacgagaagtgggcagaacatttgatcccaccacatcatacgtggtagaagatttaaaacctaatactgagtacgcctttaggctagccgcacggagcccacaggggctcggtgcattcacccctgtggtgcgtcagcgcaccttgcagagcatttcgcccaagaattttaaggtaaaaatgattatgaagacttccgtactactgtcatgggagttcccagacaactataacagcccaactccatacaaaatccagtataatgggctcacactcgatgtggacggccgaactaccaaaaaactaattacacatctgaaacctcatactttctataatttcgtgttgacgaatcgcggatccagcttgggcggacttcagcaaactgttacggcttggactgcgtttaatctcctgaacggaaagccctccgtcgcaccgaaacccgatgctgacgggttcattatggtttacctgccagatgggcagtccccggtgcctgtgcaatcttacttcatcgtgatggtaccactgcgaaaatctagaggcggtcagtttctcactcccttgggcagcccagaagacatggacctggaggagcttattcaggatattagccgacttcagaggcgcagtctgaggcacagtcgacagctagaagttcccaggccctatatcgcggctcgattctctgttctgccgcctacgtttcaccccggtgatcaaaagcagtacggtgggttcgacaatcggggattggagcctggccacagatacgtcctcttcgtcctcgcagtgctacaaaaaagcgaacctacttttgctgcatctcctttttcggatcctttccagctggacaatccagatccccagcccatagtagacggtgaagaggggcttatctgggtgataggtcctgttttagctgttgtcttcattatatgcattgtcatcgccattctgttatataagaataagcccgattccaaaaggaaggactcagaacccaggacaaaatgcctcctcaacaatgccgatttagcccctcatcatcccaaggacccagttgagatgagaaggataaactttcagactcctggcatgctgagtcatcccccaatccctatcgcagacatggccgaacacacggagcggctgaaggcaaacgattcactgaaattgtcccaggaatatgaatccatcgatccgggacagcagttcacctgggaacacagcaacctagaagtgaacaagcccaaaaatcgttatgcgaacgtcatcgcttacgaccatagtagggtcattctccagcccatcgaagggatcatgggatctgattacataaatgccaattacgtggacggctaccgttgccaaaacgcctacattgccacgcaggggccactcccagaaacattcggagacttctggcgcatggtctgggaacagagatcagccaccatagtaatgatgactcgacttgaggaaaaaagtagaatcaaatgtgatcaatactggccaaatcgtggaaccgagacttatggcttcatccaggtcaccttgctcgacaccatcgaacttgcgacattctgcgtgcgcacattctcactccataagaacggctcttccgagaaaagagaagtgcgtcaatttcaattcactgcatggccagaccacggcgtgcccgagtaccccaccccattcctcgcgttcctcaggcgcgtgaaaacttgcaatccgccagatgccggtcctatcgtagtacactgtagtgccggtgttggtcgcacaggttgtttcatagttatcgatgctatgttggaaaggattaagcccgagaagacagttgatgtgtatgggcatgtgacactgatgaggtcacagcggaactatatggtccagaccgaagaccagtacagcttcatccacgaggctctactcgaagccgtcggatgcggtaatactgaggtgcctgccaggtctctgtatgcttatatccagaagttggcacaggtagagccaggggagcacgtcacaggtatggaattagagttcaagcgcttggcaaacagtaaggctcacacgtcacgctttatcagtgctaatctgccttgcaacaagttcaaaaatagactcgttaacatcatgccctacgagtccacccgggtttgcttgcagccaatcagaggggtggaggggagcgactatatcaatgcgagcttcatcgatgggtacaggcagcagaaggcctacatcgccacacaagggcctctcgctgagactacagaagatttttggaggatgctgtgggagaacaactcaacaatcgtcgtgatgcttaccaagctgcgagagatgggcagggaaaagtgccaccaatactggccagctgaaaggtcagcaaggtaccagtacttcgtcgtggatccaatggcggagtataacatgccgcagtacattttgcgcgagtttaaggtgacagatgccagagatgggcaatctcggaccgttaggcaattccagtttaccgactggcccgaacagggcgtcccgaaatcaggtgaggggttcattgactttatcgggcaggtgcacaaaacaaaggagcagtttgggcaggatggccctattagcgttcactgttcagcaggggtgggccgaactggggtgtttataactctctccattgtcctggaacgtatgcgctacgagggtgtcgtagatatcttccagaccgtcaagatgctcagaacacagagacccgcaatggtccaaaccgaggatgagtatcagttttgctaccaggcagctttagagtacctgggaagtttcgaccactacgccacctag

SEQ ID NO: 234413 - DNA, 6006 bp, Artificial Sequence
  derived and/or modified sequence
cctcgcgccgcccgcccggcagcccggccggcgcgcgcacgccgcgagccgctggcgctcgggctccgctcggatcccatgcaacagccacgatgtgaagcggggcagagccgggggagcccagcccagccagcctccagacgttgccccatctgacgctcggctcgaggcctctctgtgagggaccggggggccatccccctccagggcggagatcggaggtcgctgccaagcatggcgcccacctggggccctggcatggtgtctgtggttggtcccatgggcctccttgtggtcctgctcgttggaggctgtgcagcagaagagccccccaggtttatcaaagaacccaaggaccagatcggcgtgtcggggggtgtggcctctttcgtgtgtcaggccacgggtgaccccaagccacgagtgacctggaacaagaagggcaagaaggtcaactctcagcgctttgagacgattgagtttgatgagagtgcaggggcagtgctgaggatccagccgctgaggacaccgcgggatgaaaacgtgtacgagtgtgtggcccagaactcggttggggagatcacagtccatgccaagcttactgtcctccgagaggaccagctgccctctggcttccccaacatcgacatgggcccacagttgaaggtggtggagcggacacggacagccaccatgctctgtgcagccagcggcaaccctgaccctgagatcacctggttcaaggacttcctgcctgtggatcctagtgccagcaatggacgcatcaaacagctgcgatcaggagccctgcagattgaaagcagtgaggaaaccgaccagggcaaatatgagtgtgtggccaccaacagcgccggcgtgcgctactcctcacctgccaacctctacgtgcgagtccgccgcgtggccccgcgcttctccatcctgcccatgagccacgagatcatgccagggggcaacgtgaacatcacctgcgtggccgtgggctcgcccatgccatacgtgaagtggatgcagggggccgaggacctgacccccgaggatgacatgcccgtgggtcggaacgtgctggaactcacagatgtcaaggactcggccaactacacctgcgtggccatgtccagcctgggcgtcattgaggcggttgctcagatcacggtgaaatctctccccaaagctcccgggactcccatggtgactgagaacacagccaccagcatcaccatcacgtgggactcgggcaacccagatcctgtgtcctattacgtcatcgaatataaatccaagagccaagacgggccgtatcagattaaagaggacatcaccaccacacgttacagcatcggcggcctgagccccaactcggagtacgagatctgggtgtcggccgtcaactccatcggccaggggccccccagcgagtccgtggtcacccgcacaggcgagcaggccccggccagcgcgccgcggaacgtgcaagcccggatgctcagcgcgaccaccatgattgtgcagtgggaggagccggtggagcccaacggcctgatccgcggctaccgcgtctactacaccatggaaccggagcaccccgtgggcaactggcagaagcacaacgtggacgacagcctgctgaccaccgtgggcagcctgctggaggacgagacctacaccgtgcgggtgctcgccttcacctccgtcggcgacgggcccctctcggaccccatccaggtcaagacgcagcagggagtgccgggccagcccatgaacctgcgggccgaggccaggtcggagaccagcatcacgctgtcctggagccccccgcggcaggagagtatcatcaagtacgagctcctcttccgggaaggcgaccatggccgggaggtgggaaggaccttcgacccgacgacttcctacgtggtggaggacctgaagcccaacacggagtacgccttccgcctggcggcccgctcgccgcagggcctgggcgccttcacccccgtggtgcggcagcgcacgctgcagtccatctcgcccaagaacttcaaggtgaaaatgatcatgaagacatcagttctgctcagctgggagttccctgacaactacaactcacccacaccctacaagatccagtacaatgggctcacactggatgtggatggccgtaccaccaagaagctcatcacgcacctcaagccccacaccttctacaactttgtgctgaccaatcgcggcagcagcctgggcggcctccagcagacggtcaccgcctggactgccttcaacctgctcaacggcaagcccagcgtcgcccccaagcctgatgctgacggcttcatcatggtgtatcttcctgacggccagagccccgtgcctgtccagagctatttcattgtgatggtgccactgcgcaagtctcgtggaggccaattcctgaccccgctgggtagcccagaggacatggatctggaagagctcatccaggacatctcacggctacagaggcgcagcctgcggcactcgcgtcagctggaggtgccccggccctatattgcagctcgcttctctgtgctgccacccacgttccatcccggcgaccagaagcagtatggcggcttcgataaccggggcctggagcccggccaccgctatgtcctcttcgtgcttgccgtgcttcagaagagcgagcctacctttgcagccagtcccttctcagaccccttccagctggataacccggacccccagcccatcgtggatggcgaggaggggcttatctgggtgatcgggcctgtgctggccgtggtcttcataatctgcattgtcattgctatcctgctctacaagaacaaacccgacagtaaacgcaaggactcagaaccccgcaccaaatgcctcctgaacaatgccgacctcgcccctcaccaccccaaggaccctgtggaaatgagacgcattaacttccagactccaggcatgcttagccacccgccaattcccatcgcagacatggcggagcacacggagcggctcaaggccaacgacagcctcaagctctcccaggagtatgagtccatcgaccctggacagcagttcacatgggaacattccaacctggaagtgaacaagccgaagaaccgctatgccaacgtcatcgcctatgaccactcccgtgtcatcctccagcccattgaaggcatcatgggcagtgattacatcaatgccaactacgtggacggctaccggtgtcagaacgcgtacattgccacgcaggggccgctgcctgagacctttggggacttctggcgtatggtgtgggagcagcggtcggcgaccatcgtcatgatgacgcggctggaggagaagtcacggatcaagtgtgatcagtattggcccaacagaggcacggagacctacggcttcatccaggtcacgttgctagataccatcgagctggccacattctgcgtcaggacattctctctgcacaagaatggctccagtgagaaacgcgaggtccgccagttccagtttacggcgtggccggaccatggcgtgcccgaatacccaacgcccttcctggctttcctgcggagagtcaagacctgcaacccgccagatgccggccccatcgtggttcactgcagtgccggtgtgggccgcacaggctgctttatcgtcatcgacgccatgcttgagcggatcaagccagagaagacagtcgatgtctatggccacgtgacgctcatgaggtcccagcgcaactacatggtgcagacggaggaccagtacagcttcatccacgaggccctgctggaggccgtgggctgtggcaacacagaagtgcccgcacgcagcctctatgcctacatccagaagctggcccaggtggagcctggcgaacacgtcactggcatggaactcgagttcaagcggctggctaactccaaggcccacacgtcacgcttcatcagtgccaatctgccttgtaacaagttcaagaaccgcctggtgaacatcatgccctatgagagcacacgggtctgtctgcaacccatccggggtgtggagggctctgactacatcaacgccagcttcattgatggctacaggcagcagaaggcctacatcgcgacacaggggccgctggcggagaccacggaagacttctggcgcatgctgtgggagaacaattcgacgatcgtggtgatgctgaccaagctgcgggagatgggccgggagaagtgtcaccagtactggccggccgagcgctctgcccgctaccagtactttgtggtagatccgatggcagaatacaacatgcctcagtatatcctgcgagagttcaaggtcacagatgcccgggatggccagtcccggactgtccggcagttccagttcacagactggccggaacagggtgtgccaaagtcgggggagggcttcatcgacttcattggccaagtgcataagactaaggagcagtttggccaggacggccccatctctgtccactgcagtgccggcgtgggcaggacgggcgtcttcatcacgcttagcatcgtgctggagcggatgcggtatgaaggcgtggtggacatctttcagacggtgaagatgctacgaacccagcggccggccatggtgcagacagaggatgagtaccagttctgttaccaggcggcactggagtacctcggaagctttgaccactatgcaacctaaagccatggttccccccaggcccgacaccactggccccggatgcctctgcccctcccgggcggacctcctgaggcctggacccccagtgggcagggcaggaggtggcagcggcagcagctgtgtttctgcaccatttccgaggacgacgcagcccctcgagcccccccaccggccccggccgccccagcgacctccctggcaccggccgccgccttcaaatacttggcacattcctcctttccttccaattccaaaaccagattccggggtggggggtggggggatggtgagcaaataggagtgctccccagaaccagaggagggtggggcacagaccatagacggacccctcgtcctcccccagcggtggtagggggacccggggggctcctccccgctctgcagcctggggacactgggctgggaccagaatccagctttcttttaaaactctcagtgtaactgtatcccgtgacatttcattttttttaaatagtgtatttttttttccatttttttttttaagagaaacaaacaaaagactcgccagtcaatgactttcaaagagaactaactttggcttattcatattctgttcaaagacagtctattttttcactgtagaaagcgtccttgtgtgatagttacgttcgcaaacgcgcacgccaggcccatggctgtaccttggcttttttttttttttttttttttttaatttttcctaccatcagaaagtgtgctttgctcacagaagaatgggatgtccttttttctttcttggctttttttttccccctttttgtttcatttttataaattaaattttcagacatatcaaatacagttctgagggtaaggtcatgggggagctcggacccagtggcgttgggtgcggttgagggggacgctgctgtaagaggagagagatgacagtggtcctcctctgagagcctgagctgtctccccgtctcccgcccccaaggagacagagaggatcctacttcttcggggacagtggctgtatggctgtgctgccccacatcagggaccctttccccctgggactgtggggcagtttgggagcaaaaccagaaggacaggcccccctctacccgcctaccctgagcaagcgagttgttcctctttgtacaagggcaggtctgcggttactttcaacactgtttattccagcggaagcagccgggtggttttcccacccccgtgtatgtagatatatcgactttgtattaaaggaagatcgtctga

SEQ ID NO: 234414 - DNA, 4506 bp, Artificial Sequence
  derived and/or modified sequence
atggcccccacctggggccccggcatggtgagcgtggtgggccccatgggcctgctggtggtgctgctggtgggcggctgcgccgccgaggagccccccagattcatcaaggagcccaaggaccagatcggcgtgagcggcggcgtggccagcttcgtgtgccaggccaccggcgaccccaagcccagagtgacctggaacaagaagggcaagaaggtgaacagccagagattcgagaccatcgagttcgacgagagcgccggcgccgtgctgagaatccagcccctgagaacccccagagacgagaacgtgtacgagtgcgtggcccagaacagcgtgggcgagatcaccgtgcacgccaagctgaccgtgctgagagaggaccagctgcccagcggcttccccaacatcgacatgggcccccagctgaaggtggtggagagaaccagaaccgccaccatgctgtgcgccgccagcggcaaccccgaccccgagatcacctggttcaaggacttcctgcccgtggaccccagcgccagcaacggcagaatcaagcagctgagaagcggcgccctgcagatcgagagcagcgaggagaccgaccagggcaagtacgagtgcgtggccaccaacagcgccggcgtgagatacagcagccccgccaacctgtacgtgagagtgagaagagtggcccccagattcagcatcctgcccatgagccacgagatcatgcccggcggcaacgtgaacatcacctgcgtggccgtgggcagccccatgccctacgtgaagtggatgcagggcgccgaggacctgacccccgaggacgacatgcccgtgggcagaaacgtgctggagctgaccgacgtgaaggacagcgccaactacacctgcgtggccatgagcagcctgggcgtgatcgaggccgtggcccagatcaccgtgaagagcctgcccaaggcccccggcacccccatggtgaccgagaacaccgccaccagcatcaccatcacctgggacagcggcaaccccgaccccgtgagctactacgtgatcgagtacaagagcaagagccaggacggcccctaccagatcaaggaggacatcaccaccaccagatacagcatcggcggcctgagccccaacagcgagtacgagatctgggtgagcgccgtgaacagcatcggccagggcccccccagcgagagcgtggtgaccagaaccggcgagcaggcccccgccagcgcccccagaaacgtgcaggccagaatgctgagcgccaccaccatgatcgtgcagtgggaggagcccgtggagcccaacggcctgatcagaggctacagagtgtactacaccatggagcccgagcaccccgtgggcaactggcagaagcacaacgtggacgacagcctgctgaccaccgtgggcagcctgctggaggacgagacctacaccgtgagagtgctggccttcaccagcgtgggcgacggccccctgagcgaccccatccaggtgaagacccagcagggcgtgcccggccagcccatgaacctgagagccgaggccagaagcgagaccagcatcaccctgagctggagcccccccagacaggagagcatcatcaagtacgagctgctgttcagagagggcgaccacggcagagaggtgggcagaaccttcgaccccaccaccagctacgtggtggaggacctgaagcccaacaccgagtacgccttcagactggccgccagaagcccccagggcctgggcgccttcacccccgtggtgagacagagaaccctgcagagcatcagccccaagaacttcaaggtgaagatgatcatgaagaccagcgtgctgctgagctgggagttccccgacaactacaacagccccaccccctacaagatccagtacaacggcctgaccctggacgtggacggcagaaccaccaagaagctgatcacccacctgaagccccacaccttctacaacttcgtgctgaccaacagaggcagcagcctgggcggcctgcagcagaccgtgaccgcctggaccgccttcaacctgctgaacggcaagcccagcgtggcccccaagcccgacgccgacggcttcatcatggtgtacctgcccgacggccagagccccgtgcccgtgcagagctacttcatcgtgatggtgcccctgagaaagagcagaggcggccagttcctgacccccctgggcagccccgaggacatggacctggaggagctgatccaggacatcagcagactgcagagaagaagcctgagacacagcagacagctggaggtgcccagaccctacatcgccgccagattcagcgtgctgccccccaccttccaccccggcgaccagaagcagtacggcggcttcgacaacagaggcctggagcccggccacagatacgtgctgttcgtgctggccgtgctgcagaagagcgagcccaccttcgccgccagccccttcagcgaccccttccagctggacaaccccgacccccagcccatcgtggacggcgaggagggcctgatctgggtgatcggccccgtgctggccgtggtgttcatcatctgcatcgtgatcgccatcctgctgtacaagaacaagcccgacagcaagagaaaggacagcgagcccagaaccaagtgcctgctgaacaacgccgacctggccccccaccaccccaaggaccccgtggagatgagaagaatcaacttccagacccccggcatgctgagccacccccccatccccatcgccgacatggccgagcacaccgagagactgaaggccaacgacagcctgaagctgagccaggagtacgagagcatcgaccccggccagcagttcacctgggagcacagcaacctggaggtgaacaagcccaagaacagatacgccaacgtgatcgcctacgaccacagcagagtgatcctgcagcccatcgagggcatcatgggcagcgactacatcaacgccaactacgtggacggctacagatgccagaacgcctacatcgccacccagggccccctgcccgagaccttcggcgacttctggagaatggtgtgggagcagagaagcgccaccatcgtgatgatgaccagactggaggagaagagcagaatcaagtgcgaccagtactggcccaacagaggcaccgagacctacggcttcatccaggtgaccctgctggacaccatcgagctggccaccttctgcgtgagaaccttcagcctgcacaagaacggcagcagcgagaagagagaggtgagacagttccagttcaccgcctggcccgaccacggcgtgcccgagtaccccacccccttcctggccttcctgagaagagtgaagacctgcaacccccccgacgccggccccatcgtggtgcactgcagcgccggcgtgggcagaaccggctgcttcatcgtgatcgacgccatgctggagagaatcaagcccgagaagaccgtggacgtgtacggccacgtgaccctgatgagaagccagagaaactacatggtgcagaccgaggaccagtacagcttcatccacgaggccctgctggaggccgtgggctgcggcaacaccgaggtgcccgccagaagcctgtacgcctacatccagaagctggcccaggtggagcccggcgagcacgtgaccggcatggagctggagttcaagagactggccaacagcaaggcccacaccagcagattcatcagcgccaacctgccctgcaacaagttcaagaacagactggtgaacatcatgccctacgagagcaccagagtgtgcctgcagcccatcagaggcgtggagggcagcgactacatcaacgccagcttcatcgacggctacagacagcagaaggcctacatcgccacccagggccccctggccgagaccaccgaggacttctggagaatgctgtgggagaacaacagcaccatcgtggtgatgctgaccaagctgagagagatgggcagagagaagtgccaccagtactggcccgccgagagaagcgccagataccagtacttcgtggtggaccccatggccgagtacaacatgccccagtacatcctgagagagttcaaggtgaccgacgccagagacggccagagcagaaccgtgagacagttccagttcaccgactggcccgagcagggcgtgcccaagagcggcgagggcttcatcgacttcatcggccaggtgcacaagaccaaggagcagttcggccaggacggccccatcagcgtgcactgcagcgccggcgtgggcagaaccggcgtgttcatcaccctgagcatcgtgctggagagaatgagatacgagggcgtggtggacatcttccagaccgtgaagatgctgagaacccagagacccgccatggtgcagaccgaggacgagtaccagttctgctaccaggccgccctggagtacctgggcagcttcgaccactacgccacctag

SEQ ID NO: 234415 - protein, 1910 aa, Artificial Sequence
  derived and/or modified sequence
MAPTWGPGMVSVVGPMGLLVVLLVGGCAAEEPPRFIKEPKDQIGVSGGVASFVCQATGDPKPRVTWNKKGKKVNSQRFETIEFDESAGAVLRIQPLRTPRDENVYECVAQNSVGEITVHAKLTVLREDQLPSGFPNIDMGPQLKVVERTRTATMLCAASGNPDPEITWFKDFLPVDPSASNGRIKQLRSGALQIESSEETDQGKYECVATNSAGVRYSSPANLYVRVRRVAPRFSILPMSHEIMPGGNVNITCVAVGSPMPYVKWMQGAEDLTPEDDMPVGRNVLELTDVKDSANYTCVAMSSLGVIEAVAQITVKSLPKAPGTPMVTENTATSITITWDSGNPDPVSYYVIEYKSKSQDGPYQIKEDITTTRYSIGGLSPNSEYEIWVSAVNSIGQGPPSESVVTRTGEQAPASAPRNVQARMLSATTMIVQWEEPVEPNGLIRGYRVYYTMEPEHPVGNWQKHNVDDSLLTTVGSLLEDETYTVRVLAFTSVGDGPLSDPIQVKTQQGVPGQPMNLRAEARSETSITLSWSPPRQESIIKYELLFREGDHGREVGRTFDPTTSYVVEDLKPNTEYAFRLAARSPQGLGAFTPVVRQRTLQSKPSAPPQDVKCVSVRSTAILVSWRPPPPETHNGALVGYSVRYRPLGSEDPEPKEVNGIPPTTTQILLEALEKWTQYRITTVAHTEVGPGPESSPVVVRTDEDVPSAPPRKVEAEALNATAIRVLWRSPAPGRQHGQIRGYQVHYVRMEGAEARGPPRIKDVMLADAQEMVITNLQPETAYSITVAAYTMKGDGARSKPKVVVTKGAVLGRPTLSVQQTPEGSLLARWEPPAGTAEDQVLGYRLQFGREDSTPLATLEFPPSEDRYTASGVHKGATYVFRLAARSRGGLGEEAAEVLSIPEDTPRGHPQILEAAGNASAGTVLLRWLPPVPAERNGAIVKYTVAVREAGALGPARETELPAAAEPGAENALTLQGLKPDTAYDLQVRAHTRRGPGPFSPPVRYRTFLRDQVSPKNFKVKMIMKTSVLLSWEFPDNYNSPTPYKIQYNGLTLDVDGRTTKKLITHLKPHTFYNFVLTNRGSSLGGLQQTVTAWTAFNLLNGKPSVAPKPDADGFIMVYLPDGQSPVPVQSYFIVMVPLRKSRGGQFLTPLGSPEDMDLEELIQDISRLQRRSLRHSRQLEVPRPYIAARFSVLPPTFHPGDQKQYGGFDNRGLEPGHRYVLFVLAVLQKSEPTFAASPFSDPFQLDNPDPQPIVDGEEGLIWVIGPVLAVVFIICIVIAILLYKNKPDSKRKDSEPRTKCLLNNADLAPHHPKDPVEMRRINFQTPGMLSHPPIPIADMAEHTERLKANDSLKLSQEYESIDPGQQFTWEHSNLEVNKPKNRYANVIAYDHSRVILQPIEGIMGSDYINANYVDGYRCQNAYIATQGPLPETFGDFWRMVWEQRSATIVMMTRLEEKSRIKCDQYWPNRGTETYGFIQVTLLDTIELATFCVRTFSLHKNGSSEKREVRQFQFTAWPDHGVPEYPTPFLAFLRRVKTCNPPDAGPIVVHCSAGVGRTGCFIVIDAMLERIKPEKTVDVYGHVTLMRSQRNYMVQTEDQYSFIHEALLEAVGCGNTEVPARSLYAYIQKLAQVEPGEHVTGMELEFKRLANSKAHTSRFISANLPCNKFKNRLVNIMPYESTRVCLQPIRGVEGSDYINASFIDGYRQQKAYIATQGPLAETTEDFWRMLWENNSTIVVMLTKLREMGREKCHQYWPAERSARYQYFVVDPMAEYNMPQYILREFKVTDARDGQSRTVRQFQFTDWPEQGVPKSGEGFIDFIGQVHKTKEQFGQDGPISVHCSAGVGRTGVFITLSIVLERMRYEGVVDIFQTVKMLRTQRPAMVQTEDEYQFCYQAALEYLGSFDHYAT

SEQ ID NO: 234416 - DNA, 5733 bp, Artificial Sequence
  derived and/or modified sequence
atggcccccacctggggtcctgggatggtgtccgtcgtgggtcctatgggcctgctagtagtgctcctggttggcggctgtgcggcagaagaaccaccccgctttataaaggaacccaaagaccagatcggagtaagcggcggtgtcgctagctttgtctgtcaagccactggggatcccaaaccaagggtgacttggaataagaaagggaaaaaagtcaattctcaacgatttgaaaccatcgaattcgacgagagcgccggcgctgtgctgagaatacagcccttgaggactccaagagacgaaaatgtctatgagtgtgtagcacagaattccgtgggtgaaattacggtgcacgccaagttaactgtgctgcgggaagatcagcttcccagcggattcccaaacattgacatgggaccgcagttaaaagtggtcgaaagaactaggacagcaactatgctatgtgccgcatccggcaatcccgatcccgagattacgtggtttaaagactttttacccgtcgatccttcggcatcgaatggacgcataaagcaactacggtctggggccttacagattgagtcctccgaggagaccgaccagggaaagtatgaatgtgtagctacaaattcggccggggttcgatatagttcccctgctaatttgtatgttcgggtccgaagggtggctccacggttttccatcctgcctatgtcccacgagataatgccaggtggcaacgtgaacataacatgtgtcgctgtcggtagccctatgccatatgtaaagtggatgcagggggccgaggacctcactcccgaagacgatatgcctgttggcagaaatgttcttgaactgacagatgtgaaagacagtgcaaattatacttgcgtagccatgtcatccctgggcgtgatcgaagcggttgctcaaataaccgtcaaatcactgcccaaggcccccgggacccctatggttaccgagaacacagcaacttccattacaatcacctgggattcgggaaaccccgaccctgtatcctactatgtgatcgaatacaagtctaagagccaggatggcccgtaccagattaaagaggatattactactactcggtattctatcggtggtctgtcacctaattccgagtatgagatctgggtgtctgctgtgaattccattggccagggtcccccaagcgagtcagtagtgaccagaactggcgagcaggctcctgcaagtgcgccgcggaacgtgcaggccaggatgctatcagctaccacaatgattgtgcagtgggaggagccagtcgaaccaaatggtctcattaggggatatagagtttattacacaatggagcctgagcatcccgtgggaaattggcagaagcataacgtggacgactccttattaactaccgtgggcagtttgcttgaagatgaaacctacacagtgcgggtattggccttcacctcagtcggggacggacccctgtccgatcccatacaggtgaaaactcaacagggagtgcccggacagccaatgaacctccgggccgaggctagaagcgaaacttctatcacactctcttggtctcctccacgacaggagtccataattaagtatgagctgctctttcgcgaaggcgatcacggacgggaagtaggacgaacgttcgaccccactacatcatatgtggtcgaggaccttaagccgaataccgaatatgccttcagactcgccgccagatcgccgcaagggctgggggcatttacacccgtggttcgtcagaggacccttcagtccaaaccatctgcacctccacaggatgttaaatgtgttagcgttcggtcaaccgctattcttgtgagttggaggcctcctcctcctgagactcacaatggggctctggtcggatacagcgtcagatacaggcccctgggcagtgaggaccccgagcctaaggaggtgaatggcatccctccaaccaccacccaaattctgctggaggcactggaaaagtggacacagtaccgtattacaaccgtggcccacactgaagtagggccaggtcccgaaagctcacccgtggtggtgcgaaccgacgaggacgttcccagtgcaccacctcgcaaggtggaggcagaagcgctcaacgctaccgcaattcgggttttgtggaggtccccagcacctggtcgacaacatggccagattagagggtatcaggttcactacgtgcgaatggaaggcgcagaagcacgcggccccccccgtatcaaagatgtgatgctcgctgacgcccaggagatggtgataaccaacctgcagcctgaaactgcgtattccattactgtggccgcttacaccatgaaaggggacggcgcccgcagtaaacctaaagtcgtcgtcaccaaaggcgcagtacttggacgaccaaccctcagtgtccagcagacccccgaaggaagcctgctagctcggtgggaaccccccgcaggcacagcggaggatcaagttttgggctaccgactccaatttggtagagaggacagcactcccctagctaccctagagttccccccctctgaagatcgctacaccgcgtcaggcgtccataaaggcgccacatacgttttcagacttgctgcacgctctcgcgggggtctgggagaagaggctgccgaagtactttcaattcccgaggatacccctcgaggtcacccacagatcctggaagctgccgggaatgcttcggctgggactgtgttgctgaggtggctgccacccgtgcccgcagaaagaaacggagccatagtgaaatatacggtcgctgtcagagaagcaggggcattggggccggcccgcgagaccgaactgccggctgccgccgaaccaggggcggaaaacgcgttgactctgcagggactaaagccagatacggcttatgatttgcaggtgcgggcccacacccgtcgcggaccgggacccttttctcccccggttcggtacaggacattcctgagggaccaggttagtcccaagaattttaaagtgaagatgatcatgaaaacgtccgttctgctttcttgggagtttcccgacaactacaactcgccgaccccttataaaatacagtataatgggctcaccctagatgtggatgggcggacgacaaagaaattaataacccacctcaagccacacaccttctataattttgtgctgacgaacagaggctcctctctggggggattacagcagacagtaacggcctggacggcctttaaccttcttaatgggaagccatctgttgccccgaaacccgatgcagacggcttcatcatggtctatctcccagatggtcaatctccagtccctgtgcaatcgtatttcatcgtaatggtaccactaaggaagtcacggggaggccaatttctgacccccctaggatctcccgaagacatggaccttgaggaattgatccaggatatatcacggctgcagaggaggtctcttcgccactctagacagctagaagtaccaaggccttatatcgccgcccgattcagcgtcctgccaccaacatttcatccaggcgaccagaaacagtatggcgggtttgacaacaggggcttggaacctggccaccgctatgtactcttcgtccttgcagtgctccaaaaatcagagcctacattcgcggccagccctttttcagacccatttcagctggacaacccagatccccagcccatcgtagacggcgaggagggacttatctgggtgatcggtcctgtgctggccgtagttttcattatttgcatcgttatagccatcttactctataaaaacaaacctgacagtaaaaggaaggatagcgagcctcgtaccaagtgtttgctcaataatgctgatctcgccccccaccacccaaaagatcctgtcgaaatgaggcgaataaactttcagacacctggtatgctctcacacccccctattccgattgctgatatggccgagcacaccgaaagactgaaggcgaacgatagtctcaaactgtcacaggagtacgagtccattgatcccggccagcaattcacctgggaacatagtaacttagaagtcaataaacctaaaaataggtacgctaacgtgattgcctacgatcattcccgagtgatactgcagccgatcgagggaatcatggggagtgattatattaatgctaattacgtggatggttacagatgccaaaatgcctacatagccacacagggtccattgcccgagacctttggggacttctggagaatggtctgggaacaaaggtccgccactattgttatgatgacaaggttggaagagaagagccgtataaaatgcgatcaatattggccgaataggggaactgagacttacggattcattcaagtaacactcctcgataccattgaactcgccacgttttgtgtgagaactttcagtttacataagaatggcagtagcgagaagcgcgaggtccgacaattccaatttaccgcctggccggatcatggcgtgcctgagtatccgacaccattcctggcttttttgagacgggtcaagacttgtaaccctccagatgccgggcctatagtggtgcattgctcggccggggtaggtcggacgggctgcttcattgtgattgatgcgatgctggaaagaatcaagcctgaaaaaaccgttgacgtgtatggacacgtcaccctgatgaggagtcaaagaaactacatggtccagacagaagatcagtatagttttattcacgaggctctgcttgaagccgtgggatgtggcaacacagaagtgcctgcgcgtagcctctacgcctacatccagaaattagcccaggtggagcctggggagcacgtgacgggcatggagctcgagttcaaacggctggccaactcaaaggctcatacctccagatttatttctgcaaatctgccatgcaacaagttcaaaaaccgactcgttaatataatgccatacgagagtacaagagtgtgcctgcagccgatcagaggggtagaggggtctgattacattaatgcaagctttattgatgggtaccgacagcagaaggcatatattgccacacaagggcctttagccgagaccacggaagatttctggcggatgctttgggaaaacaacagtactatagtggtaatgctcacaaaactgcgtgagatgggccgtgaaaagtgccaccagtactggccagctgagcgtagtgcacggtaccagtactttgtggttgaccccatggctgaatataatatgccccagtacatcctgcgggaatttaaagtgacggatgcaagagatggtcaatcccgtactgtgcgccaattccagttcacagactggccagaacaaggcgtgcctaagtccggagagggattcattgactttatcggacaagtgcataaaaccaaggagcagtttgggcaagatggacccatcagcgttcactgctccgcgggcgtgggccggactggcgtgtttataacactgtccatcgtgctggagcgtatgagatatgaaggcgtggtggacattttccagaccgtaaagatgctgaggacgcagcgcccagccatggtgcagacagaagatgaatatcaattctgctatcaggccgccctggagtatctgggtagttttgatcattatgccacctag

SEQ ID NO: 234417 - DNA, 5733 bp, Artificial Sequence
  derived and/or modified sequence
atggcccccacctggggccctggcatggtgtctgtggtgggccccatgggcctgctggtggtgctgctggtgggcggctgtgccgctgaggagcccccacgcttcatcaaggagcccaaggaccagattggagtgtctgggggcgtggccagctttgtgtgccaggccactggagaccccaagccccgggtgacctggaacaagaagggcaagaaggtgaacagccagagatttgagaccattgaatttgatgagagcgctggagctgtgctgcgcatccagcccctgcggaccccaagagatgaaaatgtgtatgaatgtgtggcccagaacagcgtgggggagatcaccgtgcacgccaagctgactgtgctgcgggaggaccagctgcccagcggcttccccaacatcgacatgggcccccagctgaaggtggtggagaggaccaggacagccaccatgctgtgtgccgccagcggcaacccagaccctgagatcacctggttcaaggacttcctgcctgtggaccccagcgccagcaatggccgcatcaagcagctgcggagcggggccctgcagatcgagagcagcgaggagacagaccagggcaagtatgaatgtgtggccaccaacagcgctggggtgcgctacagcagccctgccaacctgtatgtgcgggtgcggcgggtggccccccgcttcagcatcctgcccatgagccatgagatcatgcctggaggaaatgtgaacatcacctgtgtggccgtgggcagccccatgccctacgtgaagtggatgcagggcgctgaggacctgaccccagaagatgacatgcctgtgggcagaaatgtgctggagctgacagatgtgaaggacagcgccaactacacctgtgtggccatgagcagcctgggcgtgattgaagctgtggcccagatcaccgtgaagagcctgcccaaggcccctggcacccccatggtgacagaaaatacagccaccagcatcaccatcacctgggacagcggcaacccagaccctgtgtcctactacgtgattgagtacaagagcaagagccaggacggcccctaccagatcaaggaggacatcaccaccacccgctacagcatcggcggcctgagccccaacagtgaatatgagatctgggtgtctgctgtgaacagcatcggccagggccccccatctgagagcgtggtgaccaggactggagagcaggccccagccagcgcccccagaaatgtgcaggccaggatgctgagcgccaccaccatgattgtgcagtgggaggagcctgtggagcccaacggcctcatccggggctacagagtgtactacaccatggagcctgagcaccctgtgggcaactggcagaagcacaacgtggatgacagcctgctgaccaccgtgggcagcctgctggaggatgagacctacacagtgcgggtgctggccttcacctctgtgggagatggccccctgagtgaccccatccaggtgaagacccagcagggcgtgcccggccagcccatgaacctgcgggcagaggcccggtctgagaccagcatcaccctgtcctggagccccccccggcaggagagcatcatcaagtatgagctgctcttccgggagggggaccacggccgggaggtgggccgcacctttgaccccaccaccagctatgtggtggaggacctgaagcccaacacagaatatgccttccggctggccgcccggagcccccagggcctgggcgccttcacccctgtggtgcggcagaggaccctgcagagcaagcccagcgccccaccccaggatgtgaagtgtgtgtctgtgcgcagcacagccatcctggtgtcctggaggcctcctcctcctgagacccacaatggagccctggtgggctacagcgtgcgctaccggcccctgggctctgaagatcctgagcccaaggaggtgaatggcatcccccccaccaccacccagatcctgctggaggccctggagaagtggacccagtaccgcatcaccaccgtggcccacacagaggtgggccctggccctgagagcagccctgtggtggtgaggacagatgaagatgtgcccagcgccccacccaggaaggtggaggccgaggccctgaatgccacagccatccgggtgctgtggaggagccctgcccctggccggcagcacggccagatccggggctaccaggtgcactacgtgaggatggagggcgctgaggcccggggccccccacgcatcaaggatgtgatgctggctgatgcccaggagatggtgatcaccaacctgcagcctgagacagcctacagcatcaccgtggccgcctacaccatgaagggagatggagcccggagcaagcccaaggtggtggtgaccaagggagctgtgctgggccggcccaccctgtctgtgcagcagaccccagagggcagcctgctggcccgctgggagcccccagctggaacagctgaggaccaggtgctgggctaccgcctgcagtttggaagagaggacagcacccccctggccaccctggagttccccccatctgaagatcgctacacagccagcggcgtgcacaagggggccacctacgtgttccggctggccgcccggagcagaggaggcctgggggaggaggccgctgaggtgctgagcatccctgaggacaccccccggggccacccccagatcctggaggccgctggaaatgccagcgctggcaccgtgctgctgcgctggctgccccctgtgcctgctgagagaaatggagccatcgtgaagtacacagtggccgtgcgggaggccggggccctgggccctgcccgggagacagagctgcctgctgctgctgagcctggagcagaaaatgccctgaccctgcagggcctgaagccagacacagcctatgacctgcaggtgcgggcccacacccggcggggccctggccccttcagcccccctgtgcgctaccgcaccttcctgcgggaccaggtgagccccaagaacttcaaggtgaagatgatcatgaagacctctgtgctgctgtcctgggagttcccagacaactacaacagccccaccccctacaagatccagtacaacggcctgaccctggatgtggatggccgcaccaccaagaagctgatcacccacctgaagccccacaccttctacaactttgtgctgaccaacagaggcagcagcctgggcggcctgcagcagacagtgacagcctggacagccttcaacctgctgaatggcaagcccagcgtggcccccaagccagatgctgatggcttcatcatggtgtacctgcctgatggccagagccctgtgcctgtgcagagctacttcatcgtgatggtgcccctgaggaagagccggggcggccagttcctgacccccctgggcagccctgaggacatggacctggaggagctgatccaggacatcagccggctgcagaggaggagcctgcggcacagccggcagctggaggtgccccggccctacatcgccgcccgcttctctgtgctgccccccaccttccaccctggggaccagaagcagtatggaggctttgacaacagaggcctggagcccggccaccgctacgtgctgtttgtgctggccgtgctgcagaagtctgagcccacctttgctgccagccccttcagtgaccccttccagctggacaacccagacccccagcccatcgtggatggagaggagggcctcatctgggtgattggccctgtgctggccgtggtgttcatcatctgcatcgtgattgccatcctgctgtacaagaacaagccagacagcaagaggaaggacagcgagcccaggaccaagtgcctgctgaacaatgctgacctggccccccaccaccccaaggaccctgtggagatgaggcgcatcaacttccagaccccaggcatgctgagccacccccccatccccatcgctgacatggccgagcacacagagcggctgaaggccaatgacagcctgaagctgagccaggagtatgagagcattgaccccggccagcagttcacctgggagcacagcaacctggaggtgaacaagcccaagaacagatatgccaacgtcatcgcctatgaccacagcagggtcatcctgcagcccatcgagggcatcatgggcagtgactacatcaatgccaactacgtggatggctaccgctgccagaatgcctacatcgccacccagggccccctgcctgagaccttcggggacttctggaggatggtgtgggagcagaggtctgccaccatcgtgatgatgacccggctggaggagaagagccgcatcaagtgtgaccagtactggcccaacagaggaacagagacctacggcttcatccaggtgaccctgctggacaccatcgagctggccaccttctgtgtgaggaccttcagcctgcacaagaatggcagcagcgagaagcgggaggtgcggcagttccagttcaccgcctggccagaccacggcgtgcctgagtaccccacccccttcctggccttcctgcggcgggtgaagacctgcaaccccccagatgctggccccatcgtggtgcactgcagcgctggggtgggccgcacaggctgcttcatcgtgattgatgccatgctggagcgcatcaagccagagaagacagtggatgtgtatggccacgtgaccctgatgaggagccagaggaactacatggtgcagacagaggaccagtacagcttcatccacgaggccctgctggaggccgtgggctgcggcaacacagaggtgcctgcccggagcctgtatgcctacatccagaagctggcccaggtggagcctggagagcacgtgacaggcatggagctggagttcaagaggctggccaacagcaaggcccacaccagccgcttcatcagcgccaacctgccctgcaacaagttcaagaaccggctggtgaacatcatgccctatgagagcaccagggtgtgcctgcagcccatccggggcgtggagggcagtgactacatcaatgccagcttcattgatggctaccggcagcagaaggcctacatcgccacccagggccccctggccgagaccacagaggacttctggaggatgctgtgggagaacaacagcaccatcgtggtgatgctgaccaagctgcgggagatgggccgggagaagtgccaccagtactggccagctgagaggtctgcccgctaccagtactttgtggtggaccccatggccgagtacaacatgccccagtacatcctgcgggagttcaaggtgacagatgccagagatggccagagcaggacagtgcggcagttccagttcacagactggccagagcagggcgtgcccaagagcggggagggcttcatcgacttcatcggccaggtgcacaagaccaaggagcagtttggccaggacggccccatctctgtgcactgcagcgctggggtgggccgcactggagtcttcatcaccctgagcatcgtgctggagaggatgagatatgagggcgtggtggacatcttccagacagtgaagatgctgcggacccagaggcctgccatggtgcagacagaagatgagtaccagttctgctaccaggccgccctggagtacctgggcagctttgaccactacgccacctag

SEQ ID NO: 234418 - DNA, 5733 bp, Artificial Sequence
  derived and/or modified sequence
atggcccccacctggggccccggcatggtgagcgtggtgggccccatgggcctcctcgtagtgctgcttgtcggcggctgtgccgcagaggagcctcccaggtttataaaggagccaaaagaccaaattggcgttagtggcggagtggcctcttttgtttgccaagctactggagatcccaaaccacgagttacatggaacaaaaagggaaagaaagttaatagccaaagatttgaaaccattgaatttgatgagagcgctggcgccgtcctccggattcagccacttaggaccccgcgcgatgaaaatgtgtacgaatgtgtggcccagaactctgtaggcgaaatcaccgtgcatgcaaagctcaccgtgctacgggaagaccagcttcctagtggattccctaatatcgatatgggaccccagttaaaagtcgtcgagaggacaagaaccgctaccatgctgtgtgctgctagcgggaacccggacccagagataacctggtttaaggacttcctcccagtggaccctagtgcatcaaatgggagaatcaagcaattacggagcggagccttacaaatcgaaagctctgaagagacagaccagggcaagtatgaatgcgtggccacaaattcggctggtgtgaggtatagtagcccggccaatctgtacgtgcgtgttagacgcgtcgcgcctcggttcagcattttaccgatgtcacacgaaattatgcctggcggtaacgtgaacatcacctgtgtcgcagtgggatctccaatgccctatgtaaagtggatgcaaggggcagaagacttgactcctgaagatgacatgcctgttggaaggaacgtgctggaactaactgacgtgaaagatagtgcaaattatacgtgcgtagctatgtctagtttgggagtcatcgaggcagtcgcacagattaccgtgaagtcactgccaaaagcccccggtacacccatggtaactgagaacaccgccacctccatcactattacgtgggattctggcaatccagaccccgtatcctattatgtaatagagtacaaatctaaaagccaggacggcccatatcagatcaaggaggatattaccacaaccaggtattcaatcggggggttatcacccaactccgaatacgaaatatgggtctcagctgtaaacagcatcgggcaggggccccccagcgaaagcgtggtcactaggactggtgaacaggcaccagcaagcgctccaagaaatgtccaggcgagaatgttgtcagccaccacgatgatagtacagtgggaggagcccgtggagccaaatggactcatccgtggctatagagtctattatacaatggagccggaacaccccgttggaaattggcaaaagcacaacgtggatgactccctgctcactactgtcggctcccttctggaggacgaaacttatacagtaagagtcctggcatttacctccgttggtgacgggcccctcagcgacccaatccaggtgaaaacccaacaaggtgtgcccggccagccgatgaacctcagggccgaggcgaggagcgagacaagcattacgctaagttggtctcccccacgccaagaatcgatcatcaagtacgagctgttgtttcgggagggcgaccatgggcgcgaggttgggaggacatttgatcccaccacgagctatgtagttgaagatctcaagccgaacaccgagtatgccttccgcctggctgcgcggtctcctcaggggctgggggcatttacaccggtcgtgaggcagagaacgctgcaatcaaaaccctcagctccccctcaggacgtgaaatgcgtgagcgtgcgatctactgctattctggtatcttggaggccaccgccccctgaaacacacaatggagcgttagtcggctattcagtgcggtacaggccactggggtcagaggatcccgaaccgaaggaagtgaacggcattcccccgactacaacccagatcctgctagaagcccttgagaaatggacccagtaccgcattaccactgttgcccacaccgaagttgggccgggcccggagtcctcaccagtcgtcgtgcggacagacgaagacgttccaagcgcaccaccccgcaaagtggaggccgaagctctcaatgctacggctatccgtgtgctgtggcgcagcccagcccccggccgccagcacggacaaattcgcggctaccaggtgcattacgtcaggatggaaggtgctgaggctaggggtcctccacgaatcaaggatgtgatgttagccgatgcccaggaaatggttatcaccaacctccagccagagacagcctatagcatcacagtggccgcatataccatgaaaggagatggcgcccgctctaagcctaaggtcgtggtcaccaagggagcagtgcttggtaggcctacattgagtgtgcagcagactcctgaaggtagcctccttgcacgctgggaaccgccagccggcaccgcagaggatcaggtgctgggttacagattgcagttcggaagggaggacagtactcccctcgccactctcgagtttccaccttcggaggacaggtataccgcctcgggagtacataaaggcgctacctacgtttttagattggccgcaaggtctcggggcggtctgggcgaggaagcggctgaggttttatcaattcctgaggatacaccacggggtcatcctcaaatcctggaagccgccgggaatgcatccgccggcaccgtgctgctgagatggctgccacctgttccggccgagagaaatggcgccatcgtcaaatacacagtggccgttagggaggccggcgctttggggcccgctagagagacagaactccccgctgcagctgagcctggagcggagaatgcattaacacttcagggcctaaagccggacaccgcttatgacctgcaggttagggcgcacacccggcgggggccaggccccttcagtccgccagtgcgataccgtacattcttgcgggaccaggtgtcccctaagaacttcaaggtgaagatgattatgaaaacctccgtattattgtcctgggagtttcccgataactacaatagcccgacaccttacaaaatccagtataacgggctgaccctggacgttgatggcagaaccaccaagaagctgatcacacacctgaaaccgcacaccttctacaatttcgtccttacaaatcggggatctagcctgggcggactgcagcagactgtgaccgcttggactgccttcaacctcctaaatggtaagccatcagtcgctccgaaacccgatgcagacggcttcataatggtgtacctgccagacgggcagtcccccgtgcccgttcagtcttatttcatcgtcatggttcccctgagaaaaagcaggggaggccaattcctaacccctctgggctcgcctgaagatatggacctggaagaactgatacaagatatttcgagactgcagcggcgcagcttgcgtcatagtaggcagctggaggtacccagaccctacatagccgcacggtttagcgtgcttccccctacatttcatcctggagatcaaaaacaatatggtggattcgataaccgcgggttagaacctgggcacagatatgtcctgttcgttctggccgttctgcagaaatccgagcccactttcgctgcaagcccattctcagaccccttccagctggataatcccgacccccagccaatagtcgacggcgaagagggcctaatttgggtgatcggacctgtgctcgctgtggtgttcattatctgcattgtgattgctatactgctgtacaagaacaaaccagattcaaaaagaaaggattcagagcccaggacaaagtgtctgctcaataatgccgacctggcaccccatcatcccaaagatccagtggagatgaggcggattaattttcaaactcctgggatgttgagccacccgcctatcccaatcgccgatatggccgagcacacagaacgcctgaaagcaaatgacagcctgaagctcagccaggaatatgagagtatagacccaggccagcagttcacttgggaacactccaatttagaagtgaataagcccaagaatagatatgccaacgttattgcgtacgatcactcaagagtgatcttacagcccattgagggcattatggggtccgactatataaatgcaaactacgttgatgggtatagatgtcaaaatgcctacatcgccacccagggacccctgccagaaacatttggcgacttctggcgtatggtgtgggaacagcggagcgccacgattgttatgatgactcgccttgaggagaaatcaaggatcaagtgcgatcaatattggccaaataggggaacagagacctacgggttcatccaggttacgcttctagataccatagagttggcaaccttctgcgtaagaactttcagtctccacaaaaatggcagctctgagaaacgcgaggtcaggcagttccagttcacggcctggccagaccatggagtgcctgagtacccaacaccctttctcgcatttctgcgcagggtcaagacatgcaacccccccgacgccggcccaatcgtagtgcattgttccgccggggtggggagaaccggctgctttatcgtgatcgacgcaatgttagaaagaatcaaacctgaaaaaacagtcgacgtgtatggccatgttactttaatgaggagtcagcggaattacatggtacagactgaagatcaatacagcttcatccatgaggcgctgctggaagccgtggggtgtggcaacaccgaagttcccgccagaagcctctacgcttatattcaaaagcttgcccaagtggaaccaggagagcacgtgactggcatggaactggaatttaagcggctggccaatagcaaggcccataccagccggtttatttctgccaacctgccctgcaataaatttaagaacaggctggtcaacattatgccatatgaaagtaccagagtgtgtctgcagcccataagaggtgtcgaaggctcagactacattaacgccagcttcatagatggatatcgccagcagaaagcatacatcgccacacagggacctttggcggagactaccgaggacttttggaggatgttgtgggagaataatagtacgatcgtggtgatgctgaccaaactccgggagatggggagggagaagtgccatcagtattggccggccgagcgctcagcccgatatcaatacttcgttgtggatcctatggcggagtataacatgccccagtatattctgagggagttcaaagttaccgacgccagggacgggcagtccagaacagtgaggcagttccagttcactgactggccagagcagggagtccctaaaagcggcgagggattcattgactttataggacaggtgcacaagacaaaggagcagtttggtcaagacggacctattagtgtccattgcagcgcaggtgttggaagaaccggcgttttcattacactttccatcgtcctggaacgcatgaggtatgaaggcgtggtggatatttttcagactgtcaaaatgctgcgcacacaaaggccggccatggtgcaaaccgaagatgaataccagttctgctatcaggcagccctggagtacctgggctctttcgaccactacgccacatag

SEQ ID NO: 234419 - DNA, 5732 bp, Artificial Sequence
  derived and/or modified sequence
atggccccaacctggggaccaggcatggtaagcgtcgtagggccaatgggactacttgtagtgttgctggtgggaggatgtgccgcagaggagccgcctaggtttataaaagagccgaaggatcaaataggagtgtctggaggcgtcgcctcatttgtgtgccaggctacaggtgatcccaagccgagggtcacctggaacaagaaagggaaaaaagtgaatagccagcggttcgaaacgatagaatttgacgaaagcgccggagctgtcctgcgcatccagccactgcggactcctcgggacgagaacgtgtacgaatgtgtggcccagaatagtgtcggggagattacagtgcacgcgaaactaaccgtcctacgcgaggatcagctgccaagtgggttcccaaacattgatatgggaccccagttgaaagtcgtcgaacgaactcgaacagccacgatgctgtgcgccgcaagcggaaaccctgatccggagatcacctggtttaaggattttctcccagtggacccatctgcctcaaatgggcgaatcaagcagctacggtcgggcgcattgcaaatcgaatcaagcgaggagactgaccagggcaaatatgagtgcgttgccacgaatagtgcaggagtgcgctactcttcacctgccaacctctacgtaagagttaggcgggtggcaccccgtttcagcatcctcccaatgagccacgaaatcatgcccggaggaaatgtgaacataacatgcgtggctgtcggctccccaatgccctatgtcaagtggatgcagggagcagaggatcttaccccagaagacgacatgccagtagggcgtaatgtgctcgagctgacagatgttaaggattccgccaattatacctgcgtggctatgagttctctaggggttatcgaggctgtggcccagattaccgtcaaaagcctccccaaggctcctggaacgccaatggttactgaaaatacggctacctccatcacgatcacttgggacagtggaaatccggatcctgtgagctactatgttattgagtataagtccaaatcacaggatgggccttaccaaatcaaggaggatattaccactactagatattcgataggcggtctgagccctaacagtgagtacgagatttgggttagcgcagtcaatagcattggacaggggccacctagtgaaagcgtggttactcggaccggtgaacaagccccagcatctgccccacggaacgtgcaggctaggatgttgagcgcaacgacaatgattgtgcaatgggaagaaccagtcgaacccaacggtctgatccgtggatatcgggtctactatactatggaaccggagcaccctgtcggaaattggcagaaacataacgttgacgatagcctgctgacaactgttgggtctttactggaggatgaaacttacactgttcgcgtgctggcctttacaagcgtgggagatggaccgctgagtgatcccatccaggttaagacgcagcagggcgttccaggccagcctatgaaccttagagccgaggctagaagcgagacatctatcacactttcatggagcccccctaggcaagagtccatcattaaatatgagctcttgttccgcgagggcgaccatggccgtgaagtcgggagaacattcgatcccacaacatcctatgtcgtagaagacctaaaacccaataccgagtacgctttcagactggccgctcgcagccctcaaggcctaggcgcattcacaccagttgttcgacagcggaccttacagtctaagccatcagccccaccacaagacgtgaaatgcgtgagtgtacggtccactgctattttggtaagttggagacccccaccgcctgagactcacaacggtgctctcgttggctactccgtgcggtacaggccgctgggcagcgaggatccagaaccaaaagaggtcaatggaatccctcctacaacaacccagatcctgctggaggccctggaaaagtggacccagtacagaatcaccactgtcgcccatacagaggtagggcctggcccagaatcctcacccgtggtcgtgcggaccgatgaagacgtgcccagcgctccacccaggaaagtcgaggcagaagctttgaacgccacagcaatcagagtcctctggcgcagtcccgctccagggagacagcatggccaaatccgaggataccaggtccactatgtaagaatggagggcgctgaggcgagaggaccccctagaattaaagacgtcatgttggctgacgcgcaggaaatggtaatcacgaatttacagcccgaaacagcctattctattactgtggcagcctacactatgaagggcgacggggctaggagcaagccgaaagtagtagttaccaaaggggcagtgctggggaggcccacactgtccgtccagcaaacacctgagggaagtctgctcgcacggtgggagcccccagcgggaaccgcagaggatcaggttctcggttatagattgcagttcggacgagaagacagtacccctctcgcgaccttggagttccccccttccgaagacaggtacacagcgagtggcgtgcataaaggagcgacctatgttttccgcttagccgctagatcccgcggaggcttgggagaggaggctgctgaggtcctctcaattccagaggacactccacgagggcacccccagattctagaggctgccggaaatgcaagtgccggtacagtgctgttgcggtggctcccccctgtccccgctgagcgcaacggcgctatagtcaaatatacggtagctgtgcgggaagcaggcgctctgggcccagcccgagaaactgagctccccgcagctgccgaaccaggggcagagaatgcactgactcttcagggcctgaagcccgatactgcgtatgacttacaggttcgtgcgcacactaggcgtgggcctggcccttttagtccccctgtgagatatagaacctttttgcgcgaccaggtttcaccaaaaaatttcaaagttaaaatgattatgaaaacctctgtgctgctcagctgggagttccccgataactataactcacctacgccatacaaaatccagtacaacggcctcacacttgacgtggacggcagaactactaaaaaactgattacgcatttgaagccccatacattctacaattttgtattaacaaataggggcagctcattggggggactgcagcagaccgttacggcttggacagcttttaatctcttgaacgggaaacccagcgtggcccctaagccggatgcggatgggttcatcatggtttaccttccggacgggcaaagtccagtgccagtacagtcctatttcatagttatggtgccacttagaaagtcacgaggcggacagtttctcaccccactagggagccctgaggatatggacctggaggaactgatacaggatatttcccggcttcagagaagatccctgcgtcactcacgccaattagaagttccccgtccttatatcgcagcccgtttcagtgtgctgccccctaccttccaccctggcgaccagaaacagtatgggggtttcgacaatagaggcctagaacctgggcacaggtatgtgctgtttgtgctggccgttctgcagaaaagtgaaccaaccttcgcagcttcccctttcagtgacccattccagctggacaacccagatccacagccgatcgtagatggcgaagaagggctgatctgggtgatcggccctgtactcgcagtggtttttattatctgcatagtcatcgcaattctactttacaagaataaaccagatagcaagaggaaagatagcgaacctcgcacaaagtgtctgctgaacaatgccgatctggcccctcatcatccaaaagaccctgtggaaatgcggaggattaacttccagacaccaggaatgctgtcccaccctcccatcccaatcgccgacatggccgaacacaccgagagactgaaggccaatgactcactgaagctgagtcaggaatacgagtcgatagatcctggtcagcagtttacttgggaacattctaatttagaagtcaataaacctaagaaccggtatgccaacgtcatcgcttatgatcattcccgcgtaatcctgcagccgatcgaaggcatcatgggctctgattatatcaacgcaaactacgtggatggctatcggtgccaaaacgcttatattgccacacaaggccctctgccagagacctttggggacttctggagaatggtgtgggagcaacgctctgcaacaatcgtaatgatgacaagacttgaggagaaaagccggatcaagtgtgatcagtattggccaaatcggggaactgagacttacgggttcatccaagtaactctacttgacaccatcgaattggctaccttttgcgttcgaacatttagtttacacaagaatggctcaagcgaaaaacgggaggtgcgccaatttcagtttactgcatggcctgaccacggagtgcccgagtaccctaccccctttctggccttcttgcgcagggtcaagacctgtaatccccctgacgctggcccaatcgttgttcactgttccgccggagtagggaggaccggttgcttcattgtgatcgatgccatgctagaaagaatcaaacctgagaagactgtggacgtgtacgggcatgtaacattaatgcgcagtcaacgtaattatatggtgcagaccgaggaccagtactcttttattcacgaagccttgctcgaagccgtgggctgcggcaatacagaggtgcctgctagatctctatacgcttacattcaaaagctggcccaggtggagcccggtgaacatgttaccgggatggagctggagttcaaacggctggctaatagcaaggcacatactagtaggttcatctccgctaatctgccttgcaataaatttaaaaacagactggtcaacatcatgccttatgagtctactcgggtgtgtctgcagcccatacgcggagtcgaggggtctgattacataaacgcatcatttattgacgggtaccggcagcagaaggcctacattgcaacacagggcccattagccgagacaaccgaggacttttggcggatgctgtgggagaataacagcactattgtggtcatgttaacaaagcttcgtgaaatggggagagaaaagtgccaccagtattggccggctgagcgtagcgccaggtaccaatatttcgtggtcgatcccatggctgagtacaacatgcctcagtatatattgcgggagttcaaggttactgacgcccgtgatgggcagagtagaactgtgcgtcagttccagttcactgattggcccgagcagggggtcccgaaatcaggggaaggcttcatagattttatcggccaagttcacaaaacaaaagagcagttcggccaagatggacccatctccgttcactgtagcgcaggggtcggcagaacgggggtatttataactctgtcaatcgtgctagagcgaatgcggtatgagggagtggtagatatttttcagacagtgaaaatgttgaggactcagcgacctgccatggttcagactgaagacgagtaccagttttgttaccaggcggcattagaatacctgggcagctttgaccattatgctacata

SEQ ID NO: 234420 - DNA, 7233 bp, Artificial Sequence
  derived and/or modified sequence
cctcgcgccgcccgcccggcagcccggccggcgcgcgcacgccgcgagccgctggcgctcgggctccgctcggatcccatgcaacagccacgatgtgaagcggggcagagccgggggagcccagcccagccagcctccagacgttgccccatctgacgctcggctcgaggcctctctgtgagggaccggggggccatccccctccagggcggagatcggaggtcgctgccaagcatggcgcccacctggggccctggcatggtgtctgtggttggtcccatgggcctccttgtggtcctgctcgttggaggctgtgcagcagaagagccccccaggtttatcaaagaacccaaggaccagatcggcgtgtcggggggtgtggcctctttcgtgtgtcaggccacgggtgaccccaagccacgagtgacctggaacaagaagggcaagaaggtcaactctcagcgctttgagacgattgagtttgatgagagtgcaggggcagtgctgaggatccagccgctgaggacaccgcgggatgaaaacgtgtacgagtgtgtggcccagaactcggttggggagatcacagtccatgccaagcttactgtcctccgagaggaccagctgccctctggcttccccaacatcgacatgggcccacagttgaaggtggtggagcggacacggacagccaccatgctctgtgcagccagcggcaaccctgaccctgagatcacctggttcaaggacttcctgcctgtggatcctagtgccagcaatggacgcatcaaacagctgcgatcaggagccctgcagattgaaagcagtgaggaaaccgaccagggcaaatatgagtgtgtggccaccaacagcgccggcgtgcgctactcctcacctgccaacctctacgtgcgagtccgccgcgtggccccgcgcttctccatcctgcccatgagccacgagatcatgccagggggcaacgtgaacatcacctgcgtggccgtgggctcgcccatgccatacgtgaagtggatgcagggggccgaggacctgacccccgaggatgacatgcccgtgggtcggaacgtgctggaactcacagatgtcaaggactcggccaactacacctgcgtggccatgtccagcctgggcgtcattgaggcggttgctcagatcacggtgaaatctctccccaaagctcccgggactcccatggtgactgagaacacagccaccagcatcaccatcacgtgggactcgggcaacccagatcctgtgtcctattacgtcatcgaatataaatccaagagccaagacgggccgtatcagattaaagaggacatcaccaccacacgttacagcatcggcggcctgagccccaactcggagtacgagatctgggtgtcggccgtcaactccatcggccaggggccccccagcgagtccgtggtcacccgcacaggcgagcaggccccggccagcgcgccgcggaacgtgcaagcccggatgctcagcgcgaccaccatgattgtgcagtgggaggagccggtggagcccaacggcctgatccgcggctaccgcgtctactacaccatggaaccggagcaccccgtgggcaactggcagaagcacaacgtggacgacagcctgctgaccaccgtgggcagcctgctggaggacgagacctacaccgtgcgggtgctcgccttcacctccgtcggcgacgggcccctctcggaccccatccaggtcaagacgcagcagggagtgccgggccagcccatgaacctgcgggccgaggccaggtcggagaccagcatcacgctgtcctggagccccccgcggcaggagagtatcatcaagtacgagctcctcttccgggaaggcgaccatggccgggaggtgggaaggaccttcgacccgacgacttcctacgtggtggaggacctgaagcccaacacggagtacgccttccgcctggcggcccgctcgccgcagggcctgggcgccttcacccccgtggtgcggcagcgcacgctgcagtccaaaccgtcagccccccctcaagacgttaaatgtgtcagcgtgcgctccacggccattttggtaagttggcgcccgccgccgccggaaacgcacaacggggccctggtgggctacagcgtccgctaccgaccgctgggctcagaggacccggaacccaaggaggtgaacggcatccccccgaccaccactcagatcctgctggaggccttggagaagtggacccagtaccgcatcacgactgtcgctcacacagaggtgggaccagggcccgagagctcgcccgtggtcgtccgcaccgacgaggatgtgcccagcgcgccgccgcggaaggtggaggcggaggcgctcaacgccacggccatccgcgtgctgtggcgctcgcccgcgcccggccggcagcacggccagatccgcggctaccaggtccactacgtgcgcatggagggcgccgaggcccgcgggccgccgcgcatcaaggacgtcatgctggccgatgcccaggagatggtcatcacaaacttgcagcctgagaccgcgtactccatcacggtagccgcctacaccatgaagggcgatggcgctcgcagcaaacccaaggtggttgtgaccaagggagcagtgctgggccgcccaaccctgtcggtgcagcagacccccgagggcagcctgctggcacgctgggagcccccggctggcaccgcggaggaccaggtgctgggctaccgcctgcagtttggccgtgaggactcgacgcccctggccaccctggagttcccgccctccgaggaccgctacacggcatcaggcgtgcacaagggggccacgtatgtgttccggcttgcggcccggagccgcggcggcctgggcgaggaggcagccgaggtcctgagcatcccggaggacacgccccgtggccacccgcagattctggaggcggccggcaacgcctcggccgggaccgtccttctccgctggctgccacccgtgcccgccgagcgcaacggggccatcgtcaaatacacggtggccgtgcgggaggccggtgccctgggccctgcccgagagactgagctgccggcagcggctgagccgggcgcggagaacgcgctcacgctgcagggcctgaagcccgacacggcctatgacctccaagtgcgagcccacacgcgccggggccctggccccttcagcccccccgtccgctaccggacgttcctgcgggaccaagtctcgcccaagaacttcaaggtgaaaatgatcatgaagacatcagttctgctcagctgggagttccctgacaactacaactcacccacaccctacaagatccagtacaatgggctcacactggatgtggatggccgtaccaccaagaagctcatcacgcacctcaagccccacaccttctacaactttgtgctgaccaatcgcggcagcagcctgggcggcctccagcagacggtcaccgcctggactgccttcaacctgctcaacggcaagcccagcgtcgcccccaagcctgatgctgacggcttcatcatggtgtatcttcctgacggccagagccccgtgcctgtccagagctatttcattgtgatggtgccactgcgcaagtctcgtggaggccaattcctgaccccgctgggtagcccagaggacatggatctggaagagctcatccaggacatctcacggctacagaggcgcagcctgcggcactcgcgtcagctggaggtgccccggccctatattgcagctcgcttctctgtgctgccacccacgttccatcccggcgaccagaagcagtatggcggcttcgataaccggggcctggagcccggccaccgctatgtcctcttcgtgcttgccgtgcttcagaagagcgagcctacctttgcagccagtcccttctcagaccccttccagctggataacccggacccccagcccatcgtggatggcgaggaggggcttatctgggtgatcgggcctgtgctggccgtggtcttcataatctgcattgtcattgctatcctgctctacaagaacaaacccgacagtaaacgcaaggactcagaaccccgcaccaaatgcctcctgaacaatgccgacctcgcccctcaccaccccaaggaccctgtggaaatgagacgcattaacttccagactccaggcatgcttagccacccgccaattcccatcgcagacatggcggagcacacggagcggctcaaggccaacgacagcctcaagctctcccaggagtatgagtccatcgaccctggacagcagttcacatgggaacattccaacctggaagtgaacaagccgaagaaccgctatgccaacgtcatcgcctatgaccactcccgtgtcatcctccagcccattgaaggcatcatgggcagtgattacatcaatgccaactacgtggacggctaccggtgtcagaacgcgtacattgccacgcaggggccgctgcctgagacctttggggacttctggcgtatggtgtgggagcagcggtcggcgaccatcgtcatgatgacgcggctggaggagaagtcacggatcaagtgtgatcagtattggcccaacagaggcacggagacctacggcttcatccaggtcacgttgctagataccatcgagctggccacattctgcgtcaggacattctctctgcacaagaatggctccagtgagaaacgcgaggtccgccagttccagtttacggcgtggccggaccatggcgtgcccgaatacccaacgcccttcctggctttcctgcggagagtcaagacctgcaacccgccagatgccggccccatcgtggttcactgcagtgccggtgtgggccgcacaggctgctttatcgtcatcgacgccatgcttgagcggatcaagccagagaagacagtcgatgtctatggccacgtgacgctcatgaggtcccagcgcaactacatggtgcagacggaggaccagtacagcttcatccacgaggccctgctggaggccgtgggctgtggcaacacagaagtgcccgcacgcagcctctatgcctacatccagaagctggcccaggtggagcctggcgaacacgtcactggcatggaactcgagttcaagcggctggctaactccaaggcccacacgtcacgcttcatcagtgccaatctgccttgtaacaagttcaagaaccgcctggtgaacatcatgccctatgagagcacacgggtctgtctgcaacccatccggggtgtggagggctctgactacatcaacgccagcttcattgatggctacaggcagcagaaggcctacatcgcgacacaggggccgctggcggagaccacggaagacttctggcgcatgctgtgggagaacaattcgacgatcgtggtgatgctgaccaagctgcgggagatgggccgggagaagtgtcaccagtactggccggccgagcgctctgcccgctaccagtactttgtggtagatccgatggcagaatacaacatgcctcagtatatcctgcgagagttcaaggtcacagatgcccgggatggccagtcccggactgtccggcagttccagttcacagactggccggaacagggtgtgccaaagtcgggggagggcttcatcgacttcattggccaagtgcataagactaaggagcagtttggccaggacggccccatctctgtccactgcagtgccggcgtgggcaggacgggcgtcttcatcacgcttagcatcgtgctggagcggatgcggtatgaaggcgtggtggacatctttcagacggtgaagatgctacgaacccagcggccggccatggtgcagacagaggatgagtaccagttctgttaccaggcggcactggagtacctcggaagctttgaccactatgcaacctaaagccatggttccccccaggcccgacaccactggccccggatgcctctgcccctcccgggcggacctcctgaggcctggacccccagtgggcagggcaggaggtggcagcggcagcagctgtgtttctgcaccatttccgaggacgacgcagcccctcgagcccccccaccggccccggccgccccagcgacctccctggcaccggccgccgccttcaaatacttggcacattcctcctttccttccaattccaaaaccagattccggggtggggggtggggggatggtgagcaaataggagtgctccccagaaccagaggagggtggggcacagaccatagacggacccctcgtcctcccccagcggtggtagggggacccggggggctcctccccgctctgcagcctggggacactgggctgggaccagaatccagctttcttttaaaactctcagtgtaactgtatcccgtgacatttcattttttttaaatagtgtatttttttttccatttttttttttaagagaaacaaacaaaagactcgccagtcaatgactttcaaagagaactaactttggcttattcatattctgttcaaagacagtctattttttcactgtagaaagcgtccttgtgtgatagttacgttcgcaaacgcgcacgccaggcccatggctgtaccttggcttttttttttttttttttttttttaatttttcctaccatcagaaagtgtgctttgctcacagaagaatgggatgtccttttttctttcttggctttttttttccccctttttgtttcatttttataaattaaattttcagacatatcaaatacagttctgagggtaaggtcatgggggagctcggacccagtggcgttgggtgcggttgagggggacgctgctgtaagaggagagagatgacagtggtcctcctctgagagcctgagctgtctccccgtctcccgcccccaaggagacagagaggatcctacttcttcggggacagtggctgtatggctgtgctgccccacatcagggaccctttccccctgggactgtggggcagtttgggagcaaaaccagaaggacaggcccccctctacccgcctaccctgagcaagcgagttgttcctctttgtacaagggcaggtctgcggttactttcaacactgtttattccagcggaagcagccgggtggttttcccacccccgtgtatgtagatatatcgactttgtattaaaggaagatcgtctga

SEQ ID NO: 234421 - DNA, 5733 bp, Artificial Sequence
  derived and/or modified sequence
atggcccccacctggggccccggcatggtgagcgtggtgggccccatgggcctgctggtggtgctgctggtgggcggctgcgccgccgaggagccccccagattcatcaaggagcccaaggaccagatcggcgtgagcggcggcgtggccagcttcgtgtgccaggccaccggcgaccccaagcccagagtgacctggaacaagaagggcaagaaggtgaacagccagagattcgagaccatcgagttcgacgagagcgccggcgccgtgctgagaatccagcccctgagaacccccagagacgagaacgtgtacgagtgcgtggcccagaacagcgtgggcgagatcaccgtgcacgccaagctgaccgtgctgagagaggaccagctgcccagcggcttccccaacatcgacatgggcccccagctgaaggtggtggagagaaccagaaccgccaccatgctgtgcgccgccagcggcaaccccgaccccgagatcacctggttcaaggacttcctgcccgtggaccccagcgccagcaacggcagaatcaagcagctgagaagcggcgccctgcagatcgagagcagcgaggagaccgaccagggcaagtacgagtgcgtggccaccaacagcgccggcgtgagatacagcagccccgccaacctgtacgtgagagtgagaagagtggcccccagattcagcatcctgcccatgagccacgagatcatgcccggcggcaacgtgaacatcacctgcgtggccgtgggcagccccatgccctacgtgaagtggatgcagggcgccgaggacctgacccccgaggacgacatgcccgtgggcagaaacgtgctggagctgaccgacgtgaaggacagcgccaactacacctgcgtggccatgagcagcctgggcgtgatcgaggccgtggcccagatcaccgtgaagagcctgcccaaggcccccggcacccccatggtgaccgagaacaccgccaccagcatcaccatcacctgggacagcggcaaccccgaccccgtgagctactacgtgatcgagtacaagagcaagagccaggacggcccctaccagatcaaggaggacatcaccaccaccagatacagcatcggcggcctgagccccaacagcgagtacgagatctgggtgagcgccgtgaacagcatcggccagggcccccccagcgagagcgtggtgaccagaaccggcgagcaggcccccgccagcgcccccagaaacgtgcaggccagaatgctgagcgccaccaccatgatcgtgcagtgggaggagcccgtggagcccaacggcctgatcagaggctacagagtgtactacaccatggagcccgagcaccccgtgggcaactggcagaagcacaacgtggacgacagcctgctgaccaccgtgggcagcctgctggaggacgagacctacaccgtgagagtgctggccttcaccagcgtgggcgacggccccctgagcgaccccatccaggtgaagacccagcagggcgtgcccggccagcccatgaacctgagagccgaggccagaagcgagaccagcatcaccctgagctggagcccccccagacaggagagcatcatcaagtacgagctgctgttcagagagggcgaccacggcagagaggtgggcagaaccttcgaccccaccaccagctacgtggtggaggacctgaagcccaacaccgagtacgccttcagactggccgccagaagcccccagggcctgggcgccttcacccccgtggtgagacagagaaccctgcagagcaagcccagcgcccccccccaggacgtgaagtgcgtgagcgtgagaagcaccgccatcctggtgagctggagaccccccccccccgagacccacaacggcgccctggtgggctacagcgtgagatacagacccctgggcagcgaggaccccgagcccaaggaggtgaacggcatcccccccaccaccacccagatcctgctggaggccctggagaagtggacccagtacagaatcaccaccgtggcccacaccgaggtgggccccggccccgagagcagccccgtggtggtgagaaccgacgaggacgtgcccagcgccccccccagaaaggtggaggccgaggccctgaacgccaccgccatcagagtgctgtggagaagccccgcccccggcagacagcacggccagatcagaggctaccaggtgcactacgtgagaatggagggcgccgaggccagaggcccccccagaatcaaggacgtgatgctggccgacgcccaggagatggtgatcaccaacctgcagcccgagaccgcctacagcatcaccgtggccgcctacaccatgaagggcgacggcgccagaagcaagcccaaggtggtggtgaccaagggcgccgtgctgggcagacccaccctgagcgtgcagcagacccccgagggcagcctgctggccagatgggagccccccgccggcaccgccgaggaccaggtgctgggctacagactgcagttcggcagagaggacagcacccccctggccaccctggagttcccccccagcgaggacagatacaccgccagcggcgtgcacaagggcgccacctacgtgttcagactggccgccagaagcagaggcggcctgggcgaggaggccgccgaggtgctgagcatccccgaggacacccccagaggccacccccagatcctggaggccgccggcaacgccagcgccggcaccgtgctgctgagatggctgccccccgtgcccgccgagagaaacggcgccatcgtgaagtacaccgtggccgtgagagaggccggcgccctgggccccgccagagagaccgagctgcccgccgccgccgagcccggcgccgagaacgccctgaccctgcagggcctgaagcccgacaccgcctacgacctgcaggtgagagcccacaccagaagaggccccggccccttcagcccccccgtgagatacagaaccttcctgagagaccaggtgagccccaagaacttcaaggtgaagatgatcatgaagaccagcgtgctgctgagctgggagttccccgacaactacaacagccccaccccctacaagatccagtacaacggcctgaccctggacgtggacggcagaaccaccaagaagctgatcacccacctgaagccccacaccttctacaacttcgtgctgaccaacagaggcagcagcctgggcggcctgcagcagaccgtgaccgcctggaccgccttcaacctgctgaacggcaagcccagcgtggcccccaagcccgacgccgacggcttcatcatggtgtacctgcccgacggccagagccccgtgcccgtgcagagctacttcatcgtgatggtgcccctgagaaagagcagaggcggccagttcctgacccccctgggcagccccgaggacatggacctggaggagctgatccaggacatcagcagactgcagagaagaagcctgagacacagcagacagctggaggtgcccagaccctacatcgccgccagattcagcgtgctgccccccaccttccaccccggcgaccagaagcagtacggcggcttcgacaacagaggcctggagcccggccacagatacgtgctgttcgtgctggccgtgctgcagaagagcgagcccaccttcgccgccagccccttcagcgaccccttccagctggacaaccccgacccccagcccatcgtggacggcgaggagggcctgatctgggtgatcggccccgtgctggccgtggtgttcatcatctgcatcgtgatcgccatcctgctgtacaagaacaagcccgacagcaagagaaaggacagcgagcccagaaccaagtgcctgctgaacaacgccgacctggccccccaccaccccaaggaccccgtggagatgagaagaatcaacttccagacccccggcatgctgagccacccccccatccccatcgccgacatggccgagcacaccgagagactgaaggccaacgacagcctgaagctgagccaggagtacgagagcatcgaccccggccagcagttcacctgggagcacagcaacctggaggtgaacaagcccaagaacagatacgccaacgtgatcgcctacgaccacagcagagtgatcctgcagcccatcgagggcatcatgggcagcgactacatcaacgccaactacgtggacggctacagatgccagaacgcctacatcgccacccagggccccctgcccgagaccttcggcgacttctggagaatggtgtgggagcagagaagcgccaccatcgtgatgatgaccagactggaggagaagagcagaatcaagtgcgaccagtactggcccaacagaggcaccgagacctacggcttcatccaggtgaccctgctggacaccatcgagctggccaccttctgcgtgagaaccttcagcctgcacaagaacggcagcagcgagaagagagaggtgagacagttccagttcaccgcctggcccgaccacggcgtgcccgagtaccccacccccttcctggccttcctgagaagagtgaagacctgcaacccccccgacgccggccccatcgtggtgcactgcagcgccggcgtgggcagaaccggctgcttcatcgtgatcgacgccatgctggagagaatcaagcccgagaagaccgtggacgtgtacggccacgtgaccctgatgagaagccagagaaactacatggtgcagaccgaggaccagtacagcttcatccacgaggccctgctggaggccgtgggctgcggcaacaccgaggtgcccgccagaagcctgtacgcctacatccagaagctggcccaggtggagcccggcgagcacgtgaccggcatggagctggagttcaagagactggccaacagcaaggcccacaccagcagattcatcagcgccaacctgccctgcaacaagttcaagaacagactggtgaacatcatgccctacgagagcaccagagtgtgcctgcagcccatcagaggcgtggagggcagcgactacatcaacgccagcttcatcgacggctacagacagcagaaggcctacatcgccacccagggccccctggccgagaccaccgaggacttctggagaatgctgtgggagaacaacagcaccatcgtggtgatgctgaccaagctgagagagatgggcagagagaagtgccaccagtactggcccgccgagagaagcgccagataccagtacttcgtggtggaccccatggccgagtacaacatgccccagtacatcctgagagagttcaaggtgaccgacgccagagacggccagagcagaaccgtgagacagttccagttcaccgactggcccgagcagggcgtgcccaagagcggcgagggcttcatcgacttcatcggccaggtgcacaagaccaaggagcagttcggccaggacggccccatcagcgtgcactgcagcgccggcgtgggcagaaccggcgtgttcatcaccctgagcatcgtgctggagagaatgagatacgagggcgtggtggacatcttccagaccgtgaagatgctgagaacccagagacccgccatggtgcagaccgaggacgagtaccagttctgctaccaggccgccctggagtacctgggcagcttcgaccactacgccacctag

SEQ ID NO: 234422 - protein, 1505 aa, Artificial Sequence
  derived and/or modified sequence
MAPTWGPGMVSVVGPMGLLVVLLVGGCAAEEPPRFIKEPKDQIGVSGGVASFVCQATGDPKPRVTWNKKGKKVNSQRFETIEFDESAGAVLRIQPLRTPRDENVYECVAQNSVGEITVHAKLTVLREDQLPSGFPNIDMGPQLKVVERTRTATMLCAASGNPDPEITWFKDFLPVDPSASNGRIKQLRSGALQIESSEETDQGKYECVATNSAGVRYSSPANLYVRALREVRRVAPRFSILPMSHEIMPGGNVNITCVAVGSPMPYVKWMQGAEDLTPEDDMPVGRNVLELTDVKDSANYTCVAMSSLGVIEAVAQITVKSLPKAPGTPMVTENTATSITITWDSGNPDPVSYYVIEYKSKSQDGPYQIKEDITTTRYSIGGLSPNSEYEIWVSAVNSIGQGPPSESVVTRTGEQAPASAPRNVQARMLSATTMIVQWEEPVEPNGLIRGYRVYYTMEPEHPVGNWQKHNVDDSLLTTVGSLLEDETYTVRVLAFTSVGDGPLSDPIQVKTQQGVPGQPMNLRAEARSETSITLSWSPPRQESIIKYELLFREGDHGREVGRTFDPTTSYVVEDLKPNTEYAFRLAARSPQGLGAFTPVVRQRTLQSISPKNFKVKMIMKTSVLLSWEFPDNYNSPTPYKIQYNGLTLDVDGRTTKKLITHLKPHTFYNFVLTNRGSSLGGLQQTVTAWTAFNLLNGKPSVAPKPDADGFIMVYLPDGQSPVPVQSYFIVMVPLRKSRGGQFLTPLGSPEDMDLEELIQDISRLQRRSLRHSRQLEVPRPYIAARFSVLPPTFHPGDQKQYGGFDNRGLEPGHRYVLFVLAVLQKSEPTFAASPFSDPFQLDNPDPQPIVDGEEGLIWVIGPVLAVVFIICIVIAILLYKNKPDSKRKDSEPRTKCLLNNADLAPHHPKDPVEMRRINFQTPGMLSHPPIPIADMAEHTERLKANDSLKLSQEYESIDPGQQFTWEHSNLEVNKPKNRYANVIAYDHSRVILQPIEGIMGSDYINANYVDGYRCQNAYIATQGPLPETFGDFWRMVWEQRSATIVMMTRLEEKSRIKCDQYWPNRGTETYGFIQVTLLDTIELATFCVRTFSLHKNGSSEKREVRQFQFTAWPDHGVPEYPTPFLAFLRRVKTCNPPDAGPIVVHCSAGVGRTGCFIVIDAMLERIKPEKTVDVYGHVTLMRSQRNYMVQTEDQYSFIHEALLEAVGCGNTEVPARSLYAYIQKLAQVEPGEHVTGMELEFKRLANSKAHTSRFISANLPCNKFKNRLVNIMPYESTRVCLQPIRGVEGSDYINASFIDGYRQQKAYIATQGPLAETTEDFWRMLWENNSTIVVMLTKLREMGREKCHQYWPAERSARYQYFVVDPMAEYNMPQYILREFKVTDARDGQSRTVRQFQFTDWPEQGVPKSGEGFIDFIGQVHKTKEQFGQDGPISVHCSAGVGRTGVFITLSIVLERMRYEGVVDIFQTVKMLRTQRPAMVQTEDEYQFCYQAALEYLGSFDHYAT

SEQ ID NO: 234423 - DNA, 4518 bp, Artificial Sequence
  derived and/or modified sequence
atggctcccacatggggccccggcatggtgagcgtggtcggaccgatgggactgttagtcgtgctgctcgttggtggttgcgctgcggaggagcccccgcgtttcatcaaggaacctaaggatcagattggggtgagcgggggtgtggcatcttttgtgtgtcaagctacaggcgatccaaagcctcgggtcacatggaacaaaaagggcaaaaaagtgaactcacagaggtttgagaccatagagtttgacgagagcgccggtgcagtgctgcgcatccagcctctgcgcacacctagggacgagaatgtctacgagtgcgtggcgcaaaatagcgttggcgagatcacagtgcacgccaagctgacagtactgcgtgaggatcagctcccatctggctttcccaacatcgacatgggtcctcagctaaaagtggtggaacggaccagaactgcgaccatgctatgcgccgcttctggcaatcccgatcctgagattacctggttcaaggactttttgcctgttgatcccagtgcctctaacggcagaattaaacagttgagatccggcgcactgcagatcgaatcatctgaggagaccgaccaggggaagtacgagtgcgtggcaaccaatagtgccggagtacgctatagctctccagcaaatctctacgttagagctctgcgcgaggtgcggcgcgtcgcgccccgattttcgatactgcctatgtcccatgagataatgccagggggcaacgtgaatataacctgcgtcgctgtgggatcacccatgccctacgtcaagtggatgcagggagctgaggatctgacacctgaagacgatatgcccgttggtcggaatgtgctggagctgactgacgtcaaagactcggctaactacacgtgtgtagccatgtcctcattaggagtgattgaagcggtagcgcagattacggtaaagtcactgcctaaagcaccaggaacaccgatggtcacagagaatacagcaacgtctatcaccattacatgggattccgggaatccggatcctgtctcttactatgtgatcgaatataagagtaagagccaggatggcccgtaccagattaaagaggatattacgaccacacggtattccattggcggactcagtcctaattccgaatacgagatctgggttagcgcagtcaacagtatcggccagggaccaccaagcgagtcagttgtgacacggacaggagagcaggctcccgcctctgctcccagaaacgttcaggcccggatgctgtcagcaactacaatgatcgtgcagtgggaggagcctgttgagcctaatggccttattcgcggctaccgcgtgtactataccatggagcctgagcatccagttggtaattggcaaaaacacaacgtagatgattctctgctaaccactgtcgggagcctgctcgaagacgagacctacaccgttcgtgtcctggcattcacaagtgttggagacggtcccttgtccgatcctatccaggtgaagacccaacagggcgttccgggccaacccatgaatctgagagccgaggctcggtccgaaacatcgattaccttgtcttggtcacctccacgccaggaatcgatcattaagtacgaactgctgttcagggagggtgatcatggacgcgaggttgggaggactttcgatccgaccacttcctacgttgtggaagacctgaaacctaataccgaatatgccttcaggctggcggccaggtctccgcagggcttaggcgcattcacacccgtggtgcggcaaaggacactgcagtccattagtcctaagaatttcaaagttaaaatgataatgaagacctcagtcttactgagttgggagttcccagacaactacaacagcccgaccccttataagattcagtataacggactcacactagacgttgacggcagaacaacaaagaagttgataactcacctcaaacctcacacgttttataattttgtgcttacgaatagaggcagttctctgggcggacttcagcagacagtgactgcgtggaccgccttcaatctccttaatgggaagcccagtgtggctcctaagccggacgcggacggcttcatcatggtttatctgcctgatggccagtcgcctgtccctgttcagagctactttattgtaatggtgcccctgcgtaagagtcggggggggcaatttctgacaccactcggaagccccgaagacatggacctggaagagctcattcaagatatatccaggttacagaggcgctccctgagacacagccggcaattagaggtaccccggccttatattgcggccagattcagcgtgctgccccccacctttcacccaggagatcagaaacagtacggcggcttcgataatcgcggcctggagcccggtcataggtacgtgctgttcgtgctggccgtgcttcagaagtcggaaccgacattcgcagcgagtcccttttcagatcccttccaacttgataaccctgaccctcagcccatcgtcgacggagaagaggggctaatctgggttatcggcccagtcttagccgtggttttcataatttgcattgtgattgccatcctgttatataagaacaagcctgatagcaagagaaaggactcagagcctagaacaaagtgtttgctcaacaatgctgatttggcaccacaccatccgaaggatccagtggagatgcgccggattaactttcagacgcctggtatgctgagccacccgcccatccccatcgccgacatggccgagcataccgaaagacttaaagctaatgattctctcaagctctcacaagaatacgagtccatagatccaggacagcagtttacatgggaacacagtaacctggaggtaaataaacccaagaacagatatgctaatgtaatcgcttatgaccactccagggtcatcctgcagccaatcgaaggaataatggggagtgactatatcaatgctaactatgtcgacggctaccgctgccagaacgcttacatcgctacccagggcccattgcccgaaaccttcggcgacttctggagaatggtatgggaacagagaagcgccacaatcgtgatgatgacacgccttgaggaaaaatcccgcatcaaatgcgaccagtattggcctaatagaggtactgagacctatggctttatccaagttacgttactcgatacaattgagttagccactttttgtgtgcgaaccttcagcctgcacaaaaatggaagcagtgagaagcgtgaggtgcggcaattccaattcactgcctggcctgaccacggggtacccgaataccctaccccgttcctcgcctttctacgacgtgtcaaaacctgtaatccacctgacgcaggaccaattgtggtgcattgttccgccggtgtgggccgcacaggatgcttcattgtaatcgacgctatgctggagcggattaagcccgagaagacagttgatgtgtatggccacgttacgctaatgcgctctcagcggaattatatggtgcaaacagaggaccagtactccttcatccacgaagccttattagaggccgtaggctgcgggaacaccgaggtacccgcgcggtctctgtacgcgtatattcaaaagttggcccaggtcgagcctggagagcatgtcactgggatggagctagagttcaagcgattggctaactcgaaggcacataccagtagatttatatcggcaaatctaccatgtaacaagtttaaaaaccggctggtgaacattatgccctacgagagcactcgcgtgtgcctacaacctataagaggcgtcgagggcagcgattacatcaacgcatcatttattgacgggtaccgacagcaaaaagcttatatcgctacccagggccctctcgcagaaacgaccgaggacttttggagaatgctgtgggagaacaactctacaattgttgttatgctgaccaaactgagggagatgggccgggaaaaatgccaccagtactggcccgcggaacggtcagctcgctaccagtattttgtggtggatccaatggccgagtataacatgccacagtatattctgcgcgagttcaaggtcactgatgctagggatggccagtcgcgaacggtgaggcagttccagtttacagattggcctgagcagggagttcctaaatccggagaagggtttattgattttattggacaggtacataagacaaaagaacagttcggacaagacgggcccatcagcgtccactgttccgctggagttgggcgaacaggtgtcttcatcaccctgagcatcgtactcgaacggatgagatatgagggtgtggtggacatctttcagaccgtgaagatgttgcgcacgcagagacccgctatggtgcagaccgaggatgagtaccaattctgctaccaagccgccctggaatatctggggagcttcgatcactacgctacctag

SEQ ID NO: 234424 - DNA, 4518 bp, Artificial Sequence
  derived and/or modified sequence
atggcccccacctggggccctggcatggtgtctgtggtgggccccatgggcctgctggtggtgctgctggtgggcggctgtgccgctgaggagcccccacgcttcatcaaggagcccaaggaccagattggagtgtctgggggcgtggccagctttgtgtgccaggccactggagaccccaagccccgggtgacctggaacaagaagggcaagaaggtgaacagccagagatttgagaccattgaatttgatgagagcgctggagctgtgctgcgcatccagcccctgcggaccccaagagatgaaaatgtgtatgaatgtgtggcccagaacagcgtgggggagatcaccgtgcacgccaagctgactgtgctgcgggaggaccagctgcccagcggcttccccaacatcgacatgggcccccagctgaaggtggtggagaggaccaggacagccaccatgctgtgtgccgccagcggcaacccagaccctgagatcacctggttcaaggacttcctgcctgtggaccccagcgccagcaatggccgcatcaagcagctgcggagcggggccctgcagatcgagagcagcgaggagacagaccagggcaagtatgaatgtgtggccaccaacagcgctggggtgcgctacagcagccctgccaacctgtatgtgcgggccctgcgggaggtgcggcgggtggccccccgcttcagcatcctgcccatgagccatgagatcatgcctggaggaaatgtgaacatcacctgtgtggccgtgggcagccccatgccctacgtgaagtggatgcagggcgctgaggacctgaccccagaagatgacatgcctgtgggcagaaatgtgctggagctgacagatgtgaaggacagcgccaactacacctgtgtggccatgagcagcctgggcgtgattgaagctgtggcccagatcaccgtgaagagcctgcccaaggcccctggcacccccatggtgacagaaaatacagccaccagcatcaccatcacctgggacagcggcaacccagaccctgtgtcctactacgtgattgagtacaagagcaagagccaggacggcccctaccagatcaaggaggacatcaccaccacccgctacagcatcggcggcctgagccccaacagtgaatatgagatctgggtgtctgctgtgaacagcatcggccagggccccccatctgagagcgtggtgaccaggactggagagcaggccccagccagcgcccccagaaatgtgcaggccaggatgctgagcgccaccaccatgattgtgcagtgggaggagcctgtggagcccaacggcctcatccggggctacagagtgtactacaccatggagcctgagcaccctgtgggcaactggcagaagcacaacgtggatgacagcctgctgaccaccgtgggcagcctgctggaggatgagacctacacagtgcgggtgctggccttcacctctgtgggagatggccccctgagtgaccccatccaggtgaagacccagcagggcgtgcccggccagcccatgaacctgcgggcagaggcccggtctgagaccagcatcaccctgtcctggagccccccccggcaggagagcatcatcaagtatgagctgctcttccgggagggggaccacggccgggaggtgggccgcacctttgaccccaccaccagctatgtggtggaggacctgaagcccaacacagaatatgccttccggctggccgcccggagcccccagggcctgggcgccttcacccctgtggtgcggcagaggaccctgcagagcatcagccccaagaacttcaaggtgaagatgatcatgaagacctctgtgctgctgtcctgggagttcccagacaactacaacagccccaccccctacaagatccagtacaacggcctgaccctggatgtggatggccgcaccaccaagaagctgatcacccacctgaagccccacaccttctacaactttgtgctgaccaacagaggcagcagcctgggcggcctgcagcagacagtgacagcctggacagccttcaacctgctgaatggcaagcccagcgtggcccccaagccagatgctgatggcttcatcatggtgtacctgcctgatggccagagccctgtgcctgtgcagagctacttcatcgtgatggtgcccctgaggaagagcagaggaggccagttcctgacccccctgggcagccctgaggacatggacctggaggagctgatccaggacatcagccggctgcagaggaggagcctgcggcacagccggcagctggaggtgccccggccctacatcgccgcccgcttctctgtgctgccccccaccttccaccctggggaccagaagcagtatggaggctttgacaacagaggcctggagcccggccacagatatgtgctgtttgtgctggccgtgctgcagaagtctgagcccacctttgctgccagccccttcagtgaccccttccagctggacaacccagacccccagcccatcgtggatggagaggagggcctcatctgggtgattggccctgtgctggccgtggtgttcatcatctgcatcgtcatcgccatcctgctgtacaagaacaagccagacagcaagaggaaggacagcgagcccaggaccaagtgcctgctgaacaatgctgacctggccccccaccaccccaaggaccctgtggagatgaggcgcatcaacttccagaccccaggcatgctgagccacccccccatccccatcgctgacatggccgagcacacagagcggctgaaggccaatgacagcctgaagctgagccaggagtatgagagcattgatcctggccagcagttcacctgggagcacagcaacctggaggtgaacaagcccaagaacagatatgccaacgtgattgcctatgaccacagcagggtcatcctgcagcccatcgagggcatcatgggcagtgactacatcaatgccaactacgtggatggctaccgctgccagaatgcctacatcgccacccagggccccctgcctgagacctttggagacttctggaggatggtgtgggagcagaggtctgccaccatcgtgatgatgacccggctggaggagaagagccgcatcaagtgtgaccagtactggcccaacagaggaacagagacctacggcttcatccaggtgaccctgctggacaccatcgagctggccaccttctgtgtgaggaccttcagcctgcacaagaatggcagcagcgagaagcgggaggtgcggcagttccagttcaccgcctggccagaccatggagtgcctgagtaccccacccccttcctggccttcctgcggcgggtgaagacctgcaaccccccagatgctggccccatcgtggtgcactgcagcgctggggtgggccgcacaggctgcttcatcgtgattgatgccatgctggagcgcatcaagccagagaagacagtggatgtgtatggccacgtgaccctgatgaggagccagaggaactacatggtgcagacagaggaccagtacagcttcatccacgaggccctgctggaggccgtgggctgcggcaacacagaggtgcctgcccggagcctgtatgcctacatccagaagctggcccaggtggagcccggggagcacgtgacaggcatggagctggagttcaagaggctggccaacagcaaggcccacaccagccgcttcatcagcgccaacctgccctgcaacaagttcaagaaccggctggtgaacatcatgccctatgagagcaccagggtgtgcctgcagcccatccggggcgtggagggcagtgactacatcaatgccagcttcattgatggctaccggcagcagaaggcctacatcgccacccagggccccctggccgagaccacagaggacttctggaggatgctgtgggagaacaacagcaccatcgtggtgatgctgaccaagctgcgggagatgggccgggagaagtgccaccagtactggccagctgagaggtctgcccgctaccagtactttgtggtggaccccatggccgagtacaacatgccccagtacatcctgcgggagttcaaggtgacagatgccagagatggccagagcaggacagtgcggcagttccagttcacagactggccagagcagggcgtgcccaagtctggagagggcttcatcgacttcatcggccaggtgcacaagaccaaggagcagtttggccaggacggccccatctctgtgcactgcagcgctggggtgggccgcactggagtcttcatcaccctgagcatcgtgctggagaggatgagatatgaaggagtggtggacatcttccagacagtgaagatgctgcggacccagaggcctgccatggtgcagacagaagatgagtaccagttctgctaccaggccgccctggagtacctgggcagctttgaccactacgccacctag

SEQ ID NO: 234425 - DNA, 4518 bp, Artificial Sequence
  derived and/or modified sequence
atggcccccacctggggccccggcatggtgagcgtggtgggccccatggggctcctagtggtcttactggtagggggatgcgcagctgaggaacccccgaggtttataaaggagccaaaagaccagatcggcgtgagcggaggcgtagcaagcttcgtttgtcaggcaaccggcgaccctaagccacgagtgacctggaataaaaagggtaagaaggtgaatagtcagcgctttgagacgatcgaattcgatgaaagcgccggcgcggtgcttaggattcagccgctaagaacacccagagatgagaacgtctatgaatgtgttgctcagaatagtgtcggcgaaatcactgtgcacgccaagttaaccgtgttacgagaggatcagctaccaagcgggtttccaaatatagatatgggcccacagctcaaagtcgtggaacggacccgcaccgcaactatgctctgtgctgcctccggcaaccctgaccccgaaatcacctggtttaaggacttcttaccagtggatcccagtgcaagcaatgggcgcatcaagcagctgcgtagcggagctttacagatcgagtccagtgaagaaacggatcagggtaaatatgagtgcgttgccaccaactccgctggggtgcgctattcgtccccagcaaacctctacgtgagagccctgagagaggtgcggagggtggctccgaggttctcaattttgcccatgtcccatgagataatgcctggcggaaacgttaacatcacctgtgtggccgtgggctccccgatgccctacgttaaatggatgcagggtgccgaggacctgactcccgaggacgacatgcctgtgggccgcaacgtgctagaactgaccgacgtgaaagacagtgcgaattatacctgcgtcgcaatgagttcactgggggtgattgaagctgtggctcagatcaccgttaagtctctgcctaaggccccaggaaccccgatggtaactgaaaatacagctacatctattacaataacatgggactcaggaaacccagatccagtctcatactatgttatcgaatacaaaagcaagtcacaagacggtccctaccagatcaaagaggatattaccacgacgcgctattctataggaggtctctcgcctaattccgagtacgaaatatgggtgtcagccgttaacagtatcggacaggggccaccatctgagtcagtggtgacacgcacaggtgagcaggctcccgcttcagccccccgtaatgtgcaggcccgcatgctctccgccacaacaatgattgtccaatgggaggaaccggtcgagcccaacgggctgataaggggctatcgtgtgtattacactatggagccagagcacccagtgggaaattggcagaaacataatgtggacgactccttgctaactaccgttgggtccttactggaggacgaaacttacaccgtgagggtcctggccttcactagcgtcggggacggtcccttgtcagatcccatccaggtgaaaactcagcagggtgtgcccggccaacctatgaacctgagggcagaggcacgtagtgaaacgagcattacactctcctggtcaccgcccagacaagaaagtatcataaagtatgaattattgttccgagaaggagatcatggaagagaggttggaaggacattcgaccccacaacgagttatgttgtcgaagacctgaaacccaacactgaatatgctttcaggcttgcggctaggtccccccaagggttgggcgccttcactcctgtggttcgccaaagaactctgcaatccatctcccccaagaatttcaaggttaagatgatcatgaagacctcagtactcctgagttgggagttccccgataattacaactctcccaccccgtacaaaatccagtataatggcctcactctggacgtggatggtaggacgaccaagaagctgattacccatctgaagccacatacattctacaattttgtcttaacaaaccggggcagcagcctcgggggactgcaacagactgtaacagcctggactgcgttcaacttgctcaatggtaaaccttccgtcgcacccaaacctgatgcagatggcttcattatggtgtaccttcctgacggtcaaagccccgtccctgtacagagctattttatcgttatggtgccgttacggaaatctcggggtggccagtttctgacacccctgggatcccctgaggacatggacttggaggaacttattcaagatatctctcgactccaacgcaggtctctccgacatagtcgacagctagaagtgccccggccgtacattgccgcgcgattttccgtactgccgcccacctttcacccaggggatcagaagcagtatggaggctttgataacagggggctggaaccagggcatcggtatgtgctgttcgtccttgctgttctccagaagagtgagccaaccttcgcggcttcccccttctccgacccgtttcagctggacaaccctgatccgcagccaattgtcgatggcgaagagggattaatctgggttattgggcccgtgctagccgtggtcttcattatctgtatagtgatcgcaattctattgtataaaaacaagccagacagtaagcggaaagatagcgaaccgaggacaaagtgtctgctgaacaatgctgatttggccccacatcatcctaaggatcccgttgagatgcgcaggataaactttcaaacgcccgggatgctttcgcacccacctattcccatcgctgacatggccgaacacaccgaaaggctcaaggccaatgattctttgaaactctcacaggagtatgagtcgatcgatcctggccagcagtttacctgggaacacagcaacttggaagtgaataaaccaaaaaataggtatgcgaacgtaatagcctacgaccatagcagggtgatcctccagcccattgaaggtattatgggcagcgattatataaacgcgaattatgttgacgggtaccgctgtcagaacgcttacattgctacacagggccccctacctgagacgtttggagatttctggcgaatggtgtgggagcagaggtctgcgacaattgtgatgatgacacggttagaagaaaaaagccggattaaatgcgatcagtattggcctaaccggggcacagagacatacggtttcatccaggtcacgctgttggacactattgaactggccacattctgcgtaagaacgtttagcttacacaagaatggtagctctgaaaagcgggaagtccgccagttccagttcacggcttggcctgaccacggggtacccgagtaccccacgcctttcctggcattcctgaggcgcgtgaagacttgcaatcccccagacgccgggcccatcgtcgtgcactgttcagcgggcgtgggcagaacaggatgttttattgtgatcgacgctatgttagagagaataaaacccgaaaagacggttgacgtttacgggcacgttactttaatgcgctcacagcgtaactacatggtgcagaccgaggaccagtatagcttcatccacgaagctctgctggaagccgtggggtgcgggaataccgaggtccccgcccgctcactatacgcttacatccagaagcttgcccaagtcgagccaggagagcacgtcacaggcatggagttggaattcaagaggctggccaactcaaaggcccacacaagccgcttcatctctgcgaatttgccttgcaacaagttcaaaaatcgcttggtcaatattatgccttatgaaagcacacgcgtctgtctccagcccattagaggtgttgagggtagcgactacataaacgctagcttcatagatggctaccggcagcagaaagcctatattgctacacaggggccactggctgagaccaccgaagacttctggcggatgctctgggaaaataacagcacaattgtggttatgcttactaagttgagggagatgggccgagagaagtgccaccaatactggcctgccgaacggtccgcgcgttaccagtatttcgtagtggaccctatggccgagtataacatgccccagtatattttaagggagttcaaagtcaccgatgcccgcgatggacagagcagaacagttcgtcaattccagttcacagattggcccgaacagggtgttcccaagtctggcgagggctttatagacttcatcggacaggtccataagacaaaagagcagttcggacaagacggaccaatcagtgttcattgttctgccggggttggccgcactggtgtgtttattacactctctatagttcttgaacgaatgaggtacgaaggagtcgtggatattttccagaccgttaagatgctgaggactcagcgtcctgccatggtgcagactgaagatgaataccagttttgttaccaggccgcgttggagtatctcggctccttcgatcattatgccacatag

SEQ ID NO: 234426 - DNA, 4518 bp, Artificial Sequence
  derived and/or modified sequence
atggctcccacttggggccctggcatggtaagcgtggtaggtcccatggggttacttgtggttctgctcgtcggcggttgcgctgctgaagagcctcctcgctttatcaaggagcccaaggaccagattggcgtatccggtggagtagcttcctttgtgtgccaggctacaggcgaccccaagcctagagtcacttggaataagaagggaaagaaggttaattcacaacgctttgagactatcgagtttgatgagtctgccggtgccgtcttgaggattcagccattgagaactccaagggatgagaacgtgtacgagtgcgtagctcagaactcagtgggagagatcaccgtgcacgccaagctcactgttcttcgagaggaccagctccccagtggtttccccaacattgacatgggcccacagttgaaggtcgtggagcgtactagaacggcgactatgctctgcgccgcttccggtaatccggatcccgaaatcacttggtttaaggatttcctacctgtcgatccctccgccagtaacggccgaataaagcagctgaggtcaggcgcattgcagatcgaaagttcagaggagacagaccagggaaagtacgagtgtgtggctactaactcagctggtgtcaggtatagcagtccagcgaacttatacgtgcgcgcactgagggaagtccgccgtgtggcaccgagattctctattttgcccatgagtcacgagatcatgcctgggggtaacgtgaacatcacctgcgtagccgtgggctctcccatgccctacgtgaaatggatgcagggggctgaggatctgactccagaggatgacatgccggttggcagaaatgtgctcgaactaactgatgtgaaggactctgcaaattacacctgcgttgccatgtccagcctgggtgtcatcgaggccgtggcccaaatcactgtgaagagtttgcccaaggcacctggaacgcctatggttacggagaacacagcaacaagtatcacaattacctgggatagcggcaaccccgaccccgtttcatattatgttatcgagtacaaaagtaaatcccaggatggcccataccaaataaaggaagacattacgactacccgctactccattggaggtctcagcccaaactcagaatacgagatctgggtgagcgccgtcaactcaatcgggcaggggcctccctcggaatccgtggtaacccggacaggtgagcaggcaccggcatccgctccaagaaacgtgcaggctcgaatgttaagtgccaccaccatgatcgtgcagtgggaggaacccgtggaaccaaatgggctcatccggggatatagggtctattataccatggagccagagcatcctgtaggcaactggcagaagcacaacgtggacgacagtctgctaacaaccgtggggagtctccttgaggatgagacatatacagttcgggttctcgcgttcacgtccgtgggagatggccctctcagcgacccaatccaggtgaaaacccagcagggagtcccagggcagccaatgaacttaagggccgaagcgagaagtgaaacctccatcactctaagctggagtcctccccgacaggagtctattatcaagtacgaattgctgtttagagagggggaccatgggcgagaagtcggtcggaccttcgatcccactacgtcttacgttgtggaagacctcaaacctaacaccgaatacgcgtttagattagccgctaggtctccccagggtctgggggctttcactcccgtagttagacagaggacgttacagagtataagcccaaaaaacttcaaggtcaagatgattatgaaaacctcagtcttgctgtcctgggaatttcccgataactataattcgccgacaccttacaagatacaatacaacggcttgactcttgacgtggacgggcgaacgaccaaaaagctcattacgcacctgaaaccccacacattttataacttcgtcttgactaataggggcagttctctgggcggactccagcagaccgtgactgcttggacagcctttaatctcctgaacggcaagccaagcgtcgcccctaaacctgatgctgatggctttatcatggtgtacctgcccgacggacagagtcccgtccccgtacagtcctattttattgtcatggtccctctgcggaagagcaggggcggacaattcctcacacctctcgggagtcctgaggacatggatctggaggaactgatacaggacatctcgaggcttcagcgcagaagcctgcgccactcccgtcagctggaagtgcctcggccatatatcgcagccaggtttagtgtgctgccacccacttttcaccctggcgatcagaagcaatatggtgggttcgacaataggggcctggagcccggacacaggtacgtgctctttgtgctggccgtattgcagaagagcgaacctacctttgccgcatcccctttcagtgatccttttcagctcgacaaccctgatcctcaacccatcgtcgatggagaagaaggccttatatgggtcatcgggccagtgctcgcagttgtgttcattatctgcattgtaatcgccatccttctctacaaaaacaagccagatagcaagaggaaggatagcgaacctagaacgaaatgcttgctgaataacgccgatctggcaccccatcaccctaaggaccccgttgaaatgagacgtattaattttcagacacccggaatgcttagtcatcctcctataccaatcgcggacatggccgagcatactgagcgactaaaggctaacgactccctcaagctgtcccaggagtatgaatctatcgatcccggtcagcagttcacatgggagcatagcaatctggaggtaaataagcccaagaatagatatgctaacgtgatcgcgtatgatcacagcagagtaattctgcagcctattgaggggatcatggggtctgactacataaatgccaactatgtcgacggctacaggtgtcaaaatgcctacatcgccacccagggccctcttccagaaaccttcggagacttctggagaatggtctgggaacagcgatccgccacaatagtgatgatgaccaggctagaagaaaaaagtcggattaagtgcgatcagtattggccaaaccgcggtaccgaaacctatggcttcattcaggtgacccttctggacaccatagaactggctaccttttgcgttcggacattttccctgcacaaaaacgggtcgtctgaaaagcgtgaagtcagacagttccagttcactgcctggcccgaccacggcgtgcctgaatatccaacgcccttcttggcctttctgcgtagggtgaagacttgcaatccccctgacgccggaccgattgtcgtccactgtagcgctggggttggcagaaccggctgtttcatcgttatcgacgctatgctggaaagaatcaagccagaaaagaccgtggacgtttatgggcacgttacgctaatgcgctcacaacgcaattacatggtacagaccgaggaccagtactcttttatccatgaggccctgcttgaagctgtggggtgcggtaacacagaagtgccagctcggtctctttatgcatatattcaaaagttagcacaagtggaaccaggcgaacatgtcacagggatggagctggaattcaagcgactcgccaattccaaggcccacacttcccgttttatcagtgcaaacctcccgtgcaacaaattcaaaaacagacttgttaatatcatgccttatgaatccacaagggtttgcctgcagcctataaggggggtcgagggctctgactatattaacgctagtttcatcgatggataccggcagcaaaaggcctatattgccactcagggtcctcttgcagagaccacagaggacttctggcggatgctatgggagaacaactccacaatcgtggtgatgctgacaaagctccgggagatgggccgtgagaaatgtcatcaatactggcctgcagaacgctcagctcggtaccagtactttgtcgttgaccccatggcggagtataacatgcctcagtacattctccgcgagttcaaagtgaccgacgctcgagacggccagtctaggaccgtgcgccagttccaattcacggattggcctgagcagggagtgccaaaaagcggtgagggattcatcgactttattggtcaagtccacaaaacgaaagaacagtttgggcaggacggacctatttccgtgcactgttcagcgggagtgggacgcacaggggtcttcattacactgtccatcgttctggagagaatgcggtatgagggcgtggtagatatcttccagaccgtgaaaatgctgcgcacacagaggcccgcaatggtgcagaccgaggacgaatatcagttctgctaccaggctgctctcgaatacttgggctcatttgatcattacgccacctag

SEQ ID NO: 234427 - DNA, 6018 bp, Artificial Sequence
  derived and/or modified sequence
cctcgcgccgcccgcccggcagcccggccggcgcgcgcacgccgcgagccgctggcgctcgggctccgctcggatcccatgcaacagccacgatgtgaagcggggcagagccgggggagcccagcccagccagcctccagacgttgccccatctgacgctcggctcgaggcctctctgtgagggaccggggggccatccccctccagggcggagatcggaggtcgctgccaagcatggcgcccacctggggccctggcatggtgtctgtggttggtcccatgggcctccttgtggtcctgctcgttggaggctgtgcagcagaagagccccccaggtttatcaaagaacccaaggaccagatcggcgtgtcggggggtgtggcctctttcgtgtgtcaggccacgggtgaccccaagccacgagtgacctggaacaagaagggcaagaaggtcaactctcagcgctttgagacgattgagtttgatgagagtgcaggggcagtgctgaggatccagccgctgaggacaccgcgggatgaaaacgtgtacgagtgtgtggcccagaactcggttggggagatcacagtccatgccaagcttactgtcctccgagaggaccagctgccctctggcttccccaacatcgacatgggcccacagttgaaggtggtggagcggacacggacagccaccatgctctgtgcagccagcggcaaccctgaccctgagatcacctggttcaaggacttcctgcctgtggatcctagtgccagcaatggacgcatcaaacagctgcgatcaggagccctgcagattgaaagcagtgaggaaaccgaccagggcaaatatgagtgtgtggccaccaacagcgccggcgtgcgctactcctcacctgccaacctctacgtgcgagctctccgagaagtccgccgcgtggccccgcgcttctccatcctgcccatgagccacgagatcatgccagggggcaacgtgaacatcacctgcgtggccgtgggctcgcccatgccatacgtgaagtggatgcagggggccgaggacctgacccccgaggatgacatgcccgtgggtcggaacgtgctggaactcacagatgtcaaggactcggccaactacacctgcgtggccatgtccagcctgggcgtcattgaggcggttgctcagatcacggtgaaatctctccccaaagctcccgggactcccatggtgactgagaacacagccaccagcatcaccatcacgtgggactcgggcaacccagatcctgtgtcctattacgtcatcgaatataaatccaagagccaagacgggccgtatcagattaaagaggacatcaccaccacacgttacagcatcggcggcctgagccccaactcggagtacgagatctgggtgtcggccgtcaactccatcggccaggggccccccagcgagtccgtggtcacccgcacaggcgagcaggccccggccagcgcgccgcggaacgtgcaagcccggatgctcagcgcgaccaccatgattgtgcagtgggaggagccggtggagcccaacggcctgatccgcggctaccgcgtctactacaccatggaaccggagcaccccgtgggcaactggcagaagcacaacgtggacgacagcctgctgaccaccgtgggcagcctgctggaggacgagacctacaccgtgcgggtgctcgccttcacctccgtcggcgacgggcccctctcggaccccatccaggtcaagacgcagcagggagtgccgggccagcccatgaacctgcgggccgaggccaggtcggagaccagcatcacgctgtcctggagccccccgcggcaggagagtatcatcaagtacgagctcctcttccgggaaggcgaccatggccgggaggtgggaaggaccttcgacccgacgacttcctacgtggtggaggacctgaagcccaacacggagtacgccttccgcctggcggcccgctcgccgcagggcctgggcgccttcacccccgtggtgcggcagcgcacgctgcagtccatctcgcccaagaacttcaaggtgaaaatgatcatgaagacatcagttctgctcagctgggagttccctgacaactacaactcacccacaccctacaagatccagtacaatgggctcacactggatgtggatggccgtaccaccaagaagctcatcacgcacctcaagccccacaccttctacaactttgtgctgaccaatcgcggcagcagcctgggcggcctccagcagacggtcaccgcctggactgccttcaacctgctcaacggcaagcccagcgtcgcccccaagcctgatgctgacggcttcatcatggtgtatcttcctgacggccagagccccgtgcctgtccagagctatttcattgtgatggtgccactgcgcaagtctcgtggaggccaattcctgaccccgctgggtagcccagaggacatggatctggaagagctcatccaggacatctcacggctacagaggcgcagcctgcggcactcgcgtcagctggaggtgccccggccctatattgcagctcgcttctctgtgctgccacccacgttccatcccggcgaccagaagcagtatggcggcttcgataaccggggcctggagcccggccaccgctatgtcctcttcgtgcttgccgtgcttcagaagagcgagcctacctttgcagccagtcccttctcagaccccttccagctggataacccggacccccagcccatcgtggatggcgaggaggggcttatctgggtgatcgggcctgtgctggccgtggtcttcataatctgcattgtcattgctatcctgctctacaagaacaaacccgacagtaaacgcaaggactcagaaccccgcaccaaatgcctcctgaacaatgccgacctcgcccctcaccaccccaaggaccctgtggaaatgagacgcattaacttccagactccaggcatgcttagccacccgccaattcccatcgcagacatggcggagcacacggagcggctcaaggccaacgacagcctcaagctctcccaggagtatgagtccatcgaccctggacagcagttcacatgggaacattccaacctggaagtgaacaagccgaagaaccgctatgccaacgtcatcgcctatgaccactcccgtgtcatcctccagcccattgaaggcatcatgggcagtgattacatcaatgccaactacgtggacggctaccggtgtcagaacgcgtacattgccacgcaggggccgctgcctgagacctttggggacttctggcgtatggtgtgggagcagcggtcggcgaccatcgtcatgatgacgcggctggaggagaagtcacggatcaagtgtgatcagtattggcccaacagaggcacggagacctacggcttcatccaggtcacgttgctagataccatcgagctggccacattctgcgtcaggacattctctctgcacaagaatggctccagtgagaaacgcgaggtccgccagttccagtttacggcgtggccggaccatggcgtgcccgaatacccaacgcccttcctggctttcctgcggagagtcaagacctgcaacccgccagatgccggccccatcgtggttcactgcagtgccggtgtgggccgcacaggctgctttatcgtcatcgacgccatgcttgagcggatcaagccagagaagacagtcgatgtctatggccacgtgacgctcatgaggtcccagcgcaactacatggtgcagacggaggaccagtacagcttcatccacgaggccctgctggaggccgtgggctgtggcaacacagaagtgcccgcacgcagcctctatgcctacatccagaagctggcccaggtggagcctggcgaacacgtcactggcatggaactcgagttcaagcggctggctaactccaaggcccacacgtcacgcttcatcagtgccaatctgccttgtaacaagttcaagaaccgcctggtgaacatcatgccctatgagagcacacgggtctgtctgcaacccatccggggtgtggagggctctgactacatcaacgccagcttcattgatggctacaggcagcagaaggcctacatcgcgacacaggggccgctggcggagaccacggaagacttctggcgcatgctgtgggagaacaattcgacgatcgtggtgatgctgaccaagctgcgggagatgggccgggagaagtgtcaccagtactggccggccgagcgctctgcccgctaccagtactttgtggtagatccgatggcagaatacaacatgcctcagtatatcctgcgagagttcaaggtcacagatgcccgggatggccagtcccggactgtccggcagttccagttcacagactggccggaacagggtgtgccaaagtcgggggagggcttcatcgacttcattggccaagtgcataagactaaggagcagtttggccaggacggccccatctctgtccactgcagtgccggcgtgggcaggacgggcgtcttcatcacgcttagcatcgtgctggagcggatgcggtatgaaggcgtggtggacatctttcagacggtgaagatgctacgaacccagcggccggccatggtgcagacagaggatgagtaccagttctgttaccaggcggcactggagtacctcggaagctttgaccactatgcaacctaaagccatggttccccccaggcccgacaccactggccccggatgcctctgcccctcccgggcggacctcctgaggcctggacccccagtgggcagggcaggaggtggcagcggcagcagctgtgtttctgcaccatttccgaggacgacgcagcccctcgagcccccccaccggccccggccgccccagcgacctccctggcaccggccgccgccttcaaatacttggcacattcctcctttccttccaattccaaaaccagattccggggtggggggtggggggatggtgagcaaataggagtgctccccagaaccagaggagggtggggcacagaccatagacggacccctcgtcctcccccagcggtggtagggggacccggggggctcctccccgctctgcagcctggggacactgggctgggaccagaatccagctttcttttaaaactctcagtgtaactgtatcccgtgacatttcattttttttaaatagtgtatttttttttccatttttttttttaagagaaacaaacaaaagactcgccagtcaatgactttcaaagagaactaactttggcttattcatattctgttcaaagacagtctattttttcactgtagaaagcgtccttgtgtgatagttacgttcgcaaacgcgcacgccaggcccatggctgtaccttggcttttttttttttttttttttttttaatttttcctaccatcagaaagtgtgctttgctcacagaagaatgggatgtccttttttctttcttggctttttttttccccctttttgtttcatttttataaattaaattttcagacatatcaaatacagttctgagggtaaggtcatgggggagctcggacccagtggcgttgggtgcggttgagggggacgctgctgtaagaggagagagatgacagtggtcctcctctgagagcctgagctgtctccccgtctcccgcccccaaggagacagagaggatcctacttcttcggggacagtggctgtatggctgtgctgccccacatcagggaccctttccccctgggactgtggggcagtttgggagcaaaaccagaaggacaggcccccctctacccgcctaccctgagcaagcgagttgttcctctttgtacaagggcaggtctgcggttactttcaacactgtttattccagcggaagcagccgggtggttttcccacccccgtgtatgtagatatatcgactttgtattaaaggaagatcgtctga

SEQ ID NO: 234428 - DNA, 4518 bp, Artificial Sequence
  derived and/or modified sequence
atggcccccacctggggccccggcatggtgagcgtggtgggccccatgggcctgctggtggtgctgctggtgggcggctgcgccgccgaggagccccccagattcatcaaggagcccaaggaccagatcggcgtgagcggcggcgtggccagcttcgtgtgccaggccaccggcgaccccaagcccagagtgacctggaacaagaagggcaagaaggtgaacagccagagattcgagaccatcgagttcgacgagagcgccggcgccgtgctgagaatccagcccctgagaacccccagagacgagaacgtgtacgagtgcgtggcccagaacagcgtgggcgagatcaccgtgcacgccaagctgaccgtgctgagagaggaccagctgcccagcggcttccccaacatcgacatgggcccccagctgaaggtggtggagagaaccagaaccgccaccatgctgtgcgccgccagcggcaaccccgaccccgagatcacctggttcaaggacttcctgcccgtggaccccagcgccagcaacggcagaatcaagcagctgagaagcggcgccctgcagatcgagagcagcgaggagaccgaccagggcaagtacgagtgcgtggccaccaacagcgccggcgtgagatacagcagccccgccaacctgtacgtgagagccctgagagaggtgagaagagtggcccccagattcagcatcctgcccatgagccacgagatcatgcccggcggcaacgtgaacatcacctgcgtggccgtgggcagccccatgccctacgtgaagtggatgcagggcgccgaggacctgacccccgaggacgacatgcccgtgggcagaaacgtgctggagctgaccgacgtgaaggacagcgccaactacacctgcgtggccatgagcagcctgggcgtgatcgaggccgtggcccagatcaccgtgaagagcctgcccaaggcccccggcacccccatggtgaccgagaacaccgccaccagcatcaccatcacctgggacagcggcaaccccgaccccgtgagctactacgtgatcgagtacaagagcaagagccaggacggcccctaccagatcaaggaggacatcaccaccaccagatacagcatcggcggcctgagccccaacagcgagtacgagatctgggtgagcgccgtgaacagcatcggccagggcccccccagcgagagcgtggtgaccagaaccggcgagcaggcccccgccagcgcccccagaaacgtgcaggccagaatgctgagcgccaccaccatgatcgtgcagtgggaggagcccgtggagcccaacggcctgatcagaggctacagagtgtactacaccatggagcccgagcaccccgtgggcaactggcagaagcacaacgtggacgacagcctgctgaccaccgtgggcagcctgctggaggacgagacctacaccgtgagagtgctggccttcaccagcgtgggcgacggccccctgagcgaccccatccaggtgaagacccagcagggcgtgcccggccagcccatgaacctgagagccgaggccagaagcgagaccagcatcaccctgagctggagcccccccagacaggagagcatcatcaagtacgagctgctgttcagagagggcgaccacggcagagaggtgggcagaaccttcgaccccaccaccagctacgtggtggaggacctgaagcccaacaccgagtacgccttcagactggccgccagaagcccccagggcctgggcgccttcacccccgtggtgagacagagaaccctgcagagcatcagccccaagaacttcaaggtgaagatgatcatgaagaccagcgtgctgctgagctgggagttccccgacaactacaacagccccaccccctacaagatccagtacaacggcctgaccctggacgtggacggcagaaccaccaagaagctgatcacccacctgaagccccacaccttctacaacttcgtgctgaccaacagaggcagcagcctgggcggcctgcagcagaccgtgaccgcctggaccgccttcaacctgctgaacggcaagcccagcgtggcccccaagcccgacgccgacggcttcatcatggtgtacctgcccgacggccagagccccgtgcccgtgcagagctacttcatcgtgatggtgcccctgagaaagagcagaggcggccagttcctgacccccctgggcagccccgaggacatggacctggaggagctgatccaggacatcagcagactgcagagaagaagcctgagacacagcagacagctggaggtgcccagaccctacatcgccgccagattcagcgtgctgccccccaccttccaccccggcgaccagaagcagtacggcggcttcgacaacagaggcctggagcccggccacagatacgtgctgttcgtgctggccgtgctgcagaagagcgagcccaccttcgccgccagccccttcagcgaccccttccagctggacaaccccgacccccagcccatcgtggacggcgaggagggcctgatctgggtgatcggccccgtgctggccgtggtgttcatcatctgcatcgtgatcgccatcctgctgtacaagaacaagcccgacagcaagagaaaggacagcgagcccagaaccaagtgcctgctgaacaacgccgacctggccccccaccaccccaaggaccccgtggagatgagaagaatcaacttccagacccccggcatgctgagccacccccccatccccatcgccgacatggccgagcacaccgagagactgaaggccaacgacagcctgaagctgagccaggagtacgagagcatcgaccccggccagcagttcacctgggagcacagcaacctggaggtgaacaagcccaagaacagatacgccaacgtgatcgcctacgaccacagcagagtgatcctgcagcccatcgagggcatcatgggcagcgactacatcaacgccaactacgtggacggctacagatgccagaacgcctacatcgccacccagggccccctgcccgagaccttcggcgacttctggagaatggtgtgggagcagagaagcgccaccatcgtgatgatgaccagactggaggagaagagcagaatcaagtgcgaccagtactggcccaacagaggcaccgagacctacggcttcatccaggtgaccctgctggacaccatcgagctggccaccttctgcgtgagaaccttcagcctgcacaagaacggcagcagcgagaagagagaggtgagacagttccagttcaccgcctggcccgaccacggcgtgcccgagtaccccacccccttcctggccttcctgagaagagtgaagacctgcaacccccccgacgccggccccatcgtggtgcactgcagcgccggcgtgggcagaaccggctgcttcatcgtgatcgacgccatgctggagagaatcaagcccgagaagaccgtggacgtgtacggccacgtgaccctgatgagaagccagagaaactacatggtgcagaccgaggaccagtacagcttcatccacgaggccctgctggaggccgtgggctgcggcaacaccgaggtgcccgccagaagcctgtacgcctacatccagaagctggcccaggtggagcccggcgagcacgtgaccggcatggagctggagttcaagagactggccaacagcaaggcccacaccagcagattcatcagcgccaacctgccctgcaacaagttcaagaacagactggtgaacatcatgccctacgagagcaccagagtgtgcctgcagcccatcagaggcgtggagggcagcgactacatcaacgccagcttcatcgacggctacagacagcagaaggcctacatcgccacccagggccccctggccgagaccaccgaggacttctggagaatgctgtgggagaacaacagcaccatcgtggtgatgctgaccaagctgagagagatgggcagagagaagtgccaccagtactggcccgccgagagaagcgccagataccagtacttcgtggtggaccccatggccgagtacaacatgccccagtacatcctgagagagttcaaggtgaccgacgccagagacggccagagcagaaccgtgagacagttccagttcaccgactggcccgagcagggcgtgcccaagagcggcgagggcttcatcgacttcatcggccaggtgcacaagaccaaggagcagttcggccaggacggccccatcagcgtgcactgcagcgccggcgtgggcagaaccggcgtgttcatcaccctgagcatcgtgctggagagaatgagatacgagggcgtggtggacatcttccagaccgtgaagatgctgagaacccagagacccgccatggtgcagaccgaggacgagtaccagttctgctaccaggccgccctggagtacctgggcagcttcgaccactacgccacctag

SEQ ID NO: 234429 - protein, 246 aa, Artificial Sequence
  derived and/or modified sequence
MAAAAIPALLLCLPLLFLLFGWSRARRDDPHSLCYDITVIPKFRPGPRWCAVQGQVDEKTFLHYDCGNKTVTPVSPLGKKLNVTMAWKAQNPVLREVVDILTEQLLDIQLENYTPKEPLTLQARMSCEQKAEGHSSGSWQFSIDGQTFLLFDSEKRMWTTVHPGARKMKEKWENDKDVAMSFHYISMGDCIGWLEDFLMGMDSTLEPSAGAPLAMSSGTTQLRATATTLILCCLLIILPCFILPGI

SEQ ID NO: 234430 - DNA, 741 bp, Artificial Sequence
  derived and/or modified sequence
atggccgcggcggccatcccagccttgcttctctgccttcctctcctgtttctgctattcggttggtcaagggcacgccgggacgatccgcattcattgtgttacgacattactgtgatccctaagtttcgaccgggtccccggtggtgtgctgtgcagggacaggttgatgagaagacttttttacactacgattgcggcaacaaaacggtgacgcccgtgagcccattaggtaaaaaacttaacgtcactatggcctggaaagctcagaatccagtactgcgagaggtagtggacatccttacagagcagttactggacatacagctcgaaaactacacgcctaaagaacctctgaccctccaggcccgcatgtcatgcgaacagaaagccgagggccactcctcaggcagctggcagttcagcatcgacggtcaaaccttccttctttttgatagtgagaagcgtatgtggaccacagtccatccaggcgcccgaaaaatgaaagagaagtgggaaaacgacaaagatgtggcaatgtcttttcattacatctcaatgggggactgcattggctggctggaagattttctgatgggcatggactctacactggagccaagtgccggcgctccccttgcaatgagctcaggtaccacacagcttcgagccacagcaactactcttatcctgtgctgcctcctgattattcttccatgcttcattctccctggaatatag

SEQ ID NO: 234431 - DNA, 741 bp, Artificial Sequence
  derived and/or modified sequence
atggccgctgcagccattccagcgttactcctttgcctccccttattattcctgctgtttggatggtcccgagcccgacgcgatgacccccactccctctgttacgacatcacagtgatccccaagttccggcccggcccgcgatggtgcgccgtgcaagggcaggtggatgagaaaacgtttctgcactacgattgcggcaacaagaccgttacacctgtcagccccttgggcaagaaactgaatgtgacgatggcttggaaagcacagaaccccgtgctcagggaggtggtagacattctgaccgaacagctactggacatccaactcgagaactatactccaaaagaacccctaactctgcaagcaagaatgagctgcgagcagaaggctgaaggccatagttcaggatcctggcaatttagtattgatgggcagacattcctgttgttcgactcagagaagcggatgtggacaacagtacaccccggggcgagaaaaatgaaagagaagtgggagaacgacaaggacgtggctatgtcttttcattatatcagtatgggggactgcattggatggctcgaagatttcttaatgggtatggattcaaccctggaaccatctgctggcgcgcccctggctatgagtagcggaactacccagctgcgcgccacagcaacaaccctaatcctgtgctgtcttctcattatcctgccttgttttatcttgccagggatctag

SEQ ID NO: 234432 - DNA, 741 bp, Artificial Sequence
  derived and/or modified sequence
atggctgctgctgccatcccagccctgctgctgtgcctgcccctgctcttcctgctgtttggctggagccgggccaggagagatgacccccacagcctgtgctatgacatcaccgtcatccccaagttccggcccggcccccgctggtgtgctgtgcagggccaggtggatgagaagaccttcctgcactatgactgtggcaacaagacagtgacccctgtgagccccctgggcaagaagctgaatgtgaccatggcctggaaggcccagaaccctgtgctgcgggaggtggtggacatcctgacagagcagctgctggacatccagctggagaactacacccccaaggagcccctgaccctgcaggccaggatgagctgtgagcagaaggccgagggccacagcagcggctcctggcagttcagcattgatggccagaccttcctgctgtttgattctgagaagaggatgtggaccaccgtgcaccctggggccaggaagatgaaggagaagtgggagaatgacaaggatgtggccatgtccttccactacatctccatgggagactgcatcggctggctggaggacttcctgatgggcatggacagcaccctggagcccagcgctggggcccccctggccatgagcagcggcaccacccagctgcgggccacagccaccaccctcatcctgtgctgcctgctgatcatcctgccctgcttcatcctgcccggcatctag

SEQ ID NO: 234433 - DNA, 741 bp, Artificial Sequence
  derived and/or modified sequence
atggccgccgccgccatccccgccctgctgctgtgcctgcccctgctgtttttactgttcggctggagccgcgcccgtagagacgacccccactcactttgctatgatatcaccgtcatacctaaatttagacctgggccacgctggtgcgccgtgcaggggcaagtggacgaaaagactttccttcactatgactgcggaaataaaacagtgacgccggtctcgcccctggggaagaagctgaacgtcaccatggcttggaaagcacagaaccctgtgctccgagaggtcgtggacattctgacagagcagctacttgatatccaactcgagaactatactccaaaagaaccacttaccttacaggccagaatgagttgtgagcagaaagcagaagggcactcttctggatcctggcagttctccatcgacggccaaacattccttctgttcgattcagagaagcggatgtggaccaccgtgcaccccggagctcgtaaaatgaaggaaaagtgggaaaatgataaggacgtcgcgatgtctttccactacatttctatgggagactgtataggctggctggaggattttttgatgggcatggactcaacccttgaaccctccgcaggcgccccactcgctatgtctagtggcaccactcagctgagggctaccgcaaccactctcatcctttgctgcctgttaattattttgccatgcttcattcttccaggcatttag

SEQ ID NO: 234434 - DNA, 741 bp, Artificial Sequence
  derived and/or modified sequence
atggccgccgccgccatccccgccctgctgctgtgcctgcccctgctgttccttctgtttggttggagcagggcaagaagggacgatccccacagtctctgctacgacatcacagttatccctaaattcagacctggaccccgctggtgcgcagtccaggggcaagtagacgagaaaacattcctccattatgattgtggaaacaagactgttaccccagtttcccccctcggcaaaaaactgaacgtgacaatggcctggaaagctcagaacccagttcttcgagaggttgtagatattctgaccgagcagttgttagatattcagcttgagaactacacacctaaagagcccttaacattgcaagcaaggatgtcttgcgagcagaaggcagagggccattcttctggtagctggcaattttccatcgacggacagacatttctgctgtttgattccgagaagaggatgtggacaacggtgcacccaggcgctcgaaagatgaaggagaagtgggaaaatgataaggacgtcgcaatgtctttccattatatttccatgggcgattgtattggatggctggaggactttttgatgggtatggacagcactctggagccaagcgctggtgccccactggctatgagctccgggaccacccagctgagagccactgcaaccaccctcattctttgctgtctgctaatcatcctgccttgctttatactgcccggaatctag

SEQ ID NO: 234435 - DNA, 741 bp, Artificial Sequence
  derived and/or modified sequence
atggctgccgcagccattcccgcactacttttgtgtcttccgctgttgtttctgctatttggttggtctcgcgctcggagggacgacccacattcactgtgttacgatattaccgtaataccgaagttccgccctggccctagatggtgcgcagtgcaggggcaggttgacgaaaagacatttctacactacgactgtggaaacaaaactgtcacacctgtgagcccactcgggaagaaacttaatgtgacaatggcgtggaaagcgcagaatcctgttttaagagaggtggtcgacatactgactgagcagctgctcgacattcaactggagaactatacaccaaaggaaccgctcactctccaggctaggatgtcttgcgaacagaaagccgaggggcatagctccggctcctggcagttttccatcgatggtcagacatttctgctgttcgatagcgagaagcgcatgtggaccacagttcaccctggagccagaaagatgaaagagaaatgggagaatgataaagatgttgccatgtccttccactatatatctatgggggactgtatcggttggttagaagactttcttatgggtatggattcaactctggagcccagcgcaggagctccacttgccatgtctagcggtaccacccagctgagggctacagccacaaccctgatcttgtgctgcctgctgatcattctcccctgctttattctgcccggaatctag

SEQ ID NO: 234436 - DNA, 741 bp, Artificial Sequence
  derived and/or modified sequence
atggccgctgcagccatccccgctctgcttctgtgtttgccattactatttcttctgtttggatggtctcgcgctaggagagatgatcctcactccctctgctacgacatcactgtgatccccaaattcaggccaggaccacggtggtgtgcggttcagggacaggtggacgagaaaacattccttcattatgactgcggaaacaaaactgtgacaccagtgtctccactaggaaagaaactgaatgtaacgatggcctggaaggcacagaaccccgtattgcgagaggttgtggatatcctaaccgagcagctattggatatccagctcgagaattatacacccaaggagccacttacactgcaagccagaatgtcgtgcgagcagaaagccgaaggccattcaagtggaagttggcagttttccatcgacgggcagacctttctcctttttgacagcgagaaacgaatgtggaccacagtgcacccaggcgctcgcaagatgaaagagaagtgggagaacgataaggacgtggcaatgtcattccactacatttccatgggggactgcataggctggctagaggatttcctgatgggcatggactctacgctagaaccaagcgctggtgccccacttgccatgtcttccggaactactcagctgagagccaccgccaccacactgattctttgttgcctgcttatcatcctgccgtgcttcattctcccaggcatttag

SEQ ID NO: 234437 - DNA, 802 bp, Artificial Sequence
  derived and/or modified sequence
gatttcatcttccaggatccaccttgattaaatctcttgtccccagccctcctggtccccaatggcagcagccgccatcccagctttgcttctgtgcctcccgcttctgttcctgctgttcggctggtcccgggctaggcgagacgaccctcactctctttgctatgacatcaccgtcatccctaagttcagacctggaccacggtggtgtgcggttcaaggccaggtggatgaaaagacttttcttcactatgactgtggcaacaagacagtcacacccgtcagtcccctggggaagaaactaaatgtcacaatggcctggaaagcacagaacccagtactgagagaggtggtggacatacttacagagcaactgcttgacattcagctggagaattacacacccaaggaacccctcaccctgcaggcaaggatgtcttgtgagcagaaagctgaaggacacagcagtggatcttggcagttcagtatcgatggacagaccttcctactctttgactcagagaagagaatgtggacaacggttcatcctggagccagaaagatgaaagaaaagtgggagaatgacaaggatgtggccatgtccttccattacatctcaatgggagactgcataggatggcttgaggacttcttgatgggcatggacagcaccctggagccaagtgcaggagcaccactcgccatgtcctcaggcacaacccaactcagggccacagccaccaccctcatcctttgctgcctcctcatcatcctcccctgcttcatcctccctggcatctga

SEQ ID NO: 234438 - DNA, 1285 bp, Artificial Sequence
  derived and/or modified sequence
atggcagcagccgccatcccagctttgcttctgtgcctcccgcttctgttcctgctgttcggctggtcccgggctaggcgagacgaccctcactctctttgctatgacatcaccgtcatccctaagttcagacctggaccacggtggtgtgcggttcaaggccaggtggatgaaaagacttttcttcactatgactgtggcaacaagacagtcacacccgtcagtcccctggggaagaaactaaatgtcacaatggcctggaaagcacagaacccagtactgagagaggtggtggacatacttacagagcaactgcttgacattcagctggagaattacacacccaaggaacccctcaccctgcaggcaaggatgtcttgtgagcagaaagctgaaggacacagcagtggatcttggcagttcagtatcgatggacagaccttcctactctttgactcagagaagagaatgtggacaacggttcatcctggagccagaaagatgaaagaaaagtgggagaatgacaaggatgtggccatgtccttccattacatctcaatgggagactgcataggatggcttgaggacttcttgatgggcatggacagcaccctggagccaagtgcaggagcaccactcgccatgtcctcaggcacaacccaactcagggccacagccaccaccctcatcctttgctgcctcctcatcatcctcccctgcttcatcctccctggcatctgaggagagtcctttagagtgacaggttaaagatgataccaaaaagcccctgtgagcacggtcttgatcaacctcgcccttctgtctggccagctgcccaccacctacggtgtatgtccagcagcctccagcagatgatgatgacaccatggacccaatagctcattcactgccttgattccttttgccaacaatttaaccagtgattattcctaacatattatgcaattttctcttggtgctacctgatggaattcctgcacttaaagttctggctgactaaacaagatatgtcaacattttctttcttctctttttgtttggaaaatcaagtacttctttgaatgatgatttctttctttcattactgacatgattgtcagtaaaacaatcatgttagacttcagacctccagggattctttccatgtcctgaaagagaattgtttaattatttaataagaaaaaaatttatattaatgattgtttcctttagtaatttattgctgtgtactgatatttaaataaagagttatatttcccaaaaa

SEQ ID NO: 234439 - DNA, 741 bp, Artificial Sequence
  derived and/or modified sequence
atggccgccgccgccatccccgccctgctgctgtgcctgcccctgctgttcctgctgttcggctggagcagagccagaagagacgacccccacagcctgtgctacgacatcaccgtgatccccaagttcagacccggccccagatggtgcgccgtgcagggccaggtggacgagaagaccttcctgcactacgactgcggcaacaagaccgtgacccccgtgagccccctgggcaagaagctgaacgtgaccatggcctggaaggcccagaaccccgtgctgagagaggtggtggacatcctgaccgagcagctgctggacatccagctggagaactacacccccaaggagcccctgaccctgcaggccagaatgagctgcgagcagaaggccgagggccacagcagcggcagctggcagttcagcatcgacggccagaccttcctgctgttcgacagcgagaagagaatgtggaccaccgtgcaccccggcgccagaaagatgaaggagaagtgggagaacgacaaggacgtggccatgagcttccactacatcagcatgggcgactgcatcggctggctggaggacttcctgatgggcatggacagcaccctggagcccagcgccggcgcccccctggccatgagcagcggcaccacccagctgagagccaccgccaccaccctgatcctgtgctgcctgctgatcatcctgccctgcttcatcctgcccggcatctag

SEQ ID NO: 234440 - protein, 926 aa, Artificial Sequence
  derived and/or modified sequence
MVSSVLPNPTSAECWAALLHDPMTLDMDAVLSDFVRSTGAEPGLARDLLEGKNWDLTAALSDYEQLRQVHTANLPHVFNEGRGPKQPEREPQPGHKVERPCLQRQDDIAQEKRLSRGISHASSAIVSLARSHVASECNNEQFPLEMPIYTFQLPDLSVYSEDFRSFIERDLIEQATMVALEQAGRLNWWSTVCTSCKRLLPLATTGDGNCLLHAASLGMWGFHDRDLVLRKALYTMMRTGAEREALKRRWRWQQTQQNKEEEWEREWTELLKLASSEPRTHFSKNGGTGGGVDNSEDPVYESLEEFHVFVLAHILRRPIVVVADTMLRDSGGEAFAPIPFGGIYLPLEVPPNRCHCSPLVLAYDQAHFSALVSMEQRDQQREQAVIPLTDSEHKLLPLHFAVDPGKDWEWGKDDNDNARLAHLILSLEAKLNLLHSYMNVTWIRIPSETRAPLAQPESPTASAGEDVQSLADSLDSDRDSVCSNSNSNNGKNGKDKEKEKQRKEKDKTRADSVANKLGSFSKTLGIKLKKNMGGLGGLVHGKMGRANSANGKNGDSAERGKEKKAKSRKGSKEESGASASTSPSEKTTPSPTDKAAGASPAEKGGGPRGDAWKYSTDVKLSLNILRAAMQGERKFIFAGLLLTSHRHQFHEEMIGYYLTSAQERFSAEQEQRRRDAATAAAAAAAAAAATAKRPPRRPETEGVPVPERASPGPPTQLVLKLKERPSPGPAAGRAARAAAGGTASPGGGARRASASGPVPGRSPPAPARQSVIHVQASGARDEACAPAVGALRPCATYPQQNRSLSSQSYSPARAAALRTVNTVESLARAVPGALPGAAGTAGAAEHKSQTYTNGFGALRDGLEFADADAPTARSNGECGRGGPGPVQRRCQRENCAFYGRAETEHYCSYCYREELRRRREARGARP

SEQ ID NO: 234441 - protein, 110 aa, Artificial Sequence
  derived and/or modified sequence
MVSSVLPNPTSAECWAALLHDPMTLDMDAVLSDFVRSTGAEPGLARDLLEGKNWDLTAALSDYEQLRQVHTANLPHVFNEGRGPKQPEREPQPGHKVERPCLQRQDDIAQ

SEQ ID NO: 234442 - DNA, 2781 bp, Artificial Sequence
  derived and/or modified sequence
atggtgagcagcgtgctgcccaatccgaccagtgccgagtgctgggctgccctcttgcacgaccccatgaccctcgatatggatgccgtccttagtgactttgtgagatccacgggcgccgagccagggcttgctagagacctgttggagggtaaaaattgggatctgaccgctgccttgtcagattatgagcagttgcgtcaggtgcacactgccaacttacctcatgtgttcaatgagggacggggtcccaaacaacctgaaagagaaccacagcccggacataaggtggaaaggccttgtctccagcgccaggacgacatcgcccaggaaaaacgactcagccgcggcatctcccatgctagcagcgccatcgtgtccctggctcgcagccatgtcgcatccgagtgcaacaatgaacaatttcccctggagatgcccatttataccttccagctgccagacctaagcgtgtactccgaggatttcagaagcttcatcgagcgggacctaatagaacaggctaccatggttgcactggagcaggccggacgactcaactggtggtctaccgtctgcacctcatgcaaaagacttttgcccctcgccacaaccggggacggaaactgtctgctccacgcagcatctctgggcatgtggggatttcatgatcgggacctggtgctgcgaaaagcactgtacacaatgatgaggacaggggccgaacgggaagcactgaagcgccgatggcgttggcaacagactcagcaaaacaaggaggaagaatgggagagagagtggacagaattgttaaaactggcaagtagcgagccccgcacacacttttctaaaaatggcgggactggaggaggggtagataatagtgaggatcctgtgtatgaatccctcgaggagttccacgtgttcgtactagcacacatactgcgaagaccaattgtggttgtggctgataccatgcttcgggactccggaggtgaagcatttgcccctatccccttcgggggaatttatctgccgttggaggttccaccaaatagatgccactgctcgccactagtgctagcctatgaccaggcccacttctctgctctagtgagcatggagcagcgcgatcagcagagggagcaggcagtgattccactcactgactccgagcacaaactgcttccgctgcacttcgccgtcgaccctggaaaagattgggagtggggaaaggacgataacgacaatgcacgacttgcccacttgatcctgtctctggaagctaagctcaatcttctgcattcctatatgaatgtcacatggatccggataccaagtgagacccgcgcgccccttgctcagccagagtcccctacagcaagcgctggagaggatgtccagagtttggcggacagcttggattccgacagggacagcgtctgttctaactccaacagtaataatggcaagaatggtaaagataaagagaaggagaagcagcgcaaagagaaggataagacacgggccgatagcgtcgctaataagctgggaagttttagcaaaacccttggaattaagctgaagaagaacatggggggcttgggcggacttgtgcacggcaagatggggagagccaactccgccaatggcaaaaacggggattcagcagagagaggcaaggaaaagaaggccaagtcacgcaaagggagtaaggaggaaagtggcgctagtgcctccactagcccttccgagaaaaccacaccatcccccaccgataaagctgccggcgcctcaccagccgagaaaggtgggggtcctagaggagatgcctggaagtatagcaccgatgtcaagctgagtctgaatattttgagagcagccatgcagggagaaaggaagtttatttttgccgggttgctgttgaccagtcatcggcaccagttccatgaagaaatgatcggatactatctgacttccgctcaggaacggtttagcgccgaacaggaacagagaaggcgggatgcagccaccgccgccgccgcggccgccgctgctgcggccgcaactgccaaaagaccgccaagacggccagagactgaaggtgtgcccgtgccggaacgtgctagcccaggcccccctacccagctagtgctgaaactgaaagaacgcccgtcacctgggccagcagcgggcagggccgctagggctgctgccggggggaccgcctcccccggagggggcgcccggcgcgcctccgcgagcggccctgtgccgggcagaagcccccctgcaccagcacgtcaaagcgttattcatgtgcaggcgtcaggggcacgcgatgaagcttgcgcacctgccgttggagccctacggccctgtgcaacctaccctcaacagaataggtcgctttcctcccagtcttatagtcccgctagggcggccgccctgcgcacagtgaatactgtggaaagcttggccagagccgtcccaggagccctgcctggcgcagcaggcaccgcaggcgcagcagaacataagtcgcaaacctacaccaacggtttcggagctctccgggatgggcttgagttcgctgacgccgatgcacctaccgcccggtcaaatggtgagtgtgggcgcgggggccccgggcctgtgcaacgtcggtgccagagggaaaactgtgctttctacggcagggccgaaaccgaacactattgctcatactgctacagggaagagctacgcaggagacgggaggcccggggggctagaccatag

SEQ ID NO: 234443 - DNA, 333 bp, Artificial Sequence
  derived and/or modified sequence
atggtgtccagcgtgttgcctaatccaacgtctgctgagtgctgggccgctctgctccacgatccgatgacactcgacatggacgcggtactgtcagactttgtccgctcaacaggcgccgaacccggcctggccagagacttactcgagggaaaaaactgggatctgacagctgccctgtctgattacgaacagctaaggcaagtgcacactgccaatctacctcacgtgttcaacgaaggcaggggacctaaacagcccgaacgcgagcctcagcccggacacaaggtggaacgtccatgcctgcagaggcaggacgatattgcccaatag

SEQ ID NO: 234444 - DNA, 2781 bp, Artificial Sequence
  derived and/or modified sequence
atggtgtcctctgtgctgcccaaccccaccagcgctgagtgctgggccgccctgctgcatgaccccatgaccctggacatggatgctgtgctgagtgactttgtgcgcagcactggagctgagcccggcctggcccgggacctgctggagggcaagaactgggacctgacagctgccctgagtgactatgagcagctgcggcaggtgcacacagccaacctgccccacgtgttcaatgaaggccggggccccaagcagcctgagcgggagccccagcccggccacaaggtggagcggccctgcctgcagaggcaggatgacatcgcccaggagaagaggctgagccggggcatcagccacgccagcagcgccatcgtgtccctggcccggagccacgtggccagcgagtgcaacaatgagcagttccccctggagatgcccatctacaccttccagctgcctgacctgtctgtgtacagcgaggacttccgctccttcatcgagcgggacctgattgagcaggccaccatggtggccctggagcaggccggccgcctgaactggtggagcacagtgtgcaccagctgcaagaggctgctgcccctggccaccactggagatggcaactgcctgctgcacgccgccagcctgggcatgtggggcttccatgaccgggacctggtgctgaggaaggccctgtacaccatgatgaggactggagctgagcgggaggccctgaagaggcgctggcgctggcagcagacccagcagaacaaggaggaggagtgggagcgggagtggacagagctgctgaagctggccagcagcgagcccaggacccacttcagcaagaatggaggcaccggcggcggcgtggacaacagcgaggaccctgtgtatgagagcctggaggagttccacgtgtttgtgctggcccacatcctgcggcggcccatcgtggtggtggccgacaccatgctgcgggacagcggcggggaggcctttgcccccatcccctttggaggcatctacctgcccctggaggtgccccccaaccgctgccactgcagccccctggtgctggcctatgaccaggcccacttcagcgccctggtgtccatggagcagagggaccagcagcgggagcaggccgtcatccccctgacagattctgagcacaagctgctgcccctgcactttgctgtggaccccgggaaggactgggagtggggcaaggatgacaatgacaatgcccggctggcccacctgatcctgagcctggaggccaagctgaacctgctgcacagctacatgaatgtgacctggatccgcatccccagcgagacccgggcccccctggcccagcctgagagccccacagccagcgctggagaagatgtgcagagcctggccgacagcctggacagcgaccgggacagcgtgtgcagcaacagcaacagcaacaacgggaagaatggcaaggacaaggagaaggagaagcagaggaaggagaaggacaagaccagggctgacagcgtggccaacaagctgggcagcttcagcaagaccctgggcatcaagctgaagaagaacatgggcggcctgggcggcctggtgcacggcaagatgggccgggccaacagcgccaacgggaagaatggagacagcgctgagcggggcaaggagaagaaggccaagagcaggaagggcagcaaggaggagagcggggccagcgccagcaccagccccagcgagaagaccacccccagccccacagacaaggccgccggggccagccctgctgagaagggcggcggccccagaggagatgcctggaagtacagcacagatgtgaagctgagcctgaacatcctgcgggccgccatgcagggcgagaggaagttcatctttgctggcctgctgctgaccagccaccgccaccagttccacgaggagatgattggctactacctgaccagcgcccaggagcgcttctctgctgagcaggagcagaggagaagagatgctgccacagctgctgctgctgctgctgctgctgctgctgccacagccaagaggcctccccggcggcctgagacagagggcgtgcctgtgcctgagcgggccagccctggcccccccacccagctggtgctgaagctgaaggagcggcccagccctggccctgctgctggccgggccgcccgggctgctgctgggggcacagccagccctgggggcggggcccggcgggccagcgccagcggccctgtgcccggccgcagccccccagccccagcccggcagagcgtcatccacgtgcaggccagcggggccagagatgaggcctgtgccccagctgtgggcgccctgcggccctgtgccacctacccccagcagaacagaagcctgagcagccagagctacagccctgcccgggctgctgccctgaggacagtgaacacagtggagagcctggcccgggctgtgcctggggccctgcctggagctgctggaacagctggagctgctgagcacaagagccagacctacaccaatggatttggagccctgagagatggcctggagtttgctgatgctgatgcccccacagcccggagcaatggagaatgtggccggggcggccctggccctgtgcagaggcgctgccagcgggagaactgtgccttctacggccgggcagagacagagcactactgcagctactgctaccgggaggagctgcggcggcggcgggaggcccggggggcccggccctag

SEQ ID NO: 234445 - DNA, 333 bp, Artificial Sequence
  derived and/or modified sequence
atggtgtcctctgtgctgcccaaccccaccagcgctgagtgctgggccgccctgctgcatgaccccatgaccctggacatggatgctgtgctgagtgactttgtgcgcagcactggagctgagcccggcctggcccgggacctgctggagggcaagaactgggacctgacagctgccctgagtgactatgagcagctgcggcaggtgcacacagccaacctgccccacgtgttcaatgaaggccggggccccaagcagcctgagcgggagccccagcccggccacaaggtggagcggccctgcctgcagaggcaggatgacatcgcccagtag

SEQ ID NO: 234446 - DNA, 2781 bp, Artificial Sequence
  derived and/or modified sequence
atggtgagcagcgtgctgcccaaccccaccagcgccgagtgctgggccgcccttctgcatgaccctatgactctggatatggatgctgtcctgagcgatttcgtgaggagcaccggagctgagccagggcttgcgcgggacctcttggagggcaagaattgggatctgacagctgcgctgagtgactatgagcaactgcggcaagttcacacggctaatcttccccacgtctttaatgaaggtagggggccgaaacagcctgaacgcgagccacaacctgggcacaaagtggagaggccatgtctgcaaagacaggatgatattgcccaggaaaaacgcttgagcagaggcatttctcatgcctcctctgcaatcgtgtctcttgcccgctcacatgtagcttctgaatgtaacaatgagcagttccccctggagatgccaatctatacatttcagctcccagatctgtctgtgtacagcgaggactttaggtcattcatcgagcgagacctcatcgaacaggccaccatggtagcccttgagcaggctgggcgactgaactggtggtccactgtctgcacctcatgtaaaaggctccttcctctggccactactggagatggaaactgcctgctgcacgccgcaagcctcggcatgtgggggttccacgatcgcgatctggtgctcaggaaagccttatatactatgatgagaactggagccgaacgtgaggccctgaaacgccggtggcgctggcagcagactcagcagaacaaggaggaggagtgggaaagagagtggactgagctgcttaaactcgcaagttccgagccccggacccacttttccaaaaacggtggtacagggggaggagtagataatagtgaggatcctgtgtacgagtctctggaagaatttcacgttttcgttctggctcatatcctgcggcgacccattgtcgtggtcgcagatacaatgctcagggacagtggcggggaagcctttgcaccaatcccatttggcggaatttatctgcctctggaggtgccgcccaatcgctgccactgctcccctctagttctggcgtatgatcaggctcacttctccgccctggttagtatggaacaacgcgaccagcaaagggagcaagcagtgatcccgctcacggactccgagcataagttgctgccactccactttgcagtggatccaggtaaagactgggaatggggcaaagatgacaatgataacgcccgcctagctcacctaattctgtcgctggaagctaagctcaacctccttcacagctatatgaacgtaacctggatcaggattccgtctgagacccgagcccctctggctcaacctgaaagtcccactgccagcgcaggcgaagatgtccagagcctcgccgattctctcgattctgatagggatagcgtgtgttcgaactctaacagtaataatggtaagaacggcaaggacaaggaaaaggagaaacagcggaaggagaaggataagacacgcgctgattctgttgccaataaactgggtagtttctctaagactttgggcatcaagctcaagaagaatatgggcggactggggggtctggtgcacggtaagatgggacgagctaactcagccaatgggaagaacggcgatagcgccgagagagggaaagaaaaaaaagccaagtctagaaaaggcagtaaagaagagtcaggagcgagtgccagcacatcccctagcgagaagaccactccaagtcctaccgacaaggcagcaggtgctagccccgccgagaagggaggcggccctcgcggggacgcttggaagtacagtaccgacgtcaagctgtctcttaatatacttagagccgccatgcaaggagaacgaaagtttattttcgcaggacttctgctcacttcccatagacatcagtttcacgaagagatgatcggatattacctcacatctgcccaggagcggttttctgcggagcaggagcagagaagacgggatgctgctaccgctgcagctgcagccgctgcggcggccgctgccacagctaaacggccgccacgacgccccgaaactgaaggtgtgccggtgccggaacgagcgagccctgggccaccaacgcagcttgttctgaaactgaaggagcgcccttctccaggacctgctgcgggacgtgcagccagagcagccgcaggcggcaccgcgagtcccggcggaggcgcacggagagccagcgccagcggacccgtgcccgggcggtctccccctgcgcccgctaggcagagtgtaatacacgtgcaagcctcgggggctcgagatgaagcctgcgcacctgccgtgggcgcgctgcgcccctgcgccacctacccccagcagaaccgctctcttagtagccagagctactccccagccagagcggccgctttgcgaaccgttaataccgtggagagtctggctcgtgcagtgcccggggccctgcctggagccgccggtaccgccggtgcagcagaacacaaaagtcagacctacaccaacggcttcggggctctgagagacgggttggaatttgcagacgctgacgctcctacagcacgcagtaatggagagtgtggaagaggcgggccagggcctgtccagagacgctgtcagagggagaattgcgctttttatggccgagctgagaccgaacattattgctcatattgttaccgggaagaattgcggaggcgacgggaggccagaggagccagaccttag

SEQ ID NO: 234447 - DNA, 333 bp, Artificial Sequence
  derived and/or modified sequence
atggtgagcagcgtgctgcccaaccccaccagcgccgagtgctgggcggccctattgcatgatcctatgactctagacatggatgccgtgctaagtgatttcgtaagatcaaccggggccgaaccgggcctggctcgcgatttgctggaaggcaagaactgggacctgaccgcagccctaagcgattatgagcagctcagacaggtgcatacggccaacttgccccatgtctttaacgagggccgcggtcctaaacagccggagcgtgaaccacagcctggccacaaggtggagcgaccctgtttgcagcgtcaagacgatattgcacagtag

SEQ ID NO: 234448 - DNA, 3042 bp, Artificial Sequence
  derived and/or modified sequence
gttctctcgctcaggtctctgcatgtagttgtcacttgcagctccatttccatcacgtggtaaaatgccctttctcttctttcctgcagatggatggtttctagtgtgcttccaaaccccacctcggctgagtgttgggcagcacttctacatgatcctatgactcttgatatggacgcagtcctgtcagactttgttcggtccacgggggcagaacctggtctggccagagacctgctggaaggcaaaaactgggacctgacagccgctctgagcgactatgagcagctccgccaggtgcacacagccaatctgccacatgtgttcaatgaagggcggggtcccaagcagccagagcgagagccacagcccgggcacaaggtggagcgaccctgcctgcagaggcaggacgacattgcccaagaaaagcggctttcccgggggatttcccacgccagctcagccatcgtctccctggcccggtcccacgtggcaagtgaatgcaacaacgagcagttccccctggagatgccaatctacacattccagttgccagacctgagcgtgtacagcgaggatttcaggagcttcatcgagcgggacttgatcgagcaggcaacaatggtggctttggagcaggcaggtcgcctgaactggtggtccactgtgtgcacgagctgtaaacggcttcttcctctggccacaacaggggatgggaactgccttttacatgctgcttcactgggaatgtgggggtttcacgaccgggacctggtgttacggaaagctctctataccatgatgaggacgggagctgagagggaagccctgaagcggaggtggaggtggcagcagacgcagcagaataaggaggaggagtgggagcgggagtggacggagctgctgaagctggcctccagcgagccgcgcacacacttcagcaagaatggcggcacgggcgggggtgtggacaactctgaggaccccgtgtacgagagcctggaagagttccacgtttttgtcctagcccatatattaagaaggcccatcgttgttgtggcagatacaatgttaagagactcaggtggagaagcgttcgcacccatcccattcggagggatctacctgcccttggaggtccctcccaacagatgccactgctcgcctctggttctggcctatgatcaagcccatttctctgcccttgtgtccatggaacagagagaccagcaaagagaacaagccgtgatccccctgacggattctgagcacaagctgctgcctctgcactttgcagtggaccctggcaaggactgggagtgggggaaagacgacaacgataacgcccggctggcccaccttatcctgtcgctagaagccaagctgaaccttctgcacagctacatgaacgtgacgtggatccggatcccctccgagacacgggcgcccctggcacagccggagtctcccacggcctcggcaggggaggacgtgcagtccctggccgactcgctggactcggaccgcgattcggtgtgcagcaattctaacagcaataacggcaagaacggcaaggacaaggagaaggagaagcagcgcaaggagaaggacaagacgcgcgccgactccgtggccaacaagctgggcagcttcagcaagacgctgggcatcaagctgaagaaaaacatgggcggcctcggcggcctggtgcacggcaagatgggccgcgccaactccgccaatggcaagaacggggactcggccgagcggggcaaggagaagaaggccaagtcgcgcaagggcagcaaggaggagtctggtgcgtcggccagcacgtcgccgtcggaaaagaccacgccgtcgcccacagacaaggcagcgggcgcgtcgccggcggagaagggcggtgggccgcggggcgacgcctggaagtacagcacggatgtgaagctgagcctcaacatcctgcgcgccgccatgcagggggagcgcaagttcatcttcgccggcctgctgctcaccagccaccggcaccagttccacgaggagatgatcggctactacctgacgagcgcgcaggagcgcttcagcgccgagcaggagcagcggcgccgcgacgccgctactgcggccgccgctgccgccgccgccgccgccgccacggccaagcggccgccgcgcagaccggagacggagggcgtgccggtcccggagcgcgcctctccgggcccacccacgcagctggtgctcaagctcaaggagcggccgagccccgggcccgcggcagggcgtgcggcgcgggcggcggcgggcggcacggcctccccggggggaggcgcgcggcgtgcgagcgccagcggaccagtgcctggccgcagccccccggcgccagcgcgccagagcgtcatccacgtgcaggcgtcgggcgcgcgggacgaggcgtgcgcgccggccgtgggggcgctgcggccgtgcgccacgtacccgcagcagaaccgctcgctgtcgtcgcagagctacagcccggcgcgcgccgccgccctgcgcaccgtcaacacggtcgagtcgctggcgcgcgcggtgcccggggccctaccgggcgcggcggggacggcgggggcggccgagcacaagtcgcagacctacaccaacggcttcggcgccctgcgcgacggcctggagttcgccgacgccgacgcgccgaccgcgcgctcgaacggtgagtgcggccgtggcggcccggggccggtgcagcggcgctgccagcgcgagaactgtgcgttctacgggcgcgccgagaccgagcactactgctcctactgctaccgcgaggagctgcggcggcggcgcgaggcgcgcggggcccggccctgagcggcgcggcgcggcgcgggcggcgaggttctaccttcgaggatttcttttccattgtgtcggtgtcttttttacatgccctggtccaccggaaggccggcgcctcctctgtcagtgccgtgtacgtgtttggtcaaacgttcctaatggtgcctgaacctacactga

SEQ ID NO: 234449 - DNA, 2781 bp, Artificial Sequence
  derived and/or modified sequence
atggtctcaagcgtccttccgaatccaaccagtgcagagtgctgggccgctctgctgcacgatccaatgaccttggatatggacgctgtgcttagcgatttcgtgagatcaacaggtgctgagccagggcttgcacgggacctcctagaagggaagaattgggacttaacggccgctctgtcagattacgaacagttgcggcaggtgcacacagctaatcttccgcacgtgtttaatgagggacggggacctaagcagcccgagagggagccccagccgggacataaggtggagcggccatgcctacagcgacaagacgacattgcccaggagaaacgcctatcacgcggaatttctcatgcctcttctgccatcgtgtctttagcaagaagtcacgtcgcatccgagtgcaataacgaacagttccctcttgaaatgccaatttacacgttccagctgccagatctcagtgtatattcagaagacttcagatcgttcatcgaacgggatttaattgaacaggcaacaatggtcgccctggaacaagccggaagacttaactggtggagcacagtctgcacatcctgcaaaagactgttacctctcgctactaccggggatggcaactgcctgctccatgctgcttctcttggcatgtggggctttcatgatagagatctggtgctccgcaaggccctctacacaatgatgagaacaggcgcagagcgagaggccctaaaaagaaggtggcggtggcaacagacgcaacagaataaagaggaagaatgggagcgtgaatggactgagttgctcaaactggcctcgtctgagcctcgtacccactttagtaagaatggagggacgggaggaggagtggataatagcgaggatccagtttatgagtcactcgaggaattccacgttttcgtccttgctcatatcctgcggagacccatcgtcgtcgtggctgatacaatgctcagggatagcggaggagaggccttcgcacccataccgttcgggggaatctatctgccccttgaagtgcctcctaatcgatgtcactgttcccctctggtgcttgcttacgatcaggctcattttagcgcgctggtgtctatggaacagcgggaccaacagagggagcaggctgtgattccactgacagactctgaacataaactgctgccactccactttgcagtcgaccctgggaaggattgggagtgggggaaagacgataatgacaatgcaagactggcccatctcatcctgagtctggaggctaaactgaacctgcttcatagctacatgaacgtgacctggatcagaattccctcagagacgcgcgctccactcgctcagcccgaatccccaacggcttctgcgggagaggacgtacagtctctggccgattcactggacagcgatagagactcagtgtgctctaacagcaactctaacaacgggaaaaacggcaaagataaagagaaggaaaaacagagaaaggagaaagacaaaacacgcgcagattccgtcgcgaacaaactcgggtccttctccaaaactttaggcattaaactcaaaaagaacatgggtggtctcgggggtctagtccatggcaaaatggggcgagctaatagcgccaatggaaagaacggcgatagcgctgagagaggcaaggagaagaaagcgaagtcaaggaaggggtctaaggaagagtccggtgcctctgccagcacctccccgagcgagaagaccacccccagccctacggataaagccgcaggagcctcaccagctgaaaagggaggcggtcctcggggtgacgcctggaaatattccacagacgtcaaactgtccctcaacattctgagggccgctatgcagggcgagagaaaattcatatttgctggattgctcctaacgtcacatcggcaccagttccacgaggagatgataggctattatctgacatcagctcaggagagatttagcgcagaacaggaacagcgacgaagggatgcggcaaccgcagcagccgctgcagcagccgcagccgcagccacagctaagcgaccaccacggagacccgagaccgaaggcgtacctgtgcccgagagagcctcccccggacctcctacacagctggtcctgaagctcaaagagcggccttcacccggacccgctgcaggacgcgcagctagagcggcagcaggaggcacagcatctcccggtggaggggctcgaagggcaagcgcatcaggaccggtgcctggccgatccccacctgcacccgctcggcagtccgtgatccacgtgcaggcctccggcgcaagggatgaagcctgcgccccagctgtcggggcactgcggccatgcgcaacctacccccaacaaaatcgcagcctttcttctcagtcatactctccagctcgcgctgctgccctccggaccgtgaacaccgtggaaagcctggcacgggctgtccctggggcactgccaggtgcagccggaactgctggtgccgcagagcataaatcccagacttacaccaacggatttggagccttgcgggatggtctggagtttgctgatgctgatgccccaaccgctagatccaacggagagtgcggcaggggcggaccgggtcccgtacaacggagatgccaaagggagaactgtgccttctacggcagggcagagaccgaacactattgttcctactgctaccgggaagaactgcggaggcggagagaggcccgtggggcacgcccttag

SEQ ID NO: 234450 - DNA, 333 bp, Artificial Sequence
  derived and/or modified sequence
atggtgagttccgttttgccgaacccaacctcagctgagtgttgggctgccctgctacatgatccgatgacattagacatggacgctgttctgagtgattttgtccggagcacaggtgccgaacccggactggccagggacctgctggaagggaaaaattgggacttaactgcagcactatccgattatgaacagcttcggcaggtgcatactgcaaaccttcctcacgttttcaacgaagggagaggccctaagcagcccgaacgggaaccacagcccggtcacaaggttgaacggccttgtctccagcggcaagacgatatcgcacagtag

SEQ ID NO: 234451 - DNA, 2781 bp, Artificial Sequence
  derived and/or modified sequence
atggtgagcagcgtgctgcccaaccccaccagcgccgagtgctgggccgccctgctgcacgaccccatgaccctggacatggacgccgtgctgagcgacttcgtgagaagcaccggcgccgagcccggcctggccagagacctgctggagggcaagaactgggacctgaccgccgccctgagcgactacgagcagctgagacaggtgcacaccgccaacctgccccacgtgttcaacgagggcagaggccccaagcagcccgagagagagccccagcccggccacaaggtggagagaccctgcctgcagagacaggacgacatcgcccaggagaagagactgagcagaggcatcagccacgccagcagcgccatcgtgagcctggccagaagccacgtggccagcgagtgcaacaacgagcagttccccctggagatgcccatctacaccttccagctgcccgacctgagcgtgtacagcgaggacttcagaagcttcatcgagagagacctgatcgagcaggccaccatggtggccctggagcaggccggcagactgaactggtggagcaccgtgtgcaccagctgcaagagactgctgcccctggccaccaccggcgacggcaactgcctgctgcacgccgccagcctgggcatgtggggcttccacgacagagacctggtgctgagaaaggccctgtacaccatgatgagaaccggcgccgagagagaggccctgaagagaagatggagatggcagcagacccagcagaacaaggaggaggagtgggagagagagtggaccgagctgctgaagctggccagcagcgagcccagaacccacttcagcaagaacggcggcaccggcggcggcgtggacaacagcgaggaccccgtgtacgagagcctggaggagttccacgtgttcgtgctggcccacatcctgagaagacccatcgtggtggtggccgacaccatgctgagagacagcggcggcgaggccttcgcccccatccccttcggcggcatctacctgcccctggaggtgccccccaacagatgccactgcagccccctggtgctggcctacgaccaggcccacttcagcgccctggtgagcatggagcagagagaccagcagagagagcaggccgtgatccccctgaccgacagcgagcacaagctgctgcccctgcacttcgccgtggaccccggcaaggactgggagtggggcaaggacgacaacgacaacgccagactggcccacctgatcctgagcctggaggccaagctgaacctgctgcacagctacatgaacgtgacctggatcagaatccccagcgagaccagagcccccctggcccagcccgagagccccaccgccagcgccggcgaggacgtgcagagcctggccgacagcctggacagcgacagagacagcgtgtgcagcaacagcaacagcaacaacggcaagaacggcaaggacaaggagaaggagaagcagagaaaggagaaggacaagaccagagccgacagcgtggccaacaagctgggcagcttcagcaagaccctgggcatcaagctgaagaagaacatgggcggcctgggcggcctggtgcacggcaagatgggcagagccaacagcgccaacggcaagaacggcgacagcgccgagagaggcaaggagaagaaggccaagagcagaaagggcagcaaggaggagagcggcgccagcgccagcaccagccccagcgagaagaccacccccagccccaccgacaaggccgccggcgccagccccgccgagaagggcggcggccccagaggcgacgcctggaagtacagcaccgacgtgaagctgagcctgaacatcctgagagccgccatgcagggcgagagaaagttcatcttcgccggcctgctgctgaccagccacagacaccagttccacgaggagatgatcggctactacctgaccagcgcccaggagagattcagcgccgagcaggagcagagaagaagagacgccgccaccgccgccgccgccgccgccgccgccgccgccgccaccgccaagagaccccccagaagacccgagaccgagggcgtgcccgtgcccgagagagccagccccggcccccccacccagctggtgctgaagctgaaggagagacccagccccggccccgccgccggcagagccgccagagccgccgccggcggcaccgccagccccggcggcggcgccagaagagccagcgccagcggccccgtgcccggcagaagcccccccgcccccgccagacagagcgtgatccacgtgcaggccagcggcgccagagacgaggcctgcgcccccgccgtgggcgccctgagaccctgcgccacctacccccagcagaacagaagcctgagcagccagagctacagccccgccagagccgccgccctgagaaccgtgaacaccgtggagagcctggccagagccgtgcccggcgccctgcccggcgccgccggcaccgccggcgccgccgagcacaagagccagacctacaccaacggcttcggcgccctgagagacggcctggagttcgccgacgccgacgcccccaccgccagaagcaacggcgagtgcggcagaggcggccccggccccgtgcagagaagatgccagagagagaactgcgccttctacggcagagccgagaccgagcactactgcagctactgctacagagaggagctgagaagaagaagagaggccagaggcgccagaccctag

SEQ ID NO: 234452 - DNA, 333 bp, Artificial Sequence
  derived and/or modified sequence
atggtgagcagcgtgctgcccaaccccaccagcgccgagtgctgggccgccctgctgcacgaccccatgaccctggacatggacgccgtgctgagcgacttcgtgagaagcaccggcgccgagcccggcctggccagagacctgctggagggcaagaactgggacctgaccgccgccctgagcgactacgagcagctgagacaggtgcacaccgccaacctgccccacgtgttcaacgagggcagaggccccaagcagcccgagagagagccccagcccggccacaaggtggagagaccctgcctgcagagacaggacgacatcgcccagtag

SEQ ID NO: 234453 - protein, 161 aa, Artificial Sequence
  derived and/or modified sequence
MSVTLHTDVGDIKIEVFCERTPKTCENFLALCASNYYNGCIFHRNIKGFMVQTGDPTGTGRGGNSIWGKKFEDEYSEYLKHNVRGVVSMANNGPNTNGSQFFITYGKQPHLDMKYTVFGKVIDGLETLDELEKLPVNEKTYRPLNDVHIKDITIHANPFAQ

SEQ ID NO: 234454 - protein, 80 aa, Artificial Sequence
  derived and/or modified sequence
MSVTLHTDVGDIKIEVFCERTPKTCENFLALCASNYYNGCIFHRNIKGFMVQTGDPTGTGRGGNSIWGKKFEDEYSEYLK

SEQ ID NO: 234455 - DNA, 486 bp, Artificial Sequence
  derived and/or modified sequence
atgagtgttacgctgcataccgacgtcggcgacatcaaaattgaggtgttttgtgagcgtacacctaagacatgcgagaattttcttgcactgtgtgcgagcaattattataacggctgcatcttccatcgaaacatcaaggggttcatggtgcagaccggagacccgaccggtactggccgaggcggtaactcaatatggggaaagaagtttgaagatgagtactccgagtatctgaaacacaacgtgcggggcgtggtttccatggcgaacaatgggcccaatacgaacggctcgcagttcttcattacatacgggaagcaacctcacctggatatgaagtataccgtctttggtaaggtgatcgacgggcttgaaaccctggacgaactcgaaaaactacccgtgaatgagaaaacctaccggccccttaacgacgtacacattaaggatattactatccacgccaatcccttcgcacagtag

SEQ ID NO: 234456 - DNA, 243 bp, Artificial Sequence
  derived and/or modified sequence
atgagtgtgacattgcacacagacgtgggagacattaagattgaggtattctgcgagaggacacccaagacatgcgagaactttttggcactgtgcgcctcaaattattacaatgggtgcatctttcatcgtaatataaagggctttatggtccagacaggcgaccctaccggtaccggacggggtggcaactccatctggggcaagaagtttgaagacgagtactccgaatacctgaaatag

SEQ ID NO: 234457 - DNA, 1194 bp, Artificial Sequence
  derived and/or modified sequence
gtcgttttggtttgagataggaagatgaggggaggaaggaggtgaggcggtaaggggcgttctctctcttgggtcccgcgcccaacttccgctggcccaaagaaactataattttgaaccaacagacctctgctggcatctgcgattgcatttttcctgttttaacaacggctgtgctagacgaagtggtgaagcccaaagacttatttttgagctcgctgtaagactgagaaatcacgtagtccttcctgaaaccactaagaggaaaaatgtctgtgacactgcatacagatgtaggtgatattaaaattgaagtcttctgtgagaggacacccaaaacatgtgagaatttcttggctctttgtgccagtaattactacaatggctgtatatttcataggaatatcaagggtttcatggttcaaacaggagatccaacaggaactggaagaggaggcaacagtatttggggcaagaagtttgaggatgaatacagtgaatatcttaagcacaatgttagaggtgttgtatctatggctaataatggcccgaacaccaatggatctcagttcttcatcacctatggcaaacagccacatttggacatgaaatacaccgtatttggaaaggtaatagatggtctggaaactctagatgagttggagaagttgccagtaaatgagaagacataccgacctcttaatgatgtacacattaaggacataactattcatgccaacccatttgctcagtagctatgatagacctggacaaataacttgacaaattgctggaacacacttattgtggtttacccggttttaattatgtcagagattgcatcatccttctgcttgtttacaactatgatcttctatgaaatggtggtaccaaggggcgcccaacagcttttatccccattcttagagcatattctttattataatgattatccaacatatttctttaattttaatacaaaaaatacatcatttaatttttgttacatatgaacattcatttttaaatgctcagcctcaagtgcaggcatttttgagtggcctgattacatattcctcccacagcaagtccgtatcctggaagtgttattttataataaaatttaaaaagttttaaagaattaaatcgtaggacaaattaattaaaatattgtgtaaaattaccttcaggcta

SEQ ID NO: 234458 - DNA, 596 bp, Artificial Sequence
  derived and/or modified sequence
ccgcactgcactccagcctggcgacatagcgagactccgtctcaaaatgaaaaaaaaagagaagttcatagtatattagtgataagtgctgtggtggaaaaaaaaaagttcatagtatattagtataagtgctgtggtgaaaaaaaaaaaaagcgaatttcatagtatattagtgataagtgctgtgggagaaggaaataggaatgtcctagggctgaagggctaaagcagttctgtgtaggattgtcaggtcagttaaacttgacatttaagcagaaatttggagagacttatttttgagctcgctgtaagactgagaaatcacgtagtccttcctgaaaccactaagaggaaaaatgtctgtgacactgcatacagatgtaggtgatattaaaattgaagtcttctgtgagaggacacccaaaacatgtgagaatttcttggctctttgtgccagtaattactacaatggctgtatatttcataggaatatcaagggtttcatggttcaaacaggagatccaacaggaactggaagaggaggcaacagtatttggggcaagaagtttgaggatgaatacagtgaatatcttaag

SEQ ID NO: 234459 - DNA, 486 bp, Artificial Sequence
  derived and/or modified sequence
atgtctgtgaccctgcacacagatgtgggggacatcaagattgaggtgttctgtgagaggacccccaagacctgtgagaacttcctggccctgtgtgccagcaactactacaacggctgcatcttccacaggaacatcaagggcttcatggtgcagacaggagaccccactggaacaggccggggcggcaacagcatctggggcaagaagtttgaagatgagtacagcgagtacctgaagcacaacgtgcggggcgtggtgtccatggccaacaacggccccaacaccaacggcagccagttcttcatcacctacggcaagcagccccacctggacatgaagtacacagtgtttgggaaggtgattgatggcctggagaccctggatgagctggagaagctgcctgtgaatgagaagacctaccggcccctgaatgatgtgcacatcaaggacatcaccatccacgccaacccctttgcccagtag

SEQ ID NO: 234460 - DNA, 243 bp, Artificial Sequence
  derived and/or modified sequence
atgtctgtgaccctgcacacagatgtgggggacatcaagattgaggtgttctgtgagaggacccccaagacctgtgagaacttcctggccctgtgtgccagcaactactacaacggctgcatcttccacaggaacatcaagggcttcatggtgcagacaggagaccccactggaacaggccggggcggcaacagcatctggggcaagaagtttgaagatgagtacagcgagtacctgaagtag

SEQ ID NO: 234461 - DNA, 486 bp, Artificial Sequence
  derived and/or modified sequence
atgagcgtgaccctgcacaccgacgtgggcgacatcaagatcgaggtcttttgcgaacgaacacctaagacgtgtgaaaattttctagccctgtgtgctagtaattactacaacggctgtattttccatcgaaatataaaagggttcatggtgcagaccggcgacccaaccgggacgggcagaggaggcaactcaatctggggcaagaagttcgaagacgaatactctgaatatcttaaacataacgtcagaggcgtggtcagtatggccaataatgggcctaacaccaacggatcccagttttttataacctacggaaaacaaccacatctggacatgaaatatacagtgttcggaaaagtgattgacggattggaaaccctggatgagctcgagaagctccccgtgaacgagaaaacatatcggccccttaatgatgtacatattaaggatataacaatccatgccaaccctttcgcccagtag

SEQ ID NO: 234462 - DNA, 243 bp, Artificial Sequence
  derived and/or modified sequence
atgagcgtgaccctgcacaccgacgtgggcgacatcaagatcgaggtcttttgtgaacggacgccaaagacatgtgagaatttcctcgccctctgtgcaagcaattattataatggttgtatcttccaccggaacatcaaagggttcatggtccagacgggagatcccacaggaacgggtcgtggcggcaactcaatctggggaaaaaaattcgaagacgaatatagtgagtaccttaaatag

SEQ ID NO: 234463 - DNA, 486 bp, Artificial Sequence
  derived and/or modified sequence
atgtccgttaccttgcataccgacgtgggtgacatcaaaattgaggtcttctgtgaacgcactccaaagacatgcgagaacttcctagccctttgcgcctctaattattacaatgggtgcatctttcatcggaacatcaaaggtttcatggttcagaccggggaccctacgggtaccggacgcggaggtaactctatctggggcaaaaaatttgaagatgagtattcagagtatttaaagcacaatgtacgtggcgtggtgtccatggctaataacggtcctaacaccaacgggtcacagtttttcatcacctatggaaagcagccccatctagatatgaaatatacggtgttcggcaaagtgatagacggcctggaaaccttggatgagcttgagaagcttccagtgaacgagaagacgtacagaccccttaacgatgtccacataaaagacattacaatccacgccaatccatttgctcagtag

SEQ ID NO: 234464 - DNA, 243 bp, Artificial Sequence
  derived and/or modified sequence
atgagtgtcacactgcacaccgacgtcggagacataaaaatcgaggtgttctgtgagcgcacccccaagacctgtgagaattttctcgccctctgtgcatccaactattacaatggctgcatctttcatcgcaatattaaagggttcatggttcagacaggggatccaaccggtaccggaagaggaggaaattccatctggggtaagaaatttgaggatgagtatagtgagtacctaaagtag

SEQ ID NO: 234465 - DNA, 486 bp, Artificial Sequence
  derived and/or modified sequence
atgagcgtgaccctgcacaccgacgtgggcgacatcaagatcgaggtgttctgcgagagaacccccaagacctgcgagaacttcctggccctgtgcgccagcaactactacaacggctgcatcttccacagaaacatcaagggcttcatggtgcagaccggcgaccccaccggcaccggcagaggcggcaacagcatctggggcaagaagttcgaggacgagtacagcgagtacctgaagcacaacgtgagaggcgtggtgagcatggccaacaacggccccaacaccaacggcagccagttcttcatcacctacggcaagcagccccacctggacatgaagtacaccgtgttcggcaaggtgatcgacggcctggagaccctggacgagctggagaagctgcccgtgaacgagaagacctacagacccctgaacgacgtgcacatcaaggacatcaccatccacgccaaccccttcgcccagtag

SEQ ID NO: 234466 - DNA, 243 bp, Artificial Sequence
  derived and/or modified sequence
atgagcgtgaccctgcacaccgacgtgggcgacatcaagatcgaggtgttctgcgagagaacccccaagacctgcgagaacttcctggccctgtgcgccagcaactactacaacggctgcatcttccacagaaacatcaagggcttcatggtgcagaccggcgaccccaccggcaccggcagaggcggcaacagcatctggggcaagaagttcgaggacgagtacagcgagtacctgaagtag

SEQ ID NO: 234467 - protein, 252 aa, Artificial Sequence
  derived and/or modified sequence
MALVLILQLLTLFPPASYHPKPWLGAQPATVVTPGVNVTLRCRAPQPAWRFGLFKPGEIAPLLFRDVSSELAEFFLEEVTPAQGGIYRCCYRRPDWGPGVWSQPSDVLELLVTEELPRPSLVALPGPVVGPGANVSLRCAGRLRNMSFVLYREGVAAPLQYRHSAQPWADFTLLGARAPGTYSCYYHTPSAPYVLSQRSEVLVISWEDSGSSDYTRGNLVRLGLAGLVLISLGALVTFDWRSQNRAPAGIRP

SEQ ID NO: 234468 - DNA, 759 bp, Artificial Sequence
  derived and/or modified sequence
atggcattagtcttgatcctgcagctgctgacccttttccctccagcctcctaccaccctaagccttggctcggcgcccagcctgctacagtcgtgacccctggcgtgaatgtgactttacggtgtcgggccccccaacccgcttggcggttcggactgtttaaaccaggcgagatcgcccccctgctctttcgggacgtcagcagcgaattggctgagttcttcctggaagaggtgactcccgcccagggtggaatatatcgctgttgctaccgacgccccgactgggggccaggggtgtggtctcagccctcagatgtgcttgagctgctggtgacggaggaactcccaagaccaagcctggttgccttgcctggccccgtggtgggacccggggcaaacgttagcctgcggtgcgccggacggctccgcaatatgtccttcgtcctgtacagggagggcgttgctgcacctctgcaatatcgacactctgcccaaccgtgggccgacttcacactactgggtgccagagctccgggtacctacagctgttattatcacacccccagcgcaccctatgtgctatcccagaggagtgaggtcctggttatctcctgggaagactcgggcagctccgactacacccgggggaacttggtccggctgggcctggcaggtctcgtcctgattagcctgggggcactggtcacgttcgattggaggagtcagaaccgggcaccagccggaattcgcccctag

SEQ ID NO: 234469 - DNA, 759 bp, Artificial Sequence
  derived and/or modified sequence
atggccctggtgctgatcctgcagctgctgaccctcttccccccagccagctaccaccccaagccctggctgggcgcccagcctgccaccgtggtgaccccaggagtgaatgtgaccctgcgctgccgggccccccagcctgcctggaggtttggcctcttcaagccaggagaaattgcccccctgctcttcagagatgtgtcctctgagctggccgagttcttcctggaggaggtgaccccagcccagggcggcatctaccgctgctgctacagaagaccagactggggccctggggtgtggagccagcccagtgatgtgctggagctgctggtgacagaggagctgccccggcccagcctggtggccctgcccggccctgtggtgggccctggggccaacgtgtccctgcgctgtgccggccgcctgaggaacatgagctttgtgctgtaccgggagggcgtggccgcccccctgcagtaccgccacagcgcccagccctgggccgacttcaccctgctgggcgcccgggcccctggcacctacagctgctactaccacacccccagcgccccctacgtgctgagccagaggtctgaggtgctggtgatctcctgggaggacagcggcagcagtgactacacccggggcaacctggtgcggctgggcctggccggcctggtgctgatcagcctgggcgccctggtgacctttgactggaggagccagaacagagccccagctggcatccggccctag

SEQ ID NO: 234470 - DNA, 759 bp, Artificial Sequence
  derived and/or modified sequence
atggccctggtgctgatcctgcagctgctgaccctgttcccccccgctagttaccaccccaaaccgtggcttggggcacagcccgcaaccgtcgttacacccggagttaacgttaccttgcgctgtcgcgcaccacagcccgcttggcggttcggattatttaagcccggggagatcgccccactgctcttccgcgacgtatcctccgaacttgctgagttctttctcgaagaagttacacctgcacaggggggcatctacaggtgttgctaccggcgtcctgactggggccccggggtgtggtcacagccatctgacgtcttggagcttctcgttactgaagagttgccgaggcccagcttagtcgccctccccggtcccgtggtggggcctggcgctaacgtcagcctgcgctgtgccggcagactaaggaacatgtcctttgtactttaccgcgaaggagttgccgcccccctacagtatagacatagtgcccagccctgggcggattttacattattaggggccagagctcccggtacatatagttgttactatcatacccccagtgcaccctatgtactgagtcaacggagcgaagttttggtcattagttgggaggactcaggatccagtgactatacacggggcaatctagtgcgtctagggcttgctggactagtactgatctcattaggggcactcgtgacctttgactggagatctcaaaaccgcgctccagccgggatccgaccgtag

SEQ ID NO: 234471 - DNA, 759 bp, Artificial Sequence
  derived and/or modified sequence
atggcattggtgcttatcctgcagttattgaccctcttcccaccagcctcatatcaccctaaaccatggttaggagcacaaccagccacagtagttacacccggagtgaatgtgacactccgctgtcgcgctccacagcccgcatggcggtttggtctgttcaaacccggtgaaatcgctcctttactgtttagagatgtaagttctgaattagccgagtttttcttagaagaggttaccccggctcaaggcggaatctaccggtgctgctacagacggccagattggggtcccggtgtctggtcacagccaagtgacgtgctggagctgcttgttaccgaagagctcccaagaccttctctggtggcactgccaggcccagtggtgggcccaggtgccaacgtctcactcaggtgtgcagggagactccggaacatgtcatttgttctctatcgagagggcgtagcggctccactgcaatacagacactccgcccagccttgggccgattttaccctgctgggagcacgcgctcctggtacctactcttgctactaccacactccatccgcgccatacgtcctgtcccagcggagcgaagtccttgtgatctcctgggaggattccgggtcttccgattatacgcggggtaacctggtgagactgggtctggctggcctggtccttattagcctcggagccctggtgactttcgactggaggagccagaatcgggcacctgccggtatccgcccttag

SEQ ID NO: 234472 - DNA, 759 bp, Artificial Sequence
  derived and/or modified sequence
atggcattagttctcattctgcagctgctgacactttttcctcctgcatcttatcatcctaagccatggctgggcgctcagcccgcaacggtggtgactcctggggtaaatgtgactctcaggtgtcgtgcgccccagcctgcctggcgcttcggactatttaaaccaggagaaatcgcccctctgttattccgggatgtgtcctccgagttggccgagttcttcctggaagaggtgacacccgcccaaggcggcatataccgctgctgctacaggcgacccgactggggacccggagtctggagccagcccagtgatgtgctcgaactgctcgtgaccgaagaactgcccagaccttctttggttgctctccccggaccagtagttggaccaggcgctaatgtaagtctccgttgcgccggacggctcagaaatatgtcattcgtattatatagagaaggagttgccgcaccattgcagtacagacacagcgctcagccttgggccgattttacgcttcttggcgcgagggcaccaggcacgtacagctgctactatcacacccctagtgcaccttacgtactctcacagcgttcagaagtcctggtgatttcatgggaagactctggctcttccgactatacccgaggtaacctcgtgcggctggggctcgcggggttggtattgatctcactaggtgccctggtcacttttgactggagatctcagaaccgggccccagctggcattcggccatag

SEQ ID NO: 234473 - DNA, 759 bp, Artificial Sequence
  derived and/or modified sequence
atggcgctggtcctcattctccaactgctgaccctcttcccacctgccagttatcatccaaagccttggctcggtgcccagcccgcaacagttgtgaccccaggagttaacgttacgcttaggtgcagagccccacagccggcatggaggttcggtctctttaagccgggtgaaattgccccactactctttagggacgtttcaagcgagctcgcagaattcttcctcgaagaggtgacacctgcacaaggaggtatttatagatgttgttaccggcgccctgactggggacccggggtgtggagccagcccagtgatgtgctcgaactgctcgtgaccgaagaactgcccagaccttctttggttgctctccccggaccagtagttggaccaggcgctaatgtaagtctccgttgcgccggacggctcagaaatatgtcattcgtattatatagagaaggagttgccgcaccattgcagtacagacacagcgctcagccttgggccgattttacgcttcttggcgcgagggcaccaggcacgtacagctgctactatcacacccctagtgcaccttacgtactctcacagcgttcagaagtcctggtgatctcatgggaagactctggaagttcagattataccaggggaaatctcgtcagactgggcctagctggactcgtgctcattagtctcggtgccctcgtcactttcgattggcgtagccagaatcgcgccccagcaggcataaggccttag

SEQ ID NO: 234474 - DNA, 759 bp, Artificial Sequence
  derived and/or modified sequence
atggccctggtgctgatcctgcagctgctgaccctgttcccccccgccagctaccaccccaagccctggctgggcgcccagcccgccaccgtggtgacccccggcgtgaacgtgaccctgagatgcagagccccccagcccgcctggagattcggcctgttcaagcccggcgagatcgcccccctgctgttcagagacgtgagcagcgagctggccgagttcttcctggaggaggtgacccccgcccagggcggcatctacagatgctgctacagaagacccgactggggccccggcgtgtggagccagcccagcgacgtgctggagctgctggtgaccgaggagctgcccagacccagcctggtggccctgcccggccccgtggtgggccccggcgccaacgtgagcctgagatgcgccggcagactgagaaacatgagcttcgtgctgtacagagagggcgtggccgcccccctgcagtacagacacagcgcccagccctgggccgacttcaccctgctgggcgccagagcccccggcacctacagctgctactaccacacccccagcgccccctacgtgctgagccagagaagcgaggtgctggtgatcagctgggaggacagcggcagcagcgactacaccagaggcaacctggtgagactgggcctggccggcctggtgctgatcagcctgggcgccctggtgaccttcgactggagaagccagaacagagcccccgccggcatcagaccctag

SEQ ID NO: 234475 - protein, 263 aa, Artificial Sequence
  derived and/or modified sequence
MALVLILQLLTLWPLCHTDITPSVPPASYHPKPWLGAQPATVVTPGVNVTLRCRAPQPAWRFGLFKPGEIAPLLFRDVSSELAEFFLEEVTPAQGGIYRCCYRRPDWGPGVWSQPSDVLELLVTEELPRPSLVALPGPVVGPGANVSLRCAGRLRNMSFVLYREGVAAPLQYRHSAQPWADFTLLGARAPGTYSCYYHTPSAPYVLSQRSEVLVISWEDSGSSDYTRGNLVRLGLAGLVLISLGALVTFDWRSQNRAPAGIRP

SEQ ID NO: 234476 - DNA, 792 bp, Artificial Sequence
  derived and/or modified sequence
atggcactggtactgatactgcagttgctcactctttggcccctgtgccacacagatataacgccgagtgtgccccccgccagctatcaccctaagccctggttgggcgcccagcctgctacagtagtaacacccggagtaaatgtcacactgcgatgcagagcaccgcagcctgcatggcgttttggactgtttaagccaggcgagatagcccccctgctgttccgcgatgtctccagcgagttggccgagttttttctggaggaggtgacgcccgcccaggggggtatttacagatgttgctaccggcgacccgattggggacccggggtgtggagccagccctccgatgtcctggaactgctggtgaccgaggaactcccccggccttctcttgtggccctgccaggacctgtagttggaccaggagccaatgtttcacttcgatgcgccggaaggctgcggaacatgtccttcgtcctgtacagagagggggtagccgctccattgcagtacaggcattcggcgcaaccatgggccgacttcacactgctgggcgcaagagcccctggcacctatagctgctattaccatacacccagcgccccgtatgtcctgtctcagaggagcgaagtgttggtaatcagttgggaggatagtggcagctccgactacacacgcgggaacctggttaggctcgggctcgccggccttgtgctgataagcttgggcgctctggtgactttcgactggagaagccagaaccgagcccccgctggcatcagaccgtag

SEQ ID NO: 234477 - DNA, 792 bp, Artificial Sequence
  derived and/or modified sequence
atggccctggtgctgatcctgcagctgctgaccctgtggcccctgtgccacacagacatcaccccatctgtgcccccagccagctaccaccccaagccctggctgggcgcccagcctgccaccgtggtgaccccaggagtgaatgtgaccctgcgctgccgggccccccagcctgcctggaggtttggcctcttcaagccaggagagatcgcccccctgctcttcagagatgtgagcagcgagctggccgagttcttcctggaggaggtgaccccagcccagggcggcatctaccgctgctgctacagaagaccagactggggccctggggtgtggagccagcccagtgatgtgctggagctgctggtgacagaggagctgccccggcccagcctggtggccctgcccggccctgtggtgggccctggggccaacgtgtccctgcgctgtgccggccgcctgaggaacatgagctttgtgctgtaccgggagggcgtggccgcccccctgcagtaccgccacagcgcccagccctgggccgacttcaccctgctgggcgcccgggcccctggcacctacagctgctactaccacaccccatctgccccctacgtgctgagccagaggtctgaggtgctggtgatctcctgggaggacagcggcagcagtgactacacccggggcaacctggtgcggctgggcctggccggcctggtgctgatcagcctgggcgccctggtgacctttgactggaggagccagaacagagccccagctggcatccggccctag

SEQ ID NO: 234478 - DNA, 792 bp, Artificial Sequence
  derived and/or modified sequence
atggccctggtgctgatcctgcagctgctgaccctgtggcccctgtgccataccgacattacaccttctgtacctcctgccagctatcaccctaagccttggctgggcgcacaacctgcaaccgtggtgacccccggggtgaatgtgacgctccgttgccgggccccgcagcccgcatggcgattcggcctgtttaagcccggcgaaattgcccctttactgttcagggacgtgtcaagcgagctggccgaattttttctggaggaggtcacccccgctcagggcggtatttaccgatgttgttaccgccggcctgattggggcccaggtgtgtggtcacagccttcggacgtgctcgagctgctggtgactgaggagcttcccaggcccagccttgtggcactgcctggacctgtggtcgggcccggtgcaaatgtttcactgcgttgcgcaggacggttgaggaacatgtcattcgttctctacagagaaggtgttgcagccccactccaatataggcactcagctcagccttgggctgacttcacccttctcggagccagggccccgggtacgtatagctgctactaccacactcccagtgcaccatacgtcttatcacagcgcagcgaggtactggtcatttcctgggaagattccggtagctcagattacactaggggcaacctcgtaaggttgggcctcgccggccttgtccttataagtttgggggctctggtaacatttgactggaggtctcagaatcgagctccagccggcatacgaccgtag

SEQ ID NO: 234479 - DNA, 792 bp, Artificial Sequence
  derived and/or modified sequence
atggcccttgtcctgatcttgcaactgctcacgctctggccactatgccacacagacatcacaccctcagtgcctccagcttcgtaccaccccaagccttggctaggggcacaacctgccacagtggtgaccccaggggtgaatgtgacactcaggtgtagagctccgcagccagcttggagattcggactgtttaaacccggagagatcgctcctttactgtttcgcgacgtctcatccgagctggccgaatttttcctggaggaagtgactcctgctcagggaggaatctatcgttgctgctaccggagaccagactggggacccggagtgtggtctcagccaagtgacgtgttagaactgttagtcacggaggagcttcctcggccatcacttgtggcccttccaggtcctgtggtgggacctggcgcaaacgtaagtcttagatgcgcagggagactgcgaaacatgagtttcgtgctataccgggagggcgtggctgctccacttcagtatcgccacagcgcgcagccatgggccgactttaccctgctgggagcccgagccccaggaacctattcttgctactatcacacacctagtgctccgtatgttctttctcagcggagtgaggtgctggttattagctgggaggattccggaagctctgactatacacgaggtaacctagtccgcctcggactcgcaggactggtgttgattagcctcggcgcattggttaccttcgactggagatcacagaaccgcgctcctgcaggtatccgtccgtag

SEQ ID NO: 234480 - DNA, 792 bp, Artificial Sequence
  derived and/or modified sequence
atggcccttgtattaatcctgcaattactgacgctctggccactgtgccataccgatattacaccctccgtgccccctgcaagttatcacccaaagccttggttaggggcacagcccgctaccgtggtgacgccgggagttaacgttaccttgcgatgtcgggctccacaacccgcctggagattcggcctttttaaacctggcgagatcgctccactcctctttcgggatgtttcatcggagctggctgaattcttcctggaagaggtcactcccgcacagggcggcatttaccgctgttgctaccgacggcccgactggggaccaggtgtctggtcacagccttccgacgtgcttgagttactggttactgaagaattgccccgaccaagcctcgtggcccttccaggccctgtcgttgggccgggagcaaacgtgtcacttcgatgcgcaggccgccttcgcaatatgtcttttgtgctgtaccgcgaaggcgtggccgccccgttgcagtacaggcactccgcacagccatgggcagacttcaccctccttggcgcacgcgccccaggcacatattcttgttactatcacactcctagtgctccctatgtcctcagccagcgctctgaggtgctggtcatcagctgggaagatagcggcagttctgattacactagaggcaatctcgtgcgactcggcctcgcaggattggtactgatttccctcggcgcattggtaactttcgactggcggtctcagaatcgggctcccgctggcattcgtccatag

SEQ ID NO: 234481 - DNA, 792 bp, Artificial Sequence
  derived and/or modified sequence
atggccctcgtgctcatcctccaacttcttacattgtggcccctgtgtcataccgatattaccccttctgttccaccagcttcctaccaccctaaaccttggcttggcgcacagccggctactgtcgtgacccctggggtgaacgtgacattgcgctgtagagctccccaaccagcttggagatttggtctgtttaagccaggagaaattgcccccctgttgtttcgggacgtgtcgagcgaattggcagagttctttttggaagaagtgacaccggcccagggagggatttataggtgctgttaccgacgacctgattggggtcctggagtctggtcccagccttccgacgtgctcgagctgctggtcacagaagaactgccccgtccctcactcgtggctcttcctgggccagtcgttggacctggagcaaatgtatctctccgctgcgcagggagactacgcaatatgagcttcgtcctgtatagagagggcgtcgccgctcccctgcaatacaggcattcagcccagccttgggccgattttacactcctcggcgctcgcgcccctgggacttactcttgctactaccatacccccagcgccccttacgtgctctcccaaagatcagaagtgcttgtaatttcctgggaagatagtggcagcagtgattacacacgcggaaacttggtgcggctgggcctcgctggtcttgtgctaattagcctcggagcactagtgaccttcgactggagaagccaaaacagggccccagccggaatcagaccctag

SEQ ID NO: 234482 - DNA, 792 bp, Artificial Sequence
  derived and/or modified sequence
atggccctggtgctgatcctgcagctgctgaccctgtggcccctgtgccacaccgacatcacccccagcgtgccccccgccagctaccaccccaagccctggctgggcgcccagcccgccaccgtggtgacccccggcgtgaacgtgaccctgagatgcagagccccccagcccgcctggagattcggcctgttcaagcccggcgagatcgcccccctgctgttcagagacgtgagcagcgagctggccgagttcttcctggaggaggtgacccccgcccagggcggcatctacagatgctgctacagaagacccgactggggccccggcgtgtggagccagcccagcgacgtgctggagctgctggtgaccgaggagctgcccagacccagcctggtggccctgcccggccccgtggtgggccccggcgccaacgtgagcctgagatgcgccggcagactgagaaacatgagcttcgtgctgtacagagagggcgtggccgcccccctgcagtacagacacagcgcccagccctgggccgacttcaccctgctgggcgccagagcccccggcacctacagctgctactaccacacccccagcgccccctacgtgctgagccagagaagcgaggtgctggtgatcagctgggaggacagcggcagcagcgactacaccagaggcaacctggtgagactgggcctggccggcctggtgctgatcagcctgggcgccctggtgaccttcgactggagaagccagaacagagcccccgccggcatcagaccctag

SEQ ID NO: 234483 - protein, 1450 aa, Artificial Sequence
  derived and/or modified sequence
MASLAALALSLLLRLQLPPLPGARAQSAAGGCSFDEHYSNCGYSVALGTNGFTWEQINTWEKPMLDQAVPTGSFMMVNSSGRASGQKAHLLLPTLKENDTHCIDFHYYFSSRDRSSPGALNVYVKVNGGPQGNPVWNVSGVVTEGWVKAELAISTFWPHFYQVIFESVSLKGHPGYIAVDEVRVLAHPCRKAPHFLRLQNVEVNVGQNATFQCIAGGKWSQHDKLWLQQWNGRDTALMVTRVVNHRRFSATVSVADTAQRSVSKYRCVIRSDGGSGVSNYAELIVKEPPTPIAPPELLAVGATYLWIKPNANSIIGDGPIILKEVEYRTTTGTWAETHIVDSPNYKLWHLDPDVEYEIRVLLTRPGEGGTGPPGPPLTTRTKCADPVHGPQNVEIVDIRARQLTLQWEPFGYAVTRCHSYNLTVQYQYVFNQQQYEAEEVIQTSSHYTLRGLRPFMTIRLRLLLSNPEGRMESEELVVQTEEDVPGAVPLESIQGGPFEEKIYIQWKPPNETNGVITLYEINYKAVGSLDPSADLSSQRGKVFKLRNETHHLFVGLYPGTTYSFTIKASTAKGFGPPVTTRIATKISAPSMPEYDTDTPLNETDTTITVMLKPAQSRGAPVSVYQLVVKEERLQKSRRAADIIECFSVPVSYRNASSLDSLHYFAAELKPANLPVTQPFTVGDNKTYNGYWNPPLSPLKSYSIYFQALSKANGETKINCVRLATKAPMGSAQVTPGTPLCLLTTGASTQNSNTVEPEKQVDNTVKMAGVIAGLLMFIIILLGVMLTIKRRKLAKKQKETQSGAQREMGPVASADKPTTKLSASRNDEGFSSSSQDVNGFTDGSRGELSQPTLTIQTHPYRTCDPVEMSYPRDQFQPAIRVADLLQHITQMKRGQGYGFKEEYEALPEGQTASWDTAKEDENRNKNRYGNIISYDHSRVRLLVLDGDPHSDYINANYIDGYHRPRHYIATQGPMQETVKDFWRMIWQENSASIVMVTNLVEVGRVKCVRYWPDDTEVYGDIKVTLIETEPLAEYVIRTFTVQKKGYHEIRELRLFHFTSWPDHGVPCYATGLLGFVRQVKFLNPPEAGPIVVHCSAGAGRTGCFIAIDTMLDMAENEGVVDIFNCVRELRAQRVNLVQTEEQYVFVHDAILEACLCGNTAIPVCEFRSLYYNISRLDPQTNSSQIKDEFQTLNIVTPRVRPEDCSIGLLPRNHDKNRSMDVLPLDRCLPFLISVDGESSNYINAALMDSHKQPAAFVVTQHPLPNTVADFWRLVFDYNCSSVVMLNEMDTAQFCMQYWPEKTSGCYGPIQVEFVSADIDEDIIHRIFRICNMARPQDGYRIVQHLQYIGWPAYRDTPPSKRSLLKVVRRLEKWQEQYDGREGRTVVHCLNGGGRSGTFCAICSVCEMIQQQNIIDVFHIVKTLRNNKSNMVETLEQYKFVYEVALEYLSSF

SEQ ID NO: 234484 - protein, 1463 aa, Artificial Sequence
  derived and/or modified sequence
MASLAALALSLLLRLQLPPLPGARAQSAAGGCSFDEHYSNCGYSVALGTNGFTWEQINTWEKPMLDQAVPTGSFMMVNSSGRASGQKAHLLLPTLKENDTHCIDFHYYFSSRDRSSPGALNVYVKVNGGPQGNPVWNVSGVVTEGWVKAELAISTFWPHFYQVIFESVSLKGHPGYIAVDEVRVLAHPCRKAPHFLRLQNVEVNVGQNATFQCIAGGKWSQHDKLWLQQWNGRDTALMVTRVVNHRRFSATVSVADTAQRSVSKYRCVIRSDGGSGVSNYAELIVKEPPTPIAPPELLAVGATYLWIKPNANSIIGDGPIILKEVEYRTTTGTWAETHIVDSPNYKLWHLDPDVEYEIRVLLTRPGEGGTGPPGPPLTTRTKCADPVHGPQNVEIVDIRARQLTLQWEPFGYAVTRCHSYNLTVQYQYVFNQQQYEAEEVIQTSSHYTLRGLRPFMTIRLRLLLSNPEGRMESEELVVQTEEDVPGAVPLESIQGGPFEEKIYIQWKPPNETNGVITLYEINYKAVGSLDPSADLSSQRGKVFKLRNETHHLFVGLYPGTTYSFTIKASTAKGFGPPVTTRIATKISAPSMPEYDTDTPLNETDTTITVMLKPAQSRGAPVSVYQLVVKEERLQKSRRAADIIECFSVPVSYRNASSLDSLHYFAAELKPANLPVTQPFTVGDNKTYNGYWNPPLSPLKSYSIYFQALSKANGETKINCVRLATKAPMGSAQVTPGTPLCLLTTGASTQNSNTVEPEKQVDNTVKMAGVIAGLLMFIIILLGVMLTIKRRRNAYSYSYYLSQRKLAKKQKETQSGAQREMGPVASADKPTTKLSASRNDEGFSSSSQDVNGFTDGSRGELSQPTLTIQTHPYRTCDPVEMSYPRDQFQPAIRVADLLQHITQMKRGQGYGFKEEYEALPEGQTASWDTAKEDENRNKNRYGNIISYDHSRVRLLVLDGDPHSDYINANYIDGYHRPRHYIATQGPMQETVKDFWRMIWQENSASIVMVTNLVEVGRVKCVRYWPDDTEVYGDIKVTLIETEPLAEYVIRTFTVQKKGYHEIRELRLFHFTSWPDHGVPCYATGLLGFVRQVKFLNPPEAGPIVVHCSAGAGRTGCFIAIDTMLDMAENEGVVDIFNCVRELRAQRVNLVQTEEQYVFVHDAILEACLCGNTAIPVCEFRSLYYNISRLDPQTNSSQIKDEFQTLNIVTPRVRPEDCSIGLLPRNHDKNRSMDVLPLDRCLPFLISVDGESSNYINAALMDSHKQPAAFVVTQHPLPNTVADFWRLVFDYNCSSVVMLNEMDTAQFCMQYWPEKTSGCYGPIQVEFVSADIDEDIIHRIFRICNMARPQDGYRIVQHLQYIGWPAYRDTPPSKRSLLKVVRRLEKWQEQYDGREGRTVVHCLNGGGRSGTFCAICSVCEMIQQQNIIDVFHIVKTLRNNKSNMVETLEQYKFVYEVALEYLSSF

SEQ ID NO: 234485 - DNA, 4353 bp, Artificial Sequence
  derived and/or modified sequence
atggccagcctggccgccctggccctgagcctgctgctgagactgcagctgccccccctgcccggcgccagagcccagagcgccgccggcggctgcagcttcgacgagcactacagcaactgcggctacagcgtggccctgggcaccaacggcttcacctgggagcagatcaacacctgggagaagcccatgctggaccaggccgtgcccaccggcagcttcatgatggtgaacagcagcggcagagccagcggccagaaggcccacctgctgctgcccaccctgaaggagaacgacacccactgcatcgacttccactactacttcagcagcagagacagaagcagccccggcgccctgaacgtgtacgtgaaggtgaacggcggcccccagggcaaccccgtgtggaacgtgagcggcgtggtgaccgagggctgggtgaaggccgagctggccatcagcaccttctggccccacttctaccaggtgatcttcgagagcgtgagcctgaagggccaccccggctacatcgccgtggacgaggtgagagtgctggcccacccctgcagaaaggccccccacttcctgagactgcagaacgtggaggtgaacgtgggccagaacgccaccttccagtgcatcgccggcggcaagtggagccagcacgacaagctgtggctgcagcagtggaacggcagagacaccgccctgatggtgaccagagtggtgaaccacagaagattcagcgccaccgtgagcgtggccgacaccgcccagagaagcgtgagcaagtacagatgcgtgatcagaagcgacggcggcagcggcgtgagcaactacgccgagctgatcgtgaaggagccccccacccccatcgccccccccgagctgctggccgtgggcgccacctacctgtggatcaagcccaacgccaacagcatcatcggcgacggccccatcatcctgaaggaggtggagtacagaaccaccaccggcacctgggccgagacccacatcgtggacagccccaactacaagctgtggcacctggaccccgacgtggagtacgagatcagagtgctgctgaccagacccggcgagggcggcaccggcccccccggcccccccctgaccaccagaaccaagtgcgccgaccccgtgcacggcccccagaacgtggagatcgtggacatcagagccagacagctgaccctgcagtgggagcccttcggctacgccgtgaccagatgccacagctacaacctgaccgtgcagtaccagtacgtgttcaaccagcagcagtacgaggccgaggaggtgatccagaccagcagccactacaccctgagaggcctgagacccttcatgaccatcagactgagactgctgctgagcaaccccgagggcagaatggagagcgaggagctggtggtgcagaccgaggaggacgtgcccggcgccgtgcccctggagagcatccagggcggccccttcgaggagaagatctacatccagtggaagccccccaacgagaccaacggcgtgatcaccctgtacgagatcaactacaaggccgtgggcagcctggaccccagcgccgacctgagcagccagagaggcaaggtgttcaagctgagaaacgagacccaccacctgttcgtgggcctgtaccccggcaccacctacagcttcaccatcaaggccagcaccgccaagggcttcggcccccccgtgaccaccagaatcgccaccaagatcagcgcccccagcatgcccgagtacgacaccgacacccccctgaacgagaccgacaccaccatcaccgtgatgctgaagcccgcccagagcagaggcgcccccgtgagcgtgtaccagctggtggtgaaggaggagagactgcagaagagcagaagagccgccgacatcatcgagtgcttcagcgtgcccgtgagctacagaaacgccagcagcctggacagcctgcactacttcgccgccgagctgaagcccgccaacctgcccgtgacccagcccttcaccgtgggcgacaacaagacctacaacggctactggaacccccccctgagccccctgaagagctacagcatctacttccaggccctgagcaaggccaacggcgagaccaagatcaactgcgtgagactggccaccaaggcccccatgggcagcgcccaggtgacccccggcacccccctgtgcctgctgaccaccggcgccagcacccagaacagcaacaccgtggagcccgagaagcaggtggacaacaccgtgaagatggccggcgtgatcgccggcctgctgatgttcatcatcatcctgctgggcgtgatgctgaccatcaagagaagaaagctggccaagaagcagaaggagacccagagcggcgcccagagagagatgggccccgtggccagcgccgacaagcccaccaccaagctgagcgccagcagaaacgacgagggcttcagcagcagcagccaggacgtgaacggcttcaccgacggcagcagaggcgagctgagccagcccaccctgaccatccagacccacccctacagaacctgcgaccccgtggagatgagctaccccagagaccagttccagcccgccatcagagtggccgacctgctgcagcacatcacccagatgaagagaggccagggctacggcttcaaggaggagtacgaggccctgcccgagggccagaccgccagctgggacaccgccaaggaggacgagaacagaaacaagaacagatacggcaacatcatcagctacgaccacagcagagtgagactgctggtgctggacggcgacccccacagcgactacatcaacgccaactacatcgacggctaccacagacccagacactacatcgccacccagggccccatgcaggagaccgtgaaggacttctggagaatgatctggcaggagaacagcgccagcatcgtgatggtgaccaacctggtggaggtgggcagagtgaagtgcgtgagatactggcccgacgacaccgaggtgtacggcgacatcaaggtgaccctgatcgagaccgagcccctggccgagtacgtgatcagaaccttcaccgtgcagaagaagggctaccacgagatcagagagctgagactgttccacttcaccagctggcccgaccacggcgtgccctgctacgccaccggcctgctgggcttcgtgagacaggtgaagttcctgaacccccccgaggccggccccatcgtggtgcactgcagcgccggcgccggcagaaccggctgcttcatcgccatcgacaccatgctggacatggccgagaacgagggcgtggtggacatcttcaactgcgtgagagagctgagagcccagagagtgaacctggtgcagaccgaggagcagtacgtgttcgtgcacgacgccatcctggaggcctgcctgtgcggcaacaccgccatccccgtgtgcgagttcagaagcctgtactacaacatcagcagactggacccccagaccaacagcagccagatcaaggacgagttccagaccctgaacatcgtgacccccagagtgagacccgaggactgcagcatcggcctgctgcccagaaaccacgacaagaacagaagcatggacgtgctgcccctggacagatgcctgcccttcctgatcagcgtggacggcgagagcagcaactacatcaacgccgccctgatggacagccacaagcagcccgccgccttcgtggtgacccagcaccccctgcccaacaccgtggccgacttctggagactggtgttcgactacaactgcagcagcgtggtgatgctgaacgagatggacaccgcccagttctgcatgcagtactggcccgagaagaccagcggctgctacggccccatccaggtggagttcgtgagcgccgacatcgacgaggacatcatccacagaatcttcagaatctgcaacatggccagaccccaggacggctacagaatcgtgcagcacctgcagtacatcggctggcccgcctacagagacaccccccccagcaagagaagcctgctgaaggtggtgagaagactggagaagtggcaggagcagtacgacggcagagagggcagaaccgtggtgcactgcctgaacggcggcggcagaagcggcaccttctgcgccatctgcagcgtgtgcgagatgatccagcagcagaacatcatcgacgtgttccacatcgtgaagaccctgagaaacaacaagagcaacatggtggagaccctggagcagtacaagttcgtgtacgaggtggccctggagtacctgagcagcttctag

SEQ ID NO: 234486 - DNA, 4392 bp, Artificial Sequence
  derived and/or modified sequence
atggccagcctggccgccctggccctgagcctgctgctgagactgcagctgccccccctgcccggcgccagagcccagagcgccgccggcggctgcagcttcgacgagcactacagcaactgcggctacagcgtggccctgggcaccaacggcttcacctgggagcagatcaacacctgggagaagcccatgctggaccaggccgtgcccaccggcagcttcatgatggtgaacagcagcggcagagccagcggccagaaggcccacctgctgctgcccaccctgaaggagaacgacacccactgcatcgacttccactactacttcagcagcagagacagaagcagccccggcgccctgaacgtgtacgtgaaggtgaacggcggcccccagggcaaccccgtgtggaacgtgagcggcgtggtgaccgagggctgggtgaaggccgagctggccatcagcaccttctggccccacttctaccaggtgatcttcgagagcgtgagcctgaagggccaccccggctacatcgccgtggacgaggtgagagtgctggcccacccctgcagaaaggccccccacttcctgagactgcagaacgtggaggtgaacgtgggccagaacgccaccttccagtgcatcgccggcggcaagtggagccagcacgacaagctgtggctgcagcagtggaacggcagagacaccgccctgatggtgaccagagtggtgaaccacagaagattcagcgccaccgtgagcgtggccgacaccgcccagagaagcgtgagcaagtacagatgcgtgatcagaagcgacggcggcagcggcgtgagcaactacgccgagctgatcgtgaaggagccccccacccccatcgccccccccgagctgctggccgtgggcgccacctacctgtggatcaagcccaacgccaacagcatcatcggcgacggccccatcatcctgaaggaggtggagtacagaaccaccaccggcacctgggccgagacccacatcgtggacagccccaactacaagctgtggcacctggaccccgacgtggagtacgagatcagagtgctgctgaccagacccggcgagggcggcaccggcccccccggcccccccctgaccaccagaaccaagtgcgccgaccccgtgcacggcccccagaacgtggagatcgtggacatcagagccagacagctgaccctgcagtgggagcccttcggctacgccgtgaccagatgccacagctacaacctgaccgtgcagtaccagtacgtgttcaaccagcagcagtacgaggccgaggaggtgatccagaccagcagccactacaccctgagaggcctgagacccttcatgaccatcagactgagactgctgctgagcaaccccgagggcagaatggagagcgaggagctggtggtgcagaccgaggaggacgtgcccggcgccgtgcccctggagagcatccagggcggccccttcgaggagaagatctacatccagtggaagccccccaacgagaccaacggcgtgatcaccctgtacgagatcaactacaaggccgtgggcagcctggaccccagcgccgacctgagcagccagagaggcaaggtgttcaagctgagaaacgagacccaccacctgttcgtgggcctgtaccccggcaccacctacagcttcaccatcaaggccagcaccgccaagggcttcggcccccccgtgaccaccagaatcgccaccaagatcagcgcccccagcatgcccgagtacgacaccgacacccccctgaacgagaccgacaccaccatcaccgtgatgctgaagcccgcccagagcagaggcgcccccgtgagcgtgtaccagctggtggtgaaggaggagagactgcagaagagcagaagagccgccgacatcatcgagtgcttcagcgtgcccgtgagctacagaaacgccagcagcctggacagcctgcactacttcgccgccgagctgaagcccgccaacctgcccgtgacccagcccttcaccgtgggcgacaacaagacctacaacggctactggaacccccccctgagccccctgaagagctacagcatctacttccaggccctgagcaaggccaacggcgagaccaagatcaactgcgtgagactggccaccaaggcccccatgggcagcgcccaggtgacccccggcacccccctgtgcctgctgaccaccggcgccagcacccagaacagcaacaccgtggagcccgagaagcaggtggacaacaccgtgaagatggccggcgtgatcgccggcctgctgatgttcatcatcatcctgctgggcgtgatgctgaccatcaagagaagaagaaacgcctacagctacagctactacctgagccagagaaagctggccaagaagcagaaggagacccagagcggcgcccagagagagatgggccccgtggccagcgccgacaagcccaccaccaagctgagcgccagcagaaacgacgagggcttcagcagcagcagccaggacgtgaacggcttcaccgacggcagcagaggcgagctgagccagcccaccctgaccatccagacccacccctacagaacctgcgaccccgtggagatgagctaccccagagaccagttccagcccgccatcagagtggccgacctgctgcagcacatcacccagatgaagagaggccagggctacggcttcaaggaggagtacgaggccctgcccgagggccagaccgccagctgggacaccgccaaggaggacgagaacagaaacaagaacagatacggcaacatcatcagctacgaccacagcagagtgagactgctggtgctggacggcgacccccacagcgactacatcaacgccaactacatcgacggctaccacagacccagacactacatcgccacccagggccccatgcaggagaccgtgaaggacttctggagaatgatctggcaggagaacagcgccagcatcgtgatggtgaccaacctggtggaggtgggcagagtgaagtgcgtgagatactggcccgacgacaccgaggtgtacggcgacatcaaggtgaccctgatcgagaccgagcccctggccgagtacgtgatcagaaccttcaccgtgcagaagaagggctaccacgagatcagagagctgagactgttccacttcaccagctggcccgaccacggcgtgccctgctacgccaccggcctgctgggcttcgtgagacaggtgaagttcctgaacccccccgaggccggccccatcgtggtgcactgcagcgccggcgccggcagaaccggctgcttcatcgccatcgacaccatgctggacatggccgagaacgagggcgtggtggacatcttcaactgcgtgagagagctgagagcccagagagtgaacctggtgcagaccgaggagcagtacgtgttcgtgcacgacgccatcctggaggcctgcctgtgcggcaacaccgccatccccgtgtgcgagttcagaagcctgtactacaacatcagcagactggacccccagaccaacagcagccagatcaaggacgagttccagaccctgaacatcgtgacccccagagtgagacccgaggactgcagcatcggcctgctgcccagaaaccacgacaagaacagaagcatggacgtgctgcccctggacagatgcctgcccttcctgatcagcgtggacggcgagagcagcaactacatcaacgccgccctgatggacagccacaagcagcccgccgccttcgtggtgacccagcaccccctgcccaacaccgtggccgacttctggagactggtgttcgactacaactgcagcagcgtggtgatgctgaacgagatggacaccgcccagttctgcatgcagtactggcccgagaagaccagcggctgctacggccccatccaggtggagttcgtgagcgccgacatcgacgaggacatcatccacagaatcttcagaatctgcaacatggccagaccccaggacggctacagaatcgtgcagcacctgcagtacatcggctggcccgcctacagagacaccccccccagcaagagaagcctgctgaaggtggtgagaagactggagaagtggcaggagcagtacgacggcagagagggcagaaccgtggtgcactgcctgaacggcggcggcagaagcggcaccttctgcgccatctgcagcgtgtgcgagatgatccagcagcagaacatcatcgacgtgttccacatcgtgaagaccctgagaaacaacaagagcaacatggtggagaccctggagcagtacaagttcgtgtacgaggtggccctggagtacctgagcagcttctag

SEQ ID NO: 234487 - DNA, 4353 bp, Artificial Sequence
  derived and/or modified sequence
atggcttctctggccgccctggccctgtcattgctgctaaggctgcaactgccaccactccccggagccagggcccaatcggccgctggggggtgcagtttcgatgagcactatagtaattgcggctactccgttgcgctgggtaccaatgggtttacttgggaacagataaacacctgggaaaagcctatgctcgatcaggctgtccccacaggctcattcatgatggtcaattcttcagggcgggcttccggtcagaaagcccatctgctgctcccaaccctgaaagagaacgacacacactgcatcgacttccattattacttctcctcacgcgaccggtcctccccaggcgcactgaacgtttacgtcaaggtcaatggagggccacagggaaacccggtgtggaatgttagcggggtggttacagagggttgggtgaaggcagagctggccatctccacattttggcctcatttctaccaggtgatctttgaatcggtttcactgaaaggtcaccccggatacatcgccgtggacgaagtgagggtcctggctcacccttgccgcaaggcaccgcacttcctccgactccaaaacgtggaagttaacgttggccagaatgctacgtttcagtgcattgctgggggcaagtggagccagcatgataagctctggttgcagcaatggaacggcagagacacggctcttatggtgacacgagtggtgaatcataggagatttagcgcaacagtcagtgtcgcggacacagcccagagaagcgtgtcaaaatatcggtgtgttattcggtccgatggaggctcaggggttagtaattacgccgagctgatcgtgaaagagccaccaactccaatcgcacccccggagctgttggccgtcggcgctacctacctgtggataaaacctaacgccaacagcatcattggtgatgggccaatcatactgaaagaagtggaatacaggaccaccaccggaacttgggccgagactcacatcgtggattcccctaactacaagctgtggcacctggatcctgacgtagagtacgagattcgagtgctgctcactcggcccggggaaggggggactggacccccaggtccgcctttaacgacacgcacgaaatgtgcggaccccgtgcacggtccccagaatgtcgagatcgtcgacatccgcgcaaggcaactcacccttcagtgggaaccctttggttatgctgttacccgatgccacagctacaacctcacggttcaatatcaatatgtgttcaatcagcaacaatatgaggctgaggaggtcatacagacttcgagccactacacattgcggggactgcgaccctttatgacaattcgactgcgactgttactgagtaaccccgaaggcagaatggagtcagaggagctggtagttcagaccgaggaagacgtgccaggagccgtccctctggagtctatacaagggggacctttcgaagaaaaaatttatattcaatggaagccccctaacgagactaacggagtgattacactctatgagatcaactataaggctgtggggagtctcgacccttccgcagacctgagttcacagaggggcaaggtttttaaacttaggaacgaaacccatcatctgttcgtcggcttgtacccaggcacaacgtattcttttaccataaaggctagcactgctaagggatttggcccccccgtcacgacacggattgctacaaaaatcagcgccccatccatgccggaatatgacacagataccccgctcaatgagacggatacgaccattacggtaatgttgaagccagcccaatctcgcggcgcccccgtcagtgtgtatcaattggtggtgaaggaagaacggctccaaaagtcacgccgggccgccgacattattgagtgcttctcggtgcctgtatcctatagaaacgcatccagcctggactctttacactacttcgccgcggaattaaagccggcaaaccttccagttacacagccatttaccgtgggagacaacaaaacgtacaacggttactggaacccccccctgtctccattaaaaagctactcgatttactttcaggctctctccaaagccaatggtgagacaaaaattaattgtgtgcggctggctaccaaagccccgatgggctcggctcaagtgacgccaggtactccactctgcctccttaccacaggggctagtacccagaactctaacaccgtggagccagaaaaacaggtggataacaccgttaagatggctggtgtcatagccgggttgttaatgttcattataatcctgctcggagtgatgctgactatcaaaaggcgtaagcttgctaagaagcagaaagagacacagagtggcgcacagcgggaaatggggccagtggcctctgccgacaaacctaccacaaagctgagtgcttctcgtaacgacgagggattcagctcaagtagccaggatgtaaatggctttactgatgggagtaggggagagctcagtcagcccaccctgactatccagactcatccttaccggacatgcgaccccgtcgagatgagctatccaagagaccagttccagcccgcaatccgcgtcgctgatctgttgcaacatatcactcaaatgaagagggggcaggggtatgggttcaaggaggaatacgaagcactgcccgaaggccaaacggcctcctgggatactgctaaggaagatgagaaccgcaacaaaaataggtatggaaacatcatctcttacgaccactctcgggttcggttactcgtgctggatggagacccacattcagactacattaatgcaaattacatcgacgggtatcaccggcctaggcattacatcgccacacaggggcctatgcaggagaccgttaaggacttctggcgaatgatttggcaggagaactcagcgtctatcgtgatggtcacaaacctcgtggaggtaggcagggtgaagtgtgttagatactggcccgacgacacagaagtgtacggggacataaaggttacgcttattgagactgagcctctcgctgagtatgtcataaggaccttcaccgtccagaagaaaggctaccatgagattagagagctcaggctcttccactttacttcctggcctgaccatggagtcccatgctacgcaacaggactgctcggcttcgtgaggcaagtgaagtttcttaaccctccagaggcaggacctatcgtggtccactgctccgcaggcgcaggcaggacaggctgcttcatcgccatcgacacaatgctcgacatggctgaaaacgagggcgtggtcgatatctttaattgtgtccgagagttaagggcccagagggtgaatctggtacagaccgaagaacagtatgtgttcgttcatgatgctattctggaagcttgtttgtgtgggaataccgccatcccggtatgtgagttccgatcactttactacaatatcagccgactcgatccgcaaaccaactcatcccaaatcaaggacgagttccaaacactgaacattgtcacacctcgggtgagacccgaggactgcagcatcggattacttccgcggaaccatgataagaacaggagcatggatgtcctaccactggatcgttgtctaccctttcttatctctgtcgatggggaatcctccaactacattaacgccgccttgatggattctcacaagcagccggctgcattcgtggtgacgcagcatccccttccgaacactgtggccgacttctggagactggtctttgattataattgctccagcgtggtaatgctgaatgagatggacaccgcccagttttgtatgcagtattggcccgagaagacaagtgggtgctacggacctatccaggtggagttcgtgtctgccgatatagacgaagacattattcaccgcatcttcaggatctgcaatatggcccggccccaggacggatatcggattgtacagcaccttcagtatatcggctggccagcctaccgcgatacgcctccttcaaagaggtctttactgaaggtggtgcggcgcctggaaaagtggcaagagcagtatgacggtagagaaggtcgcaccgtggtacattgccttaacggcggtgggagaagtggtacattttgtgccatttgtagcgtttgcgagatgatccagcaacagaatatcatcgacgtctttcatatagtcaaaaccctgaggaacaacaaaagcaacatggtcgaaaccttagagcaatacaaatttgtttacgaggtagctttggagtacttgtctagcttctag

SEQ ID NO: 234488 - DNA, 4392 bp, Artificial Sequence
  derived and/or modified sequence
atggcatcactggcagcactggccctgagcctacttctgcgtctgcagttaccccctctgccaggcgcccgggcacagtctgcagctggtgggtgcagcttcgacgagcattacagtaactgcggttactcagtagccctagggactaatgggtttacctgggagcaaattaacacatgggaaaaaccaatgttggaccaggctgtgcccacagggtcttttatgatggtcaactcaagcggccgcgcgtcaggccagaaagctcacttgcttttgccgaccttgaaggaaaatgacacccactgcattgacttccactactactttagttctcgggatcgttcatcaccaggggccctgaacgtatacgtgaaagtaaacgggggcccccagggtaaccccgtgtggaatgtgagcggtgtcgttaccgagggctgggttaaggctgagttggccatctcaactttctggccccatttctaccaagtgatctttgagtccgtgtcactaaagggccaccccggctacatagctgtcgatgaggtgcgggtgttggctcacccctgcaggaaggcaccccactttcttagattgcagaacgtcgaagtgaatgtaggccagaatgccactttccagtgcattgctgggggaaagtggagtcagcatgacaaactctggctgcaacaatggaatgggagagacaccgccctgatggtcacaagagtggtcaaccacaggagattcagtgcaacggtgtcagttgcagacacagcacagaggtcggtctctaagtacaggtgcgttatccgttcagatggcgggagcggtgttagtaactacgccgagctcattgtaaaggagccgcccacaccaatcgcgccaccagagttgctggccgtgggggctacttacctgtggatcaagccaaatgctaatagcattattggagatggcccaattatactcaaggaggtcgagtataggactaccacaggcacttgggcagaaacacatatcgtcgactcacccaattacaagctgtggcatctagatccggacgtcgaatatgagattcgggttctgttgacgcggccgggtgaggggggcaccggccccccagggccaccactaactaccaggaccaaatgcgccgaccccgttcatggtcctcagaatgttgaaatcgtggatataagggccagacagttaaccctccagtgggagccattcggatatgcggtaaccagatgccactcttataacctgacggttcaataccagtacgtatttaaccaacaacagtacgaggctgaagaagtgattcaaacctctagtcactatactcttcgggggctacggccctttatgaccatccgcctgcggctgctacttagcaatcctgaaggtcgtatggagtccgaggagctagtggtgcagacggaggaggatgttccaggagcggtccccttggagtcaatccagggtgggccatttgaagaaaaaatttacattcaatggaagcctcctaatgagactaacggggtgatcacactgtacgaaattaattataaggcagtgggttccttagacccgtcagcagatttgtcgtcccaaagggggaaagtttttaagctgcgcaatgagacgcatcacctgttcgttggtctatatccggggacaacatactcatttactattaaggcctccacagctaaaggattcgggcctcccgtaaccaccaggattgcaaccaagatctccgcgccaagcatgcccgaatatgacacagacactccccttaacgagaccgataccactatcaccgtgatgctcaagccagcacagtcacggggagctcccgtgagcgtttatcaattagtagttaaagaagagagactgcagaaatccagaagagctgccgatataattgagtgtttttccgttccggtctcgtatcgcaacgcatcatcgctggattctctgcactacttcgccgccgagttaaagcccgccaaccttccagtgactcagccattcaccgtgggtgataataagacttacaatggctattggaatccccctctctcaccactgaaatcctactcaatatacttccaggctctctctaaagccaatggagaaactaagatcaattgcgtgaggctcgccaccaaggctcccatgggtagcgcacaggtgacacccgggacccctctgtgcctgcttactacaggcgccagtactcagaatagtaatactgtggagcctgagaagcaagttgacaataccgtgaagatggctggggtgatcgctggcttactgatgttcataataatcctcctaggggtcatgctgacgatcaaacgcagaaggaacgcgtactcatactcttattatctgtcccaaagaaaattggcaaagaagcaaaaggagactcagtccggagcccagagagagatgggccccgtggcttccgccgataagcctactacaaagctgagcgcctctaggaatgatgaaggattctccagtagttcgcaggatgttaatggatttactgatggcagccgaggtgaattaagccaacctaccttgacaatacagacccatccttatcgtacctgcgaccccgtggagatgagctaccctagagaccagttccagcccgccattagggtggccgacttgctccagcacataacacaaatgaaacgcggccaaggatacggcttcaaggaggagtatgaagcactgccagagggccaaaccgcatcctgggataccgcgaaagaagatgaaaaccggaacaagaatcggtacggtaacattatcagctatgaccattcacgggtgcgccttctagtgctcgacggcgaccctcattccgattacatcaacgctaattacatagatgggtatcacaggccaagacactacatcgctacacagggtcctatgcaggaaactgtgaaagatttctggcgaatgatttggcaggagaatagcgccagcatcgttatggtcaccaacctcgtggaagtgggacgcgtgaaatgcgtgcgctactggcctgacgatacagaggtttacggagatattaaggtgacccttattgagacagaacccctcgctgaatacgtgatcaggacgttcaccgtgcagaagaaggggtaccatgagattagagaactccggctgttccattttacctcctggcccgatcacggggtcccctgttacgcaacagggttgctaggctttgtgagacaggtgaagttcctcaacccccccgaagccggaccaatcgtggtgcattgctccgctggagcagggcggacgggatgttttattgctatcgacactatgttagacatggcggagaatgagggcgtggtagatatatttaactgcgtgagggagttaagggcacagcgcgtgaacctggtccaaacggaggagcagtacgtcttcgtgcacgacgccatcctcgaggcctgcctatgcggcaatactgccattcctgtgtgtgaatttcggtctttgtattacaacatcagtcgcttagatcctcagactaactcttcccagatcaaagacgagtttcagacgctgaatatcgtcactccaagagtgcgccctgaagactgtagcattggcctgttgcctagaaatcacgacaaaaatcggtccatggacgtgcttccactggatcgatgcctgccattcctgattagcgttgacggggagagttcaaactatattaacgcagccctaatggacagccacaaacagcctgctgcatttgtagtgactcagcatcccctgccaaataccgtcgctgacttctggagattagttttcgattacaattgctcgtctgtggtcatgttgaatgagatggatacagctcagttttgcatgcagtactggccagagaaaacaagcggctgttacggcccaatccaggtagaattcgtctctgctgacatcgatgaggatatcattcatcgtatcttccggatctgtaacatggctagaccacaggacgggtatagaattgtgcaacacctccagtacattggctggcccgcttacagggatactcccccaagcaaaagatcccttctgaaagtggtgaggcggctggagaagtggcaggaacagtacgacggccgtgagggccggacagttgtccattgcctgaacggcggagggcgcagcgggacattttgcgcaatatgcagcgtgtgcgaaatgattcaacagcagaacataattgatgtgtttcacatcgtcaaaactttacgcaacaataagagcaacatggtcgaaacactggagcagtataagtttgtatatgaagtcgccttggaatatctgtccagtttttag

SEQ ID NO: 234489 - DNA, 4353 bp, Artificial Sequence
  derived and/or modified sequence
atggccagcctggccgccctggccctgagcctgctgctgcggctgcagctgccccccctgcccggggcccgggcccagagcgctgctgggggctgcagctttgatgagcactacagcaactgtggctacagcgtggccctgggcaccaacggcttcacctgggagcagatcaacacctgggagaagcccatgctggaccaggccgtgcccaccggcagcttcatgatggtgaacagcagcggccgggccagcggccagaaggcccacctgctgctgcccaccctgaaggaaaatgacacccactgcatcgacttccactactacttcagcagccgggacaggagcagccctggggccctgaatgtgtatgtgaaggtgaatggaggcccccagggcaaccctgtgtggaatgtgtctggagtggtgacagagggctgggtgaaggccgagctggccatcagcaccttctggccccacttctaccaggtgatctttgaatctgtgtccctgaagggccaccctggctacatcgctgtggatgaggtgcgggtgctggcccacccctgcaggaaggccccccacttcctgcggctgcagaatgtggaggtgaatgtgggccagaatgccaccttccagtgcatcgccggcggcaagtggagccagcacgacaagctgtggctgcagcagtggaatggccgggacacagccctgatggtgaccagggtggtgaaccaccggcgcttcagcgccaccgtgtctgtggccgacacagcccagaggtctgtgtccaagtaccgctgtgtgatccgcagtgatggcggcagcggcgtgagcaactatgcagagctgattgtgaaggagccccccacccccatcgcccctcctgagctgctggccgtgggcgccacctacctgtggatcaagcccaatgccaacagcatcattggagatggccccatcatcctgaaggaggtggagtaccgcaccaccaccggcacctgggccgagacccacatcgtggacagccccaactacaagctgtggcacctggaccctgatgtggagtatgagatccgggtgctgctgaccaggcctggagagggcggcaccggccccccaggcccccccctgaccaccaggaccaagtgtgccgaccctgtgcacggcccccagaatgtggagatcgtggacatccgggcccggcagctgaccctgcagtgggagcccttcggctatgctgtgacccgctgccacagctacaacctgactgtgcagtaccagtatgtgttcaaccagcagcagtatgaagctgaggaggtgatccagaccagcagccactacaccctgcggggcctgcggcccttcatgaccatccggctgcggctgctgctgagcaaccctgagggccgcatggagagcgaggagctggtggtgcagacagaggaggatgtgcctggagctgtgcccctggagagcatccagggcggcccctttgaggagaagatctacatccagtggaagcccccaaatgagaccaatggagtcatcaccctgtatgagatcaactacaaggctgtgggcagcctggaccccagcgctgacctgagcagccagaggggcaaggtgttcaagctgagaaatgagacccaccacctgtttgtgggcctgtacccaggcaccacctacagcttcaccatcaaggccagcacagccaagggcttcggcccccctgtgaccacccgcatcgccaccaagatcagcgcccccagcatgccagaatatgacacagacacccccctgaatgaaacagacaccaccatcaccgtgatgctgaagccagcccagagcagaggagcccctgtgtctgtgtaccagctggtggtgaaggaggagcggctgcagaagagcagaagagctgctgacatcatcgagtgcttctctgtgcctgtgtcctacagaaatgccagcagcctggacagcctgcactactttgctgctgagctgaagccagccaacctgcctgtgacccagcccttcaccgtgggggacaacaagacctacaacggctactggaacccccccctgagccccctgaagagctacagcatctacttccaggccctgagcaaggccaacggggagaccaagatcaactgtgtgcggctggccaccaaggcccccatgggcagcgcccaggtgaccccaggcacccccctgtgcctgctgaccaccggggccagcacccagaacagcaacacagtggagcctgagaagcaggtggacaacacagtgaagatggccggcgtgattgctggcctgctgatgttcatcatcatcctgctgggcgtgatgctgaccatcaagaggaggaagctggccaagaagcagaaggagacccagagcggggcccagcgggagatgggccctgtggccagcgctgacaagcccaccaccaagctgagcgccagcagaaatgatgagggcttcagcagcagcagccaggatgtgaatggcttcacagatggcagcagaggagagctgagccagcccaccctgaccatccagacccacccctaccgcacctgtgaccctgtggagatgagctacccccgggaccagttccagcctgccatccgggtggccgacctgctgcagcacatcacccagatgaagaggggccagggctacggcttcaaggaggagtatgaggccctgcctgagggccagacagcctcctgggacacagccaaggaggatgagaacagaaacaagaacagatatggcaacatcatctcctatgaccacagccgggtgcggctgctggtgctggatggagacccccacagcgactacatcaatgccaactacattgatggctaccaccggcccaggcactacatcgccacccagggccccatgcaggagaccgtgaaggacttctggaggatgatctggcaggagaacagcgccagcatcgtgatggtgaccaacctggtggaggtgggccgggtgaagtgtgtgcgctactggccagatgacacagaggtgtatggagacatcaaggtgaccctgattgaaacagagcccctggccgagtatgtgatccgcaccttcaccgtgcagaagaagggctaccacgagatccgggagctgcggctcttccacttcacctcctggccagaccacggcgtgccctgctacgccaccggcctgctgggctttgtgcggcaggtgaagttcctgaaccccccagaggccggccccatcgtggtgcactgcagcgctggagctggccgcacaggctgcttcatcgccatcgacaccatgctggacatggccgagaatgaaggagtggtggacatcttcaactgtgtgcgggagctgcgggcccagagggtgaacctggtgcagacagaggagcagtatgtgtttgtgcatgatgccatcctggaggcctgcctgtgtggcaacacagccatccctgtgtgtgagttccgcagcctgtactacaacatcagccggctggacccccagaccaacagcagccagatcaaggatgagttccagaccctgaacatcgtgaccccccgggtgcggcctgaggactgcagcatcggcctgctgcccaggaaccacgacaagaacagatccatggatgtgctgcccctggaccgctgcctgcccttcctgatctctgtggatggagagagcagcaactacatcaatgctgccctgatggacagccacaagcagcctgctgcctttgtggtgacccagcaccccctgcccaacacagtggccgacttctggaggctggtgtttgactacaactgcagctctgtggtgatgctgaatgagatggacacagcccagttctgcatgcagtactggccagagaagaccagcggctgctacggccccatccaggtggagtttgtgtctgctgacattgatgaggacatcatccaccgcatcttccgcatctgcaacatggcccggccccaggacggctaccgcatcgtgcagcacctgcagtacatcggctggccagcctacagagacaccccacccagcaagaggagcctgctgaaggtggtgcggcggctggagaagtggcaggagcagtatgatggccgggagggccgcacagtggtgcactgcctgaatggaggcggccgcagcggcaccttctgtgccatctgcagcgtgtgtgagatgatccagcagcagaacatcattgatgtgttccacatcgtgaagaccctgaggaacaacaagagcaacatggtggagaccctggagcagtacaagtttgtgtatgaggtggccctggagtacctgagcagcttctag

SEQ ID NO: 234490 - DNA, 4392 bp, Artificial Sequence
  derived and/or modified sequence
atggccagcctggccgccctggccctgagcctgctgctgcggctgcagctgccccccctgcccggggcccgggcccagagcgctgctgggggctgcagctttgatgagcactacagcaactgtggctacagcgtggccctgggcaccaacggcttcacctgggagcagatcaacacctgggagaagcccatgctggaccaggccgtgcccaccggcagcttcatgatggtgaacagcagcggccgggccagcggccagaaggcccacctgctgctgcccaccctgaaggaaaatgacacccactgcatcgacttccactactacttcagcagccgggacaggagcagccctggggccctgaatgtgtatgtgaaggtgaatggaggcccccagggcaaccctgtgtggaatgtgtctggagtggtgacagagggctgggtgaaggccgagctggccatcagcaccttctggccccacttctaccaggtgatctttgaatctgtgtccctgaagggccaccctggctacatcgctgtggatgaggtgcgggtgctggcccacccctgcaggaaggccccccacttcctgcggctgcagaatgtggaggtgaatgtgggccagaatgccaccttccagtgcatcgccggcggcaagtggagccagcacgacaagctgtggctgcagcagtggaatggccgggacacagccctgatggtgaccagggtggtgaaccaccggcgcttcagcgccaccgtgtctgtggccgacacagcccagaggtctgtgtccaagtaccgctgtgtgatccgcagtgatggcggcagcggcgtgagcaactatgcagagctgattgtgaaggagccccccacccccatcgcccctcctgagctgctggccgtgggcgccacctacctgtggatcaagcccaatgccaacagcatcattggagatggccccatcatcctgaaggaggtggagtaccgcaccaccaccggcacctgggccgagacccacatcgtggacagccccaactacaagctgtggcacctggaccctgatgtggagtatgagatccgggtgctgctgaccaggcctggagagggcggcaccggccccccaggcccccccctgaccaccaggaccaagtgtgccgaccctgtgcacggcccccagaatgtggagatcgtggacatccgggcccggcagctgaccctgcagtgggagcccttcggctatgctgtgacccgctgccacagctacaacctgactgtgcagtaccagtatgtgttcaaccagcagcagtatgaagctgaggaggtgatccagaccagcagccactacaccctgcggggcctgcggcccttcatgaccatccggctgcggctgctgctgagcaaccctgagggccgcatggagagcgaggagctggtggtgcagacagaggaggatgtgcctggagctgtgcccctggagagcatccagggcggcccctttgaggagaagatctacatccagtggaagcccccaaatgagaccaatggagtcatcaccctgtatgagatcaactacaaggctgtgggcagcctggaccccagcgctgacctgagcagccagaggggcaaggtgttcaagctgagaaatgagacccaccacctgtttgtgggcctgtacccaggcaccacctacagcttcaccatcaaggccagcacagccaagggcttcggcccccctgtgaccacccgcatcgccaccaagatcagcgcccccagcatgccagaatatgacacagacacccccctgaatgaaacagacaccaccatcaccgtgatgctgaagccagcccagagcagaggagcccctgtgtctgtgtaccagctggtggtgaaggaggagcggctgcagaagagcagaagagctgctgacatcatcgagtgcttctctgtgcctgtgtcctacagaaatgccagcagcctggacagcctgcactactttgctgctgagctgaagccagccaacctgcctgtgacccagcccttcaccgtgggggacaacaagacctacaacggctactggaacccccccctgagccccctgaagagctacagcatctacttccaggccctgagcaaggccaacggggagaccaagatcaactgtgtgcggctggccaccaaggcccccatgggcagcgcccaggtgaccccaggcacccccctgtgcctgctgaccaccggggccagcacccagaacagcaacacagtggagcctgagaagcaggtggacaacacagtgaagatggccggcgtgattgctggcctgctgatgttcatcatcatcctgctgggcgtgatgctgaccatcaagagaagaagaaatgcctacagctacagctactacctgagccagaggaagctggccaagaagcagaaggagacccagagcggggcccagcgggagatgggccctgtggccagcgctgacaagcccaccaccaagctgagcgccagcagaaatgatgagggcttcagcagcagcagccaggatgtgaatggcttcacagatggcagcagaggagagctgagccagcccaccctgaccatccagacccacccctaccgcacctgtgaccctgtggagatgagctacccccgggaccagttccagcctgccatccgggtggccgacctgctgcagcacatcacccagatgaagaggggccagggctacggcttcaaggaggagtatgaggccctgcctgagggccagacagcctcctgggacacagccaaggaggatgaaaatagaaacaagaacagatatggcaacatcatctcctatgaccacagccgggtgcggctgctggtgctggatggagacccccacagcgactacatcaatgccaactacattgatggctaccaccggcccaggcactacatcgccacccagggccccatgcaggagaccgtgaaggacttctggaggatgatctggcaggagaacagcgccagcatcgtgatggtgaccaacctggtggaggtgggccgggtgaagtgtgtgcgctactggccagatgacacagaggtgtatggagacatcaaggtgaccctcatcgagacagagcccctggccgagtatgtgatccgcaccttcaccgtgcagaagaagggctaccacgagatccgggagctgcggctcttccacttcacctcctggccagaccatggagtgccctgctacgccaccggcctgctgggctttgtgcggcaggtgaagttcctgaaccccccagaggccggccccatcgtggtgcactgcagcgctggggccggccgcacaggctgcttcatcgccatcgacaccatgctggacatggctgaaaatgaaggagtggtggacatcttcaactgtgtgcgggagctgcgggcccagagggtgaacctggtgcagacagaggagcagtatgtgtttgtgcatgatgccatcctggaggcctgcctgtgtggcaacacagccatccctgtgtgtgagttccgcagcctgtactacaacatcagccggctggacccccagaccaacagcagccagatcaaggatgagttccagaccctgaacatcgtgaccccccgggtgcggcctgaggactgcagcatcggcctgctgcccagaaatcatgacaagaacagatccatggatgtgctgcccctggaccgctgcctgcccttcctgatctctgtggatggagagagcagcaactacatcaatgctgccctgatggacagccacaagcagcctgctgcctttgtggtgacccagcaccccctgcccaacacagtggccgacttctggaggctggtgtttgactacaactgcagctctgtggtgatgctgaatgagatggacacagcccagttctgcatgcagtactggccagagaagaccagcggctgctacggccccatccaggtggagtttgtgtctgctgacattgatgaggacatcatccaccgcatcttccgcatctgcaacatggcccggccccaggacggctacagaattgtgcagcacctgcagtacatcggctggccagcctacagagacaccccacccagcaagaggagcctgctgaaggtggtgcggcggctggagaagtggcaggagcagtatgatggccgggagggccgcacagtggtgcactgcctgaatggaggcggccgcagcggcaccttctgtgccatctgcagcgtgtgtgagatgatccagcagcagaacatcattgatgtgttccacatcgtgaagaccctgaggaacaacaagagcaacatggtggagaccctggagcagtacaagtttgtgtatgaggtggccctggagtacctgagcagcttctag

SEQ ID NO: 234491 - DNA, 4353 bp, Artificial Sequence
  derived and/or modified sequence
atggccagcctggccgccctggccctgagcctgctgctgcggctgcaattaccacccctccccggagctcgcgcccagtctgccgcgggcggttgcagttttgacgagcactattctaattgcggatactccgtggcactgggaacaaatggattcacctgggagcagatcaatacctgggaaaaaccaatgctcgatcaggcagtccccaccggatcctttatgatggttaacagcagcggacgggcaagtggacagaaggcccacttgctgctgcctacactaaaagagaatgatactcattgcatagacttccattattacttctcaagccgcgacaggtcttccccaggcgccctgaatgtttacgttaaggtgaacggtggtccccaagggaatcccgtatggaacgttagcggcgtggtaacggaagggtgggtcaaggcagagctggccatcagcaccttctggccccacttttatcaggtaattttcgaaagcgtgtccttaaagggtcaccccggctatattgcagtagatgaggtgcgcgttctagcccacccctgcaggaaggcaccacattttttacgcctacaaaacgtggaggtcaacgtcggccagaacgccactttccagtgtattgcaggtgggaagtggtcacagcacgacaaactgtggttacagcaatggaatgggagggacaccgccctgatggtgacgagggttgttaaccatcgaaggttttccgcgacagtctctgttgccgacaccgcacagagaagcgtttcaaagtaccggtgtgtgattagatcagatgggggatcaggtgtcagcaactacgccgaactcattgtgaaagagccgccgacgcccatcgcgccccccgaactgctcgcagtcggcgcgacttatctgtggattaagccgaatgccaattcaattatcggggacggccccattatcctcaaagaagtggagtaccgaacaactactgggacgtgggcagagacacatattgtggacagccctaactacaagctgtggcacctagatcccgacgtcgaatacgagattagggtgctgttgactcgtccaggagagggaggcactgggccgccaggacctccgctcacaaccaggactaagtgtgccgatcccgtacacggcccgcagaatgtagaaattgtggacatacgggccaggcaactgacactccagtgggagcctttcggctatgcagtgacgaggtgccactcctataatctaacagtccagtatcagtacgtgttcaaccagcaacagtacgaggctgaggaggtgattcagacgtcttcgcattatactctacgcggtttaaggccttttatgaccatcaggctgagactgctgttgtcaaaccctgaaggacgaatggagagcgaggagctggtcgtccagacagaggaggacgtaccaggcgctgtgccgcttgagagcatccagggcggacctttcgaggagaagatctacatccagtggaaacctccaaatgagaccaacggggtgatcaccctgtacgagattaattacaaggctgtagggtccctggacccgtctgccgatctgagctcccaaaggggaaaagtgttcaaactccggaatgagacccaccacttgtttgttggcttgtaccccggaacgacatattccttcaccatcaaggccagcaccgccaaaggatttggtccccccgtgactaccagaatcgcaacaaaaatatctgccccctcaatgccagaatacgacactgacacccctcttaatgagactgacaccacaatcactgtgatgcttaagcctgcccagtcccgtggcgcccccgtctctgtttatcagcttgtggtgaaggaagagaggctccaaaaatcccgcagagctgccgacatcatcgagtgtttcagtgtcccggtctcttaccggaatgcctcaagcctggactcgctgcattatttcgccgctgagctgaagcccgcgaatttgcccgtcactcagccctttactgttggtgacaacaagacatacaacggatactggaatcccccactgtccccattgaagtcctattccatttatttccaggccctttcaaaggcaaatggcgagaccaaaattaattgtgtgcggctggccacaaaggctccgatggggtcagctcaggtgactccaggcacgcctctctgcctgcttactacaggagctagcacgcagaactccaacacagtcgagcctgagaagcaggtggacaacactgtgaagatggctggagttatagctggtcttcttatgtttatcattatcctattaggtgtgatgctgacaattaaaagacgtaagcttgccaaaaagcagaaagagacgcagtcaggggcccagagagagatgggccctgtcgcctcagccgataagcctactacaaagctttctgccagtaggaacgacgaggggttcagctcgtcttcccaggacgtgaatggcttcaccgacggcagccgcggtgagttaagccaacctaccctcaccattcaaacacatccctatcggacttgtgacccagttgagatgagttacccaagagatcagttccagcccgctatacgggtcgccgacctgcttcaacacattacccaaatgaagcgggggcaagggtacggcttcaaagaagaatacgaggctctccccgagggacagactgcctcgtgggacaccgcaaaggaagatgagaacagaaataagaaccggtacgggaatatcatcagctacgaccatagccgggtgcgtctcctggtgctggatggtgacccccactctgattacattaacgccaattacatagatggttaccacagacctagacactacatcgctacacagggcccaatgcaggaaactgttaaggatttctggcggatgatctggcaggaaaactctgcttccatcgtcatggtgaccaatctggtcgaggtcggcagggtaaaatgcgtcagatactggcccgacgacactgaggtgtacggagacatcaaagtaactctgatcgagactgagccgttagcagagtacgtaatccgcacattcactgtgcagaaaaaaggctatcacgaaatacgggaactaagactgttccatttcactagctggcccgatcatggagtcccctgctatgccaccggactgcttgggtttgttcgacaggtgaaatttctgaaccctccagaagccgggcccatcgtggtgcactgctcagccggggcaggccggaccggatgctttatcgcgatagataccatgctggacatggccgaaaatgaaggagtcgtcgacattttcaattgcgtgagagaattacgtgctcagagggtgaacttggtccagacagaagaacaatatgtgttcgtgcacgacgcgatccttgaggcttgtctatgcggtaacacagctatcccagtgtgtgagtttcggtcgctctattacaacatttctaggttggaccctcagacgaattcatcacagattaaggacgagttccagactttgaacattgtcacaccgagagtgagacctgaggattgcagtatcgggctcctgccaaggaaccatgataaaaacagatctatggatgtgctgcccctagacagatgcctgccattcctgatttctgtggatggcgaaagctccaactatattaacgccgcgctgatggatagccacaaacaaccagccgctttcgtagtaacacagcaccctcttcctaacaccgtggcggacttttggcgtcttgtctttgattacaattgttcaagtgtagtcatgctaaacgagatggacacagcgcaattctgcatgcagtactggccagagaaaacctcaggctgctatgggccaattcaggtagaatttgtgtctgctgatattgatgaggacatcattcaccggatatttaggatctgtaacatggcccgcccccaggatggttataggattgttcaacacctccagtatatcggttggcccgcctatcgcgacacaccaccctctaaacggtccctcctcaaagtggtgaggagactggagaaatggcaggagcagtatgatggcagagaaggccgtacggtcgtgcactgtctgaacgggggcggacggagcggcacattttgcgccatttgcagcgtgtgcgagatgatacagcagcagaatattatcgatgtgttccacatagttaagacattgcgcaataataagtcaaatatggtggagactctggaacaatataaatttgtttacgaagtcgctctggaataccttagctccttttag

SEQ ID NO: 234492 - DNA, 4392 bp, Artificial Sequence
  derived and/or modified sequence
atggccagcctggccgccctggccctgagcctgctgctgcggctgcagctccctcccctgcccggggcgagggctcaaagcgctgctgggggctgtagttttgatgagcactattccaattgcggctatagcgtggctctgggaactaatggcttcacttgggaacagattaatacgtgggaaaaaccaatgctggaccaggcggtacccacagggtctttcatgatggtgaattcctccgggagggctagcggccagaaggctcatctgttactgcccactctgaaagagaatgacacccactgcattgacttccactactattttagttctcgagaccggagtagccccggcgctctgaacgtctacgtcaaagtgaacgggggcccgcagggtaatccagtttggaacgtgtccggcgtggtcaccgagggatgggtgaaggccgaactcgcaattagcacgttctggccgcacttttaccaggtgatttttgaatctgtttcgctgaaaggccacccaggttacattgccgttgacgaggtgcgtgttctcgcccatccctgccgcaaggccccacattttcttaggttgcagaacgtggaagtgaatgtagggcagaacgccaccttccagtgcattgctggtggaaagtggtcgcagcacgataaactatggcttcagcagtggaacgggcgcgatactgcccttatggtcacgcgagtcgtgaaccatcgaaggttctctgccaccgtgtctgtcgccgacacggcacagaggtcggtgagcaaataccgctgcgtaattagaagcgatggagggtcaggagtgtctaattatgctgaactcatcgtgaaggagcctccgaccccaatcgcccctcccgagctgcttgccgtaggtgctacttacctgtggatcaaaccaaatgctaattcaatcataggagacggccccattatccttaaggaggtggaatatcggacaaccaccgggacatgggctgagacacatatcgtggactcccctaattacaaactctggcatctggacccagatgtagagtatgagattcgggtcctgctcacccgccctggggaaggcggtaccggaccacctggaccccctttaacaacacgcactaagtgcgcagatccagtccatggcccgcaaaatgtcgaaatcgtcgatatacgggcacggcagcttaccttacagtgggagcccttcggatacgcagttacaaggtgccacagttacaatttgactgtgcaataccaatacgtctttaatcagcagcaatacgaggcagaggaggtaatccagacgagctctcactatacattgcgcggtctgcggccgttcatgaccatccgtcttcggctccttctgagtaaccccgagggccgtatggaatctgaggaactagttgttcagacagaagaggatgtgccaggggctgtcccacttgaatcaatacaggggggccctttcgaggagaagatttatattcaatggaaaccccctaacgagactaatggagtcatcacactgtacgaaataaattacaaagctgttggatccctggatccctccgccgacctgagcagccagcggggcaaggtgtttaagttacgtaatgagactcatcatctgttcgtcgggttgtacccgggtaccacttacagtttcacaatcaaggcttccacagcaaagggcttcggaccccccgtgacaactcggatcgcaaccaaaatctcagcaccctctatgccagaatacgacaccgatacacccctgaacgagactgataccacaattaccgtgatgctcaagccggcccagtcccgtggtgcgccagtctccgtgtaccagctggtcgtcaaggaagaaaggttgcagaaatcccgccgtgcagccgacatcattgagtgctttagtgtgccagtgagctacaggaacgcctcttccctggactctctgcactatttcgccgcagagctgaagccagccaacctgcctgtgacccaacctttcaccgtgggagacaataaaacctacaacgggtattggaacccccccctcagtcctctgaagtcctactccatttatttccaagctctatctaaggccaacggggagaccaagattaactgcgtccggctggccaccaaagcccctatgggctccgctcaagtcacccctggaaccccgctgtgcctattaacgaccggcgccagcactcaaaattctaacactgtagagcctgagaaacaggttgacaacactgtcaagatggctggggtgattgcgggattgcttatgttcatcatcatcctccttggcgtgatgcttaccatcaagcggaggcgtaatgcttattcatattcgtattatcttagccagcgtaagctggccaaaaagcaaaaggagacccaaagcggtgcacagcgtgagatgggccccgtcgcttcagcagacaaacctacaacaaaattaagcgcctcacggaatgacgaagggtttagctcgagttcccaggacgtgaacggctttaccgatggctcccggggggagttgagtcagcctaccttgaccatccagactcacccctatagaacttgtgatcccgtggagatgagttatccacgggatcagttccagccagctatacgagtggccgatctgctccagcacataacccagatgaagaggggccaagggtacggcttcaaagaggagtacgaagcactccctgagggccagacagcttcttgggacactgcaaaggaagacgagaaccggaataaaaacaggtatggtaacatcatcagctatgatcactcaagagtgcgtctgctggtactcgacggcgacccacactccgactatattaacgcgaactatattgacggttaccaccggcccagacactacatcgcgacccagggcccaatgcaagaaacagtgaaagacttctggaggatgatctggcaggagaattcagccagcattgtcatggtcacaaatctggtggaagtcggacgggtcaaatgcgtgagatactggcccgatgatactgaggtgtacggtgacatcaaggtcactctgatcgagactgaacccctggccgagtatgtcattaggacttttacagtgcagaagaagggataccatgagatacgcgaactgagactgtttcattttacctcatggcccgatcatggcgtcccctgctacgccactggcttactaggctttgtgagacaggtgaaatttctgaatcctcctgaagcaggccccatcgtggtgcattgctccgccggcgcaggccggacaggatgctttatcgccatcgatactatgctcgatatggccgagaatgagggcgtggtggatatcttcaactgtgtccgggagctcagagcccaacgagtgaatctcgtccagaccgaagagcaatatgttttcgttcatgacgctatactcgaggcttgcctttgcggaaacaccgccattcccgtttgcgagttcagatccctgtactacaacatttcgcgcttggatccacagaccaacagtagccagataaaggatgaatttcaaacgcttaacatcgtgactccccgcgtgcggccggaggattgctcaatcggcctgttgccccgcaatcatgacaagaatcggagtatggacgtccttcctctcgatcgatgtctcccatttctaatcagtgtggacggggagagtagtaactatattaacgcagctctgatggattctcacaaacagcccgcagcctttgtcgtgacccagcatcccttgcctaacacagtggctgacttctggagattagtgttcgactacaactgttcatcggtggtcatgctgaacgagatggatacagcccagttttgtatgcagtattggcccgaaaaaacttccgggtgctatggtcccattcaagtggagttcgtgagcgctgacattgacgaagacattatccaccgtatttttaggatctgtaatatggctagacctcaggacggctacagaatagtgcagcatttgcagtacatcggatggcctgcataccgcgatacccctcctagcaaaaggagcttattgaaggtcgttaggcgcctggaaaaatggcaagaacagtatgacggcagagagggccggacggtcgtccactgcttgaacgggggaggtcgctcggggactttttgcgcgatctgctccgtgtgcgagatgattcagcagcagaacattatcgatgtgtttcatatcgtcaaaaccctcaggaataacaaaagtaatatggtggagacgctcgagcagtataagtttgtgtatgaggtagcccttgagtacctgagttcattctag

SEQ ID NO: 234493 - DNA, 12480 bp, Artificial Sequence
  derived and/or modified sequence
atggcgagcctcgccgcgctcgccctcagcctgctcctgaggctgcagctgccgccactgcccggcgcccgggctcagagcgccgcaggtggctgttcctttgatgagcactacagcaactgtggttatagtgtggctctagggaccaatgggttcacctgggagcagattaacacatgggagaaaccaatgctggaccaggcagtgcccacaggatctttcatgatggtgaacagctctgggagagcctctggccagaaggcccaccttctcctgccaaccctgaaggagaatgacacccactgcatcgacttccattactacttctccagccgtgacaggtccagcccaggggccttgaacgtctacgtgaaggtgaatggtggcccccaagggaaccctgtgtggaatgtgtccggggtcgtcactgagggctgggtgaaggcagagctcgccatcagcactttctggccacatttctatcaggtgatatttgaatccgtctcattgaagggtcatcctggctacatcgccgtggacgaggtccgggtccttgctcatccatgcagaaaagcacctcattttctgcgactccaaaacgtggaggtgaatgtggggcagaatgccacatttcagtgcattgctggtgggaagtggtctcagcatgacaagctttggctccagcaatggaatggcagggacacggccctgatggtcacccgtgtggtcaaccacaggcgcttctcagccacagtcagtgtggcagacactgcccagcggagcgtcagcaagtaccgctgtgtgatccgctctgatggtgggtctggtgtgtccaactacgcggagctgatcgtgaaagagcctcccacgcccattgctcccccagagctgctggctgtgggggccacatacctgtggatcaagccaaatgccaactccatcatcggggatggccccatcatcctgaaggaagtggaatatcgcaccaccacaggcacgtgggcagagacccacatagtcgactctcccaactataagctgtggcatctggaccccgatgttgagtatgagatccgagtgctcctcacacgaccaggtgaggggggtacgggaccgccagggcctcccctcaccaccaggaccaagtgtgcagatccggtacatggcccacagaacgtggaaatcgtagacatcagagcccggcagctgaccctgcagtgggagcccttcggctacgcggtgacccgctgccatagctacaacctcaccgtgcagtaccagtatgtgttcaaccagcagcagtacgaggccgaggaggtcatccagacctcctcccactacaccctgcgaggcctgcgccccttcatgaccatccggctgcgactcttgctgtctaaccccgagggccgaatggagagcgaggagctggtggtgcagactgaggaagacgttccaggagctgttcctctagaatccatccaaggggggccctttgaggagaagatctacatccagtggaaacctcccaatgagaccaatggggtcatcacgctctacgagatcaactacaaggctgtcggctcgctggacccaagtgctgacctctcgagccagagggggaaagtgttcaagctccggaatgaaacccaccacctctttgtgggtctgtacccagggaccacctattccttcaccatcaaggccagcacagcaaagggctttgggccccctgtcaccactcggattgccaccaaaatttcagctccatccatgcctgagtacgacacagacaccccattgaatgagacagacacgaccatcacagtgatgctgaaacccgctcagtcccggggagctcctgtcagtgtttatcagctggttgtcaaggaggagcgacttcagaagtcacggagggcagctgacattattgagtgcttttcggtgcccgtgagctatcggaatgcctccagcctcgattctctacactactttgctgctgagttgaagcctgccaacctgcctgtcacccagccatttacagtgggtgacaataagacatacaatggctactggaaccctcctctctctcccctgaaaagctacagcatctacttccaggcactcagcaaagccaatggagagaccaaaatcaactgtgttcgtctggctacaaaagcaccaatgggcagcgcccaggtgaccccggggactccactctgcctcctcaccacaggtgcctccacccagaattctaacactgtggagccagagaagcaggtggacaacaccgtgaagatggctggcgtgatcgctggcctcctcatgttcatcatcattctcctgggcgtgatgctcaccatcaaaaggaggaagctggccaagaagcagaaggagacccagagtggagcccagagggagatggggcctgtggcctctgccgacaaacccaccaccaagctcagcgccagccgcaatgatgaaggcttctcttctagttctcaggacgtcaacggattcacagatggcagccgcggggagctttcccagcccaccctcacgatccagactcatccctaccgcacctgtgaccctgtggagatgagctacccccgggaccagttccaacccgccatccgggtggctgacttgctgcagcacatcacgcagatgaagagaggccagggctacgggttcaaggaggaatacgaggccttaccagaggggcagacagcttcgtgggacacagccaaggaggatgaaaaccgcaataagaatcgatatgggaacatcatatcctacgaccattcccgggtgaggctgctggtgctggatggagacccgcactctgactacatcaatgccaactacattgacggataccatcgacctcggcactacattgcgactcaaggtccgatgcaggagactgtaaaggacttttggagaatgatctggcaggagaactccgccagcatcgtcatggtcacaaacctggtggaagtgggcagggtgaaatgtgtgcgatactggccagatgacacggaggtctacggagacattaaagtcaccctgattgaaacagagcccctggcagaatacgtcatacgcaccttcacagtccagaagaaaggctaccatgagatccgggagctccgcctcttccacttcaccagctggcctgaccacggcgttccctgctatgccactggccttctgggcttcgtccgccaggtcaagttcctcaaccccccggaagctgggcccatagtggtccactgcagtgctggggctgggcggactggctgcttcattgccattgacaccatgcttgacatggccgagaatgaaggggtggtggacatcttcaactgcgtgcgtgagctccgggcccaaagggtcaacctggtacagacagaggagcaatatgtgtttgtgcacgatgccatcctggaagcgtgcctctgtggcaacactgccatccctgtgtgtgagttccgttctctctactacaatatcagcaggctggacccccagacaaactccagccaaatcaaagatgaatttcagaccctcaacattgtgacaccccgtgtgcggcccgaggactgcagcattgggctcctgccccggaaccatgataagaatcgaagtatggacgtgctgcctctggaccgctgcctgcccttccttatctcagtggacggagaatccagcaattacatcaacgcagcactgatggatagccacaagcagcctgccgccttcgtggtcacccagcaccctctacccaacaccgtggcagacttctggaggctggtgttcgattacaactgctcctctgtggtgatgctgaatgagatggacactgcccagttctgtatgcagtactggcctgagaagacctccgggtgctatgggcccatccaggtggagttcgtctccgcagacatcgacgaggacatcatccacagaatattccgcatctgtaacatggcccggccacaggatggttatcgtatagtccagcacctccagtacattggctggcctgcctaccgggacacgcccccctccaagcgctctctgctcaaagtggtccgacgactggagaagtggcaggagcagtatgacgggagggagggacgtactgtggtccactgcctaaatgggggaggccgtagtggaaccttctgtgccatctgcagtgtgtgtgagatgatccagcagcaaaacatcattgacgtgttccacatcgtgaaaacactgcgtaacaacaaatccaacatggtggagaccctggaacagtataaatttgtatacgaggtggcactggaatatttaagctccttttagctcaatgggatggggaacctgccggagtccagaggctgctgtgaccaagcccccttttgtgtgaatggcagtaactgggctcaggagctctgaggtggcaccctgcctgactccaaggagaagactggtggccctgtgttccacggggggctctgcaccttctgaggggtctcctgttgccgtgggagatgctgctccaaaaggcccaggcttccttttcaacctaaccagccacagccaagggcccaagcagaagtacacccacaagcaaggccttggatttctggctcccagaccacctgcttttgttctgagtttgtggatctcttggcaagccaactgtgcaggtgctggggagtgggaggctcccctgccctccttctccttaggagtggaggagatgtgtgttctgctcctctacgtcatggaaaagattgaggctcttgggggtcactgctctgctgccccctgcaacctccttcaggggcctctggcaccagacatttgcagtctggaccagtgtgaccttacgatgttccctaggccacaagagaggccccccatcctcacacctaacctgcatggggcttcgcccacaaccattctgtaccccttccccagcctgggccttgaccgtccagcattcactggccggccagctgtgtccacagcagtttttgataaaggtgttctttgcttttttgtgtggtcagtgggagggggtggaactgcagggaacttctctgctcctccttgtctttgtaaaaagggaccacctccctggggcagggcttgggctgacctgtaggatgtaacccctgtgtttctttggtggtagctttctttggaagagacaaacaagataagatttgattattttccaaagtgtatgtgaaaagaaactttcttttggagggtgtaaaatcttagtctcttatgtcaaaaagaagggggcgggggagtttgagtatgtacctctaagacaaatctctcgggccttttattttttcctggcaatgtccttaaaagctcccaccctgggacagcatgccactgagcaaggagagatgggtgagcctgaagatggtccctttggtttctggggcaaatagagcaccagctttgtgcataatttggatgtccaaatttgaactccttcctaaagaaacccagcagccaccttgaaaaaggccattgtggagcccattatactttgatttaaaataggccaagagaatcaggcctggagatctagggtcttgtccaaagtgtgagtgagtcaatgagagggaaccaacatttgctaagtctctactgtatgccagggatcatgcttggcactttccataggacatttcacacagtccttagaacccccaggagagagctactgacttgttatcatctccatttgatcatctcctccaatgaggaaacccacgcaccttccttagtaatgaaatcctgggttccaaaggggcaggtaatggcaatgagacttctccgtgctgttttcttcatcttctctaagccaagcaattattttatggagggaaaataaggccagaaacttctgagcagataactccacaaatggaaatttagtactttcttcctgatgccagttcttctgggaagcgcagaatttcagatatattttagtaacacattcccagctccccaggaaagccagtctcatctaatttcttagtcagtaaaaacaattccctgttccttcaggctatgaatggaccagccagggaaactctcgaccttgatctctagccagtgcttaggcccaatatctgacagcctcaggtgggctgggacctaggaagctccatcttgaaggctggtctagccccagacagggcatgaggggcagagaattcaagaaggtacagctttggccctcaagagcccactgtatgctggggaaatggaaccatggtgcagtagtgtggagtggatgagtgttccatgagcctaggagcaagaaagtctcttcggcctcgggcttcctggagaaggggacgtccattcctgctgggtcttaacaagcataaaaaggaaaaaaaggaaactcaggcaaagggatccatatgtgcaatggcaaagaaatgtgaaaaggcattgggagaagcagtctgggggaggccagcccagtgcgggcacagcacaacacggggagcagcaagagatgagccagggtccaggagacagatgcccatcgcgagtacagactttgtcctattggcaacaaggagtccatggagctttagagagatgcactcagcttcgtgttggccaagactccttctgggccaatggggctgcctcttttcctttcatcagacactgtgaaaacattcccttaagcgtgcactttttaatatcacatctatttgtctgtctgctcattgttttgttgctggaactaaatatgcaatggatcatgagactcagattctatgagaaacccagggtctctgctttaccacggagcagggtcaccaacccagatctccaggcccatgaggatggaacatgaaaggagccgacaaaagttgcttccattggcatgggctctggagctgtccagaagtccagggacaccagacttgatcaaggaagggctgtcactttagaggttcaaaaggaagtgcctcaaagcaaaggcaagcaaaggaaccccacgatgaacttgctcttttcctttgatgagcctctccccaggtgtatttcagcagaccccggggacccacccccactgggcctgctggcctccctcggctccagcccaatgccccagctggccttccccagcctgcaaggagcctgtagcatggcaaatctgcctgctgtatgctattttcttagatcttggtacatccagacaggatgagggtggagggagagctatttaacacaaatcctaagatttttttctgctcaggaaggggtgaaatagctggcagatacaaaagacagtggcttttatcattttaaatggtaggaatttaaggtgtgacttcagggagaaacaaacttgcaaaaaaaaaaaatctcaggccatgttggggtaacccagcaagggccagtgatgatttcccccagctcatccccttattttcccacaacccaaccattctctaaagcaggacagtgaataggtcttaggccagtgcacacaggaagaaattgaggcttatggatggggatgacttccctaagatcccatgggacaaggatgtggcaaggcttggatgagatggggcaccagtgcccaggaatttgaacattttcctttacccaggaaatctccggagccaacaccaccacccccagggggtctccccaccccaccccatttacagggtgagctcagcctgtcatgagcagaggaaaatattattaatgctctctgagtctttacaacaggagctcttacctcatagatgtgggctctgtttggggaagatgcaaggaagtaatgagaagcccaggaaatttctccacctgtgtttatggcctaaatagcttcaggatgtatcttagctgcactccaacattgcatcctttctggggtgaagaatctgggccaaccaggggtccttgggcctctagaaggccacagtaggcctctctttgtgggaatggaaggggacagtttgcttttagtgctggccctctctgtgggtgtggcctgcaaaggaaccaacagaccctatgctggggactctaacatgtgagctcattaaattcttccagcattctaaaggagggtttgtgattgtcaccatttactgatgaggaaactaaggctcctaggggagaaatcacttgcccacagttccacagctagtgagtgaatgaaccaggatttaaaccggttttttctcactacagagacaatatttttccaccattgtatctcacatttttcccaggaggttacccataacagaagagactagagtggaacagatacgtcagtggataaagctcaaagcaaacaacagtaagcttaaaattccttcatagtctcatgttttacgttcacaattcatgcaaaatttgcattccactttctgatttagccttgttggttttaatatgactctatgaatatttcaaaaaaaaatgtgctctgttcctcatgttgttctgttctgttcaccccgctatgacggaccctaggtcagctggtcttcagcttgaccctagaattgactctaggagcagtgaccctgctgcctcccagagccagttataggctcaagatcaagaccaactgaccttctcctaggcagctcctttggtgtgtgggtgctctgacctcactgttcatgaggggacctcaactaaggcatcttccagttgggtgctggaaggaacccattaactcacactagaatgatgaggatttgctcatctggcgtggagaaggatgagcccacaaaaccctaaagggaaaagagaagctggacacagctgtactcagcagattcctgaatgctaggctggaaagtggtgcctgttgtccaagtggagtcacatggttgctaatgtgggcaagtctgaggacacacttcatgagcagctggggtctggaaggctcctcactttaccctagccacacataattactgggtgcctacagcacctagcaccttggagggggcactattaggaaatcgagattactatggcacaattaattcctgggtaaggcatggggttgtggtggacagagctcagtctttagtttgaacgaaaacatacatacatgaaaaacatacatgaaaaaaggaccctcatcaacattagaaggggtagatttggagcactttaggcaggaaaacaggaacgcaaggccaggaaactggaacccagtgaatactcagaaccgaggatgcagatgacttatttagcaaaatggtcacttctgtgacatagctggagaaaggatgggtaacagcttgccagagccacttggaacaagggcaaatctcagtgtctggggcaaaagatgatgcatttccctctgacccatcatgtttattcatcctccactccccattgccacactagctcttgctgtaagtcctcaccaggatctacatttcctcgtcgctggtgggaaccccttagagtacatagaggtatcagtccagtaagactgctctacacaacagaagtgaggcccagggagtagcagccaggcccttatcctgttacctctgcaggagtgactgcccaacccagatccagagacattgaaggaaatgataattccttggtacctcactgccttgggacaaaatgaagaaagccacccttccttaggctgcagcttgccactcctgggctgggtaaacaggtcatcagcaccaagctcaaccaggagtaacactctggaagacatgggtgagcccaagaggaagcatgaacaggacgctgttcctaagtcatgtcaacaggttgtgctgggccaggatccccagggaaaaaaatggtcaacccaactggagggtaggttagaagaaaaaaaacataaacgtggatagtcatgtcatctcaaatccctgacttggcttccccattacttaacagtctgagctccttcttagcctgtgaccagcttcaaatcacagccaagtaaaacaaggaaataggaaaagtaaatccaactagaagagacaagctgagattcagatttgtttactcctcccatgcaaagtttccctgttggaggttttccatgtatacatgtctagaagtgatagaatgcaaggccttggctttgtcttgcagggatctgcctttgaggtcatagactgaacagcagggagagaggttagtggtggagtgtggggggagctgttctagctccagtttcttctgacacatttttcaggatcatggatctgatcctccgaagcacagcagagatatctaagccatatttgtgcacatgagcagactcttctagttttttagtaaccagggatgggcttttgcatggcactgactatagagatgtcttgtagagatcaagccagtcttttgcatcccacctgcccacctccagaagagatgggaaaaggtcatcaaagggcattcaccaactgaaatccactcatgaatgttaggtctctaaaaggaggcatcaacactcacaatggtagcctccaaacctagcatcccacctatctaagagctcaggggtggtccactggggcagatacaagggaagtgcaagggctcaggatgaaagaaaatctattgggaagagttttaggggcttgatcattatggggcttccttctatatctgagaactgctctgggtggtgagatgtggactctgatccttaattggaatgttcggagaatgagtgtctggtggccttgaagtgttggacagaaaagtatcagtataaaagcctggagctcagggtaattaatgtagttcatggttccttagtgagcaggactcttggatgtggaggagaaagggtcataggaagtaaaccaccaaaattacaaaattgagtctctgtacaattacttcagtgcctttgggcttatgaatacaaatcagtgggccttctctatgatggtccaacaaactctcagtgtccaccctgtccctgtatctcccatggaagatgaataatgtcaggtgttctttgggtcaaaggccccagggcagtctggaggcttagagggcagagtggtgtcattccatgtaaagttaggcttctgaggggtcaggcagaatatggtgtccatatcttccatagctctgcagattcttggatgaagtcaagcacagtttgctagacccaggtcactcctctgagtataactaggacccatgagtgaaacttaatagctgtaaggaagaacctgctgtctgccagagaggataagctgcccatctcagcagctgtctaaaagaaggcaggtgtctctttaaagggaagagaagcattggtgaaatggatttcaggtcacttccattccagatgggtgagatcttgtggagctgggatcatgtttgaactcattcatacctgtagagcacgaatccaagtagattgtgtttggtctgtacaggctgaagccccctgctctcccacccaagtgcccccactgagcaggccaacatgctgttgtggccacatatactgggctgatccaggctggttatcaccaaacagcaaaccatagggaacagctgctttgccatagacccaatacccatgtagatctctcatgagagcagccataactcagacccactgaccaacagggccatgagtgacagccagaaccagtgaaggtccaagtaggacacagagcagggcttttcttaccatacacattatctccagaggttatttctaccccactccctattcaaggcctgttggagcacactgcaaaagcaaaagcacagtaactcaatttacacatgattataatcatttccagtgcacacatttcatcaccaggtggatcctgagctagcccatgtaaatccgggttaacccatattggtaatcatactcaaaagcacttttcaccctacattctactagccaatcaaagacaaagagttgtggcctctaccattgccttggcttctggacaccctcacaagctatcccaaggttcccgctcaactccagggaggctgacatcttcacatccactgggcatataatattgcatgagaccaaagtctccacactctttgcagcctcctccatgaatcccaatggcctgcacttgtacagtttgggtgtttgatagataaagcacgtatgagaagagaaaacaaaataaatcaactttttaaaaaagccagcactgtgctgtcaatgttttttttttcttttcaattctagctcagaaaagcagaaggtaaataatgtcaggtcaatgaatatcagatatattttttgactgtacattacagtgaagtgtaatctttttacacctgcaagtccatcttatttattcttgtaaatgttccctgacaatgtttgtaacatggctgtgttaaaaaatctatacaataaagctgtgaccctgagattcatgttttcctaagata

SEQ ID NO: 234494 - DNA, 12755 bp, Artificial Sequence
  derived and/or modified sequence
ttaggactcgggggacaccgccccccgccccccgcgtcccgcccccgcccagcctcccgcctcagttcgcgccgcgcctcggcttggaacgcaggagcgccggctccgggagcccgagcggagccagccgcgcgcacagccagcggccgcgccggcgatgcggggccaccccgcgcccgccccagtcccggccccggcccccgcgggaaggggctgagctgcccgccgccgcccggatggcgagcctcgccgcgctcgccctcagcctgctcctgaggctgcagctgccgccactgcccggcgcccgggctcagagcgccgcaggtggctgttcctttgatgagcactacagcaactgtggttatagtgtggctctagggaccaatgggttcacctgggagcagattaacacatgggagaaaccaatgctggaccaggcagtgcccacaggatctttcatgatggtgaacagctctgggagagcctctggccagaaggcccaccttctcctgccaaccctgaaggagaatgacacccactgcatcgacttccattactacttctccagccgtgacaggtccagcccaggggccttgaacgtctacgtgaaggtgaatggtggcccccaagggaaccctgtgtggaatgtgtccggggtcgtcactgagggctgggtgaaggcagagctcgccatcagcactttctggccacatttctatcaggtgatatttgaatccgtctcattgaagggtcatcctggctacatcgccgtggacgaggtccgggtccttgctcatccatgcagaaaagcacctcattttctgcgactccaaaacgtggaggtgaatgtggggcagaatgccacatttcagtgcattgctggtgggaagtggtctcagcatgacaagctttggctccagcaatggaatggcagggacacggccctgatggtcacccgtgtggtcaaccacaggcgcttctcagccacagtcagtgtggcagacactgcccagcggagcgtcagcaagtaccgctgtgtgatccgctctgatggtgggtctggtgtgtccaactacgcggagctgatcgtgaaagagcctcccacgcccattgctcccccagagctgctggctgtgggggccacatacctgtggatcaagccaaatgccaactccatcatcggggatggccccatcatcctgaaggaagtggaatatcgcaccaccacaggcacgtgggcagagacccacatagtcgactctcccaactataagctgtggcatctggaccccgatgttgagtatgagatccgagtgctcctcacacgaccaggtgaggggggtacgggaccgccagggcctcccctcaccaccaggaccaagtgtgcagatccggtacatggcccacagaacgtggaaatcgtagacatcagagcccggcagctgaccctgcagtgggagcccttcggctacgcggtgacccgctgccatagctacaacctcaccgtgcagtaccagtatgtgttcaaccagcagcagtacgaggccgaggaggtcatccagacctcctcccactacaccctgcgaggcctgcgccccttcatgaccatccggctgcgactcttgctgtctaaccccgagggccgaatggagagcgaggagctggtggtgcagactgaggaagacgttccaggagctgttcctctagaatccatccaaggggggccctttgaggagaagatctacatccagtggaaacctcccaatgagaccaatggggtcatcacgctctacgagatcaactacaaggctgtcggctcgctggacccaagtgctgacctctcgagccagagggggaaagtgttcaagctccggaatgaaacccaccacctctttgtgggtctgtacccagggaccacctattccttcaccatcaaggccagcacagcaaagggctttgggccccctgtcaccactcggattgccaccaaaatttcagctccatccatgcctgagtacgacacagacaccccattgaatgagacagacacgaccatcacagtgatgctgaaacccgctcagtcccggggagctcctgtcagtgtttatcagctggttgtcaaggaggagcgacttcagaagtcacggagggcagctgacattattgagtgcttttcggtgcccgtgagctatcggaatgcctccagcctcgattctctacactactttgctgctgagttgaagcctgccaacctgcctgtcacccagccatttacagtgggtgacaataagacatacaatggctactggaaccctcctctctctcccctgaaaagctacagcatctacttccaggcactcagcaaagccaatggagagaccaaaatcaactgtgttcgtctggctacaaaagcaccaatgggcagcgcccaggtgaccccggggactccactctgcctcctcaccacaggtgcctccacccagaattctaacactgtggagccagagaagcaggtggacaacaccgtgaagatggctggcgtgatcgctggcctcctcatgttcatcatcattctcctgggcgtgatgctcaccatcaaaaggagaagaaatgcttattcctactcctattacttgtcccaaaggaagctggccaagaagcagaaggagacccagagtggagcccagagggagatggggcctgtggcctctgccgacaaacccaccaccaagctcagcgccagccgcaatgatgaaggcttctcttctagttctcaggacgtcaacggattcacagatggcagccgcggggagctttcccagcccaccctcacgatccagactcatccctaccgcacctgtgaccctgtggagatgagctacccccgggaccagttccaacccgccatccgggtggctgacttgctgcagcacatcacgcagatgaagagaggccagggctacgggttcaaggaggaatacgaggccttaccagaggggcagacagcttcgtgggacacagccaaggaggatgaaaaccgcaataagaatcgatatgggaacatcatatcctacgaccattcccgggtgaggctgctggtgctggatggagacccgcactctgactacatcaatgccaactacattgacggataccatcgacctcggcactacattgcgactcaaggtccgatgcaggagactgtaaaggacttttggagaatgatctggcaggagaactccgccagcatcgtcatggtcacaaacctggtggaagtgggcagggtgaaatgtgtgcgatactggccagatgacacggaggtctacggagacattaaagtcaccctgattgaaacagagcccctggcagaatacgtcatacgcaccttcacagtccagaagaaaggctaccatgagatccgggagctccgcctcttccacttcaccagctggcctgaccacggcgttccctgctatgccactggccttctgggcttcgtccgccaggtcaagttcctcaaccccccggaagctgggcccatagtggtccactgcagtgctggggctgggcggactggctgcttcattgccattgacaccatgcttgacatggccgagaatgaaggggtggtggacatcttcaactgcgtgcgtgagctccgggcccaaagggtcaacctggtacagacagaggagcaatatgtgtttgtgcacgatgccatcctggaagcgtgcctctgtggcaacactgccatccctgtgtgtgagttccgttctctctactacaatatcagcaggctggacccccagacaaactccagccaaatcaaagatgaatttcagaccctcaacattgtgacaccccgtgtgcggcccgaggactgcagcattgggctcctgccccggaaccatgataagaatcgaagtatggacgtgctgcctctggaccgctgcctgcccttccttatctcagtggacggagaatccagcaattacatcaacgcagcactgatggatagccacaagcagcctgccgccttcgtggtcacccagcaccctctacccaacaccgtggcagacttctggaggctggtgttcgattacaactgctcctctgtggtgatgctgaatgagatggacactgcccagttctgtatgcagtactggcctgagaagacctccgggtgctatgggcccatccaggtggagttcgtctccgcagacatcgacgaggacatcatccacagaatattccgcatctgtaacatggcccggccacaggatggttatcgtatagtccagcacctccagtacattggctggcctgcctaccgggacacgcccccctccaagcgctctctgctcaaagtggtccgacgactggagaagtggcaggagcagtatgacgggagggagggacgtactgtggtccactgcctaaatgggggaggccgtagtggaaccttctgtgccatctgcagtgtgtgtgagatgatccagcagcaaaacatcattgacgtgttccacatcgtgaaaacactgcgtaacaacaaatccaacatggtggagaccctggaacagtataaatttgtatacgaggtggcactggaatatttaagctccttttagctcaatgggatggggaacctgccggagtccagaggctgctgtgaccaagcccccttttgtgtgaatggcagtaactgggctcaggagctctgaggtggcaccctgcctgactccaaggagaagactggtggccctgtgttccacggggggctctgcaccttctgaggggtctcctgttgccgtgggagatgctgctccaaaaggcccaggcttccttttcaacctaaccagccacagccaagggcccaagcagaagtacacccacaagcaaggccttggatttctggctcccagaccacctgcttttgttctgagtttgtggatctcttggcaagccaactgtgcaggtgctggggagtgggaggctcccctgccctccttctccttaggagtggaggagatgtgtgttctgctcctctacgtcatggaaaagattgaggctcttgggggtcactgctctgctgccccctgcaacctccttcaggggcctctggcaccagacatttgcagtctggaccagtgtgaccttacgatgttccctaggccacaagagaggccccccatcctcacacctaacctgcatggggcttcgcccacaaccattctgtaccccttccccagcctgggccttgaccgtccagcattcactggccggccagctgtgtccacagcagtttttgataaaggtgttctttgcttttttgtgtggtcagtgggagggggtggaactgcagggaacttctctgctcctccttgtctttgtaaaaagggaccacctccctggggcagggcttgggctgacctgtaggatgtaacccctgtgtttctttggtggtagctttctttggaagagacaaacaagataagatttgattattttccaaagtgtatgtgaaaagaaactttcttttggagggtgtaaaatcttagtctcttatgtcaaaaagaagggggcgggggagtttgagtatgtacctctaagacaaatctctcgggccttttattttttcctggcaatgtccttaaaagctcccaccctgggacagcatgccactgagcaaggagagatgggtgagcctgaagatggtccctttggtttctggggcaaatagagcaccagctttgtgcataatttggatgtccaaatttgaactccttcctaaagaaacccagcagccaccttgaaaaaggccattgtggagcccattatactttgatttaaaataggccaagagaatcaggcctggagatctagggtcttgtccaaagtgtgagtgagtcaatgagagggaaccaacatttgctaagtctctactgtatgccagggatcatgcttggcactttccataggacatttcacacagtccttagaacccccaggagagagctactgacttgttatcatctccatttgatcatctcctccaatgaggaaacccacgcaccttccttagtaatgaaatcctgggttccaaaggggcaggtaatggcaatgagacttctccgtgctgttttcttcatcttctctaagccaagcaattattttatggagggaaaataaggccagaaacttctgagcagataactccacaaatggaaatttagtactttcttcctgatgccagttcttctgggaagcgcagaatttcagatatattttagtaacacattcccagctccccaggaaagccagtctcatctaatttcttagtcagtaaaaacaattccctgttccttcaggctatgaatggaccagccagggaaactctcgaccttgatctctagccagtgcttaggcccaatatctgacagcctcaggtgggctgggacctaggaagctccatcttgaaggctggtctagccccagacagggcatgaggggcagagaattcaagaaggtacagctttggccctcaagagcccactgtatgctggggaaatggaaccatggtgcagtagtgtggagtggatgagtgttccatgagcctaggagcaagaaagtctcttcggcctcgggcttcctggagaaggggacgtccattcctgctgggtcttaacaagcataaaaaggaaaaaaaggaaactcaggcaaagggatccatatgtgcaatggcaaagaaatgtgaaaaggcattgggagaagcagtctgggggaggccagcccagtgcgggcacagcacaacacggggagcagcaagagatgagccagggtccaggagacagatgcccatcgcgagtacagactttgtcctattggcaacaaggagtccatggagctttagagagatgcactcagcttcgtgttggccaagactccttctgggccaatggggctgcctcttttcctttcatcagacactgtgaaaacattcccttaagcgtgcactttttaatatcacatctatttgtctgtctgctcattgttttgttgctggaactaaatatgcaatggatcatgagactcagattctatgagaaacccagggtctctgctttaccacggagcagggtcaccaacccagatctccaggcccatgaggatggaacatgaaaggagccgacaaaagttgcttccattggcatgggctctggagctgtccagaagtccagggacaccagacttgatcaaggaagggctgtcactttagaggttcaaaaggaagtgcctcaaagcaaaggcaagcaaaggaaccccacgatgaacttgctcttttcctttgatgagcctctccccaggtgtatttcagcagaccccggggacccacccccactgggcctgctggcctccctcggctccagcccaatgccccagctggccttccccagcctgcaaggagcctgtagcatggcaaatctgcctgctgtatgctattttcttagatcttggtacatccagacaggatgagggtggagggagagctatttaacacaaatcctaagatttttttctgctcaggaaggggtgaaatagctggcagatacaaaagacagtggcttttatcattttaaatggtaggaatttaaggtgtgacttcagggagaaacaaacttgcaaaaaaaaaaaatctcaggccatgttggggtaacccagcaagggccagtgatgatttcccccagctcatccccttattttcccacaacccaaccattctctaaagcaggacagtgaataggtcttaggccagtgcacacaggaagaaattgaggcttatggatggggatgacttccctaagatcccatgggacaaggatgtggcaaggcttggatgagatggggcaccagtgcccaggaatttgaacattttcctttacccaggaaatctccggagccaacaccaccacccccagggggtctccccaccccaccccatttacagggtgagctcagcctgtcatgagcagaggaaaatattattaatgctctctgagtctttacaacaggagctcttacctcatagatgtgggctctgtttggggaagatgcaaggaagtaatgagaagcccaggaaatttctccacctgtgtttatggcctaaatagcttcaggatgtatcttagctgcactccaacattgcatcctttctggggtgaagaatctgggccaaccaggggtccttgggcctctagaaggccacagtaggcctctctttgtgggaatggaaggggacagtttgcttttagtgctggccctctctgtgggtgtggcctgcaaaggaaccaacagaccctatgctggggactctaacatgtgagctcattaaattcttccagcattctaaaggagggtttgtgattgtcaccatttactgatgaggaaactaaggctcctaggggagaaatcacttgcccacagttccacagctagtgagtgaatgaaccaggatttaaaccggttttttctcactacagagacaatatttttccaccattgtatctcacatttttcccaggaggttacccataacagaagagactagagtggaacagatacgtcagtggataaagctcaaagcaaacaacagtaagcttaaaattccttcatagtctcatgttttacgttcacaattcatgcaaaatttgcattccactttctgatttagccttgttggttttaatatgactctatgaatatttcaaaaaaaaatgtgctctgttcctcatgttgttctgttctgttcaccccgctatgacggaccctaggtcagctggtcttcagcttgaccctagaattgactctaggagcagtgaccctgctgcctcccagagccagttataggctcaagatcaagaccaactgaccttctcctaggcagctcctttggtgtgtgggtgctctgacctcactgttcatgaggggacctcaactaaggcatcttccagttgggtgctggaaggaacccattaactcacactagaatgatgaggatttgctcatctggcgtggagaaggatgagcccacaaaaccctaaagggaaaagagaagctggacacagctgtactcagcagattcctgaatgctaggctggaaagtggtgcctgttgtccaagtggagtcacatggttgctaatgtgggcaagtctgaggacacacttcatgagcagctggggtctggaaggctcctcactttaccctagccacacataattactgggtgcctacagcacctagcaccttggagggggcactattaggaaatcgagattactatggcacaattaattcctgggtaaggcatggggttgtggtggacagagctcagtctttagtttgaacgaaaacatacatacatgaaaaacatacatgaaaaaaggaccctcatcaacattagaaggggtagatttggagcactttaggcaggaaaacaggaacgcaaggccaggaaactggaacccagtgaatactcagaaccgaggatgcagatgacttatttagcaaaatggtcacttctgtgacatagctggagaaaggatgggtaacagcttgccagagccacttggaacaagggcaaatctcagtgtctggggcaaaagatgatgcatttccctctgacccatcatgtttattcatcctccactccccattgccacactagctcttgctgtaagtcctcaccaggatctacatttcctcgtcgctggtgggaaccccttagagtacatagaggtatcagtccagtaagactgctctacacaacagaagtgaggcccagggagtagcagccaggcccttatcctgttacctctgcaggagtgactgcccaacccagatccagagacattgaaggaaatgataattccttggtacctcactgccttgggacaaaatgaagaaagccacccttccttaggctgcagcttgccactcctgggctgggtaaacaggtcatcagcaccaagctcaaccaggagtaacactctggaagacatgggtgagcccaagaggaagcatgaacaggacgctgttcctaagtcatgtcaacaggttgtgctgggccaggatccccagggaaaaaaatggtcaacccaactggagggtaggttagaagaaaaaaaacataaacgtggatagtcatgtcatctcaaatccctgacttggcttccccattacttaacagtctgagctccttcttagcctgtgaccagcttcaaatcacagccaagtaaaacaaggaaataggaaaagtaaatccaactagaagagacaagctgagattcagatttgtttactcctcccatgcaaagtttccctgttggaggttttccatgtatacatgtctagaagtgatagaatgcaaggccttggctttgtcttgcagggatctgcctttgaggtcatagactgaacagcagggagagaggttagtggtggagtgtggggggagctgttctagctccagtttcttctgacacatttttcaggatcatggatctgatcctccgaagcacagcagagatatctaagccatatttgtgcacatgagcagactcttctagttttttagtaaccagggatgggcttttgcatggcactgactatagagatgtcttgtagagatcaagccagtcttttgcatcccacctgcccacctccagaagagatgggaaaaggtcatcaaagggcattcaccaactgaaatccactcatgaatgttaggtctctaaaaggaggcatcaacactcacaatggtagcctccaaacctagcatcccacctatctaagagctcaggggtggtccactggggcagatacaagggaagtgcaagggctcaggatgaaagaaaatctattgggaagagttttaggggcttgatcattatggggcttccttctatatctgagaactgctctgggtggtgagatgtggactctgatccttaattggaatgttcggagaatgagtgtctggtggccttgaagtgttggacagaaaagtatcagtataaaagcctggagctcagggtaattaatgtagttcatggttccttagtgagcaggactcttggatgtggaggagaaagggtcataggaagtaaaccaccaaaattacaaaattgagtctctgtacaattacttcagtgcctttgggcttatgaatacaaatcagtgggccttctctatgatggtccaacaaactctcagtgtccaccctgtccctgtatctcccatggaagatgaataatgtcaggtgttctttgggtcaaaggccccagggcagtctggaggcttagagggcagagtggtgtcattccatgtaaagttaggcttctgaggggtcaggcagaatatggtgtccatatcttccatagctctgcagattcttggatgaagtcaagcacagtttgctagacccaggtcactcctctgagtataactaggacccatgagtgaaacttaatagctgtaaggaagaacctgctgtctgccagagaggataagctgcccatctcagcagctgtctaaaagaaggcaggtgtctctttaaagggaagagaagcattggtgaaatggatttcaggtcacttccattccagatgggtgagatcttgtggagctgggatcatgtttgaactcattcatacctgtagagcacgaatccaagtagattgtgtttggtctgtacaggctgaagccccctgctctcccacccaagtgcccccactgagcaggccaacatgctgttgtggccacatatactgggctgatccaggctggttatcaccaaacagcaaaccatagggaacagctgctttgccatagacccaatacccatgtagatctctcatgagagcagccataactcagacccactgaccaacagggccatgagtgacagccagaaccagtgaaggtccaagtaggacacagagcagggcttttcttaccatacacattatctccagaggttatttctaccccactccctattcaaggcctgttggagcacactgcaaaagcaaaagcacagtaactcaatttacacatgattataatcatttccagtgcacacatttcatcaccaggtggatcctgagctagcccatgtaaatccgggttaacccatattggtaatcatactcaaaagcacttttcaccctacattctactagccaatcaaagacaaagagttgtggcctctaccattgccttggcttctggacaccctcacaagctatcccaaggttcccgctcaactccagggaggctgacatcttcacatccactgggcatataatattgcatgagaccaaagtctccacactctttgcagcctcctccatgaatcccaatggcctgcacttgtacagtttgggtgtttgatagataaagcacgtatgagaagagaaaacaaaataaatcaactttttaaaaaagccagcactgtgctgtcaatgttttttttttcttttcaattctagctcagaaaagcagaaggtaaataatgtcaggtcaatgaatatcagatatattttttgactgtacattacagtgaagtgtaatctttttacacctgcaagtccatcttatttattcttgtaaatgttccctgacaatgtttgtaacatggctgtgttaaaaaatctatacaataaagctgtgaccctgagattcatgttttcctaagata

SEQ ID NO: 234495 - DNA, 4352 bp, Artificial Sequence
  derived and/or modified sequence
atggcatcgctggctgctctggctctctcactgctcctcaggctacagcttcccccactgccaggggctagggctcagtcggctgccggtggctgcagctttgatgagcactacagcaattgcgggtatagcgtggccctcggaacgaatggtttcacatgggaacagattaatacctgggagaagccaatgcttgaccaagcggtgccaaccggctccttcatgatggtgaactcctcagggagggcttccggacagaaagcacaccttctgttgccaactttgaaggaaaatgatactcactgtatagattttcattactatttcagttcccgggatcggtcatcgccgggagctttaaatgtttatgtgaaagtcaacggcggtccacaaggcaatcccgtctggaatgtgtcaggggtagttaccgaaggctgggtcaaggccgagctggccattagcacattctggcctcacttctatcaggtcatcttcgaatcagtaagcctgaaagggcatcctggctatatcgccgtggacgaggtgagagttcttgcccatccctgtaggaaggctcctcatttcctccgcctacagaacgtggaggttaatgtaggacagaacgccacatttcagtgcattgcaggcggaaaatggagtcagcatgataagttgtggttacagcagtggaatggacgggacaccgccctcatggtgacacgcgtagtgaatcatagaagattttctgctaccgtatcagtggctgacaccgcgcagcggtccgtgtctaagtatcggtgtgtcatccgaagtgacgggggatccggggtaagcaattacgcggaactgatcgtaaaggagcctcctactccaatcgctcccccagagctgctagctgtgggcgcaacctatctgtggataaagcccaatgccaacagcattattggagatgggcctatcatcctgaaggaagtagaatatagaacaacaacgggtacttgggctgagacacatatcgttgacagccctaactacaaactgtggcacctggaccctgatgtagaatacgaaatcagggtgctcctgacgagaccaggagagggagggaccgggccaccgggacccccattgaccacccgcacaaagtgcgccgacccagtgcacggccctcagaacgttgagattgtagacattcgcgcacggcagttgacgctgcaatgggagccattcggctacgccgtgacaaggtgtcacagctataaccttacagtgcagtatcagtacgtgtttaaccaacagcagtatgaggctgaggaggtgattcagacctctagtcactatacattaaggggtctcagaccctttatgacgatccggctccgccttctccttagcaatccagagggcaggatggaatcagaggaactcgtggtgcagaccgaagaggatgtgcctggggcagtgccccttgaatcgatacaggggggaccattcgaggagaaaatttacattcaatggaagcctccgaatgagacgaatggcgtgatcacgctttacgagatcaattacaaggctgtgggtagtttggatccctcagccgatctgtcctcccagaggggaaaagtctttaagctccgcaatgagacccaccatctctttgtcgggctgtatccaggtactacatactcattcactattaaagcttctactgcaaaaggcttcggaccgcctgtgaccacacgcatcgctacaaaaatcagcgctccatccatgcctgaatacgacactgacactccactgaatgagactgacacaactattacggtaatgctcaagccagctcagtcgagaggagcacccgttagcgtttaccagcttgtagtcaaggaggagaggctccaaaagtctaggagagcagccgacattatcgaatgctttagcgtgcccgtgtcctatcgcaatgcttcttctttagattcacttcactactttgccgcagagctgaagccggcaaatctccctgttacgcagccctttacagtaggtgataacaagacctataacggttattggaatccacctctatcaccccttaaatcatactctatttacttccaggcactgtcaaaggccaacggggagactaagattaactgcgtgcggctcgcgaccaaggcccctatgggctctgcacaggttacacccggaacccccctgtgcttgctgaccactggggcttctacacagaatagcaacacggttgagccagaaaagcaggttgacaacaccgtgaagatggccggtgtcatcgctggcctcttaatgttcatcattatactgctgggtgtcatgctgactataaaacgacggaagctggcgaaaaaacagaaggaaacccagtcgggagctcagcgagagatgggccctgtagcctcagccgataaacctacaaccaagctgtcagcgagccggaatgatgaggggttttcctcttcttcccaggatgtgaacggatttacagacggcagccggggagaactctcccagcccactctgaccattcagacacacccatataggacttgcgatcctgtagagatgagctatcccagggatcagtttcagcctgcgatccgcgtggccgacctgctccagcacataacacaaatgaagagaggccagggctacggcttcaaagaggaatacgaagccttgcctgaagggcagacagcctcttgggacactgctaaagaagacgagaatcggaataagaaccgatacggcaatatcattagctacgaccactcaagggtccggctacttgtcctcgacggtgacccacactcagactatataaacgccaattacattgacgggtaccataggccgaggcactatatcgcgacccaagggccaatgcaagaaacagttaaagacttttggaggatgatatggcaggaaaactcagcctcaatcgtgatggtgactaatctggtggaagtcgggagagtcaaatgcgtaagatattggcccgacgataccgaagtgtacggcgacatcaaagtcaccctgattgagaccgaaccactcgctgagtatgttatccgcacatttactgttcagaaaaaagggtaccatgaaattcgggaattacgactgtttcacttcacaagctggcctgatcacggagtcccatgctatgctaccggcctgctagggtttgtcaggcaggttaaattcctgaacccaccggaagcaggaccaatcgtagtccattgtagcgcaggcgctgggagaaccggatgcttcatcgccatcgatactatgttagatatggccgagaacgagggagtggttgatatcttcaactgtgtcagggaattaagggcgcaacgcgtgaatctggtccaaactgaggagcagtacgtctttgtgcatgacgctatcctagaagcttgtctgtgcggcaatacagccattcccgtgtgcgagtttcgcagcctctattacaacatcagccgcctggacccacagaccaacagtagccagatcaaggatgaatttcagaccctcaatatagttaccccgagggtacgacctgaagattgctcaatagggctcctgccacggaatcacgataagaacagatccatggatgtacttcctctggatagatgcctgccctttttgatctccgtcgacggtgagtcttccaattacattaacgccgctctcatggatagccataaacagcctgccgcatttgttgtgacacagcaccccttgcccaatacagtcgctgatttttggagacttgtctttgattataattgtagcagtgtcgttatgctgaatgaaatggatactgctcagttctgtatgcagtactggccagaaaagacctccggctgttacggcccaatccaggttgagttcgtctctgcagatattgacgaagacatcatccatagaatatttagaatttgcaatatggccaggcctcaggacggatatcgtattgtgcaacacttacagtacatcggatggccagcttacagggacactcccccaagtaaaagatccctgttgaaggtggtgcgcagactcgagaaatggcaggagcagtacgacggccgagagggccgaactgtcgtccattgtcttaatggtggtggaagaagtggcactttttgcgccatttgcagtgtgtgcgagatgatccaacagcagaacatcatcgacgtgtttcatatcgttaaaacccttcggaacaacaaatccaacatggtcgagacactcgagcagtacaagtttgtctatgaagtggcgctggaatatctgagctcttttta

SEQ ID NO: 234496 - DNA, 4391 bp, Artificial Sequence
  derived and/or modified sequence
atggcctctctggcggcactggccctctcgctcttacttagacttcagttgcctcccctaccaggggctagagcccagtccgcggctggaggatgctcatttgacgagcattactcaaactgtggttatagtgtggccttaggaaccaacggatttacttgggaacagatcaacacatgggagaagcccatgctggatcaagcagtccccactggctccttcatgatggttaatagctctgggagggcttccggacaaaaagcacacctgctgctgcctactctgaaggaaaatgacacccactgcatagattttcattattactttagttccagggaccggagctctccgggagccctgaatgtctatgtaaaagtaaacggcggacctcaaggaaatcctgtgtggaacgtaagtggagttgtgactgagggctgggtcaaagccgagctcgcaatctccacattttggccccacttttaccaggtgatcttcgagagcgttagcttgaagggtcatcctggttacattgccgtcgacgaggtacgcgtcttagctcatccctgcagaaaggctccccactttctgaggttgcagaacgtcgaggtcaatgtagggcaaaatgcgacttttcagtgcatcgcgggaggcaagtggtcacagcatgataagctttggctccagcagtggaacggtcgggatactgcactgatggtgaccagagtggtgaaccataggcggttctctgccaccgtgagcgtggccgacacggcccagaggagcgttagtaagtaccgttgtgttattcggagcgatggcggaagcggtgtgtccaactacgcagaactgatagtgaaggaacctccaacaccgattgccccaccagagctcctcgccgtaggtgccacgtacttgtggattaagcctaatgccaatagcattataggcgatgggccaatcattttgaaagaagttgaataccgcaccaccacaggaacgtgggctgaaacccatatcgtggactctcctaactacaagttgtggcacctggatccagatgtggagtacgaaatccgggtgctgcttactcggcctggtgaaggcggtactggaccacccggtccaccactgaccaccaggaccaaatgcgcggatcctgtccatgggccacaaaacgtggaaattgtggatatcagagccagacagcttaccttgcaatgggagccttttggatacgccgttacacgctgccattcctataacctaacagtacagtaccagtacgtgttcaaccagcagcagtatgaggccgaggaagtcatccagaccagctcacattacaccttgcgcggtctgcggccttttatgaccatccgcttaaggcttctgttatcaaaccctgaagggaggatggaaagcgaggagcttgtggtgcagactgaggaggatgttcccggtgcagtgccccttgaaagtattcaaggcggaccttttgaggaaaaaatctacatccagtggaaacccccaaacgagaccaacggtgttattaccctctatgagattaactacaaagccgtgggtagcctggatccatccgctgatctctcatctcaaagaggcaaggtcttcaagctcagaaacgagacgcaccacctgttcgtcggactgtacccagggacgacatactccttcaccattaaggcatccactgctaagggctttggtcctccagttaccacacggatagctactaagatctcggctccttcaatgccggagtacgataccgacactcctctcaacgagacggacactaccataacagtgatgctgaaacccgctcagagtcgcggagccccagttagcgtgtatcagctagttgtgaaggaggaaaggctgcagaagtcgagaagagctgcagatataattgaatgctttagcgtcccagtgagctaccgcaacgccagctcactggatagccttcattactttgctgctgagctcaagcccgcaaacctaccggttacccagccctttactgtgggagacaacaaaacttataacggctactggaatccccctctgtctccccttaagtcatacagtatatacttccaagccctatcaaaagcaaatggcgagacaaagatcaattgcgtgcgacttgccaccaaagcacccatgggttcagctcaggtgacacctggcacgcctctctgtctcctgaccaccggtgccagtacgcagaattcaaataccgtggaaccggaaaagcaggtggacaacaccgtcaagatggctggagtcatcgccggactcctaatgttcattatcattctgctgggggtgatgcttacaatcaaaagacgtagaaacgcctatagctatagctactacctgagccagaggaaacttgctaagaagcaaaaggaaacacagagtggtgcacagcgggagatgggaccagttgctagcgccgataaaccgacgacaaaactttccgcctccaggaacgatgaaggattctcttcctcctcccaagatgtcaatggcttcacggacggatcacgcggagagctgtcccagcccacgctcacgatccagacgcacccctacaggacgtgtgaccctgtggaaatgtcctatccaagagaccaatttcagcccgctatccgcgtggctgatctgcttcagcacatcacccaaatgaagagagggcaggggtatggttttaaagaggaatatgaggcgctgcccgaaggccaaaccgcctcatgggacacggccaaggaagatgagaacaggaacaagaatcggtatggaaatatcatttcttatgaccacagcagggtgaggctcttggtcttagacggcgatccacactccgactacattaacgccaactacattgatggctatcaccgaccgagacactacatcgcgacccaaggcccaatgcaggagacagtgaaagacttttggaggatgatctggcaggagaattccgcttctatcgtgatggtgaccaacttggtggaggttggacgagttaaatgcgtgcgctattggcccgacgatacggaggtctacggcgacattaaggtgacactgatagagaccgaacccctggccgaatacgtgattcgaacattcacggtgcagaagaaggggtaccacgaaatcagagagctccgactcttccatttcacttcttggcctgaccacggcgtgccctgttatgcaacaggccttctggggtttgtgagacaggttaaatttcttaatccaccagaggccggaccaattgtagtgcactgtagtgctggcgctggccgaaccggatgtttcatcgccattgacaccatgcttgatatggctgaaaatgagggggttgtggatatttttaactgtgtgcgggaactccgggctcagcgggttaacctggtgcagacagaagaacagtatgtgttcgtacacgacgccatcctcgaggcatgcctgtgcgggaatacagccatccctgtgtgtgagtttcggagcctgtactataatatttcccgactggatcctcagacaaattccagccagattaaagatgaattccagaccctgaacattgttacaccaagggtgagacctgaggactgctccatagggctgttgccacgaaatcacgacaagaataggagtatggacgtgctccctctcgaccggtgtctgcccttcctcatatccgtagatggggaatcgtctaattatatcaatgccgcactgatggactcacacaaacagcccgctgcattcgttgtcacccaacatcccttgccaaacacagtcgctgacttttggcggctggtgtttgattacaactgctcttccgtggttatgttgaacgagatggacaccgcccagttctgtatgcagtactggcccgagaagacttccggctgctacggaccaattcaggttgagtttgtgagcgcagatatagacgaagacatcatacatagaatttttcggatctgtaacatggctaggcctcaggatgggtatcggatcgtgcagcacctgcagtacatcggctggcctgcttatagggacacccccccttctaagaggtctctcctcaaagttgtgagaaggctggagaagtggcaagagcagtacgatggccgagaagggcgtacagtggtgcactgtcttaacggtggcggacgcagcgggacattctgtgctatctgcagcgtttgcgagatgattcagcagcagaatataatcgacgtgtttcatattgtcaagaccctaaggaataacaaatcaaatatggtcgagacactggaacagtacaaatttgtgtatgaggttgccctggagtacctgtccagctttta

SEQ ID NO: 234497 - protein, 491 aa, Artificial Sequence
  derived and/or modified sequence
MLGKDYMLAIILVNCDDDLWGDHSLEVEAGLPPGWRKIHDAAGTYYWHVPSGSTQWQRPTWELGDAEDPGTGTEGIWGLRPPKGRSFSSLESSLDRSNSLSWYGGESYIQSMEPGAKCFAVRSLGWVEVPEEDLAPGKSSIAVNNCIQQLAQTRSRSQPPDGAWGEGQNMLMILKKDAMSLVNPLDHSLIHCQPLVHIRVWGVGSSKGRPISAPARDFAFVASDKDSCMLKCHVFCCDVPAKAIASALHGLCAQILSERVEVSGDASCCSPDPISPEDLPRQVELLDAVSQAAQKYEALYMGTLPVTKAMGMDVLNEAIGTLTARGDRNAWVPTMLSVSDSLMTAHPIQAEASTEEEPLWQCPVRLVTFIGVGRDPHTFGLIADLGRQSFQCAAFWCQPHAGGLSEAVQAACMVQYQKCLVASAARGKAWGAQARARLRLKRTSSMDSPGGPLPLPLLKGGVGGAGATPRKRGVFSFLDAFRLKPSLLHMP

SEQ ID NO: 234498 - protein, 263 aa, Artificial Sequence [sequence omitted]

SEQ ID NO: 234499 - protein, 214 aa, Artificial Sequence
  derived and/or modified sequence
MLGKDYMLAIILVNCDDDLWGDHSLEVEAGLPPGWRKIHDAAGTYYWHVPSGSTQWQRPTWELGDAEDPGTGTEGIWGLRPPKGRSFSSLESSLDRSNSLSWYGGESYIQSMEPGAKCFAVRSLGWVEVPEEDLAPGKSSIAVNNCIQQLAQTRSRSQPPDGAWGEGQNMLMILKKDAMSLVNPLDHSLIHCQPLAVIPTDADPQYLNPWTQIL

SEQ ID NO: 234500 - DNA, 1476 bp, Artificial Sequence
  derived and/or modified sequence
atgctagggaaggattatatgcttgcgatcatactggtgaattgcgacgacgacttgtggggagaccattctctcgaggtggaggcgggtctgcccccaggctggagaaagatacacgacgcagccggtacatattattggcatgtcccttctggctcaacacaatggcaacgtcccacttgggagctgggagatgccgaagatccaggcaccgggacagaaggaatctggggactaaggcctccgaaagggaggagcttcagttccttggagagttccctggatagaagcaattccctgtcgtggtatggaggcgaaagctatattcaaagcatggaacctggagccaaatgttttgccgtaagatcgctaggatgggtcgaggttccagaggaggacctagcacctggaaagtcctctatcgcagtaaataattgcatccagcagctggctcagactaggtctcgatcccagccccccgacggggcgtggggcgagggacagaatatgctgatgattctgaagaaggatgcaatgtccctggtgaatcctttggaccactcacttattcactgccaacctcttgttcatatacgcgtgtggggtgtgggaagcagtaaaggtaggcctatctcagccccggctcgagactttgccttcgtcgcatccgacaaagacagctgtatgttgaagtgccacgtattttgctgtgatgtgcctgcgaaagcgatcgccagcgccctgcacggcctgtgcgctcagatactttcagaaagagttgaagtatccggcgacgcaagctgttgttctccggatccaatttctccggaggacctcccccggcaggtggagctcttggacgctgtatcacaggctgctcaaaagtacgaggccctgtacatgggcactcttcccgttactaaggctatgggaatggacgttttaaatgaagcgataggtaccttgactgcaaggggcgataggaatgcttgggtgcctacaatgctttctgtttcagatagcctgatgactgcccatcccattcaggctgaggcctcgacagaggaggaaccactctggcagtgtcccgtgcgccttgtcacattcatcggagtcgggagggatcctcacacttttgggctgatcgccgacctgggtcggcagagttttcaatgcgcagctttctggtgccagccccacgctggcggactctccgaggccgtgcaggccgcgtgtatggttcagtaccagaagtgtctcgtggccagcgccgcccgcggcaaagcttggggcgcacaggcgcgggctcggttgagacttaagcgcacatctagtatggattcacccggcggcccactgccattgcctcttttaaagggcggtgtggggggggctggtgcgacgccgaggaaacgcggggttttctcgtttctggacgcctttagactcaaacctagtcttttacacatgccgtag

SEQ ID NO: 234501 - DNA, 1476 bp, Artificial Sequence
  derived and/or modified sequence
atgctgggcaaggactacatgctggccatcatcctggtgaactgtgatgatgacctgtggggagaccacagcctggaggtggaggccggcctgcccccaggctggaggaagatccatgatgctgctggcacctactactggcacgtgcccagcggcagcacccagtggcagaggcccacctgggagctgggagatgctgaagatcctggcactggaacagagggcatctggggcctgcggccccccaagggccgctccttcagcagcctggagagcagcctggacaggagcaacagcctgtcctggtatggaggagagagctacatccagagcatggagcccggggccaagtgctttgctgtgcgcagcctgggctgggtggaggtgcctgaggaggacctggcccctgggaagagcagcattgctgtgaacaactgcatccagcagctggcccagaccaggagccgcagccagcccccagatggagcctggggcgagggccagaacatgctgatgatcctgaagaaggatgccatgagcctggtgaaccccctggaccacagcctcatccactgccagcccctggtgcacatccgggtgtggggcgtgggcagcagcaagggccggcccatcagcgccccagcccgggactttgcctttgtggccagtgacaaggacagctgcatgctgaagtgccacgtgttctgctgtgatgtgcctgccaaggccatcgccagcgccctgcacggcctgtgtgcccagatcctgtctgagcgggtggaggtgtctggagatgccagctgctgcagcccagaccccatcagccctgaggacctgccccggcaggtggagctgctggatgctgtgtcccaggccgcccagaagtatgaggccctgtacatgggcaccctgcctgtgaccaaggccatgggcatggatgtgctgaatgaggccatcggcaccctgacagcccggggggacagaaatgcctgggtgcccaccatgctgtctgtgtctgacagcctgatgacagcccaccccatccaggccgaggccagcacagaggaggagcccctgtggcagtgccctgtgcggctggtgaccttcatcggcgtgggccgggacccccacaccttcggcctgattgctgacctgggccggcagagcttccagtgtgccgccttctggtgccagccccatgctgggggcctgtctgaggccgtgcaggccgcctgcatggtgcagtaccagaagtgcctggtggccagcgctgcccggggcaaggcctggggcgcccaggcccgggcccggctgcggctgaagaggaccagctccatggacagccctgggggccccctgcccctgcccctgctgaagggcggcgtgggcggggccggggccacccccaggaagaggggcgtcttctccttcctggatgccttccggctgaagcccagcctgctgcacatgccctag

SEQ ID NO: 234502 - DNA, 1476 bp, Artificial Sequence
  derived and/or modified sequence
atgctgggcaaggactacatgctggccatcatcctggtgaactgcgatgatgacctttggggtgaccactcgctagaggtggaagcaggcttgcctcctggttggcggaagatccacgacgcagctggtacctattactggcacgtacctagcggcagcacgcagtggcagcggccgacatgggagttgggcgatgcggaggatccgggtactggaactgaaggtatctggggcctcagaccacctaaagggcggtcattttccagcctggagtcctctctcgatcgatccaatagcttatcatggtatggcggtgaaagttacattcaatctatggaaccaggcgcgaagtgtttcgccgtacggtcactggggtgggtcgaggtgcctgaagaggaccttgcacccgggaaaagttctatcgccgttaacaactgcattcagcagctggcacaaacccgctctaggtcgcaaccccccgacggagcttggggcgaaggccagaatatgttaatgatccttaaaaaagacgccatgtccctggtgaatcctttagaccacagtctgatccattgtcagcccctggtgcacatccgggtgtggggagtgggatcgagcaagggaagacctatatccgcccctgcccgagatttcgcctttgtcgcaagtgataaggactcttgcatgctcaagtgtcacgttttttgttgtgatgtgcctgcgaaagccattgctagcgccctgcatgggctctgcgctcaaatactcagcgaacgggtggaggtgagcggggacgcttcttgttgcagtcccgatcccatctcaccagaggacttgcccaggcaggtcgaacttctggacgccgtgtcacaggctgcacagaagtatgaggctttgtatatgggcactctgcccgttacaaaggccatgggaatggacgtactaaatgaggccataggtaccctgacggcccgcggcgatcgcaatgcctgggtgccaacaatgctttcagtgtcagatagtctgatgactgcccaccccatacaggccgaggcaagtaccgaggaagaacctctgtggcagtgtccggtgcggctggtgacatttataggcgtcggaagagatccacacacattcggtctgattgctgacctgggccgccaatcatttcagtgcgccgccttttggtgtcagccacacgctggcggcctatccgaggctgtgcaagccgcttgcatggttcaataccagaagtgcctggtagccagcgctgcgcgggggaaagcctggggagctcaggcgcgggctaggttaaggctcaagagaacgtcaagcatggactctcctggaggcccacttccgcttcctctgttgaaggggggagtgggtggggccggggcaacccctcgtaagcgcggagtgttttcattcctcgacgcgttcagacttaaaccctccctgttacacatgccttag

SEQ ID NO: 234503 - DNA, 1804 bp, Artificial Sequence
  derived and/or modified sequence
ggagcagccggggttatgctgggcaaggattacatgctggccatcattctggtcaactgcgatgatgacttgtggggggaccacagtctggaggtggaggctggcctgcctcctggctggaggaagatccacgatgctgcaggtacttactactggcatgtacccagcggtagcacccagtggcagcgcccaacctgggaactaggagatgcagaggacccaggcacgggaacggaggggatctggggactgcggccccccaaagggagatccttctccagcctggagagttcactggaccggagtaactctctgtcctggtatggtggggaatcctacatccagagcatggagccaggggctaagtgctttgcagtccgctctctgggctgggtagaggtacctgaagaggacctggcaccggggaagagcagtattgcagtcaataactgtatccagcagctggcccagacccgcagccggagccagcctccagatggtgcctggggtgagggccagaacatgctgatgatcctgaagaaggatgccatgagcctagtgaatcccctggaccacagtctgatccactgccagcctctggtgcacatccgtgtgtggggcgtggggagctccaagggccgccccatctctgcccctgctagggacttcgcttttgtggcaagtgacaaagatagctgtatgctcaagtgccatgtgttttgctgtgatgtccctgccaaggccattgccagtgccctacatgggctttgtgcccagatcttgtcagagcgagtagaggtcagtggtgatgcctcttgctgctccccagaccccatctctcctgaagacctgccacggcaagtggagctgctggatgcggtaagccaagctgctcagaagtacgaggcactgtatatggggacactgccagtcaccaaggccatgggcatggatgtgctgaacgaggccattggtaccctcaccgccaggggggaccggaatgcctgggtccccaccatgctcagtgtgtctgactctctcatgactgcacaccccattcaggcagaggccagtacagaggaggagccattgtggcagtgccctgtgcgccttgtgacatttattggtgttggccgcgacccacacacctttggcctcatcgctgacctgggccgtcagagcttccagtgcgcagccttctggtgccagccccatgcagggggactctctgaagctgtgcaggctgcctgtatggttcagtaccagaagtgtcttgtggcctctgcagctcgaggcaaggcctggggtgcccaggcccgtgcccgcctgcggctcaagcggaccagctccatggattccccaggaggtcccctgcccctccccctgctcaaaggaggggttggcggtgcaggggcaacccctcgaaagcggggtgtcttctcttttcttgatgccttccggctgaaaccctctctgctccatatgccctaaacttatctgggaaggctggggaagtaggctctgggtccatgcctaactctgtaccgttttattcctcaaggcctatagcctgtcactccttgaagccttctctgcctgtccctccgatccttgtccaccgtctatttattgcccaatttattgtttatacggatgactgggaggcactgcaccacaacgtaggaccctggctcccctttccttgggtccttgtgttccttgcccctgtccaaccctggacagttggctctacctcagtaacactttatagcaaaatcagtgcaaataaaaatccctcagtgac

SEQ ID NO: 234504 - DNA, 1476 bp, Artificial Sequence
  derived and/or modified sequence
atgctggggaaggactacatgctggctatcatactcgtgaactgcgacgacgacctctggggagaccattctctggaagtcgaggccggactgccacccggatggcgcaaaatccacgacgccgcaggcacatactactggcacgtgccctccgggagtacccagtggcagcgccctacttgggagctgggcgatgcagaagaccccggtacaggaacagagggcatttgggggttgcgaccccctaaaggtcgatcgttttcaagtcttgagagcagcctcgaccggtccaattctctttcgtggtacggcggagagtcatatatacagtccatggagccaggcgctaagtgttttgccgtgcgtagtcttgggtgggttgaagtgccagaggaagatctagcgcctggaaagagctcaatcgccgtaaacaactgtatacagcaactggctcaaacaagaagccgttcacaaccccctgacggcgcatggggcgaagggcaaaacatgctgatgattttgaagaaggacgccatgagcctggtgaatcctctggaccattctctgatccactgccaacccctggtccatattagggtgtggggtgtgggatcaagtaagggaaggcccatatcggcgccagcaagagactttgccttcgttgcctcagataaagattcttgcatgctgaagtgccatgtgttctgttgtgatgtgcccgcaaaagccattgcctctgctcttcacgggctttgcgctcaaattttatccgagcgcgtggaggtttcaggagatgctagctgttgttctcctgaccccatctcccccgaggacctacctcgtcaggtggagctgctggacgctgtgtcccaagctgcacagaaatacgaggctttgtatatgggaaccctgccagttacaaaggctatgggcatggatgtcctgaatgaggcgatcggtacacttacagctagaggggatagaaacgcttgggtccccacgatgctctctgtcagcgattctctcatgaccgcgcaccctattcaagccgaggctagtaccgaagaagaacccctgtggcagtgccccgtcagactggtaactttcattggagtggggagggatcctcacacatttgggctgattgctgaccttggcagacagtcgtttcagtgtgcggcattttggtgtcaaccgcacgctgggggtttaagtgaagccgtacaagccgcatgtatggtacaataccagaaatgcctggttgccagcgcagctagaggcaaagcatggggggcacaggcgagggctcggctgcggctcaagcggacatcatctatggattctccaggcggaccacttccattacctctcctgaaagggggagtgggtggcgcaggggctacccctagaaagagaggcgtcttctccttcctggatgcattccgcctgaaaccttccctgcttcacatgccatag

SEQ ID NO: 234505 - DNA, 1476 bp, Artificial Sequence
  derived and/or modified sequence
atgctgggcaaggactacatgctggccatcatcctggtgaactgcgacgacgacctgtggggcgaccacagcctggaggtggaggccggcctgccccccggctggagaaagatccacgacgccgccggcacctactactggcacgtgcccagcggcagcacccagtggcagagacccacctgggagctgggcgacgccgaggaccccggcaccggcaccgagggcatctggggcctgagaccccccaagggcagaagcttcagcagcctggagagcagcctggacagaagcaacagcctgagctggtacggcggcgagagctacatccagagcatggagcccggcgccaagtgcttcgccgtgagaagcctgggctgggtggaggtgcccgaggaggacctggcccccggcaagagcagcatcgccgtgaacaactgcatccagcagctggcccagaccagaagcagaagccagccccccgacggcgcctggggcgagggccagaacatgctgatgatcctgaagaaggacgccatgagcctggtgaaccccctggaccacagcctgatccactgccagcccctggtgcacatcagagtgtggggcgtgggcagcagcaagggcagacccatcagcgcccccgccagagacttcgccttcgtggccagcgacaaggacagctgcatgctgaagtgccacgtgttctgctgcgacgtgcccgccaaggccatcgccagcgccctgcacggcctgtgcgcccagatcctgagcgagagagtggaggtgagcggcgacgccagctgctgcagccccgaccccatcagccccgaggacctgcccagacaggtggagctgctggacgccgtgagccaggccgcccagaagtacgaggccctgtacatgggcaccctgcccgtgaccaaggccatgggcatggacgtgctgaacgaggccatcggcaccctgaccgccagaggcgacagaaacgcctgggtgcccaccatgctgagcgtgagcgacagcctgatgaccgcccaccccatccaggccgaggccagcaccgaggaggagcccctgtggcagtgccccgtgagactggtgaccttcatcggcgtgggcagagacccccacaccttcggcctgatcgccgacctgggcagacagagcttccagtgcgccgccttctggtgccagccccacgccggcggcctgagcgaggccgtgcaggccgcctgcatggtgcagtaccagaagtgcctggtggccagcgccgccagaggcaaggcctggggcgcccaggccagagccagactgagactgaagagaaccagcagcatggacagccccggcggccccctgcccctgcccctgctgaagggcggcgtgggcggcgccggcgccacccccagaaagagaggcgtgttcagcttcctggacgccttcagactgaagcccagcctgctgcacatgccctag

SEQ ID NO: 234506 - protein, 486 aa, Artificial Sequence
  derived and/or modified sequence
MLGKDYMLAIILVNCDDDLWGDHSLEVEAGLPPGWRKIHDAAGTYYWHVPSGSTQWQRPTWELGDAEDPGTGTEGIWGLRPPKGRSFSSLESSLDRSNSLSWYGGESYIQSMEPGAKCFAVRSLGWVEVPEEDLAPGKSSIAVNNCIQQLAQTRSRSQPPDGAWGEGQNMLMILKKDAMSLVNPLDHSLIHCQPLVHIRVWGVGSSKGRDRDFAFVASDKDSCMLKCHVFCCDVPAKAIASALHGLCAQILSERVEVSGDASCCSPDPISPEDLPRQVELLDAVSQAAQKYEALYMGTLPVTKAMGMDVLNEAIGTLTARGDRNAWVPTMLSVSDSLMTAHPIQAEASTEEEPLWQCPVRLVTFIGVGRDPHTFGLIADLGRQSFQCAAFWCQPHAGGLSEAVQAACMVQYQKCLVASAARGKAWGAQARARLRLKRTSSMDSPGGPLPLPLLKGGVGGAGATPRKRGVFSFLDAFRLKPSLLHMP

SEQ ID NO: 234507 - protein, 339 aa, Artificial Sequence
  derived and/or modified sequence
MLGKDYMLAIILVNCDDDLWGDHSLEVEAGLPPGWRKIHDAAGTYYWHVPSGSTQWQRPTWELGDAEDPGTGTEGIWGLRPPKGRSFSSLESSLDRSNSLSWYGGESYIQSMEPGAKCFAVRSLGWVEVPEEDLAPGKSSIAVNNCIQQLAQTRSRSQPPDGAWGEGQNMLMILKKDAMSLVNPLDHSLIHCQPLVHIRVWGVGSSKGRDRDFAFVASDKDSCMLKCHVFCCDVPAKAIASALHGLCAQILSERVEVSGDASCCSPDPISPEDLPRQVELLDAVSQAAQKYEALYMGTLPVTKAMGRGQYRGGAIVAVPCAPCDIYWCWPRPTHLWPHR

SEQ ID NO: 234508 - DNA, 1461 bp, Artificial Sequence
  derived and/or modified sequence
atgttgggcaaagattacatgcttgctattatacttgttaattgcgacgatgacttatggggtgaccacagtctggaggtagaagcggggttgcctcctggatggaggaaaatccacgatgccgccggtacttactactggcacgtgccatcaggaagcactcagtggcagcgccctacatgggaactgggcgacgcagaagatccgggcaccggtacagagggcatctggggtctacgccctccaaaaggccggtccttctcatccttggaatcttctcttgaccggtcgaactccctgagctggtatggcggcgaaagctatattcagtccatggaaccaggagcgaaatgcttcgccgtgcggagcctgggctgggtagaggttcccgaggaagatttggcccccgggaagagctctattgctgtgaacaattgcatacagcagctggcacagactcgaagtagaagccagcctcctgatggggcctggggtgaaggccagaacatgctaatgattcttaaaaaggacgcaatgagcctcgtcaatccactcgatcactccctgatacactgccagcccttggtacacatacgcgtttggggcgtgggctcttccaaagggcgagatagggatttcgcttttgtggctagtgacaaggattcctgtatgcttaagtgccacgtcttctgctgcgacgtgccagccaaagcaatcgcctcagccctccacggcttatgcgcacagatcctgtccgaacgcgtagaagtgtctggcgacgcatcatgttgcagccccgacccaatcagtccagaggacctcccacgccaggtggaactgcttgacgccgtgtcccaggcggcgcagaaatatgaggccctctacatgggaactttacctgttacaaaggctatgggaatggatgtgctgaacgaagctataggtaccctgactgcaagaggggaccgtaacgcttgggtgccaaccatgctctcagtgagcgattccctgatgacggcacaccctatccaggccgaggcctcgacggaggaggagcccctctggcagtgtcctgtccggttggtgacctttatcggggtcggccgggatccgcacacgttcggtctgattgcagatctggggaggcagagctttcagtgcgctgctttctggtgtcagccacacgccggcggactctccgaggccgttcaggccgcttgtatggtgcagtaccaaaagtgtcttgtggcaagcgcggcgcgggggaaagcctggggggcacaagcccgtgccagactgaggctgaagcgcacctctagcatggattcccccggaggccctctcccactccctctgttgaagggcggagtggggggggcaggggcgaccccacgcaagcgcggcgtgttcagcttcctcgatgcattccgcctgaaaccctccctgttacatatgccctag

SEQ ID NO: 234509 - DNA, 1020 bp, Artificial Sequence
  derived and/or modified sequence
atgttgggtaaagattatatgctggccataatccttgtaaactgtgacgacgacttatggggcgatcactcgctggaagtggaagccgggctgccaccagggtggaggaaaatccacgacgccgccgggacttattattggcatgtgccatctggttccactcagtggcagcggcccacatgggaactgggcgacgcggaggaccctggcacggggactgaaggcatctggggcttacgaccccccaaaggcaggagcttttctagcttggaaagttctctcgacaggagtaattccttaagttggtacggcggcgagagttatatccaatcaatggagcctggcgctaaatgcttcgccgttaggtctttagggtgggtcgaagtccctgaggaagatctcgctccaggaaagagctccatcgccgttaacaactgtatccagcaactggcgcagacacggtctcggtctcaacccccggatggagcctggggtgaggggcagaatatgttgatgatcctcaagaaagacgccatgagtcttgtcaaccctttggaccactccttaattcattgccagcccctggtacatattagggtgtggggcgtgggctcctccaaaggcagagacagagacttcgccttcgttgccagcgacaaggatagctgcatgctgaaatgtcacgtgttctgttgtgatgtgcccgccaaggccatcgcatctgccctgcacgggttgtgcgcccagatcctctctgagcgcgtggaggtgtcaggagacgcctcctgttgtagccccgatccgatatctccggaggaccttcctcgccaggtcgagctcctggatgcagtctcgcaggccgcccagaagtacgaggcattatacatgggtaccctgcccgtcaccaaggctatgggccgcggacaatatagaggaggagccatagtcgcagtgccttgcgctccctgtgatatttactggtgttggccaaggccaacacacctgtggccccaccggtag

SEQ ID NO: 234510 - DNA, 1461 bp, Artificial Sequence
  derived and/or modified sequence
atgctgggcaaggactacatgctggccatcatcctggtgaactgtgatgatgacctgtggggagaccacagcctggaggtggaggccggcctgcccccaggctggaggaagatccatgatgctgctggcacctactactggcacgtgcccagcggcagcacccagtggcagaggcccacctgggagctgggagatgctgaagatcctggcactggaacagagggcatctggggcctgcggccccccaagggccgctccttcagcagcctggagagcagcctggacaggagcaacagcctgtcctggtatggaggagagagctacatccagagcatggagcccggggccaagtgctttgctgtgcgcagcctgggctgggtggaggtgcctgaggaggacctggcccctgggaagagcagcattgctgtgaacaactgcatccagcagctggcccagaccaggagccgcagccagcccccagatggagcctggggcgagggccagaacatgctgatgatcctgaagaaggatgccatgagcctggtgaaccccctggaccacagcctcatccactgccagcccctggtgcacatccgggtgtggggcgtgggcagcagcaagggccgggaccgggactttgcctttgtggccagtgacaaggacagctgcatgctgaagtgccacgtgttctgctgtgatgtgcctgccaaggccatcgccagcgccctgcacggcctgtgtgcccagatcctgtctgagcgggtggaggtgtctggagatgccagctgctgcagcccagaccccatcagccctgaggacctgccccggcaggtggagctgctggatgctgtgtcccaggccgcccagaagtatgaggccctgtacatgggcaccctgcctgtgaccaaggccatgggcatggatgtgctgaatgaggccatcggcaccctgacagcccggggggacagaaatgcctgggtgcccaccatgctgtctgtgtctgacagcctgatgacagcccaccccatccaggccgaggccagcacagaggaggagcccctgtggcagtgccctgtgcggctggtgaccttcatcggcgtgggccgggacccccacaccttcggcctgattgctgacctgggccggcagagcttccagtgtgccgccttctggtgccagccccacgccggcggcctgtctgaggccgtgcaggccgcctgcatggtgcagtaccagaagtgcctggtggccagcgctgcccggggcaaggcctggggcgcccaggcccgggcccggctgcggctgaagaggaccagctccatggacagccctgggggccccctgcccctgcccctgctgaagggcggcgtgggcggggccggggccacccccaggaagaggggcgtcttctccttcctggatgccttccggctgaagcccagcctgctgcacatgccctag

SEQ ID NO: 234511 - DNA, 1020 bp, Artificial Sequence
  derived and/or modified sequence
atgctgggcaaggactacatgctggccatcatcctggtgaactgtgatgatgacctgtggggagaccacagcctggaggtggaggccggcctgcccccaggctggaggaagatccatgatgctgctggcacctactactggcacgtgcccagcggcagcacccagtggcagaggcccacctgggagctgggagatgctgaagatcctggcactggaacagagggcatctggggcctgcggccccccaagggccgctccttcagcagcctggagagcagcctggacaggagcaacagcctgtcctggtatggaggagagagctacatccagagcatggagcccggggccaagtgctttgctgtgcgcagcctgggctgggtggaggtgcctgaggaggacctggcccctgggaagagcagcattgctgtgaacaactgcatccagcagctggcccagaccaggagccgcagccagcccccagatggagcctggggcgagggccagaacatgctgatgatcctgaagaaggatgccatgagcctggtgaaccccctggaccacagcctcatccactgccagcccctggtgcacatccgggtgtggggcgtgggcagcagcaagggccgggaccgggactttgcctttgtggccagtgacaaggacagctgcatgctgaagtgccacgtgttctgctgtgatgtgcctgccaaggccatcgccagcgccctgcacggcctgtgtgcccagatcctgtctgagcgggtggaggtgtctggagatgccagctgctgcagcccagaccccatcagccctgaggacctgccccggcaggtggagctgctggatgctgtgtcccaggccgcccagaagtatgaggccctgtacatgggcaccctgcctgtgaccaaggccatgggccggggccagtaccggggcggggccatcgtggccgtgccctgtgccccctgtgacatctactggtgctggccccggcccacccacctgtggccccacaggtag

SEQ ID NO: 234512 - DNA, 1461 bp, Artificial Sequence
  derived and/or modified sequence
atgctgggcaaggactacatgctggccatcatcctggtgaactgcgacgacgatttgtggggagatcactccctggaggtagaggctggtttaccgcctggatggcgtaagattcatgatgctgctggtacctactactggcacgtgccctctggttccacccagtggcagcggccaacttgggaattaggcgacgccgaagaccccggcaccgggactgaaggcatttggggactgcggcctccgaagggaagaagtttttcaagtctagagtcttctcttgatagatctaactcactgtcctggtacggtggggagagctacatccaaagcatggaacccggggccaaatgcttcgccgtcagatccctaggctgggtcgaagtccctgaggaagatctggccccgggaaagtcttctatcgctgtgaacaattgtatccagcaactggcacaaacgcgcagcaggtcccagccccctgacggtgcatggggcgaagggcagaacatgcttatgatactcaagaaagatgcgatgagcctggtgaatccactcgaccactccctgatacactgtcagccactcgtgcatattagagtgtggggcgtgggtagcagtaagggaagagaccgggactttgccttcgtggccagtgataaagacagttgtatgctgaaatgccacgtgttttgctgtgatgtcccagccaaagcaatcgcatctgcccttcatgggctgtgtgcacagatacttagcgaacgggtggaagtgtccggcgatgcatcttgttgcagcccggacccaattagtcctgaggatctgccccggcaggtggagctcctcgacgctgtgtcccaggcagcacagaaatatgaagcgctttacatgggtaccctccctgtaactaaagctatggggatggatgtcctcaacgaggccatcggcaccttaaccgcccgcggggaccgcaacgcttgggtacctaccatgttgtctgtgtcggactctctgatgacagctcaccccattcaggctgaggcttctacggaggaggaacccttgtggcaatgtcccgtccgcctcgtaacatttatcggcgttggccgcgacccccacacttttggcttgatcgctgatctcggcaggcagtctttccagtgcgccgccttctggtgccagcctcacgctggaggactgagcgaagccgtccaggctgcttgcatggtgcagtaccaaaaatgtcttgtcgcttctgcagcccgaggaaaggcttggggcgcccaggcacgagcaaggctcaggctgaaaagaacctcttctatggatagccccggaggccccctccctctgcctcttctgaaagggggagttggtggcgccggtgctaccccaagaaaacggggagtgtttagctttctggatgcgtttaggctgaagcctagccttctacacatgccatag

SEQ ID NO: 234513 - DNA, 1020 bp, Artificial Sequence
  derived and/or modified sequence
atgctgggcaaggactacatgctggccatcatcctggtgaactgcgacgatgatctctggggtgaccactcgctggaggtagaggctggactccctcctgggtggcggaagatccacgacgctgccggaacatactattggcacgtcccttccgggtcaactcagtggcagagaccaacgtgggaattgggggatgcggaagaccccgggacaggaacggaaggaatatgggggctcagacctccaaaaggaaggtcattcagttcactggagagcagcttggaccgttccaattctctgagttggtacgggggggagagttatattcagtctatggagccgggagccaagtgttttgctgtccgctctctgggctgggtggaggttcctgaggaagacctggccccgggaaagagctctatcgccgttaataattgcattcaacagctcgcgcagacgaggtctagatctcagcctcctgacggagcctggggcgaaggacagaatatgctcatgatacttaaaaaggacgccatgagtctagtgaatcctctcgatcacagtctgattcactgccagccacttgttcacatccgtgtgtggggtgtaggatctagtaagggccgtgacagagactttgcctttgtcgcctcagacaaggatagctgtatgctaaaatgtcacgtgttctgctgcgacgtcccagcaaaagctatagcctcagcactgcacgggctgtgcgcacaaattctttcagaacgggtggaagtttccggcgacgcctcatgttgctctccggacccaatcagtccggaggacctgccacgtcaggtggagctgctcgatgccgtgagtcaggcagcccaaaagtatgaagcactgtatatgggaactctgccggtaaccaaagccatggggcgaggccaataccgcggcggagcaattgtggccgtcccctgcgccccctgcgatatctactggtgctggcctaggccgacacatctctggcctcaccgatag

SEQ ID NO: 234514 - DNA, 2218 bp, Artificial Sequence
  derived and/or modified sequence
acgtgaccccctcccgtcgagtctcaggctgcgtgtgagcgcactcacgaccggggcgcgatgatctcactcgtgcgcgagtgcgcgcggcgcatgttcggcgtgtcggtcttcaggcgcctgatgagttcatagttgggcggtggtgtcagcggtttcgctggcgttcgtgggcctcccccggacccacacacggaaacacgcaaccattcggggatccagacgcccgtttacacgcaccacccctgggcgggctgtgcggctcaggccctcccccgggaccggcccgtgtcccgccccgtgtcccgccccgtatttgtgcggcgccagctggccccgcagcctgcggcgcagagaggctgggcttgcaggcgcagtagctccagaggtcgcgctgggctgagagtgcgggccggcagaggctggcggggagcagccggggttatgctgggcaaggattacatgctggccatcattctggtcaactgcgatgatgacttgtggggggaccacagtctggaggtggaggctggcctgcctcctggctggaggaagatccacgatgctgcaggtacttactactggcatgtacccagcggtagcacccagtggcagcgcccaacctgggaactaggagatgcagaggacccaggcacgggaacggaggggatctggggactgcggccccccaaagggagatccttctccagcctggagagttcactggaccggagtaactctctgtcctggtatggtggggaatcctacatccagagcatggagccaggggctaagtgctttgcagtccgctctctgggctgggtagaggtacctgaagaggacctggcaccggggaagagcagtattgcagtcaataactgtatccagcagctggcccagacccgcagccggagccagcctccagatggtgcctggggtgagggccagaacatgctgatgatcctgaagaaggatgccatgagcctagtgaatcccctggaccacagtctgatccactgccagcctctggtgcacatccgtgtgtggggcgtggggagctccaagggccgtgacagggacttcgcttttgtggcaagtgacaaagatagctgtatgctcaagtgccatgtgttttgctgtgatgtccctgccaaggccattgccagtgccctacatgggctttgtgcccagatcttgtcagagcgagtagaggtcagtggtgatgcctcttgctgctccccagaccccatctctcctgaagacctgccacggcaagtggagctgctggatgcggtaagccaagctgctcagaagtacgaggcactgtatatggggacactgccagtcaccaaggccatgggcatggatgtgctgaacgaggccattggtaccctcaccgccaggggggaccggaatgcctgggtccccaccatgctcagtgtgtctgactctctcatgactgcacaccccattcaggcagaggccagtacagaggaggagccattgtggcagtgccctgtgcgccttgtgacatttattggtgttggccgcgacccacacacctttggcctcatcgctgacctgggccgtcagagcttccagtgcgcagccttctggtgccagccccatgcagggggactctctgaagctgtgcaggctgcctgtatggttcagtaccagaagtgtcttgtggcctctgcagctcgaggcaaggcctggggtgcccaggcccgtgcccgcctgcggctcaagcggaccagctccatggattccccaggaggtcccctgcccctccccctgctcaaaggaggggttggcggtgcaggggcaacccctcgaaagcggggtgtcttctcttttcttgatgccttccggctgaaaccctctctgctccatatgccctaaacttatctgggaaggctggggaagtaggctctgggtccatgcctaactctgtaccgttttattcctcaaggcctatagcctgtcactccttgaagccttctctgcctgtccctccgatccttgtccaccgtctatttattgcccaatttattgtttatacggatgactgggaggcactgcaccacaacgtaggaccctggctcccctttccttgggtccttgtgttccttgcccctgtccaaccctggacagttggctctacctcagtaacactttatagcaaaatcagtgcaaataaaaatccctcagtgac

SEQ ID NO: 234515 - DNA, 1748 bp, Artificial Sequence
  derived and/or modified sequence
ggctgggcttgcaggcgcagtagctccagaggtcgcgctgggctgagagtgcgggccggcagaggctggcggggagcagccggggttatgctgggcaaggattacatgctggccatcattctggtcaactgcgatgatgacttgtggggggaccacagtctggaggtggaggctggcctgcctcctggctggaggaagatccacgatgctgcaggtacttactactggcatgtacccagcggtagcacccagtggcagcgcccaacctgggaactaggagatgcagaggacccaggcacgggaacggaggggatctggggactgcggccccccaaagggagatccttctccagcctggagagttcactggaccggagtaactctctgtcctggtatggtggggaatcctacatccagagcatggagccaggggctaagtgctttgcagtccgctctctgggctgggtagaggtacctgaagaggacctggcaccggggaagagcagtattgcagtcaataactgtatccagcagctggcccagacccgcagccggagccagcctccagatggtgcctggggtgagggccagaacatgctgatgatcctgaagaaggatgccatgagcctagtgaatcccctggaccacagtctgatccactgccagcctctggtgcacatccgtgtgtggggcgtggggagctccaagggccgtgacagggacttcgcttttgtggcaagtgacaaagatagctgtatgctcaagtgccatgtgttttgctgtgatgtccctgccaaggccattgccagtgccctacatgggctttgtgcccagatcttgtcagagcgagtagaggtcagtggtgatgcctcttgctgctccccagaccccatctctcctgaagacctgccacggcaagtggagctgctggatgcggtaagccaagctgctcagaagtacgaggcactgtatatggggacactgccagtcaccaaggccatgggcagaggccagtacagaggaggagccattgtggcagtgccctgtgcgccttgtgacatttattggtgttggccgcgacccacacacctttggcctcatcgctgacctgggccgtcagagcttccagtgcgcagccttctggtgccagccccatgcagggggactctctgaagctgtgcaggctgcctgtatggttcagtaccagaagtgtcttgtggcctctgcagctcgaggcaaggcctggggtgcccaggcccgtgcccgcctgcggctcaagcggaccagctccatggattccccaggaggtcccctgcccctccccctgctcaaaggaggggttggcggtgcaggggcaacccctcgaaagcggggtgtcttctcttttcttgatgccttccggctgaaaccctctctgctccatatgccctaaacttatctgggaaggctggggaagtaggctctgggtccatgcctaactctgtaccgttttattcctcaaggcctatagcctgtcactccttgaagccttctctgcctgtccctccgatccttgtccaccgtctatttattgcccaatttattgtttatacggatgactgggaggcactgcaccacaacgtaggaccctggctcccctttccttgggtccttgtgttccttgcccctgtccaaccctggacagttggctctacctcagtaacactttatagcaaaatcagtgcaaataaaaatccctcagtgacctc

SEQ ID NO: 234516 - DNA, 1920 bp, Artificial Sequence
  derived and/or modified sequence
atgctgggcaaggattacatgctggccatcattctggtcaactgcgatgatgacttgtggggggaccacagtctggaggtggaggctggcctgcctcctggctggaggaagatccacgatgctgcaggtacttactactggcatgtacccagcggtagcacccagtggcagcgcccaacctgggaactaggagatgcagaggacccaggcacgggaacggaggggatctggggactgcggccccccaaagggagatccttctccagcctggagagttcactggaccggagtaactctctgtcctggtatggtggggaatcctacatccagagcatggagccaggggctaagtgctttgcagtccgctctctgggctgggtagaggtacctgaagaggacctggcaccggggaagagcagtattgcagtcaataactgtatccagcagctggcccagacccgcagccggagccagcctccagatggtgcctggggtgagggccagaacatgctgatgatcctgaagaaggatgccatgagcctagtgaatcccctggaccacagtctgatccactgccagcctctggtgcacatccgtgtgtggggcgtggggagctccaagggccgatcctctgatgtggacccaggactgcttcccctgcctggtccagccctggttggggagggtgggcccagctcagcagggacagtttggggagagtccgagaggctgggctgattcccttctgtgctcccacatgcttccggaacagtgacagggacttcgcttttgtggcaagtgacaaagatagctgtatgctcaagtgccatgtgttttgctgtgatgtccctgccaaggccattgccagtgccctacatgggctttgtgcccagatcttgtcagagcgagtagaggtcagtggtgatgcctcttgctgctccccagaccccatctctcctgaagacctgccacggcaagtggagctgctggatgcggtaagccaagctgctcagaagtacgaggcactgtatatggggacactgccagtcaccaaggccatgggcatggatgtgctgaacgaggccattggtaccctcaccgccaggggggaccggaatgcctgggtccccaccatgctcagtgtgtctgactctctcatgactgcacaccccattcaggcagaggccagtacagaggaggagccattgtggcagtgccctgtgcgccttgtgacatttattggtgttggccgcgacccacacacctttggcctcatcgctgacctgggccgtcagagcttccagtgcgcagccttctggtgccagccccatgcagggggactctctgaagctgtgcaggctgcctgtatggttcagtaccagaagtgtcttgtggcctctgcagctcgaggcaaggcctggggtgcccaggcccgtgcccgcctgcggctcaagcggaccagctccatggattccccaggaggtcccctgcccctccccctgctcaaaggaggggttggcggtgcaggggcaacccctcgaaagcggggtgtcttctcttttcttgatgccttccggctgaaaccctctctgctccatatgccctaaacttatctgggaaggctggggaagtaggctctgggtccatgcctaactctgtaccgttttattcctcaaggcctatagcctgtcactccttgaagccttctctgcctgtccctccgatccttgtccaccgtctatttattgcccaatttattgtttatacggatgactgggaggcactgcaccacaacgtaggaccctggctcccctttccttgggtccttgtgttccttgcccctgtccaaccctggacagttggctctacctcagtaacactttatagcaaaatcagtgcaaataaaaatccctcagtgac

SEQ ID NO: 234517 - DNA, 1461 bp, Artificial Sequence
  derived and/or modified sequence
atgctgggtaaggattacatgttggcgatcatcctcgtgaattgcgatgatgatctgtggggggatcattcattggaggttgaagccggtctacctccagggtggagaaaaatccacgacgccgctgggacatattactggcatgtgccatctggaagcacccagtggcagagacccacatgggagctgggggacgctgaagatcccggaaccgggaccgaggggatctggggactccggcctccgaaaggacggagtttttcctccctggaatcgtcccttgacaggtctaattctctttcttggtatggcggagagagctacatccagtcgatggagcccggagccaaatgtttcgccgttaggtctctcgggtgggtcgaagtgcctgaggaagacctcgctccaggcaaatcttccatagccgtcaacaattgtatacaacagctcgcacagactaggagtaggagccaaccaccggacggtgcctggggagaagggcaaaacatgctaatgattctcaaaaaagacgctatgtccctagtgaatccactggatcatagcctcattcactgtcagcccttggtgcacatccgggtttggggcgttgggagcagcaagggcagagaccgcgatttcgctttcgtggcttcagacaaggactcatgcatgctcaaatgtcacgtcttttgctgcgatgtgcctgcgaaagcaatcgcctccgctctccacggcctgtgtgcgcagatcctaagcgaacgagttgaggtatcgggagacgctagttgctgttctccagaccccatctcccccgaggacctgccacggcaggttgagctgctggatgctgtgtcacaggcagcccagaagtacgaggccctgtacatggggaccctgccagtgactaaagccatgggaatggatgttctcaacgaggcaatagggactcttacagcccgaggcgacaggaatgcctgggtgcccaccatgctgtccgtttcggacagcctcatgacggcacatcctatccaggcggaggccagcacagaggaagaacctttgtggcagtgtccggtgaggttggtaactttcattggggtgggcagagaccctcacaccttcggcctcatcgcagatcttggaagacaatccttccagtgtgcagccttctggtgtcaacctcatgctggcggattgtccgaggccgtacaggcggcatgcatggtccagtatcagaagtgtctggttgcctccgccgcaagagggaaagcctggggggctcaggccagggcaagactgcgcttgaaacgcacatcttccatggactcacccggagggccactacctctgccactcctgaaaggcggagtaggcggagcaggggcaacaccacgcaagaggggcgttttttctttcttggatgccttccgcctgaaacctagccttctgcatatgccatag

SEQ ID NO: 234518 - DNA, 1020 bp, Artificial Sequence
  derived and/or modified sequence
atgctgggcaaagactatatgctggccattatcctggtgaattgcgatgatgacttgtggggagaccatagcttggaggtagaggccggactcccacctggatggcggaagatccacgacgccgcaggaacttattattggcatgtcccgtctgggtcaacacagtggcaaagacccacttgggagctgggcgacgccgaagacccagggacgggcaccgaaggcatatgggggctgcgccctcccaaaggcagatcgttcagttcactcgaaagcagcttggatcggtcaaatagcctgtcttggtacggaggagagtcttacattcagagcatggagcccggagccaagtgcttcgccgtccgtagcctcggatgggttgaggtgccagaagaagacctggcacctggcaagagctccatcgcagtcaataattgcatccagcagctcgctcagacaaggagtcggtctcagccgccagatggcgcatggggcgaaggtcaaaacatgctaatgatcctcaagaaggacgctatgagcttggttaatcccctggaccacagcttgattcactgccaaccactggtgcacataagggtgtggggcgtggggtcatctaagggtcgtgatagggatttcgcgttcgtcgcctcagacaaggacagctgcatgttgaagtgtcacgtgttctgttgcgatgtacccgctaaagctatcgcttcggccctccacgggctctgtgcccagattctgagtgagagggttgaagtatccggagacgctagttgttgtagtcctgaccccatctctccagaggacctgccacgacaagtggaattgctcgatgcggtcagccaggcggctcagaaatatgaagcactgtatatgggcacactgcctgtgaccaaagccatggggaggggccagtaccggggtggcgctatcgttgccgtaccctgcgcaccttgtgatatttactggtgttggcccaggcccacacacctttggcctcatcgatag

SEQ ID NO: 234519 - DNA, 1461 bp, Artificial Sequence
  derived and/or modified sequence
atgctgggcaaggactacatgctggccatcatcctggtgaactgcgacgacgacctgtggggcgaccacagcctggaggtggaggccggcctgccccccggctggagaaagatccacgacgccgccggcacctactactggcacgtgcccagcggcagcacccagtggcagagacccacctgggagctgggcgacgccgaggaccccggcaccggcaccgagggcatctggggcctgagaccccccaagggcagaagcttcagcagcctggagagcagcctggacagaagcaacagcctgagctggtacggcggcgagagctacatccagagcatggagcccggcgccaagtgcttcgccgtgagaagcctgggctgggtggaggtgcccgaggaggacctggcccccggcaagagcagcatcgccgtgaacaactgcatccagcagctggcccagaccagaagcagaagccagccccccgacggcgcctggggcgagggccagaacatgctgatgatcctgaagaaggacgccatgagcctggtgaaccccctggaccacagcctgatccactgccagcccctggtgcacatcagagtgtggggcgtgggcagcagcaagggcagagacagagacttcgccttcgtggccagcgacaaggacagctgcatgctgaagtgccacgtgttctgctgcgacgtgcccgccaaggccatcgccagcgccctgcacggcctgtgcgcccagatcctgagcgagagagtggaggtgagcggcgacgccagctgctgcagccccgaccccatcagccccgaggacctgcccagacaggtggagctgctggacgccgtgagccaggccgcccagaagtacgaggccctgtacatgggcaccctgcccgtgaccaaggccatgggcatggacgtgctgaacgaggccatcggcaccctgaccgccagaggcgacagaaacgcctgggtgcccaccatgctgagcgtgagcgacagcctgatgaccgcccaccccatccaggccgaggccagcaccgaggaggagcccctgtggcagtgccccgtgagactggtgaccttcatcggcgtgggcagagacccccacaccttcggcctgatcgccgacctgggcagacagagcttccagtgcgccgccttctggtgccagccccacgccggcggcctgagcgaggccgtgcaggccgcctgcatggtgcagtaccagaagtgcctggtggccagcgccgccagaggcaaggcctggggcgcccaggccagagccagactgagactgaagagaaccagcagcatggacagccccggcggccccctgcccctgcccctgctgaagggcggcgtgggcggcgccggcgccacccccagaaagagaggcgtgttcagcttcctggacgccttcagactgaagcccagcctgctgcacatgccctag

SEQ ID NO: 234520 - DNA, 1020 bp, Artificial Sequence
  derived and/or modified sequence
atgctgggcaaggactacatgctggccatcatcctggtgaactgcgacgacgacctgtggggcgaccacagcctggaggtggaggccggcctgccccccggctggagaaagatccacgacgccgccggcacctactactggcacgtgcccagcggcagcacccagtggcagagacccacctgggagctgggcgacgccgaggaccccggcaccggcaccgagggcatctggggcctgagaccccccaagggcagaagcttcagcagcctggagagcagcctggacagaagcaacagcctgagctggtacggcggcgagagctacatccagagcatggagcccggcgccaagtgcttcgccgtgagaagcctgggctgggtggaggtgcccgaggaggacctggcccccggcaagagcagcatcgccgtgaacaactgcatccagcagctggcccagaccagaagcagaagccagccccccgacggcgcctggggcgagggccagaacatgctgatgatcctgaagaaggacgccatgagcctggtgaaccccctggaccacagcctgatccactgccagcccctggtgcacatcagagtgtggggcgtgggcagcagcaagggcagagacagagacttcgccttcgtggccagcgacaaggacagctgcatgctgaagtgccacgtgttctgctgcgacgtgcccgccaaggccatcgccagcgccctgcacggcctgtgcgcccagatcctgagcgagagagtggaggtgagcggcgacgccagctgctgcagccccgaccccatcagccccgaggacctgcccagacaggtggagctgctggacgccgtgagccaggccgcccagaagtacgaggccctgtacatgggcaccctgcccgtgaccaaggccatgggcagaggccagtacagaggcggcgccatcgtggccgtgccctgcgccccctgcgacatctactggtgctggcccagacccacccacctgtggccccacagatag

SEQ ID NO: 234521 - protein, 484 aa, Artificial Sequence
  derived and/or modified sequence
MLGKDYMLAIILVNCDDDLWGDHSLEVEAGLPPGWRKIHDAAGTYYWHVPSGSTQWQRPTWELGDAEDPGTGTEGIWGLRPPKGRSFSSLESSLDRSNSLSWYGGESYIQSMEPGAKCFAVRSLGWVEVPEEDLAPGKSSIAVNNCIQQLAQTRSRSQPPDGAWGEGQNMLMILKKDAMSLVNPLDHSLIHCQPLVHIRVWGVGSSKGRDFAFVASDKDSCMLKCHVFCCDVPAKAIASALHGLCAQILSERVEVSGDASCCSPDPISPEDLPRQVELLDAVSQAAQKYEALYMGTLPVTKAMGMDVLNEAIGTLTARGDRNAWVPTMLSVSDSLMTAHPIQAEASTEEEPLWQCPVRLVTFIGVGRDPHTFGLIADLGRQSFQCAAFWCQPHAGGLSEAVQAACMVQYQKCLVASAARGKAWGAQARARLRLKRTSSMDSPGGPLPLPLLKGGVGGAGATPRKRGVFSFLDAFRLKPSLLHMP

SEQ ID NO: 234522 - DNA, 168 bp, Artificial Sequence
  derived and/or modified sequence
atggtccagtctgcctcagtgtccaaggcaggaaagggctcatcaagctcccacggcgtagccgccgccctgaaccaggatttggaccccgaccctaaatgccacgtgtttaatgtgtcttcacagcgctgtcaaatgggatccgctcagccgtgcctttgttgttag

SEQ ID NO: 234523 - DNA, 1455 bp, Artificial Sequence
  derived and/or modified sequence
atgctgggcaaggactacatgctagcgatcatccttgtcaattgcgatgatgatctctggggcgaccactccctggaagtagaggccggccttcctcccggctggcggaagattcatgacgcagctggcacatactactggcacgtgcccagtgggagcactcaatggcagcgacccacatgggagttgggagacgcggaggatccgggtacgggaaccgagggcatctggggtttaagaccacctaaaggacgcagcttctccagcctggagagcagtctcgacagatctaactcattatcctggtatggaggggaatcctatatacagtccatggagccgggagccaaatgcttcgccgtgaggtctttgggatgggtcgaagtgcccgaagaggaccttgcccctgggaaaagctctatcgccgtgaataactgtattcaacaactggctcagacccgctctcgaagtcagccccctgacggagcatggggtgaggggcaaaatatgctcatgatcctgaagaaggacgccatgtcacttgtcaatccgttagaccattctctgatacattgccaacccctcgtgcacatccgcgtttggggagtgggcagcagcaagggaagggacttcgcgttcgtcgctagcgataaggacagctgcatgctaaaatgccacgtcttctgctgtgacgttcccgcgaaggccatcgctagtgctctccacggtctttgcgcccaaattctgtccgagcgtgtcgaagtttccggagacgctagttgttgcagccctgacccaatatccccagaggatctgcctagacaggtggaattactcgacgccgtatctcaggctgcccagaagtatgaagctctgtacatgggaacactacctgttacaaaagccatgggaatggacgtcctgaatgaggcgatcggcacactgactgccagaggggaccggaacgcatgggtcccgactatgctctccgtctcagacagcctcatgaccgcccatcctatccaggccgaagcctcgacggaggaggagccgctctggcagtgtcctgtgcgattggtgacctttattggtgtggggcgagaccctcatacgttcgggttaatcgcggatctgggacggcaaagttttcagtgtgccgcgttttggtgccagccgcacgctgggggattgtcagaggccgtgcaagccgcttgtatggtccaataccaaaagtgcctggtcgcaagtgcagccagagggaaggcctggggtgctcaggccagagctaggctcaggctaaagcggaccagctcaatggattcacccggcggccccctgcctctgcctctgttaaaaggcggcgtgggaggtgcgggagctaccccgcggaagagaggcgtgttttcgtttcttgacgcttttcgcttaaagccttccctcctacacatgccatag

SEQ ID NO: 234524 - DNA, 792 bp, Artificial Sequence
  derived and/or modified sequence
atgctaaagtgccacgtgttttgctgcgatgttcccgccaaggcaattgcatccgccctgcacgggttgtgtgcccagattttatcagagagagttgaagtcagcggagatgcttcttgttgttctcccgatccaatcagtccagaggaccttccgcgccaggtagagctgctagatgctgtttctcaagctgcccaaaagtacgaagcgttgtacatgggcacactgcctgtgacaaaggcaatgggtatggacgtgcttaacgaagccatcggtaccctgacagcgcggggagacaggaacgcctgggtgccaaccatgctctcagtgtccgactctctgatgactgctcatcctatccaggcagaggccagtactgaggaagaaccactctggcagtgccctgtccgattagtcactttcattggggtaggacgggatccacatactttcggactgattgcagatttaggcaggcagtctttccagtgtgccgccttttggtgccagccccacgcagggggacttagcgaggccgtacaagccgcctgcatggtgcagtatcagaagtgcctggtagcaagcgccgcacggggaaaagcctggggagctcaggccagagcccggctccggttgaaaaggacctctagcatggattctcctggaggcccgctgcctctccctctgctcaaagggggcgtgggaggggctggtgccactccaagaaagcggggggtcttcagctttctggatgctttcaggctgaagccctccttactgcacatgccctag

SEQ ID NO: 234525 - DNA, 645 bp, Artificial Sequence
  derived and/or modified sequence
atgctgggcaaagactatatgttggctattattctggtcaactgcgatgacgacctgtggggtgatcactcactggaggtggaggcgggcctgccacctggctggcgaaagattcacgacgccgcggggacctactattggcatgtgcccagcggctcaacccaatggcaaagaccaacttgggagctgggcgatgccgaggatcccgggactggaacggaaggcatctgggggctgcggcctcctaaggggaggtctttttcctctctggaaagttccctggacaggtccaattcattgagttggtacgggggcgagtcatacatccagtccatggagcccggcgcgaaatgctttgcagttaggtctctgggctgggttgaggttcctgaggaggatctggcacctggtaaatcgagtatcgcggtcaataactgcattcagcagctcgcacagactcgttcacgctcccaacctcctgacggggcctggggcgaggggcagaatatgttgatgattctaaagaaagacgccatgtcgcttgttaatcccttggatcattcccttatccactgtcaaccgctggccgtcatccccacggacgctgacccccagtacctaaatccatggacccagattctgtag

SEQ ID NO: 234526 - DNA, 1455 bp, Artificial Sequence
  derived and/or modified sequence
atgctgggcaaggactacatgctggccatcatcctggtgaactgtgatgatgacctgtggggagaccacagcctggaggtggaggccggcctgcccccaggctggaggaagatccatgatgctgctggcacctactactggcacgtgcccagcggcagcacccagtggcagaggcccacctgggagctgggagatgctgaagatcctggcactggaacagagggcatctggggcctgcggccccccaagggccgctccttcagcagcctggagagcagcctggacaggagcaacagcctgtcctggtatggaggagagagctacatccagagcatggagcccggggccaagtgctttgctgtgcgcagcctgggctgggtggaggtgcctgaggaggacctggcccctgggaagagcagcattgctgtgaacaactgcatccagcagctggcccagaccaggagccgcagccagcccccagatggagcctggggcgagggccagaacatgctgatgatcctgaagaaggatgccatgagcctggtgaaccccctggaccacagcctcatccactgccagcccctggtgcacatccgggtgtggggcgtgggcagcagcaagggccgggactttgcctttgtggccagtgacaaggacagctgcatgctgaagtgccacgtgttctgctgtgatgtgcctgccaaggccatcgccagcgccctgcacggcctgtgtgcccagatcctgtctgagcgggtggaggtgtctggagatgccagctgctgcagcccagaccccatcagccctgaggacctgccccggcaggtggagctgctggatgctgtgtcccaggccgcccagaagtatgaggccctgtacatgggcaccctgcctgtgaccaaggccatgggcatggatgtgctgaatgaggccatcggcaccctgacagcccggggggacagaaatgcctgggtgcccaccatgctgtctgtgtctgacagcctgatgacagcccaccccatccaggccgaggccagcacagaggaggagcccctgtggcagtgccctgtgcggctggtgaccttcatcggcgtgggccgggacccccacaccttcggcctgattgctgacctgggccggcagagcttccagtgtgccgccttctggtgccagccccacgccggcggcctgtctgaggccgtgcaggccgcctgcatggtgcagtaccagaagtgcctggtggccagcgctgcccggggcaaggcctggggcgcccaggcccgggcccggctgcggctgaagaggaccagctccatggacagccctgggggccccctgcccctgcccctgctgaagggcggcgtgggcggggccggggccacccccaggaagaggggcgtcttctccttcctggatgccttccggctgaagcccagcctgctgcacatgccctag

SEQ ID NO: 234527 - DNA, 792 bp, Artificial Sequence
  derived and/or modified sequence
atgctgaagtgccacgtgttctgctgtgatgtgcctgccaaggccatcgccagcgccctgcacggcctgtgtgcccagatcctgtctgagcgggtggaggtgtctggagatgccagctgctgcagcccagaccccatcagccctgaggacctgccccggcaggtggagctgctggatgctgtgtcccaggccgcccagaagtatgaggccctgtacatgggcaccctgcctgtgaccaaggccatgggcatggatgtgctgaatgaggccatcggcaccctgacagcccggggggacagaaatgcctgggtgcccaccatgctgtctgtgtctgacagcctgatgacagcccaccccatccaggccgaggccagcacagaggaggagcccctgtggcagtgccctgtgcggctggtgaccttcatcggcgtgggccgggacccccacaccttcggcctgattgctgacctgggccggcagagcttccagtgtgccgccttctggtgccagccccatgctgggggcctgtctgaggccgtgcaggccgcctgcatggtgcagtaccagaagtgcctggtggccagcgctgcccggggcaaggcctggggcgcccaggcccgggcccggctgcggctgaagaggaccagctccatggacagccctgggggccccctgcccctgcccctgctgaagggcggcgtgggcggggccggggccacccccaggaagaggggcgtcttctccttcctggatgccttccggctgaagcccagcctgctgcacatgccctag

SEQ ID NO: 234528 - DNA, 645 bp, Artificial Sequence
  derived and/or modified sequence
atgctgggcaaggactacatgctggccatcatcctggtgaactgtgatgatgacctgtggggagaccacagcctggaggtggaggccggcctgcccccaggctggaggaagatccatgatgctgctggcacctactactggcacgtgcccagcggcagcacccagtggcagaggcccacctgggagctgggagatgctgaagatcctggcactggaacagagggcatctggggcctgcggccccccaagggccgctccttcagcagcctggagagcagcctggacaggagcaacagcctgtcctggtatggaggagagagctacatccagagcatggagcccggggccaagtgctttgctgtgcgcagcctgggctgggtggaggtgcctgaggaggacctggcccctgggaagagcagcattgctgtgaacaactgcatccagcagctggcccagaccaggagccgcagccagcccccagatggagcctggggcgagggccagaacatgctgatgatcctgaagaaggatgccatgagcctggtgaaccccctggaccacagcctcatccactgccagcccctggccgtcatccccacagatgctgacccccagtacctgaacccctggacccagatcctgtag

SEQ ID NO: 234529 - DNA, 1455 bp, Artificial Sequence
  derived and/or modified sequence
atgctgggcaaggactacatgctggccatcatcctggtgaactgcgatgatgacctttggggggatcactccttggaggtagaagcaggtctaccaccagggtggcggaagatccatgatgctgccggcacatactattggcacgtgcccagcggttccacccagtggcagaggcccacatgggagctgggcgacgctgaagatcccggaacgggcacggagggaatctgggggctgaggccacccaagggccggagtttctcaagtctagagagcagcctagaccgctctaacagtctttcatggtacgggggagagagctacatccaatctatggaaccaggggccaagtgtttcgcagtgcgttcgttaggatgggttgaagttcctgaggaggatcttgcccctggaaaatcctccatcgctgtgaacaactgcatccagcagttggcccaaaccagatctcgatctcagccgccggacggcgcctggggcgagggtcagaatatgcttatgattctgaagaaagatgcaatgtccctggtgaatccactggatcactctctcattcactgtcagcctctggtgcacatccgtgtgtggggagtggggtcctcgaaagggcgcgatttcgccttcgtcgccagcgataaagatagttgcatgttgaagtgccacgtgttctgttgtgatgtgcctgccaaggccatcgcctcggcactacacggactttgtgcccaaattctcagtgaacgtgttgaggtctcaggggacgcctcctgttgttcccccgaccccatttcaccggaggacctccctcgccaggtcgagctcttggacgccgtgtctcaagctgcacagaaatatgaggcactgtacatggggacgctgccagtgacaaaagccatgggcatggacgtgttgaacgaggcgattggtaccctcaccgccaggggggataggaatgcttgggtcccaacaatgctatcagtcagcgatagcctcatgacggcacaccctatacaagctgaagcctctactgaggaggagccactgtggcagtgccccgtgcggttggtaacatttattggtgtggggagggatccccacacattcggattaattgcggatctgggccgccagtcattccagtgcgccgcattctggtgtcaaccacacgccggaggtctgtctgaggctgtccaagccgcatgtatggtccagtaccagaaatgcctcgttgcctctgcggcacgcggtaaggcgtggggcgctcaagctcgggcccgcttacggctgaagcgcaccagcagtatggactctcctggcgggcctttgcccctcccgttactgaagggcggtgttggcggcgccggggccaccccaaggaagcggggagtgttttcattcctggacgcttttagacttaaaccttctcttctgcacatgccttag

SEQ ID NO: 234530 - DNA, 792 bp, Artificial Sequence
  derived and/or modified sequence
atgctgaagtgccacgtgttctgctgcgacgtgcccgccaaggccatcgcatccgctctccacggtttatgcgcccaaatcctctccgaaagagtcgaggtgagtggggatgctagttgctgctcacccgatcccatctcccccgaagatttacccagacaggtcgaattgctcgatgcagtctcccaggcggcccaaaaatacgaagccctttacatgggcacactccctgtcacaaaagcgatgggcatggacgtgctgaacgaggccattggaaccctgacagcacgcggagacaggaatgcctgggttcccacaatgctctccgtgagcgacagcctcatgaccgctcaccccatacaggccgaggcatccaccgaggaagagcctctctggcagtgcccagtgaggcttgtaaccttcattggcgttgggagggatccccacactttcggcttgatcgccgatctgggcaggcaatcctttcagtgcgcagccttttggtgccagccacacgccggtggactctcagaagcagtgcaggcagcttgcatggtacaataccagaaatgtctggtggcaagtgctgcgcgcgggaaagcctggggggcccaggcccgcgcaaggctgagactcaagcgtacatccagtatggattcaccaggcggccctctcccgctgccactcttaaagggtggggttggcggcgcaggggcgacccccagaaaaagaggggtattctctttcttggatgcctttcggcttaagccatcactgttacacatgccttag

SEQ ID NO: 234531 - DNA, 645 bp, Artificial Sequence
  derived and/or modified sequence
atgctgggcaaggactacatgctggccatcatcctggtgaactgcgatgacgatctgtggggcgaccacagtctggaagtggaagcaggcctccctccaggatggcggaagatccacgatgccgctggaacttattactggcacgtaccttctgggtctacacagtggcagagacccacatgggagctgggtgacgcagaggatcctggaaccggaacagagggcatctggggcctacgcccccccaaaggccggagcttctcctcacttgagagctccctcgaccgatcaaatagtctcagctggtatggaggtgaatcttatatccagagtatggagcctggagcaaaatgctttgccgtgcgtagtctgggctgggtcgaagtccccgaggaagatctggctcctggaaaatcctcaattgcagtgaacaattgcatacaacagttggctcagacccgttcaagaagccagcctcccgatggggcgtggggagaaggacagaatatgctaatgattttgaagaaagacgcaatgagtctagtcaatcctttggaccactctcttatacattgtcaaccacttgctgtgatcccaactgatgccgacccccagtaccttaacccgtggactcagattctttag

SEQ ID NO: 234532 - DNA, 1455 bp, Artificial Sequence
  derived and/or modified sequence
atgctgggcaaggattacatgctggccatcattctggtcaactgcgatgatgacttgtggggggaccacagtctggaggtggaggctggcctgcctcctggctggaggaagatccacgatgctgcaggtacttactactggcatgtacccagcggtagcacccagtggcagcgcccaacctgggaactaggagatgcagaggacccaggcacgggaacggaggggatctggggactgcggccccccaaagggagatccttctccagcctggagagttcactggaccggagtaactctctgtcctggtatggtggggaatcctacatccagagcatggagccaggggctaagtgctttgcagtccgctctctgggctgggtagaggtacctgaagaggacctggcaccggggaagagcagtattgcagtcaataactgtatccagcagctggcccagacccgcagccggagccagcctccagatggtgcctggggtgagggccagaacatgctgatgatcctgaagaaggatgccatgagcctagtgaatcccctggaccacagtctgatccactgccagcctctggtgcacatccgtgtgtggggcgtggggagctccaagggccgggacttcgcttttgtggcaagtgacaaagatagctgtatgctcaagtgccatgtgttttgctgtgatgtccctgccaaggccattgccagtgccctacatgggctttgtgcccagatcttgtcagagcgagtagaggtcagtggtgatgcctcttgctgctccccagaccccatctctcctgaagacctgccacggcaagtggagctgctggatgcggtaagccaagctgctcagaagtacgaggcactgtatatggggacactgccagtcaccaaggccatgggcatggatgtgctgaacgaggccattggtaccctcaccgccaggggggaccggaatgcctgggtccccaccatgctcagtgtgtctgactctctcatgactgcacaccccattcaggcagaggccagtacagaggaggagccattgtggcagtgccctgtgcgccttgtgacatttattggtgttggccgcgacccacacacctttggcctcatcgctgacctgggccgtcagagcttccagtgcgcagccttctggtgccagccccatgcagggggactctctgaagctgtgcaggctgcctgtatggttcagtaccagaagtgtcttgtggcctctgcagctcgaggcaaggcctggggtgcccaggcccgtgcccgcctgcggctcaagcggaccagctccatggattccccaggaggtcccctgcccctccccctgctcaaaggaggggttggcggtgcaggggcaacccctcgaaagcggggtgtcttctcttttcttgatgccttccggctgaaaccctctctgctccatatgccctaa

SEQ ID NO: 234533 - DNA, 1455 bp, Artificial Sequence
  derived and/or modified sequence
atgctggggaaggattacatgctcgccataatactggtgaactgcgatgatgatttatggggggaccacagcttggaggtcgaagctggcctgccacccggatggcgcaaaatccacgatgctgctggcacatactactggcacgtgccgagcggttctacgcagtggcagcggcctacctgggaactgggcgatgccgaggatcctggtaccggaacggagggcatatgggggttgcgcccaccaaaaggccgatcctttagctccctggagtccagcctggatcggtctaattcactgagttggtacgggggagaaagctatatccaaagtatggagcccggagcaaaatgtttcgcagtcagaagcttaggttgggtggaggtcccggaagaggatctggcgcctggcaagtcaagcattgctgtgaacaattgcattcagcagctggcacagacacgatctagatctcaacccccagacggggcatggggggaaggtcagaacatgctcatgatcctgaagaaggacgcaatgtccctggtgaacccccttgatcactcactgatccattgccaaccattagttcatatcagggtgtggggagtggggtcctctaaagggagggattttgctttcgtggccagcgataaagactcctgcatgcttaagtgccacgtgttctgttgtgacgtgccggcaaaggctattgcaagcgctctgcacggcctgtgtgcacagatcctgtctgaacgggtggaggtgtctggcgacgcatcctgttgttctcccgatccaatctcgcctgaagacctcccgagacaggtggagctgctggatgctgtctctcaggccgcacaaaagtatgaagccctctacatgggcacactccccgtaaccaaggcaatgggcatggacgtattaaacgaagctattggaacgctcactgctagaggcgatcggaacgcctgggtcccaaccatgctttctgtgtccgattcgttgatgaccgcccaccctattcaagcagaggccagcacggaagaggaaccactatggcagtgccccgtccggctcgtgacatttatcggtgtgggaagagacccacatacattcggactgattgccgacctgggaaggcagagcttccaatgtgccgcattttggtgtcagccccatgcgggtgggctcagcgaagcagtgcaggccgcttgtatggtgcaataccaaaagtgtttggtagccagtgcggctcgaggcaaggcatggggtgcacaggccagagccaggcttcgtctgaagcgcacatcaagtatggatagcccgggtggacccctgccgctgcctctgctgaaaggcggagtgggcggagcgggtgctactcctcgcaagaggggagttttttcttttctcgacgcgtttcgtcttaagcccagccttctgcatatgccttag

SEQ ID NO: 234534 - DNA, 792 bp, Artificial Sequence
  derived and/or modified sequence
atgctcaagtgccacgtgttttgctgtgatgtgcctgccaaagcgattgccagtgcgctgcatggactttgcgctcagattctcagcgagcgcgtcgaggttagcggtgatgcatcttgctgcagccctgatccaatttccccagaggatctcccgaggcaggttgaacttctcgacgcagtcagccaggccgctcagaagtacgaggccctgtacatgggcacgctccctgttacaaaggctatggggatggacgtgcttaatgaagccataggaaccctcacggctaggggagatcgcaatgcctgggttcccacgatgctctccgtctccgattcactgatgactgcacacccgattcaggcggaggcgtcaacagaagaagaaccgctctggcagtgcccagtccggctggtgacattcataggtgttggacgagaccctcacacattcggattgatcgccgaccttggccgacagagcttccagtgcgcagccttctggtgccagccccatgcaggaggtctgtctgaggcagtacaggctgcctgtatggtccagtaccagaaatgcctcgtggccagcgccgctcggggaaaagcgtggggggcacaggcgagggccagactccgtctgaaacggacctcctcaatggatagtcccggagggcctttacccctgcccctcctaaagggcggtgtaggcggagctggcgctacgccccgtaagagaggagttttttcctttcttgatgcgttccgcctgaaaccctctctcttgcacatgccgtag

SEQ ID NO: 234535 - DNA, 645 bp, Artificial Sequence
  derived and/or modified sequence
atgctgggaaaggactacatgctggctattatccttgtgaactgtgacgacgatctttggggcgaccacagtctcgaagttgaagccggacttccacctggatggagaaaaattcatgacgctgctggcacttactactggcacgtgcctagcggcagcacgcagtggcaacggcctacctgggagctcggggacgctgaggatcccggtactggaacagaaggcatttggggtctgcggccaccgaaagggcgatcattttcatcgttggaaagtagcctggacaggagtaattcattgtcatggtacggaggagaatcttacatacagtctatggagcccggtgctaagtgttttgctgtcagatctctcgggtgggttgaagttcctgaggaggatctggcaccaggaaaatcttccattgccgtaaacaattgcattcaacagctagcacagacacgctccaggtcccagccaccagacggagcatggggcgagggacagaacatgcttatgatcctgaaaaaagatgcaatgtccctggtgaacccgctcgatcactcattgatccattgccagcccctcgctgttatccctacggacgctgatcctcagtatttgaacccctggactcaaatcctttag

SEQ ID NO: 234536 - DNA, 1455 bp, Artificial Sequence
  derived and/or modified sequence
atgctgggcaaggactacatgctggccatcatcctggtgaactgcgacgacgacctgtggggcgaccacagcctggaggtggaggccggcctgccccccggctggagaaagatccacgacgccgccggcacctactactggcacgtgcccagcggcagcacccagtggcagagacccacctgggagctgggcgacgccgaggaccccggcaccggcaccgagggcatctggggcctgagaccccccaagggcagaagcttcagcagcctggagagcagcctggacagaagcaacagcctgagctggtacggcggcgagagctacatccagagcatggagcccggcgccaagtgcttcgccgtgagaagcctgggctgggtggaggtgcccgaggaggacctggcccccggcaagagcagcatcgccgtgaacaactgcatccagcagctggcccagaccagaagcagaagccagccccccgacggcgcctggggcgagggccagaacatgctgatgatcctgaagaaggacgccatgagcctggtgaaccccctggaccacagcctgatccactgccagcccctggtgcacatcagagtgtggggcgtgggcagcagcaagggcagagacttcgccttcgtggccagcgacaaggacagctgcatgctgaagtgccacgtgttctgctgcgacgtgcccgccaaggccatcgccagcgccctgcacggcctgtgcgcccagatcctgagcgagagagtggaggtgagcggcgacgccagctgctgcagccccgaccccatcagccccgaggacctgcccagacaggtggagctgctggacgccgtgagccaggccgcccagaagtacgaggccctgtacatgggcaccctgcccgtgaccaaggccatgggcatggacgtgctgaacgaggccatcggcaccctgaccgccagaggcgacagaaacgcctgggtgcccaccatgctgagcgtgagcgacagcctgatgaccgcccaccccatccaggccgaggccagcaccgaggaggagcccctgtggcagtgccccgtgagactggtgaccttcatcggcgtgggcagagacccccacaccttcggcctgatcgccgacctgggcagacagagcttccagtgcgccgccttctggtgccagccccacgccggcggcctgagcgaggccgtgcaggccgcctgcatggtgcagtaccagaagtgcctggtggccagcgccgccagaggcaaggcctggggcgcccaggccagagccagactgagactgaagagaaccagcagcatggacagccccggcggccccctgcccctgcccctgctgaagggcggcgtgggcggcgccggcgccacccccagaaagagaggcgtgttcagcttcctggacgccttcagactgaagcccagcctgctgcacatgccctag

SEQ ID NO: 234537 - DNA, 792 bp, Artificial Sequence
  derived and/or modified sequence
atgctgaagtgccacgtgttctgctgcgacgtgcccgccaaggccatcgccagcgccctgcacggcctgtgcgcccagatcctgagcgagagagtggaggtgagcggcgacgccagctgctgcagccccgaccccatcagccccgaggacctgcccagacaggtggagctgctggacgccgtgagccaggccgcccagaagtacgaggccctgtacatgggcaccctgcccgtgaccaaggccatgggcatggacgtgctgaacgaggccatcggcaccctgaccgccagaggcgacagaaacgcctgggtgcccaccatgctgagcgtgagcgacagcctgatgaccgcccaccccatccaggccgaggccagcaccgaggaggagcccctgtggcagtgccccgtgagactggtgaccttcatcggcgtgggcagagacccccacaccttcggcctgatcgccgacctgggcagacagagcttccagtgcgccgccttctggtgccagccccacgccggcggcctgagcgaggccgtgcaggccgcctgcatggtgcagtaccagaagtgcctggtggccagcgccgccagaggcaaggcctggggcgcccaggccagagccagactgagactgaagagaaccagcagcatggacagccccggcggccccctgcccctgcccctgctgaagggcggcgtgggcggcgccggcgccacccccagaaagagaggcgtgttcagcttcctggacgccttcagactgaagcccagcctgctgcacatgccctag

SEQ ID NO: 234538 - DNA, 645 bp, Artificial Sequence
  derived and/or modified sequence
atgctgggcaaggactacatgctggccatcatcctggtgaactgcgacgacgacctgtggggcgaccacagcctggaggtggaggccggcctgccccccggctggagaaagatccacgacgccgccggcacctactactggcacgtgcccagcggcagcacccagtggcagagacccacctgggagctgggcgacgccgaggaccccggcaccggcaccgagggcatctggggcctgagaccccccaagggcagaagcttcagcagcctggagagcagcctggacagaagcaacagcctgagctggtacggcggcgagagctacatccagagcatggagcccggcgccaagtgcttcgccgtgagaagcctgggctgggtggaggtgcccgaggaggacctggcccccggcaagagcagcatcgccgtgaacaactgcatccagcagctggcccagaccagaagcagaagccagccccccgacggcgcctggggcgagggccagaacatgctgatgatcctgaagaaggacgccatgagcctggtgaaccccctggaccacagcctgatccactgccagcccctggccgtgatccccaccgacgccgacccccagtacctgaacccctggacccagatcctgtag

SEQ ID NO: 234539 - protein, 1394 aa, Artificial Sequence
  derived and/or modified sequence
MAALLRSARWLLRAGAAPRLPLSLRLLPGGPGRLHAASYLPAARAGPVAGGLLSPARLYAIAAKEKDIQEESTFSSRKISNQFDWALMRLDLSVRRTGRIPKKLLQKVFNDTCRSGGLGGSHALLLLRSCGSLLPELKLEERTEFAHRIWDTLQKLGAVYDVSHYNALLKVYLQNEYKFSPTDFLAKMEEANIQPNRVTYQRLIASYCNVGDIEGASKILGFMKTKDLPVTEAVFSALVTGHARAGDMENAENILTVMRDAGIEPGPDTYLALLNAYAEKGDIDHVKQTLEKVEKSELHLMDRDLLQIIFSFSKAGYPQYVSEILEKVTCERRYIPDAMNLILLLVTEKLEDVALQILLACPVSKEDGPSVFGSFFLQHCVTMNTPVEKLTDYCKKLKEVQMHSFPLQFTLHCALLANKTDLAKALMKAVKEEGFPIRPHYFWPLLVGRRKEKNVQGIIEILKGMQELGVHPDQETYTDYVIPCFDSVNSARAILQENGCLSDSDMFSQAGLRSEAANGNLDFVLSFLKSNTLPISLQSIRSSLLLGFRRSMNINLWSEITELLYKDGRYCQEPRGPTEAVGYFLYNLIDSMSDSEVQAKEEHLRQYFHQLEKMNVKIPENIYRGIRNLLESYHVPELIKDAHLLVESKNLDFQKTVQLTSSELESTLETLKAENQPIRDVLKQLILVLCSEENMQKALELKAKYESDMVTGGYAALINLCCRHDKVEDALNLKEEFDRLDSSAVLDTGKYVGLVRVLAKHGKLQDAINILKEMKEKDVLIKDTTALSFFHMLNGAALRGEIETVKQLHEAIVTLGLAEPSTNISFPLVTVHLEKGDLSTALEVAIDCYEKYKVLPRIHDVLCKLVEKGETDLIQKAMDFVSQEQGEMVMLYDLFFAFLQTGNYKEAKKIIETPGIRARSARLQWFCDRCVANNQVETLEKLVELTQKLFECDRDQMYYNLLKLYKINGDWQRADAVWNKIQEENVIPREKTLRLLAEILREGNQEVPFDVPELWYEDEKHSLNSSSASTTEPDFQKDILIACRLNQKKGAYDIFLNAKEQNIVFNAETYSNLIKLLMSEDYFTQAMEVKAFAETHIKGFTLNDAANSRLIITQVRRDYLKEAVTTLKTVLDQQQTPSRLAVTRVIQALAMKGDVENIEVVQKMLNGLEDSIGLSKMVFINNIALAQIKNNNIDAAIENIENMLTSENKVIEPQYFGLAYLFRKVIEEQLEPAVEKISIMAERLANQFAIYKPVTDFFLQLVDAGKVDDARALLQRCGAIAEQTPILLLFLLRNSRKQGKASTVKSVLELIPELNEKEEAYNSLMKSYVSEKDVTSAKALYEHLTAKNTKLDDLFLKRYASLLKYAGEPVPFIEPPESFEFYAQQLRKLRENSS

SEQ ID NO: 234540 - DNA, 4185 bp, Artificial Sequence
  derived and/or modified sequence
atggccgctctgctacggtcggctagatggctcctacgggcaggagccgctcctagattaccgctttcactgcggttgcttccaggggggccgggcagacttcacgccgcgtcatatctgcccgccgcccgggccggccctgtagccggtggcctgctctctcctgccaggctatatgcgatcgccgctaaagaaaaggatattcaggaggaatccactttcagctcaaggaagatttccaatcagttcgattgggcattgatgcggctggacctttccgtcaggcgcacgggcaggatccctaaaaagctgttgcagaaggtgttcaacgacacttgccggtccggggggctcggggggtctcatgcgctgctgctgttgcgttcatgcggctcgctgctgcccgaacttaaattggaggaaagaacagagtttgcccaccgtatctgggacactctccagaagcttggtgcagtttatgatgtgtctcactataacgcgttgttaaaagtttacctgcaaaacgagtacaagttctcacctacggacttcctggctaaaatggaagaagctaacattcagcccaacagggtgacataccagcgactcattgcgagctactgtaatgtgggggacatagagggcgccagtaaaatcctggggtttatgaagacaaaagatctcccggtgaccgaggcagtttttagcgcccttgtgaccgggcacgctagggctggcgacatggagaacgccgagaatatcctgactgtcatgagggacgccgggattgagcctggccctgatacctatctggccctcctgaatgcttatgcagagaaaggcgacatagaccacgtgaaacagaccctggagaaggtagaaaaatctgaactgcacctaatggatcgagatctgttgcagattatttttagcttctctaaggcaggctacccacaatacgtgtcagagatactggagaaggtgacatgcgaacggagatatattcctgatgcgatgaacctaatcctgctgctggttactgagaaactagaggacgtagccctgcagattttactcgcttgccctgtcagcaaagaagacggccccagcgtgttcgggtcctttttcctacaacattgtgtaacaatgaatacccctgtggaaaagctcaccgactattgtaaaaagttaaaggaagtgcaaatgcacagctttcccttgcagtttacactccactgcgcccttctggccaataagactgacctcgccaaggctcttatgaaagcagtgaaggaggagggcttccctattaggccacactacttttggcctctgttggtgggccgccggaaggaaaagaacgtccagggtatcatcgagatcttaaaaggaatgcaggagctgggggtccacccggaccaagaaacatacaccgactatgttatcccctgcttcgactccgtgaacagcgcccgagccatactgcaagagaatggttgcctgtccgactctgatatgttcagtcaagccgggcttagaagcgaggctgccaacggtaacctggatttcgtcctttcattcctgaaaagtaacacactgcctatctctcttcaatctataagaagttcattgctcctaggttttagaaggagcatgaacataaacctatggtccgagattactgaactcctgtacaaggacgggagatactgtcaggagcccaggggccccacggaagctgtgggttacttcctgtacaacctgatcgacagcatgtctgattcagaagtccaggcaaaggaggagcacttaaggcagtattttcatcaactggagaagatgaacgtgaagatcccagagaatatctaccgggggatccgtaatctcctcgagtcataccacgttccggaattgatcaaagacgctcacctattggtcgagtcaaagaacctggacttccagaagacagttcaacttacatccagcgaattggagagcacgctggaaacgctgaaggctgaaaatcagcctatcagagatgtgctcaaacaactcatccttgtgttgtgctccgaagagaacatgcagaaagctctggagctcaaggccaaatatgagagcgacatggtgactggcgggtacgctgcgctgattaatctgtgctgccggcacgacaaggtggaggacgcactcaacctgaaagaagagttcgatagattagactcctcagctgttttggacacagggaagtatgttggattggtcagggttctcgctaagcacgggaagttgcaggacgcaatcaatatcttgaaagaaatgaaggagaaagatgtgctgattaaagacacaaccgcactctcatttttccacatgctgaacggcgctgctctaaggggggagatagagacagtgaagcagcttcatgaagcaatagttactcttggcctggctgaaccatctaccaatatttctttccctctggtgaccgtacacctcgagaaaggggatcttagtacggcactggaagtcgccatcgattgctacgaaaagtataaagtcctgccacggatccacgacgtactctgtaagttggttgagaagggagaaaccgatctgattcaaaaagccatggacttcgtgagtcaggagcaaggggagatggtgatgctgtacgatttgttcttcgcattcttgcagactggcaattacaaagaggctaagaagattatagagactccgggcatccgggctcgctcagcaagactacaatggttttgcgacagatgcgtggccaataatcaggtcgaaaccctagagaagctagtagaactcactcagaaactctttgagtgtgaccgggaccagatgtattacaatctactgaaactctacaagattaatggtgactggcaaagggcggacgcagtctggaataagatccaggaagagaacgttattccacgcgagaagaccctgcgtctgctggctgagattttaagggagggaaaccaggaagtaccctttgatgtgcctgagttatggtatgaagatgagaaacattccctcaatagctcctccgctagcaccacagaaccggacttccagaaagatatactgattgcttgccggctgaaccagaagaagggggcatacgatattttcctgaacgcaaaggaacagaacattgtattcaacgccgaaacatactctaacctgatcaaattgctcatgtctgaagactatttcacgcaagctatggaggtgaaagcttttgccgagacccatatcaaaggcttcacattaaacgacgcggccaacagcaggctgattatcactcaggtgcgtcgcgattacctgaaggaggccgttacgactctcaagaccgtccttgatcagcaacagacaccatcccggctcgcggtgactcgcgtcattcaggccctcgccatgaaaggtgacgtggagaatatcgaggtggtgcagaagatgctgaacggcctcgaagacagcatagggttgtcaaagatggtgttcattaacaacatcgccctggcccagatcaaaaataataatatagacgccgccattgaaaatatcgaaaacatgctcacaagcgagaataaggtcattgagccacaatacttcgggctcgcatatctgtttcggaaggtgatcgaagagcaactggagccagccgtggaaaagatctccattatggccgaacgcttagccaaccagtttgctatctataaacctgttactgacttctttctgcaactggtcgatgctggcaaggtggatgacgcccgcgcgctgttgcaacggtgcggagctatcgccgagcagacacccatacttttgctttttctgctgcggaatagtcggaagcagggcaaagcttcaaccgtaaaatccgtgctggaactgatccctgagctcaatgagaaggaagaggcctataacagtctgatgaaatcatatgtctcagagaaagacgtgacttctgccaaggcactgtacgaacacctgactgccaaaaacactaagcttgacgacctgtttttgaaacgctatgcctctttgctcaaatatgccggggaaccagtgccttttatcgagccgccagaatcgttcgaattttacgcccaacagttacgcaaacttagggagaactcttcctag

SEQ ID NO: 234541 - DNA, 3264 bp, Artificial Sequence
  derived and/or modified sequence
atgcctccaccaatctgtcccccactcgcacctggaccatggcccggggggctcggcggcagccatgctctcctgctcctgcgttcttgcggaagcctgcttcccgagttaaagctggaggagagaacagagtttgctcaccgcatatgggacactctgcagaagctaggagcggtgtacgacgtaagccactataacgcccttctgaaggtctacctgcagaatgaatataaattttctcctaccgattttctggccaagatggaggaggcaaatatacaaccgaatagagtcacatatcagcgcctgattgcctcgtactgtaatgtaggcgacatcgagggagcgtcaaaaatcctcggcttcatgaagacaaaggacctcccagtcaccgaagccgtcttcagtgctctagtgactggccatgctagggcgggagacatggaaaatgctgagaacattttaactgtgatgcgggacgcgggaattgagcccggaccggacacctacctggctcttctaaacgcctacgcagagaaaggtgacattgatcacgtgaaacagaccttggagaaagtagagaaatctgagcttcacttaatggaccgcgacttgctccagatcatcttctctttttcaaaggccggctacccccagtatgtgagcgagatcctggaaaaggttacctgtgaacggcgttacatccccgatgcgatgaatctcattctcttgttagtgacagaaaaactcgaggatgttgctttgcaaattctgctcgcatgtcctgtgagcaaggaagacgggccgtcagtctttgggtccttctttttacagcattgtgtcactatgaacacaccagtggagaagctcacggattactgtaagaaacttaaggaggtgcaaatgcacagcttccccctgcagtttacactccactgcgcactgctggccaacaagaccgacctcgcaaaagcactgatgaaagctgtgaaagaggaagggttcccaatccgcccccactatttttggcccctcctggttggaagacggaaggagaagaatgtgcagggcataatcgagatccttaagggaatgcaggaactgggcgttcatcccgaccaggaaacctacactgactatgtcattccatgcttcgactctgttaattctgcgcgtgctatactgcaggaaaatgggtgtctttccgactctgacatgttctcccaggcagggctcagaagcgaagcagcgaatgggaaccttgacttcgtgctgtcctttctgaagtcgaacactctcccgatctcacttcaatcgataaggtccagccttcttctggggtttagacgaagtatgaatatcaacctctggagcgagattacagaattgctttacaaggacggcaggtactgtcaggagcccaggggtccaaccgaggcggtgggatactttctctacaacctgatcgatagcatgtctgatagtgaggtgcaggccaaggaagaacacctgaggcagtattttcaccaactggagaagatgaacgtgaaaatccctgaaaatatctaccgggggatcagaaacctgcttgagagttatcacgtacccgaacttatcaaagacgcacatctgctggtggagagtaaaaacttggacttccaaaaaacggtccagctcacctcgagtgaactggaatcaaccctggaaacactgaaagcggaaaaccagccaatccgggatgtactcaagcaactgatattggtgctctgcagcgaagagaatatgcagaaagcgttagaactgaaggccaagtacgaatcagacatggtaaccggcggttatgctgcgctcattaatctgtgctgtagacacgataaggtcgaagatgctctgaacctgaaagaggagttcgatagacttgactccagtgctgtgctggataccggaaaatatgtgggattggtccgagtactggctaagcacggaaaactgcaggacgcaattaacattcttaaagagatgaaagaaaaggacgttctcattaaagatacgacggctctctccttcttccatatgctaaacggagccgccttgcgtggcgagatcgaaactgtgaaacagctgcatgaggcaatcgttacgctgggactcgcggaaccctccaccaacatctcttttccactcgtgaccgtccacctcgagaaaggagacctgtctacagcccttgaagtggcgattgattgctacgagaaatataaggttctgccaaggattcatgacgtgctatgtaagttagttgagaagggcgagactgatctgatccagaaagcaatggattttgttagtcaggagcagggagagatggtgatgctgtacgatctgttttttgccttcttacagaccgggaattacaaagaagccaagaagattatcgagacgccaggcattcgggccagatccgcccgccttcagtggttttgtgatcgatgcgttgccaataaccaggtagaaacactcgagaaattggtggagctcacgcagaaattattcgaatgtgaccgagaccagatgtactacaacttgctgaaactgtataagatcaatggcgactggcaacgggccgacgccgtatggaataaaatccaggaggagaatgtaatcccgcgcgagaaaacccttcggctcctagcagagatcttaagagaaggtaatcaggaagtcccattcgacgtgccggagctgtggtacgaagacgaaaagcactcgttaaattctagttcagcttcaactaccgagccagattttcaaaaagacattttaatcgcttgcagactgaatcagaaaaagggcgcctacgatatttttcttaatgcaaaggagcaaaatatcgtgtttaatgcagaaacttactccaatctaattaagctgctcatgtccgaagactattttacccaggccatggaagttaaggctttcgcggagacgcacataaaaggctttactctgaacgacgccgccaactccaggcttatcatcacccaagtgcggcgggactacttgaaagaagcagtgacgactctgaaaacagttttggaccagcaacagacgccgagccgactggccgtgacccgggtgatccaggccttggctatgaagggggacgtggagaacatagaggtcgtgcagaaaatgttgaacggcttagaggatagcattggcttgagcaaaatggtgtttataaacaacattgcgttggcccagtag

SEQ ID NO: 234542 - DNA, 4185 bp, Artificial Sequence
  derived and/or modified sequence
atggccgccctgctgcggagcgcccgctggctgctgcgggccggggccgccccccggctgcccctgagcctgcggctgctgcccggcggccctggccgcctgcacgccgccagctacctgcctgctgcccgggccggccctgtggccggcggcctgctgagccctgcccggctgtatgccatcgccgccaaggagaaggacatccaggaggagagcaccttcagcagcaggaagatcagcaaccagtttgactgggccctgatgaggctggacctgtctgtgagaagaacaggccgcatccccaagaagctgctgcagaaggtgttcaatgacacctgccgcagcggcggcctgggcggcagccacgccctgctgctgctgcggagctgtggcagcctgctgcctgagctgaagctggaggagaggacagaatttgcccaccgcatctgggacaccctgcagaagctgggcgctgtgtatgatgtgagccactacaatgccctgctgaaggtgtacctgcagaatgagtacaagttcagccccacagacttcctggccaagatggaggaggccaacatccagcccaacagagtgacctaccagaggctcatcgccagctactgcaatgtgggggacattgaaggagccagcaagatcctgggcttcatgaagaccaaggacctgcctgtgacagaagctgtgttcagcgccctggtgacaggccacgcccgggccggggacatggagaatgctgagaacatcctgactgtgatgagagatgctggcatcgagcccggccctgacacctacctggccctgctgaatgcctatgcagagaagggggacatcgaccacgtgaagcagaccctggagaaggtggagaagtctgagctgcacctgatggaccgggacctgctgcagatcatcttctccttcagcaaggccggctacccccagtatgtgtctgagatcctggagaaggtgacctgtgagcggcgctacatcccagatgccatgaacctgatcctgctgctggtgacagagaagctggaggatgtggccctgcagatcctgctggcctgccctgtgtccaaggaggatggccccagcgtgtttggcagcttcttcctgcagcactgtgtgaccatgaacacccctgtggagaagctgacagactactgcaagaagctgaaggaggtgcagatgcacagcttccccctgcagttcaccctgcactgtgccctgctggccaacaagacagacctggccaaggccctgatgaaggctgtgaaggaggagggcttccccatccggccccactacttctggcccctgctggtgggccgcaggaaggagaagaatgtgcagggcatcatcgagatcctgaagggcatgcaggagctgggcgtgcacccagaccaggagacctacacagattatgtgatcccctgctttgattctgtgaacagcgcccgggccatcctgcaggagaatggctgcctgagtgacagcgacatgttcagccaggccggcctgcggtctgaggccgccaacggcaacctggactttgtgctgtccttcctgaagagcaacaccctgcccatcagcctgcagagcatccgcagcagcctgctgctgggcttcagaagatccatgaacatcaacctgtggagcgagatcacagagctgctgtacaaggatggccgctactgccaggagccccggggccccacagaggccgtgggctacttcctgtacaacctgattgacagcatgtctgattctgaggtgcaggccaaggaggagcacctgcggcagtacttccaccagctggagaagatgaatgtgaagatccctgagaacatctaccggggcatccggaacctgctggagagctaccacgtgcctgagctgatcaaggatgcccacctgctggtggagagcaagaacctggacttccagaagacagtgcagctgaccagcagcgagctggagagcaccctggagaccctgaaggccgagaaccagcccatcagagatgtgctgaagcagctgatcctggtgctgtgcagcgaggagaacatgcagaaggccctggagctgaaggccaagtatgaaagtgacatggtgactggaggctatgctgccctgatcaacctgtgctgcagacatgacaaggtggaggatgccctgaacctgaaggaggagtttgaccggctggacagcagcgctgtgctggacaccgggaagtatgtgggcctggtgcgggtgctggccaagcacggcaagctgcaggatgccatcaacatcctgaaggagatgaaggagaaggatgtgctgatcaaggacaccacagccctgtccttcttccacatgctgaatggagctgccctgcggggggagattgagaccgtgaagcagctgcacgaggccatcgtgaccctgggcctggccgagcccagcaccaacatctccttccccctggtgacagtgcacctggagaagggggacctgagcacagccctggaggtggccatcgactgctatgagaagtacaaggtgctgccccgcatccatgatgtgctgtgcaagctggtggagaagggggagacagacctgatccagaaggccatggactttgtgtcccaggagcagggcgagatggtgatgctgtatgacctcttctttgccttcctgcagacaggcaactacaaggaggccaagaagatcatcgagaccccaggcatccgggcccggagcgcccggctgcagtggttctgtgacagatgtgtggccaacaaccaggtggagaccctggagaagctggtggagctgacccagaagctgtttgaatgtgaccgggaccagatgtactacaacctgctgaagctgtacaagatcaacggggactggcagagagcagatgctgtgtggaacaagatccaggaggagaatgtcatcccccgggagaagaccctgcggctgctggccgagatcctgcgggagggcaaccaggaggtgccctttgatgtgcctgagctgtggtatgaagatgagaagcacagcctgaacagcagcagcgccagcaccacagagccagacttccagaaggacatcctgattgcctgccgcctgaaccagaagaagggggcctatgacatcttcctgaatgccaaggagcagaacatcgtgttcaatgctgagacctacagcaacctgatcaagctgctgatgtctgaggactacttcacccaggccatggaggtgaaggcctttgctgagacccacatcaagggcttcaccctgaatgatgctgccaacagccgcctcatcatcacccaggtgcggcgggactacctgaaggaggccgtgaccaccctgaagacagtgctggaccagcagcagacccccagccggctggccgtgaccagggtcatccaggccctggccatgaagggagatgtggagaacatcgaggtggtgcagaagatgctgaatggcctggaggacagcatcggcctgagcaagatggtgttcatcaacaacatcgccctggcccagatcaagaacaacaacattgatgctgccatcgagaacatcgagaacatgctgaccagcgagaacaaggtgattgagccccagtacttcggcctggcctacctgttcaggaaggtgattgaggagcagctggagcctgctgtggagaagatcagcatcatggccgagcggctggccaaccagtttgccatctacaagcctgtgacagacttcttcctgcagctggtggatgctgggaaggtggatgatgcccgggccctgctgcagagatgtggggccatcgccgagcagacccccatcctgctgctcttcctgctgaggaacagcaggaagcagggcaaggccagcacagtgaagtctgtgctggagctgatccctgagctgaatgagaaggaggaggcctacaacagcctgatgaagagctatgtgtctgagaaggatgtgaccagcgccaaggccctgtatgagcacctgacagccaagaacaccaagctggatgacctcttcctgaagagatatgccagcctgctgaagtatgctggggagcctgtgcccttcatcgagcccccagagagctttgagttctacgcccagcagctgaggaagctgcgggagaacagcagctag

SEQ ID NO: 234543 - DNA, 3264 bp, Artificial Sequence
  derived and/or modified sequence
atgcccccacccatctgcccccccctggcccctggcccctggccaggcggcctgggcggcagccacgccctgctgctgctgcggagctgtggcagcctgctgcctgagctgaagctggaggagaggacagaatttgcccaccgcatctgggacaccctgcagaagctgggcgctgtgtatgatgtgagccactacaatgccctgctgaaggtgtacctgcagaatgagtacaagttcagccccacagacttcctggccaagatggaggaggccaacatccagcccaacagagtgacctaccagaggctcatcgccagctactgcaatgtgggggacattgaaggagccagcaagatcctgggcttcatgaagaccaaggacctgcctgtgacagaagctgtgttcagcgccctggtgacaggccacgcccgggccggggacatggagaatgctgagaacatcctgactgtgatgagagatgctggcatcgagcccggccctgacacctacctggccctgctgaatgcctatgcagagaagggggacatcgaccacgtgaagcagaccctggagaaggtggagaagtctgagctgcacctgatggaccgggacctgctgcagatcatcttctccttcagcaaggccggctacccccagtatgtgtctgagatcctggagaaggtgacctgtgagcggcgctacatcccagatgccatgaacctgatcctgctgctggtgacagagaagctggaggatgtggccctgcagatcctgctggcctgccctgtgtccaaggaggatggccccagcgtgtttggcagcttcttcctgcagcactgtgtgaccatgaacacccctgtggagaagctgacagactactgcaagaagctgaaggaggtgcagatgcacagcttccccctgcagttcaccctgcactgtgccctgctggccaacaagacagacctggccaaggccctgatgaaggctgtgaaggaggagggcttccccatccggccccactacttctggcccctgctggtgggccgcaggaaggagaagaatgtgcagggcatcatcgagatcctgaagggcatgcaggagctgggcgtgcacccagaccaggagacctacacagattatgtgatcccctgctttgattctgtgaacagcgcccgggccatcctgcaggagaatggctgcctgagtgacagcgacatgttcagccaggccggcctgcggtctgaggccgccaacggcaacctggactttgtgctgtccttcctgaagagcaacaccctgcccatcagcctgcagagcatccgcagcagcctgctgctgggcttcagaagatccatgaacatcaacctgtggagcgagatcacagagctgctgtacaaggatggccgctactgccaggagccccggggccccacagaggccgtgggctacttcctgtacaacctgattgacagcatgtctgattctgaggtgcaggccaaggaggagcacctgcggcagtacttccaccagctggagaagatgaatgtgaagatccctgagaacatctaccggggcatccggaacctgctggagagctaccacgtgcctgagctgatcaaggatgcccacctgctggtggagagcaagaacctggacttccagaagacagtgcagctgaccagcagcgagctggagagcaccctggagaccctgaaggccgagaaccagcccatcagagatgtgctgaagcagctgatcctggtgctgtgcagcgaggagaacatgcagaaggccctggagctgaaggccaagtatgaaagtgacatggtgactggaggctatgctgccctgatcaacctgtgctgcagacatgacaaggtggaggatgccctgaacctgaaggaggagtttgaccggctggacagcagcgctgtgctggacaccgggaagtatgtgggcctggtgcgggtgctggccaagcacggcaagctgcaggatgccatcaacatcctgaaggagatgaaggagaaggatgtgctgatcaaggacaccacagccctgtccttcttccacatgctgaatggagctgccctgcggggggagattgagaccgtgaagcagctgcacgaggccatcgtgaccctgggcctggccgagcccagcaccaacatctccttccccctggtgacagtgcacctggagaagggggacctgagcacagccctggaggtggccatcgactgctatgagaagtacaaggtgctgccccgcatccatgatgtgctgtgcaagctggtggagaagggggagacagacctgatccagaaggccatggactttgtgtcccaggagcagggcgagatggtgatgctgtatgacctcttctttgccttcctgcagacaggcaactacaaggaggccaagaagatcatcgagaccccaggcatccgggcccggagcgcccggctgcagtggttctgtgacagatgtgtggccaacaaccaggtggagaccctggagaagctggtggagctgacccagaagctgtttgaatgtgaccgggaccagatgtactacaacctgctgaagctgtacaagatcaacggggactggcagagagcagatgctgtgtggaacaagatccaggaggagaatgtcatcccccgggagaagaccctgcggctgctggccgagatcctgcgggagggcaaccaggaggtgccctttgatgtgcctgagctgtggtatgaagatgagaagcacagcctgaacagcagcagcgccagcaccacagagccagacttccagaaggacatcctgattgcctgccgcctgaaccagaagaagggggcctatgacatcttcctgaatgccaaggagcagaacatcgtgttcaatgctgagacctacagcaacctgatcaagctgctgatgtctgaggactacttcacccaggccatggaggtgaaggcctttgctgagacccacatcaagggcttcaccctgaatgatgctgccaacagccgcctcatcatcacccaggtgcggcgggactacctgaaggaggccgtgaccaccctgaagacagtgctggaccagcagcagacccccagccggctggccgtgaccagggtcatccaggccctggccatgaagggagatgtggagaacatcgaggtggtgcagaagatgctgaatggcctggaggacagcatcggcctgagcaagatggtgttcatcaacaacatcgccctggcccagtag

SEQ ID NO: 234544 - DNA, 6335 bp, Artificial Sequence
  derived and/or modified sequence
acatgctcctcctgtccttctggcggagcgtgcttcccgctgcggggacgttcgagcaatggcagccctgctgagatccgcgcgttggttgctgcgtgccggggcggccccgcgcctcccgctctccctgcgcctcctccctggcggcccgggccggctgcatgccgcctcctatctgcccgccgctcgcgccgggcccgtggccggaggactactgagcccagccaggctgtatgccattgctgccaaagaaaaagatattcaagaggagtccactttttcttctaggaagatttccaatcagtttgattgggctctaatgagactagatctttctgttcgaagaactggccgcattccaaagaagcttctacaaaaagtttttaatgatacctgccgctcaggtggcctaggtggtagtcatgccttgcttctactacgtagttgtggttctctcttgcctgaactaaagcttgaagagagaacagaatttgctcataggatatgggacacacttcagaaattaggtgctgtgtatgatgtgagtcactataatgctttacttaaagtctatcttcaaaatgaatataaattctcaccaactgatttcctggcaaaaatggaggaagcaaacattcaaccaaatcgagtgacataccagagattgattgcttcttattgtaatgtaggagatattgaaggtgccagcaagattcttggatttatgaaaactaaggatctcccagttacagaggcagtattcagtgcccttgtgacagggcatgccagagctggtgatatggagaatgcagaaaacattctcacagtgatgagagatgccggaattgagcctggtccagacacatacctcgcattattgaatgcatatgctgagaagggcgacattgaccatgttaagcagactctggagaaggtggagaagtccgagcttcaccttatggaccgtgatttactgcaaattatttttagcttcagtaaagctgggtatcctcagtatgtctcagaaattttggaaaaagttacatgtgaaagaagatatattccagatgcaatgaacctcattttacttttagtcactgaaaaattggaagatgtagcgttgcaaattttactagcatgccccgtatcaaaggaagatggcccaagtgtctttggcagtttctttttacaacactgtgtgactatgaatacgcctgtggagaagctaacagactactgtaagaagttaaaggaagtccagatgcactcctttcctctgcagttcaccctccattgtgctttactcgccaataaaactgatttggcaaaagccttaatgaaggctgtgaaggaggaaggttttcctatcagacctcactatttctggccattgctagttggacgtcggaaggaaaaaaatgttcaaggtataattgaaatcctcaaaggaatgcaagaattgggagtacatcctgatcaggaaacatatacagattatgtgattccatgctttgatagtgtaaactcagcacgagccattttgcaggaaaatggatgtctgtctgatagtgatatgttttctcaagctggattgagaagtgaagcagcaaatgggaacttagactttgtattatcatttttgaaatcaaatacattgcccatctcgctgcagtctataagaagtagcctactgctaggcttcaggaggtctatgaatataaatctttggagcgagataacagaattgttgtacaaggatggacgttattgccaggagcctcgaggaccgacggaagctgttggctattttctttataacttgattgacagcatgagtgactcagaggtacaggccaaggaggagcatttgagacaatacttccatcagctggagaagatgaatgtaaaaattcctgaaaatatctacagaggcattcgtaatctcctggaaagctaccatgttcctgaattgattaaggatgctcacttgttggttgagagtaagaatttagactttcaaaaaactgtgcaacttacatcatctgaattggagtccacacttgaaacactaaaagctgaaaatcaacctataagagatgtcctaaagcaactcatattagtgctttgttcagaagagaatatgcaaaaagcccttgaattgaaagcaaaatatgaatccgacatggttactggtggctatgcagctttaataaatttatgctgtcgacatgataaagtagaagatgccttgaacttgaaagaagaatttgaccgcttagattcatctgctgtccttgacaccggcaagtatgtaggccttgtaagagtattggcaaagcatggcaagctccaagatgctattaacattctgaaggagatgaaagagaaggatgttcttatcaaagatacaacagccttgtcctttttccacatgctaaatggcgcagctttaagaggtgaaattgaaacagtaaaacagttgcatgaagccatcgtgactctagggttagcagaaccatccaccaacataagtttcccattggtcactgtacacttggaaaagggcgacctatctactgctcttgaggtcgccattgactgctatgaaaagtataaagtattaccaaggattcatgatgtcttgtgtaaactggtagagaaaggcgagactgatctaattcagaaagcaatggactttgtgagccaagaacaaggtgaaatggtgatgctctatgatctcttctttgccttcctacaaacaggaaattacaaagaggccaagaagatcattgagactccagggattagagctcgatctgcaaggcttcagtggttttgtgacagatgtgttgcaaataatcaggttgaaactctggaaaaattagtggagctgacacagaagctatttgaatgtgatagagaccagatgtactacaatctgctaaaactgtataaaataaacggtgactggcaaagagctgatgcagtctggaataaaatccaagaagaaaatgttattcctcgtgaaaagacattaagattattagcagaaatccttagagagggtaaccaggaagttccgtttgacgtacctgagttgtggtatgaagatgaaaaacattccctgaattcttcgtcagcctcaaccacagaacctgatttccagaaagatatattgattgcctgccgattgaaccaaaaaaaaggggcatatgatattttcctgaatgcaaaagagcaaaacattgtgtttaatgctgaaacctacagcaatctcattaaattactgatgtcagaagattattttacacaagcaatggaagtgaaagcattcgcggagacccacatcaagggcttcacactgaacgatgctgccaacagccgcctcatcataacgcaagttaggcgggattatttgaaagaggctgtgacaacactgaaaacagtattggatcagcagcagaccccttctaggttagcagtgacccgtgtcatccaggcattggccatgaagggtgatgttgaaaacatagaagtagttcagaagatgttaaatggactcgaagactccattggactttcaaaaatggttttcatcaataacattgctttggctcaaataaagaataataacatagatgccgcaatagaaaacattgaaaatatgcttacttcagagaataaagtcattgaaccccaatacttcggcttggcatacttattcagaaaagtaatagaggagcagttggaaccagcagttgaaaagataagcatcatggcggagagattggccaatcagtttgcaatttataaacctgtcactgattttttccttcaacttgtggatgcaggcaaggtggatgatgccagagctctcctacagagatgtggtgcaattgctgaacaaaccccgattttgttgttgttcctccttaggaattctaggaaacaaggaaaggcatcaactgtgaaatctgtgttagaattgattcctgaattaaatgaaaaggaagaagcatacaattccctcatgaaaagctatgtctcagagaaagatgtcacatctgctaaagcactgtatgaacatttgactgcaaagaatacaaaattggatgatctgtttctaaagcgttacgcatctttgctgaagtatgctggagagcctgtccctttcattgaaccccctgaaagctttgaattttatgcacagcagctaagaaaattgagggaaaactcttcttgaaataaccaggcgatactttgttttgtatatatttgtgattctgtgtctacatgttattttgaagtatatctgagggaaaaataaatgaaaattttctttatgtacttatgtatgtgtgatgcatgttcaaagtcttattgaccataactctgtgcacttggttattggacatttttggagtttttttctctgggaaaaatcgatagtgttttcttcaatgctgctgctgtgtgaagccatactttttcaggattcttcccctaattggctctttggtttccctgctctgtttcatttatttcattaaaatgttattcctttatttaagattcacttattagtctgctgtttctctgaaaaattttagagctaggtatagtgaccgtgaactttctaacgcataatattctgtgatacagccattccgtacatgtgtgaagtcctgcataactttcgaactttgttaaatgttggcactaggagtcatcagatctaggcttcatcattttccagtgagaagcagagacccaaagggcctgttacttgtgcttggtcaggggactgtctgtcatgcctggaggctcttcggcacacttccccatctttcccttctgccactgtggcttcaagcacctctgttcatagagcgtctctgaaattgagtctcggtcatgacttatcccgaagtagagcaatgtgtttcctctcattgtagtttcaggactttgtcagtacaagctctgccctaggcttgttactttatactcatatcctgaaaagatgtgatttcatctatgaaggggtaaaatattggtttgtatttaattgtttgaaataaaagtgatccctatattgaatctcatgcctgttaatatctacactgtaagtagtgacttcaaaaaaattctaagataggtagtcaggagagtttgccattataaaaggtgtcttaataatatggaatattgacctaactggagatgaggtaattaattaccgaaatgttgaaaatgttttgagaactctccccattttggggtattccttgttcatttgaatttggtgactccctactgttccagtttcagtgccaacttgggtcacactgttcacatcaggggagaccttgccttggggacgtaggcgggcctcttgcaacttgtgctgttgaccttctgtcttgtggaactctctctcctgcatctgctacctgcccgcagatggtgtgagggagggttgatggcgggaagccaggaagtagatgtcatcatggtattggccaggcttttacttcaactctttttgtggcgttagatttaaggaagcagggggcatggccaacgttgagtcttggcccagtggacatagtgcggctttcccttgagcactgcccagatgcaggacctgcacatgttacaggtttgccaaaagcatctttttttttttttttttttttgagatagtcttgctctgttgcttaagccagagtgcagtggcgcaatctcagctcactgcaacctccgcctcctgggttcaagtgattcttgtgcctcagcctcccacgtagctgagattacaggcttgcaccaccatgttcagctaatttttgtatggtaaagacggagtttcaccatgttggccaggttggtctcgaactcctggccccaagtgatcctccccctgcgctcgcttcagcctcccaaagtgctgggattacaggtgtgagccaccacgcctggccaagagcctcactcctgtctttagtgattgcactgaagcaggcctcatttttttgcagtcatgctaaccacaagttagtcaacattcactaattgacattcattagaataggtctccaaggtgaggcataacgttggggtgtaatctggatttcgcagtcatctttttggggaaactgaaagtaccatctcatttgcatgaagtgactccacactggccctgtatatggactctggtaaaatgtgagtgtggtacagaggaaataggtaagacccccttatctagccctctcggcagcagcgggggggtgttacaaaggactagctgttcaaatatcttttgtattgtattg

SEQ ID NO: 234545 - DNA, 6422 bp, Artificial Sequence
  derived and/or modified sequence
acatgctcctcctgtccttctggcggagcgtgcttcccgctgcggggacgttcgagcaatggcagccctgctgagatccgcgcgttggttgctgcgtgccggggcggccccgcgcctcccgctctccctgcgcctcctccctggcggcccgggccggctgcatgccgcctcctatctgcccgccgctcgcgccgggcccgtggccgggtggcctaggtggtagtcatgccttgcttctactacgtagttgtggttctctcttgcctgaactaaagcttgaagagagaacagaatttgctcataggatatgggacacacttcagaaattaggtgctgtgtatgatgtgagtcactataatgctttacttaaagtctatcttcaaaatgaatataaattctcaccaactgatttcctggcaaaaatggaggaagcaaacattcaaccaaatcgagtgacataccagagattgattgcttcttattgtaatgtaggagatattgaaggtgccagcaagattcttggatttatgaaaactaaggatctcccagttacagaggcagtattcagtgcccttgtgacagggcatgccagagctggtgatatggagaatgcagaaaacattctcacagtgatgagagatgccggaattgagcctggtccagacacatacctcgcattattgaatgcatatgctgagaagggcgacattgaccatgttaagcagactctggagaaggtggagaagtccgagcttcaccttatggaccgtgatttactgcaaattatttttagcttcagtaaagctgggtatcctcagtatgtctcagaaattttggaaaaagttacatgtgaaagaagatatattccagatgcaatgaacctcattttacttttagtcactgaaaaattggaagatgtagcgttgcaaattttactagcatgccccgtatcaaaggaagatggcccaagtgtctttggcagtttctttttacaacactgtgtgactatgaatacgcctgtggagaagctaacagactactgtaagaagttaaaggaagtccagatgcactcctttcctctgcagttcaccctccattgtgctttactcgccaataaaactgatttggcaaaagccttaatgaaggctgtgaaggaggaaggttttcctatcagacctcactatttctggccattgctagttggacgtcggaaggaaaaaaatgttcaaggtataattgaaatcctcaaaggaatgcaagaattgggagtacatcctgatcaggaaacatatacagattatgtgattccatgctttgatagtgtaaactcagcacgagccattttgcaggaaaatggatgtctgtctgatagtgatatgttttctcaagctggattgagaagtgaagcagcaaatgggaacttagactttgtattatcatttttgaaatcaaatacattgcccatctcgctgcagtctataagaagtagcctactgctaggcttcaggaggtctatgaatataaatctttggagcgagataacagaattgttgtacaaggatggacgttattgccaggagcctcgaggaccgacggaagctgttggctattttctttataacttgattgacagcatgagtgactcagaggtacaggccaaggaggagcatttgagacaatacttccatcagctggagaagatgaatgtaaaaattcctgaaaatatctacagaggcattcgtaatctcctggaaagctaccatgttcctgaattgattaaggatgctcacttgttggttgagagtaagaatttagactttcaaaaaactgtgcaacttacatcatctgaattggagtccacacttgaaacactaaaagctgaaaatcaacctataagagatgtcctaaagcaactcatattagtgctttgttcagaagagaatatgcaaaaagcccttgaattgaaagcaaaatatgaatccgacatggttactggtggctatgcagctttaataaatttatgctgtcgacatgataaagtagaagatgccttgaacttgaaagaagaatttgaccgcttagattcatctgctgtccttgacaccggcaagtatgtaggccttgtaagagtattggcaaagcatggcaagctccaagatgctattaacattctgaaggagatgaaagagaaggatgttcttatcaaagatacaacagccttgtcctttttccacatgctaaatggcgcagctttaagaggtgaaattgaaacagtaaaacagttgcatgaagccatcgtgactctagggttagcagaaccatccaccaacataagtttcccattggtcactgtacacttggaaaagggcgacctatctactgctcttgaggtcgccattgactgctatgaaaagtataaagtattaccaaggattcatgatgtcttgtgtaaactggtagagaaaggcgagactgatctaattcagaaagcaatggactttgtgagccaagaacaaggtgaaatggtgatgctctatgatctcttctttgccttcctacaaacaggaaattacaaagaggccaagaagatcattgagactccagggattagagctcgatctgcaaggcttcagtggttttgtgacagatgtgttgcaaataatcaggttgaaactctggaaaaattagtggagctgacacagaagctatttgaatgtgatagagaccagatgtactacaatctgctaaaactgtataaaataaacggtgactggcaaagagctgatgcagtctggaataaaatccaagaagaaaatgttattcctcgtgaaaagacattaagattattagcagaaatccttagagagggtaaccaggaagttccgtttgacgtacctgagttgtggtatgaagatgaaaaacattccctgaattcttcgtcagcctcaaccacagaacctgatttccagaaagatatattgattgcctgccgattgaaccaaaaaaaaggggcatatgatattttcctgaatgcaaaagagcaaaacattgtgtttaatgctgaaacctacagcaatctcattaaattactgatgtcagaagattattttacacaagcaatggaagtgaaagcattcgcggagacccacatcaagggcttcacactgaacgatgctgccaacagccgcctcatcataacgcaagttaggcgggattatttgaaagaggctgtgacaacactgaaaacagtattggatcagcagcagaccccttctaggttagcagtgacccgtgtcatccaggcattggccatgaagggtgatgttgaaaacatagaagtagttcagaagatgttaaatggactcgaagactccattggactttcaaaaatggttttcatcaataacattgctttggctcaaataaagaataataacatagatgccgcaatagaaaacattgaaaatatgcttacttcagagaataaagtcattgaaccccaatacttcggcttggcatacttattcagaaaagtaatagaggagcagttggaaccagcagttgaaaagataagcatcatggcggagagattggccaatcagtttgcaatttataaacctgtcactgattttttccttcaacttgtggatgcaggcaaggtggatgatgccagagctctcctacagagatgtggtgcaattgctgaacaaaccccgattttgttgttgttcctccttaggaattctaggaaacaaggaaaggcatcaactgtgaaatctgtgttagaattgattcctgaattaaatgaaaaggaagaagcatacaattccctcatgaaaagctatgtctcagagaaagatgtcacatctgctaaagcactgtatgaacatttgactgcaaagaatacaaaattggatgatctgtttctaaagcgttacgcatctttgctgaagtatgctggagagcctgtccctttcattgaaccccctgaaagctttgaattttatgcacagcagctaagaaaattgagggaaaactcttcttgaaataaccaggcgatactttgttttgtatatatttgtgattctgtgtctacatgttattttgaagtatatctgagggaaaaataaatgaaaattttctttatgtacttatgtatgtgtgatgcatgttcaaagtcttattgaccataactctgtgcacttggttattggacatttttggagtttttttctctgggaaaaatcgatagtgttttcttcaatgctgctgctgtgtgaagccatactttttcaggattcttcccctaattggctctttggtttccctgctctgtttcatttatttcattaaaatgttattcctttatttaagattcacttattagtctgctgtttctctgaaaaattttagagctaggtatagtgaccgtgaactttctaacgcataatattctgtgatacagccattccgtacatgtgtgaagtcctgcataactttcgaactttgttaaatgttggcactaggagtcatcagatctaggcttcatcattttccagtgagaagcagagacccaaagggcctgttacttgtgcttggtcaggggactgtctgtcatgcctggaggctcttcggcacacttccccatctttcccttctgccactgtggcttcaagcacctctgttcatagagcgtctctgaaattgagtctcggtcatgacttatcccgaagtagagcaatgtgtttcctctcattgtagtttcaggactttgtcagtacaagctctgccctaggcttgttactttatactcatatcctgaaaagatgtgatttcatctatgaaggggtaaaatattggtttgtatttaattgtttgaaataaaagtgatccctatattgaatctcatgcctgttaatatctacactgtaagtagtgacttcaaaaaaattctaagataggtagtcaggagagtttgccattataaaaggtgtcttaataatatggaatattgacctaactggagatgaggtaattaattaccgaaatgttgaaaatgttttgagaactctccccattttggggtattccttgttcatttgaatttggtgactccctactgttccagtttcagtgccaacttgggtcacactgttcacatcaggggagaccttgccttggggacgtaggcgggcctcttgcaacttgtgctgttgaccttctgtcttgtggaactctctctcctgcatctgctacctgcccgcagatggtgtgagggagggttgatggcgggaagccaggaagtagatgtcatcatggtattggccaggcttttacttcaactctttttgtggcgttagatttaaggaagcagggggcatggccaacgttgagtcttggcccagtggacatagtgcggctttcccttgagcactgcccagatgcaggacctgcacatgttacaggtttgccaaaagcatctttttttttttttttttttttgagatagtcttgctctgttgcttaagccagagtgcagtggcgcaatctcagctcactgcaacctccgcctcctgggttcaagtgattcttgtgcctcagcctcccacgtagctgagattacaggcttgcaccaccatgttcagctaatttttgtatggtaaagacggagtttcaccatgttggccaggttggtctcgaactcctggccccaagtgatcctccccctgcgctcgcttcagcctcccaaagtgctgggattacaggtgtgagccaccacgcctggccaagagcctcactcctgtctttagtgattgcactgaagcaggcctcatttttttgcagtcatgctaaccacaagttagtcaacattcactaattgacattcattagaataggtctccaaggtgaggcataacgttggggtgtaatctggatttcgcagtcatctttttggggaaactgaaagtaccatctcatttgcatgaagtgactccacactggccctgtatatggactctggtaaaatgtgagtgtggtacagaggaaataggtaagacccccttatctagccctctcggcagcagcgggggggtgttacaaaggactagctgttcaaatatcttttgtattgtattgattcccctattgaatataaatatttaaagtataataactatactgtaggtgggcttatgagtgttctaaatatctaatagctaaattgaaataagtagaaatataaacaatttagcagctttctgtaatacatttacactcaaattataagcagctaattctaaaaaagatgtcactgtaaactattgagaactatagtattttatatataattatatgttcatgtatttgaacccaaaataattttaactgaaatgctttgaataaagtatactgtaaatatc

SEQ ID NO: 234546 - DNA, 4185 bp, Artificial Sequence
  derived and/or modified sequence
atggccgccctgctgcggagcgcccggtggctgctgcgggccggcgccgcacctcgactcccacttagtttgaggctgctgccagggggacccggccgcctccacgccgcctcctacttgcccgcagcccgtgccggtcccgtggcaggcggacttctgtcgccagccagactttatgcaattgctgcaaaagagaaagatattcaggaggagtctacattttccagcaggaagattagcaaccaatttgactgggccctgatgagactcgatctctcagttcgcagaaccggtaggattccaaaaaagttattacaaaaagtgtttaatgatacctgccggtcagggggcctgggcggaagtcacgcgctgttgcttctcaggtcttgcggatcgctgttaccggaacttaagctggaggagaggacagaattcgcccacagaatttgggacaccctacaaaaactcggagctgtgtatgatgtcagccactataatgcattacttaaagtctacctgcagaacgagtataagttttcacctacagacttcctggcgaagatggaggaagccaacatccaacccaacagagtaacgtaccagaggctcatcgccagctattgcaacgttggagatatcgagggggcctcaaaaatcttgggattcatgaagacaaaagatctcccagtcacggaggccgtcttcagtgctctcgtgaccggtcacgctcgcgctggggatatggaaaatgccgagaacatcctaactgttatgcgggatgctggaatcgagcccggtccagacacctacttggctctcttgaacgcctacgcggaaaaaggggatattgatcacgttaagcagacgctcgagaaggttgaaaagtctgagctgcacttgatggatcgcgacctgctccagattattttctctttttctaaggcgggttacccgcagtatgtgagtgagattttagagaaagtaacctgcgagagaagatacatcccagatgcaatgaacctgatcctgttgctggttacagaaaagctggaggacgtggccttgcagattctcctcgcttgcccagtctccaaagaagacggacccagcgtcttcgggtccttttttctccagcattgcgtgacaatgaacacacctgtggagaagctcacggattactgcaagaagctgaaagaagttcagatgcactccttccccttacagtttacactccactgcgccctgctcgcgaataagacggatcttgctaaagcactgatgaaagccgtgaaggaggaaggttttcccatccgccctcattacttctggcccctgctggtggggagacggaaggagaaaaacgtgcaggggatcattgagatcctcaagggcatgcaggagctcggtgtgcatccagaccaagagacctatacggactacgtgattccgtgctttgacagtgtgaacagcgctcgcgctatactgcaggagaacggttgtctaagtgattccgacatgttctcccaggctggcctgagatccgaggctgccaacggcaatctggactttgtcctaagcttccttaagtccaatacgctgccgattagccttcagtctatcaggagtagcctcttacttggattccggagatcaatgaacattaatttgtggtctgagatcaccgagcttctttacaaagacggccggtattgccaggaaccaagaggtccgacggaagccgtcggctactttctctataatctgattgattctatgtcggactcagaggtacaagccaaagaggaacaccttcgtcagtactttcatcagctggaaaaaatgaacgtcaaaatcccggaaaatatatacagagggatccgcaacttgttagaaagttatcatgtacccgagcttatcaaggatgcccatctgctggtggaaagcaaaaacctcgatttccagaaaacagtccaactgacatcctcagagttggaatctaccctggagacactaaaggccgaaaatcaacccattagagatgttttaaaacagctgatactggtgctctgtagcgaggaaaacatgcaaaaagctctggaactgaaggccaaatacgagtctgatatggttacaggtggatacgccgcccttatcaacctgtgttgccgccacgacaaggtggaggatgccctgaacctcaaggaagagttcgacaggctggatagttcggccgtcttagacaccggaaaatatgttggactggtgcgagtcctggccaaacacggaaagctccaggacgccataaacattctgaaggaaatgaaagaaaaagacgtcttgattaaggataccactgccctcagcttcttccacatgcttaatggggcagctctgcgcggagaaattgaaacagtgaagcagctacatgaagcgattgttacactcggcttagccgagccttccacgaatatctctttcccacttgtgacggtgcatcttgagaagggtgacttatcaacagccctcgaggtcgccatagactgttacgagaaatataaagtgctcccacggatacatgacgtgctgtgtaagctagttgagaagggcgagaccgatttgatacagaaggctatggactttgtttcccaagaacagggggaaatggtgatgttgtatgatttattctttgccttcctgcagaccggcaattataaggaggcaaagaaaatcattgaaactccaggaattagggcacgaagcgcaagactgcaatggttctgtgacagatgcgtggccaataatcaggtggaaacactggaaaagctggtcgaactaacccagaaacttttcgaatgcgacagagaccaaatgtattataatctgttaaaactttacaaaattaatggggactggcaacgcgcggatgcggtttggaacaaaatccaggaggagaacgtgataccacgcgaaaaaaccctgcggctgctagccgaaatcctgagagagggcaaccaggaggtcccctttgacgtacccgaattgtggtatgaggatgagaaacacagtctgaacagttcaagcgccagtaccacggagcctgatttccagaaagatatcctgatcgcatgtagattgaaccagaagaagggggcctacgatatatttctcaacgccaaggaacagaacattgtctttaacgcagagacgtacagcaatcttataaaactcctgatgtccgaggattatttcacccaggccatggaggtgaaggcattcgctgaaacacacatcaaaggattcactctgaatgatgctgccaatagccgcttgatcatcacccaggttcgccgtgactatctgaaggaagccgtgactacattaaaaactgtactcgaccagcagcagaccccttcccgtctggctgtgacgagagtaattcaggccctggctatgaagggggacgtggagaatatcgaagttgtccagaaaatgctcaatgggttagaagacagcattgggctcagcaaaatggtcttcatcaataacatagccctggcacaaattaaaaataacaacatcgacgccgccattgagaacatcgagaacatgttgacttcagaaaataaggttattgaaccacagtacttcgggctggcctatctttttcgaaaagtcatcgaggaacagctagaacctgccgtggagaaaattagtatcatggccgagaggctggccaaccagtttgccatttacaagcccgtgacagacttctttctgcagctggtggacgcagggaaggtcgatgacgccagagcgcttctgcagcgctgtggagcaatcgctgaacaaaccccgatcctgcttctgtttctgctccggaactcacggaagcagggcaaggcttccacagtgaaaagcgtactggagctcatcccagaactgaacgaaaaggaagaggcctataatagcctgatgaagtcctacgtaagcgagaaggatgtgacatccgctaaagcactttatgagcacctgaccgcgaagaatactaagctcgacgacttattccttaaacgatacgcgtccctgctaaagtatgccggggagccagtgcccttcatagaacctcccgagagtttcgagttctacgcacagcagctgcgaaaactgcgggaaaactcttcatag

SEQ ID NO: 234547 - DNA, 3264 bp, Artificial Sequence
  derived and/or modified sequence
atgcccccccccatctgcccccccctggcccccggcccctggcccggcgggttgggtggatcacacgctctgctgctgctcaggtcatgcggctcactgctgcccgaactaaaactcgaagaaaggaccgaatttgctcacaggatctgggatacactgcaaaagctgggagctgtatacgacgtgtctcactataatgccctactgaaagtgtacctgcagaacgagtacaaatttagcccaactgacttccttgccaaaatggaagaggctaatatccagccgaatcgggtgacctaccaaaggctgattgcttcatattgtaatgtaggcgacattgagggcgcatccaagattctgggcttcatgaaaaccaaagatttgcctgtgaccgaggcagtattctctgctctggtgacaggacatgcccgagcaggcgacatggaaaacgccgaaaacattctcacagtgatgcgagacgccgggattgagcctggacccgacacttacctggctcttttgaatgcttacgccgagaaaggcgacattgatcacgtgaaacagacactggaaaaagttgaaaaatctgagctgcatctgatggaccgggacctgctccagattatctttagtttcagcaaagcaggatacccccagtatgtctcagagattttggaaaaagtgacttgcgagcggcggtacattccagacgctatgaatctcattctcctgcttgtcaccgagaaattggaggatgttgccctccagattctgctggcctgtccagtctcaaaggaggacggcccatcagtgtttgggagcttcttccttcaacattgtgtaactatgaatacgcccgtggaaaagctgacagattactgtaagaagctgaaagaagtgcagatgcactcgtttccgttacagttcaccctccactgcgccctgctggctaacaaaactgatttggccaaggcgctaatgaaggcagtgaaagaggaaggttttcctattaggccccactacttttggccacttttggtgggacgacgcaaagaaaagaatgtccaggggataattgagattctcaagggcatgcaggaactcggtgtacacccggatcaggaaacctacacggattatgtgatcccctgcttcgattccgtcaatagcgctcgggcaattcttcaggaaaacggttgcttatctgactcagatatgttttcccaagctgggctccggtcggaagccgccaacgggaatctggatttcgtgctgtcgttcttgaagtctaacactctccccatctcacttcagagcattagaagcagtcttttgctaggattccggaggtccatgaatatcaatttatggtcggagatcaccgaattgctatacaaagatgggcgatattgtcaggaaccaaggggccctactgaagctgtggggtactttctttacaatctgatagactcgatgtcggacagcgaggttcaggctaaagaggaacacctaaggcagtactttcatcagctggagaaaatgaacgtgaagatcccagaaaatatctatcggggtattaggaacctacttgagtcttaccatgtgcctgagctcataaaggacgctcacttacttgtggagtccaagaatctcgacttccagaagaccgtgcagctgacttcaagcgaattagagagcaccttggaaactctcaaagccgaaaaccagcccatcagagacgtgttgaagcagctcatactggtcctttgtagtgaggagaacatgcagaaggctcttgagctgaaagcgaaatacgagtccgatatggtgacaggtgggtatgcagcccttatcaacctttgttgccgccacgacaaagtggaagatgcactgaacctgaaggaagagtttgaccgcctggattcctcggcggtgttagacaccggcaaatacgtgggactcgtacgtgttctcgccaagcacggcaaattgcaggatgccattaatattctcaaggagatgaaggaaaaggacgtcttgataaaagacacgactgccttgtccttctttcatatgcttaatggcgcggctttacgcggtgaaattgaaacggttaaacagctccatgaggccatcgtaactctgggcttggccgagccaagcactaatatcagcttccccctggtgaccgtccatctggaaaagggggacctgtcaaccgccctggaggttgccatcgattgttatgaaaagtataaggtcctaccgagaatacatgatgtcctgtgcaagttggtggagaagggggagacagatctgatacagaaggccatggatttcgtgtctcaagagcagggggagatggtcatgctgtacgatctattcttcgctttcctgcagacaggcaattataaagaggcgaagaaaatcatcgagacacccggcattagagcaaggtccgcgagactgcagtggttttgcgatcggtgtgtggctaacaatcaggtggaaacactggagaagcttgttgagcttacgcagaaactctttgaatgcgatcgtgaccagatgtactataacctactcaagctgtacaagatcaatggagattggcagcgagctgacgctgtctggaataagatacaggaagagaatgtcatcccgagagaaaaaacccttcgactgttggccgagattctacgggaaggtaatcaggaggtccccttcgacgtgccagagctatggtatgaggacgaaaagcactctctgaactcatcttctgcctctaccaccgaacccgactttcagaaagacatactcatcgcttgtcggctcaaccagaagaagggcgcttatgatattttcttaaacgccaaggaacagaatatagtgttcaacgcagagacctactccaatctcatcaaactgttgatgagcgaggattactttacgcaggccatggaggtaaaagcgtttgccgaaactcatatcaagggatttacattgaacgatgctgctaattcgagattgatcatcactcaggtaagaagggattacctcaaagaggccgtcacaacacttaagacggtcctggatcagcagcagactcctagtcgactggccgtcacccgggtcatccaggcattggcaatgaaaggggacgtcgagaatatcgaagtcgtgcagaaaatgttgaacgggctggaggattccattggcttgtccaagatggtgtttattaacaatatcgccctggcccagtag

SEQ ID NO: 234548 - DNA, 4185 bp, Artificial Sequence
  derived and/or modified sequence
atggccgcattacttaggagcgctagatggcttctcagagccggagctgccccaagattgcctctgtccctgagacttttacctgggggtcccggacggctgcatgcggcaagttacctacccgctgctcgcgcaggccctgtagctggcggactgttgagccctgcacgactgtatgcaattgctgccaaggagaaggatatccaggaagaatccactttcagctccaggaagattagtaatcaattcgactgggcactgatgcggctggacctgtccgtgcgacgcacgggcagaatcccgaagaagttactgcaaaaagtgtttaacgacacatgcaggtcaggcggactcgggggtagtcatgctttgctgcttctccggagctgcggaagtttacttcccgagttgaagctcgaggagcggacagaattcgcgcatcgaatttgggataccctgcagaagctgggcgctgtgtacgatgtatcccactataacgccctgctcaaagtatacctgcaaaacgagtacaagttttccccgacagattttctcgcaaaaatggaggaagcgaacatccagccaaacagggtaacataccagcggctcatcgccagttactgcaacgttggagacatcgagggtgccagcaagatccttggctttatgaagacaaaggatttgccggtgacagaggctgtgttttcagctttggtgacgggtcacgctagggcgggagacatggagaatgctgagaatattctgacagtcatgcgagatgcaggtatcgagcccggaccagatacttatctcgcactgcttaacgcctacgccgagaagggagatatcgatcatgttaagcagaccctggagaaggttgaaaagtctgagctccacttgatggaccgggacctgctccagataatcttctccttctccaaggcagggtatccacaatacgtctctgaaatcctcgagaaagtgacttgtgaacggcgttacatccccgatgccatgaacctgatactactcctggtcactgaaaaactggaagacgtggccttgcagatacttctagcgtgccccgtgtctaaggaggacgggccatccgtgttcggttcctttttccttcaacattgcgtgactatgaacactccagttgaaaagctcacagattactgtaaaaaattgaaggaggtgcagatgcatagcttcccactgcagtttaccctccactgtgccttgctggccaataaaaccgatctggccaaggccctgatgaaggccgttaaggaggagggtttcccgattaggccccactatttctggccattgctggtgggccgtcgaaaggagaagaatgtgcaggggattattgagattctcaaggggatgcaggaacttggagtccaccccgaccaggaaacctacactgattacgtgatcccctgctttgatagcgtcaactcggctcgggctatcctacaggaaaacgggtgccttagcgattctgacatgttcagccaagccggattgcgcagcgaggcagctaatggtaacctcgatttcgttttaagtttcctaaaaagtaatacacttccgatctccttgcagtccatcagaagcagtctgcttctgggctttcgacgtagcatgaatattaacctgtggtctgaaatcaccgaactgctgtataaggacggccgatattgccaggaaccaagaggaccaaccgaggccgtgggctactttctttacaatctgatcgactccatgtcagattccgaagtccaagctaaggaggaacacttacgccagtactttcaccagctcgaaaaaatgaacgtaaaaatcccggaaaatatttaccggggtattaggaacttactggagagttatcacgtgccagaactgattaaagacgcccacctccttgtcgaatccaaaaacctagactttcagaaaacagtgcagctaacctccagcgagctggagtcgacccttgaaacactgaaagcagaaaaccagccaatcagggatgtgctcaaacagctcattctggtgctctgcagcgaggaaaacatgcaaaaagctctggagttaaaagccaaatacgaaagcgatatggtcacaggcggatacgccgcactaataaatttgtgttgtagacacgacaaagtcgaagacgcgctgaacttaaaagaagagtttgatcgactggactcctcagccgtcctggacaccgggaaatacgtcggactcgtgagggtgcttgctaagcatgggaaacttcaagatgccataaacatccttaaagagatgaaggagaaggatgtattaataaaggataccacggcacttagcttctttcacatgctgaatggcgctgccctgcgtggcgagatcgagactgtgaagcagctccatgaggcgatcgtgaccctagggctcgctgagccctctacaaatatcagctttcctctggtcaccgtacacctggagaagggagatctctccacggcactcgaagttgccattgactgctatgagaaatacaaggtactgcccaggattcatgacgtcctttgcaagctggtggagaagggagagacggacctcattcagaaggctatggatttcgtgagccaagagcagggggagatggtgatgctgtatgacctattctttgctttcctgcaaacggggaattataaagaggccaagaagatcattgagacacccggtatcagggccaggagtgctcgcttgcaatggttttgcgatagatgcgtggctaacaatcaggtggagactctggagaagctcgtagagttgacacaaaagctgttcgagtgtgaccgggatcaaatgtactacaacctcctaaagctctacaaaattaatggcgactggcagcgtgccgacgctgtgtggaataaaatccaggaggagaacgtaattccgagagaaaaaaccctccgcctgttggcggagatcctgcgagagggaaatcaggaggttccgttcgacgtccctgagctatggtacgaggacgaaaagcactccctgaacagcagttctgcctctactaccgagccagatttccaaaaggacattctcatcgcgtgtagattgaaccagaagaagggagcctatgatatatttctgaatgctaaggaacagaatattgtttttaacgccgagacctattctaatcttatcaaactgctgatgtctgaagattactttactcaggctatggaagtcaaagcttttgcagagacacacatcaaaggctttacgcttaatgatgccgctaactcgagactgataatcacccaggtgcgcagagattatctgaaggaagctgttaccactctcaagaccgtgttggaccaacagcagaccccatcccgactggcagttaccagagtgatccaggccctcgccatgaaaggggacgtggagaacatcgaggtggtgcagaagatgctgaacggattggaggattcgattgggttatccaagatggtgttcatcaacaatatcgctctggcacaaattaaaaacaacaatattgacgccgctatcgagaacattgaaaacatgctaacatccgaaaataaagttatcgagccgcagtattttgggttggcctacctgtttagaaaggtcatcgaggagcaattggagccagctgtcgagaaaatctcaattatggccgagaggcttgctaaccagtttgctatatataaacccgtgacagatttcttcttgcaacttgtggatgccggtaaggtcgacgatgcccgagctctactccaacgatgcggggctatagccgaacagactcccattttgctgctgtttttgctgcgtaactctaggaagcaaggcaaagctagcacggtgaagagcgtcctcgaactaattccagagctgaatgaaaaagaggaggcctacaactcgttaatgaaatcatacgtgtctgagaaggacgtcacgtcagccaaagccctgtatgaacatctgacagccaaaaacactaagctggatgacctatttctcaagagatacgcctcactgctcaaatatgccggagagcccgttccctttatagagcccccagagtctttcgagttttatgcacaacaactgaggaagctgcgggaaaactcatcctag

SEQ ID NO: 234549 - DNA, 3264 bp, Artificial Sequence
  derived and/or modified sequence
atgccacctccaatatgtcccccactggctccaggaccttggcccggagggcttggaggaagtcacgcactgctgctccttcgctcgtgcgggtcactcctcccagaacttaagctcgaggagcgtaccgaatttgcccacagaatttgggacaccttgcagaaactcggagccgtctacgacgtgagtcactataacgcactcctaaaggtttacctccaaaacgagtataagttctcacctaccgacttcctggccaagatggaggaggccaacatacagcccaacagggtcacctaccagcgacttatagcatcatattgtaacgtgggtgacattgaaggtgcatctaaaattctaggttttatgaaaactaaggaccttccagttaccgaggccgtctttagtgccctggtgaccggacacgccagagcaggtgacatggaaaatgcggagaatatcctgaccgtaatgcgcgatgccggtatagagcccggacccgacacatacttagccctgttaaatgcatacgccgagaagggagacatagaccacgtcaagcagacactggaaaaagttgaaaagtctgagcttcatttaatggatcgcgacttgctgcaaatcatcttctctttctctaaggccggttacccccagtacgtgtctgaaatcctcgagaaggtaacttgtgagcgtcgttatattccagacgcaatgaacctcattcttctgctggtcacagagaagttggaagatgttgccctacagattcttctcgcgtgcccagtgtctaaagaggacgggccatcggttttcggctcttttttcttacagcactgtgtcaccatgaatacacccgttgaaaaattaacggattactgcaagaagctgaaggaggtccaaatgcactctttcccattacagttcacactgcactgcgcactgctagccaataaaactgatctggccaaggcgctcatgaaggctgtcaaagaggaggggttccctattcggcctcattatttctggccgctgctggtcgggaggcgcaaggaaaagaatgtgcagggcatcattgagatcctgaaagggatgcaggagctcggggtacatcctgaccaagagacttatacagattacgttatcccttgcttcgactcagtgaactcggctcgcgcaatcctccaggaaaacggttgccttagcgattcagacatgttctcacaggcagggctccggtcagaagccgcaaacgggaatttggatttcgtgctgtcattccttaaaagcaatactttgccaatttccctgcaaagcatcaggtcgagtctcttgttagggttccgccgtagcatgaacattaacctgtggagtgaaataactgaattgctctacaaagacggaaggtactgccaggagcccagaggcccaacggaagcagtcggctacttcctatataacctcatcgattcaatgtctgacagtgaggtccaggccaaagaagaacatctgcgccaatattttcatcagctggaaaagatgaatgtaaaaatcccggaaaacatttacagaggaatccggaatctgctggaaagctatcatgtgccggaactcatcaaggacgcgcaccttctggtcgaaagcaagaacctcgactttcagaagactgtgcaactaacttcctcggaactggagtctactttagagacactgaaagccgagaaccagcctatacgagatgtgctgaagcagctcatactagtcttgtgctcggaagagaacatgcagaaggcgctagaacttaaagcaaaatacgaatccgacatggtgactgggggttatgcagccctgatcaacctttgctgcaggcacgacaaggttgaggatgcattaaacctcaaggaggagttcgaccgactggattccagcgcggttctcgataccggaaagtacgttggactggttagggtattggccaagcatgggaaactgcaagacgctatcaacattcttaaggagatgaaggagaaggatgtgctcattaaagataccacagctctatctttctttcatatgcttaacggggcagcattgaggggtgaaattgagaccgtgaaacaactgcatgaggcaatagtaactctgggacttgctgagccctctacgaatatcagttttcccctggtaactgtccacctcgagaaaggtgatctcagcaccgcactggaggtggctatcgactgctacgagaaatataaagttctcccacggatacacgatgtcctctgtaagctggtagaaaagggcgagaccgatctgatccaaaaagcgatggacttcgtgagccaggagcagggggaaatggtgatgctgtatgacctgtttttcgctttccttcagactggtaattacaaggaggccaagaagatcattgagaccccaggcatccgtgccaggtccgcccgtctgcagtggttttgtgaccgctgtgttgccaacaatcaagtggagaccctggaaaagcttgttgaactgacccagaagctttttgagtgcgatagggatcagatgtactacaatcttctgaaactgtataaaatcaacggagattggcaacgggctgacgccgtctggaacaagatccaagaagagaatgtaattcctagggagaaaacccttagactgctggctgaaattctcagagaggggaatcaggaggtgcctttcgatgtgccagagctgtggtatgaggatgagaagcacagtttgaattctagctccgcttcaacaacagaaccagactttcagaaggacatattgattgcctgcaggttgaaccaaaaaaaaggcgcttatgatatcttcctgaacgcgaaggagcagaatatagtgttcaacgcagaaacctattccaatctcataaaactactcatgagcgaggattacttcacacaggctatggaggtgaaggccttcgccgagacgcatattaagggctttacccttaacgatgccgctaactctcggctgattataactcaggttcggagagattatctgaaagaggccgtgacaactctgaaaacagtgctggaccagcagcagaccccgtcccgcttagcagtgacacgggtaatccaggcactcgctatgaaaggagatgtggaaaacatcgaggtggtgcagaagatgctcaacggtctggaggattcaataggcctcagtaagatggtgtttattaacaatatcgccctcgcccagtag

SEQ ID NO: 234550 - DNA, 4185 bp, Artificial Sequence
  derived and/or modified sequence
atggccgccctgctgagaagcgccagatggctgctgagagccggcgccgcccccagactgcccctgagcctgagactgctgcccggcggccccggcagactgcacgccgccagctacctgcccgccgccagagccggccccgtggccggcggcctgctgagccccgccagactgtacgccatcgccgccaaggagaaggacatccaggaggagagcaccttcagcagcagaaagatcagcaaccagttcgactgggccctgatgagactggacctgagcgtgagaagaaccggcagaatccccaagaagctgctgcagaaggtgttcaacgacacctgcagaagcggcggcctgggcggcagccacgccctgctgctgctgagaagctgcggcagcctgctgcccgagctgaagctggaggagagaaccgagttcgcccacagaatctgggacaccctgcagaagctgggcgccgtgtacgacgtgagccactacaacgccctgctgaaggtgtacctgcagaacgagtacaagttcagccccaccgacttcctggccaagatggaggaggccaacatccagcccaacagagtgacctaccagagactgatcgccagctactgcaacgtgggcgacatcgagggcgccagcaagatcctgggcttcatgaagaccaaggacctgcccgtgaccgaggccgtgttcagcgccctggtgaccggccacgccagagccggcgacatggagaacgccgagaacatcctgaccgtgatgagagacgccggcatcgagcccggccccgacacctacctggccctgctgaacgcctacgccgagaagggcgacatcgaccacgtgaagcagaccctggagaaggtggagaagagcgagctgcacctgatggacagagacctgctgcagatcatcttcagcttcagcaaggccggctacccccagtacgtgagcgagatcctggagaaggtgacctgcgagagaagatacatccccgacgccatgaacctgatcctgctgctggtgaccgagaagctggaggacgtggccctgcagatcctgctggcctgccccgtgagcaaggaggacggccccagcgtgttcggcagcttcttcctgcagcactgcgtgaccatgaacacccccgtggagaagctgaccgactactgcaagaagctgaaggaggtgcagatgcacagcttccccctgcagttcaccctgcactgcgccctgctggccaacaagaccgacctggccaaggccctgatgaaggccgtgaaggaggagggcttccccatcagaccccactacttctggcccctgctggtgggcagaagaaaggagaagaacgtgcagggcatcatcgagatcctgaagggcatgcaggagctgggcgtgcaccccgaccaggagacctacaccgactacgtgatcccctgcttcgacagcgtgaacagcgccagagccatcctgcaggagaacggctgcctgagcgacagcgacatgttcagccaggccggcctgagaagcgaggccgccaacggcaacctggacttcgtgctgagcttcctgaagagcaacaccctgcccatcagcctgcagagcatcagaagcagcctgctgctgggcttcagaagaagcatgaacatcaacctgtggagcgagatcaccgagctgctgtacaaggacggcagatactgccaggagcccagaggccccaccgaggccgtgggctacttcctgtacaacctgatcgacagcatgagcgacagcgaggtgcaggccaaggaggagcacctgagacagtacttccaccagctggagaagatgaacgtgaagatccccgagaacatctacagaggcatcagaaacctgctggagagctaccacgtgcccgagctgatcaaggacgcccacctgctggtggagagcaagaacctggacttccagaagaccgtgcagctgaccagcagcgagctggagagcaccctggagaccctgaaggccgagaaccagcccatcagagacgtgctgaagcagctgatcctggtgctgtgcagcgaggagaacatgcagaaggccctggagctgaaggccaagtacgagagcgacatggtgaccggcggctacgccgccctgatcaacctgtgctgcagacacgacaaggtggaggacgccctgaacctgaaggaggagttcgacagactggacagcagcgccgtgctggacaccggcaagtacgtgggcctggtgagagtgctggccaagcacggcaagctgcaggacgccatcaacatcctgaaggagatgaaggagaaggacgtgctgatcaaggacaccaccgccctgagcttcttccacatgctgaacggcgccgccctgagaggcgagatcgagaccgtgaagcagctgcacgaggccatcgtgaccctgggcctggccgagcccagcaccaacatcagcttccccctggtgaccgtgcacctggagaagggcgacctgagcaccgccctggaggtggccatcgactgctacgagaagtacaaggtgctgcccagaatccacgacgtgctgtgcaagctggtggagaagggcgagaccgacctgatccagaaggccatggacttcgtgagccaggagcagggcgagatggtgatgctgtacgacctgttcttcgccttcctgcagaccggcaactacaaggaggccaagaagatcatcgagacccccggcatcagagccagaagcgccagactgcagtggttctgcgacagatgcgtggccaacaaccaggtggagaccctggagaagctggtggagctgacccagaagctgttcgagtgcgacagagaccagatgtactacaacctgctgaagctgtacaagatcaacggcgactggcagagagccgacgccgtgtggaacaagatccaggaggagaacgtgatccccagagagaagaccctgagactgctggccgagatcctgagagagggcaaccaggaggtgcccttcgacgtgcccgagctgtggtacgaggacgagaagcacagcctgaacagcagcagcgccagcaccaccgagcccgacttccagaaggacatcctgatcgcctgcagactgaaccagaagaagggcgcctacgacatcttcctgaacgccaaggagcagaacatcgtgttcaacgccgagacctacagcaacctgatcaagctgctgatgagcgaggactacttcacccaggccatggaggtgaaggccttcgccgagacccacatcaagggcttcaccctgaacgacgccgccaacagcagactgatcatcacccaggtgagaagagactacctgaaggaggccgtgaccaccctgaagaccgtgctggaccagcagcagacccccagcagactggccgtgaccagagtgatccaggccctggccatgaagggcgacgtggagaacatcgaggtggtgcagaagatgctgaacggcctggaggacagcatcggcctgagcaagatggtgttcatcaacaacatcgccctggcccagatcaagaacaacaacatcgacgccgccatcgagaacatcgagaacatgctgaccagcgagaacaaggtgatcgagccccagtacttcggcctggcctacctgttcagaaaggtgatcgaggagcagctggagcccgccgtggagaagatcagcatcatggccgagagactggccaaccagttcgccatctacaagcccgtgaccgacttcttcctgcagctggtggacgccggcaaggtggacgacgccagagccctgctgcagagatgcggcgccatcgccgagcagacccccatcctgctgctgttcctgctgagaaacagcagaaagcagggcaaggccagcaccgtgaagagcgtgctggagctgatccccgagctgaacgagaaggaggaggcctacaacagcctgatgaagagctacgtgagcgagaaggacgtgaccagcgccaaggccctgtacgagcacctgaccgccaagaacaccaagctggacgacctgttcctgaagagatacgccagcctgctgaagtacgccggcgagcccgtgcccttcatcgagccccccgagagcttcgagttctacgcccagcagctgagaaagctgagagagaacagcagctag

SEQ ID NO: 234551 - DNA, 3264 bp, Artificial Sequence
  derived and/or modified sequence
atgcccccccccatctgcccccccctggcccccggcccctggcccggcggcctgggcggcagccacgccctgctgctgctgagaagctgcggcagcctgctgcccgagctgaagctggaggagagaaccgagttcgcccacagaatctgggacaccctgcagaagctgggcgccgtgtacgacgtgagccactacaacgccctgctgaaggtgtacctgcagaacgagtacaagttcagccccaccgacttcctggccaagatggaggaggccaacatccagcccaacagagtgacctaccagagactgatcgccagctactgcaacgtgggcgacatcgagggcgccagcaagatcctgggcttcatgaagaccaaggacctgcccgtgaccgaggccgtgttcagcgccctggtgaccggccacgccagagccggcgacatggagaacgccgagaacatcctgaccgtgatgagagacgccggcatcgagcccggccccgacacctacctggccctgctgaacgcctacgccgagaagggcgacatcgaccacgtgaagcagaccctggagaaggtggagaagagcgagctgcacctgatggacagagacctgctgcagatcatcttcagcttcagcaaggccggctacccccagtacgtgagcgagatcctggagaaggtgacctgcgagagaagatacatccccgacgccatgaacctgatcctgctgctggtgaccgagaagctggaggacgtggccctgcagatcctgctggcctgccccgtgagcaaggaggacggccccagcgtgttcggcagcttcttcctgcagcactgcgtgaccatgaacacccccgtggagaagctgaccgactactgcaagaagctgaaggaggtgcagatgcacagcttccccctgcagttcaccctgcactgcgccctgctggccaacaagaccgacctggccaaggccctgatgaaggccgtgaaggaggagggcttccccatcagaccccactacttctggcccctgctggtgggcagaagaaaggagaagaacgtgcagggcatcatcgagatcctgaagggcatgcaggagctgggcgtgcaccccgaccaggagacctacaccgactacgtgatcccctgcttcgacagcgtgaacagcgccagagccatcctgcaggagaacggctgcctgagcgacagcgacatgttcagccaggccggcctgagaagcgaggccgccaacggcaacctggacttcgtgctgagcttcctgaagagcaacaccctgcccatcagcctgcagagcatcagaagcagcctgctgctgggcttcagaagaagcatgaacatcaacctgtggagcgagatcaccgagctgctgtacaaggacggcagatactgccaggagcccagaggccccaccgaggccgtgggctacttcctgtacaacctgatcgacagcatgagcgacagcgaggtgcaggccaaggaggagcacctgagacagtacttccaccagctggagaagatgaacgtgaagatccccgagaacatctacagaggcatcagaaacctgctggagagctaccacgtgcccgagctgatcaaggacgcccacctgctggtggagagcaagaacctggacttccagaagaccgtgcagctgaccagcagcgagctggagagcaccctggagaccctgaaggccgagaaccagcccatcagagacgtgctgaagcagctgatcctggtgctgtgcagcgaggagaacatgcagaaggccctggagctgaaggccaagtacgagagcgacatggtgaccggcggctacgccgccctgatcaacctgtgctgcagacacgacaaggtggaggacgccctgaacctgaaggaggagttcgacagactggacagcagcgccgtgctggacaccggcaagtacgtgggcctggtgagagtgctggccaagcacggcaagctgcaggacgccatcaacatcctgaaggagatgaaggagaaggacgtgctgatcaaggacaccaccgccctgagcttcttccacatgctgaacggcgccgccctgagaggcgagatcgagaccgtgaagcagctgcacgaggccatcgtgaccctgggcctggccgagcccagcaccaacatcagcttccccctggtgaccgtgcacctggagaagggcgacctgagcaccgccctggaggtggccatcgactgctacgagaagtacaaggtgctgcccagaatccacgacgtgctgtgcaagctggtggagaagggcgagaccgacctgatccagaaggccatggacttcgtgagccaggagcagggcgagatggtgatgctgtacgacctgttcttcgccttcctgcagaccggcaactacaaggaggccaagaagatcatcgagacccccggcatcagagccagaagcgccagactgcagtggttctgcgacagatgcgtggccaacaaccaggtggagaccctggagaagctggtggagctgacccagaagctgttcgagtgcgacagagaccagatgtactacaacctgctgaagctgtacaagatcaacggcgactggcagagagccgacgccgtgtggaacaagatccaggaggagaacgtgatccccagagagaagaccctgagactgctggccgagatcctgagagagggcaaccaggaggtgcccttcgacgtgcccgagctgtggtacgaggacgagaagcacagcctgaacagcagcagcgccagcaccaccgagcccgacttccagaaggacatcctgatcgcctgcagactgaaccagaagaagggcgcctacgacatcttcctgaacgccaaggagcagaacatcgtgttcaacgccgagacctacagcaacctgatcaagctgctgatgagcgaggactacttcacccaggccatggaggtgaaggccttcgccgagacccacatcaagggcttcaccctgaacgacgccgccaacagcagactgatcatcacccaggtgagaagagactacctgaaggaggccgtgaccaccctgaagaccgtgctggaccagcagcagacccccagcagactggccgtgaccagagtgatccaggccctggccatgaagggcgacgtggagaacatcgaggtggtgcagaagatgctgaacggcctggaggacagcatcggcctgagcaagatggtgttcatcaacaacatcgccctggcccagtag

SEQ ID NO: 234552 - protein, 312 aa, Artificial Sequence
  derived and/or modified sequence
MEGAAAREARGTETPRASAPPPAPSEPPAAPRARPRLVFRTQLAHGSPTGKIEGFTNVRELYAKIAEAFGIAPTEILFCTLNSHKVDMQKLLGGQIGLEDFIFAHVRGETKEVEVTKTEDALGLTITDNGAGYAFIKRIKEGSIINRIEAVCVGDSIEAINDHSIVGCRHYEVAKMLRELPKSQPFTLRLVQPKRAFDMIGQRSRSSKCPVEAKVTSGRETLRLRSGGAATVEEAPSEFEEEASRKVDDLLESYMGIRDPELASTMVETSKKTASAQEFARCLDSVLGEFAFPDEFVVEVWAAIGEAREACG

SEQ ID NO: 234553 - DNA, 939 bp, Artificial Sequence
  derived and/or modified sequence
atggagggtgccgccgctcgtgaagccaggggaacagaaaccccacgagcttctgctccccccccagccccaagcgagccccccgctgccccacgagcacgacctcggctggtgtttagaacacagctcgcccatggctctcccacagggaagattgagggattcactaatgtgagagagttgtatgctaagatcgccgaagccttcggcatcgctccgaccgagattctcttttgcaccttaaactctcacaaagtggacatgcagaaattacttggggggcaaattggcctcgaggacttcatatttgcccatgtgcgaggcgagactaaagaggtggaggtcacaaagactgaagacgctctggggctcactataaccgacaatggggcgggatatgcttttatcaagcggatcaaagaggggtccatcattaacaggatcgaagcagtgtgtgtcggggactccattgaggccattaatgaccatagtatcgtcggttgcaggcactacgaggtcgctaaaatgctaagagagctgccaaaaagccaaccgtttaccctgcggctggtacaacccaaaagagcttttgacatgattggacagagatcccggtccagcaaatgccctgtggaagctaaagtgacctctggccgggagacgctgagactgcgttctggcggagccgcaaccgtcgaagaggcaccatccgagttcgaggaagaagctagccgcaaggtggacgacttactagaatcatacatgggaatcagagacccggagcttgctagtacaatggtcgaaacatctaagaagaccgccagcgcccaggagttcgctcgctgccttgattccgtccttggagaatttgccttccctgacgagtttgttgtagaagtctgggcggctatcggcgaggctcgagaagcttgcggctag

SEQ ID NO: 234554 - DNA, 939 bp, Artificial Sequence
  derived and/or modified sequence
atggagggcgctgctgcccgggaggcccggggcacagagaccccccgggccagcgcccctcctccagcccccagcgagcccccagctgccccccgggcccggccccggctggtgttccgcacccagctggcccacggcagccccaccgggaagattgagggcttcaccaacgtgcgggagctgtatgccaagattgctgaggcctttggaattgcccccacagagatcctcttctgcaccctgaacagccacaaggtggacatgcagaagctgctgggcggccagatcggcctggaggacttcatctttgcccacgtgcggggggagaccaaggaggtggaggtgaccaagacagaagatgccctgggcctgaccatcacagacaatggagctggctacgccttcatcaagaggatcaaggagggcagcatcatcaaccgcatcgaggccgtgtgtgtgggggacagcattgaggccatcaatgaccacagcatcgtgggctgccgccactatgaggtggccaagatgctgcgggagctgcccaagagccagcccttcaccctgcggctggtgcagcccaagagggcctttgacatgattggccagaggagccgcagcagcaagtgccctgtggaggccaaggtgaccagcggccgggagaccctgcggctgcggagcggcggggccgccaccgtggaggaggcccccagcgagtttgaggaggaggccagcaggaaggtggatgacctgctggagagctacatgggcatccgggaccctgagctggccagcaccatggtggagaccagcaagaagacagccagcgcccaggagtttgcccgctgcctggacagcgtgctgggggagtttgccttcccagatgaatttgtggtggaggtgtgggccgccatcggggaggcccgggaggcctgtggctag

SEQ ID NO: 234555 - DNA, 939 bp, Artificial Sequence
  derived and/or modified sequence
atggagggcgccgccgcccgggaggcccggggcaccgagacccccagggcctctgccccacctccagcaccatccgaacctccagctgctcctcgcgccagaccgaggctggtatttcgcactcaattagcacacggcagtccgaccggcaaaatcgagggatttactaatgttagagagctgtacgctaaaatcgccgaggcctttggcattgccccgactgaaatactgttctgcactcttaactcccacaaggtagacatgcagaagcttctagggggccaaattggactagaagatttcatcttcgcccatgtgaggggggagacaaaagaagtggaggtgaccaagacagaggacgcactgggcctgacaatcacagacaacggcgcagggtatgcctttataaaacgcatcaaggagggttccatcattaatcggattgaggcagtatgtgtaggggactctattgaggccattaatgaccacagcatcgtggggtgcagacactacgaggtagccaagatgctgcgagagttgcccaagtcccagcccttcaccctgaggcttgtccagccgaaacgtgcgttcgacatgattgggcagcgctcacggagcagcaaatgtcccgtagaggcaaaggtcacctctggaagggaaactctccggctgcgctctgggggagctgccacagtggaggaggcccccagcgaatttgaagaagaagccagccgcaaggttgacgacttactggagagttatatgggtattcgagaccctgagctcgccagcacaatggtcgagactagcaagaagactgccagcgcccaagaattcgctagatgcttggattccgtgctgggtgaatttgcctttcccgatgagttcgtcgtagaagtttgggccgctatcggtgaagctagagaggcgtgcggctag

SEQ ID NO: 234556 - DNA, 939 bp, Artificial Sequence
  derived and/or modified sequence
atggaaggtgctgcggcacgcgaagcccgaggcacagagacccctcgcgcttccgcaccaccacctgcgccatcggagccaccagctgcccctagagcaagacctaggctggtctttaggacccagcttgcacacggttcacctactggaaaaatcgaaggcttcactaacgtacgggaattgtatgccaaaatagccgaagcgttcggtatcgcaccaacggaaatccttttctgcactctgaatagccataaagtcgatatgcagaaactgctcggcggacaaataggtctggaagatttcatatttgcccatgtgcggggagagaccaaagaagtggaagtgacgaagactgaggacgctttgggactgaccatcaccgataatggggcagggtacgcctttataaagaggataaaagagggttccatcattaaccggattgaggctgtgtgtgtgggggactccattgaagccatcaatgaccattccatcgtgggatgcaggcattatgaagtcgccaagatgctgagagagctacctaagagtcagccttttactctccgccttgtccagccaaagagagcctttgatatgattggtcagcggtccaggagcagtaagtgccccgtcgaggccaaggtgactagtgggagggagaccctgcggctgcggagcggcggtgcggcaaccgtggaagaagccccatccgagtttgaagaggaagctagtcgcaaggtcgacgatctgctggaatcctacatgggtatcagagacccagaacttgcttctacgatggtcgagacaagcaaaaaaacagcgagcgctcaagaatttgctcggtgcttggattccgtgctgggtgagtttgctttccctgacgaatttgttgtggaggtctgggcagcgatcggcgaagcacgcgaggcgtgtggctag

SEQ ID NO: 234557 - DNA, 939 bp, Artificial Sequence
  derived and/or modified sequence
atggagggcgccgccgccagagaggccagaggcaccgagacccccagagccagcgcccccccccccgcccccagcgagccccccgccgcccccagagccagacccagactggtgttcagaacccagctggcccacggcagccccaccggcaagatcgagggcttcaccaacgtgagagagctgtacgccaagatcgccgaggccttcggcatcgcccccaccgagatcctgttctgcaccctgaacagccacaaggtggacatgcagaagctgctgggcggccagatcggcctggaggacttcatcttcgcccacgtgagaggcgagaccaaggaggtggaggtgaccaagaccgaggacgccctgggcctgaccatcaccgacaacggcgccggctacgccttcatcaagagaatcaaggagggcagcatcatcaacagaatcgaggccgtgtgcgtgggcgacagcatcgaggccatcaacgaccacagcatcgtgggctgcagacactacgaggtggccaagatgctgagagagctgcccaagagccagcccttcaccctgagactggtgcagcccaagagagccttcgacatgatcggccagagaagcagaagcagcaagtgccccgtggaggccaaggtgaccagcggcagagagaccctgagactgagaagcggcggcgccgccaccgtggaggaggcccccagcgagttcgaggaggaggccagcagaaaggtggacgacctgctggagagctacatgggcatcagagaccccgagctggccagcaccatggtggagaccagcaagaagaccgccagcgcccaggagttcgccagatgcctggacagcgtgctgggcgagttcgccttccccgacgagttcgtggtggaggtgtgggccgccatcggcgaggccagagaggcctgcggctag

SEQ ID NO: 234558 - protein, 1023 aa, Artificial Sequence
  derived and/or modified sequence
MAGNDCGALLDEELSSFFLNYLADTQGGGSGEEQLYADFPELDLSQLDASDFDSATCFGELQWCPENSETEPNQYSPDDSELFQIDSENEALLAELTKTLDDIPEDDVGLAAFPALDGGDALSCTSASPAPSSAPPSPAPEKPSAPAPEVDELSLLQKLLLATSYPTSSSDTQKEGTAWRQAGLRSKSQRPCVKADSTQDKKAPMMQSQSRSCTELHKHLTSAQCCLQDRGLQPPCLQSPRLPAKEDKEPGEDCPSPQPAPASPRDSLALGRADPGAPVSQEDMQAMVQLIRYMHTYCLPQRKLPPQTPEPLPKACSNPSQQVRSRPWSRHHSKASWAEFSILRELLAQDVLCDVSKPYRLATPVYASLTPRSRPRPPKDSQASPGRPSSVEEVRIAASPKSTGPRPSLRPLRLEVKREVRRPARLQQQEEEDEEEEEEEEEEEKEEEEEWGRKRPGRGLPWTKLGRKLESSVCPVRRSRRLNPELGPWLTFADEPLVPSEPQGALPSLCLAPKAYDVERELGSPTDEDSGQDQQLLRGPQIPALESPCESGCGDMDEDPSCPQLPPRDSPRCLMLALSQSDPTFGKKSFEQTLTVELCGTAGLTPPTTPPYKPTEEDPFKPDIKHSLGKEIALSLPSPEGLSLKATPGAAHKLPKKHPERSELLSHLRHATAQPASQAGQKRPFSCSFGDHDYCQVLRPEGVLQRKVLRSWEPSGVHLEDWPQQGAPWAEAQAPGREEDRSCDAGAPPKDSTLLRDHEIRASLTKHFGLLETALEEEDLASCKSPEYDTVFEDSSSSSGESSFLPEEEEEEGEEEEEDDEEEDSGVSPTCSDHCPYQSPPSKANRQLCSRSRSSSGSSPCHSWSPATRRNFRCESRGPCSDRTPSIRHARKRREKAIGEGRVVYIQNLSSDMSSRELKRRFEVFGEIEECEVLTRNRRGEKYGFITYRCSEHAALSLTKGAALRKRNEPSFQLSYGGLRHFCWPRYTDYDSNSEEALPASGKSKYEAMDFDSLLKEAQQSLH

SEQ ID NO: 234559 - protein, 1017 aa, Artificial Sequence
  derived and/or modified sequence
MAGNDCGALLDEELSSFFLNYLADTQGGGSGEEQLYADFPELDLSQLDASDFDSATCFGELQWCPENSETEPNQYSPDDSELFQIDSENEALLAELTKTLDDIPEDDVGLAAFPALDGGDALSCTSASPAPSSAPPSPAPEKPSAPAPEVDELSLLQKLLLATSYPTSSSDTQKEGTAWRQAGLRSKSQRPCVKADSTQDKKAPMMQSQSRSCTELHKHLTSAQCCLQDRGLQPPCLQSPRLPAKEDKEPGEDCPSPQPAPASPRDSLALGRADPGAPVSQEDMQAMVQLIRYMHTYCLPQRKLPPQTPEPLPKACSNPSQQVRSRPWSRHHSKASWAEFSILRELLAQDVLCDVSKPYRLATPVYASLTPRSRPRPPKDSQASPGRPSSVEEVRIAASPKSTGPRPSLRPLRLEVKREVRRPARLQQQEEEDEEEEEEEEEEEKEEEEEWGRKRPGRGLPWTKLGRKLESSVCPVRRSRRLNPELGPWLTFADEPLVPSEPQGALPSLCLAPKAYDVERELGSPTDEDSGQDQQLLRGPQIPALESPCESGCGDMDEDPSCPQLPPRDSPRCLMLALSQSDPTFGKKSFEQTLTVELCGTAGLTPPTTPPYKPTEEDPFKPDIKHSLGKEIALSLPSPEGLSLKATPGAAHKLPKKHPERSELLSHLRHATAQPASQAGQKRPFSCSFGDHDYCQVLRPEGVLQRKVLRSWEPSGVHLEDWPQQGAPWAEAQAPGREEDRSCDAGAPPKDSTLLRDHEIRASLTKHFGLLETALEEEDLASCKSPEYDTVFEDSSSSSGESSFLPEEEEEEGEEEEEDDEEEDSGVSPTCSDHCPYQSPPSKANRQLCSRSRSSSGSSPCHSWSPATRRNFRCESRGPCSDRTPSIRHARKRREKAIGEGRVVYIQNLSSDMSSRELKRRFEVFGEIEECEVLTRNRRGEKYGFITYRCSEHAALSLTKGAALRKRNEPSFQLSYGGLRHFCWPRYTDYGKPLKPSHSLVRLKAWEAVPSLNKTQS

SEQ ID NO: 234560 - DNA, 3072 bp, Artificial Sequence
  derived and/or modified sequence
atggccggaaacgactgcggcgcactgctggacgaagaactatctagcttctttctgaactacttagctgatacgcagggcggtggaagcggggaggaacagctctatgccgactttcccgaactggacctgagccaactggatgctagtgattttgactccgctacttgtttcggagagcttcaatggtgtccagaaaactcagaaacagagcccaaccagtatagccctgatgattctgaactgttccagatcgactcagagaatgaagctcttctggccgaattgaccaaaaccctggacgatatccccgaagacgacgtgggtcttgctgccttccccgctctagacgggggagacgcactctcgtgcacatcggcctctcctgcccccagctcggcccccccctccccagcgccagaaaaaccgtccgctcctgcccccgaggtcgacgagctgtctctgctgcaaaagctgctcctcgctacctcttatccaacaagtagctccgatactcaaaaagaagggaccgcctggaggcaggcgggcctacgctccaaatctcagcggccgtgcgtgaaggccgattctacccaggataagaaggccccaatgatgcaaagtcagtccaggagctgcaccgagctccacaaacacttgaccagcgcccagtgctgcctgcaggataggggcttgcaaccaccatgcctgcagtccccacgactgcctgctaaggaggataaagaacctggcgaagactgtccgagtccacagcctgctcccgcttctcccagagattctttagccctcggacgagccgaccctggcgctcctgtgtctcaggaggacatgcaggccatggtgcagctgatcaggtacatgcatacttactgcctgccccagcgaaagctgcctccccaaacacctgagccactgccaaaagcttgctccaacccatcacagcaggtgcggtccagaccttggagccgccaccattcaaaggcttcctgggccgaattttcaattctaagagagcttcttgcccaggatgttctgtgtgatgtgagcaaaccttacaggctggcaactccagtgtacgcaagcctgacaccgcggagccggcctcggccacctaaggactcacaggccagtcccgggcggccctcatccgtggaggaagtcagaattgcagcctctccaaaatccactggtcccaggcccagtctgaggcccctgcgactcgaagtaaaacgggaggttcgacgccctgctagactgcaacagcaggaagaggaagacgaggaggaggaagaggaagaagaggaggaggagaaagaggaggaggaggaatgggggaggaaaaggcctggccggggccttccttggaccaagcttggtagaaagctggagtcctcagtctgccctgtgcggcgctcacggaggctgaacccagagctcggcccctggctgacttttgctgacgaacccttggtgcccagcgaacctcagggcgctctgccctccctctgcctggcccccaaagcgtatgatgtggagcgcgagttgggcagtcccacggacgaggactctgggcaggaccagcagcttcttcggggtcctcagattccggcattggaatctccttgcgagtcggggtgcggtgacatggatgaggacccaagttgtcctcagctgccaccaagagatagccctcgctgcctgatgctggctctctctcagtccgacccgacattcggtaaaaagtcatttgagcagacactgacggtcgaactctgtggtaccgctggcctaacacccccaactacaccaccttataagccaacagaagaggaccctttcaagcctgacattaaacacagcctaggtaaggaaatcgcattgtctctcccatcacccgagggtctgtcactaaaggctacccctggcgcagcgcataagctccccaagaaacacccagaaagatctgagctattgtctcacctccggcatgccacggcccagcccgctagccaggcagggcagaaaaggcctttttcttgcagcttcggtgaccacgattactgtcaggtcttaagaccagaaggcgtccttcagaggaaggtactgcgtagctgggaacctagcggagtacacctggaagactggcctcaacagggagccccttgggccgaagcccaagctcccgggcgtgaagaagatcggtcttgtgacgccggagccccacccaaggacagcaccctgctccgggaccacgagatccgtgcttcactgaccaaacactttggcctcctggaaacagctttggaagaggaagatttggccagctgcaaatcaccagagtacgacacagtgttcgaagattcgtcgtcttctagtggcgaatcctcctttttgcctgaggaggaagaggaggagggggaagaggaggaagaggacgatgaggaggaggactccggtgtatcaccaacgtgctccgaccactgtccataccaaagccctcccagtaaggccaatcgccagctctgctcaagatcccggagcagtagcgggagctccccctgtcacagttggtctcccgccacacgtaggaacttcagatgtgagagtcgcgggccctgttcagaccgcaccccttctatccgccacgcccggaagcgccgcgaaaaggcaatcggggagggacgagttgtctacatccaaaatctttctagcgacatgagcagtagggagcttaagagacggtttgaagtgtttggcgaaatcgaggagtgcgaagtgctaaccaggaaccgccgtggggaaaagtatgggtttattacctatcgctgctccgagcatgctgctctctctttaaccaagggggctgctcttcgtaaaagaaacgagccgtcctttcagctgagctatggcggcctgcgtcacttctgttggccacggtacacggattacgatagcaacagcgaggaagcactgcctgctagtggaaaatctaaatatgaggccatggacttcgacagtctgctgaaggaggcccaacagagcctgcactag

SEQ ID NO: 234561 - DNA, 3072 bp, Artificial Sequence
  derived and/or modified sequence
atggctggaaatgactgtggggccctgctggatgaggagctgagcagcttcttcctgaactacctggccgacacccagggcggcggcagcggggaggagcagctgtatgctgacttccctgagctggacctgagccagctggatgccagtgactttgacagcgccacctgcttcggggagctgcagtggtgcccagagaacagcgagacagagcccaaccagtacagcccagatgacagcgagctgttccagattgattctgaaaatgaggccctgctggccgagctgaccaagaccctggatgacatcccagaagatgatgtgggcctggccgccttccctgccctggatggaggagatgccctgagctgcaccagcgccagccctgcccccagcagcgccccacccagccctgcccctgagaagcccagcgccccagcccctgaggtggatgagctgagcctgctgcagaagctgctgctggccaccagctaccccaccagcagcagtgacacccagaaggagggcacagcctggaggcaggccggcctgcggagcaagagccagaggccctgtgtgaaggctgacagcacccaggacaagaaggcccccatgatgcagagccagagccgcagctgcacagagctgcacaagcacctgaccagcgcccagtgctgcctgcaggaccggggcctgcagcccccctgcctgcagagcccccggctgcctgccaaggaggacaaggagcccggggaggactgccccagcccccagcctgccccagccagcccccgggacagcctggccctgggccgggctgaccccggggcccctgtgtcccaggaggacatgcaggccatggtgcagctgatccgctacatgcacacctactgcctgccccagaggaagctgcccccccagaccccagagcccctgcccaaggcctgcagcaaccccagccagcaggtgcgcagccggccctggagccgccaccacagcaaggcctcctgggccgagttcagcatcctgcgggagctgctggcccaggatgtgctgtgtgatgtgtccaagccctaccgcctggccacccctgtgtatgccagcctgacccccaggagccggcccaggcctcccaaggacagccaggccagccctggccggcccagctctgtggaggaggtgagaattgctgccagccccaagagcacaggcccccggcccagcctgcggcccctgcggctggaggtgaagcgggaggtgagaagacctgcccggctgcagcagcaggaggaggaggatgaggaggaggaggaggaggaggaggaggaggagaaggaggaggaggaggagtggggcaggaagaggcctggccggggcctgccctggaccaagctgggcaggaagctggagagctctgtgtgccctgtgagaagaagccggcggctgaaccctgagctgggcccctggctgacctttgctgatgagcccctggtgcccagcgagccccagggcgccctgcccagcctgtgcctggcccccaaggcctatgatgtggagcgggagctgggcagccccacagatgaggacagcggccaggaccagcagctgctgcggggcccccagatcccagccctggagagcccctgtgagagcggctgtggggacatggatgaggaccccagctgcccccagctgcccccccgggacagcccccgctgcctgatgctggccctgagccagagcgaccccaccttcggcaagaagagctttgagcagaccctgactgtggagctgtgtggcacagctggcctgaccccacccaccaccccaccctacaagcccacagaggaggaccccttcaagccagacatcaagcacagcctgggcaaggagatcgccctgagcctgcccagccctgagggcctgagcctgaaggccacccctggggccgcccacaagctgcccaagaagcaccctgagaggtctgagctgctgagccacctgcggcatgccacagcccagcctgccagccaggccggccagaagaggcccttcagctgcagctttggagaccatgactactgccaggtgctgcggcctgagggcgtgctgcagaggaaggtgctgcgctcctgggagcccagcggcgtgcacctggaggactggccccagcagggcgccccctgggccgaggcccaggcccctggccgggaggaggacaggagctgtgatgctggggccccacccaaggacagcaccctgctgcgggaccacgagatccgggccagcctgaccaagcacttcggcctgctggagacagccctggaggaggaggacctggccagctgcaagagcccagaatatgacacagtgtttgaggacagcagcagcagcagtggagagagcagcttcctgcctgaggaggaggaggaggagggggaggaggaggaggaggatgatgaggaggaggacagcggcgtgagccccacctgcagcgaccactgcccctaccagagcccccccagcaaggccaaccggcagctgtgcagccgcagccgcagcagcagcggcagcagcccctgccacagctggagccctgccaccaggaggaacttccgctgtgagagccggggcccctgcagcgacaggacccccagcatcagacatgccaggaagagaagagagaaggccatcggggagggccgggtggtgtacatccagaacctgagcagtgacatgagcagccgggagctgaagagaagatttgaggtgtttggagaaattgaggagtgtgaggtgctgaccaggaacagaagaggagagaagtatggcttcatcacctaccgctgcagcgagcacgccgccctgagcctgaccaagggggccgccctgaggaagagaaatgagcccagcttccagctgtcctatggaggcctgcggcacttctgctggccccgctacacagattatgacagcaacagcgaggaggccctgcctgccagcggcaagagcaaatatgaggccatggactttgacagcctgctgaaggaggcccagcagagcctgcactag

SEQ ID NO: 234562 - DNA, 3072 bp, Artificial Sequence
  derived and/or modified sequence
atggccggcaacgactgcggcgccctgctggacgaggagctgagctcattcttcctgaactatcttgctgacacccaggggggcgggtctggcgaggagcagctgtacgccgatttccccgaactggacctaagccagttggatgcaagcgattttgactcagctacatgctttggggagcttcagtggtgccccgagaattccgagacggagcctaatcagtactctcccgacgattccgagctctttcaaatcgattctgagaatgaggctctcctggcggagctcaccaagacccttgacgacatcccggaagacgatgtaggcctggctgcatttcctgcactggatggaggcgacgcccttagctgcacgtccgcatcacccgctccttccagcgcaccaccatcacccgcccccgaaaagccaagcgctcccgccccagaggtagacgagctgtcactactgcagaaactgctgttagcgacatcataccccaccagtagttcagacactcaaaaggaggggacagcttggaggcaagctggactaagatccaagtctcagcgtccatgtgtgaaggccgactcaactcaggacaagaaagcgcccatgatgcaaagccagtcccggagctgtaccgagctgcataaacacctaacatctgcacagtgctgtctacaggacaggggtctgcagcctccatgtctgcagagtccacgattgcctgccaaagaggataaggagccgggagaggactgtcccagtcctcagccggcgcctgcatcaccacgggattctcttgccctgggacgagccgatcccggcgccccggtctcccaggaggatatgcaagctatggtgcagctaattcgctacatgcatacttactgcctgccccagcggaagttgccgcctcagactcctgaacctctacctaaggcatgctctaatccaagccagcaggtgcgcagtcggccctggagtagacatcatagcaaggcgtcctgggccgaattcagcatacttcgagaattactcgctcaagatgtgctgtgcgatgtgagcaagccgtaccggttggctacacctgtatacgcgtctttaacaccccgaagtcgaccgcggccccctaaggattcccaagccagccctggacgaccctctagcgtggaagaagttcggatcgcagcgtctcccaagagcactgggccaagaccaagcttgcgccccctgagattggaagtcaagcgagaggtgagaagacccgccagactgcagcagcaagaggaggaagatgaggaagaggaggaagaggaagaagaagaggagaaagaggaggaggaggagtggggtcgcaagcggcctggccgtggcttgccgtggacgaaattaggccgaaaactggagtcaagcgtgtgtcccgtgcggcgttctaggagactgaatcccgagctcggaccttggttgacatttgctgatgaacctctcgtaccctccgagcctcagggagctctgccatcactatgcctggctcctaaggcttacgacgttgagagagaacttggctcccccaccgatgaagactcaggacaagaccagcagcttctgagagggccccagattcctgctctggaatccccctgtgaaagtggctgcggagacatggatgaggacccttcctgcccacagctgcctcctagagactctccgcgctgcctgatgctggctctgtcgcaatccgatccaactttcggaaaaaaaagctttgaacagacattgaccgtggagctgtgcggcacagccggcctaactcctcccacaacccctccctacaagccgaccgaggaagacccatttaaaccagatataaagcatagcctgggaaaagagatcgctttgtccctaccttctccggagggactctcgctcaaggccactcccggtgcggcccataagctacccaaaaagcatccggaaaggtccgaactgctgtctcacctgcgccacgcaacagctcagcccgcttcccaggcagggcagaaacgccctttctcctgctcctttggtgaccatgactactgccaggtgctgagacccgagggggtgctccagcgcaaagtgctgcgctcatgggaacctagcggagtgcaccttgaggattggcctcagcagggtgctccctgggcggaagcacaagctccgggaagagaagaagaccggtcatgcgatgcaggggcaccacctaaggattcaactctccttcgggaccatgaaattcgcgcctcactaacgaagcactttggactgctggagaccgccctggaggaagaggacctcgcctcatgtaagtccccggagtacgacactgtgttcgaagacagcagttcctcatccggtgagagtagctttctgcccgaggaagaagaggaggagggagaagaggaggaggaggacgacgaggaagaagattctggagtatccccaacttgctccgatcactgtccataccagagtcctcccagcaaagccaacaggcaactctgcagcagaagtaggagttcgagcgggagttctccttgccattcctggagcccagccactcgccggaacttcagatgtgaaagcagaggcccgtgttctgacagaacaccttcaattcgacatgcccgcaaaagacgggaaaaggctataggagagggacgcgtcgtgtacatccagaatctcagtagtgatatgagctcgcgtgagctgaagcggagatttgaagtatttggagaaattgaggagtgtgaagtgctgaccaggaaccgaaggggcgagaaatacggtttcatcacttacaggtgctctgagcacgccgccctgagtctcacaaagggcgcggctctccgaaaaaggaacgagcctagttttcagttgagctacggcgggctgagacatttctgttggccacggtatacggactacgacagcaattcagaggaagcgctccccgccagcgggaaaagcaaatacgaagccatggatttcgattcattgttgaaagaggcgcagcagagcttgcactag

SEQ ID NO: 234563 - DNA, 10568 bp, Artificial Sequence
  derived and/or modified sequence
actccgccgcacgctgcagccgcggctggaagatggcggggaacgactgcggcgcgctgctggacgaagagctctcctccttcttcctcaactatctcgctgacacgcagggtggagggtccggggaggagcaactctatgctgactttccagaacttgacctctcccagctggatgccagcgactttgactcggccacctgctttggggagctgcagtggtgcccagagaactcagagactgaacccaaccagtacagccccgatgactccgagctcttccagattgacagtgagaatgaggccctcctggcagagctcaccaagaccctggatgacatccctgaagatgacgtgggtctggctgccttcccagccctggatggtggagacgctctatcatgcacctcagcttcgcctgccccctcatctgcaccccccagccctgccccggagaagccctcggccccagcccctgaggtggacgagctctcactgctgcagaagctcctcctggccacatcctacccaacatcaagctctgacacccagaaggaagggaccgcctggcgccaggcaggcctcagatctaaaagtcaacggccttgtgttaaggcggacagcacccaagacaagaaggctcccatgatgcagtctcagagccgaagttgtacagaactacataagcacctcacctcggcacagtgctgcctgcaggatcggggtctgcagccaccatgcctccagagtccccggctccctgccaaggaggacaaggagccgggtgaggactgcccgagcccccagccagctccagcctctccccgggactccctagctctgggcagggcagaccccggtgccccggtttcccaggaagacatgcaggcgatggtgcaactcatacgctacatgcacacctactgcctcccccagaggaagctgcccccacagacccctgagccactccccaaggcctgcagcaacccctcccagcaggtcagatcccggccctggtcccggcaccactccaaagcctcctgggctgagttctccattctgagggaacttctggctcaagacgtgctctgtgatgtcagcaaaccctaccgtctggccacgcctgtttatgcctccctcacacctcggtcaaggcccaggccccccaaagacagtcaggcctcccctggtcgcccgtcctcggtggaggaggtaaggatcgcagcttcacccaagagcaccgggcccagaccaagcctgcgcccactgcggctggaggtgaaaagggaggtccgccggcctgccagactgcagcagcaggaggaggaagacgaggaagaagaggaggaggaagaggaagaagaaaaagaggaggaggaggagtggggcaggaaaaggccaggccgaggcctgccatggacgaagctggggaggaagctggagagctctgtgtgccccgtgcggcgttctcggagactgaaccctgagctgggcccctggctgacatttgcagatgagccgctggtcccctcggagccccaaggtgctctgccctcactgtgcctggctcccaaggcctacgacgtagagcgggagctgggcagccccacggacgaggacagtggccaagaccagcagctcctacggggaccccagatccctgccctggagagcccctgtgagagtgggtgtggggacatggatgaggaccccagctgcccgcagctccctcccagagactctcccaggtgcctcatgctggccttgtcacaaagcgacccaacttttggcaagaagagctttgagcagaccttgacagtggagctctgtggcacagcaggactcaccccacccaccacaccaccgtacaagcccacagaggaggatcccttcaaaccagacatcaagcatagtctaggcaaagaaatagctctcagcctcccctcccctgagggcctctcactcaaggccaccccaggggctgcccacaagctgccaaagaagcacccagagcgaagtgagctcctgtcccacctgcgacatgccacagcccagccagcctcccaggctggccagaagcgtcccttctcctgttcctttggagaccatgactactgccaggtgctccgaccagaaggcgtcctgcaaaggaaggtgctgaggtcctgggagccgtctggggttcaccttgaggactggccccagcagggtgccccttgggctgaggcacaggcccctggcagggaggaagacagaagctgtgatgctggcgccccacccaaggacagcacgctgctgagagaccatgagatccgtgccagcctcaccaaacactttgggctgctggagaccgccctggaggaggaagacctggcctcctgcaagagccctgagtatgacactgtctttgaagacagcagcagcagcagcggcgagagcagcttcctcccagaggaggaagaggaagaaggggaggaggaggaggaggacgatgaagaagaggactcaggggtcagccccacttgctctgaccactgcccctaccagagcccaccaagcaaggccaaccggcagctctgttcccgcagccgctcaagctctggctcttcaccctgccactcctggtcaccagccactcgaaggaacttcagatgtgagagcagagggccgtgttcagacagaacgccaagcatccggcacgccaggaagcggcgggaaaaggccattggggaaggccgcgtggtgtacattcaaaatctctccagcgacatgagctcccgagagctgaagaggcgctttgaagtgtttggtgagattgaggagtgcgaggtgctgacaagaaataggagaggcgagaagtacggcttcatcacctaccggtgttctgagcacgcggccctctctttgacaaagggcgctgccctgaggaagcgcaacgagccctccttccagctgagctacggagggctccggcacttctgctggcccagatacactgactacgattccaattcagaagaggcccttcctgcgtcagggaaaagcaagtatgaagccatggattttgacagcttactgaaagaggcccagcagagcctgcattgataacagccttaaccctcgaggaatacctcaatacctcagacaaggcccttccaatatgtttacgttttcaaagaaatcaagtatatgaggagagcgagcgagcgtgagagaacacccgtgagagagacttgaaactgctgtcctttaaaaaaaaaaaaaatcaatgtttacattgaacaaagctgcttctgtctgtgagtttccatggtgttgacgttccactgccacattagtgtcctcgcttccaacgggttgtcccgggtgcacctcgaagtgccgggtccgtcacccatcgccccttccttcccgactgacttcctctcgtagacttgcagctgtgttcaccataacatttcttgtctgtagtgtgtgatgatgaaattgttacttgtgaatagaatcaggactataaacttcatttttaattgaaaaaaaaagtatatccttaaaataatgtatttatggctcagatgtactgtgcctgggattattgtattgcttccttgattttttaactatgcactgtcatgaggtgtttgccactgagctgccctgctccccttgccagattgccctggaggtgctgggtggccgctaggctggtctgcaggaaagcgcggcctgccgtttccgggccgtatctgccaagccctgccttgtctcttactgagcaagtttggctcaaattataggagcccccatcttgtgcccagctcatgctccaagtgtgtgtctatccatttgtactcagactcttgagtaccttgtaaggaaggcggggcaagctgcatcattcctgttttccaggggaggctggcagctcctcaagaggcgaaatgactgtgggaggtccggttaccagtgaggaggcagagcggtgacccagaccaggccttctggttcttggtcccgtgcttccgtagtagctggggtaaagacaccgtttcagggactggtagaggtgagttcggctaaattgggcaccgggctagaagcctaagggctcattttaggggttacattaggtgttgattcaccagcatcaggtgaattcaagccctggcatgtgtcttggatgcaccatcagctttgatcctgagtggtcctgcggtttgtctgtgcctgtggacacactgtcagaacttcagtgacacccctggcagcggtacagacaggtggtctgggagcagtcatcttttttgggccagccaccagcccatcctactccctcaggtagtccttcgtctttaccttgtccttgtctgtaaagttgttttggtggctggggcaggggagccaggaggagggagtgaaggttgggaatagataggacaatctcctagctctcctccaattgagaaaacactccaattgggctttgctttaaactttgtgttcttaagtgatgtcaaagccatttccagcttaatgttctgtgggtaccttgggggccattcatgcagggagcatggccaggcagggtatgagtacattgtttctgatttctttcatacatcagggttcctcgggaaatttttgtattttttttttaagtcctgctgctttaaaaatttgaaagtggctcattaaactaaacaggctaatgtaatttgttgcttatgccaagcctagactgttgagaattgacgtttttaaagattatcaaatacctcagtaggtaaaatgagcccatgatcttccactgagtggtgagcatactcccagcccatggacaaggccggaagagacaggctttagtaggggtagggaatttgaactgttgtgtgtcacagcagttgacctctctggactccaatttcctttcctgtgaaatgaactgattagacatgtttcaacattgttagcttctgctgaggcagtgtctagcccaagatggcaaatacatagctcatgtgccactactcccacctccttgaccaatacagacataactaatcaatcacaccactcaggttccctgagcctggatgtgctataagaatcctgaaatcagtgctctggtaagtcattactaattgattagagttcaatctatttgacatcttgggctaatctttggaaggtttccaacaatcacacaaaaccatatgctggctgggtttcatgctggcctatccctgtctgtgatgttccgttccatgagagaaaactcccctaatgctattccatggcgtaacactcccaatactattttgacgcccacgtccccttgcagagggtgcagggggcggtagacgaatgacagacaggaacatatttggggaaggcagggcttaggaagatggaccaaaaagggacttcccacagcacagacctgatcattcggatttcctctttagctattcactgcctagcacatagtaggcacacaataaatgattatggaatgggataaaatttagatctttctgctgcctccactaagttaagtcctgatttacatcaaggagagaactgagataggaaagaacactagattccaagtctggagagttgggggagtccagattctaccaagaatttcctttgtaactttggtaagtcccttttactccctggcaccccggtgtgctgaaaggagttggtccatatatgatctcttagcccctcctatttgcttcttccttgattgctcttggtcaaagggtcagccttgggctggtgatactttagagtaaagaaatggagagttttagcaaaggaccagtctgtccctccctgctttggggtcagctaaagctgtcctttcatgtcagattaacctaggacacttgtagttagcttagacgttggcccttgagcagagacctgagcgtggcattgggacatgacatacctaaagtcagggctaggggacgctgcctgccaagggcatcgagtagtctctacttgctatcccgtacataaaatgctacaagttctaaaatttaccgaccctgcagacaacctctatcccgaaggactcattcggtgctgtgtattatttagggcaactccaaggtctattcagaaaaacgagtgaaccttggtctctttcccaccaaattgaggagtaacccagagggagcagctgccattggcaaccatctcgttgtagctctgtcctagtgtttgctcttgatgatgtttacatgtgatcgccataaagcttgctgtagactgtgtcgatagccgcccgcacagggcaggtcgtactgtccgtttctgtgccgtgctggtgttttccaaaaatgtctgatccaaccactaagtggaattcttccatctccttcctcagtctgtacaaggctgaatcagaatccccattctcgggggctctggttaccgaaggaaaatgcatcaaagagttaaagaatatgagtggatggagtgcagctaaggcccccaccccctgctccgtcacaacttgccccctcaaccaaaaagctgctttgagtcaaaaagcacccataagatacctgcatctgccttgaaatcttgcagcatggagtgtcatatgtactcaggagagaggcagggctttgcgggcaggagaaggaagggaggaatgctctgagctgcaaagacccagtactcaagttctgacgtgggaggagatgcagtgagacgtctcttgttgcctaaagcctgttcctgttggttttcttagagtgatttctcctagacatgtgcagtaggcccactggggctgctgtgcagtggtgagtaaaagggcagggaaggcatggacagcctggtccttctgcatggacagctcagtccatggcccatcccaggtatagagttcagttaatcccatttgagcctgcagcttaagagatggctcatcctaactgtgaagcaaaatcagccccagaggatgtattgatctgactcactgatgtcaaaattgcagtatttttttagcatttgagatttagcagctgccttcagtttggggttacccacatcccagcatcagatatgattaaggaaagaaattggatgtacaacagcaaagaaagtgaatgtcatggtttccctggccaaagaagagggaccctgtcatccttaccaatggggaagaagaaaactagtgcatgtgcaatatgtcaaagttagtcccctagtccctgaggggtttttacacacagatgggctccaggtctgctcgtcaagtttggaggtaccgggtaaatggaggggagctgcagagttggaaacccacatgcatggatgtgtccttggcccagaaccaccatgggatgggggaggccctgagccggctacaagacacccaggaagtaggcaaaggctgactttgcattaaacaataaaagcactttgagaaaaccccaacacttcagcctgggtccgtgtttctacactggaaaatacgagtctcctttggctgtgtgaagtgatcttctagagactgggacagggagtttgggaatggggctgctgtcaggtaggagagagcagagatgcctttggagatgtcagcagcaggagagccagtgctggggccaaccctttgctggccttttgttggaagcccttgaaacagggagccatgggtttagatcttggtacctacctttacagaaagatgaaaacagcccagctgagtgaaatgagtttgtagagtaagtcacttaactgtaagccatctcagaatcagaaaccctaatgtttcttacttgctatgtgaccttgggcccctgtttcctcatctaccaaatgagaatgttgaatatgagcattaaagtccctttcacctctgagaggctcagatccccaaccaggagcattgggaatccatcactcctccttgaaactgattccattctctgacttgacccagctcctgttcagggtgagggttctctgcaagaaccaaccagcagtaggttcaatcccactgtgtcctggctgagttgccttatccaagaagaccagctccccgggacagatctaagccatagtttctagtggggacagtaaggaattaaacccccaacttggctaggtaacgatgtcaaatctcacattaaccttgtctttgtccccactggatagctgttaatccgaatgttgtgaccatttggctgtttctctcttgttctcagacaatactagcaatacactttttttttttttttttaaagaaaaacagcttaggagcttttcacacatttctttcaaatgattgtaaaacatatggggcaacaggaggcattgatcgcgctgcatatgtttagggcagcttttgttttttgtttctttaatggtatagcagcagtgactgagccttcgtgattcctggggacagcttttcagatactctgtttcatcagtatgctttgcacatccggaaggagtacaaaaatccaactgcccaaatttggggcttggaaaataggttttataggtggtcggtccctgggctgtgcaacaactcctcaaagaggggtttatataactagaacccccctgggctgtatttttggtcaaaggagtctccaaggcggcttacaaaagcttcctttttcacttgaccacccttgctcattggttacttgtgaagggaattggtcagtttccacctcagcactttgccttatcaacatgcggtcgccatctagtggccaaaggttgtctccaccagctacccagatggaaggcaaataaatcctttcggccaccctgctgtccatcgtgaactttgggaatgaaatataatggcctgaacgaactgcctttgtgttcagagatcagtgcaacactagggtcagaagactccagaagcagccacttagtagactctcacgcagaactgagaaatgcactagctgtcctgtgggcagaagagacaggagtggaccaggagaggtccaggtgcccgggaagggtttactgtaactgcaatactggcagcccagctgctgaccttgttaagtaaacctttgctgggtggtccgaattctgccctcaaggcaagataagaagttgggtgtaaggattttgtggggggcctggccatgatctttgatatgatccccgaatagccaaatagttttttttgttcaattttttgtttctgtattttgtatttttaaaatcttgtcaaatgtttttgtgttaggaataaaaagtcataaactattcccaactttgtttcttgagggatgttctgattccaatggaaacaggtgggaaatctcaaggggagcgtggacaaggtggtatgtgcagcaggggaatagactgcttggatttccaaatggtttctggggaagatgaccatccagaagtccagcttagtgcagtctgctctggaattcacacccaccccctcgcctccttgtgccatgttgttagcattggcttggagcatctgcttcttccagaggcagctgctaatgttgaaaccaacacgagccctctccccaaccccaggtttctaaagaaggtgtctgtagccagccttaatcaactgggcaaggtggtccctatggtcctttccagcatttccaaatcttggactcaaattattttctcttggtgtgaccacacagcctagagaattctgagcaataggagccagggctttccctgactctgcgacagggtcaaaccaaggaatggctaaacctgtgaggttttgtcatccccgggggtactactgtagggggcattatttattaggaagcttaacaaggtaactacggcctgagtgcgtgagtgtaaggctgtgtttgtggtgggggtgtgtgtgtgtgtatctgtgcacacatacacacgtctgtgcctgtgtgtgtgtgtttgtgtgtgtgtgtgtgtgtggaattacattgatgcatttattgagaaaggtgcaagaatttcacctacacagagggacacatctgctttgttatttataatagaaagctaaattttaattttttaaaggacactgctaatgattgagaatcaagtttttagttttgctattttttttaattggtagaggatttttatatattttttccattttgttgggttgtgtccttatttatataaatactttatccgtaagaggcaaggaggaaaccttctttgcttttacatattgtggttgtcatcgtccctattttatttctggtgtgatttctctgtcttaccttctaaatgagaaaatgttttcttgtatttgtacattgtcagattctatagtttcctagataatttaaccaaattgctctatgtattattattctgtgagtataaagttctattttaatgtctgtaaatacttcagaactggcttcttttctcaaactcccactgtggggttattgtttacatcacagaaactgtagaatctctatgctcatgtactgtaaatagtgaagtgatctgcttataaataaacttaacaaatacactatggagattaaaaacaaaataccacccaca

SEQ ID NO: 234564 - DNA, 3072 bp, Artificial Sequence
  derived and/or modified sequence
atggcaggaaatgactgtggtgcgctgttagacgaggaactgtcctccttttttctcaattaccttgccgacacccaaggaggtgggagcggggaagaacaactctacgccgactttcctgaattggacctgtctcaactcgacgcctccgatttcgatagcgctacttgttttggggagctgcagtggtgtcctgagaactccgaaactgagcctaaccagtatagccccgacgactccgagctgtttcagatagatagtgaaaacgaggctctcctggccgagttaaccaagacccttgacgacatcccggaggatgacgtgggtctggccgcttttcctgccttagatgggggtgacgcactctcatgcacttctgctagtcctgccccaagctcagcaccaccatctccagcgccagaaaagccatccgccccagcaccagaggtagacgagctgagtttacttcagaagctgttgctggccactagctaccccacaagcagcagcgatacgcagaaggagggcactgcgtggagacaggctgggctacgaagcaagtctcaacgaccttgcgtcaaggctgatagtactcaggacaaaaaagcccctatgatgcagagccagtcacggtcatgcaccgagctgcataagcaccttacatccgcacagtgttgcttacaggaccggggattgcaaccgccttgcctccagagtcccagacttccagctaaggaggacaaagagcctggggaggattgtccatctccgcagccagcaccggctagtcctcgagacagcctcgcgctgggtcgggctgaccccggagccccagtgagccaagaagatatgcaggccatggtgcagttgatacgatacatgcatacttactgcttgccccagcggaaactgcccccacagaccccagagcctctgccaaaagcgtgttcgaatccttcgcagcaggtaagatctagaccttggtcacgtcatcacagtaaggcttcttgggctgaattttccatcctgagagaactgttggcccaggacgttctgtgcgacgtctctaagccatacagactggctaccccagtgtatgccagtctcacaccgagatcaagaccaaggccccctaaggattcacaggccagcccaggacgcccatcgagtgtcgaggaagttcggatcgcggcttcacctaagagcaccggaccccgtccgagcctgcgacccttgcgcctggaggtaaagcgcgaagtcagacgacccgcaaggctgcagcagcaagaagaagaagatgaagaagaagaagaggaagaggaggaggaggagaaggaagaggaggaagaatgggggagaaagcggccaggtagaggcctcccgtggactaagctgggccgaaaactggagagctcagtctgcccagtccgcagaagtcggaggctcaatcctgagttgggcccatggttgaccttcgctgatgagccgctggtgcctagcgagcctcaaggcgctttgccttcactgtgcctggcccctaaagcctacgacgtggagcgcgaactgggatcccctactgacgaagactctggccaggaccagcagctactcagaggcccacagattcccgctctcgagtcgccatgtgagagtggatgcggcgatatggacgaagaccctagttgtcctcagttgccccctcgggattctcctcgctgcctaatgcttgccctttcccagagcgaccctacatttggaaaaaaaagcttcgagcagacgctgacagttgagctctgtggaactgccggtctgaccccccctaccacccccccttataagccaacagaggaggacccttttaagccggatatcaaacatagcctgggaaaggagattgctctgagcctcccatcccccgaaggactgtcactcaaggctacacctggggctgctcacaagctcccaaagaagcaccccgaacgatctgaactactatcccacctacgccacgccacagcccagccagccagccaggctgggcaaaaacgacctttcagctgctccttcggtgatcacgattattgccaagttctcaggcccgaaggagtgttgcagcggaaagtgctcaggagctgggagccctccggcgtgcaccttgaagactggccccagcagggagctccctgggctgaggcgcaggcgccaggaagagaggaggaccggtcatgcgatgctggtgccccacctaaggacagtacgctgttgagggaccacgagatcagggcctctctgacaaagcactttggcctgcttgagacagctttagaagaagaggacttggccagctgcaagtccccagagtatgacactgtcttcgaggactcatccagctctagtggagaatcctccttcctcccggaggaggaggaggaggagggagaggaagaagaagaggacgacgaagaagaggacagtggcgtatcccctacctgcagtgatcactgcccatatcaatcccccccttccaaggccaatcgccagttatgttccaggtctaggtcctcttcgggatctagtccctgtcactcttggtccccagcgacccgaaggaacttcaggtgtgagtcccgaggaccctgcagtgatcgcactccttcaatcaggcatgcgaggaagcgcagggaaaaggctataggcgaggggcgtgtggtttacatacagaatctttccagcgacatgagcagtagggaactcaagcggcgatttgaggtcttcggcgagatcgaagaatgcgaggtactcactaggaaccggcgtggagagaaatacgggttcattacataccgatgttccgagcacgccgcactgtccctgacgaaaggtgccgctcttcgcaaacgtaatgaaccctcgttccagctttcctacggcggattgcggcatttttgctggcccaggtataccgattatgatagtaacagcgaagaagccctgccggcttcaggaaagtctaagtacgaagcgatggatttcgactcattgctgaaggaggcgcagcaatcgctgcactag

SEQ ID NO: 234565 - DNA, 3072 bp, Artificial Sequence
  derived and/or modified sequence
atggccggcaacgactgcggcgccctgctggacgaggagctgagcagcttcttcctgaactacctggccgacacccagggcggcggcagcggcgaggagcagctgtacgccgacttccccgagctggacctgagccagctggacgccagcgacttcgacagcgccacctgcttcggcgagctgcagtggtgccccgagaacagcgagaccgagcccaaccagtacagccccgacgacagcgagctgttccagatcgacagcgagaacgaggccctgctggccgagctgaccaagaccctggacgacatccccgaggacgacgtgggcctggccgccttccccgccctggacggcggcgacgccctgagctgcaccagcgccagccccgcccccagcagcgccccccccagccccgcccccgagaagcccagcgcccccgcccccgaggtggacgagctgagcctgctgcagaagctgctgctggccaccagctaccccaccagcagcagcgacacccagaaggagggcaccgcctggagacaggccggcctgagaagcaagagccagagaccctgcgtgaaggccgacagcacccaggacaagaaggcccccatgatgcagagccagagcagaagctgcaccgagctgcacaagcacctgaccagcgcccagtgctgcctgcaggacagaggcctgcagcccccctgcctgcagagccccagactgcccgccaaggaggacaaggagcccggcgaggactgccccagcccccagcccgcccccgccagccccagagacagcctggccctgggcagagccgaccccggcgcccccgtgagccaggaggacatgcaggccatggtgcagctgatcagatacatgcacacctactgcctgccccagagaaagctgcccccccagacccccgagcccctgcccaaggcctgcagcaaccccagccagcaggtgagaagcagaccctggagcagacaccacagcaaggccagctgggccgagttcagcatcctgagagagctgctggcccaggacgtgctgtgcgacgtgagcaagccctacagactggccacccccgtgtacgccagcctgacccccagaagcagacccagaccccccaaggacagccaggccagccccggcagacccagcagcgtggaggaggtgagaatcgccgccagccccaagagcaccggccccagacccagcctgagacccctgagactggaggtgaagagagaggtgagaagacccgccagactgcagcagcaggaggaggaggacgaggaggaggaggaggaggaggaggaggaggagaaggaggaggaggaggagtggggcagaaagagacccggcagaggcctgccctggaccaagctgggcagaaagctggagagcagcgtgtgccccgtgagaagaagcagaagactgaaccccgagctgggcccctggctgaccttcgccgacgagcccctggtgcccagcgagccccagggcgccctgcccagcctgtgcctggcccccaaggcctacgacgtggagagagagctgggcagccccaccgacgaggacagcggccaggaccagcagctgctgagaggcccccagatccccgccctggagagcccctgcgagagcggctgcggcgacatggacgaggaccccagctgcccccagctgccccccagagacagccccagatgcctgatgctggccctgagccagagcgaccccaccttcggcaagaagagcttcgagcagaccctgaccgtggagctgtgcggcaccgccggcctgaccccccccaccacccccccctacaagcccaccgaggaggaccccttcaagcccgacatcaagcacagcctgggcaaggagatcgccctgagcctgcccagccccgagggcctgagcctgaaggccacccccggcgccgcccacaagctgcccaagaagcaccccgagagaagcgagctgctgagccacctgagacacgccaccgcccagcccgccagccaggccggccagaagagacccttcagctgcagcttcggcgaccacgactactgccaggtgctgagacccgagggcgtgctgcagagaaaggtgctgagaagctgggagcccagcggcgtgcacctggaggactggccccagcagggcgccccctgggccgaggcccaggcccccggcagagaggaggacagaagctgcgacgccggcgccccccccaaggacagcaccctgctgagagaccacgagatcagagccagcctgaccaagcacttcggcctgctggagaccgccctggaggaggaggacctggccagctgcaagagccccgagtacgacaccgtgttcgaggacagcagcagcagcagcggcgagagcagcttcctgcccgaggaggaggaggaggagggcgaggaggaggaggaggacgacgaggaggaggacagcggcgtgagccccacctgcagcgaccactgcccctaccagagcccccccagcaaggccaacagacagctgtgcagcagaagcagaagcagcagcggcagcagcccctgccacagctggagccccgccaccagaagaaacttcagatgcgagagcagaggcccctgcagcgacagaacccccagcatcagacacgccagaaagagaagagagaaggccatcggcgagggcagagtggtgtacatccagaacctgagcagcgacatgagcagcagagagctgaagagaagattcgaggtgttcggcgagatcgaggagtgcgaggtgctgaccagaaacagaagaggcgagaagtacggcttcatcacctacagatgcagcgagcacgccgccctgagcctgaccaagggcgccgccctgagaaagagaaacgagcccagcttccagctgagctacggcggcctgagacacttctgctggcccagatacaccgactacgacagcaacagcgaggaggccctgcccgccagcggcaagagcaagtacgaggccatggacttcgacagcctgctgaaggaggcccagcagagcctgcactag

SEQ ID NO: 234566 - protein, 440 aa, Artificial Sequence
  derived and/or modified sequence
MPIPPPPPPPPGPPPPPTFHQANTEQPKLSRDEQRGRGALLQDICKGTKLKKVTNINDRSAPILEKPKGSSGGYGSGGAALQPKGGLFQGGVLKLRPVGAKDGSENLAGKPALQIPSSRAAAPRPPVSAASGRPQDDTDSSRASLPELPRMQRPSLPDLSRPNTTSSTGMKHSSSAPPPPPPGRRANAPPTPLPMHSSKAPAYNREKPLPPTPGQRLHPGREGPPAPPPVKPPPSPVNIRTGPSGQSLAPPPPPYRQPPGVPNGPSSPTNESAPELPQRHNSLHRKTPGPVRGLAPPPPTSASPSLLSNRPPPPARDPPSRGAAPPPPPPVIRNGARDAPPPPPPYRMHGSEPPSRGKPPPPPSRTPAGPPPPPPPPLRNGHRDSITTVRSFLDDFESKYSFHPVEDFPAPEEYKHFQRIYPSKTNRAARGAPPLPPILR

SEQ ID NO: 234567 - protein, 182 aa, Artificial Sequence
  derived and/or modified sequence
MPIPPPPPPPPGPPPPPTFHQANTEQPKLSRDEQRGRGALLQDICKGTKLKKVTNINDRSAPILETPPPPPPVIRNGARDAPPPPPPYRMHGSEPPSRGKPPPPPSRTPAGPPPPPPPPLRNGHRDSITTVRSFLDDFESKYSFHPVEDFPAPEEYKHFQRIYPSKTNRAARGAPPLPPILR

SEQ ID NO: 234568 - DNA, 1323 bp, Artificial Sequence
  derived and/or modified sequence
atgcctatccctcctcctccacctccaccacccggtccacccccccctcctacattccaccaggcaaacacagaacaaccaaaactatcaagggacgagcaacgaggccgcggggccctcctccaggatatttgtaaaggcactaaactgaaaaaagtcactaatataaatgaccgaagcgcacccatcctggagaaacccaagggctcttcaggggggtatggatcgggtggggccgcacttcaaccgaaaggcggcttgtttcagggaggagtgctgaagctgcggccagttggtgctaaggacgggagtgaaaacctcgctggcaagccggccctccagattcctagcagccgcgccgcagctccccgaccaccggtcagcgctgccagcggtcgaccgcaggacgatactgactcttcccgcgccagccttcccgagctgcctcggatgcagcgcccctccctcccggacctgtccagacctaataccacctcgtctacggggatgaaacactccagttccgctcccccaccaccaccaccagggcgaagggccaacgcacctcctacccctcttcccatgcactcctcaaaggcccctgcctataatcgggaaaaacctcttcccccaaccccagggcagcgcttgcaccccggacgtgagggcccaccggcaccaccgccagtgaaaccgcctccttccccagttaatattcgcactggcccctcgggccagagcctcgcgcctccaccgcccccctaccgccaacctcctggagtgcctaacggcccaagctctcctacaaacgaaagtgccccagagctgccgcagcgtcacaattctctgcatcgcaaaaccccaggaccagtacgaggtctggcgccgcctccacctactagcgcgtccccatctttattgagtaatcgcccacctcccccagcgcgcgatcccccatcaagaggagcggcaccaccacccccacccccagtgatacgcaatggcgcacgggatgcaccccccccgccaccaccctatcggatgcatggctccgaaccaccatctcgcgggaagccaccaccaccgccatcgcgaactcctgcagggccaccccctcccccccctccgcccctccggaacggccatagggacagcatcacgacggtgaggtcttttctggacgatttcgaaagtaaatatagttttcatcccgtcgaagattttcccgccccggaggagtataagcattttcagaggatttacccgtctaagactaatcgagccgctaggggtgctccgccattgccgcctatcctgaggtag

SEQ ID NO: 234569 - DNA, 1323 bp, Artificial Sequence
  derived and/or modified sequence
atgcccatccccccacctcctcctcctcctcctggccccccacctccacccaccttccaccaggccaacacagagcagcccaagctgagcagagatgagcagaggggccgcggggccctgctgcaggacatctgcaagggcaccaagctgaagaaggtgaccaacatcaatgacagaagtgcccccatcctggagaagcccaagggcagcagcggcggctacggcagcggcggggccgccctgcagcccaagggcggcctcttccagggcggcgtgctgaagctgcggcctgtgggcgccaaggatggcagcgagaacctggccggcaagccagccctgcagatccccagcagcagagctgctgcccccaggcctcctgtgtctgctgccagcggccggccccaggatgacacagacagcagccgggccagcctgcctgagctgcccaggatgcagaggcccagcctgcctgacctgagccggcccaacaccaccagcagcacaggcatgaagcacagcagcagcgcccctcctcctcctcctcctggccggcgggccaatgccccacccacccccctgcccatgcacagcagcaaggccccagcctacaaccgggagaagcccctgccccccaccccaggccagaggctgcaccctggccgggagggccccccagcccctcctcctgtgaagcccccacccagccctgtgaacatcagaacaggccccagcggccagagcctggcccctcctcctccaccctaccggcagcccccaggagtgcccaacggccccagcagccccaccaatgaaagtgcccctgagctgccccagaggcacaacagcctgcacaggaagaccccaggccctgtgcggggcctggcccctcctccacccaccagcgccagccccagcctgctgagcaacagacctcctcctccagcccgggacccccccagcagaggagctgcccctcctcctcctcctcctgtgatcagaaatggagccagagatgcccctcctcctcctccaccctacaggatgcacggcagcgagccccccagccggggcaagcccccacctccacccagcaggaccccagctggccccccacctcctcctcctccacccctgagaaatggccaccgggacagcatcaccaccgtgcgctccttcctggatgactttgagagcaagtacagcttccaccctgtggaggacttccctgcccctgaggagtacaagcacttccagaggatctaccccagcaagaccaacagagctgcccggggggccccacccctgccccccatcctgaggtag

SEQ ID NO: 234570 - DNA, 1323 bp, Artificial Sequence
  derived and/or modified sequence
atgcccatcccccccccccccccccccccccccggccccccccccccacctactttccatcaggctaatacagagcagcctaaactttcccgggacgagcagaggggacgtggagccctcctacaggatatatgtaaggggaccaagctgaagaaagtaacgaatattaatgataggtcagcaccaatcctagaaaaacccaaggggtcaagcggcggctatggtagcggtggagcagccctacagccaaaaggagggctgttccaaggtggggtgcttaaacttagaccggtcggggccaaagatggcagcgagaacctggccggaaaacccgctctgcagatcccctccagcagggctgctgcacccagaccgcccgtgagcgccgcaagcgggcgcccccaggatgataccgactcctccagagcatccctccccgaactccctcggatgcaacggccatccctacccgacctgtcacgaccaaataccacaagctccaccggcatgaagcattcctcaagcgctcctccacccccccctcctgggcgtagggccaacgctccaccgacacccttgcccatgcacagttccaaggcacccgcctacaatagggaaaagccccttccccccactccgggtcagagacttcatcccgggcgcgagggcccacctgcaccaccaccggtcaaaccccccccctcacccgtcaatatccgtacaggcccttctggacaatcacttgcccccccccccccaccatatcggcagcccccgggcgtgccaaacggcccttcctcccccacaaacgaaagcgccccagagctgccacagcgtcacaactcgctgcatcggaaaacccctggacccgtacgtggtcttgcacccccccctccaacatcagcatcacctagtctgctgagtaacaggcctcccccccccgctagggacccgccttcccggggggcagccccccctcctccacccccggtcatccggaacggcgcaagagacgcaccccctcctccacctccttaccgcatgcatgggtcagaacccccttcccgcggcaaacctcctccacctccgagccggacaccagcggggcccccgcccccacctcctccgcctctcaggaacggccacagggacagtatcaccacagtcagatcttttcttgacgattttgaaagcaaatattctttccatcctgtggaggacttccccgcccctgaagagtataagcacttccagcggatttaccctagcaagactaaccgggctgcacgcggtgcccctcccctgcctccgatcctgcgctag

SEQ ID NO: 234571 - DNA, 1323 bp, Artificial Sequence
  derived and/or modified sequence
atgcctatcccgcctcctccgcctcccccaccaggccctccacctccgccaactttccatcaggctaacactgagcaacctaagttgagtagagatgagcagagaggcaggggggcattgctgcaggacatttgtaaagggacaaaactgaagaaagtgaccaacatcaacgataggtccgctccaattctggagaaaccgaagggatcgtctggcggatacggatccgggggtgcggctctgcagcccaagggcggtctgttccagggcggagtgctgaagctcaggcccgtgggcgctaaagatggtagtgagaatctcgccggaaagcctgcattacagataccctcatcccgggcagccgctcctcgcccaccagttagtgctgccagcgggaggccacaggatgatacagactcttcccgcgctagtctgcccgagttaccccgaatgcagagaccgtccctccccgatctgtctcggcctaataccaccagtagtaccggcatgaaacattcttcaagtgcccctccaccccctccacctggacggagagccaatgctccacccactcctttgccaatgcatagtagtaaggccccagcttataatcgtgaaaagccgttgcctcccacgcccggacagagacttcatccagggagggagggacctccagcccctcctcctgtaaaaccacctcccagccccgtcaacattcgtactggaccttcagggcagtcactcgccccacctcctccgccttaccgccagccacccggagtgcctaatggaccatcctctccaaccaatgagtccgccccagagttaccacagcgtcacaactccttacaccgaaagaccccgggtcctgtgcgcggtctggctccgccacccccaacctccgcctctccatctctattgagcaataggccccctccacctgccagagatccaccatctagaggtgctgccccacctccgccacctcccgtcattcggaatggcgctcgagacgcgccacctccccctcccccttatagaatgcacgggagtgagccgccatcccgagggaagccacctccacccccatccagaacgccagccggacctcctccgccaccccctcctccacttagaaatgggcaccgcgactcaattactaccgtccgatcttttctcgacgacttcgagtctaaatactcgtttcatccagtggaggattttccagcccctgaggaatacaaacatttccagcgcatatacccgtcaaagacaaatagagcggctaggggcgcaccccctttgcctcctatactccgatag

SEQ ID NO: 234572 - DNA, 7474 bp, Artificial Sequence
  derived and/or modified sequence
ggggacggtgggagcagatccatttccgggttggcaaaaggggcggtggcggcggcggcggcggcggcggcggcggcgacggcgagaaagagcttgccggggggcgagcaggacaggacgaagccggagtgtaggcggcagaggattcgctcccagagcagctgcggccaggtatatgaatgacctaaaggtacaaataaagacggagagagaacagtgccaactgggagcagggcaagaatgccaattcctcctcccccgccacccccacctggtcctcctccacctcccacatttcatcaggcaaacacagagcagcccaagctgagtagagatgagcagcggggtcgaggcgccctcttacaggacatttgcaaagggaccaagctgaagaaggtgaccaacattaatgatcggagtgctcccatcctcgagaagccgaaaggaagcagtggtggctatggctctggaggagctgccctgcagcccaagggaggtctcttccaaggaggagtgctgaagcttcgacctgtgggagccaaggatggttcagagaacctagctggtaagccagccctgcaaatccccagttctcgagctgctgccccaaggcctccagtatctgccgccagcgggcgtcctcaggatgatacagacagcagccgggcctcactcccagaactgccccggatgcagagaccctctttaccggacctctctcggcctaataccaccagcagtacgggcatgaagcacagctcctctgcccctcccccaccacccccagggcggcgtgccaacgcaccccccacacctctgcctatgcacagcagcaaagcccccgcctacaacagagagaaacccttgccaccgacgcctggacaaaggcttcaccctggtcgagagggacctcctgctccacccccagtcaaaccacctccttcccctgtgaatatcagaacaggaccaagtggccagtctctggctcctcctcctccgccttaccgccagcctcctggggtccccaatggaccctctagccccactaatgagtcagcccctgagctgccacagagacacaattctttgcataggaagacaccagggcctgtcagaggcctagcacctcctccacccacctcggcctccccatctttactgagtaataggccacctcccccagcccgagaccctcccagtcggggagcagctcctccacccccaccacctgtgatccgaaatggtgccagggatgctccccctcccccaccaccataccgaatgcatgggtcagaacccccgagccgaggaaagcccccacctccaccctcaaggacgccagctgggccaccccctcctcctccaccgcccctgaggaatggccacagagattctatcaccactgtccggtctttcttggatgattttgagtcaaagtattccttccatccagtagaagactttcctgctccagaagaatataaacactttcagaggatatatcccagcaaaacaaaccgagctgcccgtggagccccacctctgccacccattctcaggtgaagcctggcttggtcccgttcctcaggaaaaggatggaccttctcttcttctcagatggtcccttccattcccctgaaacctgcatgagagctcctaacatgtttctccaatgcaatcaagccctagactccaaatgtcctcccagctcacctccatctatgcatctcatctctggatttggtgatcagactctatattgacagtaggatctcaaaccctgcatccatccttcctccagcaagccctgctagccacatgaggaacaagtttccgtgtcttctgccttcctcttggggaaaggtgccttgttgtgatgaattaactcactgttagggcagggtggagaatggtactccttccttctcctgtccactgtgggggaagcttggcaggtatattatatttcatcatttaggaggctggcatgaccaggacttatgggtgggaggggagcatttttagtgaagcaagaaaggagtttgccaagaagtgatctgttttaaaggtcatatttggagaaagggcaaggaattgggtctgctttatttttgggggtattttgtttttgttctcacctgctgcccccccaccccaccaccccagggataaattggatataaacactaaatactaatcagttgaacttaacatttaataaaaagaaagggtgaaataaactgaagaccattttagaactagtcagttctctgcagcaaagggaacaggagccatttgaaccctctgggacccctcaccccactgcttcagggtgctaggctgagggatgtttttcctcccccttaccgcccatgcccttgaaagaaaagtcactttttgtggagggcatcattcattcctgattcacaaaccccaaaaacctctggtgggagataggaagatagggcgtgggcctgggccttaacctcaatcttgtgtctgcctcagtcttttctgactggccctgaagttgtcagtggctctttctgtccttcagcccctggaaggtgctccaggataacaaagaagggcaggttgaagcccctcatggaaggagctggctttgtggggctgcaaaggacttttaagtcctgcctgtactgaagttcacagcccacctgactgagcagactcttcctgttcctttctctaccacccttgccttcccaggactgcacggtttaacacagcagagtacagaagggtgaagaagtgagcagaggcttatgaagatattcagatactcttctatgccaggaagcacaaagactttgttgagatttgcctcagttcagtagatcttccttggcagccagccataggttgtttctttgtcttccgggtcctaaagagcacagagaaaatggaggtccccagtctaggtaggaagctgattggatgaggacttctttttttccgacagcaggatggggctcttgggctccacacaccagatgctttggttttctacaactgttgctatgtgtagagggtgctcagagcgtggcatgagagcaaggagaccatggctactctttgaaatggatggggaaaattagcttaaaaatttaatcacgagattgcgccactgcactccagcctgggcgacagagccagactccgtctcaaaaaaaaaaaaaaaaaaaaaatttaatcacacacatcacaggcttaaactgtcttagagacctttccagttgattggatcacaggctagggatctgtgcatggtgccaggtgaaacccaagtctccccagtgctaggtgagggagggctcaacgggggtaatgtgtatggggtctgctgtcctttgccatcccctggaccatattaactctgggacagaccatgattaggtctgtcaccaaacttttcctaatcattttttatgtatcattcttctttctaatctgttagcagttatctcccagaagtatccctagcatcctgaagcaaacagaactgccgggcgctgtggcttatgcctgtaatctcagcaatttgggaggccgaggcgggcggatcacctgaggtcagaagttcgagaccagcctgtccaacatggtgaaaccccgtctccactaaaaacacaaaaattatctgggcgtggtggcatgtgcctgtagtcccagctactggggaggctgaggcaggagaatcgcttgaatccaggaggtggaggttgcagtgagtggagatggcgccactgcgctccagcccgggtgacagagtgaaactccatctcagaaaacaaacaaaccaaacaactgagagagggcatgctagtggagggaaaaggagagagtacaagagttgatactgcatcagagttccagggcagatactgacaagtgactgaactttgactgtgaagtcttcccatttatttttgaaatgggagtcgatgccttttgtacgttatcaaagtgtttttttttttttcctcctttactcagacatagagcatcaaaatatcacgagtaaagccaaaccccagcttttcactggggctgatatcttcctccccatggcccactgccccctcatattccccagcacttggactgtgtcacatgggtattgattgtatacttgttgtcttggcctcatgcaaaaaggcctgggtctagatctagtcagatgagttttttttagagcatgttgatgatacaacacctgtttaaatgtctgccttatatgttatttggtcccactgttaataatagatttattactatgtatatttactattgaagatgggaatgtgatctgcatagttatcagtctattttgtatgttgtaaaaagcttctaatttaggtttaaggtgggctggctacaagagcactaaaactcctcaccttttaaactgctctttttatctgcttgtgggaatgtcgtctctttcgtggaagattgggtggtctcatgttgaggctgttgcccagtcccattaactcccttgtccccccacagaaggaagagacattgcccagctaagcatcaggaagctgtgttaaaagcccttctatgggtttggttttgtgatgtttttccctaatgggaaaaacgttatagttgtttcttactgccctgtctgggaagcagggcaaacctccaggtttttaaatgagctagatgcccctcttcctcttctctggtcactgaacctggaccaaagcactttgatattccaggtgtgattttctctgtcatggggatttgctccactgcagagccccatcattttcacagcgtaggccaacagagtgagaacctagggctaccctagctgatggatgtgaggctgctgtctacaggagctcatcccagccctgttaactggcagtggcaaggatactcgtcatcggccattgcactggggaactccctcaccccatggcttcccaacttgaaacccagatttacctccagggagaggtgagaaaaaaattgtaaatagacttgctaaagagcaactcagggttggggtgtgttttaattctcctgatcacttgaaataatctgtaggctgagtgcttatgggggtgggggagaagggtgactccagggtccttccattttgtgaagctctgggggtggagtgtgggcatctgaggccctatgatggcactacattgagctgtctgcccttccggaaacccaacctgcaatcaactgcaaatcaaattcttcacattccagctacagtctttctttccccattgaatctcagtccctggccatgtggtcaaggtggctttctgttaagctaccctaatttcgggaatgggaggggagagaggagggccattacaactctgccttcaagactcatctcttaaaaacaaaacgaaacaaaactacaaccaccatcaaaaccacacgcaaaaaaaaaaaaaaaaaaaaaaaggataactttaaccgaaggaagggtttggttccattcaactccacattcattgtgcctttacttgcattagatttctgtgctttcttcctttccctctttgaagcaattaaaatcttccttgataactgctgtttctttctactcttgtttctggcaatttagtgggttccttctctagtggtcttaaatctcattccactggtggcaagatggggcctagccttcttttcacatgtctaatcttttcctttctcatggtgccctccatggaagtcacagtcaacactgaataaatgactagaatgacacgtgtgcgtgcgcacgcgtgtgcgtgtgtgtgttcatctgtctgcatgtggatcaatttcttttagaaaataatttattgtatgatttattttggagttatattctgattacagtgctccctctcccaaatagcattgattttttcccccctctaaaatgtataatctggtctcaggttggattctttggtacatttctctcttctggatgccatgcagcttaattaaaaccttgcttaaaaacaaaaagtgaaaattgtgtactcttgtctggaataccgcctcaggtggtggcacagagaggggagaaaacctttgcctcataatttgggtaagtgtagtggtttgattccaggtcccttgaaaaagtagatctactgaattgggcagactcatctatagctttctgagggtcttctctcctcctctccagctgtattttgaaaattacagttctagttggctgggcgcgatggctcatgtctgtaatcccagcactttgggaggccaaggcgggtggatcatttgaggtcaggagttcaagaccagcttggccaacatggtgaaaccccgtctctactgaaaatacaaaaattaaccggtgtcatggcgcatgcctgtagtcccagctactcgggaggccgaggcaggaaaatcacttgaacccaggaggcggaggttgcactgagctgagatcatgccactgcactaaaaaaaaaaaaaaaaaaaaaaaaaaaaaaaaaaaaaaattctagagttctagttacccttcctgggagattctgatggtccttattttattattattattatttttttttgagacaggatgttgctgtcatccaggctggagtgcagtggtgtgatcatagctcaccgcagcctccaactctcaagctcaagtgatcctcccacctcagcctcccgtgtagctgggaccacaggtgtgtaccactatgcctggctaattttgaaaatttttttgtaaagacagggtctccctatgttgcccagactggtctcaaattcctgggcttaagtgattgtcccacctcagcttctcaaagtgctgggattacaggcatgagccaccgcacccagccagtccttattttatatttccacctaactcccctttgcccacgatttcagggaacctaggaggcttcctggccttgtgaccttttccttgaatctcttataattctttctacctgtgttgcatggcagattctcagattgaggctaaagaaaagaagggtggggacaaagcatacagaatgtgtgtatctgtttttatgtgggtgttggctgtttttcgtcactgctttttaagctgaatcttagctggttttcttgaactttgactttaggtgtaaaaattcaaccagacattctctccttactgtggtcagctgacatcataaccactaaggcttaatgagcttaacttgcactttcatcactagcaaaggtcttgaagttatttctcttactgattcataatgggtgtgtgtatgaatcactctcacataatttagatataaaaacctatgaggatgagggagggaggggaagaaaaaaaaggactcctttcattttcatccgtacttcccagatgggctgaatctccgattatttgacccatcattgttattaatatggttaataaactacctatttattgattgaa

SEQ ID NO: 234573 - DNA, 1323 bp, Artificial Sequence
  derived and/or modified sequence
atgcccatcccccccccccccccccccccccccggccccccccccccccccaccttccaccaggccaacaccgagcagcccaagctgagcagagacgagcagagaggcagaggcgccctgctgcaggacatctgcaagggcaccaagctgaagaaggtgaccaacatcaacgacagaagcgcccccatcctggagaagcccaagggcagcagcggcggctacggcagcggcggcgccgccctgcagcccaagggcggcctgttccagggcggcgtgctgaagctgagacccgtgggcgccaaggacggcagcgagaacctggccggcaagcccgccctgcagatccccagcagcagagccgccgcccccagaccccccgtgagcgccgccagcggcagaccccaggacgacaccgacagcagcagagccagcctgcccgagctgcccagaatgcagagacccagcctgcccgacctgagcagacccaacaccaccagcagcaccggcatgaagcacagcagcagcgccccccccccccccccccccggcagaagagccaacgccccccccacccccctgcccatgcacagcagcaaggcccccgcctacaacagagagaagcccctgccccccacccccggccagagactgcaccccggcagagagggcccccccgcccccccccccgtgaagcccccccccagccccgtgaacatcagaaccggccccagcggccagagcctggccccccccccccccccctacagacagccccccggcgtgcccaacggccccagcagccccaccaacgagagcgcccccgagctgccccagagacacaacagcctgcacagaaagacccccggccccgtgagaggcctggccccccccccccccaccagcgccagccccagcctgctgagcaacagaccccccccccccgccagagacccccccagcagaggcgccgccccccccccccccccccccgtgatcagaaacggcgccagagacgcccccccccccccccccccctacagaatgcacggcagcgagccccccagcagaggcaagcccccccccccccccagcagaacccccgccggcccccccccccccccccccccccccctgagaaacggccacagagacagcatcaccaccgtgagaagcttcctggacgacttcgagagcaagtacagcttccaccccgtggaggacttccccgcccccgaggagtacaagcacttccagagaatctaccccagcaagaccaacagagccgccagaggcgccccccccctgccccccatcctgagatag

SEQ ID NO: 234574 - protein, 281 aa, Artificial Sequence
  derived and/or modified sequence
MMMNVPGGGAAAVMMTGYNNGRCPRNSLYSDCIIEEKTVVLQKKDNEGFGFVLRGAKADTPIEEFTPTPAFPALQYLESVDEGGVAWQAGLRTGDFLIEVNNENVVKVGHRQVVNMIRQGGNHLVLKVVTVTRNLDPDDTARKKAPPPPKRAPTTALTLRSKSMTSELEELVDKGVIRKGKDKPEEIVPASKPSRAAENMAVEPRVATIKQRPSSRCFPAGSDMNSVYERQGIAVMTPTVPGSPKAPFLGIPRGTMRRQKSIGKKCGTPPQKLPLGFQTQP

SEQ ID NO: 234575 - protein, 1253 aa, Artificial Sequence
  derived and/or modified sequence
MMNVPGGGAAAVMMTGYNNGRCPRNSLYSDCIIEEKTVVLQKKDNEGFGFVLRGAKADTPIEEFTPTPAFPALQYLESVDEGGVAWQAGLRTGDFLIEVNNENVVKVGHRQVVNMIRQGGNHLVLKVVTVTRNLDPDDTARKKAPPPPKRAPTTALTLRSKSMTSELEELVDKDKPEEIVPASKPSRAAENMAVEPRVATIKQRPSSRCFPAGSDMNSVYERQGIAVMTPTVPGSPKAPFLGIPRGTMRRQKSIDSRIFLSGITEEERQFLAPPMLKFTRSLSMPDTSEDIPPPPQSVPPSPPPPSPTTYNCPKSPTPRVYGTIKPAFNQNSAAKVSPATRSDTVATMMREKGMYFRRELDRYSLDSEDLYSRNAGPQANFRNKRGQMPENPYSEVGKIASKAVYVPAKPARRKGMLVKQSNVEDSPEKTCSIPIPTIIVKEPSTSSSGKSSQGSSMEIDPQAPEPPSQLRPDESLTVSSPFAAAIAGAVRDREKRLEARRNSPAFLSTDLGDEDVGLGPPAPRTRPSMFPEEGDFADEDSAEQLSSPMPSATPREPENHFVGGAEASAPGEAGRPLNSTSKAQGPESSPAVPSASSGTAGPGNYVHPLTGRLLDPSSPLALALSARDRAMKESQQGPKGEAPKADLNKPLYIDTKMRPSLDAGFPTVTRQNTRGPLRRQETENKYETDLGRDRKGDDKKNMLIDIMDTSQQKSAGLLMVHTVDATKLDNALQEEDEKAEVEMKPDSSPSEVPEGVSETEGALQISAAPEPTTVPGRTIVAVGSMEEAVILPFRIPPPPLASVDLDEDFIFTEPLPPPLEFANSFDIPDDRAASVPALSDLVKQKKSDTPQSPSLNSSQPTNSADSKKPASLSNCLPASFLPPPESFDAVADSGIEEVDSRSSSDHHLETTSTISTVSSISTLSSEGGENVDTCTVYADGQAFMVDKPPVPPKPKMKPIIHKSNALYQDALVEEDVDSFVIPPPAPPPPPGSAQPGMAKVLQPRTSKLWGDVTEIKSPILSGPKANVISELNSILQQMNREKLAKPGEGLDSPMGAKSASLAPRSPEIMSTISGTRSTTVTFTVRPGTSQPITLQSRPPDYESRTSGTRRAPSPVVSPTEMNKETLPAPLSAATASPSPALSDVFSLPSQPPSGDLFGLNPAGRSRSPSPSILQQPISNKPFTTKPVHLWTKPDVADWLESLNLGEHKEAFMDNEIDGSHLPNLQKEDLIDLGVTRVGHRMNIERALKQLLDR

SEQ ID NO: 234576 - protein, 280 aa, Artificial Sequence
  derived and/or modified sequence
MMNVPGGGAAAVMMTGYNNGRCPRNSLYSDCIIEEKTVVLQKKDNEGFGFVLRGAKADTPIEEFTPTPAFPALQYLESVDEGGVAWQAGLRTGDFLIEVNNENVVKVGHRQVVNMIRQGGNHLVLKVVTVTRNLDPDDTARKKAPPPPKRAPTTALTLRSKSMTSELEELVDKASVRKKKDKPEEIVPASKPSRAAENMAVEPRVATIKQRPSSRCFPAGSDMNSVYERQGIAVMTPTVPGSPKAPFLGIPRGTMRRQKSIGKKCGTPPQKLPLGFQTQP

SEQ ID NO: 234577 - protein, 271 aa, Artificial Sequence
  derived and/or modified sequence
MMMNVPGGGAAAVMMTGYNNGRCPRNSLYSDCIIEEKTVVLQKKDNEGFGFVLRGAKADTPIEEFTPTPAFPALQYLESVDEGGVAWQAGLRTGDFLIEVNNENVVKVGHRQVVNMIRQGGNHLVLKVVTVTRNLDPDDTARKKAPPPPKRAPTTALTLRSKSMTSELEELDKPEEIVPASKPSRAAENMAVEPRVATIKQRPSSRCFPAGSDMNSVYERQGIAVMTPTVPGSPKAPFLGIPRGTMRRQKSIGKKCGTPPQKLPLGFQTQP

SEQ ID NO: 234578 - protein, 1254 aa, Artificial Sequence
  derived and/or modified sequence
MMMNVPGGGAAAVMMTGYNNGRCPRNSLYSDCIIEEKTVVLQKKDNEGFGFVLRGAKADTPIEEFTPTPAFPALQYLESVDEGGVAWQAGLRTGDFLIEVNNENVVKVGHRQVVNMIRQGGNHLVLKVVTVTRNLDPDDTARKKAPPPPKRAPTTALTLRSKSMTSELEELVDKDKPEEIVPASKPSRAAENMAVEPRVATIKQRPSSRCFPAGSDMNSVYERQGIAVMTPTVPGSPKAPFLGIPRGTMRRQKSIDSRIFLSGITEEERQFLAPPMLKFTRSLSMPDTSEDIPPPPQSVPPSPPPPSPTTYNCPKSPTPRVYGTIKPAFNQNSAAKVSPATRSDTVATMMREKGMYFRRELDRYSLDSEDLYSRNAGPQANFRNKRGQMPENPYSEVGKIASKAVYVPAKPARRKGMLVKQSNVEDSPEKTCSIPIPTIIVKEPSTSSSGKSSQGSSMEIDPQAPEPPSQLRPDESLTVSSPFAAAIAGAVRDREKRLEARRNSPAFLSTDLGDEDVGLGPPAPRTRPSMFPEEGDFADEDSAEQLSSPMPSATPREPENHFVGGAEASAPGEAGRPLNSTSKAQGPESSPAVPSASSGTAGPGNYVHPLTGRLLDPSSPLALALSARDRAMKESQQGPKGEAPKADLNKPLYIDTKMRPSLDAGFPTVTRQNTRGPLRRQETENKYETDLGRDRKGDDKKNMLIDIMDTSQQKSAGLLMVHTVDATKLDNALQEEDEKAEVEMKPDSSPSEVPEGVSETEGALQISAAPEPTTVPGRTIVAVGSMEEAVILPFRIPPPPLASVDLDEDFIFTEPLPPPLEFANSFDIPDDRAASVPALSDLVKQKKSDTPQSPSLNSSQPTNSADSKKPASLSNCLPASFLPPPESFDAVADSGIEEVDSRSSSDHHLETTSTISTVSSISTLSSEGGENVDTCTVYADGQAFMVDKPPVPPKPKMKPIIHKSNALYQDALVEEDVDSFVIPPPAPPPPPGSAQPGMAKVLQPRTSKLWGDVTEIKSPILSGPKANVISELNSILQQMNREKLAKPGEGLDSPMGAKSASLAPRSPEIMSTISGTRSTTVTFTVRPGTSQPITLQSRPPDYESRTSGTRRAPSPVVSPTEMNKETLPAPLSAATASPSPALSDVFSLPSQPPSGDLFGLNPAGRSRSPSPSILQQPISNKPFTTKPVHLWTKPDVADWLESLNLGEHKEAFMDNEIDGSHLPNLQKEDLIDLGVTRVGHRMNIERALKQLLDR

SEQ ID NO: 234579 - DNA, 846 bp, Artificial Sequence
  derived and/or modified sequence
atgatgatgaacgttcccgggggcggagctgctgctgttatgatgaccggctacaacaacggtaggtgtccgcggaactccctgtattcagattgtatcattgaggagaaaacagtcgtgctgcagaagaaggataacgaaggattcggatttgtcttaagaggagccaaagccgacacaccaatcgaagagttcactccaaccccagcatttcccgctctccagtatctggagtcagtcgatgagggcggtgtcgcttggcaggccggacttcgcacgggtgactttcttattgaagtaaacaacgagaacgttgtgaaagtgggacaccggcaggtcgtgaatatgataaggcaaggtggcaaccatttggtgttgaaagttgtaaccgtgacgaggaatctcgatcctgatgatacagcacgaaagaaggccccgccgcctcctaagcgcgctcccacaacagcactgacattaagaagcaaatcgatgacaagtgagctggaggagctggtggataaaggggtcattaggaaaggcaaggacaagcccgaagaaattgtgccggcctctaagccatctcgggccgctgagaatatggcagtagaaccccgcgttgccacgataaaacagaggcccagctcccgatgctttcccgccgggtcagacatgaattctgtgtacgagcgacagggaatagcggtcatgacgcctacagtacccggctcgcctaaggcacctttcctgggaatcccccgaggtacaatgaggagacagaagtcaattggcaagaagtgcgggacgccgccccagaagctgcctctggggttccagacccagccctag

SEQ ID NO: 234580 - DNA, 3762 bp, Artificial Sequence
  derived and/or modified sequence
atgatgaatgtacctggtgggggcgccgctgccgtcatgatgactggatacaacaacggcaggtgtccacggaattccctgtactcagactgcatcatcgaagagaagaccgtggtgcttcagaagaaggataacgaaggcttcggcttcgttctgaggggggccaaagccgatactccgatcgaagagtttaccccaactcccgccttccccgcactacagtatctggagtctgtggatgaaggaggcgtggcatggcaggctgggctgcgcaccggcgatttcctgatcgaagtcaacaatgagaatgtggttaaggtggggcatcgtcaggtggttaacatgatccggcagggggggaaccacttggtgttgaaggttgtaactgtgacccgaaatctggacccagacgatactgcacgcaaaaaggcaccccctccccctaaacgtgccccaaccacagccctcactctccgctccaaaagcatgaccagtgaacttgaggaattggttgataaggacaaacccgaagaaattgttcccgctagcaagcctagccgtgccgcagaaaatatggctgttgaacctcgcgtggccacgattaagcagagaccgagtagccggtgctttcccgctgggagcgatatgaactcagtgtacgagcgtcaggggattgcggtaatgacacccactgtaccaggcagccctaaggccccatttctcggtattcctcgggggaccatgaggaggcagaagagcatcgacagccggatctttctgtcaggaatcacggaggaggagaggcaattcctggcaccaccgatgctcaaatttactaggtcattgtcgatgccagacacatcggaggacatacctccccctcctcaatccgttcccccatctccccctcctccaagcccaaccacatataattgtccgaaaagtcccacgccccgagtgtatgggactatcaagcctgcatttaaccagaattctgccgctaaggtctccccagccacaaggagcgataccgtcgcgactatgatgcgtgaaaagggtatgtattttcgacgcgagttggaccgttacagcttggatagcgaggatctgtacagcagaaacgccggaccccaggctaattttcggaacaagcgcggccagatgccagagaatccctatagtgaggtaggaaagatcgcctctaaagctgtgtatgtgcctgcaaaacctgctaggcggaaggggatgttggttaaacagagtaacgtcgaggattcgcctgagaagacatgcagtatccccattcccaccattattgtaaaggaaccgagtaccagctccagcggcaagagttctcaggggtctagcatggaaattgatccccaggcgccagagcctccctcccagctgagaccggatgaatccctcacagtctcctccccttttgccgcagctatagcgggggcagttcgtgatcgtgagaagcgcttggaagcgcgcagaaactcacccgcctttctgtcaactgacttaggagacgaggatgtgggcctcggcccccctgccccgaggacaaggccaagtatgtttcctgaggagggcgacttcgcagacgaggactccgccgaacagctgtcctcacctatgccctctgccactcctcgggagcccgagaatcactttgtgggaggtgctgaggcttccgccccgggggaagcagggagacccttaaacagcacctctaaagctcaggggcccgagagtagcccagccgtgcctagtgccagcagcggaacagcaggcccaggaaattatgtgcaccccctgaccggtcgcctgttggacccatcctctcctctcgcccttgcgctgtcagcaagggatcgggccatgaaggagtctcagcaggggccgaagggggaagctcctaaagctgacctaaacaaacctctatacatcgatactaaaatgcggccatctctggacgctggctttccgacagttactcggcagaacacgcgtggacctctccgcagacaggagacggagaacaagtacgaaacggacttaggccgggatagaaaaggcgatgacaagaagaacatgctcatagatattatggatacatcacagcaaaagtcagcaggtcttctaatggtacacacagtggacgcaacaaagctggataacgccctccaagaggaggatgaaaaggccgaggtggaaatgaaacccgactcaagcccctcagaggtgcccgagggggtgtccgagacagaaggcgcgctgcagataagcgccgccccagaaccaacaaccgtgcccgggagaactatagttgccgtgggatccatggaggaagctgtcatcctgccatttcggatccctccacctcctcttgcctcggtggatctagatgaagacttcatcttcaccgagcccttaccgccaccactcgagttcgccaatagttttgacatcccggatgatcgcgccgcctccgtacccgccctcagtgacctagtgaagcagaaaaaatcagacacacctcagtctccatccctaaattcgtcgcaaccaaccaactcagcagattccaagaagcccgccagcctatctaattgcctgccagcctccttcctgcctccccccgagtcgtttgacgcagtggctgattctggcatagaagaagtggattcaaggagttctagcgaccatcaccttgagactacaagcacaataagcaccgtttcaagtataagtactctgtcaagtgagggtggagaaaatgttgacacctgcaccgtgtatgctgacggtcaggcattcatggtggacaagccgcccgtgccacctaagccgaagatgaaacccatcatacacaagagtaatgccttataccaggatgccctggtggaagaggatgtagactcctttgttatcccgcctcctgccccacccccaccaccaggctccgctcagccaggaatggccaaggtgctccagccaagaacatcaaaactctggggcgatgtgacagagattaaatcacctattctgagcgggccaaaagccaatgtcatttcggaactgaactccatactacagcaaatgaatagagaaaagctggcaaagccaggagagggacttgacagtccgatgggggccaagtctgcttcactagcccctcgatcacccgaaatcatgagcaccatcagtggtacacggtccacaacggtgactttcacagtaaggccaggtacctcacaacccattacactgcagagccgtccacccgattatgagtctagaacaagcggtaccaggcgggctccatctccagtagtctcgcccacagaaatgaacaaggagacccttccggcccctctgagcgccgccactgcatcccctagccccgccctgagcgacgtattttccctgccaagccagcccccttccggggacttattcgggctgaatccagcgggacggtctagaagtcccagccctagcatcctgcagcaacctattagtaataagcccttcacaacaaaaccggtccacctgtggacaaagcctgatgtcgccgattggctggaaagtctgaatctgggcgaacacaaagaagccttcatggacaatgaaattgacggctctcatttgcccaacttacagaaggaagacctcatcgacctgggtgtgactcgcgtcggccatagaatgaatatcgagagagcactgaaacagcttctcgatcgctag

SEQ ID NO: 234581 - DNA, 843 bp, Artificial Sequence
  derived and/or modified sequence
atgatgaatgtgcccggtggcggcgcggccgccgtcatgatgactggttacaataatggcagatgccctcgaaacagtttatactcagattgcattatcgaggagaaaacagtcgttctgcagaaaaaggacaacgagggtttcggatttgttctgcgcggggccaaagcggacacccctatcgaggaattcacaccaactccagcattccctgctctgcagtacctggagagcgtcgacgaagggggagtcgcttggcaagccggactgagaaccggagactttctgatcgaagtgaataacgagaacgttgtgaaagtgggacacagacaggttgtgaacatgattcgacaaggaggcaatcatctagtgctgaaagtggttaccgttaccagaaaccttgatccagatgacactgccagaaaaaaggcccccccaccgcccaaacgggcccctaccaccgccttaactctcaggtctaagagcatgacctcggaactggaggagttagtggacaaagccagtgtccggaaaaagaaagataaaccagaggaaatcgttccggcttcaaagccttcaagggccgctgagaatatggcagtggagccacgggtggccacaatcaaacaacgccctagttctaggtgtttccccgcagggagcgacatgaactccgtctatgagcgccaggggatcgccgtcatgactcccacagtccctggatcgccgaaggccccattcttgggcatcccaagaggcaccatgagacgtcagaaatccatcggcaagaaatgtggaacacctcctcagaagcttcctcttggtttccaaactcagccgtag

SEQ ID NO: 234582 - DNA, 816 bp, Artificial Sequence
  derived and/or modified sequence
atgatgatgaacgtgcctggcggcggtgcagctgctgtgatgatgactggctacaacaatggaaggtgtccccgcaattctctctattccgactgtatcattgaggagaaaactgtggtgcttcaaaaaaaagataacgaaggcttcggcttcgtgctccggggcgcaaaagcagatactcccattgaagaatttacgccaactccagcgttcccggccctgcagtacctggaaagtgtggacgagggaggagttgcctggcaggccggattgcgaacaggagattttctcatcgaagtgaacaatgaaaacgtagtgaaagtggggcacaggcaggtggtgaacatgatccggcagggtggtaaccaccttgtgttgaaagtggttacagtgacccggaacctcgatcctgacgacactgcccgcaaaaaggcacccccgccccctaagcgcgccccgacaacagcactgactctgagatccaaatcgatgacctcggagttagaggaactcgacaagcctgaggagattgtacccgcatctaagcccagccgggctgctgaaaatatggccgtggagcctcgggtggctacgattaagcaaagaccatccagcagatgcttccccgcgggaagcgacatgaactctgtatacgagagacagggtatcgctgttatgacacccaccgtgcccggttcacctaaggccccatttctgggtatcccccgaggtaccatgcgccgccagaaatcaattggcaagaagtgtggcaccccccctcaaaagctaccactgggattccaaacccagccgtag

SEQ ID NO: 234583 - DNA, 3765 bp, Artificial Sequence
  derived and/or modified sequence
atgatgatgaatgtgccaggtgggggggccgctgctgtgatgatgaccgggtataacaacggccggtgcccacggaatagtctctactccgattgcatcatcgaagagaaaacagttgtcctgcagaaaaaggacaacgagggatttggcttcgtgctgcgaggggctaaagctgatacacccattgaggagtttactccaactcctgcttttcccgctctacaatatttggaatctgttgacgagggtggagtcgcctggcaggccgggctccgtaccggagattttctgattgaagtgaataatgaaaacgtcgtaaaagtgggccatcgacaggttgtgaacatgattcgacagggaggcaatcatctagtgttaaaagtcgtgacagtgacccggaacttggatccagatgataccgcacggaaaaaggcaccccctcctcccaagagggcccctacgaccgcacttacactccgctctaaatccatgacgtccgagcttgaggagctcgtagataaagataaaccagaggaaattgtcccagcttccaagccatcaagagccgcagagaacatggctgtagagcctcgagtagccactatcaagcagcgcccatcatccaggtgtttcccggccgggagcgatatgaatagtgtgtacgaacggcaaggcatagctgtcatgaccccgacagtgcccggatccccaaaagcaccttttcttggcataccaagaggcactatgaggaggcagaagtctatagattccagaatcttcctgagcggaatcacggaggaggaaaggcagttcttggctccgcccatgctgaagtttacacgaagtttgagcatgcccgacacatctgaggatatccccccacctccacagtcggtgcccccctctccccctcctccttcacctaccacctataactgtcccaagagtcctactcccagggtctatggtacgataaaaccagcctttaaccaaaacagcgccgctaaggtgagtccagccacccgctccgataccgtcgctaccatgatgagggagaaaggtatgtattttcgcagagagcttgacagatatagtctcgacagtgaggacctgtatagccgaaatgccggacctcaggccaactttaggaataagcgaggccagatgcccgaaaacccatattccgaggtcggcaagattgccagtaaggccgtttacgtgccggccaaacctgctaggcgaaagggtatgctggtgaagcagagcaacgttgaggactcccccgaaaagacctgcagtattcctatcccaactattatagtgaaggagccttctacttcctcctctgggaagtctagccagggctcaagcatggagatcgatcctcaggccccagaacccccttctcagcttagaccagacgaatccctcaccgtgtctagcccttttgccgccgccattgccggggcggtacgtgatagagaaaaacggctcgaggctagacggaacagccctgcattcctatcaacggatttaggcgacgaggatgtggggctcgggcctcctgcccctcgtacacgcccttccatgtttcccgaagagggagacttcgctgacgaagattccgcagaacagctgagctctcctatgccgtccgcgactccaagagagcctgagaaccatttcgttggaggcgcagaagccagtgcacccggagaagcagggcgtccactaaatagtacctccaaagcccagggacccgaatcctcccctgcggtgccttcagcgtccagcggtactgcgggaccagggaattacgtgcaccccttgactgggcgcctcttggacccttcaagccccttggccctagcactatcggcacgcgatcgggctatgaaagaatcccagcagggcccaaaaggcgaggcaccaaaggccgacctgaataaacccctgtatatcgataccaagatgcgtccatctctcgacgccggatttcctacagtgaccagacagaatactcgcggacccctgagacggcaagaaactgagaacaaatatgaaactgaccttggtagagacagaaagggcgatgataaaaaaaacatgctcatcgacatcatggatacctcacaacagaagtctgcgggattgcttatggtccatactgtcgacgcaactaaactggataatgctctccaggaagaagatgagaaggccgaagttgagatgaagccagattccagccccagtgaggtacccgagggagttagcgagacggaaggcgccttgcagataagcgccgcgccagaacctaccacggtgccgggccgaacaatcgtcgcagtgggttccatggaagaggctgtgattctccccttccggattccaccgcctcctctcgcgagtgtagatttggacgaggattttattttcacagagcccctcccccccccattggaatttgcgaactccttcgatatcccagacgaccgggctgccagcgttccggccttatccgatctagttaagcagaaaaagagcgacactccccagagcccatcactgaacagttctcagcctactaactctgccgacagcaagaaaccagccagtcttagcaattgtctgccagcttcctttctccccccaccagagtccttcgatgctgtagcagactcaggcatcgaagaagtcgattcaaggtccagctcagatcaccatctcgaaactacgtcaacgattagcacggttagttctatatcaactctgagtagtgaaggcggggagaacgtggatacctgcactgtctatgcagatgggcaggctttcatggtagataagccacccgttccacccaaacccaaaatgaaacctatcattcataagtctaatgccctgtaccaggatgcgctggttgaagaggatgttgacagcttcgtgattccccctcccgcacctcccccacctcctgggtcagcccagccaggcatggcaaaagtcctccaaccccgaacatccaagctgtggggcgacgtgacagagataaagtctcccatcctgtccggccccaaagctaatgtaatatccgagctcaacagcatcctacagcagatgaatagggaaaagctcgcaaagcccggtgaaggactggattctccaatgggcgctaagtctgccagcctggcccctcggtctcccgagatcatgagtacaatctctggtaccaggagcaccaccgtgacttttacggtgcggccagggactagtcagcccataacattacagagcaggcctccggattatgagtcaagaacttctggaacccgccgggccccgtctccggtagtttctccaaccgagatgaacaaggagacactacccgcccctcttagcgcggcaacggcttctccatcccccgccctttccgacgtcttttctctgcctagtcagccaccctccggcgatttgtttggactgaatccggccgggcgatctcggtccccatccccatccatactccagcaacctatcagtaacaagccatttactacaaaaccggttcatctttggacgaagcctgatgtcgccgactggttagagagcctgaatctgggcgagcacaaggaagcttttatggataatgagatcgatggatcacatctgccgaacctgcagaaggaggacctgattgatctgggagtgaccagggtcgggcaccgtatgaacattgagagggcgctgaagcagctacttgaccgctag

SEQ ID NO: 234584 - DNA, 846 bp, Artificial Sequence
  derived and/or modified sequence
atgatgatgaatgtgcctgggggcggcgctgctgctgtgatgatgacaggctacaacaacggccgctgccccaggaacagcctgtacagcgactgcatcatcgaggagaagacagtggtgctgcagaagaaggacaatgaaggatttggatttgtgctgcggggggccaaggctgacacccccatcgaggagttcacccccaccccagccttccctgccctgcagtacctggagagcgtggatgaaggaggagtggcctggcaggccggcctgaggactggagacttcctgattgaggtgaacaatgaaaatgtggtgaaggtgggccaccggcaggtggtgaacatgatccggcagggcggcaaccacctggtgctgaaggtggtgacagtgaccaggaacctggaccctgatgacacagccaggaagaaggcccctcctccacccaagagggcccccaccacagccctgaccctgcggagcaagtccatgaccagcgagctggaggagctggtggacaagggcgtcatcaggaagggcaaggacaagccagaggagatcgtgcctgccagcaagcccagcagagctgctgagaacatggctgtggagccccgggtggccaccatcaagcagaggcccagcagccgctgcttccctgctggcagtgacatgaacagcgtgtatgaaaggcagggcattgctgtgatgacccccaccgtgcccggcagccccaaggcccccttcctgggcatcccccggggcaccatgaggcggcagaagagcatcggcaagaagtgtggcaccccaccccagaagctgcccctgggcttccagacccagccctag

SEQ ID NO: 234585 - DNA, 3762 bp, Artificial Sequence
  derived and/or modified sequence
atgatgaatgtgcctgggggcggcgctgctgctgtgatgatgacaggctacaacaacggccgctgccccaggaacagcctgtacagcgactgcatcatcgaggagaagacagtggtgctgcagaagaaggacaatgaaggcttcggctttgtgctgcggggggccaaggctgacacccccatcgaggagttcacccccaccccagccttccctgccctgcagtacctggagagcgtggatgagggcggcgtggcctggcaggccggcctgaggactggagacttcctgattgaggtgaacaatgaaaatgtggtgaaggtgggccaccggcaggtggtgaacatgatccggcagggcggcaaccacctggtgctgaaggtggtgacagtgaccaggaacctggaccctgatgacacagccaggaagaaggcccctcctccacccaagagggcccccaccacagccctgaccctgcggagcaagtccatgaccagcgagctggaggagctggtggacaaggacaagccagaggagatcgtgcctgccagcaagcccagcagagctgctgagaacatggctgtggagccccgggtggccaccatcaagcagaggcccagcagccgctgcttccctgctggcagtgacatgaacagcgtgtatgaaaggcagggcattgctgtgatgacccccaccgtgcccggcagccccaaggcccccttcctgggcatcccccggggcaccatgaggcggcagaagagcattgacagccgcatcttcctgagcggcatcacagaggaggagcggcagttcctggccccacccatgctgaagttcaccaggagcctgtccatgccagacaccagcgaggacatccccccaccaccccagagcgtgccccccagccccccaccacccagccccaccacctacaactgccccaagagccccaccccccgggtgtatggcaccatcaagccagccttcaaccagaacagcgctgccaaggtgtccccagccaccaggagtgacacagtggccaccatgatgagggagaagggcatgtacttcagaagagagctggaccgctacagcctggacagcgaggacctgtacagcagaaatgccggcccccaggccaacttcaggaacaagaggggccagatgcctgagaacccctacagcgaggtgggcaagatcgccagcaaggctgtgtatgtgcctgccaagccagcccggaggaagggcatgctggtgaagcagagcaatgtggaggacagccctgagaagacctgcagcatccccatccccaccatcatcgtgaaggagcccagcaccagcagcagcggcaagagcagccagggcagctccatggagattgacccccaggcccctgagccccccagccagctgcggccagatgagagcctgactgtgagcagcccctttgctgctgccatcgccggggctgtgcgggaccgggagaagaggctggaggcccggaggaacagccctgccttcctgagcacagacctgggagatgaagatgtgggcctgggccccccagcccccaggacccggcccagcatgtttcctgaggagggggactttgctgatgaagattctgctgagcagctgagcagccccatgcccagcgccaccccccgggagcctgagaaccactttgtgggcggcgctgaggccagcgcccctggagaggccggccggcccctgaacagcaccagcaaggcccagggccctgagagcagccctgctgtgcccagcgccagcagcggcacagctggccctggcaactacgtgcaccccctgaccggccgcctgctggaccccagcagccccctggccctggccctgagcgcccgggaccgggccatgaaggagagccagcagggccccaagggggaggcccccaaggctgacctgaacaagcccctgtacatcgacaccaagatgaggcccagcctggatgctggcttccccaccgtgacccggcagaacacccggggccccctgcggcggcaggagacagagaacaagtatgaaacagacctgggccgggacagaaaaggagatgacaagaagaacatgctgattgacatcatggacaccagccagcagaagtctgctggcctgctgatggtgcacacagtggatgccaccaagctggacaatgccctgcaggaggaggatgagaaggccgaggtggagatgaagccagacagcagccccagcgaggtgcctgagggcgtgtctgaaacagaaggagccctgcagatctctgctgcccctgagcccaccaccgtgcccggccgcaccatcgtggccgtgggctccatggaggaggccgtcatcctgcccttccgcatccccccaccacccctggcctctgtggacctggatgaggacttcatcttcacagagcccctgcccccacccctggagtttgccaacagctttgacatcccagatgaccgggccgcctctgtgcctgccctgagtgacctggtgaagcagaagaagagtgacaccccccagagccccagcctgaacagcagccagcccaccaacagcgctgacagcaagaagccagccagcctgagcaactgcctgcctgccagcttcctgcccccacctgagagctttgatgctgtggccgacagcggcatcgaggaggtggacagccgcagcagcagtgaccaccacctggagaccaccagcaccatcagcacagtgagcagcatcagcaccctgagcagcgagggcggagaaaatgtggacacctgcaccgtgtatgcagatggccaggccttcatggtggacaagccccctgtgccccccaagcccaagatgaagcccatcatccacaagagcaatgccctgtaccaggatgccctggtggaggaggatgtggacagctttgtgatccccccaccagcccctcctcctcctcctggcagcgcccagcccggcatggccaaggtgctgcagcccaggaccagcaagctgtggggagatgtgacagagatcaagagccccatcctgagcggccccaaggccaacgtcatcagcgagctgaacagcatcctgcagcagatgaaccgggagaagctggccaagccaggagagggcctggacagccccatgggcgccaagagcgccagcctggcccccaggagccctgagatcatgagcaccatcagcggcaccaggagcaccaccgtgaccttcaccgtgcggcccggcaccagccagcccatcaccctgcagagccggcccccagactatgagagcaggaccagcggcacccggcgggcccccagccctgtggtgagccccacagagatgaacaaggagaccctgcctgcccccctgtctgctgccacagccagccccagccctgccctgagtgatgtgttcagcctgcccagccagcccccatctggggacctgtttggcctgaacccagctggccgcagccgcagccccagccccagcatcctgcagcagcccatcagcaacaagcccttcaccaccaagcctgtgcacctgtggaccaagccagatgtggccgactggctggagagcctgaacctgggggagcacaaggaggccttcatggacaatgaaattgatggcagccacctgcccaacctgcagaaggaggacctgattgacctgggcgtgaccagggtgggccacaggatgaacatcgagcgggccctgaagcagctgctggacagatag

SEQ ID NO: 234586 - DNA, 843 bp, Artificial Sequence
  derived and/or modified sequence
atgatgaatgtgcctgggggcggcgctgctgctgtgatgatgacaggctacaacaacggccgctgccccaggaacagcctgtacagcgactgcatcatcgaggagaagacagtggtgctgcagaagaaggacaatgaaggcttcggctttgtgctgcggggggccaaggctgacacccccatcgaggagttcacccccaccccagccttccctgccctgcagtacctggagagcgtggatgagggcggcgtggcctggcaggccggcctgaggactggagacttcctgattgaggtgaacaatgaaaatgtggtgaaggtgggccaccggcaggtggtgaacatgatccggcagggcggcaaccacctggtgctgaaggtggtgacagtgaccaggaacctggaccctgatgacacagccaggaagaaggcccctcctccacccaagagggcccccaccacagccctgaccctgcggagcaagtccatgaccagcgagctggaggagctggtggacaaggcctctgtgaggaagaagaaggacaagccagaggagatcgtgcctgccagcaagcccagcagagctgctgagaacatggctgtggagccccgggtggccaccatcaagcagaggcccagcagccgctgcttccctgctggcagtgacatgaacagcgtgtatgagcggcagggcattgctgtgatgacccccaccgtgcccggcagccccaaggcccccttcctgggcatcccccggggcaccatgaggcggcagaagagcatcggcaagaagtgtggcaccccaccccagaagctgcccctgggcttccagacccagccctag

SEQ ID NO: 234587 - DNA, 816 bp, Artificial Sequence
  derived and/or modified sequence
atgatgatgaatgtgcctgggggcggcgctgctgctgtgatgatgacaggctacaacaacggccgctgccccaggaacagcctgtacagcgactgcatcatcgaggagaagacagtggtgctgcagaagaaggacaatgaaggatttggatttgtgctgcggggggccaaggctgacacccccatcgaggagttcacccccaccccagccttccctgccctgcagtacctggagagcgtggatgaaggaggagtggcctggcaggccggcctgaggactggagacttcctgattgaggtgaacaatgaaaatgtggtgaaggtgggccaccggcaggtggtgaacatgatccggcagggcggcaaccacctggtgctgaaggtggtgacagtgaccaggaacctggaccctgatgacacagccaggaagaaggcccctcctccacccaagagggcccccaccacagccctgaccctgcggagcaagtccatgaccagcgagctggaggagctggacaagccagaggagatcgtgcctgccagcaagcccagcagagctgctgagaacatggctgtggagccccgggtggccaccatcaagcagaggcccagcagccgctgcttccctgctggcagtgacatgaacagcgtgtatgaaaggcagggcattgctgtgatgacccccaccgtgcccggcagccccaaggcccccttcctgggcatcccccggggcaccatgaggcggcagaagagcatcggcaagaagtgtggcaccccaccccagaagctgcccctgggcttccagacccagccctag

SEQ ID NO: 234588 - DNA, 3765 bp, Artificial Sequence
  derived and/or modified sequence
atgatgatgaatgtgcctgggggcggcgctgctgctgtgatgatgacaggctacaacaacggccgctgccccaggaacagcctgtacagcgactgcatcatcgaggagaagacagtggtgctgcagaagaaggacaatgaaggatttggatttgtgctgcggggggccaaggctgacacccccatcgaggagttcacccccaccccagccttccctgccctgcagtacctggagagcgtggatgaaggaggagtggcctggcaggccggcctgaggactggagacttcctgattgaggtgaacaatgaaaatgtggtgaaggtgggccaccggcaggtggtgaacatgatccggcagggcggcaaccacctggtgctgaaggtggtgacagtgaccaggaacctggaccctgatgacacagccaggaagaaggcccctcctccacccaagagggcccccaccacagccctgaccctgcggagcaagtccatgaccagcgagctggaggagctggtggacaaggacaagccagaggagatcgtgcctgccagcaagcccagcagagctgctgagaacatggctgtggagccccgggtggccaccatcaagcagaggcccagcagccgctgcttccctgctggcagtgacatgaacagcgtgtatgagcggcagggcattgctgtgatgacccccaccgtgcccggcagccccaaggcccccttcctgggcatcccccggggcaccatgaggcggcagaagagcattgacagccgcatcttcctgagcggcatcacagaggaggagcggcagttcctggccccacccatgctgaagttcaccaggagcctgtccatgccagacaccagcgaggacatccccccaccaccccagagcgtgccccccagccccccaccacccagccccaccacctacaactgccccaagagccccaccccccgggtgtatggcaccatcaagccagccttcaaccagaacagcgctgccaaggtgtccccagccaccaggagtgacacagtggccaccatgatgagggagaagggcatgtacttccggcgggagctggaccgctacagcctggacagtgaagatctctacagcagaaatgccggcccccaggccaacttcaggaacaagaggggccagatgcctgagaacccctacagcgaggtgggcaagatcgccagcaaggctgtgtatgtgcctgccaagccagcccggaggaagggcatgctggtgaagcagagcaatgtggaggacagccctgagaagacctgcagcatccccatccccaccatcatcgtgaaggagcccagcaccagcagcagcggcaagagcagccagggcagctccatggagattgacccccaggcccctgagccccccagccagctgcggccagatgagagcctgactgtgagcagcccctttgctgctgccatcgccggggctgtgcgggaccgggagaagaggctggaggcccggaggaacagccctgccttcctgagcacagacctgggagatgaagatgtgggcctgggccccccagcccccaggacccggcccagcatgtttcctgaggagggggactttgctgatgaggacagcgctgagcagctgagcagccccatgcccagcgccaccccccgggagcctgagaaccactttgtgggcggcgctgaggccagcgcccctggagaggccggccggcccctgaacagcaccagcaaggcccagggccctgagagcagccctgctgtgcccagcgccagcagcggcacagctggccctggcaactacgtgcaccccctgaccggccgcctgctggaccccagcagccccctggccctggccctgagcgcccgggaccgggccatgaaggagagccagcagggccccaagggggaggcccccaaggctgacctgaacaagcccctgtacatcgacaccaagatgaggcccagcctggatgctggcttccccaccgtgacccggcagaacacccggggccccctgcggcggcaggagacagagaacaagtatgaaacagacctgggccgggacagaaaaggagatgacaagaagaacatgctgattgacatcatggacaccagccagcagaagtctgctggcctgctgatggtgcacacagtggatgccaccaagctggacaatgccctgcaggaggaggatgagaaggccgaggtggagatgaagccagacagcagccccagcgaggtgcctgagggcgtgtctgaaacagagggcgccctgcagatctctgctgcccctgagcccaccaccgtgcccggccgcaccatcgtggccgtgggctccatggaggaggccgtcatcctgcccttccgcatccccccaccacccctggcctctgtggacctggatgaggacttcatcttcacagagcccctgcccccacccctggagtttgccaacagctttgacatcccagatgacagagctgcctctgtgcctgccctgagtgacctggtgaagcagaagaagagtgacaccccccagagccccagcctgaacagcagccagcccaccaacagcgctgacagcaagaagccagccagcctgagcaactgcctgcctgccagcttcctgcccccacctgagagctttgatgctgtggccgacagcggcatcgaggaggtggacagccgcagcagcagtgaccaccacctggagaccaccagcaccatcagcacagtgagcagcatcagcaccctgagcagcgagggcggggagaatgtggacacctgcaccgtgtatgcagatggccaggccttcatggtggacaagccccctgtgccccccaagcccaagatgaagcccatcatccacaagagcaatgccctgtaccaggatgccctggtggaggaggatgtggacagctttgtgattcctcctccagcccctcctcctcctcctggcagcgcccagcccggcatggccaaggtgctgcagcccaggaccagcaagctgtggggagatgtgacagagatcaagagccccatcctgagcggccccaaggccaacgtcatcagcgagctgaacagcatcctgcagcagatgaaccgggagaagctggccaagccaggagagggcctggacagccccatgggcgccaagagcgccagcctggcccccaggagccctgagatcatgagcaccatcagcggcaccaggagcaccaccgtgaccttcaccgtgcggcccggcaccagccagcccatcaccctgcagagccggcccccagactatgagagcaggaccagcggcacccggcgggcccccagccctgtggtgagccccacagagatgaacaaggagaccctgcctgcccccctgtctgctgccacagccagccccagccctgccctgagtgatgtgttcagcctgcccagccagccccccagcggggacctgtttggcctgaacccagctggccgcagccgcagccccagccccagcatcctgcagcagcccatcagcaacaagcccttcaccaccaagcctgtgcacctgtggaccaagccagatgtggccgactggctggagagcctgaacctgggggagcacaaggaggccttcatggacaatgaaattgatggcagccacctgcccaacctgcagaaggaggacctgattgacctgggcgtgaccagggtgggccacaggatgaacatcgagcgggccctgaagcagctgctggacagatag

SEQ ID NO: 234589 - DNA, 846 bp, Artificial Sequence
  derived and/or modified sequence
atgatgatgaacgtgcccggcggcggcgccgccgccgtgatgatgaccggctacaataatggccgctgtccaagaaatagcctctactccgactgcatcattgaagagaaaacagtcgtgctgcagaaaaaggacaacgagggattcggattcgtacttcggggagccaaggcagacactccgatagaggagtttaccccaaccccagcatttcctgcactccagtacttggaaagcgtggatgaaggcggcgtggcatggcaggctggattaagaacgggagattttctgatcgaggtgaacaacgaaaacgtcgtcaaagtgggccacaggcaagtggtgaacatgatcaggcagggtgggaatcacctggtactaaaggtggttacagttaccaggaaccttgaccccgacgacacagccaggaagaaggcacctccacctccgaaaagggctcccacgaccgccctcacgctgaggagcaagagcatgacgtcagagttagaagagcttgtcgataagggcgttatcaggaaggggaaggacaaaccagaggagatagtcccagcaagtaagcccagccgtgctgcggagaatatggctgtcgaaccccgagtggccacgattaaacagcggccaagcagtcgatgttttcctgctggctcagatatgaattcagtttatgagagacaagggatcgcagttatgaccccaactgtaccaggctcccccaaagcaccctttttgggcataccacgcgggaccatgcgtcgacaaaagtctatcggtaagaaatgcggtactccaccgcagaaactgcctctgggcttccagacccagccttag

SEQ ID NO: 234590 - DNA, 3762 bp, Artificial Sequence
  derived and/or modified sequence
atgatgaacgtgcccggcggcggcgccgccgccgtgatgatgaccggatacaataacggccgctgtcctcgaaactcactctactcggattgtatcatcgaggagaaaacggttgttctccagaaaaaggacaacgagggattcggtttcgttctgagaggagccaaggccgacaccccaatcgaggaattcacaccaactcccgcctttcctgccctccagtatctggagagtgtcgatgagggcggcgtagcctggcaggccggactgcgcactggtgactttttaatcgaagtgaataatgaaaacgtggttaaggttggccacagacaggttgttaacatgatccgacagggcggtaaccacctggtgctgaaggtagtgaccgtgactcgcaaccttgatccagacgacactgcacgcaaaaaggctcctcccccacctaaaagagctcctaccaccgcactcaccctacgctctaagtctatgacatcagaactcgaggagctggtagataaggacaagcccgaggaaatcgtccctgctagtaagccgagcagggctgctgagaatatggcagtcgagccaagggttgctactataaagcagaggcccagctctaggtgctttcctgccggctcggacatgaactccgtttacgaaaggcagggcattgcagtgatgaccccaacagtccccgggagccccaaagcaccttttctcggaataccgagagggacaatgcgaaggcagaagtccatcgattcaagaatctttctatcgggaataaccgaggaagaaagacagttcctggccccccctatgctgaagtttaccagaagtctaagcatgccagacacttctgaagatattccgccaccaccccagtccgtgccacccagccctccaccgccttccccaacgacttacaactgccccaagtcccctacccccagagtctacggtacgattaaaccggctttcaaccagaattctgcagccaaggtaagccctgcaacaagatcagatacagttgccacaatgatgcgagaaaaggggatgtactttcgccgggagctggatcgatactcactcgatagtgaggatctttattcgaggaatgccgggccacaggccaattttaggaataaaagaggccagatgcccgaaaatccttacagcgaagttgggaaaatagcttcgaaagccgtgtacgtgccagccaagccagcccggcgcaaggggatgctggtcaagcagagcaatgtggaggacagcccagagaagacgtgttctattcccattcctacaattatcgtgaaggagccgagtacgtctagcagtggtaaatcctcccagggttcaagcatggagattgaccctcaggccccagagcctcctagtcaactgaggcccgacgaatcactaaccgtttctagcccatttgcagcagctatagcgggtgcagttagggatcgggagaaacgcttagaggctcgacggaactcccccgctttcctgtccacggatttgggcgatgaggacgtcgggctgggtccgcccgctccccgaacacgccctagcatgttccctgaggagggtgacttcgccgatgaagactctgcggagcagttgtcctcgccaatgccatccgccacgccccgcgaacccgagaatcactttgtaggtggcgctgaagcatccgcgcccggggaagccgggcggcctctgaacagcacatctaaggcacagggcccagagagctcacccgcagtcccaagcgcaagttccggtactgccgggccggggaattatgttcatcccctgactggacgcctcttggaccctagctcccctctggcgttggctctgtcagctcgggacagagccatgaaggagtcccagcagggaccgaagggcgaagcccccaaggctgatctgaataaaccactatatattgatacaaagatgcggccatctctggatgcaggattcccgaccgtgactcgtcagaacaccagaggaccgctccgtcggcaggagactgaaaacaagtatgagactgacttaggtcgagatcgtaaaggagacgacaagaagaatatgctcatcgacatcatggacaccagtcaacaaaaatccgctggactgctgatggttcatactgtagatgccaccaaactggataatgctcttcaggaagaggatgagaaagccgaagtggagatgaagccagactctagtccctctgaggtaccagaaggggtgtctgagaccgaaggcgccctgcagatttccgccgcaccggagccaacaactgtccccggcaggaccatcgtagcagttggctcaatggaggaggctgtgattttaccatttcggatcccgccaccgcccctcgccagtgtcgatttagacgaggactttatttttactgagccattgccccctccgcttgagttcgcaaattcattcgacatccctgacgatcgcgctgctagcgtccccgccttgtctgatctggtgaagcagaaaaagtctgacacaccgcaatcaccttccctcaattcaagtcagcctacaaatagcgctgatagcaagaagcccgcctctctctccaactgcctgcccgcaagtttcctgccccctcccgagtctttcgatgccgtggccgacagcggtatcgaagaggtcgattcgcgttctagttcagaccatcatctggagactacctcaacaatttccactgtcagttccatatctaccctgagtagcgaggggggcgaaaacgtggacacatgcactgtctacgcagatggacaagccttcatggtcgacaaaccgcctgtaccacccaagccaaagatgaagcctattatccataagagcaatgccctgtatcaggatgctctggtggaggaggacgttgattcgtttgtgatcccgcctcccgccccaccccccccgcccgggtccgctcaaccagggatggccaaggtgctgcaacccaggacctctaaactgtggggtgatgtgactgaaatcaaaagcccaatattaagcgggccaaaagccaatgtcatcagtgagcttaactccatcctgcaacagatgaaccgagaaaagctcgccaagcctggagagggcctggatagccccatgggtgccaagtcagccagcctggccccccgcagtccagaaatcatgagcaccatctccggtacaagatccacaactgtgaccttcactgtgcggcctgggacctcacagccgatcacgttacagtcacgaccacccgattacgaaagcagaacaagcggtaccagaagagccccctcacccgtggtttctccaactgagatgaataaagagactctgcccgctcccctttccgcagcgaccgctagtccttctccagccctaagcgacgtcttctccctgccttcccaacccccttctggtgacctgttcggtctcaacccggctggacggtctaggtccccgagtcccagtattctgcagcaacctataagcaacaagccctttacaactaaacctgtgcacctgtggacaaaaccggatgtcgccgactggcttgaaagcctgaacctcggcgagcacaaggaggctttcatggataacgaaattgatgggtcgcatctccccaacttacaaaaagaggatcttatcgatcttggcgttactcgtgttggtcaccgtatgaatatcgagcgcgcactcaaacaactgcttgatagatag

SEQ ID NO: 234591 - DNA, 843 bp, Artificial Sequence
  derived and/or modified sequence
atgatgaacgtgcccggcggcggcgccgccgccgtgatgatgaccgggtacaacaatgggcggtgccctaggaacagcttgtatagtgactgtatcattgaagagaaaacggttgtgctgcagaaaaaagataatgaaggttttgggttcgtgctcaggggtgctaaggctgacacacctattgaagagttcacgccgactcccgcattcccagccctgcaatacctggagagtgtagatgaggggggcgtggcctggcaggcgggcctaaggacaggtgacttcctcattgaggtgaataatgaaaatgttgtaaaagtcggccacaggcaggtggtcaatatgatcagacaggggggaaatcatttagtcctcaaagtggttacagttacacgaaacctcgatccagatgacacagcgaggaagaaggccccacctcctccaaagcgcgctcccaccacggcgttaaccctgagaagcaaatctatgacctcggagcttgaggaactggtggacaaggcttccgtgcgcaagaagaaagataagcctgaagaaatagtcccggcatccaagccatcccgggccgccgaaaatatggccgtggagcctcgggtggcaactattaaacagagaccatcttcacgctgttttccagctggctcagatatgaacagcgtgtatgagcggcaggggatagcagtcatgacaccaaccgttcctggctcacccaaagcacccttcttgggcatccctagggggaccatgcggcggcagaagtcaattggaaagaagtgcgggactcccccccagaagctgccactggggtttcagactcaaccttag

SEQ ID NO: 234592 - DNA, 816 bp, Artificial Sequence
  derived and/or modified sequence
atgatgatgaacgtgcccggcggcggcgccgccgccgtgatgatgaccggatacaacaatgggcggtgtccccggaacagtctctattcagactgtatcatcgaagagaagacggttgttttgcagaagaaggacaatgagggctttggattcgtgctgagaggtgcgaaggcggatacccctatcgaagaattcacgccaacccccgcgttccctgcccttcagtatcttgaatccgtcgatgaagggggcgtggcttggcaggccgggcttagaacaggggacttcctaattgaagtcaacaacgaaaacgttgttaaagtgggacacagacaggtggtaaatatgatccgccaggggggaaaccatctggtgcttaaagtggttacggttactagaaatctcgaccccgatgacactgcacggaaaaaagcccccccacctcctaagagagcccccactaccgccttgaccctgcgtagcaagagcatgactagcgagctggaggaacttgacaaaccagaagaaatcgttcctgcatcaaagccttcccgggccgcagagaacatggccgtggaaccacgtgtcgcaaccattaagcagcgcccaagttcgaggtgtttccctgctggaagcgatatgaacagcgtttacgagcgtcaaggaattgccgttatgacaccgacagtccccggtagtccaaaagctcctttcttaggcattccacgcggaaccatgcgcagacagaaaagcataggcaagaaatgtggaacacctcctcaaaaactgcctctgggattccaaacccagccgtag

SEQ ID NO: 234593 - DNA, 3765 bp, Artificial Sequence
  derived and/or modified sequence
atgatgatgaacgtgcccggcggcggcgccgccgccgtgatgatgacagggtacaataatgggcggtgccctaggaattccctctattccgactgtattattgaagaaaaaactgtcgtgctccagaaaaaagataatgagggcttcggcttcgtccttcggggggcaaaagcagatacccctatcgaggagtttacacctacccccgccttccccgccctccaatatctggagagcgtcgatgaaggcggggtggcgtggcaggctggacttcgcacaggagacttcctcattgaggttaataacgagaacgtcgtgaaagtgggacaccggcaagtcgtcaatatgatcagacagggaggcaaccatctagttttgaaggtggttaccgtgacgcgaaacctggaccctgacgacaccgctaggaagaaagctccaccaccccccaaacgagcaccaactactgcacttacactgcgtagtaagtccatgacatccgaattggaggaactggtagataaggacaaacccgaggagattgtgcctgcttctaagccatcccgcgcagctgagaacatggctgtggaacccagggtggctaccatcaagcagaggcccagtagtcgctgttttcctgccgggagcgatatgaactccgtgtacgagagacaggggattgccgtaatgaccccaacggtgcccgggtcaccaaaggcccccttcctcggaattccccgcggcactatgaggcggcagaagtccatcgactctcgcatctttctgtctgggatcactgaagaggagaggcaatttctggctccgcctatgctgaagttcacccgctccctgtcaatgccggacacctccgaagatatccctccccccccgcagagcgtgccccctagccccccccctcccagccccaccacatacaactgtccgaaatctccaaccccccgggtgtacgggacaataaagccagcttttaatcagaattccgcagccaaagtaagccctgcaaccaggagtgacacagtggccacaatgatgagagagaagggcatgtactttagaagagagctcgaccgctattcacttgactctgaagatctctacagtcgcaatgctggaccccaggccaatttcagaaacaagcgcgggcagatgccagagaacccctactccgaagtgggtaagattgctagcaaagcggtttatgttcccgccaaacccgccaggcggaaggggatgctagttaaacaatctaacgtcgaggattcccctgaaaaaacttgcagtatcccaatcccaactattatcgtaaaagagccatccacctcttcttccggcaaatcttcacagggttcttcaatggagattgatccccaggctccagagccaccgtctcagctgaggcccgacgagtccttaaccgttagcagccccttcgccgctgctattgctggggctgtgcgggatcgcgaaaaaagactcgaggctcgacgcaactctccagccttcctctctactgatctgggggatgaggatgtgggtttaggccctccagcccccagaacaagacctagcatgtttcccgaagaaggcgattttgccgacgaagacagcgcggagcagctgtctagtccaatgcctagcgccactcctcgcgaacctgagaaccactttgtgggcggagctgaggcaagtgctccgggcgaggctggtcgaccgctcaacagcactagcaaagcacagggacccgaaagttctcccgctgttccctccgcgagctccgggaccgccggacctgggaactatgtgcacccgttgacaggacgtctcttggatccatcctccccactggccctcgccctgagcgctcgggatcgcgccatgaaggagtcacagcagggccccaagggtgaagcgcccaaggccgatctcaataaacccctgtacatcgataccaagatgaggccatccctcgacgcaggcttccccaccgtgacacgtcagaatacacgcggcccactacgacgtcaggagacggaaaataaatacgaaactgacttaggtcgggatcgtaagggggatgataagaaaaatatgctgatagatattatggatacttcgcaacagaagtcggccggcctgctcatggtgcatacagtcgatgccacaaagctggataacgcattgcaagaggaagatgagaaggctgaagtcgaaatgaaacccgatagctccccaagtgaggttccggaaggcgtgagtgaaactgagggcgctttacagattagtgccgctcccgaaccaaccactgtgcccggaaggaccattgtggcggtaggttctatggaggaggctgttattcttcctttccggatacctccgcctcccctcgcctcagtggacctggatgaagacttcatttttaccgaaccgttgcctccgccacttgaattcgccaatagctttgatatccctgacgaccgagctgccagtgtcccagccttgagtgatctagtaaagcagaagaaatctgacaccccacagtctccttccctcaatagtagccagccgacaaattccgccgatagtaagaagccggccagcctgagcaattgcctgcctgccagcttcttgccccccccagaaagtttcgatgccgtggccgattcgggaatagaagaagtggacagcaggtccagtagcgaccatcacctggaaacaactagtactattagtacagtctcctctattagcaccctctccagcgaagggggcgagaacgtggatacctgcaccgtctacgcggacggacaggcgttcatggtggacaaaccccctgtgccgcctaagccaaaaatgaagcccattatccacaaaagcaacgctctatatcaggacgctctggtggaggaggatgtggactcattcgtgataccaccccctgccccccccccgccacccggttccgcccaacctggtatggccaaagtgctgcagcctcggactagcaagttatggggtgacgttactgagatcaagagcccgatcctgagtgggcccaaggccaatgtgatatctgagctcaattcaatcttacagcagatgaaccgagagaagcttgccaaaccaggagaggggctcgattcccctatgggagctaagtccgcctccctggccccgcggagtcccgagatcatgtccaccatctcgggaactcgctctactactgtgactttcacagttcgacctggcacctctcagcctattaccctccagtcgaggcctcccgattacgaatcaagaacatcaggcacacgcagagcaccaagtcccgtggtaagcccgactgagatgaacaaagaaactctacccgcacccctctccgctgcaactgcgagcccatctcccgcgctgtcagatgtgtttagtctgcctagccaacctccttctggcgatctattcgggctgaacccagccggtcgatcgcgttctccgtccccctctatcctccagcagccaatcagcaataaacccttcacaacgaaaccggtgcatttatggacaaaacctgacgttgccgattggctggagtcgttaaacctgggggagcacaaggaggcctttatggataatgagatagacgggagtcacctgcctaatctgcagaaagaggacctcatcgaccttggagtgactcgagtcggacaccgaatgaacatcgagcgagcccttaagcagctgctggacaggtag

SEQ ID NO: 234594 - DNA, 846 bp, Artificial Sequence
  derived and/or modified sequence
atgatgatgaatgttccaggagggggagccgcagccgttatgatgacagggtataacaacgggaggtgcccacgtaactccctttactcagactgtattattgaagagaagacagttgtcctacagaaaaaggataacgaaggattcgggtttgttctgcggggagcaaaggcagataccccaatcgaggagtttactcccactcctgcttttcccgcactgcagtatttagaaagcgtagatgagggcggagttgcatggcaggccggattacggactggggactttttgatcgaagtcaataacgaaaacgtggtgaaagttgggcaccggcaggttgtgaacatgatccggcagggaggcaaccatttagttctgaaggtggtaaccgtcacacggaatttggacccggacgacacagctcgcaaaaaagccccaccgcctccgaagcgggcacctactacagccttgacgttgagatctaagagtatgacctcggaacttgaagaactggtggacaaaggcgtgatacggaagggaaaagacaagcctgaggaaattgtcccagcttcgaaaccttcaagggccgctgagaacatggctgtggagccacgggtcgcgaccatcaaacagcgccctagcagccgctgtttccctgcaggctctgacatgaatagcgtgtacgaacgccaaggaattgccgtaatgactcctaccgtgcccggaagccctaaagccccatttctgggcataccgcgaggaacaatgaggcgccaaaaaagtataggcaagaaatgcggaactcctccacaaaagctcccgctgggttttcagacgcaaccttag

SEQ ID NO: 234595 - DNA, 3762 bp, Artificial Sequence
  derived and/or modified sequence
atgatgaatgtgccaggaggtggggctgctgcagtgatgatgaccgggtacaacaacggacgatgcccaaggaactccctctactctgactgcatcatcgaggaaaaaactgtggtgctgcagaagaaagataatgagggtttcggattcgttctacgcggtgctaaggctgacactccaattgaagagtttactcccacacctgccttcccagctttacagtatctggagagcgtggatgagggtggcgttgcatggcaggcagggctcaggaccggagactttcttatcgaggtgaacaatgagaatgtggtcaaggtaggtcacaggcaggtggtcaacatgatccgccaaggtggcaatcatctagtgctgaaggtggtgactgtcactagaaacctggatcctgacgacactgcacgtaagaaagcccctccccctccgaaacgggctccgactactgctctcaccttgagatcaaaatccatgacttcagagctggaagagttagtggataaggataagcccgaggaaatcgtccccgcatccaagccttccagggcagccgaaaatatggctgtcgaacccagggtggcgacgataaaacaaaggccttcatcaagatgtttccctgctggaagcgacatgaactctgtttacgagcggcaggggatcgctgtaatgaccccaacagtcccgggtagtccaaaggcacccttcttggggattcccagagggaccatgcgtaggcagaaaagcattgattcgaggatcttcctgagtgggattaccgaggaggaacgacaattcttagcacccccaatgctgaagttcacacgttcgctgtctatgccagacacgtccgaagacattccccctcccccacagagcgtgccaccatctccccctccccctagcccaacgacgtataattgcccgaaaagtcctacgccccgagtgtatggcaccattaagcccgctttcaatcagaactcggctgcgaaggtctcacctgcaacacgctctgacacagtggcaaccatgatgcgcgagaaagggatgtattttcgacgcgagctagacagatattccctggatagcgaggatctctattctcgaaacgccggacctcaagctaactttagaaacaagcgaggtcagatgcccgagaacccatacagtgaagttggtaagatagcatccaaagcagtctacgttccggcaaaacctgctaggcgtaagggtatgctagttaagcaaagcaacgttgaggattcccctgaaaaaacatgttccattcccatccctaccatcatcgtcaaggagccttccacctcttcctcgggcaagtcctctcaggggagctcgatggaaattgatcctcaggctcctgagcccccttcccaactgcgtccggatgaaagcctgaccgtgtcctccccatttgccgctgcaatcgctggggcagttcgagaccgcgagaagagacttgaggcacgccgtaactcccccgcttttttaagcaccgatctcggagacgaggacgtgggacttggtcctcccgctcccagaacacgccctagcatgttccccgaggaaggtgactttgctgacgaagactccgctgagcagctgtcctcaccgatgcccagtgcaactccccgtgagcctgagaatcacttcgtcgggggtgccgaggctagtgctcctggcgaggccggtcgaccgctgaatagcacgagtaaagcacagggtcctgagtcatccccagctgtgccttcagcttcaagtggcactgcaggccctggaaattacgtccatcccttgactggacgtctgctggaccccagcagcccgcttgccctcgctttaagcgctcgcgatcgggcaatgaaggagagtcagcaaggcccaaaaggcgaagcccctaaggcggacttgaataagccgctctatatcgatacaaaaatgagacccagcctcgacgctggtttccccactgtgactagacaaaacactcgcggacccctgcggagacaggagaccgagaataaatacgagaccgacctgggtcgagacaggaaaggcgacgacaagaagaacatgctcatcgatattatggacacaagccagcaaaagagtgccggactcctcatggtacacacagttgacgctactaagttggataatgccttgcaggaggaagacgagaaggccgaagtggagatgaaacctgattcgtccccgtccgaagtgccagagggagtgagcgaaactgaaggtgccctccagataagtgcagcccctgagcccaccaccgtcccgggaaggaccattgtcgcagtcgggtccatggaggaggctgtgatcctcccattcaggattccccctccccctctagcaagcgttgacctcgatgaggatttcattttcacagagccacttccaccccctctcgaatttgcgaattcattcgacattccagatgatagggccgcttcagttcctgctctgtctgacctggtcaagcagaaaaaaagcgacaccccgcagtctccttcactcaactcttcgcaacctacaaattccgctgactccaaaaagcccgcttccctctccaattgccttcccgcttcttttttgcctccaccagagtcattcgacgcagtcgctgactctggaattgaggaagtggactcacgaagttccagtgatcaccacctggagacaacgtcgaccatcagcacagtttcatcgatcagtactttgtctagcgagggtggggaaaatgtggacacctgtaccgtgtacgcagatggccaagcgttcatggtagacaagccacctgttcctcctaagccaaaaatgaaaccaataatccataagagcaatgcactgtatcaagatgccttagtggaggaggacgtcgattccttcgttatcccgccaccagccccacctcccccacctggtagcgctcagcccggaatggctaaagtcctacagcctcggacctccaaactgtggggcgatgtcacagaaattaaatctcctattctgtccggcccaaaagctaacgtcatcagcgaactgaattcaatattacagcagatgaatcgtgaaaagctggccaaaccaggggaaggcctcgattctccgatgggagccaagagtgcatctctggctccccgaagtcctgaaatcatgagtactatcagtggaacccgttctacaacagtcacctttaccgtgcgccctggcacgtcacagcctattacattgcagtcgcggcctcctgactatgaatctcggacgagcgggaccagacgggctccaagcccagtggtttcacccaccgagatgaacaaggaaacattgccggcaccacttagcgcagctaccgcatctcccagtccagccctgtcagacgtgttctcactgcctagccagccacctagtggggacctttttggcttgaaccctgccggtcggagtagatctccctccccatccatcttgcaacaacctatcagcaacaagcccttcactactaaaccagtgcacctgtggactaaacccgacgtcgctgactggctggaatccctgaatttgggggagcataaggaggccttcatggacaacgagatagacggtagccacttgccaaacctccagaaagaggacttgattgatttaggagttacacgcgtaggacacagaatgaatattgagcgcgctctaaaacaactcctagaccgttag

SEQ ID NO: 234596 - DNA, 843 bp, Artificial Sequence
  derived and/or modified sequence
atgatgaacgtgccaggaggcggtgccgcagcagtgatgatgactggatataataacggccgatgcccgcgaaatagtctatacagcgactgtatcattgaagagaaaaccgtcgtcctgcagaagaaggataacgaaggatttgggtttgtcctcagaggagccaaggctgatacccccatcgaggaatttacccctacccccgcatttcccgcactgcaatatctggaaagtgtggatgagggcggagtggcctggcaggccggactgcggacaggggactttctcatcgaggtgaacaatgaaaacgtcgtaaaagttgggcacagacaggtagtaaacatgatccgccagggcggaaatcacctggttcttaaagtggtgactgttactcgcaatctagaccccgacgacactgctagaaagaaagcgcctcctccacctaaaagggccccaacaaccgcgctgaccctgagatcaaagagtatgacttcggagctcgaggaactggtcgataaagcttccgtgcgcaaaaagaaggacaaaccagaagaaatcgtgcctgcttccaaaccttctagagctgctgagaacatggccgttgaacctcgtgtggctaccattaaacaacgcccatcctcaagatgttttcctgctggaagcgatatgaattccgtttacgaacgtcagggaattgccgtgatgacacctacggtccctggttctcccaaagcgcctttcctcggaatccctcgcggaactatgagaagacaaaagtcgataggcaaaaagtgcggaaccccccctcagaaactcccgctggggttccagacccaaccctag

SEQ ID NO: 234597 - DNA, 816 bp, Artificial Sequence
  derived and/or modified sequence
atgatgatgaatgtccccggagggggagcggcagcggtgatgatgaccggttataacaacggcagatgtccacggaatagcctgtactctgattgtattatcgaagagaaaactgttgtgttgcagaaaaaggataatgaagggttcggattcgtgcttcgcggagcaaaagcagatacaccaatcgaggaatttacccccactccggcattcccggctctccaatatctggagtcagtggacgaggggggagtggcatggcaggccggtctgaggacaggcgactttttgatcgaggtaaacaatgagaacgtggtgaaagtgggacatcgtcaagtggttaacatgattcgtcaggggggaaaccacctggtcctcaaggttgttaccgttacgagaaatctggaccccgatgacactgccaggaagaaggccccaccaccaccgaagcgcgctcccacgactgctttaaccttgcgctcaaaaagtatgacgtccgagctcgaggaactggataaacctgaagagatcgtacccgcttctaaaccgtcaagagcagccgagaacatggcagtggaacccagagttgctacaataaagcagcgaccgtcctcacgctgctttcccgctgggtcagatatgaactcagtttatgaacggcagggcatcgccgttatgacccccactgtgccgggatcccccaaggccccttttttgggcattcctcgagggactatgaggcgccaaaagtctatcggcaaaaagtgtggaacacccccacagaagctgccacttggctttcagacacagccctag

SEQ ID NO: 234598 - DNA, 3765 bp, Artificial Sequence
  derived and/or modified sequence
atgatgatgaacgtcccgggaggtggggctgcagccgtgatgatgactgggtataacaatggccgttgtccaaggaatagtctctattctgattgtatcatcgaagaaaaaactgtggtgttacaaaaaaaagataacgaggggtttgggtttgtgctgcgaggagccaaagctgatacacccatcgaagagttcacccccaccccagccttcccagcgctgcagtacctggagagcgtggacgagggaggcgttgcttggcaagccggactgcggactggagacttcttaattgaggtgaacaatgagaatgtcgtcaaggtgggccaccgtcaggtggtgaacatgattaggcagggcggaaatcatctggtgctcaaggtcgtgacagtcacgagaaacttagaccccgatgatacagcaagaaagaaagctcccccacctcccaaacgcgctccaacaacagcccttactctgcgaagcaagtccatgactagcgagttggaagaactggtggacaaagataaacccgaggagatcgtgccagcctccaagccttctcgtgctgctgagaacatggccgtggaacccagagttgcaactattaagcaacggccaagcagtcggtgctttcccgctgggtccgatatgaactctgtctatgaacgtcaggggatcgctgtgatgaccccaacggtcccaggatctcccaaggccccttttttgggaatccctagagggactatgcggcgacagaaatcaattgacagccggatattcctgtctggcataaccgaggaggaacggcagttcctagccccacccatgctgaaattcacacgttcactctcgatgccagacacgtccgaggacatacctcccccaccacagtcggttcctccatccccccctccaccgagccccaccacatacaactgccccaagagccctaccccacgggtttatgggactatcaagcctgcctttaatcagaactctgccgctaaagtgtcacctgccacgcggagcgataccgttgctaccatgatgcgggagaaaggtatgtatttcagacgcgagctggaccgatactcgctagactcagaagatctgtacagtcgcaatgcaggacctcaggccaactttcgtaacaaaagaggccagatgcctgagaacccatacagtgaggtgggcaaaatagcctcgaaagctgtgtacgttcctgctaagcccgctcggaggaaaggtatgcttgttaagcagtccaacgtcgaagactcacctgagaaaacttgttccattcccattcctaccattatcgtaaaagaacctagcacaagtagctccggtaaaagctcacaaggctcatcgatggagatcgatccccaagctccagaacccccaagccagttgcgccctgatgagagtctcactgtgagctcgccgttcgccgcagccatagctggggctgttagggaccgggagaagcggctggaagctcggagaaatagtcctgcgtttctttcaacggatttaggtgatgaggatgttgggctaggaccccctgccccaaggacaagaccgtccatgtttcccgaagagggcgactttgcggacgaggactcggctgagcagctctctagcccaatgccgtcagctacacccagagagcctgagaatcacttcgtgggcggagccgaggcaagcgctccaggtgaagcaggacggcctcttaatagcacgtcaaaagcccaggggcctgagagtagcccagcagtgccttctgcttcctccggcactgcaggccctggcaactatgtccaccccctgaccggccgactgttggacccatcatctccacttgccctcgccctttctgccagggacagggcaatgaaggagtctcaacaggggccaaaaggtgaagccccaaaggcagacctgaataaaccgctctatatcgatacaaaaatgaggcccagtctggacgccggttttccaaccgtgacgcggcagaacaccaggggccctctgaggcgacaggaaactgaaaacaaatatgaaaccgacctggggagggatcggaaaggggacgataagaaaaacatgctgattgacatcatggacacgtcccagcaaaaatcagctgggctgcttatggtgcacacagtcgacgccaccaaactggacaacgccttacaggaggaagatgaaaaggccgaagtggagatgaagccagacagtagcccgtccgaagtaccagaaggcgtgagcgagactgagggagctcttcagatttcggccgctcccgagcccacaaccgtccccggacgtacaattgttgccgtcggttccatggaggaggcggttattctgccatttcgcatcccaccaccaccactggcctcggtcgacctcgatgaggattttatttttacagaacctctccctccgccactcgagttcgctaactcctttgacattccagacgaccgggctgcgtcggtgccagctctcagtgatcttgtgaagcaaaaaaaaagcgatacgccccagtccccctccttgaactcttcgcagccaaccaactcggctgactctaagaagcccgcatccttgagtaattgcctacccgctagttttctcccaccaccggaatccttcgatgctgttgccgacagtgggattgaggaggtggattcacgcagttctagtgatcaccacctggagactacctccactattagcacagtgtcttctatttctaccctctctagtgaaggtggcgagaatgtggatacttgcacagtatacgccgacggacaggcgttcatggttgacaagccccctgtgccccctaaacctaagatgaagcccattatccacaagtcaaatgctctctatcaggatgcactggtcgaggaggacgtggattccttcgttatacctccacccgctcctcccccaccccctggatcagcccaacctggcatggccaaagtacttcagcccagaacatccaaactatggggtgacgttaccgaaatcaaatcaccaattctctctggaccaaaggccaacgtcatctctgaattgaactccatcctgcaacagatgaaccgggaaaagctggcaaaacctggtgagggtcttgactctcctatgggagcgaagtctgcatctctcgccccaagatcccccgagattatgtctaccattagcggcacaagaagtacaacagtcacttttacagtgagaccgggaacatcgcagccaattacgctccagagtaggcctcccgactacgagagccgcacctctggcacccgcagagcgccatcacccgtggtgagcccgaccgagatgaacaaggaaactctgccagcccctctttccgcagccacagcgtctccttcacccgcactctcagatgttttctcactaccatctcagcccccatctggcgacttgttcgggcttaatcccgcaggtcgaagtcgctccccctctccgtccattctccaacaacccatctcaaacaaaccattcactacgaaacccgtgcatctctggacaaagcccgatgttgctgactggctggagagcctcaacttaggggagcacaaagaggctttcatggataatgagatcgacggatcacacctcccaaatctccagaaagaggatttaattgatttgggcgtgacaagagtgggacaccggatgaacatagagagagctttgaaacagctcctggatcggtag

SEQ ID NO: 234599 - DNA, 897 bp, Artificial Sequence
  derived and/or modified sequence
tcctttcctccatgctgcctggatctggcgagctggggtgattaattggctatgatgatgaacgtccccggcggaggagcggccgcggtgatgatgacgggctacaataatggtcgctgtccccggaattctctctacagtgactgcattattgaggagaagacggtggtcctgcagaaaaaagacaatgagggctttggattcgtgcttcgaggggccaaagctgacacacccattgaagaattcacaccaacaccggctttcccagccctacagtacctggagtccgtggatgaaggtggggtggcgtggcaagccggactaaggaccggggacttcttgattgaggttaacaatgagaatgttgtcaaagtcggccacaggcaggtggtgaacatgatccggcagggagggaatcacctggtccttaaggtggtcacggtgaccaggaatctggaccccgacgacaccgccaggaagaaagctcccccgcctccaaagcgggcaccgaccacagccctcaccctgcgctccaagtccatgacctcggagctggaggagctcgtggataaaggggttattaggaagggaaaggataaacccgaggagatagtcccggcctccaagccctcccgcgctgctgagaacatggctgtggaaccgagggtggcgaccatcaagcagcggcccagcagccggtgcttcccggcgggctcagacatgaactctgtgtacgaacgccaaggaatcgccgtgatgacgcccactgttcctgggagcccaaaagccccgtttctgggcatccctcgaggtacgatgcgaaggcagaaatcaataggtaagaagtgtggcactcccccacagaagttgcccctgggctttcaaacacagccttag

SEQ ID NO: 234600 - DNA, 7198 bp, Artificial Sequence
  derived and/or modified sequence
atgatgaacgtccccggcggaggagcggccgcggtgatgatgacgggctacaataatggtcgctgtccccggaattctctctacagtgactgcattattgaggagaagacggtggtcctgcagaaaaaagacaatgagggctttggattcgtgcttcgaggggccaaagctgacacacccattgaagaattcacaccaacaccggctttcccagccctacagtacctggagtccgtggatgaaggtggggtggcgtggcaagccggactaaggaccggggacttcttgattgaggttaacaatgagaatgttgtcaaagtcggccacaggcaggtggtgaacatgatccggcagggagggaatcacctggtccttaaggtggtcacggtgaccaggaatctggaccccgacgacaccgccaggaagaaagctcccccgcctccaaagcgggcaccgaccacagccctcaccctgcgctccaagtccatgacctcggagctggaggagctcgtggataaagataaacccgaggagatagtcccggcctccaagccctcccgcgctgctgagaacatggctgtggaaccgagggtggcgaccatcaagcagcggcccagcagccggtgcttcccggcgggctcagacatgaactctgtgtacgaacgccaaggaatcgccgtgatgacgcccactgttcctgggagcccaaaagccccgtttctgggcatccctcgaggtacgatgcgaaggcagaaatcaatagacagcagaatctttctatcaggaataacagaggaagagcggcagtttctggctcctccaatgctgaagttcaccagaagcctgtccatgccggacacctctgaggacatcccccctccaccgcagtctgtgcccccgtccccaccaccaccttccccaaccacttacaactgccccaagtccccaactccaagagtctacgggacgattaagcctgcgttcaatcagaattctgccgccaaggtgtcccccgccaccaggtccgacaccgtggccaccatgatgagggagaaggggatgtacttcaggagagagctggaccgctactccttggactctgaagacctctacagtcggaatgccggcccgcaagccaacttccgcaacaagagaggccagatgccagaaaacccatactcagaggtggggaagatcgccagcaaagccgtctacgtccccgccaagcccgccaggcggaaggggatgctggtgaagcagtccaacgtggaggacagccccgagaagacgtgctccatccctatcccgaccatcatcgtgaaggagccgtccaccagcagcagcggcaagagcagccagggcagcagcatggagatcgacccccaggccccggagccaccgagccagctgcggcctgacgaaagcctgaccgtcagcagcccctttgccgccgccatcgccggagccgtccgcgaccgtgagaagcggctggaagccaggaggaactccccggccttcctctccacagacctgggggatgaggatgtgggcctggggccacccgcccccaggacgcggccctccatgttccccgaggagggggattttgctgacgaggacagcgctgagcagctgtcatcccccatgccgagtgccacgcccagggagcccgaaaaccatttcgtgggtggcgccgaggccagtgctccgggtgaggctgggaggccgctgaattccacgtccaaagcccaggggcccgagagcagcccagcagtgccctccgcgagcagcggcacagccggccccgggaattatgtccacccactcacagggcggctgcttgatcccagctccccgctggccctggcactctccgcaagggaccgagccatgaaggagtctcaacagggacccaaaggggaggcccccaaggccgacctcaacaaacctctttacattgataccaaaatgcggcccagcctggatgccggcttccctacggtcaccaggcagaacacccggggacccctgaggcggcaggagacggagaacaagtacgagaccgacctgggccgagaccggaaaggcgatgacaagaagaacatgctgatcgacatcatggacacgtcccagcagaagtcggctggcctgctgatggtgcacaccgtggacgccactaagctggacaacgccctgcaggaagaggacgagaaggcagaggtggagatgaagccagacagctcgccgtccgaggtgccagaaggtgtttccgaaaccgaaggtgctttacagatctccgctgcccccgagcccaccaccgtgcccggcagaaccatcgtcgcggtgggctccatggaagaggcggtgattttgccattccgcatccctcctccccctctggcatccgtggacttggatgaggattttatttttacagagccattgcctcctcccctggaatttgcaaatagttttgatatccccgatgaccgggcagcttctgtcccggctctctcagacttagtgaagcagaagaaaagcgacacccctcagtccccttcgttgaactccagccaaccaaccaactctgcagacagcaagaagccagccagtctttcaaactgtctgcctgcctcattcctgccaccccctgaaagctttgacgccgtcgccgactctgggatcgaggaggtggacagccggagtagcagcgaccaccacctcgagacgaccagcactatctccaccgtgtctagcatctccaccctgtcttccgaaggtggagagaatgtggacacctgcacagtctatgcagatgggcaagcatttatggttgacaaacccccagtacctcctaagccaaaaatgaagcccatcattcacaaaagcaatgcactttatcaagacgcgctcgtggaagaagatgtagatagctttgttatccccccgcccgctcccccgcccccgccgggcagtgcccagcctgggatggccaaggttctccagccaaggacctccaagttgtggggcgacgtcacagagatcaaaagcccgattctctcaggcccaaaggcaaacgttattagtgaattgaactctatcctacagcaaatgaaccgagagaaattggcaaagccgggggaaggactggattcaccaatgggagccaagtccgccagcctcgctccaagaagcccggagatcatgagcaccatctcaggtacacggagcacgacggtcaccttcactgttcgccccggcacctcccagcccatcaccctgcagagccggccccccgactatgaaagcaggacctcaggaacaagacgtgccccaagccctgtggtctcgccaacagagatgaacaaagagaccctgcccgcccccctgtctgctgccaccgcctctccttctcccgctctctcagatgtctttagccttccaagccagcccccttctggggatctatttggcttgaacccagcgggacgcagtaggtcgccatccccctcgatactgcaacagccaatctcaaataagccttttacaactaaacctgtccacctgtggactaaaccagatgtggccgattggctggaaagtctaaacttgggtgaacataaagaggccttcatggacaatgagatcgatggcagtcacttaccaaacctgcagaaggaggacctcatcgatcttggggtaactcgagtcgggcacagaatgaacatagaaagggctttgaaacagctgctggacagataaggacggctgctctccacctcgcagactgctcttgttataagtagagatgggctcgtgctgaaacatctgaatgccaagcgaagtctgtgagcatcaaccccactccatgggtttgtctcctggtacccaaagaaatactgagttgtgtccacaacatggctgggtcttcagacccctggctcaccatgtgggtgtcttgggcagtttctatcacacatgggacaaggggagggagtttttctaacatggaaaaagattctcagcctgccgcccagcatgcaggtggcctcgctttgccgggtccgagaggctccccgtcaattttgcacgggatcctagctcttgtaggcagacaccagtgcactctagatacctcctgagacctccgtcctctgctttccgggcagctctcaccaccccaggccccggcatgaggcctttcctcagtcctgtggcctctcagaggacacctgatgctcacctgcccctctttctcctgcacttggcttgcagtgagatgctcccagatgcatttgtccagtgccccatcatgggcctgaaaggcagagaaactttttcctacacagattcttttccccatctcctcctgtggtttgcatccatggctctttggccatgaggttcctggcagtgctgggagtttggatgggatcgtgcccagctttgcttagctttctttatttctgcaaatctgttagcataattccaaggtggccaagcagatgtcacatggagttagtcaaagcacaaagtcacgattccacaatggaggggagacctggccaagggagccagccagcgtgcaactgcccaagctccaggtctccaggacaagagcagttgtctgccatgagcacccatccaggatggagaataagggcttctctgcctctcagaattctttttaattgaagatgtcttgagctctgcaaagatcagagcaggtgagcatccactttgacatgaaggacaagaagacgcatggctcatggcgggcacatgcggctgccagtgagacagcgtctcctctgggagctgggcgggcacagcatcctcagttctgtgcccagccaagggtgagcatctctgctgagacagtccttttgctctcggaggccagggaagatggtacttagaggcttttcccctatcgctctgggtgtctaggaatcccaccagcttgtcttaacagtacaacagcttctttgaggacccagtgggtatggagtatagacagaacccagggttgagaacagaaggtgggcggcaggatcagagtgaaagcagaggcgtgaggagaggaaagcagggaggtctcctgggctgccaggtcagcctctctggcaaggctttcttgagccccgcccctttctttccccggagtccctccaccccataacaatacctcgaatttccaaaagaggtcaccagatgcacatgggccgcaaaacacacagtcaggcttccagcacattctcccccatttggaggatactcgaatgtcaggtttttggttttattattatttcagaactagctcagcccatctctaattataaaacatggttttgttttttttttttcctttttttcttgattaggtctggaacagctctagaatgaacacataaaatttagcaatttaaaatctttctttactgcaagtttaaatagttgtacagatagtttataagcacaatattttaagaaaaaaaagtggctggtctactaggcagcctttgtgccacttcagtgctagaaagttaaagaaaaaaaaacttttgtgatttaataatactatttctgtggaataattataaaagtatgacctttttaaatcaaccttatttggatgcatctgaaccagcagagctgtgttatattttctatctttgctagaacttcgtcattgaaggacaatttcttcaaagtggttacaattcataatgcagcagtttctccaaaaacaaaaacaaaacacacaccacacacacgcgcttttccagtcacacacccctgatgttggaaccaagtttttggaccttctgttccaaaaccttttgcaggtcaatctttgtatttgaaatgatccaatccaacttgaagtcaattgaatattaaggcgctttacttccgtgtgctttcagtttttccatcatgagatgaatgagcattactctagataaatttcaagacaggatactacaggtggcctgctgaggctgccccatattttagaaaatgtaaaaatggtggtttggccattaatttgtcttccatttgatgataccgcaaaattccgtgagtccattcctttggcatggcactttccctgggcctacagttggtattacctctgtgctcagtgccaggcaaaacactagctcaaaggagagtcaaggaaaccgctggcagacgataaccagtcgaaactcgtgacttcggtttgttgaactttggcagccagttggtgagggccagatgttattccctttcttaaagatactccaagccacatgccactaaccacaagcaagctggctgcaagactaaagagctgataacatagtttatttttacactgtcttattatagagaagtaatagacctatcagaacctgcactgaccaacaaataaacacatgttgccaagatgaatcggtctctatctctatctgcttattttggtactgaaagcaatagttcctcattcaaatcaccacccactgttctccccctttgggacatgttaggacgaggccctattccatgcccctctttaatggtggaacaaatgttaaactgctcatctaaagatcatgttgatattattccaggttttaagatcaacttttgttacatactgtaatttaaataaactgcatttacatgcctagtttctgtaatattgtgtatacaaaacccaaatctctcaaaatgtaaattatgtatacctgccaagataccttttccagggtgtctgcgcacattttaagttaattcacataatataaaaattactcaatgtgactgttgatttgctgaactttacatatcacaaagtgaattatttgtgatactttagttaataaaatggtaaatttttttctcagttattgaacaagcaagcattatccagttgatctggcaatgactttttgtgtgtgggccacaatattgattttcccattaacaatttttttttgttttttaaatactaatatgtttcacactatagtttgtgtaacaacacgtgttcgcattatctatgttgctgttacttttgtgcttttattctttttagactttataaaaaaaaaaaaaagctcctgtaatttgcactttctcccaatccttaaatctcttgtatggcaaccaaaattactgtaaaaaaataaatatactattgcactaa

SEQ ID NO: 234601 - DNA, 2047 bp, Artificial Sequence
  derived and/or modified sequence
atgatgaacgtccccggcggaggagcggccgcggtgatgatgacgggctacaataatggtcgctgtccccggaattctctctacagtgactgcattattgaggagaagacggtggtcctgcagaaaaaagacaatgagggctttggattcgtgcttcgaggggccaaagctgacacacccattgaagaattcacaccaacaccggctttcccagccctacagtacctggagtccgtggatgaaggtggggtggcgtggcaagccggactaaggaccggggacttcttgattgaggttaacaatgagaatgttgtcaaagtcggccacaggcaggtggtgaacatgatccggcagggagggaatcacctggtccttaaggtggtcacggtgaccaggaatctggaccccgacgacaccgccaggaagaaagctcccccgcctccaaagcgggcaccgaccacagccctcaccctgcgctccaagtccatgacctcggagctggaggagctcgtggataaagcctcggtccggaagaagaaggataaacccgaggagatagtcccggcctccaagccctcccgcgctgctgagaacatggctgtggaaccgagggtggcgaccatcaagcagcggcccagcagccggtgcttcccggcgggctcagacatgaactctgtgtacgaacgccaaggaatcgccgtgatgacgcccactgttcctgggagcccaaaagccccgtttctgggcatccctcgaggtacgatgcgaaggcagaaatcaataggtaagaagtgtggcactcccccacagaagttgcccctgggctttcaaacacagccttaggcccctcaggaattctgagccctgggcctctcacagttgccttggcgtcccaccccagcaaggccctgccagcccacccaccagagggtgggaacctggccttgcccactagggagccattggaacatctgagtggcatgaaactcatcccccctgaaggacacaaaatctagggtggcttctgtcatcttgaagcccagttatctgtgataattccagcagggtaaagcgggagggtgggcggggtggtgcgagccaacccccctcccccaccctgccctgctcagggtgggaagggtaagtgggttccctgcattccccagccaccaccaggcctggagtatgagctcagcagatgtacttccaagggtggttgggtcaggtctcgaaatgaaataatgtactgtgtgttgcagaaaactgccttcctttcttcttaatgtcacaattattcctattgaccctgttgcaggcaaaggtacacttgaccttgagacaaggtcacacttgaccctttgagacagtccctttgtgagataattcagcattgcctttactgtgtcaattctggtagaagctaaggcccttgccctgtgagagttgtggaggcaaccctgggactctggtctgcccagcccaccccaggggcactgtcctgtgtgttctggaaatgcctctgggctgctgtgcaaaagcgcagcgtgcttgtgagtctcaggtggataactgtaggcagtcactaggcagtaagtggccgtggaggtggtgtctgctgtgcttaaagctccccctgcaccagcaaactcagggaaagctgcgtatttgtcttgcggttactggttaataacaactgatttcctcctgtcagacagcagaatctttctatcaggttagtgaaccttacggtttggaatctgtaatctgaatgtaacccagtttactttataaggtgtattcttaaattagtactccttgggaacagaattgccagacagccaactcagagtgactggtcaatggagaacactttgaacgagccatctttgcaatgccaaaatgtcctcccacaaggagtatgttaaatttggaatacccttatcgaatggaagttttcattggaataaattattgtagtttgtcctaggactttttttcatttcaagtaatttattttgctacctctttgaaaacctgcatgctccca

SEQ ID NO: 234602 - DNA, 939 bp, Artificial Sequence
  derived and/or modified sequence
ctcctcctgcaccctcgctgcctcctttcctccatgctgcctggatctggcgagctggggtgattaattggctatgatgatgaacgtccccggcggaggagcggccgcggtgatgatgacgggctacaataatggtcgctgtccccggaattctctctacagtgactgcattattgaggagaagacggtggtcctgcagaaaaaagacaatgagggctttggattcgtgcttcgaggggccaaagctgacacacccattgaagaattcacaccaacaccggctttcccagccctacagtacctggagtccgtggatgaaggtggggtggcgtggcaagccggactaaggaccggggacttcttgattgaggttaacaatgagaatgttgtcaaagtcggccacaggcaggtggtgaacatgatccggcagggagggaatcacctggtccttaaggtggtcacggtgaccaggaatctggaccccgacgacaccgccaggaagaaagctcccccgcctccaaagcgggcaccgaccacagccctcaccctgcgctccaagtccatgacctcggagctggaggagctcgataaacccgaggagatagtcccggcctccaagccctcccgcgctgctgagaacatggctgtggaaccgagggtggcgaccatcaagcagcggcccagcagccggtgcttcccggcgggctcagacatgaactctgtgtacgaacgccaaggaatcgccgtgatgacgcccactgttcctgggagcccaaaagccccgtttctgggcatccctcgaggtacgatgcgaaggcagaaatcaataggtaagaagtgtggcactcccccacagaagttgcccctgggctttcaaacacagccttaggcccctcaggaattctgagccctgggcctctcacagttgccttggcgtcc

SEQ ID NO: 234603 - DNA, 8829 bp, Artificial Sequence
  derived and/or modified sequence
tcctttcctccatgctgcctggatctggcgagctggggtgattaattggctatgatgatgaacgtccccggcggaggagcggccgcggtgatgatgacgggctacaataatggtcgctgtccccggaattctctctacagtgactgcattattgaggagaagacggtggtcctgcagaaaaaagacaatgagggctttggattcgtgcttcgaggggccaaagctgacacacccattgaagaattcacaccaacaccggctttcccagccctacagtacctggagtccgtggatgaaggtggggtggcgtggcaagccggactaaggaccggggacttcttgattgaggttaacaatgagaatgttgtcaaagtcggccacaggcaggtggtgaacatgatccggcagggagggaatcacctggtccttaaggtggtcacggtgaccaggaatctggaccccgacgacaccgccaggaagaaagctcccccgcctccaaagcgggcaccgaccacagccctcaccctgcgctccaagtccatgacctcggagctggaggagctcgtggataaagataaacccgaggagatagtcccggcctccaagccctcccgcgctgctgagaacatggctgtggaaccgagggtggcgaccatcaagcagcggcccagcagccggtgcttcccggcgggctcagacatgaactctgtgtacgaacgccaaggaatcgccgtgatgacgcccactgttcctgggagcccaaaagccccgtttctgggcatccctcgaggtacgatgcgaaggcagaaatcaatagacagcagaatctttctatcaggaataacagaggaagagcggcagtttctggctcctccaatgctgaagttcaccagaagcctgtccatgccggacacctctgaggacatcccccctccaccgcagtctgtgcccccgtccccaccaccaccttccccaaccacttacaactgccccaagtccccaactccaagagtctacgggacgattaagcctgcgttcaatcagaattctgccgccaaggtgtcccccgccaccaggtccgacaccgtggccaccatgatgagggagaaggggatgtacttcaggagagagctggaccgctactccttggactctgaagacctctacagtcggaatgccggcccgcaagccaacttccgcaacaagagaggccagatgccagaaaacccatactcagaggtggggaagatcgccagcaaagccgtctacgtccccgccaagcccgccaggcggaaggggatgctggtgaagcagtccaacgtggaggacagccccgagaagacgtgctccatccctatcccgaccatcatcgtgaaggagccgtccaccagcagcagcggcaagagcagccagggcagcagcatggagatcgacccccaggccccggagccaccgagccagctgcggcctgacgaaagcctgaccgtcagcagcccctttgccgccgccatcgccggagccgtccgcgaccgtgagaagcggctggaagccaggaggaactccccggccttcctctccacagacctgggggatgaggatgtgggcctggggccacccgcccccaggacgcggccctccatgttccccgaggagggggattttgctgacgaggacagcgctgagcagctgtcatcccccatgccgagtgccacgcccagggagcccgaaaaccatttcgtgggtggcgccgaggccagtgctccgggtgaggctgggaggccgctgaattccacgtccaaagcccaggggcccgagagcagcccagcagtgccctccgcgagcagcggcacagccggccccgggaattatgtccacccactcacagggcggctgcttgatcccagctccccgctggccctggcactctccgcaagggaccgagccatgaaggagtctcaacagggacccaaaggggaggcccccaaggccgacctcaacaaacctctttacattgataccaaaatgcggcccagcctggatgccggcttccctacggtcaccaggcagaacacccggggacccctgaggcggcaggagacggagaacaagtacgagaccgacctgggccgagaccggaaaggcgatgacaagaagaacatgctgatcgacatcatggacacgtcccagcagaagtcggctggcctgctgatggtgcacaccgtggacgccactaagctggacaacgccctgcaggaagaggacgagaaggcagaggtggagatgaagccagacagctcgccgtccgaggtgccagaaggtgtttccgaaaccgaaggtgctttacagatctccgctgcccccgagcccaccaccgtgcccggcagaaccatcgtcgcggtgggctccatggaagaggcggtgattttgccattccgcatccctcctccccctctggcatccgtggacttggatgaggattttatttttacagagccattgcctcctcccctggaatttgcaaatagttttgatatccccgatgaccgggcagcttctgtcccggctctctcagacttagtgaagcagaagaaaagcgacacccctcagtccccttcgttgaactccagccaaccaaccaactctgcagacagcaagaagccagccagtctttcaaactgtctgcctgcctcattcctgccaccccctgaaagctttgacgccgtcgccgactctgggatcgaggaggtggacagccggagtagcagcgaccaccacctcgagacgaccagcactatctccaccgtgtctagcatctccaccctgtcttccgaaggtggagagaatgtggacacctgcacagtctatgcagatgggcaagcatttatggttgacaaacccccagtacctcctaagccaaaaatgaagcccatcattcacaaaagcaatgcactttatcaagacgcgctcgtggaagaagatgtagatagctttgttatccccccgcccgctcccccgcccccgccgggcagtgcccagcctgggatggccaaggttctccagccaaggacctccaagttgtggggcgacgtcacagagatcaaaagcccgattctctcaggcccaaaggcaaacgttattagtgaattgaactctatcctacagcaaatgaaccgagagaaattggcaaagccgggggaaggactggattcaccaatgggagccaagtccgccagcctcgctccaagaagcccggagatcatgagcaccatctcaggtacacggagcacgacggtcaccttcactgttcgccccggcacctcccagcccatcaccctgcagagccggccccccgactatgaaagcaggacctcaggaacaagacgtgccccaagccctgtggtctcgccaacagagatgaacaaagagaccctgcccgcccccctgtctgctgccaccgcctctccttctcccgctctctcagatgtctttagccttccaagccagcccccttctggggatctatttggcttgaacccagcgggacgcagtaggtcgccatccccctcgatactgcaacagccaatctcaaataagccttttacaactaaacctgtccacctgtggactaaaccagatgtggccgattggctggaaagtctaaacttgggtgaacataaagaggccttcatggacaatgagatcgatggcagtcacttaccaaacctgcagaaggaggacctcatcgatcttggggtaactcgagtcgggcacagaatgaacatagaaagggctttgaaacagctgctggacagataaggacggctgctctccacctcgcagactgctcttgttataagtagagatgggctcgtgctgaaacatctgaatgccaagcgaagtctgtgagcatcaaccccactccatgggtttgtctcctggtacccaaagaaatactgagttgtgtccacaacatggctgggtcttcagacccctggctcaccatgtgggtgtcttgggcagtttctatcacacatgggacaaggggagggagtttttctaacatggaaaaagattctcagcctgccgcccagcatgcaggtggcctcgctttgccgggtccgagaggctccccgtcaattttgcacgggatcctagctcttgtaggcagacaccagtgcactctagatacctcctgagacctccgtcctctgctttccgggcagctctcaccaccccaggccccggcatgaggcctttcctcagtcctgtggcctctcagaggacacctgatgctcacctgcccctctttctcctgcacttggcttgcagtgagatgctcccagatgcatttgtccagtgccccatcatgggcctgaaaggcagagaaactttttcctacacagattcttttccccatctcctcctgtggtttgcatccatggctctttggccatgaggttcctggcagtgctgggagtttggatgggatcgtgcccagctttgcttagctttctttatttctgcaaatctgttagcataattccaaggtggccaagcagatgtcacatggagttagtcaaagcacaaagtcacgattccacaatggaggggagacctggccaagggagccagccagcgtgcaactgcccaagctccaggtctccaggacaagagcagttgtctgccatgagcacccatccaggatggagaataagggcttctctgcctctcagaattctttttaattgaagatgtcttgagctctgcaaagatcagagcaggtgagcatccactttgacatgaaggacaagaagacgcatggctcatggcgggcacatgcggctgccagtgagacagcgtctcctctgggagctgggcgggcacagcatcctcagttctgtgcccagccaagggtgagcatctctgctgagacagtccttttgctctcggaggccagggaagatggtacttagaggcttttcccctatcgctctgggtgtctaggaatcccaccagcttgtcttaacagtacaacagcttctttgaggacccagtgggtatggagtatagacagaacccagggttgagaacagaaggtgggcggcaggatcagagtgaaagcagaggcgtgaggagaggaaagcagggaggtctcctgggctgccaggtcagcctctctggcaaggctttcttgagccccgcccctttctttccccggagtccctccaccccataacaatacctcgaatttccaaaagaggtcaccagatgcacatgggccgcaaaacacacagtcaggcttccagcacattctcccccatttggaggatactcgaatgtcaggtttttggttttattattatttcagaactagctcagcccatctctaattataaaacatggttttgttttttttttttcctttttttcttgattaggtctggaacagctctagaatgaacacataaaatttagcaatttaaaatctttctttactgcaagtttaaatagttgtacagatagtttataagcacaatattttaagaaaaaaaagtggctggtctactaggcagcctttgtgccacttcagtgctagaaagttaaagaaaaaaaaacttttgtgatttaataatactatttctgtggaataattataaaagtatgacctttttaaatcaaccttatttggatgcatctgaaccagcagagctgtgttatattttctatctttgctagaacttcgtcattgaaggacaatttcttcaaagtggttacaattcataatgcagcagtttctccaaaaacaaaaacaaaacacacaccacacacacgcgcttttccagtcacacacccctgatgttggaaccaagtttttggaccttctgttccaaaaccttttgcaggtcaatctttgtatttgaaatgatccaatccaacttgaagtcaattgaatattaaggcgctttacttccgtgtgctttcagtttttccatcatgagatgaatgagcattactctagataaatttcaagacaggatactacaggtggcctgctgaggctgccccatattttagaaaatgtaaaaatggtggtttggccattaatttgtcttccatttgatgataccgcaaaattccgtgagtccattcctttggcatggcactttccctgggcctacagttggtattacctctgtgctcagtgccaggcaaaacactagctcaaaggagagtcaaggaaaccgctggcagacgataaccagtcgaaactcgtgacttcggtttgttgaactttggcagccagttggtgagggccagatgttattccctttcttaaagatactccaagccacatgccactaaccacaagcaagctggctgcaagactaaagagctgataacatagtttatttttacactgtcttattatagagaagtaatagacctatcagaacctgcactgaccaacaaataaacacatgttgccaagatgaatcggtctctatctctatctgcttattttggtactgaaagcaatagttcctcattcaaatcaccacccactgttctccccctttgggacatgttaggacgaggccctattccatgcccctctttaatggtggaacaaatgttaaactgctcatctaaagatcatgttgatattattccaggttttaagatcaacttttgttacatactgtaatttaaataaactgcatttacatgcctagtttctgtaatattgtgtatacaaaacccaaatctctcaaaatgtaaattatgtatacctgccaagataccttttccagggtgtctgcgcacattttaagttaattcacataatataaaaattactcaatgtgactgttgatttgctgaactttacatatcacaaagtgaattatttgtgatactttagttaataaaatggtaaatttttttctcagttattgaacaagcaagcattatccagttgatctggcaatgactttttgtgtgtgggccacaatattgattttcccattaacaatttttttttgttttttaaatactaatatgtttcacactatagtttgtgtaacaacacgtgttcgcattatctatgttgctgttacttttgtgcttttattctttttagactttataaaaaaaaaaaaaagctcctgtaatttgcactttctcccaatccttaaatctcttgtatggcaaccaaaattactgtaaaaaaataaatatactattgcactaaggttgtggttctgattgcaaacaaacagtgaacactgtctgaattaaacaaaaagctgcccgacttgcaatctaatgtagattatctcaggcattgtggccagctctgcctctctaaaactgaccagaaaaatctctctcatcgagtaaacaggctcctgtcactgagctaatctgccttggttccatttccttattctcaatttatcaatggatacgtgcatgttatttcagaattatgcaaaacgtcaaaatctgcttctgtgaccgctgctataggcgtggagctgaggctcggcttttccttttgttctgggtggaagcagcggtgccgcggagggccagccagatccggacccttcccttagggtccagtctccccacaccccagcagggtgtcttctagccataaggccaagggagtggcagaactgggccgcctctctggttgacaagcaaaccacatgctaaggcttggagcaagagagaatttgtgtctattggcaaagaactaagccaggaagacatgggccatccctccgctttagggaagcatattttaaacctaaacgttgaacttcttctttggcctcaccagtgaaaacttgttgtctttagttcctaaagtttcttctactttggcacattccccagttgagcagcagcctctatgcttccacgttcaggaaaaattccagtcctcatatcttttgtagttcaccctcaagctctcccgcttcaccatccaatagtttctcccaaaccttggcacccccctagactttgcttccaatggtttcttccagaccacttttcctagatgaatatattcgtttaccttactaggaaaattattggaagattttttcttttacttgaaattggaggcattttaataactggcgaactggaatgtgtttctgtatttgtagacaaccatgaacccatgcaagtaggtgaacattccacagtggctgggtgaccacagcagctgcatgcagacaggactgcccgtgctttgtggggaatcagagaatttccaaacttgtttctcagacttccgcagatctcatcactttgatttctaatccatgctgtattggtgattttgtttatcgttcctgtaacttgttctacattccacagtctttaccgttttatgttcaaaattacaacaatccctgtccattgattccactctggaactctttgttcatgccaattttgaaattttaatacgagccttcaaataaacacagaaaagaaaaaaaaaaaggaaaaaaaataaagtgtgtgccttgggtgttttgaacctgatctgcataaaaccatattgtattcaaatgctgtatctttcatgaaaggataaatatatcttcaatgtattaatgtagctgataaaatagttatagtgccttgttttctgaactgagaagcccatatcaatgcacaacgtaaagaaaggacggttcgagctatgaaatgttgaggacacctacacgtgattctggagcctttctcatcataagactgtggaaaatacacagtcgtttaagttaaaaataaaaagtaaattga

SEQ ID NO: 234604 - DNA, 846 bp, Artificial Sequence
  derived and/or modified sequence
atgatgatgaacgtgcccggcggcggcgccgccgccgtgatgatgaccggctacaacaacggcagatgccccagaaacagcctgtacagcgactgcatcatcgaggagaagaccgtggtgctgcagaagaaggacaacgagggcttcggcttcgtgctgagaggcgccaaggccgacacccccatcgaggagttcacccccacccccgccttccccgccctgcagtacctggagagcgtggacgagggcggcgtggcctggcaggccggcctgagaaccggcgacttcctgatcgaggtgaacaacgagaacgtggtgaaggtgggccacagacaggtggtgaacatgatcagacagggcggcaaccacctggtgctgaaggtggtgaccgtgaccagaaacctggaccccgacgacaccgccagaaagaaggccccccccccccccaagagagcccccaccaccgccctgaccctgagaagcaagagcatgaccagcgagctggaggagctggtggacaagggcgtgatcagaaagggcaaggacaagcccgaggagatcgtgcccgccagcaagcccagcagagccgccgagaacatggccgtggagcccagagtggccaccatcaagcagagacccagcagcagatgcttccccgccggcagcgacatgaacagcgtgtacgagagacagggcatcgccgtgatgacccccaccgtgcccggcagccccaaggcccccttcctgggcatccccagaggcaccatgagaagacagaagagcatcggcaagaagtgcggcacccccccccagaagctgcccctgggcttccagacccagccctag

SEQ ID NO: 234605 - DNA, 3762 bp, Artificial Sequence
  derived and/or modified sequence
atgatgaacgtgcccggcggcggcgccgccgccgtgatgatgaccggctacaacaacggcagatgccccagaaacagcctgtacagcgactgcatcatcgaggagaagaccgtggtgctgcagaagaaggacaacgagggcttcggcttcgtgctgagaggcgccaaggccgacacccccatcgaggagttcacccccacccccgccttccccgccctgcagtacctggagagcgtggacgagggcggcgtggcctggcaggccggcctgagaaccggcgacttcctgatcgaggtgaacaacgagaacgtggtgaaggtgggccacagacaggtggtgaacatgatcagacagggcggcaaccacctggtgctgaaggtggtgaccgtgaccagaaacctggaccccgacgacaccgccagaaagaaggccccccccccccccaagagagcccccaccaccgccctgaccctgagaagcaagagcatgaccagcgagctggaggagctggtggacaaggacaagcccgaggagatcgtgcccgccagcaagcccagcagagccgccgagaacatggccgtggagcccagagtggccaccatcaagcagagacccagcagcagatgcttccccgccggcagcgacatgaacagcgtgtacgagagacagggcatcgccgtgatgacccccaccgtgcccggcagccccaaggcccccttcctgggcatccccagaggcaccatgagaagacagaagagcatcgacagcagaatcttcctgagcggcatcaccgaggaggagagacagttcctggccccccccatgctgaagttcaccagaagcctgagcatgcccgacaccagcgaggacatccccccccccccccagagcgtgccccccagcccccccccccccagccccaccacctacaactgccccaagagccccacccccagagtgtacggcaccatcaagcccgccttcaaccagaacagcgccgccaaggtgagccccgccaccagaagcgacaccgtggccaccatgatgagagagaagggcatgtacttcagaagagagctggacagatacagcctggacagcgaggacctgtacagcagaaacgccggcccccaggccaacttcagaaacaagagaggccagatgcccgagaacccctacagcgaggtgggcaagatcgccagcaaggccgtgtacgtgcccgccaagcccgccagaagaaagggcatgctggtgaagcagagcaacgtggaggacagccccgagaagacctgcagcatccccatccccaccatcatcgtgaaggagcccagcaccagcagcagcggcaagagcagccagggcagcagcatggagatcgacccccaggcccccgagccccccagccagctgagacccgacgagagcctgaccgtgagcagccccttcgccgccgccatcgccggcgccgtgagagacagagagaagagactggaggccagaagaaacagccccgccttcctgagcaccgacctgggcgacgaggacgtgggcctgggcccccccgcccccagaaccagacccagcatgttccccgaggagggcgacttcgccgacgaggacagcgccgagcagctgagcagccccatgcccagcgccacccccagagagcccgagaaccacttcgtgggcggcgccgaggccagcgcccccggcgaggccggcagacccctgaacagcaccagcaaggcccagggccccgagagcagccccgccgtgcccagcgccagcagcggcaccgccggccccggcaactacgtgcaccccctgaccggcagactgctggaccccagcagccccctggccctggccctgagcgccagagacagagccatgaaggagagccagcagggccccaagggcgaggcccccaaggccgacctgaacaagcccctgtacatcgacaccaagatgagacccagcctggacgccggcttccccaccgtgaccagacagaacaccagaggccccctgagaagacaggagaccgagaacaagtacgagaccgacctgggcagagacagaaagggcgacgacaagaagaacatgctgatcgacatcatggacaccagccagcagaagagcgccggcctgctgatggtgcacaccgtggacgccaccaagctggacaacgccctgcaggaggaggacgagaaggccgaggtggagatgaagcccgacagcagccccagcgaggtgcccgagggcgtgagcgagaccgagggcgccctgcagatcagcgccgcccccgagcccaccaccgtgcccggcagaaccatcgtggccgtgggcagcatggaggaggccgtgatcctgcccttcagaatcccccccccccccctggccagcgtggacctggacgaggacttcatcttcaccgagcccctgcccccccccctggagttcgccaacagcttcgacatccccgacgacagagccgccagcgtgcccgccctgagcgacctggtgaagcagaagaagagcgacaccccccagagccccagcctgaacagcagccagcccaccaacagcgccgacagcaagaagcccgccagcctgagcaactgcctgcccgccagcttcctgcccccccccgagagcttcgacgccgtggccgacagcggcatcgaggaggtggacagcagaagcagcagcgaccaccacctggagaccaccagcaccatcagcaccgtgagcagcatcagcaccctgagcagcgagggcggcgagaacgtggacacctgcaccgtgtacgccgacggccaggccttcatggtggacaagccccccgtgccccccaagcccaagatgaagcccatcatccacaagagcaacgccctgtaccaggacgccctggtggaggaggacgtggacagcttcgtgatccccccccccgcccccccccccccccccggcagcgcccagcccggcatggccaaggtgctgcagcccagaaccagcaagctgtggggcgacgtgaccgagatcaagagccccatcctgagcggccccaaggccaacgtgatcagcgagctgaacagcatcctgcagcagatgaacagagagaagctggccaagcccggcgagggcctggacagccccatgggcgccaagagcgccagcctggcccccagaagccccgagatcatgagcaccatcagcggcaccagaagcaccaccgtgaccttcaccgtgagacccggcaccagccagcccatcaccctgcagagcagaccccccgactacgagagcagaaccagcggcaccagaagagcccccagccccgtggtgagccccaccgagatgaacaaggagaccctgcccgcccccctgagcgccgccaccgccagccccagccccgccctgagcgacgtgttcagcctgcccagccagccccccagcggcgacctgttcggcctgaaccccgccggcagaagcagaagccccagccccagcatcctgcagcagcccatcagcaacaagcccttcaccaccaagcccgtgcacctgtggaccaagcccgacgtggccgactggctggagagcctgaacctgggcgagcacaaggaggccttcatggacaacgagatcgacggcagccacctgcccaacctgcagaaggaggacctgatcgacctgggcgtgaccagagtgggccacagaatgaacatcgagagagccctgaagcagctgctggacagatag

SEQ ID NO: 234606 - DNA, 843 bp, Artificial Sequence
  derived and/or modified sequence
atgatgaacgtgcccggcggcggcgccgccgccgtgatgatgaccggctacaacaacggcagatgccccagaaacagcctgtacagcgactgcatcatcgaggagaagaccgtggtgctgcagaagaaggacaacgagggcttcggcttcgtgctgagaggcgccaaggccgacacccccatcgaggagttcacccccacccccgccttccccgccctgcagtacctggagagcgtggacgagggcggcgtggcctggcaggccggcctgagaaccggcgacttcctgatcgaggtgaacaacgagaacgtggtgaaggtgggccacagacaggtggtgaacatgatcagacagggcggcaaccacctggtgctgaaggtggtgaccgtgaccagaaacctggaccccgacgacaccgccagaaagaaggccccccccccccccaagagagcccccaccaccgccctgaccctgagaagcaagagcatgaccagcgagctggaggagctggtggacaaggccagcgtgagaaagaagaaggacaagcccgaggagatcgtgcccgccagcaagcccagcagagccgccgagaacatggccgtggagcccagagtggccaccatcaagcagagacccagcagcagatgcttccccgccggcagcgacatgaacagcgtgtacgagagacagggcatcgccgtgatgacccccaccgtgcccggcagccccaaggcccccttcctgggcatccccagaggcaccatgagaagacagaagagcatcggcaagaagtgcggcacccccccccagaagctgcccctgggcttccagacccagccctag

SEQ ID NO: 234607 - DNA, 816 bp, Artificial Sequence
  derived and/or modified sequence
atgatgatgaacgtgcccggcggcggcgccgccgccgtgatgatgaccggctacaacaacggcagatgccccagaaacagcctgtacagcgactgcatcatcgaggagaagaccgtggtgctgcagaagaaggacaacgagggcttcggcttcgtgctgagaggcgccaaggccgacacccccatcgaggagttcacccccacccccgccttccccgccctgcagtacctggagagcgtggacgagggcggcgtggcctggcaggccggcctgagaaccggcgacttcctgatcgaggtgaacaacgagaacgtggtgaaggtgggccacagacaggtggtgaacatgatcagacagggcggcaaccacctggtgctgaaggtggtgaccgtgaccagaaacctggaccccgacgacaccgccagaaagaaggccccccccccccccaagagagcccccaccaccgccctgaccctgagaagcaagagcatgaccagcgagctggaggagctggacaagcccgaggagatcgtgcccgccagcaagcccagcagagccgccgagaacatggccgtggagcccagagtggccaccatcaagcagagacccagcagcagatgcttccccgccggcagcgacatgaacagcgtgtacgagagacagggcatcgccgtgatgacccccaccgtgcccggcagccccaaggcccccttcctgggcatccccagaggcaccatgagaagacagaagagcatcggcaagaagtgcggcacccccccccagaagctgcccctgggcttccagacccagccctag

SEQ ID NO: 234608 - DNA, 3765 bp, Artificial Sequence
  derived and/or modified sequence
atgatgatgaacgtgcccggcggcggcgccgccgccgtgatgatgaccggctacaacaacggcagatgccccagaaacagcctgtacagcgactgcatcatcgaggagaagaccgtggtgctgcagaagaaggacaacgagggcttcggcttcgtgctgagaggcgccaaggccgacacccccatcgaggagttcacccccacccccgccttccccgccctgcagtacctggagagcgtggacgagggcggcgtggcctggcaggccggcctgagaaccggcgacttcctgatcgaggtgaacaacgagaacgtggtgaaggtgggccacagacaggtggtgaacatgatcagacagggcggcaaccacctggtgctgaaggtggtgaccgtgaccagaaacctggaccccgacgacaccgccagaaagaaggccccccccccccccaagagagcccccaccaccgccctgaccctgagaagcaagagcatgaccagcgagctggaggagctggtggacaaggacaagcccgaggagatcgtgcccgccagcaagcccagcagagccgccgagaacatggccgtggagcccagagtggccaccatcaagcagagacccagcagcagatgcttccccgccggcagcgacatgaacagcgtgtacgagagacagggcatcgccgtgatgacccccaccgtgcccggcagccccaaggcccccttcctgggcatccccagaggcaccatgagaagacagaagagcatcgacagcagaatcttcctgagcggcatcaccgaggaggagagacagttcctggccccccccatgctgaagttcaccagaagcctgagcatgcccgacaccagcgaggacatccccccccccccccagagcgtgccccccagcccccccccccccagccccaccacctacaactgccccaagagccccacccccagagtgtacggcaccatcaagcccgccttcaaccagaacagcgccgccaaggtgagccccgccaccagaagcgacaccgtggccaccatgatgagagagaagggcatgtacttcagaagagagctggacagatacagcctggacagcgaggacctgtacagcagaaacgccggcccccaggccaacttcagaaacaagagaggccagatgcccgagaacccctacagcgaggtgggcaagatcgccagcaaggccgtgtacgtgcccgccaagcccgccagaagaaagggcatgctggtgaagcagagcaacgtggaggacagccccgagaagacctgcagcatccccatccccaccatcatcgtgaaggagcccagcaccagcagcagcggcaagagcagccagggcagcagcatggagatcgacccccaggcccccgagccccccagccagctgagacccgacgagagcctgaccgtgagcagccccttcgccgccgccatcgccggcgccgtgagagacagagagaagagactggaggccagaagaaacagccccgccttcctgagcaccgacctgggcgacgaggacgtgggcctgggcccccccgcccccagaaccagacccagcatgttccccgaggagggcgacttcgccgacgaggacagcgccgagcagctgagcagccccatgcccagcgccacccccagagagcccgagaaccacttcgtgggcggcgccgaggccagcgcccccggcgaggccggcagacccctgaacagcaccagcaaggcccagggccccgagagcagccccgccgtgcccagcgccagcagcggcaccgccggccccggcaactacgtgcaccccctgaccggcagactgctggaccccagcagccccctggccctggccctgagcgccagagacagagccatgaaggagagccagcagggccccaagggcgaggcccccaaggccgacctgaacaagcccctgtacatcgacaccaagatgagacccagcctggacgccggcttccccaccgtgaccagacagaacaccagaggccccctgagaagacaggagaccgagaacaagtacgagaccgacctgggcagagacagaaagggcgacgacaagaagaacatgctgatcgacatcatggacaccagccagcagaagagcgccggcctgctgatggtgcacaccgtggacgccaccaagctggacaacgccctgcaggaggaggacgagaaggccgaggtggagatgaagcccgacagcagccccagcgaggtgcccgagggcgtgagcgagaccgagggcgccctgcagatcagcgccgcccccgagcccaccaccgtgcccggcagaaccatcgtggccgtgggcagcatggaggaggccgtgatcctgcccttcagaatcccccccccccccctggccagcgtggacctggacgaggacttcatcttcaccgagcccctgcccccccccctggagttcgccaacagcttcgacatccccgacgacagagccgccagcgtgcccgccctgagcgacctggtgaagcagaagaagagcgacaccccccagagccccagcctgaacagcagccagcccaccaacagcgccgacagcaagaagcccgccagcctgagcaactgcctgcccgccagcttcctgcccccccccgagagcttcgacgccgtggccgacagcggcatcgaggaggtggacagcagaagcagcagcgaccaccacctggagaccaccagcaccatcagcaccgtgagcagcatcagcaccctgagcagcgagggcggcgagaacgtggacacctgcaccgtgtacgccgacggccaggccttcatggtggacaagccccccgtgccccccaagcccaagatgaagcccatcatccacaagagcaacgccctgtaccaggacgccctggtggaggaggacgtggacagcttcgtgatccccccccccgcccccccccccccccccggcagcgcccagcccggcatggccaaggtgctgcagcccagaaccagcaagctgtggggcgacgtgaccgagatcaagagccccatcctgagcggccccaaggccaacgtgatcagcgagctgaacagcatcctgcagcagatgaacagagagaagctggccaagcccggcgagggcctggacagccccatgggcgccaagagcgccagcctggcccccagaagccccgagatcatgagcaccatcagcggcaccagaagcaccaccgtgaccttcaccgtgagacccggcaccagccagcccatcaccctgcagagcagaccccccgactacgagagcagaaccagcggcaccagaagagcccccagccccgtggtgagccccaccgagatgaacaaggagaccctgcccgcccccctgagcgccgccaccgccagccccagccccgccctgagcgacgtgttcagcctgcccagccagccccccagcggcgacctgttcggcctgaaccccgccggcagaagcagaagccccagccccagcatcctgcagcagcccatcagcaacaagcccttcaccaccaagcccgtgcacctgtggaccaagcccgacgtggccgactggctggagagcctgaacctgggcgagcacaaggaggccttcatggacaacgagatcgacggcagccacctgcccaacctgcagaaggaggacctgatcgacctgggcgtgaccagagtgggccacagaatgaacatcgagagagccctgaagcagctgctggacagatag

SEQ ID NO: 234609 - protein, 304 aa, Artificial Sequence
  derived and/or modified sequence
MSRSFYVDSLIIKDTSRPAPSLPEPHPGPDFFIPLGMPPPLVMSVSGPGCPSRKSGAFCVCPLCVTSHLHSSRGSVGAGSGGAGAGVTGAGGSGVAGAAGALPLLKGQFSSAPGDAQFCPRVNHAHHHHHPPQHHHHHHQPQQPGSAAAAAAAAAAAAAAAALGHPQHHAPVCTATTYNVADPRRFHCLTMGGSDASQVPNGKRMRTAFTSTQLLELEREFSSNMYLSRLRRIEIATYLNLSEKQVKIWFQNRRVKHKKEGKGTQRNSHAGCKCVGSQVHYARSEDEDSLSPASANDDKEISPL

SEQ ID NO: 234610 - DNA, 1212 bp, Artificial Sequence
  derived and/or modified sequence
gaggagcctgagccgagcggtactccgcagcatcacgtgccagggtggggggctataaaatacccgagccggggcgccgggcgggggacgtgaggaccagccctctccggggacccctttgttcccagcccagacgccaacacctctgcgtccccaagggcttgactgcccgtgtctgcgcggctcccagggcagagcttagaacactagaggagaggggtcgccgcgaactgccggggcttccagccacccacccctctcgacatgtcgcgctccttctatgtcgactcgctcatcatcaaggacacctcacggcctgcgccctcgctgcctgaaccgcaccccgggccggatttcttcatcccgcttggcatgccgcccccattggtgatgtccgtgtccggccccggctgcccgtcccgcaagagcggcgcgttctgcgtgtgccctctctgcgtcacttcgcacctgcactcctctcgggggtctgtgggcgccggcagcgggggcgcaggggccggggttaccggggccggaggcagtggggtggcaggggccgcaggggcactgcctctgcttaagagccagttctcttcggctcctggggacgcgcagttttgcccgcgggtgaaccatgcgcatcatcaccaccacccgccgcagcaccaccatcaccatcatcagccccagcagcctggctcggccgcggcggcggcagcagcagcagcggcggcggcggccgcggcggccttggggcacccgcagcaccacgcacctgtctgcaccgccaccacctacaacgtggcggacccgcggagattccactgcctcaccatgggaggctctgacgccagccaggtacccaatggcaagaggatgaggacggcgttcactagcacgcaactcctggagctggagagagaattctcttccaacatgtacctgtctcgactccggaggattgaaatcgccacttacctgaacctgtcggagaagcaggtgaaaatctggtttcagaaccgccgagtgaagcacaagaaggaggggaagggcacgcagaggaacagtcacgcgggctgcaagtgcgtcgggagccaggtgcactacgcgcgctccgaggatgaggactccctgtcgccggcctcagccaacgatgacaaggagatttcccccttatgagggagggcctcctccctcacatcccccgctcct

SEQ ID NO: 234611 - DNA, 915 bp, Artificial Sequence
  derived and/or modified sequence
atgagccggtccttttacgtagacagtctcatcatcaaagataccagccggcccgcacctagtctgcccgaaccccatcccggtccggatttttttataccgctggggatgccaccccctctggttatgtccgtgtctgggccgggatgccctagccgcaaaagtggggccttctgcgtgtgtcccttgtgtgtgaccagccatctgcatagctctaggggatcagtgggagccggctccggaggcgctggagccggcgtgacaggggctggtggcagcggagttgccggagcagccggagctctgccacttttgaagggacagttctcttctgccccgggtgacgcccagttctgccctcgcgttaaccatgctcaccaccaccaccatcctccgcagcaccaccaccatcaccaccagccgcagcaaccggggtctgctgctgcagccgccgctgccgcagcagcggcggccgccgccgctgctttaggccatcctcagcatcatgctccagtttgtaccgctaccacatacaatgtagccgacccacgacggttccattgtcttactatgggcgggtcggacgccagccaggtccctaacggcaagcggatgaggaccgcctttactagcactcagctgttagaattagaaagggagttctcatccaacatgtacttgtcacggctgaggcgcattgaaatcgctacatatttgaacctctcagagaaacaggtgaaaatctggtttcagaacagacgcgttaaacacaagaaagaaggtaaggggacccagcggaattctcacgcaggttgcaagtgcgtgggtagtcaggtccactacgctagatcagaagatgaggatagtctgtcacctgcttctgccaatgacgacaaggagatctcacccctttag

SEQ ID NO: 234612 - DNA, 915 bp, Artificial Sequence
  derived and/or modified sequence
atgagccgctccttctacgtggacagcctcatcatcaaggacaccagcaggcctgcccccagcctgcctgagccccaccctggccctgacttcttcatccccctgggcatgcccccacccctggtgatgtctgtgtctggccctggctgccccagcaggaagagcggggccttctgtgtgtgccccctgtgtgtgaccagccacctgcacagcagccggggctctgtgggcgccggcagcggcggggccggggccggcgtgactggagctgggggcagcggcgtggccggggctgctggggccctgcccctgctgaagggccagttcagcagcgcccctggagatgcccagttctgcccccgggtgaaccacgcccaccaccaccaccaccccccccagcaccaccaccaccaccaccagccccagcagcccggcagcgctgctgctgctgctgctgctgctgctgctgctgctgctgctgctgccctgggccacccccagcaccacgcccctgtgtgcacagccaccacctacaacgtggccgacccccggcgcttccactgcctgaccatgggcggcagtgatgccagccaggtgcccaacgggaagaggatgaggacagccttcaccagcacccagctgctggagctggagcgggagttcagcagcaacatgtacctgagccggctgcggagaattgaaattgccacctacctgaacctgtctgagaagcaggtgaagatctggttccagaacagaagagtgaagcacaagaaggagggcaagggcacccagaggaacagccacgccggctgcaagtgtgtgggcagccaggtgcactacgcccggagtgaagatgaggacagcctgagccctgccagcgccaatgatgacaaggagatcagccccctgtag

SEQ ID NO: 234613 - DNA, 915 bp, Artificial Sequence
  derived and/or modified sequence
atgagccggagcttctacgtggacagcctgatcatcaaggacacctcaaggcctgcaccctcccttcctgagccgcaccccgggcccgatttctttatccctctgggcatgccccctcccctagttatgtccgtgagtgggcccggctgccctagtaggaagagcggggcattttgtgtttgccccctgtgtgtaaccagtcacttacacagttcacggggatctgttggagctggaagcggcggagccggcgccggcgtaacaggcgcaggcggtagcggagtggcaggagctgcaggcgctcttccactgctcaaaggccagttcagtagcgctcccggcgatgcccaattctgcccacgggttaaccacgcccaccaccaccaccaccctccccagcatcatcaccaccaccatcagccccagcagcccggatcagccgccgcggctgccgcagccgcagcggccgccgccgctgctgcagctctgggccacccccaacatcatgcccccgtgtgtaccgccactacttacaatgtggctgatcccagaagatttcattgtttgactatgggtggatccgacgcatcgcaggtaccaaatgggaaacgaatgaggacggcgttcacctcaacacaacttttagagctcgagcgggagttctcatctaatatgtatctcagccgcctccggaggatcgagatagccacatacctgaacctgtcagagaagcaagtcaagatctggtttcagaacaggagagtgaaacataaaaaggaagggaaggggactcaacggaacagccatgcaggctgcaaatgtgttggctcccaggttcactacgcccgttcagaagacgaagatagcctgagtcccgcttcggcgaacgatgacaaagaaattagccccctctag

SEQ ID NO: 234614 - DNA, 915 bp, Artificial Sequence
  derived and/or modified sequence
atgtcaaggtctttctacgtcgactcccttatcataaaagatacatctcggcctgctcccagtttaccggagcctcacccaggtccagacttcttcatccctttgggcatgcccccaccattggtgatgtccgtcagtggtcctggctgtccaagtcggaagtctggagccttttgtgtgtgcccactctgcgtgactagccacctgcactcctccagaggatccgttggcgctggatccgggggagccggtgccggagtgactggtgccggaggcagtggcgtcgcaggggctgccggtgccttaccacttctgaaaggccagtttagttcagcacccggagatgcacagttttgtccacgggtaaaccatgcccaccatcaccaccaccctcctcaacatcatcatcaccatcatcagcctcaacaaccaggctcagcggctgctgcagcggctgctgccgcagccgcagcagctgccgcagccctcggccacccacagcaccacgctcccgtgtgcaccgctacaacgtacaacgtcgcggatcccaggagatttcactgcctaactatgggaggcagtgatgcctctcaggtgccaaacggaaagcgtatgcgtactgcattcacaagcacccagcttctcgaactggagagggaatttagcagtaatatgtacctcagtcgcctcaggagaatagaaattgcgacgtacctaaaccttagcgaaaaacaggtgaaaatatggtttcaaaaccgaagagtgaagcataagaaggaggggaaagggacccagcgcaactcacatgctggctgtaagtgcgtgggctcacaagtccattacgctcgctctgaagatgaggacagcctgagccccgcttctgcaaatgacgacaaggagatctcacccctctag

SEQ ID NO: 234615 - DNA, 1812 bp, Artificial Sequence
  derived and/or modified sequence
gcggcttctgttgtgactcgggcagcctatcccgagggtgcggagctgccgaggagcctgagccgagcggtactccgcagcatcacgtgccagggtggggggctataaaatacccgagccggggcgccgggcgggggacgtgaggaccagccctctccggggacccctttgttcccagcccagacgccaacacctctgcgtccccaagggcttgactgcccgtgtctgcgcggctcccagggcagagcttagaacactagaggagaggggtcgccgcgaactgccggggcttccagccacccacccctctcgacatgtcgcgctccttctatgtcgactcgctcatcatcaaggacacctcacggcctgcgccctcgctgcctgaaccgcaccccgggccggatttcttcatcccgcttggcatgccgcccccattggtgatgtccgtgtccggccccggctgcccgtcccgcaagagcggcgcgttctgcgtgtgccctctctgcgtcacttcgcacctgcactcctctcgggggtctgtgggcgccggcagcgggggcgcaggggccggggttaccggggccggaggcagtggggtggcaggggccgcaggggcactgcctctgcttaagggccagttctcttcggctcctggggacgcgcagttttgcccgcgggtgaaccatgcgcatcatcaccaccacccgccgcagcaccaccatcaccatcatcagccccagcagcctggctcggccgcggcggcggcagcagcagcagcggcggcggcggccgcggcggccttggggcacccgcagcaccacgcacctgtctgcaccgccaccacctacaacgtggcggacccgcggagattccactgcctcaccatgggaggctctgacgccagccaggtacccaatggcaagaggatgaggacggcgttcactagcacgcaactcctggagctggagagagaattctcttccaacatgtacctgtctcgactccggaggattgaaatcgccacttacctgaacctgtcggagaagcaggtgaaaatctggtttcagaaccgccgagtgaagcacaagaaggaggggaagggcacgcagaggaacagtcacgcgggctgcaagtgcgtcgggagccaggtgcactacgcgcgctccgaggatgaggactccctgtcgccggcctcagccaacgatgacaaggagatttcccccttatgagggagggcctcctccctcacatcccccgctcctggcagaccaggcaacgccaaggcgtggggcacccaggggccagaatccttgctcattgcagtggtcccatctggagaagaaacgaacctggaagttctggaatggacaagccgggacctgacccttcgcgtctccttcttgacctgtttatctaggactccaacttgaagttacagatttttttaaaaaatgtaaataacctataattcaactcattcttgtcgtataacagaggaaaaacagggttggtttaagtttaacactgtatggggtttttgaaagcacatgtcagttccccatccctactctctttcagaactcgataagaacacaggatttattgattattttctgttgtcgttttcaaacaaaaacacccaagttgaaaataatttagaaaattagaccttgtaggtcttgctttctgaaatttcgcctggggagaatttaaaatctaagtcgctggaagtccctttgtatgtgaataggtttatataaaatttatatttatatttatttaaataaatgaaacaaaaaccagaattttaaa

SEQ ID NO: 234616 - DNA, 915 bp, Artificial Sequence
  derived and/or modified sequence
atgagcagaagcttctacgtggacagcctgatcatcaaggacaccagcagacccgcccccagcctgcccgagccccaccccggccccgacttcttcatccccctgggcatgcccccccccctggtgatgagcgtgagcggccccggctgccccagcagaaagagcggcgccttctgcgtgtgccccctgtgcgtgaccagccacctgcacagcagcagaggcagcgtgggcgccggcagcggcggcgccggcgccggcgtgaccggcgccggcggcagcggcgtggccggcgccgccggcgccctgcccctgctgaagggccagttcagcagcgcccccggcgacgcccagttctgccccagagtgaaccacgcccaccaccaccaccaccccccccagcaccaccaccaccaccaccagccccagcagcccggcagcgccgccgccgccgccgccgccgccgccgccgccgccgccgccgccgccctgggccacccccagcaccacgcccccgtgtgcaccgccaccacctacaacgtggccgaccccagaagattccactgcctgaccatgggcggcagcgacgccagccaggtgcccaacggcaagagaatgagaaccgccttcaccagcacccagctgctggagctggagagagagttcagcagcaacatgtacctgagcagactgagaagaatcgagatcgccacctacctgaacctgagcgagaagcaggtgaagatctggttccagaacagaagagtgaagcacaagaaggagggcaagggcacccagagaaacagccacgccggctgcaagtgcgtgggcagccaggtgcactacgccagaagcgaggacgaggacagcctgagccccgccagcgccaacgacgacaaggagatcagccccctgtag

SEQ ID NO: 234617 - DNA, 156 bp, Artificial Sequence
  derived and/or modified sequence
atgagcggccccctgagccccgtgtgcagctgcccccagctgcccttcatgctgagcccctgccacatgcaccaccaccccggccacgtggccctgagccagaccgtgagccccgccagcctgctgacccagggcctgggcctgccccagcactag

SEQ ID NO: 234618 - DNA, 156 bp, Artificial Sequence
  derived and/or modified sequence
atgagcggccccctgagccctgtgtgcagctgcccccagctgcccttcatgctgagcccctgccacatgcaccaccaccctggccacgtggccctgagccagacagtgtccccagccagcctgctgacccagggcctgggcctgccccagcactag

SEQ ID NO: 234619 - DNA, 156 bp, Artificial Sequence
  derived and/or modified sequence
atgagcggccccctgagccccgtgtgcagctgcccccagctgccctttatgctctccccctgtcacatgcaccaccaccctggccacgttgccctttcccagacggtatctccagcaagtcttcttacacagggtctcgggcttccacaacactag

SEQ ID NO: 234620 - protein, 265 aa, Artificial Sequence
  derived and/or modified sequence
MDPKQTTLLCLVLCLGQRIQAQEGDFPMPFISAKSSPVIPLDGSVKIQCQAIREAYLTQLMIIKNSTYREIGRRLKFWNETDPEFVIDHMDANKAGRYQCQYRIGHYRFRYSDTLELVVTGLYGKPFLSADRGLVLMPGENISLTCSSAHIPFDRFSLAKEGELSLPQHQSGEHPANFSLGPVDLNVSGIYRCYDSIHQDYTTQNLIRMAVAGLVLVALLAILVENWHSHTALNKEASADVAEPSWSQQMCQPGLTFARTPSVCK

SEQ ID NO: 234621 - DNA, 830 bp, Artificial Sequence
  derived and/or modified sequence
gcacgatggaccccaaacagaccaccctcctgtgtcttgtgctctgtctgggccagaggattcaggcacaggaaggggactttcccatgcctttcatatctgccaaatcgagtcctgtgattcccttggatggatctgtgaaaatccagtgccaggccattcgtgaagcttacctgacccagctgatgatcataaaaaactccacgtaccgagagataggcagaagactgaagttttggaatgagactgatcctgagttcgtcattgaccacatggacgcaaacaaggcagggcgctatcagtgccaatataggatagggcactacagattccggtacagtgacaccctggagctggtagtgacaggcttgtatggcaaacccttcctctctgcagatcggggtctggtgttgatgccaggagagaatatttccctcacgtgcagctcagcacacatcccatttgatagattttcactggccaaggagggagaactttctctgccacagcaccaaagtggggaacacccggccaacttctctttgggtcctgtggacctcaatgtctcagggatctacaggtgctacgactccatccaccaagattacacgacgcagaacttgatccgcatggccgtggcaggactggtcctcgtggctctcttggccatactggttgaaaattggcacagccatacggcactgaacaaggaagcctcggcagatgtggctgaaccgagctggagccaacagatgtgtcagccaggattgacctttgcacgaacaccaagtgtctgcaagtaaacacctggaggtgaaggcagagaggag

SEQ ID NO: 234622 - DNA, 798 bp, Artificial Sequence
  derived and/or modified sequence
atggatccgaagcaaacgaccctcctgtgcctcgtgctctgtctgggccagcggattcaggcgcaggagggcgatttcccaatgcccttcatcagcgcaaaaagctcccccgtaataccgttagacgggagcgtcaagatccaatgccaggctatacgggaggcgtacttgacccagctaatgatcatcaagaatagtacatacagagagatcggaaggaggctgaaattttggaatgagacagatcccgagtttgttatagatcacatggacgctaataaggcaggccggtatcagtgtcagtataggattggccactacagattccgctatagcgataccctggagctggtcgtgaccggactgtacggaaaaccctttctgtcagctgatcgagggctcgtgctgatgcccggagagaacatctccctgacttgttcaagcgcgcacatccccttcgatcggttctcattggctaaggagggcgaactgtccctgcctcagcatcaatccggtgagcaccctgccaatttttcccttggaccggtggacttgaatgtctctggtatctaccgctgctacgactcaatccatcaggattacactacccagaacctgatccgtatggctgtcgcaggattggtcctcgtggctttacttgcaatattagtggagaattggcactctcatactgcacttaataaggaagcctcagccgacgtggccgaaccctcctggtcacagcagatgtgccagcccggtctgacgtttgctaggaccccttccgtgtgcaaatag

SEQ ID NO: 234623 - DNA, 798 bp, Artificial Sequence
  derived and/or modified sequence
atggaccccaagcagaccaccctgctgtgcctggtgctgtgcctgggccagaggatccaggcccaggagggggacttccccatgcccttcatcagcgccaagagcagccctgtgatccccctggatggctctgtgaagatccagtgccaggccatccgggaggcctacctgacccagctgatgatcatcaagaacagcacctaccgggagattggaagaaggctgaagttctggaatgaaacagatcctgagtttgtgattgaccacatggatgccaacaaggccggccgctaccagtgccagtaccgcatcggccactaccgcttccgctacagcgacaccctggagctggtggtgacaggcctgtatggcaagcccttcctgtctgctgaccggggcctggtgctgatgcctggagagaacatcagcctgacctgcagcagcgcccacatcccctttgaccgcttcagcctggccaaggagggggagctgagcctgccccagcaccagagcggggagcacccagccaacttcagcctgggccctgtggacctgaatgtgtctggcatctaccgctgctatgacagcatccaccaggactacaccacccagaacctgatccgcatggctgtggccggcctggtgctggtggccctgctggccatcctggtggagaactggcacagccacacagccctgaacaaggaggccagcgcagatgtggccgagcccagctggagccagcagatgtgccagcccggcctgacctttgcccggacccccagcgtgtgcaagtag

SEQ ID NO: 234624 - DNA, 798 bp, Artificial Sequence
  derived and/or modified sequence
atggaccccaagcagaccaccctgctgtgcctggtgctgtgcctgggccagagaattcaggctcaagaaggcgactttcctatgccatttatttccgcaaagtcatcccctgtcataccactggatggctctgtgaaaatccagtgccaagctattagagaagcctaccttacacagcttatgatcattaagaacagtacctaccgtgagatcggtcgacgcctcaagttctggaatgaaaccgaccccgagtttgtaattgaccacatggatgcgaacaaagcagggcgctaccagtgtcagtaccgcatagggcattatagatttcggtattccgacactctggaactggtcgttaccgggctgtacggcaaaccgtttctgtccgcagaccgagggttggtgttgatgccgggggagaacattagcctcacctgctcatccgcccatatcccttttgataggttcagtctggctaaagagggtgaactgtcactgccccagcaccagagcggcgaacacccagcgaacttctctctcggtcccgtcgacctcaacgtgtctggcatttatcgctgctatgattcaatccatcaggattacaccacacaaaacctgatcagaatggccgtcgccgggctggttctggttgcactcctagcaattctcgtagaaaactggcactcacacactgccctcaacaaagaagcttctgctgacgtagcagaaccgagctggtcccagcagatgtgccagcctgggttgacatttgctcgaaccccttctgtctgcaagtag

SEQ ID NO: 234625 - DNA, 798 bp, Artificial Sequence
  derived and/or modified sequence
atggaccccaagcagaccacacttctctgcctggttctgtgcctgggtcagagaattcaagcacaagaaggggatttccctatgccatttatcagtgcaaagagttccccagtgatcccgttagatggcagcgtgaagatccagtgccaagccatccgggaagcctacttgacacaattaatgataataaagaatagcacatacagagaaatcgggcgtagactgaaattttggaatgagaccgatccagagttcgtgattgaccacatggacgccaacaaggccggtcgatatcagtgccaatacaggatcggccactacagatttcggtacagcgacactctggaactcgtggtcaccgggctctatggaaaaccttttcttagtgccgacagaggtctcgtgctgatgcctggcgaaaatatctccctgacctgtagttctgcgcatattccctttgaccgatttagcctggccaaagaaggcgaactgtcactgccacagcaccaaagtggggagcatcccgctaatttctcccttgggcctgtggacctcaatgtatcaggcatttatagatgctatgattctatccaccaggattacaccacacagaacttgattagaatggcagtggccggtcttgttttggtggctctgctggctatcctggtggaaaactggcactctcacaccgctcttaacaaggaagctagtgccgacgtggccgaaccatcttggagtcaacagatgtgtcaacccggacttacctttgctcggactccatccgtctgtaaatag

SEQ ID NO: 234626 - DNA, 798 bp, Artificial Sequence
  derived and/or modified sequence
atggaccccaagcagaccaccctgctgtgcctggtgctgtgcctgggccagagaatccaggcccaggagggcgacttccccatgcccttcatcagcgccaagagcagccccgtgatccccctggacggcagcgtgaagatccagtgccaggccatcagagaggcctacctgacccagctgatgatcatcaagaacagcacctacagagagatcggcagaagactgaagttctggaacgagaccgaccccgagttcgtgatcgaccacatggacgccaacaaggccggcagataccagtgccagtacagaatcggccactacagattcagatacagcgacaccctggagctggtggtgaccggcctgtacggcaagcccttcctgagcgccgacagaggcctggtgctgatgcccggcgagaacatcagcctgacctgcagcagcgcccacatccccttcgacagattcagcctggccaaggagggcgagctgagcctgccccagcaccagagcggcgagcaccccgccaacttcagcctgggccccgtggacctgaacgtgagcggcatctacagatgctacgacagcatccaccaggactacaccacccagaacctgatcagaatggccgtggccggcctggtgctggtggccctgctggccatcctggtggagaactggcacagccacaccgccctgaacaaggaggccagcgccgacgtggccgagcccagctggagccagcagatgtgccagcccggcctgaccttcgccagaacccccagcgtgtgcaagtag

SEQ ID NO: 234627 - protein, 191 aa, Artificial Sequence
  derived and/or modified sequence
MDPKQTTLLCLVLCLGQRIQAQEGDFPMPFISAKSSPVIPLDGSVKIQCQAIREAYLTQLMIIKNSTYREIGRRLKFWNETDPEFVIDHMDANKAGRYQCQYRIGHYRFRYSDTLELVVTDSIHQDYTTQNLIRMAVAGLVLVALLAILVENWHSHTALNKEASADVAEPSWSQQMCQPGLTFARTPSVCK

SEQ ID NO: 234628 - DNA, 608 bp, Artificial Sequence
  derived and/or modified sequence
gcacgatggaccccaaacagaccaccctcctgtgtcttgtgctctgtctgggccagaggattcaggcacaggaaggggactttcccatgcctttcatatctgccaaatcgagtcctgtgattcccttggatggatctgtgaaaatccagtgccaggccattcgtgaagcttacctgacccagctgatgatcataaaaaactccacgtaccgagagataggcagaagactgaagttttggaatgagactgatcctgagttcgtcattgaccacatggacgcaaacaaggcagggcgctatcagtgccaatataggatagggcactacagattccggtacagtgacaccctggagctggtagtgacagactccatccaccaagattacacgacgcagaacttgatccgcatggccgtggcaggactggtcctcgtggctctcttggccatactggttgaaaattggcacagccatacggcactgaacaaggaagcctcggcagatgtggctgaaccgagctggagccaacagatgtgtcagccaggattgacctttgcacgaacaccaagtgtctgcaagtaaacacctggaggtgaaggcagagaggag

SEQ ID NO: 234629 - DNA, 576 bp, Artificial Sequence
  derived and/or modified sequence
atggatcctaagcagaccacacttctctgcctggttctgtgtttggggcaaagaattcaggcacaggaaggtgacttccccatgccttttatctcagccaagagtagtccggtcattccgctagacgggtctgtcaagatccagtgccaagcgatcagggaggcttatctgacacaactaatgattattaagaattcaacgtatcgggagattggacgacgcctgaaattctggaatgaaacagacccagaattcgtaatcgaccacatggacgcaaataaggcagggagataccaatgtcagtatcgcattggacattacagatttaggtattctgacacactagagctggtggtcaccgatagcattcaccaggactatacaacacagaatctgatccgcatggcagttgcaggtctggtgctcgtcgccctgttggccatcctggttgagaactggcacagtcacacagcgctcaacaaggaggcctccgccgatgtggccgagccatcttggtcacagcagatgtgccagcctggactgacatttgcccgtactcccagtgtctgtaagtag

SEQ ID NO: 234630 - DNA, 576 bp, Artificial Sequence
  derived and/or modified sequence
atggaccccaagcagaccaccctgctgtgcctggtgctgtgcctgggccagaggatccaggcccaggagggggacttccccatgcccttcatcagcgccaagagcagccctgtgatccccctggatggctctgtgaagatccagtgccaggccatccgggaggcctacctgacccagctgatgatcatcaagaacagcacctaccgggagattggaagaaggctgaagttctggaatgaaacagatcctgagtttgtgattgaccacatggatgccaacaaggccggccgctaccagtgccagtaccgcatcggccactaccgcttccgctacagcgacaccctggagctggtggtgacagacagcatccaccaggactacaccacccagaacctgatccgcatggctgtggccggcctggtgctggtggccctgctggccatcctggtggagaactggcacagccacacagccctgaacaaggaggccagcgcagatgtggccgagcccagctggagccagcagatgtgccagcccggcctgacctttgcccggacccccagcgtgtgcaagtag

SEQ ID NO: 234631 - DNA, 576 bp, Artificial Sequence
  derived and/or modified sequence
atggaccccaagcagaccaccctgctgtgcctggtgctgtgcctgggccagcggatccaggcacaggagggagacttccctatgccattcatctcagccaaaagcagccccgttatccctctcgatgggtccgtcaagatacagtgtcaagcaatacgagaagcctacctaacgcagctcatgatcatcaagaatagcacatatcgagaaattggcaggcgcctcaaattttggaacgagactgatcctgaatttgtgatcgaccatatggacgccaacaaggccggacgataccagtgtcagtatcgcattgggcattaccgtttcaggtattccgataccctcgagctcgttgtgactgactctattcaccaggactacacaactcagaatctgataaggatggctgtcgccggccttgtgctggtggcgctactcgcaatcctggtcgagaattggcattcacacaccgcccttaacaaggaggcttccgctgacgtagccgaacccagttggtcccagcagatgtgtcagccagggttgacattcgcacgcacccccagcgtgtgtaaatag

SEQ ID NO: 234632 - DNA, 576 bp, Artificial Sequence
  derived and/or modified sequence
atggaccctaagcaaactaccttgctttgcttagtgctgtgccttgggcagcgaattcaggcccaagagggggacttcccgatgcccttcataagtgccaaatctagccctgtcattccactagacggcagcgtaaagattcagtgccaggccattcgcgaagcctaccttactcagttgatgatcatcaaaaactcgacttatagggagattggtcggcgactgaagttttggaacgagacagatcctgaatttgttattgatcatatggatgcaaacaaagctggcaggtatcaatgtcagtatagaattgggcattaccgctttcggtactctgataccttagagctcgtggtgacagactcaatccaccaagattacactacacaaaatctcatccgcatggctgtggctgggcttgttctggtagctctgctggcaatattggtggaaaactggcatagtcataccgccctaaataaagaggcttctgccgatgtcgctgaaccatcctggtcacaacaaatgtgccagcccggattgactttcgccaggactccatcagtctgtaagtag

SEQ ID NO: 234633 - DNA, 576 bp, Artificial Sequence
  derived and/or modified sequence
atggaccccaagcagaccaccctgctgtgcctggtgctgtgcctgggccagagaatccaggcccaggagggcgacttccccatgcccttcatcagcgccaagagcagccccgtgatccccctggacggcagcgtgaagatccagtgccaggccatcagagaggcctacctgacccagctgatgatcatcaagaacagcacctacagagagatcggcagaagactgaagttctggaacgagaccgaccccgagttcgtgatcgaccacatggacgccaacaaggccggcagataccagtgccagtacagaatcggccactacagattcagatacagcgacaccctggagctggtggtgaccgacagcatccaccaggactacaccacccagaacctgatcagaatggccgtggccggcctggtgctggtggccctgctggccatcctggtggagaactggcacagccacaccgccctgaacaaggaggccagcgccgacgtggccgagcccagctggagccagcagatgtgccagcccggcctgaccttcgccagaacccccagcgtgtgcaagtag

SEQ ID NO: 234634 - protein, 275 aa, Artificial Sequence
  derived and/or modified sequence
MDPKQTTLLCLGDFPMPFISAKSSPVIPLDGSVKIQCQAIREAYLTQLMIIKNSTYREIGRRLKFWNETDPEFVIDHMDANKAGRYQCQYRIGHYRFRYSDTLELVVTGLYGKPFLSADRGLVLMPGENISLTCSSAHIPFDRFSLAKEGELSLPQHQSGEHPANFSLGPVDLNVSGIYRCYGWYNRSPYLWSFPSNALELVVTDSIHQDYTTQNLIRMAVAGLVLVALLAILVENWHSHTALNKEASADVAEPSWSQQMCQPGLTFARTPSVCK

SEQ ID NO: 234635 - DNA, 828 bp, Artificial Sequence
  derived and/or modified sequence
atggaccccaaacagaccaccctcctgtgtcttggggactttcccatgcctttcatatctgccaaatcgagtcctgtgattcccttggatggatctgtgaaaatccagtgccaggccattcgtgaagcttacctgacccagctgatgatcataaaaaactccacgtaccgagagataggcagaagactgaagttttggaatgagactgatcctgagttcgtcattgaccacatggacgcaaacaaggcagggcgctatcagtgccaatataggatagggcactacagattccggtacagtgacaccctggagctggtagtgacaggcttgtatggcaaacccttcctctctgcagatcggggtctggtgttgatgccaggagagaatatttccctcacgtgcagctcagcacacatcccatttgatagattttcactggccaaggagggagaactttctctgccacagcaccaaagtggggaacacccggccaacttctctttgggtcctgtggacctcaatgtctcagggatctacaggtgctacggttggtacaacaggagcccctacctgtggtccttccccagtaatgccttggagcttgtggtcacagactccatccaccaagattacacgacgcagaacttgatccgcatggccgtggcaggactggtcctcgtggctctcttggccatactggttgaaaattggcacagccatacggcactgaacaaggaagcctcggcagatgtggctgaaccgagctggagccaacagatgtgtcagccaggattgacctttgcacgaacaccaagtgtctgcaagtaa

SEQ ID NO: 234636 - DNA, 828 bp, Artificial Sequence
  derived and/or modified sequence
atggaccccaagcagactaccttgctgtgcctgggagactttcctatgccattcatttctgctaagtcctctcccgtgattcccttagatggttccgtgaaaattcagtgccaggccatccgcgaggcttatctgacgcaattgatgatcattaaaaattcaacctatcgggagatcggtcgaaggctcaagttttggaatgagacggatcccgaatttgttatcgatcatatggacgcaaataaggcaggacgctaccaatgccagtataggatcggacattataggttcagatatagcgatacgttggaattggtggtcaccggtctgtatggcaaacccttcctgagcgctgatcgcggcctcgtcctgatgcctggcgaaaatatctcccttacttgtagctccgcccatatccccttcgatcgcttttcgctagccaaggagggcgagctgagtttacctcaacatcagtctggggagcaccccgccaacttttctctgggcccagtggacctgaacgtcagcggcatatacaggtgctatgggtggtacaatcggagtccttatctgtggtcgttcccgagcaatgcactggaattagtggtcacagactcaatccaccaggactacaccacccaaaatctgattaggatggcagtggcagggttagtccttgtggctctactggccatactggtggagaattggcattcccacactgcccttaacaaggaggcctctgctgacgtagctgagccctcttggagccagcagatgtgtcagccaggtttaactttcgctcgaaccccatccgtatgcaaatag

SEQ ID NO: 234637 - DNA, 828 bp, Artificial Sequence
  derived and/or modified sequence
atggaccccaagcagaccaccctgctgtgcctgggggacttccccatgcccttcatcagcgccaagagcagccctgtgatccccctggatggctctgtgaagatccagtgccaggccatccgggaggcctacctgacccagctgatgatcatcaagaacagcacctaccgggagattggaagaaggctgaagttctggaatgaaacagatcctgagtttgtgattgaccacatggatgccaacaaggccggccgctaccagtgccagtaccgcatcggccactaccgcttccgctacagcgacaccctggagctggtggtgacaggcctgtatggcaagcccttcctgtctgctgaccggggcctggtgctgatgcctggagagaacatcagcctgacctgcagcagcgcccacatcccctttgaccgcttcagcctggccaaggagggggagctgagcctgccccagcaccagagcggggagcacccagccaacttcagcctgggccctgtggacctgaatgtgtctggcatctaccgctgctacggctggtacaacagaagcccctacctgtggagcttccccagcaatgccctggagctggtggtgacagacagcatccaccaggactacaccacccagaacctgatccgcatggctgtggccggcctggtgctggtggccctgctggccatcctggtggagaactggcacagccacacagccctgaacaaggaggccagcgcagatgtggccgagcccagctggagccagcagatgtgccagcccggcctgacctttgcccggacccccagcgtgtgcaagtag

SEQ ID NO: 234638 - DNA, 828 bp, Artificial Sequence
  derived and/or modified sequence
atggaccccaagcagaccaccctgctgtgcctgggcgacttccccatgccatttatcagcgccaagtcttccccggtgatacctttggacgggtctgtcaagatccaatgtcaagccattagggaagcataccttactcagttgatgattattaaaaacagtacttatcgagagattggacggcggctaaagttttggaacgaaaccgatccagagttcgtgattgaccacatggatgcaaacaaggcaggaaggtatcagtgccagtaccgcataggtcactaccgatttcggtattcagatacactcgagctcgttgtgacgggcctctatggtaaaccatttctctctgccgaccgcgggcttgtgctgatgcccggagagaacatttctctgacatgtagctcagcacatattccctttgaccgctttagcctggccaaagagggggagctcagcctgccacaacatcagagcggcgaacacccagccaatttctccctggggcccgtcgacctgaacgtctcaggcatttacagatgttacggatggtacaaccgcagcccatatttatggagcttcccatccaatgctctggagctcgtagttaccgactccattcatcaggattacactacccagaatctgatccgaatggcggtggcaggcctagtgctagtagctctactggctattcttgtggagaattggcatagtcacacagctctgaacaaggaggccagcgcagatgtagccgagccttcatggtctcaacagatgtgccagccaggtctgacctttgcgcggactccctccgtgtgcaagtag

SEQ ID NO: 234639 - DNA, 828 bp, Artificial Sequence
  derived and/or modified sequence
atggatcccaagcaaaccaccctgctctgtttaggcgactttcccatgcccttcatctcagcaaaatctagcccagttatccccttagatggttctgttaaaattcagtgtcaggccatccgggaggcatacctcacccagctgatgattatcaaaaacagtacatatcgcgagattgggagacgattgaaattctggaacgaaacagatcctgagttcgtcatcgaccatatggacgccaataaggcaggtcgctaccaatgccagtacaggatcggacactatcgattccggtattctgatacacttgagctcgtggtgaccggcctctatgggaagccattcctgtcggcagataggggactggttctcatgcctggggagaacatttccctgacctgctctagtgcgcatattcccttcgataggttttcgctcgcaaaagaaggcgagttgtctcttcctcagcaccaatcgggggagcaccccgctaactttagtttaggaccggtggaccttaacgtgagcggcatctaccggtgttacggctggtacaacaggagtccatatttgtggagcttcccaagcaacgcactggagttggtggtgaccgattccatccatcaagattacacaacacagaacctgattcgcatggccgttgcgggactcgtgctggtggccctgctcgcaatcctggtggagaactggcatagtcacacggcgctaaacaaggaagcgagcgctgatgtggctgaacccagctggtctcagcagatgtgccaaccaggcctgactttcgccaggacacctagcgtttgcaaatag

SEQ ID NO: 234640 - DNA, 828 bp, Artificial Sequence
  derived and/or modified sequence
atggaccccaagcagaccaccctgctgtgcctgggcgacttccccatgcccttcatcagcgccaagagcagccccgtgatccccctggacggcagcgtgaagatccagtgccaggccatcagagaggcctacctgacccagctgatgatcatcaagaacagcacctacagagagatcggcagaagactgaagttctggaacgagaccgaccccgagttcgtgatcgaccacatggacgccaacaaggccggcagataccagtgccagtacagaatcggccactacagattcagatacagcgacaccctggagctggtggtgaccggcctgtacggcaagcccttcctgagcgccgacagaggcctggtgctgatgcccggcgagaacatcagcctgacctgcagcagcgcccacatccccttcgacagattcagcctggccaaggagggcgagctgagcctgccccagcaccagagcggcgagcaccccgccaacttcagcctgggccccgtggacctgaacgtgagcggcatctacagatgctacggctggtacaacagaagcccctacctgtggagcttccccagcaacgccctggagctggtggtgaccgacagcatccaccaggactacaccacccagaacctgatcagaatggccgtggccggcctggtgctggtggccctgctggccatcctggtggagaactggcacagccacaccgccctgaacaaggaggccagcgccgacgtggccgagcccagctggagccagcagatgtgccagcccggcctgaccttcgccagaacccccagcgtgtgcaagtag

SEQ ID NO: 234641 - protein, 179 aa, Artificial Sequence
  derived and/or modified sequence
MDPKQTTLLCLGDFPMPFISAKSSPVIPLDGSVKIQCQAIREAYLTQLMIIKNSTYREIGRRLKFWNETDPEFVIDHMDANKAGRYQCQYRIGHYRFRYSDTLELVVTDSIHQDYTTQNLIRMAVAGLVLVALLAILVENWHSHTALNKEASADVAEPSWSQQMCQPGLTFARTPSVCK

SEQ ID NO: 234642 - DNA, 609 bp, Artificial Sequence
  derived and/or modified sequence
gcattgaaaggagagcaacggggctgaggccgtgtcagcacgatggaccccaaacagaccaccctcctgtgtcttggggactttcccatgcctttcatatctgccaaatcgagtcctgtgattcccttggatggatctgtgaaaatccagtgccaggccattcgtgaagcttacctgacccagctgatgatcataaaaaactccacgtaccgagagataggcagaagactgaagttttggaatgagactgatcctgagttcgtcattgaccacatggacgcaaacaaggcagggcgctatcagtgccaatataggatagggcactacagattccggtacagtgacaccctggagctggtagtgacagactccatccaccaagattacacgacgcagaacttgatccgcatggccgtggcaggactggtcctcgtggctctcttggccatactggttgaaaattggcacagccatacggcactgaacaaggaagcctcggcagatgtggctgaaccgagctggagccaacagatgtgtcagccaggattgacctttgcacgaacaccaagtgtctgcaagtaaacacctggaggtgaaggcagagaggag

SEQ ID NO: 234643 - DNA, 540 bp, Artificial Sequence
  derived and/or modified sequence
atggacccaaagcagaccacgctgctgtgcttgggtgactttccaatgcctttcatttctgcaaaaagctccccagtgattcctctggacggatctgtcaagattcagtgccaggcgatcagagaagcctatctcacccagcttatgatcataaagaatagtacctatcgggagattggtcggagactcaaattctggaatgagactgaccccgaatttgtaattgatcacatggatgctaataaggccggccgctatcagtgtcagtaccggataggtcattacaggtttcgatattccgacacactggagctggtggtgacggatagcatccaccaagactacaccactcaaaacctgattaggatggctgtggctggcttggtgctggttgctctgctcgccattttagtggaaaactggcacagtcacacagcgctaaataaggaagctagtgctgacgtggcagagcctagttggtcccaacaaatgtgccaacccgggctgacctttgcacgaacaccatctgtgtgcaagtag

SEQ ID NO: 234644 - DNA, 540 bp, Artificial Sequence
  derived and/or modified sequence
atggaccccaagcagaccaccctgctgtgcctgggggacttccccatgcccttcatcagcgccaagagcagccctgtgatccccctggatggctctgtgaagatccagtgccaggccatccgggaggcctacctgacccagctgatgatcatcaagaacagcacctaccgggagattggaagaaggctgaagttctggaatgaaacagatcctgagtttgtgattgaccacatggatgccaacaaggccggccgctaccagtgccagtaccgcatcggccactaccgcttccgctacagcgacaccctggagctggtggtgacagacagcatccaccaggactacaccacccagaacctgatccgcatggctgtggccggcctggtgctggtggccctgctggccatcctggtggagaactggcacagccacacagccctgaacaaggaggccagcgcagatgtggccgagcccagctggagccagcagatgtgccagcccggcctgacctttgcccggacccccagcgtgtgcaagtag

SEQ ID NO: 234645 - DNA, 540 bp, Artificial Sequence
  derived and/or modified sequence
atggaccccaagcagaccaccctgctgtgcctgggcgacttccccatgccctttataagcgcaaaatcctcgcctgtgatcccactggatggctccgttaagatccaatgccaagctatcagagaggcatatctcacacagttaatgatcataaaaaacagcacctaccgggagatcgggaggcggctcaaattttggaacgagaccgatccagagtttgtgattgaccatatggatgccaacaaggccgggcgctaccagtgtcaataccgtattggccattaccggtttaggtactcagatacattggagcttgtggtcactgattcaatccatcaagattacacaacccagaatctgattaggatggccgtcgcgggtctggtcttggtggctctgcttgccatccttgtggaaaattggcacagtcacacggctctgaataaggaagcaagtgccgatgtcgcagagccttcctggtcacagcagatgtgccagcccgggctcacctttgcaagaaccccttctgtgtgcaaatag

SEQ ID NO: 234646 - DNA, 540 bp, Artificial Sequence
  derived and/or modified sequence
atggaccccaagcaaactaccctcctgtgcttaggagactttcccatgccctttatatctgctaagtcttccccggtaataccgttggacggctccgttaagattcaatgccaggctatccgggaagcctacttgactcagctcatgattattaaaaactcaacttatcgggaaataggtcggcgtctaaaattctggaatgagaccgaccctgaatttgtcattgatcacatggacgcgaataaggctggcaggtaccagtgtcagtataggatcggccactatagattcagatattcagacaccctggaactcgtagtcacagactcaatccatcaggattacaccactcagaacctgatccgaatggcggtggcaggtctcgtgctggtagctttattggctattctcgtggagaactggcacagccacaccgccctcaataaggaagcaagtgcagacgtcgcagaaccctcttggtcccagcagatgtgccagccgggactcaccttcgcccgaaccccctccgtatgcaagtag

SEQ ID NO: 234647 - DNA, 540 bp, Artificial Sequence
  derived and/or modified sequence
atggaccccaagcagaccaccctgctgtgcctgggcgacttccccatgcccttcatcagcgccaagagcagccccgtgatccccctggacggcagcgtgaagatccagtgccaggccatcagagaggcctacctgacccagctgatgatcatcaagaacagcacctacagagagatcggcagaagactgaagttctggaacgagaccgaccccgagttcgtgatcgaccacatggacgccaacaaggccggcagataccagtgccagtacagaatcggccactacagattcagatacagcgacaccctggagctggtggtgaccgacagcatccaccaggactacaccacccagaacctgatcagaatggccgtggccggcctggtgctggtggccctgctggccatcctggtggagaactggcacagccacaccgccctgaacaaggaggccagcgccgacgtggccgagcccagctggagccagcagatgtgccagcccggcctgaccttcgccagaacccccagcgtgtgcaagtag

SEQ ID NO: 234648 - protein, 209 aa, Artificial Sequence
  derived and/or modified sequence
MDPKQTTLLCLGDFPMPFISAKSSPVIPLDGSVKIQCQAIREAYLTQLMIIKNSTYREIGRRLKFWNETDPEFVIDHMDANKAGRYQCQYRIGHYRFRYSDTLELVVTGLYGKPFLSADRGLVLMPGENISLTCSSAHIPFDRFSLAKEGELSLPQHQSGEHPANFSLGPVDLNVSGIYRLHPPRLHDAELDPHGRGRTGPRGSLGHTG

SEQ ID NO: 234649 - DNA, 754 bp, Artificial Sequence
  derived and/or modified sequence
atggaccccaaacagaccaccctcctgtgtcttggggactttcccatgcctttcatatctgccaaatcgagtcctgtgattcccttggatggatctgtgaaaatccagtgccaggccattcgtgaagcttacctgacccagctgatgatcataaaaaactccacgtaccgagagataggcagaagactgaagttttggaatgagactgatcctgagttcgtcattgaccacatggacgcaaacaaggcagggcgctatcagtgccaatataggatagggcactacagattccggtacagtgacaccctggagctggtagtgacaggcttgtatggcaaacccttcctctctgcagatcggggtctggtgttgatgccaggagagaatatttccctcacgtgcagctcagcacacatcccatttgatagattttcactggccaaggagggagaactttctctgccacagcaccaaagtggggaacacccggccaacttctctttgggtcctgtggacctcaatgtctcagggatctacagactccatccaccaagattacacgacgcagaacttgatccgcatggccgtggcaggactggtcctcgtggctctcttggccatactggttgaaaattggcacagccatacggcactgaacaaggaagcctcggcagatgtggctgaaccgagctggagccaacagatgtgtcagccaggattgacctttgcacgaacaccaagtgtctgcaagtaa

SEQ ID NO: 234650 - DNA, 630 bp, Artificial Sequence
  derived and/or modified sequence
atggaccctaaacagaccacgctgctgtgtctgggggacttccctatgccctttatctcagccaaatcttcgcccgtcattcccctggacggctcagttaagatccaatgccaggcaatccgagaggcctacctcacccagctgatgattatcaagaattccacctaccgagagattgggcggcgcttaaaattctggaatgaaactgatccggagtttgttatcgaccacatggatgcaaataaagcggggaggtaccaatgtcagtatcgaatcggccattacaggtttagatactccgacaccctggagttagtggtgaccggtctctatggaaaacccttcttgagtgccgacaggggcctggtgctgatgcccggcgaaaacataagccttacctgcagcagtgcccacattccgttcgacagattctcactcgctaaggagggggagctctcactccctcagcaccagagcggagagcaccctgccaacttttctctggggcccgtggatcttaacgtgagcggtatctaccggctgcaccccccacgactgcacgatgccgaactcgacccgcatggccgaggcagaaccggtcccaggggatctctgggccatacaggttag

SEQ ID NO: 234651 - DNA, 630 bp, Artificial Sequence
  derived and/or modified sequence
atggaccccaagcagaccaccctgctgtgcctgggggacttccccatgcccttcatcagcgccaagagcagccctgtgatccccctggatggctctgtgaagatccagtgccaggccatccgggaggcctacctgacccagctgatgatcatcaagaacagcacctaccgggagattggaagaaggctgaagttctggaatgaaacagatcctgagtttgtgattgaccacatggatgccaacaaggccggccgctaccagtgccagtaccgcatcggccactaccgcttccgctacagcgacaccctggagctggtggtgacaggcctgtatggcaagcccttcctgtctgctgaccggggcctggtgctgatgcctggagagaacatcagcctgacctgcagcagcgcccacatcccctttgaccgcttcagcctggccaaggagggggagctgagcctgccccagcaccagagcggggagcacccagccaacttcagcctgggccctgtggacctgaatgtgtctggcatctaccgcctgcaccccccccggctgcatgatgctgagctggacccccacggccggggccgcacaggcccccggggcagcctgggccacactggatag

SEQ ID NO: 234652 - DNA, 630 bp, Artificial Sequence
  derived and/or modified sequence
atggaccccaagcagaccaccctgctgtgcctgggcgacttccccatgcccttcatctccgcaaagagctcccctgtcatcccacttgacggatccgtgaagatacaatgtcaggcaatccgcgaggcctatctgacacagctgatgatcattaagaattctacatatagagaaatcggtcggaggttgaagttttggaacgaaaccgaccccgagttcgtaatcgatcacatggacgctaataaagctgggaggtatcagtgtcagtatcgcattggacactaccggttcaggtattcggacacactggaactggtagtgaccggtctgtatggcaaaccctttctatctgcagaccgaggtctggtgctgatgcctggggaaaatatctcccttacctgtagcagtgcccacattcccttcgaccgattctccttggcaaaggagggagaactctccctgcctcagcaccaaagcggagagcacccagcaaacttttccctaggccctgttgacttgaacgtctcaggtatctatagactccacccgccccgactccacgatgccgagctcgaccctcacgggaggggaagaaccgggcctagaggatcactggggcatacagggtag

SEQ ID NO: 234653 - DNA, 630 bp, Artificial Sequence
  derived and/or modified sequence
atggatcccaagcagaccactctcctatgcctgggtgacttcccgatgcctttcatttctgctaagagcagtcctgttattccgttggacggctcagttaaaatccaatgccaagctatacgagaagcctatcttacccagctcatgatcatcaagaattccacctaccgagaaatcggcaggcggctgaagttttggaacgagactgatcccgaattcgtcattgaccacatggacgccaataaagcaggacgctatcagtgccagtacagaataggccattacaggttccggtactcagacacactggagctcgtcgtcactggcttgtatggcaaaccattcctgagcgcggatcgtggtcttgtattaatgccaggggagaacatcagcttaacatgcagcagtgctcacatccctttcgacagatttagtcttgccaaggagggagaactcagcctccctcagcaccagtccggggagcatccagcaaacttcagtctcgggcctgtggatctgaatgtctctgggatttacaggttgcatccccctcggcttcacgacgccgagttagacccgcacgggaggggcagaacgggaccgagaggctcgctgggacataccggctag

SEQ ID NO: 234654 - DNA, 630 bp, Artificial Sequence
  derived and/or modified sequence
atggaccccaagcagaccaccctgctgtgcctgggcgacttccccatgcccttcatcagcgccaagagcagccccgtgatccccctggacggcagcgtgaagatccagtgccaggccatcagagaggcctacctgacccagctgatgatcatcaagaacagcacctacagagagatcggcagaagactgaagttctggaacgagaccgaccccgagttcgtgatcgaccacatggacgccaacaaggccggcagataccagtgccagtacagaatcggccactacagattcagatacagcgacaccctggagctggtggtgaccggcctgtacggcaagcccttcctgagcgccgacagaggcctggtgctgatgcccggcgagaacatcagcctgacctgcagcagcgcccacatccccttcgacagattcagcctggccaaggagggcgagctgagcctgccccagcaccagagcggcgagcaccccgccaacttcagcctgggccccgtggacctgaacgtgagcggcatctacagactgcacccccccagactgcacgacgccgagctggacccccacggcagaggcagaaccggccccagaggcagcctgggccacaccggctag

SEQ ID NO: 234655 - protein, 178 aa, Artificial Sequence
  derived and/or modified sequence
MDPKQTTLLCLGLYGKPFLSADRGLVLMPGENISLTCSSAHIPFDRFSLAKEGELSLPQHQSGEHPANFSLGPVDLNVSGIYRCYGWYNRSPYLWSFPSNALELVVTDSIHQDYTTQNLIRMAVAGLVLVALLAILVENWHSHTALNKEASADVAEPSWSQQMCQPGLTFARTPSVCK

SEQ ID NO: 234656 - DNA, 537 bp, Artificial Sequence
  derived and/or modified sequence
atggaccccaaacagaccaccctcctgtgtcttggcttgtatggcaaacccttcctctctgcagatcggggtctggtgttgatgccaggagagaatatttccctcacgtgcagctcagcacacatcccatttgatagattttcactggccaaggagggagaactttctctgccacagcaccaaagtggggaacacccggccaacttctctttgggtcctgtggacctcaatgtctcagggatctacaggtgctacggttggtacaacaggagcccctacctgtggtccttccccagtaatgccttggagcttgtggtcacagactccatccaccaagattacacgacgcagaacttgatccgcatggccgtggcaggactggtcctcgtggctctcttggccatactggttgaaaattggcacagccatacggcactgaacaaggaagcctcggcagatgtggctgaaccgagctggagccaacagatgtgtcagccaggattgacctttgcacgaacaccaagtgtctgcaagtaa

SEQ ID NO: 234657 - DNA, 537 bp, Artificial Sequence
  derived and/or modified sequence
atggaccccaagcagacgactctattgtgcctaggcttatacggcaaaccctttctgagtgccgatcgtggattagttctgatgcctggggaaaacatttctcttacatgctccagcgcacacataccttttgatcggttctccttggccaaagagggggagctgagtcttccacagcaccagtctggcgaacatccagccaacttttctctgggtccagtggacttaaatgtctccggcatatataggtgctatggctggtataacaggtccccttatctttggagcttcccctcaaacgcactcgaactggtggttacagacagcatacatcaagattacaccacccagaacctgatccgcatggctgtggcaggtctggtgctggttgcactgctcgccatactcgtcgagaactggcattcacacaccgcacttaacaaggaggccagcgcggacgtggccgagccctcctggagccagcagatgtgccagccaggccttacgtttgcaaggacaccgtcggtctgcaagtag

SEQ ID NO: 234658 - DNA, 537 bp, Artificial Sequence
  derived and/or modified sequence
atggaccccaagcagaccaccctgctgtgcctgggcctgtatggcaagcccttcctgtctgctgaccggggcctggtgctgatgcctggagagaacatcagcctgacctgcagcagcgcccacatcccctttgaccgcttcagcctggccaaggagggggagctgagcctgccccagcaccagagcggggagcacccagccaacttcagcctgggccctgtggacctgaatgtgtctggcatctaccgctgctacggctggtacaacagaagcccctacctgtggagcttccccagcaatgccctggagctggtggtgacagacagcatccaccaggactacaccacccagaacctgatccgcatggctgtggccggcctggtgctggtggccctgctggccatcctggtggagaactggcacagccacacagccctgaacaaggaggccagcgcagatgtggccgagcccagctggagccagcagatgtgccagcccggcctgacctttgcccggaccccatctgtgtgcaagtag

SEQ ID NO: 234659 - DNA, 537 bp, Artificial Sequence
  derived and/or modified sequence
atggaccccaagcagaccaccctgctgtgcctgggcctgtacggcaagccttttctctcggccgaccggggcctggttttgatgcctggggaaaacataagtctcacctgcagcagcgcacacattccttttgatcgcttctcccttgctaaggagggggagctcagccttccccagcaccagtcaggggaacatcctgccaatttctcccttggacctgtagatttaaatgtgtcaggcatctacaggtgctacggatggtacaatagaagcccttatctatggagttttccatccaacgcgctggaattggtcgtgaccgacagtattcaccaggattacactacccagaacctgataaggatggcagtcgccggtcttgtgctggttgctcttctggcgatcctggttgaaaattggcactcccataccgctctgaacaaggaggccagcgcagatgtcgctgagccatcctggagtcagcaaatgtgtcagccggggttgaccttcgctcgcactcctagtgtgtgtaagtag

SEQ ID NO: 234660 - DNA, 537 bp, Artificial Sequence
  derived and/or modified sequence
atggatcccaaacaaactactctgctgtgtttgggtctctatggcaaaccattcctctcggccgacagggggctggtgctgatgcccggtgaaaacatctcgctgacgtgtagctccgcacacattcctttcgacagattttctttggcaaaggaaggggaacttagccttccacagcaccaatctggtgagcacccagccaatttttcgctgggcccagttgatcttaatgtgagcggtatttacagatgctacggctggtacaacagaagcccctacctttggtccttcccatcaaatgctctggagctcgtggtgacggattctatccatcaggactacaccacacagaatctgatcaggatggcagtggctggtcttgtcctcgtggccttgctggcaatcctagtggagaactggcacagccacaccgcactcaacaaagaagctagcgcagatgtggcggaaccatcgtggagccagcagatgtgccagccaggcttaacctttgcccgtacaccaagtgtttgcaagtag

SEQ ID NO: 234661 - DNA, 537 bp, Artificial Sequence
  derived and/or modified sequence
atggaccccaagcagaccaccctgctgtgcctgggcctgtacggcaagcccttcctgagcgccgacagaggcctggtgctgatgcccggcgagaacatcagcctgacctgcagcagcgcccacatccccttcgacagattcagcctggccaaggagggcgagctgagcctgccccagcaccagagcggcgagcaccccgccaacttcagcctgggccccgtggacctgaacgtgagcggcatctacagatgctacggctggtacaacagaagcccctacctgtggagcttccccagcaacgccctggagctggtggtgaccgacagcatccaccaggactacaccacccagaacctgatcagaatggccgtggccggcctggtgctggtggccctgctggccatcctggtggagaactggcacagccacaccgccctgaacaaggaggccagcgccgacgtggccgagcccagctggagccagcagatgtgccagcccggcctgaccttcgccagaacccccagcgtgtgcaagtag

SEQ ID NO: 234662 - protein, 253 aa, Artificial Sequence
  derived and/or modified sequence
MDPKQTTLLCLGDFPMPFISAKSSPVIPLDGSVKIQCQAIREAYLTQLMIIKNSTYREIGRRLKFWNETDPEFVIDHMDANKAGRYQCQYRIGHYRFRYSDTLELVVTGLYGKPFLSADRGLVLMPGENISLTCSSAHIPFDRFSLAKEGELSLPQHQSGEHPANFSLGPVDLNVSGIYRCYDSIHQDYTTQNLIRMAVAGLVLVALLAILVENWHSHTALNKEASADVAEPSWSQQMCQPGLTFARTPSVCK

SEQ ID NO: 234663 - DNA, 762 bp, Artificial Sequence
  derived and/or modified sequence
atggaccccaaacagaccaccctcctgtgtcttggggactttcccatgcctttcatatctgccaaatcgagtcctgtgattcccttggatggatctgtgaaaatccagtgccaggccattcgtgaagcttacctgacccagctgatgatcataaaaaactccacgtaccgagagataggcagaagactgaagttttggaatgagactgatcctgagttcgtcattgaccacatggacgcaaacaaggcagggcgctatcagtgccaatataggatagggcactacagattccggtacagtgacaccctggagctggtagtgacaggcttgtatggcaaacccttcctctctgcagatcggggtctggtgttgatgccaggagagaatatttccctcacgtgcagctcagcacacatcccatttgatagattttcactggccaaggagggagaactttctctgccacagcaccaaagtggggaacacccggccaacttctctttgggtcctgtggacctcaatgtctcagggatctacaggtgctacgactccatccaccaagattacacgacgcagaacttgatccgcatggccgtggcaggactggtcctcgtggctctcttggccatactggttgaaaattggcacagccatacggcactgaacaaggaagcctcggcagatgtggctgaaccgagctggagccaacagatgtgtcagccaggattgacctttgcacgaacaccaagtgtctgcaagtaa

SEQ ID NO: 234664 - DNA, 762 bp, Artificial Sequence
  derived and/or modified sequence
atggatcccaagcagacaaccctgttgtgtctcggcgattttcctatgccattcatttctgccaagtctagtccggttattcctctggatgggtcagtcaagatacaatgccaggcgataagggaggcctatcttacccagctcatgatcatcaagaacagcacatatagagagatcggccggagattgaaattttggaatgagactgaccccgaattcgtcattgaccatatggatgcgaataaggcaggaaggtaccaatgccagtatcggatcggccattataggtttagatactccgacacactcgagctggtcgttaccgggttatacggtaaaccctttctttctgcggatcgagggctcgtgttgatgcctggcgagaacatcagtttgacttgttccagcgcccatatccctttcgataggttctcgctggctaaagaaggggagctcagcctcccccaacatcagagcggggagcatcccgccaatttttctctaggacccgttgacctcaatgtgagcggcatttatcgctgctatgactccatccatcaggattataccacacaaaacctgatcaggatggccgtggccggcctcgtgctggtcgctctgttagccatcctggtcgagaactggcacagtcacacggcactgaataaagaggcctcagccgacgttgccgagccgtcgtggtcccagcagatgtgtcagcccgggctgactttcgctcgtaccccttctgtgtgtaagtag

SEQ ID NO: 234665 - DNA, 762 bp, Artificial Sequence
  derived and/or modified sequence
atggaccccaagcagaccaccctgctgtgcctgggggacttccccatgcccttcatcagcgccaagagcagccctgtgatccccctggatggctctgtgaagatccagtgccaggccatccgggaggcctacctgacccagctgatgatcatcaagaacagcacctaccgggagattggaagaaggctgaagttctggaatgaaacagatcctgagtttgtgattgaccacatggatgccaacaaggccggccgctaccagtgccagtaccgcatcggccactaccgcttccgctacagcgacaccctggagctggtggtgacaggcctgtatggcaagcccttcctgtctgctgaccggggcctggtgctgatgcctggagagaacatcagcctgacctgcagcagcgcccacatcccctttgaccgcttcagcctggccaaggagggggagctgagcctgccccagcaccagagcggggagcacccagccaacttcagcctgggccctgtggacctgaatgtgtctggcatctaccgctgctatgacagcatccaccaggactacaccacccagaacctgatccgcatggctgtggccggcctggtgctggtggccctgctggccatcctggtggagaactggcacagccacacagccctgaacaaggaggccagcgcagatgtggccgagcccagctggagccagcagatgtgccagcccggcctgacctttgcccggacccccagcgtgtgcaagtag

SEQ ID NO: 234666 - DNA, 762 bp, Artificial Sequence
  derived and/or modified sequence
atggaccccaagcagaccaccctgctgtgcctgggcgacttccccatgccttttataagcgccaagtccagtcctgtgattcccctcgatggctctgtcaagattcagtgtcaggcaattcgcgaggcttatctaacacagttaatgataatcaagaacagcacctacagagaaattgggagacgactcaagttttggaacgagactgaccctgaatttgtgatcgatcatatggacgctaataaggcggggaggtaccagtgtcaatatagaattggacactacagattccgctacagtgacaccttggagttggtggtgactggcctgtatggaaagcccttcctctccgccgatagaggcctggtgctcatgccgggcgagaacatcagcctgacttgtagcagtgcccatatcccttttgatagattttccctggcgaaagaaggggagctttcgttacctcagcatcagtctggcgagcatcccgccaacttcagcctgggccctgtggatttgaacgtgtcaggtatttacaggtgttacgacagtatccatcaggactatacaactcagaacctgatacgcatggctgtggccgggttagtcctggtggcacttctggcgatcctggtggagaactggcattctcacacagctcttaacaaggaagctagcgctgatgtggcagagcctagctggtcccaacagatgtgccagcctgggttgacattcgccagaacaccttccgtgtgcaagtag

SEQ ID NO: 234667 - DNA, 762 bp, Artificial Sequence
  derived and/or modified sequence
atggatcccaaacaaactactctgctgtgcctgggcgactttccaatgccatttattagtgctaagagcagcccagtgatcccacttgacggatctgttaaaattcagtgtcaggccattcgggaggcatatctgacccagctgatgatcatcaagaattccacctaccgcgaaatcgggcgtcgcttgaagttctggaacgagactgatccagagttcgtaattgaccatatggatgctaataaagctggcagataccaatgccagtacagaatcggccactacagattcaggtactccgatacactggaactcgtggtgacaggcctatacggcaaacccttcctgtcagcagaccggggattagtcctgatgccgggtgagaacataagcttgacttgttcatctgcgcatattcctttcgatcgcttttccctcgcaaaggagggggaattgtcactgcctcaacatcaatcaggagagcatccagcaaacttctccctagggccagtggatcttaacgtgtcaggcatctatcggtgttacgactccatccaccaggactacacaactcaaaatctgatcaggatggctgtggccggtctggtgttagtggcactgctcgccattctggtagagaattggcacagccacactgcactaaacaaagaggcctccgcagacgtagccgagccttcctggagccagcagatgtgccaacctgggctgaccttcgccagaacacctagcgtatgtaaatag

SEQ ID NO: 234668 - DNA, 762 bp, Artificial Sequence
  derived and/or modified sequence
atggaccccaagcagaccaccctgctgtgcctgggcgacttccccatgcccttcatcagcgccaagagcagccccgtgatccccctggacggcagcgtgaagatccagtgccaggccatcagagaggcctacctgacccagctgatgatcatcaagaacagcacctacagagagatcggcagaagactgaagttctggaacgagaccgaccccgagttcgtgatcgaccacatggacgccaacaaggccggcagataccagtgccagtacagaatcggccactacagattcagatacagcgacaccctggagctggtggtgaccggcctgtacggcaagcccttcctgagcgccgacagaggcctggtgctgatgcccggcgagaacatcagcctgacctgcagcagcgcccacatccccttcgacagattcagcctggccaaggagggcgagctgagcctgccccagcaccagagcggcgagcaccccgccaacttcagcctgggccccgtggacctgaacgtgagcggcatctacagatgctacgacagcatccaccaggactacaccacccagaacctgatcagaatggccgtggccggcctggtgctggtggccctgctggccatcctggtggagaactggcacagccacaccgccctgaacaaggaggccagcgccgacgtggccgagcccagctggagccagcagatgtgccagcccggcctgaccttcgccagaacccccagcgtgtgcaagtag

SEQ ID NO: 234669 - protein, 496 aa, Artificial Sequence
  derived and/or modified sequence
MAAAAGPGAALSPRPCDSDPATPGAQSPKDDNEDNSNDGTQPSKRRRMGSGDSSRSCETSSQDLGFSYYPAENLIEYKWPPDETGEYYMLQEQVSEYLGVTSFKRKYPERRDLSHKEKLYLRELNVITETQCTLGLTALRSDEVIDLMIKEYPAKHAEYSVILQEKERQRITDHYKEYSQMQQQNTQKVEASKVPEYIKKAAKKAAEFNSNLNRERMEERRAYFDLQTHVIQVPQGKYKVLPTERTKVSSYPVALIPGQFQEYYKRYSPDELRYLPLNTALYEPPLDPELPALDSDGDSDDGEDGRGDEKRKNKGTSDSSSGNVSEGESPPDSQEDSFQGRQKSKDKAATPRKDGPKRSVLSKSVPGYKPKVIPNAICGICLKGKESNKKGKAESLIHCSQCENSGHPSCLDMTMELVSMIKTYPWQCMECKTCIICGQPHHEEEMMFCDMCDRGYHTFCVGLGAIPSGRWICDCCQRAPPTPRKVGRRGKNSKEG

SEQ ID NO: 234670 - DNA, 1491 bp, Artificial Sequence
  derived and/or modified sequence
atggccgccgccgcaggaccaggcgcggccctgagtccaaggccttgtgattcagatccagctactcccggcgcccagtcaccaaaagatgataacgaggacaactcaaatgatggtacgcaaccatctaagcggaggaggatgggtagtggggatagcagtcggtcctgtgaaacatcatctcaggacctcggcttcagctattatcctgctgaaaatctgatcgagtataaatggccccccgacgagacaggcgagtattatatgctgcaggaacaggtgtcagaatacttgggagtgacttcctttaaacgaaagtaccctgaacggcgagacctctcccataaggagaaactttatctgcgggagctcaacgtaataacggagacacaatgcacgttgggactcaccgccttaagatccgacgaagtaatcgatctaatgattaaagaatatccagccaagcacgcggagtatagtgtgatcctgcaggaaaaggagcgtcagcggattacagaccactacaaggagtactctcagatgcagcagcagaatacccagaaggtagaggcaagtaaggttcccgagtatattaaaaaggctgcaaaaaaggctgccgaattcaattctaacttgaatcgcgaacgtatggaagagcgaagagcgtacttcgatctgcaaacgcacgttatccaagtgccccaggggaaatataaagttctgcctaccgagcgcaccaaggtaagttcttaccccgttgctctgatccctggtcaattccaagagtactataagagatacagccccgacgagctacggtacctgcccctgaacacagcgctgtacgagccccccctggatccggaactcccagccctggactccgacggtgactccgatgacggagaggacgggcgcggcgacgagaagcgaaaaaacaagggaacaagcgattcctcatcaggaaacgttagcgaaggcgagtccccacccgattcacaggaagattctttccaaggccggcagaaatccaaagacaaggctgccacaccccgaaaggacggtccgaagcgaagcgttctgagtaagagcgtcccaggttataagcctaaggtgattcctaacgcaatctgcggaatctgtctgaagggcaaagagtctaacaaaaaagggaaggccgaaagccttatacattgctctcagtgtgagaactccggccacccgagctgtctggatatgacaatggaactggtgtccatgatcaaaacctacccctggcaatgcatggagtgcaaaacctgcatcatctgcgggcagcctcaccatgaagaggaaatgatgttctgcgacatgtgcgaccggggataccacactttttgtgtaggtttaggagccatccctagtggacgttggatttgtgattgctgtcagagggctcctcccacacccaggaaagtgggccggcgggggaagaattcaaaagaagggtag

SEQ ID NO: 234671 - DNA, 1491 bp, Artificial Sequence
  derived and/or modified sequence
atggctgctgctgctggccctggagctgccctgagcccccggccctgtgacagcgaccctgccacccctggggcccagagccccaaggatgacaatgaagacaacagcaatgatggcacccagcccagcaagagaagaaggatgggcagcggggacagcagccgcagctgtgagaccagcagccaggacctgggcttctcctactacccagctgagaacctgattgagtacaagtggcccccagatgagaccggggagtactacatgctgcaggagcaggtgtctgagtacctgggcgtgaccagcttcaagaggaagtacccagagcggcgggacctgagccacaaggagaagctgtacctgcgggagctgaatgtcatcacagagacccagtgcaccctgggcctgacagccctgcggagtgatgaggtgattgacctgatgatcaaggagtacccagccaagcatgctgagtacagcgtcatcctgcaggagaaggagcggcagaggatcacagaccactacaaggagtacagccagatgcagcagcagaacacccagaaggtggaggccagcaaggtgcctgagtacatcaagaaggccgccaagaaggctgctgagttcaacagcaacctgaaccgggagaggatggaggagcggcgggcctactttgacctgcagacccacgtgatccaggtgccccagggcaagtacaaggtgctgcccacagagaggaccaaggtgagcagctaccctgtggccctgatccctggccagttccaggagtactacaagcgctacagcccagatgagctgcgctacctgcccctgaacacagccctgtatgagccccccctggaccctgagctgcctgccctggacagtgatggagacagtgatgatggagaagatggaagaggagatgagaagaggaagaacaagggcaccagtgacagcagcagtggaaatgtgtctgagggggagagccccccagacagccaggaggacagcttccagggccggcagaagagcaaggacaaggccgccacccccaggaaggatggccccaagaggtctgtgctgagcaagtctgtgcccggctacaagcccaaggtgatccccaatgccatctgtggcatctgcctgaagggcaaggagagcaacaagaagggcaaggccgagagcctcatccactgcagccagtgtgaaaattctggccaccccagctgcctggacatgaccatggagctggtgtccatgatcaagacctacccctggcagtgcatggagtgcaagacctgcatcatctgtggccagccccaccacgaggaggagatgatgttctgtgacatgtgtgaccggggctaccacaccttctgtgtgggcctgggcgccatccccagcggccgctggatctgtgactgctgccagagggccccacccacccccaggaaggtgggccggcggggcaagaacagcaaggagggctag

SEQ ID NO: 234672 - DNA, 1491 bp, Artificial Sequence
  derived and/or modified sequence
atggccgccgccgccggccccggcgccgccctgagcccccggccctgcgatagtgatcctgctacccctggggcccaatcccctaaggacgacaatgaagacaattccaacgatggcacccagccctctaagcggcgaagaatgggcagcggcgattcctccaggagctgcgagacgagctctcaggacctgggcttttcttactacccagcagagaacctgatcgaatataaatggccccctgatgaaactggcgagtattacatgctgcaggaacaagtctcagagtatctgggcgtaacgagctttaagcggaagtatcctgaaaggagggatctaagtcataaagaaaagctataccttagggagctgaatgtcattactgagacccagtgcactcttggcctgactgcactgcgttctgatgaggtcatcgaccttatgataaaagaataccctgccaagcacgcagaatacagcgtcattctccaggaaaaagaacgacaaaggataacagaccattataaggaatattcccagatgcagcagcagaatactcagaaggtggaagcctcaaaagtgcctgagtatattaagaaagccgccaaaaaggccgctgagtttaacagtaatctcaacagggaaagaatggaggaaagacgggcttactttgaccttcagacgcatgtcatccaagtcccccaggggaagtacaaggttcttcctactgagcggacgaaggtgtctagttacccagtcgcactcatccctggccaattccaagaatactataagaggtacagtccagacgagcttcggtacctgccactcaacaccgctctgtacgagccccccctagatccagaattaccagcgctggactccgatggcgattccgacgatggtgaggacgggaggggcgatgagaagagaaaaaacaaagggaccagtgactctagctctgggaacgtaagtgagggagaatcccctccagacagccaggaggattcctttcagggacgtcagaaatcaaaagataaggcggctactcctaggaaggatgggcccaaacggtctgtgctgagcaaatctgtgcccggttacaaaccaaaggtgattccaaatgcgatctgcggtatctgcctcaagggcaaagaatcaaacaagaagggcaaagccgaatcattgatacactgttcgcagtgcgaaaattcgggacatccttcatgtctggacatgaccatggagttggtatcgatgatcaagacatacccctggcaatgcatggaatgtaagacatgcattatctgcgggcaacctcaccacgaggaggaaatgatgttctgtgacatgtgtgacaggggctatcacaccttctgcgttggacttggagcaatcccatccgggcgatggatatgcgattgttgtcagcgcgcgccacctactccgcgcaaggtggggcgacggggcaaaaattctaaggagggctag

SEQ ID NO: 234673 - DNA, 1589 bp, Artificial Sequence
  derived and/or modified sequence
atggcggcggcggccgggcccggggctgcgctgtccccgcggccgtgcgacagcgacccagccacccccggagcgcagtccccgaaggatgataatgaagataattcaaatgatgggacccagccatccaaaaggaggcgaatgggctcaggagatagttctaggagttgtgaaacttcaagtcaagatcttggttttagttactatccagcagaaaacttgatagagtacaaatggccacctgatgaaacaggagaatactatatgcttcaagaacaagtcagtgaatatttgggtgtgacctcctttaaaaggaaatatccagagcgacgagatttgtctcacaaggagaaactctacctgagagagctaaatgtcattactgaaactcagtgcactctaggcttaacagcattgcgcagtgatgaagtgattgatttaatgataaaagaatatccagccaaacatgctgagtattctgttattctacaagaaaaagaacgtcaacgaattacagaccattataaagagtattcccaaatgcaacaacagaatactcagaaagttgaagccagtaaagtgcctgagtatattaagaaagctgccaaaaaagcagcagaatttaatagcaacttaaaccgggaacgcatggaagaaagaagagcttattttgacttgcagacacatgttatccaggtacctcaagggaagtacaaagttttgccaacagagcgaacaaaggtcagttcttacccagtggctctcatccccggacagttccaggaatattataagaggtactcaccagatgagctgcggtatctgccattaaacacagccctgtatgagccccctctggatcctgagctccctgctctagacagtgatggtgattcagatgatggcgaagatggtcgaggtgatgagaaacggaaaaataaaggcacttcggacagctcctctggcaatgtatctgaaggggaaagccctcctgacagccaggaggactctttccagggaagacagaaatcaaaagacaaagctgccactccaagaaaagatggtcccaaacgttctgtactgtccaagtcagttcctgggtacaagccaaaggtcattccaaatgctatatgtggaatttgtctgaagggtaaggagtccaacaagaaaggaaaggctgaatcacttatacactgctcccaatgtgagaatagtggccatccttcttgcctggatatgacaatggagcttgtttctatgattaagacctacccatggcagtgtatggaatgtaaaacatgcattatatgtggacaaccccaccatgaagaagaaatgatgttctgtgatatgtgtgacagaggttatcatactttttgtgtgggccttggtgctattccatcaggtcgctggatttgtgactgttgtcagcgggcccccccaacacccaggaaagtgggcagaagggggaaaaacagcaaagagggataaaatagtttttgactctaatactgtatatgcatttaagtggaatatttggtgccatttacaacattattttcatgccaataaaagattttttttgcaaa

SEQ ID NO: 234674 - DNA, 1491 bp, Artificial Sequence
  derived and/or modified sequence
atggcagctgccgcaggtccaggagctgctttgagccccaggccttgtgactccgacccagctacccctggcgctcagagtccaaaggatgataacgaggataatagcaatgatggcacccagccatcaaagagacgacgaatgggatcaggggacagcagtcggtcttgtgagacgagctctcaagatctgggattctcttactatccagctgagaatcttattgaatacaagtggcctcctgatgaaaccggggagtattatatgctgcaggagcaggtctctgagtacctcggcgtcacttcctttaaaaggaagtacccagagcggagagacctgtcacacaaagaaaagctttatctacgcgaactgaacgtgatcacagagacccaatgtacgcttggactcaccgcactgcggtccgacgaggtgattgacctgatgattaaggaatatccggcaaaacacgcagagtatagcgtgatcctgcaggagaaagaaaggcagcggatcacggatcattataaagagtacagtcaaatgcagcagcaaaatacacaaaaagtggaggcttctaaggtccccgagtatattaagaaggcggctaagaaggcggctgaattcaattccaacctgaaccgagagcgcatggaggaacgcagggcctatttcgatttgcagactcatgttattcaggtgcctcagggtaagtataaggtgcttccgaccgagcgcaccaaggtgtccagctatccagtggctctaattcccggacagtttcaagaatactataagcggtattcgccagacgaactgcgatatctccctttgaacactgccctctacgagcccccattggatcctgagctgcctgccctggatagcgacggtgatagcgacgatggtgaggatggacgaggcgacgaaaaaagaaaaaataaaggtactagcgactcatccagtggaaacgtgtcagaaggggaaagtcctccagattcacaggaagactccttccagggtcgacaaaaatcaaaggataaagcagctactcctagaaaggatggccctaaaagatcggtgctgtcaaaatcagttcccggttacaaacctaaagttatccctaacgctatctgcggaatttgcctcaaaggtaaggaatcaaataaaaagggaaaggctgaatctctgatccactgttctcaatgtgagaactccggtcatccctcctgcctggacatgacaatggaactggtctctatgatcaaaacatatccctggcagtgtatggaatgcaagacgtgcatcatctgcggccaacctcaccatgaagaggaaatgatgttctgtgacatgtgtgaccggggttaccatacattctgtgtagggttgggggctattccgagtggtcgctggatctgtgactgctgtcagagagcgcctcccacgcccaggaaagtgggtcggagggggaagaacagtaaggaaggatag

SEQ ID NO: 234675 - DNA, 1491 bp, Artificial Sequence
  derived and/or modified sequence
atggccgccgccgccggccccggcgccgccctgagccccagaccctgcgacagcgaccccgccacccccggcgcccagagccccaaggacgacaacgaggacaacagcaacgacggcacccagcccagcaagagaagaagaatgggcagcggcgacagcagcagaagctgcgagaccagcagccaggacctgggcttcagctactaccccgccgagaacctgatcgagtacaagtggccccccgacgagaccggcgagtactacatgctgcaggagcaggtgagcgagtacctgggcgtgaccagcttcaagagaaagtaccccgagagaagagacctgagccacaaggagaagctgtacctgagagagctgaacgtgatcaccgagacccagtgcaccctgggcctgaccgccctgagaagcgacgaggtgatcgacctgatgatcaaggagtaccccgccaagcacgccgagtacagcgtgatcctgcaggagaaggagagacagagaatcaccgaccactacaaggagtacagccagatgcagcagcagaacacccagaaggtggaggccagcaaggtgcccgagtacatcaagaaggccgccaagaaggccgccgagttcaacagcaacctgaacagagagagaatggaggagagaagagcctacttcgacctgcagacccacgtgatccaggtgccccagggcaagtacaaggtgctgcccaccgagagaaccaaggtgagcagctaccccgtggccctgatccccggccagttccaggagtactacaagagatacagccccgacgagctgagatacctgcccctgaacaccgccctgtacgagccccccctggaccccgagctgcccgccctggacagcgacggcgacagcgacgacggcgaggacggcagaggcgacgagaagagaaagaacaagggcaccagcgacagcagcagcggcaacgtgagcgagggcgagagcccccccgacagccaggaggacagcttccagggcagacagaagagcaaggacaaggccgccacccccagaaaggacggccccaagagaagcgtgctgagcaagagcgtgcccggctacaagcccaaggtgatccccaacgccatctgcggcatctgcctgaagggcaaggagagcaacaagaagggcaaggccgagagcctgatccactgcagccagtgcgagaacagcggccaccccagctgcctggacatgaccatggagctggtgagcatgatcaagacctacccctggcagtgcatggagtgcaagacctgcatcatctgcggccagccccaccacgaggaggagatgatgttctgcgacatgtgcgacagaggctaccacaccttctgcgtgggcctgggcgccatccccagcggcagatggatctgcgactgctgccagagagccccccccacccccagaaaggtgggcagaagaggcaagaacagcaaggagggctag

SEQ ID NO: 234676 - protein, 436 aa, Artificial Sequence
  derived and/or modified sequence
MTFGRSGAASVVLNVGGARYSLSRELLKDFPLRRVSRLHGCRSERDVLEVCDDYDRERNEYFFDRHSEAFGFILLYVRGHGKLRFAPRMCELSFYNEMIYWGLEGAHLEYCCQRRLDDRMSDTYTFYSADEPGVLGRDEARPGGAEAAPSRRWLERMRRTFEEPTSSLAAQILASVSVVFVIVSMVVLCASTLPDWRNAAADNRSLDDRSRYSAGPGREPSGIIEAICIGWFTAECIVRFIVSKNKCEFVKRPLNIIDLLAITPYYISVLMTVFTGENSQLQRAGVTLRVLRMMRIFWVIKLARHFIGLQTLGLTLKRCYREMVMLLVFICVAMAIFSALSQLLEHGLDLETSNKDFTSIPAACWWVIISMTTVGYGDMYPITVPGRILGGVCVVSGIVLLALPITFIYHSFVQCYHELKFRSARYSRSLSTEFLN

SEQ ID NO: 234677 - DNA, 1311 bp, Artificial Sequence
  derived and/or modified sequence
atgacctttggcaggagcggtgcagcttccgtcgttctcaatgtgggtggagctagatactctttatctcgggagttactgaaggacttcccactgcgccgggtgtctaggttacacgggtgtaggtcagaacgggacgtgctcgaggtgtgcgatgactacgatagggaacgaaacgaatatttcttcgaccggcactccgaagcctttgggttcatcctgctgtacgtgcgaggccacggcaagctcagattcgcgcccaggatgtgtgaactgtcgttttacaacgaaatgatctattggggcctggaaggtgctcacctggaatactgctgccaacgaaggctggatgatcgcatgtctgatacctacaccttctattccgcggatgagcccggcgtgctagggcgtgatgaggcgcggccgggcggcgctgaagctgcaccaagccggcggtggcttgaacggatgcgccgtacgtttgaagagcctacttcgtcattggccgcccagatcctggcaagcgtgtccgtggtgttcgtgatagtgtctatggtcgtgctctgcgcctcgacgctgcctgattggcgaaacgcagcagctgacaataggtcactggatgataggtcccgatacagtgctggccctggaagggaaccgagcggaattattgaagccatatgtatcggctggttcaccgctgagtgcattgtgagattcatcgtatccaaaaacaaatgcgagtttgtgaagcggccactaaatattatagacctgctcgccattaccccctactatatttccgtcctcatgactgtcttcactggcgaaaattctcaactgcagagggccggagtcacactgcgcgtgttaaggatgatgagaattttttgggtgatcaagctggctagacattttatcgggctgcaaaccctgggcttgacactaaagcggtgctatagggaaatggtaatgctgctagtttttatttgcgtggccatggctatctttagtgccctgtcacagctgctggagcatggtctggaccttgagacctccaacaaggacttcacttccataccagctgcatgctggtgggtcatcatcagcatgactactgtgggctacggggatatgtatccaattaccgtacctggccgaattttgggaggggtgtgcgttgttagtggcatcgtgctgcttgccctgccaattacgttcatctatcactcatttgtccaatgctatcacgagctgaaatttcggagcgctaggtattcacgatcactgtctaccgaatttctaaactag

SEQ ID NO: 234678 - DNA, 1311 bp, Artificial Sequence
  derived and/or modified sequence
atgaccttcggccgcagcggggccgcctctgtggtgctgaatgtgggcggggcccgctacagcctgagccgggagctgctgaaggacttccccctgcggcgggtgtcccggctgcacggctgccgctcagaaagagatgtgctggaggtgtgtgatgattatgaccgggagagaaatgagtacttctttgacagacattctgaggccttcggcttcatcctgctgtatgtgcggggccacggcaagctgcgctttgcccccaggatgtgtgagctgtccttctacaatgagatgatctactggggcctggagggcgcccacctggagtactgctgccagaggcggctggatgacaggatgtctgacacctacaccttctacagcgcagatgagcccggggtgctgggcagagatgaggcccggcctgggggcgctgaggccgcccccagccgccgctggctggagaggatgaggaggacctttgaggagcccaccagcagcctggccgcccagatcctggcctctgtgtctgtggtgtttgtgattgtgtccatggtggtgctgtgtgccagcaccctgcctgactggagaaatgctgctgctgacaacagaagcctggatgacaggagccgctacagcgctggccctggccgggagcccagcggcatcatcgaggccatctgcatcggctggttcaccgcagaatgtattgtgcgcttcatcgtgtccaagaacaagtgtgaatttgtgaagaggcccctgaacatcatcgacctgctggccatcaccccctactacatctctgtgctgatgaccgtcttcaccggggagaacagccagctgcagagagctggggtgaccctgcgggtgctgaggatgatgaggatcttctgggtgatcaagctggcccggcacttcatcggcctgcagaccctgggcctgaccctgaagcgctgctaccgggagatggtgatgctgctggtgttcatctgtgtggccatggccatcttcagcgccctgagccagctgctggagcacggcctggacctggagaccagcaacaaggacttcaccagcatcccagctgcctgctggtgggtgatcatctccatgaccaccgtgggctacggggacatgtaccccatcaccgtgcccggccgcatcctgggcggcgtgtgtgtggtgtctggcatcgtgctgctggccctgcccatcaccttcatctaccacagctttgtgcagtgctaccacgagctgaagttccgcagcgcccgctacagccgcagcctgagcacagagttcctgaactag

SEQ ID NO: 234679 - DNA, 1311 bp, Artificial Sequence
  derived and/or modified sequence
atgaccttcggccggagcggcgccgccagcgtggtgctgaacgtgggcggagcgagatacagcctctctcgagaactcctcaaggacttccccctcagacgggtgtccagactgcacggatgtaggtcagaacgcgacgtgctggaagtctgcgacgattatgatcgagagagaaacgagtattttttcgatcgccactccgaggcctttgggttcatactgttatatgtccgtggtcacggcaaattaaggttcgccccccgaatgtgcgagctgtctttctacaatgagatgatctattggggactcgagggcgctcatcttgagtattgctgtcagcggcggctggatgacaggatgtctgacacatacactttttactcagccgacgaaccgggggtcttagggcgtgatgaagctcggccgggcggggccgaggcagctcctagtcggaggtggctagagaggatgcgccgcacctttgaagagcctacttcttccctcgctgcccaaatcctggcatctgttagtgtagtgtttgtaattgtgtctatggtggtcctctgtgctagcacgttaccagactggcgaaatgccgcagccgacaaccgctctctggacgaccgctcaaggtactccgcgggcccgggcagagagcctagcgggattatcgaggctatctgtattggatggtttactgctgaatgtattgtgcgcttcatagtatcaaagaataagtgtgaatttgtcaagcgtcccctgaatattatagaccttttggccatcacgccatattacatcagcgtcctgatgacagtattcaccggtgaaaattcccagctgcaaagagcaggcgtgacgctccgcgttctgagaatgatgagaattttttgggtcataaagttggcacggcacttcatcgggctgcaaactctcggcctgacgctgaagagatgctacagggaaatggtgatgctgctggttttcatctgcgtcgccatggctattttctctgcattgtctcaactgctagagcacgggctggatctggaaacaagtaacaaagactttacaagcatcccggccgcctgctggtgggtgattattagtatgaccacagtgggctacggcgacatgtacccaatcaccgttccagggcgcatcctggggggagtatgtgttgtatcaggaattgtgctgcttgccctgcccattacctttatttatcattcttttgttcagtgctaccacgaacttaaattcaggtcagctcggtactccagatccctgtccacggaattcttaaactag

SEQ ID NO: 234680 - DNA, 3824 bp, Artificial Sequence
  derived and/or modified sequence
gcggcgcggagggaggtgagcggcgcgcgcggagccggcgggcgaggaggaggactgcacagaggccccgcccccgccgccgcgagccggctcttcgccgcctccgaacccgctcactttgcctctcgcctctggacggcggcggggcggccgccggattcgcggccgcagggagcgccggagacggggagctattccgccccggcggctccattcggcgcccgcagccctcagggggtcggccccgcggcttgggagagggcaccgcggcctcggtgtgcgcagccctcgggcgcgagggtcggcggcgcggacacagccgcgttcccagccggtggggctcagcgctggcgccggcgaggactccccggccacccgcaggtaccgccgggcggagggcgcgctactagcagcgccggagatactcgagcccagggacccccgggccagcggagggcaggagcggagccccgagggagcgcgggccccgacggcgcgctcccccgtcagccacgggcaggcaggccccgcgtggcggcttggggtggggggctgcagcggggccctcgggccgaaagtcccccgggcggccagccatgaccttcgggcgcagcggggcggcctcggtggtgctgaacgtgggcggcgcccggtattcgctgtcccgggagctgctgaaggacttcccgctgcgccgcgtgagccggctgcacggctgccgctccgagcgcgacgtgctcgaggtgtgcgacgactacgaccgcgagcgcaacgagtacttcttcgaccggcactcggaggccttcggcttcatcctgctctacgtgcgcggccacggcaagctgcgcttcgcgccgcggatgtgcgagctctccttctacaacgagatgatctactggggcctggagggcgcgcacctcgagtactgctgccagcgccgcctcgacgaccgcatgtccgacacctacaccttctactcggccgacgagccgggcgtgctgggccgcgacgaggcgcgccccggcggggccgaggcggctccctccaggcgctggctggagcgcatgcggcggaccttcgaggagcccacgtcgtcgctggccgcgcagatcctggctagcgtgtcggtggtgttcgtgatcgtgtccatggtggtgctgtgcgccagcacgttgcccgactggcgcaacgcagccgccgacaaccgcagcctggatgaccggagcaggtactccgccggccctgggagggagccctccgggataattgaagctatctgcataggttggttcactgccgagtgcatcgtgaggttcattgtctccaaaaacaagtgtgagtttgtcaagagacccctgaacatcattgatttactggcaatcacgccgtattacatctctgtgttgatgacagtgtttacaggcgagaactctcaactccagagggctggagtcaccttgagggtacttagaatgatgaggattttttgggtgattaagcttgcccgtcacttcattggtcttcagacactcggtttgactctcaaacgttgctaccgagagatggttatgttacttgtcttcatttgtgttgccatggcaatctttagtgcactttctcagcttcttgaacatgggctggacctggaaacatccaacaaggactttaccagcattcctgctgcctgctggtgggtgattatctctatgactacagttggctatggagatatgtatcctatcacagtgcctggaagaattcttggaggagtttgtgttgtcagtggaattgttctattggcattacctatcacttttatctaccatagctttgtgcagtgttatcatgagctcaagtttagatctgctaggtatagtaggagcctctccactgaattcctgaattaatgcattgcaaatcaattcttgcatacacttcatagaaagactttgatgctgcttcatatttatgtgtttcttgctgggtgagcactgcagtggcattgtcatcatcttggtagggtaaaaattatccttcccagccgaagggataaaacagtttacttgttatggagtaaatagaattgagactgcaaaggaagaataatgactcctagagtaaactttaggacccggttttatttagacttgttttcccgtttccttgaatgattacacatttttaaaaaatacattatttgaacattttaaaacagaaaggtactattttccaaatgtttttccatcttatgaattcagaagaagcttggaacttatagtgttttttgtttgagagtaacattttcatttctaaatgttttataatttctcatatcaatgtcagaagtatcctggaaacatatgtcacatgcgggaactgtttaacaaatactttaaaaatttggccaaaatttaaactgtataatggagctagatacaagcaagaatagtatttgaaagacttttccagcatacttctcaattctttgctttatttttgtgccaattattcaccttatcgtgccgcttcatggaagcttgagtatgttctcccttttccattttggatttatctctttactgtaatgactcaaaaggtatttaagaattgacgagagcttgtgttgtttagcatcttactggataatatttgaattcattgctgttcctaggtgataactgtcctaatatttagatgtccaaacaagaatacttccaacataaaaattataataggaataatttgagatgactcaatattacaacctcttcttctcttaacctcctcccccaaacactagaggtttaataagacttatcagatgaaaggatatttatatagccttttagtagcaaagtcatacttacgtgttgtcactggattatcataaaagggagaaattaaatattactgtactcttagttgctgtgtagctaagtcaattttaagccagtaaaagcgatggatacataatgatttgatctgatctttaactattgtgaatcacagctacaccaaaactcttcttgtaagaatactgactaatatgccatgttaatctggctagattattaggactagataatgtaaaagtgatgattgtttagtaactaaattttagcaacagaaattagaattttgctttttcaaccagttaccataaagaagttagtgtatatataaacacaaataattagtgacagattcataaaaaattgaatgttgtacacagtaattttgtcagaggtagagaagacagggattgggaagtggtgggtgatggaggacctggatatatttatcaaataaagggttaccagaagtgttcattaaaggaattttagccatcatctagttcaaacctcaactattacaggtagaaaatcagggcaggagagaatataattgtgaaggagtcagggctaacacctggatctccagaaacctagcccagcaggttaatcttcacacatctctgggttctgagaaaagcctggaaaaatcacacttctttgtcattgtcatgctgaggtaataatagcaaaactgttttctttcccttaatttcctttcctaagcttatgtaatagtttggccattaaatatcttgccctattttccctattactgctagtatgctacttcttacatacccaaaagaaattcagttatttattgtatatttattgtattctaatataattgaaataaatggcatggatttattttttcttaactatttggattaaagctttgtggttcatgcaaacaatgtgcagatgatagcacctccatattactaataaaaatatgataaccatcaa

SEQ ID NO: 234681 - DNA, 1311 bp, Artificial Sequence
  derived and/or modified sequence
atgacttttgggcgaagcggggcagcgagcgtggtgctcaatgtgggcggagcaagatattccctgtctcgtgaattactgaaagattttccgctgcggagagtcagcaggcttcatggttgccgaagtgagagagatgttctcgaagtgtgtgacgattacgatcgcgaaagaaacgagtatttttttgacaggcacagcgaagccttcggttttattctgctgtacgtgaggggccacggtaaactgcgattcgcacccaggatgtgtgaactgagtttttacaacgagatgatatactggggcttagagggcgctcaccttgagtactgttgccagcggagactcgacgatcgtatgagcgacacctatacattttatagtgccgacgaacctggcgtcctgggccgtgacgaggcgaggccaggtggtgccgaggcagctccctcacggaggtggttggaaaggatgaggcggacatttgaggaacccacgagttccctggccgcacaaatcctggcatccgtgagcgttgtcttcgtgattgtgtccatggtggtgctgtgtgccagcacactgcccgactggaggaatgctgctgctgacaaccgtagcctcgatgacagatctcggtacagtgccggtccgggaagggaaccgagcgggataatcgaagcaatctgcataggatggtttacagccgagtgtattgtgagattcatcgtgagcaagaacaaatgcgaatttgtgaagcgcccactgaacatcatagatttgttggccataaccccgtactatataagcgtcttgatgaccgtatttactggggaaaatagtcagctccagcgggctggggtcacccttagggtgctccggatgatgaggattttttgggtcatcaagttggcaagacactttattgggttacagacattaggactaacactgaaaagatgttatcgggaaatggtgatgctgctcgtgtttatctgtgtcgctatggccatattttcggccctgagtcagctcctcgagcacggtctagacctggagactagtaacaaggatttcacctcgataccggcagcctgttggtgggtgatcatttccatgacgacagtcggatatggggatatgtacccgatcaccgtgcccggtcgcattctgggaggggtctgcgtcgtgtccggtatcgtcctcctggccttgcctattacctttatctaccactcatttgtccagtgttaccacgaattgaagtttcggagcgccagatacagcagatcccttagcactgagttccttaactag

SEQ ID NO: 234682 - DNA, 1311 bp, Artificial Sequence
  derived and/or modified sequence
atgaccttcggcagaagcggcgccgccagcgtggtgctgaacgtgggcggcgccagatacagcctgagcagagagctgctgaaggacttccccctgagaagagtgagcagactgcacggctgcagaagcgagagagacgtgctggaggtgtgcgacgactacgacagagagagaaacgagtacttcttcgacagacacagcgaggccttcggcttcatcctgctgtacgtgagaggccacggcaagctgagattcgcccccagaatgtgcgagctgagcttctacaacgagatgatctactggggcctggagggcgcccacctggagtactgctgccagagaagactggacgacagaatgagcgacacctacaccttctacagcgccgacgagcccggcgtgctgggcagagacgaggccagacccggcggcgccgaggccgcccccagcagaagatggctggagagaatgagaagaaccttcgaggagcccaccagcagcctggccgcccagatcctggccagcgtgagcgtggtgttcgtgatcgtgagcatggtggtgctgtgcgccagcaccctgcccgactggagaaacgccgccgccgacaacagaagcctggacgacagaagcagatacagcgccggccccggcagagagcccagcggcatcatcgaggccatctgcatcggctggttcaccgccgagtgcatcgtgagattcatcgtgagcaagaacaagtgcgagttcgtgaagagacccctgaacatcatcgacctgctggccatcaccccctactacatcagcgtgctgatgaccgtgttcaccggcgagaacagccagctgcagagagccggcgtgaccctgagagtgctgagaatgatgagaatcttctgggtgatcaagctggccagacacttcatcggcctgcagaccctgggcctgaccctgaagagatgctacagagagatggtgatgctgctggtgttcatctgcgtggccatggccatcttcagcgccctgagccagctgctggagcacggcctggacctggagaccagcaacaaggacttcaccagcatccccgccgcctgctggtgggtgatcatcagcatgaccaccgtgggctacggcgacatgtaccccatcaccgtgcccggcagaatcctgggcggcgtgtgcgtggtgagcggcatcgtgctgctggccctgcccatcaccttcatctaccacagcttcgtgcagtgctaccacgagctgaagttcagaagcgccagatacagcagaagcctgagcaccgagttcctgaactag

SEQ ID NO: 234683 - protein, 1365 aa, Artificial Sequence
  derived and/or modified sequence
MEFSIKQSPLSVQSVVKCIKMKQAPEILGSANGKTPSCEVNRECSVFLSKAQLSSSLQEGVMQKFNGHDALPFIPADKLKDLTSRVFNGEPGAHDAKLRFESQEMKGIGTPPNTTPIKNGSPEIKLKITKTYMNGKPLFESSICGDSAADVSQSEENGQKPENKARRNRKRSIKYDSLLEQGLVEAALVSKISSPSDKKIPAKKESCPNTGRDKDHLLKYNVGDLVWSKVSGYPWWPCMVSADPLLHSYTKLKGQKKSARQYHVQFFGDAPERAWIFEKSLVAFEGEGQFEKLCQESAKQAPTKAEKIKLLKPISGKLRAQWEMGIVQAEEAASMSVEERKAKFTFLYVGDQLHLNPQVAKEAGIAAESLGEMAESSGVSEEAAENPKSVREECIPMKRRRRAKLCSSAETLESHPDIGKSTPQKTAEADPRRGVGSPPGRKKTTVSMPRSRKGDAASQFLVFCQKHRDEVVAEHPDASGEEIEELLRSQWSLLSEKQRARYNTKFALVAPVQAEEDSGNVNGKKRNHTKRIQDPTEDAEAEDTPRKRLRTDKHSLRKRDTITDKTARTSSYKAMEAASSLKSQAATKNLSDACKPLKKRNRASTAASSALGFSKSSSPSASLTENEVSDSPGDEPSESPYESADETQTEVSVSSKKSERGVTAKKEYVCQLCEKPGSLLLCEGPCCGAFHLACLGLSRRPEGRFTCSECASGIHSCFVCKESKTDVKRCVVTQCGKFYHEACVKKYPLTVFESRGFRCPLHSCVSCHASNPSNPRPSKGKMMRCVRCPVAYHSGDACLAAGCSVIASNSIICTAHFTARKGKRHHAHVNVSWCFVCSKGGSLLCCESCPAAFHPDCLNIEMPDGSWFCNDCRAGKKLHFQDIIWVKLGNYRWWPAEVCHPKNVPPNIQKMKHEIGEFPVFFFGSKDYYWTHQARVFPYMEGDRGSRYQGVRGIGRVFKNALQEAEARFREIKLQREARETQESERKPPPYKHIKVNKPYGKVQIYTADISEIPKCNCKPTDENPCGFDSECLNRMLMFECHPQVCPAGEFCQNQCFTKRQYPETKIIKTDGKGWGLVAKRDIRKGEFVNEYVGELIDEEECMARIKHAHENDITHFYMLTIDKDRIIDAGPKGNYSRFMNHSCQPNCETLKWTVNGDTRVGLFAVCDIPAGTELTFNYNLDCLGNEKTVCRCGASNCSGFLGDRPKTSTTLSSEEKGKKTKKKTRRRRAKGEGKRQSEDECFRCGDGGQLVLCDRKFCTKAYHLSCLGLGKRPFGKWECPWHHCDVCGKPSTSFCHLCPNSFCKEHQDGTAFSCTPDGRSYCCEHDLGAASVRSTKTEKPPPEPGKPKGKRRRRRGWRRVTEGK

SEQ ID NO: 234684 - DNA, 4098 bp, Artificial Sequence
  derived and/or modified sequence
atggagttcagcatcaagcagagccccctgagcgtgcagagcgtggtgaagtgcatcaagatgaagcaggcccccgagatcctgggcagcgccaacggcaagacccccagctgcgaggtgaacagagagtgcagcgtgttcctgagcaaggcccagctgagcagcagcctgcaggagggcgtgatgcagaagttcaacggccacgacgccctgcccttcatccccgccgacaagctgaaggacctgaccagcagagtgttcaacggcgagcccggcgcccacgacgccaagctgagattcgagagccaggagatgaagggcatcggcaccccccccaacaccacccccatcaagaacggcagccccgagatcaagctgaagatcaccaagacctacatgaacggcaagcccctgttcgagagcagcatctgcggcgacagcgccgccgacgtgagccagagcgaggagaacggccagaagcccgagaacaaggccagaagaaacagaaagagaagcatcaagtacgacagcctgctggagcagggcctggtggaggccgccctggtgagcaagatcagcagccccagcgacaagaagatccccgccaagaaggagagctgccccaacaccggcagagacaaggaccacctgctgaagtacaacgtgggcgacctggtgtggagcaaggtgagcggctacccctggtggccctgcatggtgagcgccgaccccctgctgcacagctacaccaagctgaagggccagaagaagagcgccagacagtaccacgtgcagttcttcggcgacgcccccgagagagcctggatcttcgagaagagcctggtggccttcgagggcgagggccagttcgagaagctgtgccaggagagcgccaagcaggcccccaccaaggccgagaagatcaagctgctgaagcccatcagcggcaagctgagagcccagtgggagatgggcatcgtgcaggccgaggaggccgccagcatgagcgtggaggagagaaaggccaagttcaccttcctgtacgtgggcgaccagctgcacctgaacccccaggtggccaaggaggccggcatcgccgccgagagcctgggcgagatggccgagagcagcggcgtgagcgaggaggccgccgagaaccccaagagcgtgagagaggagtgcatccccatgaagagaagaagaagagccaagctgtgcagcagcgccgagaccctggagagccaccccgacatcggcaagagcaccccccagaagaccgccgaggccgaccccagaagaggcgtgggcagcccccccggcagaaagaagaccaccgtgagcatgcccagaagcagaaagggcgacgccgccagccagttcctggtgttctgccagaagcacagagacgaggtggtggccgagcaccccgacgccagcggcgaggagatcgaggagctgctgagaagccagtggagcctgctgagcgagaagcagagagccagatacaacaccaagttcgccctggtggcccccgtgcaggccgaggaggacagcggcaacgtgaacggcaagaagagaaaccacaccaagagaatccaggaccccaccgaggacgccgaggccgaggacacccccagaaagagactgagaaccgacaagcacagcctgagaaagagagacaccatcaccgacaagaccgccagaaccagcagctacaaggccatggaggccgccagcagcctgaagagccaggccgccaccaagaacctgagcgacgcctgcaagcccctgaagaagagaaacagagccagcaccgccgccagcagcgccctgggcttcagcaagagcagcagccccagcgccagcctgaccgagaacgaggtgagcgacagccccggcgacgagcccagcgagagcccctacgagagcgccgacgagacccagaccgaggtgagcgtgagcagcaagaagagcgagagaggcgtgaccgccaagaaggagtacgtgtgccagctgtgcgagaagcccggcagcctgctgctgtgcgagggcccctgctgcggcgccttccacctggcctgcctgggcctgagcagaagacccgagggcagattcacctgcagcgagtgcgccagcggcatccacagctgcttcgtgtgcaaggagagcaagaccgacgtgaagagatgcgtggtgacccagtgcggcaagttctaccacgaggcctgcgtgaagaagtaccccctgaccgtgttcgagagcagaggcttcagatgccccctgcacagctgcgtgagctgccacgccagcaaccccagcaaccccagacccagcaagggcaagatgatgagatgcgtgagatgccccgtggcctaccacagcggcgacgcctgcctggccgccggctgcagcgtgatcgccagcaacagcatcatctgcaccgcccacttcaccgccagaaagggcaagagacaccacgcccacgtgaacgtgagctggtgcttcgtgtgcagcaagggcggcagcctgctgtgctgcgagagctgccccgccgccttccaccccgactgcctgaacatcgagatgcccgacggcagctggttctgcaacgactgcagagccggcaagaagctgcacttccaggacatcatctgggtgaagctgggcaactacagatggtggcccgccgaggtgtgccaccccaagaacgtgccccccaacatccagaagatgaagcacgagatcggcgagttccccgtgttcttcttcggcagcaaggactactactggacccaccaggccagagtgttcccctacatggagggcgacagaggcagcagataccagggcgtgagaggcatcggcagagtgttcaagaacgccctgcaggaggccgaggccagattcagagagatcaagctgcagagagaggccagagagacccaggagagcgagagaaagccccccccctacaagcacatcaaggtgaacaagccctacggcaaggtgcagatctacaccgccgacatcagcgagatccccaagtgcaactgcaagcccaccgacgagaacccctgcggcttcgacagcgagtgcctgaacagaatgctgatgttcgagtgccacccccaggtgtgccccgccggcgagttctgccagaaccagtgcttcaccaagagacagtaccccgagaccaagatcatcaagaccgacggcaagggctggggcctggtggccaagagagacatcagaaagggcgagttcgtgaacgagtacgtgggcgagctgatcgacgaggaggagtgcatggccagaatcaagcacgcccacgagaacgacatcacccacttctacatgctgaccatcgacaaggacagaatcatcgacgccggccccaagggcaactacagcagattcatgaaccacagctgccagcccaactgcgagaccctgaagtggaccgtgaacggcgacaccagagtgggcctgttcgccgtgtgcgacatccccgccggcaccgagctgaccttcaactacaacctggactgcctgggcaacgagaagaccgtgtgcagatgcggcgccagcaactgcagcggcttcctgggcgacagacccaagaccagcaccaccctgagcagcgaggagaagggcaagaagaccaagaagaagaccagaagaagaagagccaagggcgagggcaagagacagagcgaggacgagtgcttcagatgcggcgacggcggccagctggtgctgtgcgacagaaagttctgcaccaaggcctaccacctgagctgcctgggcctgggcaagagacccttcggcaagtgggagtgcccctggcaccactgcgacgtgtgcggcaagcccagcaccagcttctgccacctgtgccccaacagcttctgcaaggagcaccaggacggcaccgccttcagctgcacccccgacggcagaagctactgctgcgagcacgacctgggcgccgccagcgtgagaagcaccaagaccgagaagcccccccccgagcccggcaagcccaagggcaagagaagaagaagaagaggctggagaagagtgaccgagggcaagtag

SEQ ID NO: 234685 - DNA, 114 bp, Artificial Sequence
  derived and/or modified sequence
atggagttcagcatcaagcagagccccctgagcgtgcagagcgtggtgaagtgcatcaagatgaagcaggcccccgagatcctgggcagcgccaacggcaagacccccagctag

SEQ ID NO: 234686 - DNA, 4098 bp, Artificial Sequence
  derived and/or modified sequence
atggagttcagcattaagcaatcgcctctgtccgttcaatccgtcgtgaaatgcatcaaaatgaaacaggccccagagatcctgggtagcgccaatggcaaaacgccatcgtgtgaggtcaatagagaatgctccgtcttcctgagtaaggcccagctcagctcctccctgcaggagggagtgatgcagaagttcaacggacatgacgctcttccttttatcccagcagataagctgaaggatctgaccagccgcgtctttaatggtgaaccaggcgcccacgatgctaaactgcggttcgagagccaggagatgaaaggtatcggtacccctcccaacacaacgccaattaaaaatggttccccagaaatcaaactcaagataaccaagacttacatgaatggcaaacccctctttgagtcttccatatgcggtgactctgcagccgatgtcagtcagagcgaggagaacggtcagaagccagagaataaagccaggcggaaccggaagcgatcaatcaagtatgactctctgctcgaacaaggcctcgtagaagcggccctggtctcgaaaatcagctccccaagcgacaagaagatacccgctaaaaaggagtcttgtcccaacaccggacgagacaaggaccatctactgaaatataacgttggagatctcgtgtggagcaaggtgagcggatacccatggtggccgtgtatggtttctgccgatcctcttttacattcctacaccaagttaaagggtcagaaaaaatcggctagacagtatcatgtgcaattttttggagatgcccccgagcgcgcatggatcttcgagaagagcttggtcgccttcgaaggagaaggtcagttcgagaaactatgccaggagtctgcaaaacaggctcccaccaaagcggaaaagataaagctgcttaagcccatttctggaaagttaagggcacagtgggaaatgggtatcgtgcaagcggaagaagccgcttccatgtctgtagaggagaggaaggccaagttcaccttcctgtacgtgggcgatcagcttcatcttaaccctcaggtcgcaaaagaggctggaattgctgccgagtccctcggggagatggcagaaagctcgggggtgagcgaagaggccgcagagaatcccaaatctgtgcgggaggagtgcattcctatgaagaggagaagacgtgcaaagctttgttcctccgcagagacactcgaatcccaccctgatatcggaaaatctactcctcagaagacagccgaggctgaccctcggcgcggcgtgggctcgccaccagggcgcaaaaagaccaccgtgtctatgcctagatcccgcaagggtgatgctgcttctcagttcctcgtgttttgccagaagcatagggatgaagtcgttgctgaacaccctgatgccagtggcgaggaaatagaggagttgctacgctctcagtggtccctcctgagtgaaaagcagcgcgccagatataacactaaattcgccctggtcgcgccggtgcaagccgaagaagatagcgggaacgttaatgggaaaaagcggaatcacacaaaaagaatccaggaccctactgaggacgctgaagcggaggatacaccacggaagcgcctacggacggacaagcactccctccgtaagcgcgatacgattacagataaaacagcgaggacatcctcatacaaagcgatggaggctgccagttcccttaaatcacaggctgccacaaagaatctgtctgatgcatgcaagcccctgaagaagcgcaatcgcgcgtctaccgccgcgtcaagtgcgttgggcttctccaagagttcctcaccatctgcttctctcaccgagaacgaggtgagcgattcccccggagacgagcccagcgagagcccatatgagtcagcagacgaaactcaaactgaagtctcggtgagcagtaaaaaaagtgagagaggtgtcaccgccaaaaaagagtacgtgtgccaactgtgtgagaagccagggtccctcttactctgtgagggcccctgttgcggcgctttccatctcgcttgcctgggactctcaagacgcccggaaggccggtttacctgttctgagtgtgcatccggaattcacagctgctttgtatgtaaagagtctaagaccgatgtgaaacgctgtgtggttacccaatgtggtaaattttatcacgaggcgtgcgttaagaagtaccctctcactgtgtttgagtccagagggtttagatgtcccctgcattcctgtgtatcttgtcatgcctccaacccatctaatcctcgcccttcgaaagggaaaatgatgcgctgcgtgaggtgtcctgtggcttatcactccggtgatgcctgcctcgccgcgggatgctccgtcattgccagtaactccattatttgtacagctcatttcaccgcaagaaaggggaagcggcaccacgcacatgtgaatgttagctggtgcttcgtctgctccaaaggaggaagtctgctgtgctgcgaaagttgcccggctgctttccacccagattgtctgaatatcgagatgccagacggttcatggttttgtaatgactgcagagctggaaagaagttacattttcaggatattatttgggttaaactgggtaactatagatggtggcctgccgaagtgtgccaccctaagaatgtgcctcccaacattcagaagatgaagcacgagatcggcgaatttcccgtttttttcttcgggagcaaggactactattggactcaccaggcccgagtgttcccctacatggaaggcgaccggggaagcaggtatcagggagttcgggggatagggcgagtgtttaagaacgccctccaggaggctgaagctcgcttccgagagataaaactgcagcgcgaagcgcgcgaaactcaggaatcagagaggaaaccacccccctataagcatatcaaggtcaacaagccttatggcaaggtccagatatacaccgcggacatttcagagatcccaaagtgtaactgtaagccgactgatgaaaacccctgtgggttcgacagcgaatgccttaatagaatgctaatgttcgaatgtcacccacaagtatgtccggctggcgaattctgccagaatcaatgtttcactaagagacagtatccagaaactaagattattaagacagacggaaaggggtggggcttagtagccaagcgcgatatacgaaagggggagtttgtgaacgagtacgtgggcgagctgatcgatgaagaagaatgcatggcaaggattaagcatgctcacgagaatgatattactcacttctacatgctcacgatcgacaaagacaggataattgatgctgggccaaagggaaactacagtaggttcatgaatcattcatgccagcctaattgtgagaccctaaaatggaccgtgaacggtgacactcgggtcggcctttttgccgtctgcgatatacctgccggcaccgagctaacattcaattataatctggactgtcttggtaatgagaagaccgtttgcagatgtggagcatccaattgttcaggtttcctgggagaccggcccaagactagcaccaccctgagtagcgaggagaagggtaagaaaactaagaaaaagaccaggaggcgccgggccaagggggagggcaaaagacaaagcgaagacgagtgctttaggtgcggtgacgggggacagctggtcttgtgcgataggaagttttgtaccaaggcataccatttgtcctgtttgggactcggcaagaggccatttggcaaatgggagtgcccatggcatcactgtgatgtgtgtgggaaaccaagcacgagtttttgtcatctttgtccgaatagtttttgcaaagagcaccaggacggaacagcctttagttgtacacctgacggaaggtcttactgttgtgagcacgacctgggggcagcaagcgttcgatccactaagacagagaaacctccgcctgaacctggcaagcctaaaggtaagagacgtcgacgacggggctggaggagagtgacggaaggcaagtag

SEQ ID NO: 234687 - DNA, 4098 bp, Artificial Sequence
  derived and/or modified sequence
atggagttctctatcaagcagagcccgctgtctgtacagagcgtggtgaagtgtattaagatgaagcaggcacctgaaatactgggctcggcaaatgggaaaactccatcctgtgaggttaaccgggagtgtagcgtctttctttcgaaggcccagctgtccagctcactgcaagagggggtgatgcagaagtttaatggtcatgacgccctcccctttatcccggcagacaagctcaaagacctgacatcgcgagtcttcaatggcgagcccggcgcacacgacgctaaactgcgcttcgagagtcaggagatgaaaggtatagggacaccccccaataccaccccaatcaagaatgggtcaccagaaattaagctcaagataaccaagacctatatgaacggaaagcctctttttgagagctcaatatgtggagattcagccgcggatgtgtcacagagtgaggagaatgggcaaaagcccgagaacaaagccaggagaaaccgtaaacgcagcatcaaatatgactctctacttgaacagggactagttgaagctgctttagtatccaaaattagctcaccatcggacaagaaaatacctgcgaaaaaagagtcatgtccaaacacaggcagggacaaggatcacttattgaagtacaatgtaggcgacctagtttggtctaaagtgagtggttacccctggtggccatgcatggtgagcgccgatcctctcttgcactcatacacgaaattgaagggccaaaagaaaagtgccaggcagtatcatgtgcaattctttggagatgctcccgagagagcatggattttcgagaagagccttgtggcctttgagggggagggccagtttgaaaaattgtgccaagagtcagccaaacaggccccaaccaaagcagagaaaattaagttacttaaaccgatctccggaaagttgagagctcagtgggaaatgggtattgtgcaggcagaggaggccgccagcatgagtgttgaggagcgtaaagccaaattcacttttctgtacgtgggggaccagctccacttgaaccctcaagtggcaaaggaggccggcatcgctgcggagtccttaggagagatggcggaatcttccggcgtgtcggaggaggccgccgagaatcccaaatctgtgagagaagaatgcattccgatgaagcggcggagacgggctaagctgtgttccagtgccgagactctggagtcacacccagacattgggaaatcaactccacagaagacagctgaagccgacccaaggagaggcgtgggttcacccccaggccggaaaaaaaccacggtgtccatgccccgctccagaaaaggtgacgcggcatctcagtttctggtcttctgccaaaagcatcgggacgaggtggtcgcagaacatccagatgcttcaggagaggagatcgaggaactgctgcggagccaatggtctctccttagtgagaagcaacgggccagatataacacgaagttcgcactcgtggcccctgtgcaggcagaggaggattccggcaatgtgaatggcaagaaaaggaaccacacaaaacgcatccaagatcctaccgaggatgccgaggccgaggatactccccgaaagaggttaagaacggacaaacatagtctgcgcaagcgtgataccatcactgacaagacggctagaacctcatcctataaggccatggaagctgctagcagtttgaagtcccaagccgccacgaagaatctgtccgacgcctgtaagcctctgaagaaacgcaacagagccagtacagcggcctcaagcgcgttaggcttctcgaagagctcgtcacctagtgcctctcttacggaaaatgaggtttccgactcccccggagacgagccatccgagagcccctatgagagcgctgatgagactcagacggaagtgagcgtgagctcaaagaagagcgaacgtggcgtcacagccaaaaaagagtacgtctgtcagctgtgcgaaaagcccgggagcttgcttctgtgcgagggcccatgctgcggcgcttttcacttagcctgtttggggctgagccgtagacccgaaggtaggtttacgtgttcagagtgtgcatccggcatccatagctgctttgtctgtaaagaaagcaagaccgatgtgaaacggtgtgtcgtaactcagtgtggtaagttctaccatgaagcctgcgttaaaaagtacccactgacagtgttcgagagcagggggttccgctgtccactccatagctgtgtatcatgtcatgctagtaaccctagtaacccgagaccatccaagggcaaaatgatgcgttgcgtaaggtgccctgtggcatatcattctggagatgcgtgccttgccgctggttgcagcgtgattgccagtaacagtatcatttgtaccgcccacttcactgcacgaaaaggaaagcggcaccatgcccatgtgaacgtgtcttggtgctttgtgtgtagtaagggggggtcgctgctatgttgtgagtcgtgtcccgcagccttccatcctgactgccttaatatagagatgcccgatgggagctggttttgtaatgactgccgggctggcaagaagctgcattttcaagatatcatttgggtcaagctgggtaattaccgctggtggccagccgaagtttgtcatcccaagaacgtgccccctaatatccagaaaatgaagcacgagattggtgaattccccgtctttttttttggaagcaaggattattactggacccaccaggccagggtatttccctatatggagggcgaccgggggagccggtatcagggagtcaggggcatcgggagggtatttaagaatgccctccaggaggcagaggccaggttcagggagattaaacttcaacgagaagcgcgggaaactcaggagagtgagaggaaaccccccccctataagcacataaaggtgaacaagccctatggtaaggttcagatctacacagccgatatatcggaaattcccaagtgtaattgtaagcccactgatgagaacccatgtggctttgactctgagtgcctgaatcgaatgttaatgttcgagtgccatcctcaggtatgtccagcaggagagttctgtcagaaccagtgcttcactaaaagacagtaccccgaaaccaaaatcatcaagactgacggcaaaggctgggggctggttgccaagagagatattcggaaaggcgagtttgtgaatgaatatgtcggagagctgattgatgaggaggagtgtatggcaaggataaagcatgcacacgagaacgacatcactcacttctacatgctcacaattgacaaggataggattatcgatgccggtcctaaggggaactacagccgattcatgaaccattcatgccagcccaattgcgaaacactgaagtggacagtgaacggtgatacaagggtgggtctcttcgctgtgtgcgacataccagcggggactgaacttacctttaactacaatctcgactgcctcgggaacgaaaagaccgtgtgccgttgtggagcatccaattgttccggattcttaggtgacaggcccaagacaagcaccacactgtcttctgaggagaaggggaagaagaccaagaaaaagacacgcaggcgccgagctaagggggagggaaagcgccagtctgaggatgagtgctttcggtgcggcgacgggggacaattagtcctgtgtgaccggaagttttgcacgaaggcctaccacctcagttgcctgggactgggaaagcggccctttggcaaatgggaatgtccgtggcaccactgcgatgtctgtggcaaaccgtctacatctttttgccatctatgtcctaatagcttctgtaaggagcatcaggatggaacagcattttcatgcacacccgatggccgatcctactgttgtgagcatgatctgggcgccgctagtgtgcgatctacaaaaactgaaaagcccccccctgagcccggcaaacctaaaggaaagcggcgccggaggagggggtggcgcagggtcaccgaggggaagtag

SEQ ID NO: 234688 - DNA, 4098 bp, Artificial Sequence
  derived and/or modified sequence
atggaattcagcatcaagcagtcccctctcagcgtacagagcgtggtaaagtgcatcaaaatgaaacaagcccctgagattctggggtctgctaacggaaagacaccctcatgcgaagtgaatcgggaatgcagcgtttttctgagcaaggctcaactctctagctccctgcaggaaggtgtgatgcagaaattcaatggccacgatgccctacccttcattccagcagataagttgaaagatcttacctcccgtgtttttaatggcgagccaggagcacatgacgcaaaactgcggttcgaatcccaggagatgaaaggcataggcactcccccaaatactacacctatcaaaaatggcagcccggagatcaaattaaaaattacaaaaacatacatgaatgggaaacccttgttcgaaagttccatctgcggtgattcggctgcagacgtgtctcagagtgaggagaatgggcaaaagcccgagaataaggctcgccgaaaccggaagaggtctatcaaatacgattcactgttggaacagggattggtggaagcagccttggtgagtaagatttccagcccaagcgacaagaagataccagcaaaaaaagagtcatgcccaaacacaggccgcgataaagaccacctgctcaaatacaacgtaggggacctcgtctggtccaaagtgtccggctacccctggtggccatgtatggtctctgccgacccgttgctgcattcatataccaagctgaaaggacagaaaaaaagtgctcgtcagtaccacgtccagtttttcggcgatgcgccggaacgcgcgtggatcttcgagaaatctctggtcgcgttcgagggcgaagggcagttcgaaaaactgtgtcaggagtctgcaaagcaggctcccaccaaggctgagaaaattaagcttctcaagcccatctccgggaagttgcgcgcccagtgggaaatgggcattgtccaggctgaagaggccgcctccatgtcagttgaggagcgaaaggcaaagtttacatttctgtatgtcggagatcagctccacctcaacccccaggtggctaaggaagcaggaatagccgccgagagcctcggggagatggctgaaagctcaggagtgagcgaggaagctgccgaaaatccaaagtccgtgagagaagagtgcatacccatgaagaggcgaagacgcgccaagttatgttcgagtgccgaaacactggagagtcaccctgatatcggcaaatctaccccacagaaaaccgctgaagctgatccaaggaggggtgtcggatctcctccgggacgcaagaagaccacagtgtccatgcctaggtccaggaaaggggacgcagcaagccaattccttgtgttctgccaaaagcacagagacgaggtggtggccgaacaccccgatgcatccggagaagaaatcgaggaactcctgcgctcccagtggtccctgctttcagagaagcaacgggccaggtataatactaagttcgcgctggtagcacccgtgcaggcagaagaggatagtgggaacgttaacggcaaaaagagaaaccacacgaagcggatccaggatccaacggaggatgctgaagctgaggatacaccaagaaaaaggctgcggaccgataagcactcactgagaaagagggacacgatcaccgataagacagcacgtactagcagttacaaggccatggaagcagcttcgagtttgaagtcacaagccgccaccaaaaacctgtccgacgcatgtaagccactcaagaagaggaacagggcttccacggccgcatcctccgctctggggtttagcaagagctctagccccagcgcatctctcacagaaaatgaagtctcagactcgcccggggacgaaccctccgagtccccctacgagtccgctgacgaaacccagacagaagtgtccgtgagtagtaagaagagcgaaagaggggtgactgccaaaaaggaatatgtttgtcagttgtgcgagaagcccgggtcacttctgttgtgcgagggtccttgttgtggagccttccacctggcctgcctgggcttgtccaggagaccggagggccgctttacttgtagtgaatgcgccagtggcattcactcgtgcttcgtatgcaaagagtcaaagacggatgttaaaaggtgtgtagtgacccaatgtgggaagttctatcacgaagcctgtgtgaagaagtaccccctaaccgtgtttgagagccgcggctttcggtgcccactgcattcttgtgtttcctgccatgccagtaacccttccaacccgcgcccttcaaaaggcaaaatgatgaggtgtgtccgttgccccgttgcatatcattccggggacgcttgcctggcagccggctgctcggttatcgcctccaactctattatctgcactgcccatttcacggcccgaaagggcaagcgccaccatgcacatgtgaatgtctcttggtgtttcgtctgtagtaagggcggatcgctcttgtgttgcgaatcatgccctgctgctttccatcccgactgtctgaacattgaaatgccggatgggtcttggttctgcaacgactgtagggccgggaaaaaactgcacttccaggatatcatttgggtaaaactcggaaactacagatggtggcccgcggaggtgtgccatcctaagaacgtgccccccaacattcagaagatgaaacacgaaatcggggaatttcccgtctttttctttgggtccaaagattactactggacacaccaggcgcgcgtgttcccatacatggagggcgacaggggcagtaggtaccaaggcgtgcgtggcattggaagggtatttaagaacgcactccaggaggccgaggcaagatttagagagattaaacttcagagagaggctcgggaaactcaggagtccgagaggaagcctccaccttacaaacacattaaagtcaataaaccttatgggaaggtgcaaatttataccgccgacatctctgagatcccaaaatgtaactgcaaacctacagacgaaaatccctgtggatttgactctgaatgtctcaacaggatgctcatgttcgaatgtcacccacaggtatgtccggctggcgaattctgtcagaaccagtgttttaccaaacgccagtatccagaaaccaagatcattaagacagacggaaagggctggggactcgtggcaaagcgggatatacgaaaaggcgagttcgtcaatgaatacgtgggtgaattaatcgacgaagaagaatgcatggcacgtataaagcatgcccacgagaacgacatcacccatttctatatgctgaccatcgacaaggacagaattattgacgcagggccgaaaggaaattactccaggtttatgaatcatagttgccaacccaactgcgagaccttaaaatggaccgtcaacggcgatactagagtgggcctgtttgcagtgtgcgacatccccgcaggaacggagctcactttcaactacaacctggattgtctaggcaacgagaaaacggtgtgccgatgcggggccagtaattgtagcggttttctgggggaccggcccaagacgagtacaactctgagctccgaggaaaaaggcaaaaagactaagaagaagacccgcagacgtagggcaaagggcgaaggaaaacgccagtccgaagatgaatgcttcaggtgtggggacggagggcagttggtgctgtgtgatagaaagttttgcactaaagcttaccacctgagttgtctaggcctgggcaagcgtcccttcgggaagtgggagtgtccttggcaccattgcgatgtgtgtgggaagccatctaccagcttttgtcacctttgccctaactccttctgtaaggagcaccaagatggcaccgccttctcatgtaccccagacgggaggagctactgctgtgagcacgatctgggcgcagcatccgtccggtccacgaaaacagagaagcccccccctgagccgggtaaaccgaaagggaagagacgacggcgtagagggtggagaagggtcacggaaggcaaatag

SEQ ID NO: 234689 - DNA, 114 bp, Artificial Sequence
  derived and/or modified sequence
atggagtttagcatcaaacagagtccgctgtccgttcagagcgtggtgaaatgtatcaaaatgaagcaggcccctgagatactgggcagtgccaacggtaaaacaccatcctag

SEQ ID NO: 234690 - DNA, 4098 bp, Artificial Sequence
  derived and/or modified sequence
atggaattctctatcaaacagtcccccctatccgttcagagcgtggtgaagtgtatcaagatgaaacaggcaccagagatcctgggatccgcgaatggaaagaccccttcttgcgaagtcaacagggagtgtagcgtatttctcagcaaggcgcaactttcttcaagccttcaggaaggggtcatgcaaaagtttaatggtcatgatgcccttcccttcatcccagccgataagctcaaggacctgaccagcagggtgtttaacggggagccaggggctcacgatgccaaacttaggtttgagtcccaggagatgaaggggattgggacgccgcccaatactacacccatcaagaacggaagtccagaaatcaaacttaaaattaccaagacctacatgaacggtaaaccattgtttgagtcctctatttgcggggattctgccgctgacgtgtctcaaagcgaagagaatggccagaagccagaaaacaaagctcgaagaaatcgaaagcgctcaattaaatacgatagccttctggagcagggactggtggaggccgccctggtgagtaagattagcagccccagcgataaaaaaattcctgccaagaaggaatcctgccccaacacgggacgggacaaggaccatctgttgaagtacaatgtgggcgacctcgtctggtctaaagtcagcggctacccatggtggccgtgcatggtttccgctgaccctttactgcacagctataccaagttgaagggccagaagaaaagtgcaagacaatatcacgtccagttctttggggatgcccccgaacgggcttggattttcgagaagtcccttgtggccttcgaaggggagggtcagtttgagaagctgtgccaggaatccgcgaagcaggcgcccaccaaagctgagaagataaagctactgaaacccatttccgggaagttgagggcacagtgggagatgggaattgtacaggctgaggaagcagcatctatgtccgtggaagagagaaaggccaagtttacctttctgtatgtgggcgaccagctgcatctgaacccccaggttgcaaaggaggcaggaatagcagccgagtcactgggtgagatggcagagagttcaggcgtctccgaagaggcggccgagaacccaaagtcagtacgcgaagagtgtatccccatgaaacgtaggaggagggcaaaactctgttcaagcgccgagacattggagagccacccagatatagggaagtccacaccacagaaaacagccgaggctgaccctcggcggggtgtcggatccccacccggaagaaaaaagaccactgtctccatgcctagatccaggaaaggcgatgccgcatctcagtttcttgtgttttgccagaagcatagagacgaagtagtggccgagcaccccgacgcgtccggtgaagaaattgaggaactgcttcgcagtcagtggagcctgttatccgaaaagcaaagagcgcgatacaatactaaattcgccttggtggcccctgttcaggctgaggaagatagcgggaatgtcaatgggaaaaaacgcaaccacaccaagcggatccaggatcctaccgaggatgccgaagccgaggatacaccgagaaaacgactgcgcacagataagcactccttacggaaaagagatactattacagataagaccgcaaggacctcttcttataaagctatggaagccgcctcttcactgaaatctcaagctgctactaaaaacttgagtgatgcttgcaaaccattgaagaagcgaaacagggcctccaccgctgccagttctgcactaggattttcaaagagctcatccccatctgcatcactgaccgagaatgaggtatccgattcccctggagacgagccatctgagagcccatatgaatctgccgacgagactcagaccgaggtttctgtctctagcaagaagagtgagagaggcgtgacagctaaaaaagaatatgtgtgtcagctttgtgaaaaaccaggctcccttctgctttgcgagggaccgtgctgcggagcttttcacctcgcctgcctgggattgagtcggcgcccagagggtaggtttacttgcagcgaatgcgcctccggaatccacagttgtttcgtgtgcaaggagtctaaaacggacgtgaagcgatgcgtggttacgcagtgtgggaaattttaccacgaggcctgcgtcaagaagtacccgctcacagtgtttgaaagccgcggtttcagatgcccactccatagttgcgttagttgccacgcttccaatccgtctaacccccgccccagtaaggggaagatgatgagatgtgtgcgatgccccgtggcgtatcacagcggcgacgcctgcttggccgcaggttgttccgtaatagcatccaactccatcatctgcacagcgcactttactgcccggaagggtaagagacatcacgcacacgtgaatgttagctggtgctttgtgtgctcaaagggcggaagtctgctctgctgcgagagttgtcccgcggccttccatcctgattgtttgaacatcgagatgcccgacggatcttggttctgcaacgactgcagggccgggaagaagctccatttccaagacatcatctgggttaagctcggtaactataggtggtggcccgctgaggtgtgccaccctaagaatgtccctccaaacatccaaaagatgaaacacgagattggcgagttcccagtgttttttttcggttccaaggactattactggactcatcaggcccgagtctttccttatatggagggggaccggggctcacggtatcaaggagtacgcggcatcggccgtgtgttcaagaacgcactgcaagaggccgaggcaagattcagggaaataaaactccagagggaggcacgggaaactcaggaatccgaacgtaagcctcccccctacaaacatatcaaggtaaataaaccttacgggaaggtacagatctacacagcagatatctctgagatcccaaaatgcaactgtaagccgacagacgaaaatccttgcggatttgattcagaatgtttgaaccgtatgttgatgttcgagtgtcacccccaggtctgccccgcaggggagttctgccagaatcaatgtttcactaagaggcagtatcctgagactaaaatcattaagaccgacggcaagggctggggcctcgtggctaagagggacatacgcaaaggcgaatttgtcaacgagtatgtaggcgaattaatcgatgaggaggagtgtatggctagaattaagcacgcacacgagaacgacatcacgcatttttacatgctcactattgataaggatcgcattattgacgcaggcccgaaaggtaactacagtagattcatgaaccatagttgccagcctaattgtgaaactctgaagtggaccgttaacggagacacccgagtaggcctcttcgccgtgtgcgacattccggccggcactgagctgacattcaactacaatctagactgcctgggcaatgagaaaacagtctgtcgatgtggggcatcaaactgttcaggatttctcggtgaccgccctaagaccagtactacgctgtcctccgaggagaaaggaaagaaaaccaaaaaaaaaacaagaagacgcagagcaaaaggagaggggaaacggcagtcagaggacgagtgctttcgttgcggagatggtggacaactcgtgttgtgcgatcggaagttctgcaccaaagcttaccacttatcttgcctagggctcgggaaacggcccttcgggaagtgggagtgtccctggcaccactgtgatgtgtgtggcaaaccctcaactagcttctgtcatttgtgtcccaacagcttttgcaaggagcatcaggacggtactgcgttctcttgcactccagatggtcgttcatattgttgcgaacatgatctcggcgcggcgagcgtgagaagcactaagactgagaaacctccacctgaacccgggaaaccaaagggaaaacggcgtcgacgacgcgggtggcgccgcgttactgaggggaagtag

SEQ ID NO: 234691 - DNA, 4098 bp, Artificial Sequence
  derived and/or modified sequence
atggagttcagcatcaagcagagccccctgtctgtgcagagcgtggtgaagtgcatcaagatgaagcaggcccctgagatcctgggcagcgccaacgggaagacccccagctgtgaggtgaacagagaatgttctgtgttcctgagcaaggcccagctgagcagcagcctgcaggagggcgtgatgcagaagttcaacggccatgatgccctgcccttcatcccagctgacaagctgaaggacctgaccagcagggtcttcaacggggagcccggggcccatgatgccaagctgcgctttgagagccaggagatgaagggcatcggcaccccacccaacaccacccccatcaagaatggcagccctgagatcaagctgaagatcaccaagacctacatgaatggcaagcccctgtttgagagcagcatctgtggggacagcgctgctgatgtgtcccagagcgaggagaatggccagaagccagagaacaaggcccggaggaacaggaagaggagcatcaagtatgacagcctgctggagcagggcctggtggaggccgccctggtgtccaagatcagcagccccagcgacaagaagatcccagccaagaaggagagctgccccaacacaggccgggacaaggaccacctgctgaagtacaacgtgggggacctggtgtggagcaaggtgtctggctacccctggtggccctgcatggtgtctgctgaccccctgctgcacagctacaccaagctgaagggccagaagaagagcgcccggcagtaccacgtgcagttctttggagatgcccctgagcgggcctggatctttgagaagagcctggtggcctttgaaggagagggccagtttgagaagctgtgccaggagagcgccaagcaggcccccaccaaggccgagaagatcaagctgctgaagcccatcagcggcaagctgcgggcccagtgggagatgggcatcgtgcaggccgaggaggccgcctccatgtctgtggaggagaggaaggccaagttcaccttcctgtatgtgggggaccagctgcacctgaacccccaggtggccaaggaggccggcattgctgctgagagcctgggggagatggccgagagcagtggagtgtctgaggaggccgctgagaaccccaagtctgtgcgggaggagtgcatccccatgaagagaagaagaagagccaagctgtgcagcagcgctgagaccctggagagccacccagacatcggcaagagcaccccccagaagacagctgaggccgacccccggcggggcgtgggcagccccccaggcaggaagaagaccaccgtgtccatgcccaggagcaggaaaggagatgctgccagccagttcctggtgttctgccagaagcacagagatgaggtggtggccgagcacccagatgccagcggggaggagattgaggagctgctgcggagccagtggagcctgctgtctgagaagcagagggcccgctacaacaccaagtttgccctggtggcccctgtgcaggccgaggaggacagcggaaatgtgaatggcaagaagaggaaccacaccaagaggatccaggaccccacagaagatgctgaggccgaggacacccccaggaagaggctgaggacagacaagcacagcctgaggaagagggacaccatcacagacaagacagcccggaccagcagctacaaggccatggaggccgccagcagcctgaagagccaggccgccaccaagaacctgagtgatgcctgcaagcccctgaagaagaggaacagagccagcacagctgccagcagcgccctgggcttcagcaagagcagcagccccagcgccagcctgacagaaaatgaggtgtctgacagccctggagatgagcccagcgagagcccctatgaatctgcagatgagacccagacagaggtgtctgtgagcagcaagaagtctgagcggggcgtgacagccaagaaggagtatgtgtgccagctgtgtgagaagccaggcagcctgctgctgtgtgagggcccctgctgcggggccttccacctggcctgcctgggcctgagcagaagacctgagggccgcttcacctgcagtgaatgtgccagcggcatccacagctgctttgtgtgcaaggagagcaagacagatgtgaagagatgtgtggtgacccagtgtgggaagttctaccacgaggcctgtgtgaagaagtaccccctgactgtgtttgagagccggggcttccgctgccccctgcacagctgtgtgtcctgccacgccagcaaccccagcaacccccggcccagcaagggcaagatgatgagatgtgtgcgctgccctgtggcctaccacagcggagatgcctgcctggccgccggctgcagcgtcatcgccagcaacagcatcatctgcacagcccacttcaccgccaggaagggcaagaggcaccacgcccacgtgaatgtgtcctggtgctttgtgtgcagcaaaggaggcagcctgctgtgctgtgagagctgcccagctgccttccacccagactgcctgaacatcgagatgccagatggctcctggttctgcaatgactgccgggccggcaagaagctgcacttccaggacatcatctgggtgaagctgggcaactaccgctggtggccagctgaggtgtgccaccccaagaatgtgccccccaacatccagaagatgaagcatgaaattggagagttccctgtgttcttcttcggcagcaaggactactactggacccaccaggcccgggtcttcccctacatggagggggaccggggcagccgctaccagggcgtgcggggcatcggccgggtcttcaagaatgccctgcaggaggccgaggcccgcttccgggagatcaagctgcagcgggaggcccgggagacccaggagagcgagaggaagcccccaccctacaagcacatcaaggtgaacaagccctacggcaaggtgcagatctacacagctgacatcagcgagatccccaagtgcaactgcaagcccacagatgagaacccctgtggctttgacagtgaatgtctgaacaggatgctgatgtttgagtgccacccccaggtgtgcccagctggggagttctgccagaaccagtgcttcaccaagaggcagtacccagagaccaagatcatcaagacagatggcaagggctggggcctggtggccaagagggacatcagaaaaggagaatttgtgaatgaatatgtgggggagctgattgatgaggaggagtgcatggcccgcatcaagcacgcccatgaaaatgacatcacccacttctacatgctgaccatcgacaaggaccgcatcattgatgctggccccaagggcaactacagccgcttcatgaaccacagctgccagcccaactgtgagaccctgaagtggacagtgaatggagacaccagggtgggcctgtttgctgtgtgtgacatcccagctggaacagagctgaccttcaactacaacctggactgcctgggcaatgagaagacagtgtgccgctgtggggccagcaactgcagcggcttcctgggggaccggcccaagaccagcaccaccctgagcagcgaggagaagggcaagaagaccaagaagaagaccaggagaagaagagccaagggggagggcaagaggcagagtgaagatgagtgcttccgctgtggagatggcggccagctggtgctgtgtgacaggaagttctgcaccaaggcctaccacctgagctgcctgggcctgggcaagaggccctttgggaagtgggagtgcccctggcaccactgtgatgtgtgtgggaagcccagcaccagcttctgccacctgtgccccaacagcttctgcaaggagcaccaggatggaacagccttcagctgcaccccagatggccgcagctactgctgtgaacatgacctgggcgccgcctctgtgcgcagcaccaagacagagaagcccccacctgagcccgggaagcccaagggcaagagaagaagaagaagaggctggaggagagtgacagagggcaagtag

SEQ ID NO: 234692 - DNA, 114 bp, Artificial Sequence
  derived and/or modified sequence
atggagttcagcatcaagcagagccccctgtctgtgcagagcgtggtgaagtgcatcaagatgaagcaggcccctgagatcctgggcagcgccaacgggaagacccccagctag

SEQ ID NO: 234693 - DNA, 4098 bp, Artificial Sequence
  derived and/or modified sequence
atggagttcagcatcaagcagagccccctgagcgtgcagagcgtggttaagtgtatcaagatgaaacaggctcccgagatcttggggtccgctaatggcaaaacaccatcctgtgaggtgaaccgagaatgctcggtgtttctttccaaggctcagctgagctcttccttgcaggaaggcgtgatgcaaaagtttaacggacatgacgctcttccattcattcccgccgacaaactgaaggacctgacatccagggtttttaacggcgagcctggtgctcacgatgccaaactgcggtttgaatcccaggaaatgaaaggcatcggtacaccacctaacaccaccccaattaaaaacggaagtcccgagattaagctaaagatcacaaagacctacatgaacggcaagcccctatttgaaagttccatctgcggagacagcgccgcagacgtgtctcagtccgaagaaaacggacagaagcctgaaaacaaggcaagacgcaatcgcaagaggtctatcaaatatgattccttgctagaacagggcctagtggaagccgccctagtgtcaaagatcagctcccctagtgacaagaagatcccagcgaaaaaagagtcctgccccaacactggcagagacaaggatcatctgctgaaatacaatgtgggagatctggtgtggagtaaagtctctggttacccttggtggccctgtatggtcagtgccgatcccttacttcactcatacactaagcttaaggggcagaagaaaagtgccagacaataccatgtccagttctttggtgatgcccccgagcgggcctggatcttcgagaaatctctggtggcattcgaaggggaggggcaatttgaaaagctgtgtcaggagagtgcaaagcaggcgcccacaaaggccgaaaaaatcaaactgctgaagccaatctccggtaagctcagagctcagtgggagatggggattgtccaggcagaggaagcagcgtctatgagtgtcgaagagagaaaagctaaatttacatttctgtatgtcggggaccagctccatctgaacccacaggtagccaaagaagcaggcatcgccgcagaaagccttggcgaaatggcagagagcagcggggtgagcgaggaggctgcagagaatcccaaaagtgtgagagaggagtgtattcccatgaaacggcgcaggagagccaagctgtgttcttctgccgagacgctggagtctcaccccgacattggaaaatctacgcctcagaaaaccgcagaagctgatcccaggagaggggtgggcagccctccaggcagaaagaagaccacagtcagcatgcctaggtcaagaaaaggggacgcggctagccagtttttggtcttttgtcaaaaacatcgggacgaagtggtcgctgagcaccctgatgccagcggagaagaaatcgaagagctgttgaggagtcagtggtctttactctccgaaaaacagagggcccggtacaacactaagtttgccctggtagcccccgtgcaggccgaggaggacagcgggaatgtgaacgggaaaaagcgcaatcacacaaaacgcatccaagatccgactgaggatgctgaggcagaggatactccacgcaaacggctccgcactgataaacacagtttgcggaaaagggataccattacggataagactgcacggacaagttcttacaaagcaatggaagcggcctcttctctgaaatcgcaggctgccacaaaaaatctgagtgatgcttgcaaacccctaaaaaagcgtaatagggcctcaaccgccgctagctccgcgctgggattctctaagtccagctccccatcagcgtccctgaccgagaatgaagtcagcgatagccccggcgatgaacccagcgaaagcccctacgagtccgcggatgagacccagaccgaagtttctgtttctagcaaaaagtccgagcggggcgtaacagctaagaaagaatatgtatgccagctctgcgagaaacctggatccctgctcctgtgtgagggcccttgctgcggcgcctttcacctggcttgcctcgggctgtcacgacgccccgagggccggtttacctgttccgagtgtgctagcggtatacacagctgcttcgtgtgcaaagaatctaagacagatgttaaaagatgtgtcgtcactcaatgcggcaagttctaccatgaggcatgcgtgaaaaagtacccgttgactgtctttgagtccagagggtttcgatgcccgttgcatagctgcgtctcctgccacgccagcaaccctagcaacccaaggccgagcaagggtaagatgatgaggtgcgttaggtgcccggtcgcgtatcactctggtgacgcctgcctggcagccggctgctctgtgattgcgagcaacagtatcatctgcactgcccattttaccgctcggaaaggaaaacgccatcacgcacacgttaacgtgtcttggtgctttgtgtgtagcaaggggggttcactcctgtgctgtgagtcttgccccgccgcatttcaccccgactgcctaaatatcgagatgcctgatgggagctggttctgcaacgactgccgcgctgggaagaagcttcacttccaagacatcatttgggtgaaactgggaaactaccgttggtggcccgcagaggtctgtcatcccaagaacgtacctcccaacattcagaaaatgaaacacgagattggggagttccctgtgttcttctttggatcaaaagactattattggactcatcaggcgcgggtgtttccctacatggagggggaccgtgggagcagatatcagggcgtacgcggaatcggccgggtgttcaaaaatgcccttcaggaagccgaggctcgttttcgggagattaagctgcagagagaagctcgagagacccaggagagcgagcggaagcctccgccttacaaacacatcaaagtgaataagccgtacggtaaagtgcagatctacactgccgatatctccgaaatacctaaatgtaactgcaagcctacggatgagaatccttgtgggttcgatagcgagtgcctgaaccggatgttgatgtttgaatgtcaccctcaggtctgtccagctggcgaattctgccagaaccagtgttttaccaagcggcagtatccagagacaaaaattataaagacagatggaaaagggtggggtctggtcgctaaaagagatatacggaaaggagagtttgtcaatgagtacgtgggggaattgatagacgaggaggaatgcatggctcgtatcaagcacgcccacgaaaatgatatcacgcatttttatatgctgaccatcgataaagaccggataatagacgcagggcctaaagggaactattcccgcttcatgaaccatagctgccagccgaattgcgaaaccctaaagtggacagtcaatggggacactcgcgtcggcctcttcgccgtgtgcgatatccctgccggaactgagctgactttcaactacaatcttgactgcctgggcaatgaaaagaccgtgtgtcggtgtggggctagcaactgctctggattcttgggtgataggccgaaaacctcaactaccctgagctccgaagaaaagggcaagaagacaaagaagaagactagaaggcgccgcgccaagggcgagggcaaacgacaatccgaggacgagtgcttccgatgcggggacggcggtcagttggtgctgtgtgatagaaaattttgcactaaggcttatcacctgagttgtttgggactgggtaagcgcccgtttggcaaatgggagtgtccctggcaccactgcgacgtttgcggaaagccttccacatccttttgtcacttatgccccaactcgttttgcaaagagcatcaggacggaacggcttttagctgcacgcctgacggcagaagttactgttgcgaacacgaccttggtgccgcctctgtgcggtcgacaaaaacggagaaacccccacccgagcccggtaagcccaagggtaagcgaagacgccgacggggatggcgtcgggtgactgagggcaaatag

SEQ ID NO: 234694 - DNA, 4098 bp, Artificial Sequence
  derived and/or modified sequence
atggagttcagcatcaagcagagccccctgagcgtgcagagcgtggttaagtgcatcaagatgaaacaagcaccagagattctgggcagtgccaacggcaagactcctagctgcgaagtcaacagagaatgttcagtctttctcagcaaggcccagctgagctcaagccttcaggagggggtgatgcagaagtttaacgggcacgatgctctgccctttatacctgcggataagctaaaggatttaacatcgcgtgtatttaacggagagccaggtgcccatgacgccaaactgcgatttgagagccaggagatgaagggaataggcaccccacccaatacgaccccgataaaaaacggttcccccgaaataaagctgaaaatcaccaaaacatacatgaatgggaagcctttattcgaaagcagcatctgcggggattccgccgcggatgtgagccagtctgaagaaaacggacaaaagcccgaaaacaaagctcgaaggaatcggaaacggtctatcaaatacgactccctgttggagcaggggttagtagaggcagcgctagtctccaaaataagctctccgagtgacaagaagattcctgctaagaaggaaagctgccctaataccggccgagacaaggatcacctgctgaaatataacgtgggagacctggtgtggtcgaaggttagtggctatccctggtggccctgtatggtctctgccgatcctctcttacattcttataccaaattgaagggacagaagaagagcgctagacagtatcatgtgcagttcttcggagatgctcctgaaagagcctggatattcgagaagtccctggtggccttcgagggcgagggccagttcgagaagctctgccaggaatccgctaaacaagcccccaccaaggcagaaaaaatcaaactgctcaagcccatttcagggaagctcagggcccagtgggaaatgggcattgtgcaagcagaggaggccgctagcatgtctgttgaagagaggaaagcgaagttcacattcctgtatgtgggagaccaactgcatttgaacccgcaagtggccaaggaagcaggaattgccgcagaaagcctgggagaaatggcagagagttccggcgtgagtgaggaggcggctgagaaccctaaatctgtgagagaggaatgtatacctatgaagcgtcgccggcgcgccaagctgtgcagctccgctgaaacactggagtcccatcccgacatcggcaagagcacgccccagaagacagctgaagcagacccacggaggggcgtcggctctccacccggcagaaaaaaaaccaccgtctcgatgccgcgcagccggaaaggagacgctgcatcccagttcctggtattctgccagaagcatcgagacgaagttgttgctgagcacccagatgcctccggagaagaaattgaggaactcctgaggagccaatggagtctcttgtctgagaagcagcgtgcaaggtataacacaaagttcgccctcgtcgcacccgtgcaggccgaggaagattccggcaatgtgaatggaaagaagcggaaccatacaaaacgcatccaggatccgactgaggacgcagaagccgaggatacccctagaaaaagattacgtacggataagcattccttgagaaaacgggataccatcacagacaagactgcccgcacgagcagctataaagccatggaagccgctagttctctcaaatctcaggccgccacgaaaaacctgtccgacgcctgtaagcctctcaaaaagcggaatagagccagcacagctgcatcaagcgcactagggttcagcaaatcttcctctcccagtgccagtttgaccgagaacgaggtgtccgatagccccggtgatgagcctagtgagtccccatatgagtccgccgatgaaactcagacagaggtctcagtgtcttctaagaagagcgagcggggcgttaccgccaagaaagagtatgtttgtcagttatgcgagaagccaggttctctgctgttatgcgaagggccctgctgcggcgcgttccatctggcttgtctgggcctgtctcgacgtccagaaggacgcttcacctgcagtgaatgtgcctcaggtatacacagctgcttcgtctgtaaggagagcaaaacagacgtgaaacgctgcgtggttacacagtgtggaaagttctatcacgaagcttgtgtgaagaagtacccccttacagtctttgagagcagaggtttcaggtgccctctgcactcttgtgttagctgtcacgccagcaaccctagtaacccgcggccatcgaagggtaagatgatgcggtgtgtccgttgcccggtggcctaccattcaggagacgcatgcttggcggcgggctgtagcgtgatcgcaagcaacagcattatctgcacagctcacttcaccgccagaaaggggaaaagacatcatgctcatgttaacgtttcctggtgtttcgtgtgttcgaaagggggttcattgctttgttgtgagtcttgccccgccgcgttccacccagactgtctgaacatagagatgcccgacgggtcctggttctgtaatgactgcagggctggaaagaaactccatttccaggacataatctgggtcaaactggggaactatagatggtggccagccgaagtctgccacccaaagaacgtgcctccaaatattcaaaaaatgaagcatgagataggagaattcccagttttcttcttcggaagcaaggattactattggactcaccaggcaagagtgttcccatatatggagggggatagaggttcccgatatcagggcgttaggggtattggcagggtttttaagaacgctctgcaggaggctgaggctcgattcagagaaataaagttgcagagagaggcgcgcgaaacccaggagagcgagagaaagcccccgccatacaagcacattaaggtaaataagccttacgggaaagtgcaaatctacactgcagatatctccgaaattccaaagtgtaattgcaagcccacagacgaaaacccctgcggcttcgacagcgaatgtctaaataggatgctgatgttcgaatgtcacccacaggtgtgccctgccggagagttttgtcagaaccagtgttttactaagaggcagtatcctgagaccaaaattattaagaccgacggaaaagggtggggactggttgccaagcgtgatatcagaaagggcgagttcgtaaacgaatatgtcggcgagctcatcgatgaagaagagtgtatggcaagaattaagcacgctcatgagaatgatataacccacttctatatgctcacaatcgataaggatcgcatcatcgacgccgggcccaaggggaactattctagattcatgaaccattcctgccagccaaactgtgagacgcttaagtggaccgtgaacggagacaccagagtcggcttgttcgctgtttgcgacatccccgcagggactgagcttacctttaattacaacttagattgtcttggaaatgagaagactgtttgcagatgtggtgcctctaactgtagcggctttctcggtgacagacctaaaacttccacaactctttcttcggaggaaaagggcaaaaagaccaagaagaagacccgaaggcggcgggcgaaaggcgaaggaaagagacagagcgaagacgaatgctttcgttgtggcgacggtggtcaactcgtactctgtgatcgaaaattctgcacaaaagcctatcatctctcctgcttgggactaggaaagagaccctttggtaagtgggaatgtccctggcaccattgtgacgtgtgcggaaagccatccacatcgttctgccacctctgccctaatagcttttgtaaagaacaccaagacggaacagcatttagctgcacaccggatgggcggagctactgttgcgagcacgacctgggggcggcgtccgtgaggtccacgaagacagagaaaccgcctcccgaacccggtaagcctaaaggtaagagaaggcgaagacggggatggcggcgggtcacagaggggaaatag

SEQ ID NO: 234695 - DNA, 4098 bp, Artificial Sequence
  derived and/or modified sequence
atggagttcagcatcaagcagagccccctgagcgtgcagagcgtggtgaagtgcatcaagatgaagcaggctcctgagattttggggtcagccaacggaaagacgccaagctgcgaagtgaaccgggaatgtagcgttttcttgtccaaagctcaactctccagctcacttcaggagggggtgatgcagaagtttaacggtcacgacgctcttcctttcatcccagcagacaagttgaaggacctcacttcacgggtgttcaacggcgaacctggggctcacgacgccaagctgcgcttcgaaagccaggagatgaaaggaatcggcactccccctaataccacgcccatcaagaacggttctcctgagattaagctgaagataacaaagacatacatgaatggcaaaccactcttcgaatcatccatctgtggcgattctgcggccgacgtctcccaatccgaggaaaacggccagaagcctgagaataaggctagacgtaatcggaaacgaagcatcaagtacgattctctgctcgagcaagggttagtggaggccgcgctggtcagtaagatctctagccctagcgacaagaagataccagccaaaaaggaaagctgccccaacaccggcagagacaaagaccatctgttgaaatataatgtaggcgatctggtctggtccaaggtgtccgggtacccctggtggccctgcatggtcagcgcagatcctctgcttcattcctatacgaaacttaaagggcagaaaaagtctgcccggcaatatcatgtgcagttctttggggacgcccccgaaagagcctggatcttcgagaaatctcttgtggcattcgaaggggagggtcagtttgagaaattgtgccaggaatctgctaaacaggctcctaccaaagctgagaagatcaaactgttaaagcccatcagcggtaaactgcgcgcgcaatgggaaatggggatcgtccaggccgaggaggccgcttcaatgagcgtggaggagagaaaggccaaattcacttttctttatgtgggagatcagctgcatttgaacccacaagtcgcgaaggaggcggggattgccgccgagtcgctgggggagatggccgagagctccggcgtttcagaagaggccgctgagaatcccaaatccgtgcgagaggaatgtatccccatgaagcgccggaggcgggcaaaactttgttcttcagccgaaaccctggagagccaccccgatatcgggaagtcaactccccagaagactgcggaggctgaccccaggcgtggcgtcggctcaccacccggccgaaaaaaaaccactgttagcatgcctagaagccggaaaggggatgccgcttctcaattcctggttttctgtcaaaagcaccgcgatgaggttgtagccgagcaccccgacgcttccggggaggaaattgaggagctcctccgatctcagtggagcctcctcagcgagaaacaacgagccaggtataacaccaagttcgcactcgtggccccagtacaggccgaagaagattcaggaaatgtgaatggaaaaaagcggaaccacacaaaacggatacaagaccccactgaggatgcagaagctgaggatacaccacgaaaacgcctcaggacggataagcacagcctgagaaaacgggataccattacagataagactgctaggacctcctcttacaaagcaatggaggccgcaagttctttaaagtcccaggccgcaactaagaatttgtccgatgcatgtaaaccattgaagaaacgaaaccgggcctctactgcagcatcctctgcactgggattttccaagagttcctccccttctgctagcctgacagagaacgaagtgagtgatagcccaggcgatgaaccgagcgaaagcccttatgagtctgccgatgagacacaaactgaagtgtcggtatcttccaagaaatctgaaaggggcgtgactgccaagaaggagtacgtttgccagctttgtgaaaagcctggttccctcctgctttgtgaaggcccctgctgcggagcctttcatctggcttgtctggggttgtcccgtcggcctgagggacgcttcacatgtagcgaatgtgcaagcggcattcacagttgcttcgtctgcaaagagagcaaaacagatgtcaaacgctgcgtggtcactcaatgcggcaaattctatcatgaagcttgcgtcaaaaagtaccctctgaccgtctttgaaagccgtgggtttcgttgtcctctgcatagctgcgtatcatgtcatgcttccaacccttctaacccccggccctccaagggtaagatgatgcgctgcgtgcgctgtcctgtagcctaccattctggggacgcttgtctggccgcgggatgtagcgttatcgcctccaattcaatcatatgcacagctcattttactgcccgcaaggggaagcgccaccatgctcacgtgaatgtgtcctggtgttttgtttgctccaagggtggtagcctgttatgttgtgagagctgccccgcggcgtttcatcccgattgtttaaacatcgaaatgccggatgggagctggttttgcaacgactgtcgcgccggcaagaaactgcatttccaggatatcatttgggtgaaactcggcaactaccgctggtggcccgccgaagtctgccacccaaagaacgtgcctcccaacatacaaaagatgaagcacgaaataggggagtttcctgtcttcttctttggatcaaaggactattactggacacatcaggccagggtgttcccatacatggagggtgatcgcggatctagataccagggtgttagagggattggacgggtgtttaagaatgcccttcaggaggccgaggctcgatttagggaaattaagctgcagcgggaggcccgggaaactcaggagagcgagaggaagccacccccttataagcatattaaagtcaataagccttacgggaaggtgcaaatctacacagccgatatcagcgagataccgaaatgtaattgcaagcccactgatgaaaacccatgtggcttcgattccgagtgcttaaatcgtatgctcatgttcgagtgccatccacaggtctgtccagcgggtgaattctgccagaaccagtgcttcactaaaagacagtaccctgagaccaagatcattaagaccgatgggaaggggtggggcctggtagcgaagcgggatatcagaaagggcgaatttgtgaacgagtatgtgggtgaactgatcgacgaggaagaatgtatggcccgtatcaagcacgcacacgagaatgacataacacacttctacatgctgaccatagacaaagatagaatcatcgatgctggtcctaagggaaattacagtaggtttatgaatcactcctgccagcccaactgcgagactctgaagtggaccgtgaacggggatacgcgcgtgggcctctttgcagtttgcgacattccggccgggaccgaactcacgtttaattacaatctagactgcttagggaatgagaagactgtgtgtaggtgtggcgccagtaattgctccgggtttctcggcgatcggcctaaaacttccaccaccctgtctagtgaagagaaggggaaaaagacgaaaaaaaagacacggaggcgtcgggcaaaaggagagggaaagcggcagagcgaggacgagtgtttcaggtgtggggatggcggccagctcgtgctttgcgaccggaaattttgcacaaaagcgtaccatctatcttgtctcggcttgggtaaacggccctttggaaaatgggagtgtccatggcaccattgcgacgtgtgcgggaagccctccacatcattttgccacctctgccctaatagtttttgcaaggagcaccaggacggaacagctttttcgtgtaccccagatgggcggtcctactgttgtgagcatgatttaggtgccgcctccgtgcgcagtaccaagacagagaaaccccctccagagccgggcaagcctaagggcaaaagaagaaggcgacgcggctggcgaagggtgaccgagggtaagtag

SEQ ID NO: 234696 - DNA, 114 bp, Artificial Sequence
  derived and/or modified sequence
atggagttcagcatcaagcagagccccctgagcgtgcagagcgtggtgaaatgtatcaaaatgaagcaggcacctgagattttgggaagtgcaaatggaaaaaccccatcgtag

SEQ ID NO: 234697 - DNA, 4098 bp, Artificial Sequence
  derived and/or modified sequence
atggagttcagcatcaagcagagccccctgagcgtgcagagcgtggtgaagtgcataaaaatgaaacaggcaccggaaatcctgggcagtgccaatggcaagacgccctcatgtgaggtgaacagagaatgctccgttttcctctccaaggcacaattgagctcttcactgcaagaaggggttatgcagaagttcaatggccatgacgccctgccatttatccctgcagataaactgaaagacttgacttccagggtcttcaacggcgagccaggcgcacatgacgccaagctccgattcgagtctcaagaaatgaagggaattgggactcctcctaataccacccccatcaagaacggctccccagaaattaagctgaagataaccaagacttacatgaatggcaagcctcttttcgagtctagcatctgcggggattccgccgccgatgtgagtcagtccgaagaaaacggccaaaagcctgagaataaagctcggcgcaacaggaagagatctattaaatacgactccctgttggagcaaggtctggttgaggccgccttggtctctaagatatcatctccgagtgataagaagatcccggctaaaaaggagtcgtgtccaaatacaggtcgggacaaagatcacctactgaagtacaacgtgggcgatcttgtttggtcaaaagtcagcgggtacccatggtggccgtgcatggtgagcgccgatcccctcctccattcatatacaaagctcaagggtcagaaaaagtctgcccggcagtaccatgtgcaattcttcggagatgctcccgaaagagcttggatttttgagaagtcgttggtggccttcgaaggcgagggacagttcgaaaagctgtgtcaggagagtgcaaagcaggcccctacaaaggccgagaagatcaaactgttgaagcccatttctggcaaactgcgagcacagtgggaaatggggattgtccaggctgaagaagctgccagcatgtccgtggaagaaagaaaagccaagttcacatttctctatgtgggcgatcagcttcacctgaacccccaggtcgccaaagaagctggcatagctgcggagagcctgggcgaaatggccgagtccagtggcgtgtcagaagaggcagccgaaaaccctaaaagcgttcgtgaggagtgtatacccatgaaacgccgacgtcgcgctaagctgtgctcaagcgccgaaacgcttgagtcccatcctgatattggtaagtctacaccacagaagacagctgaggctgacccaagacgcggtgttggttctccccctggacgaaagaagactactgtgtcgatgcctcggagcagaaagggggacgcggctagccagtttctcgtgttctgccagaaacacagggatgaggtggtggccgagcatccagatgcctcaggcgaggaaatcgaagagcttttaaggtctcagtggagcctcttgtccgagaaacagagagctcgatacaacaccaaatttgccctggtggccccagtgcaggctgaggaggactccggtaacgtgaatggtaaaaagcgcaaccacaccaaaagaatccaagatccaacagaggacgcggaagctgaggatacacctaggaaacgcttgcggaccgataaacacagcctgcgcaagcgcgataccattactgataaaacggcacggacctcctcatataaagcaatggaagccgcatcaagcctgaaaagccaggcagcaaccaagaatttgtccgacgcttgtaagcccctaaaaaagcggaatagagcgagtactgccgcgtcttcagcgcttgggttcagtaagtcatcatctccgtcagcatccttaacagagaacgaggtctctgacagccccggagatgagcctagtgagtctccttacgagagcgcagatgagacccagacagaggtcagtgtttcctccaaaaaatcggagcggggtgtcacggctaagaaggagtatgtgtgtcaactctgtgagaaacccgggagcttgctcctttgcgaggggccatgctgtggcgcctttcacttggcatgtctggggctcagtagacgccccgaaggtagatttacttgctcggaatgtgcaagtggcatccacagctgcttcgtgtgcaaagagagtaaaactgatgttaagagatgtgttgtcactcagtgcggcaagttttaccatgaggcttgcgtcaaaaagtacccattgacagttttcgaatcccgcgggtttcggtgcccattgcactcatgtgtgagttgtcatgcgagtaatccaagtaatcctaggccttctaaggggaaaatgatgcgttgcgtcagatgccctgtcgcctatcattcaggagatgcctgtctggcggcagggtgtagcgtgatagcctccaattcaattatctgtacagcgcattttaccgccaggaagggaaaaaggcaccatgcccacgtaaatgtgagttggtgtttcgtgtgcagcaaaggggggtctctgctgtgctgcgaatcatgtcccgctgcctttcaccctgattgtttgaacattgaaatgccagacgggagttggttttgcaatgattgtcgtgctggtaaaaaactgcatttccaggacatcatatgggttaagcttggcaactataggtggtggcctgcagaagtatgccatcccaagaacgtgcccccgaacatccagaaaatgaaacatgaaataggcgaatttccggtcttcttttttgggtccaaggactattattggactcatcaagcccgggtctttccgtacatggagggggatcgtggttccaggtatcagggggtccgcgggatcggccgggtcttcaaaaacgctctgcaagaggccgaggcccgctttcgggagataaagctgcagcgggaagcaagagagacacaggagtccgaacgtaaacctcccccatataaacacataaaggttaataaaccttacggcaaagtccaaatttacacagcggacatctcagagatacccaaatgtaactgcaagccaaccgatgagaacccatgcggattcgacagcgagtgtcttaacagaatgttgatgttcgagtgccacccacaggtctgtcccgccggcgaattttgccagaatcaatgttttactaagagacaataccctgagactaaaatcattaaaactgacggtaagggctggggcttggttgcaaagcgcgatattcgtaaaggagagttcgtgaatgaatatgttggcgaattaatagacgaggaggagtgcatggcaagaattaagcacgcccatgagaacgacattacccatttctacatgttgaccatcgacaaggacagaatcatagatgcaggcccaaaaggtaactattccaggtttatgaatcattcatgccagcccaactgcgaaaccctgaaatggactgtcaatggggacactagagtcgggctgtttgctgtgtgcgacattccagctggcactgagctcacttttaactacaatctcgactgcctcggaaatgaaaaaactgtctgtagatgcggcgcatctaactgttccggctttcttggtgaccggccaaagacgagcaccactctcagctccgaagagaaaggtaaaaagaccaaaaagaaaactagacggcgcagggctaagggcgagggtaagcggcagtctgaggacgagtgctttcgctgtggtgacggcggccagctcgtactttgtgaccgcaagttctgtactaaggcttaccacctgtcctgtctaggcttaggcaagaggccatttgggaaatgggaatgtccttggcaccattgcgacgtctgcggaaagccttccacaagcttctgtcacctctgcccaaatagtttctgtaaagaacatcaagacgggactgcctttagttgtacccccgacggtcgcagttactgctgtgagcacgatctgggcgcagcatcagtgcgatcaactaagacagaaaagcccccccctgaaccaggcaagcctaaggggaaacgccggagacgcagaggctggcgacgcgtgactgaaggcaagtag

SEQ ID NO: 234698 - DNA, 4098 bp, Artificial Sequence
  derived and/or modified sequence
atggagttcagcattaagcagtctccattgtcagtacagagtgtggtgaagtgcattaagatgaagcaggcccctgaaatcctcggctccgccaatgggaaaaccccgagctgtgaggtgaaccgcgagtgcagtgtatttctgagcaaggcccagctgagctcatccctgcaggagggcgtcatgcagaaattcaacgggcatgatgctctccctttcattcccgcagacaaactgaaggacctaacctcaagagtctttaacggggagccgggagcccacgacgctaagctccggtttgagtctcaagagatgaaaggcatcgggaccccacccaataccactccaataaagaacggatcaccagagatcaaattgaaaatcacgaagacctacatgaacggaaagcctttgttcgagagctccatatgtggagactcagccgcagatgtgtcccagagcgaggagaatgggcagaaaccagagaataaggctcgacggaacaggaaacggagtattaaatacgactcactccttgagcagggcttggtggaagccgctctagttagtaaaatctcctctccgagcgacaaaaaaatcccagccaaaaaggagagctgtcctaatactgggagagacaaagaccacctattaaaatataacgtgggagacctggtgtggagtaaagtctccgggtatccatggtggccttgcatggttagcgcggaccccctcctgcatagctatactaaactgaaggggcaaaagaaatccgcacgccagtaccacgtgcagttcttcggggacgccccagaacgggcttggatcttcgagaaaagtctcgtagccttcgaaggcgaaggtcaattcgaaaaattatgtcaagagagcgccaaacaagctcccacaaaggctgaaaagattaagctgctgaaaccaatctcagggaagttgagagcacagtgggaaatgggcatcgtgcaggctgaggaagctgccagtatgtctgtggaagaaaggaaggccaagtttacatttctgtatgtgggagaccagttgcacctgaatccccaagtcgcaaaagaagctggaatcgctgccgagtccctgggagagatggccgagtctagtggagtatccgaggaggctgcagagaatcctaaaagcgttagagaggaatgtattccaatgaagcgcagacggagggcaaagctgtgttcctcagccgagacccttgaatctcatccagacatcggaaaatcgacgcctcagaagaccgcagaagcagatccgaggaggggtgtggggtctccccctgggagaaaaaaaacaactgtatcaatgcctagatcacgcaagggcgacgcggcaagccagttcttggtgttttgtcagaaacatagagatgaagttgtggcggaacacccggacgccagtggggaagagatcgaggagctgttaaggtcccagtggtctctgctgtctgagaaacagcgggctcgctataacacaaagttcgctttggttgccccagtacaggctgaggaggactcaggcaacgtaaacggtaagaaaagaaatcatacaaagcggattcaggatcctaccgaggacgctgaagcggaggacacaccacggaaacgtctgaggaccgacaaacactcactcagaaaacgagataccatcaccgataagaccgccagaacttcaagctataaggccatggaagccgcttcctctctgaaaagccaagctgcaacgaagaacctgtccgatgcttgcaaacctctgaagaagaggaacagagcttccaccgccgcatctagcgcacttggtttttctaagagcagcagccccagcgctagtctgactgaaaacgaggtttctgattctcccggtgacgagcccagtgaaagcccatatgaatctgctgatgagacccagaccgaggtgagcgtgtcctctaagaaatccgagcgaggtgtgacggcaaaaaaggagtacgtctgtcagctgtgcgagaaacccggaagtcttttattgtgtgaggggccatgttgcggagcatttcaccttgcctgtctggggctctctcgcaggccagagggaaggttcacttgtagtgagtgcgcttcaggaatccacagttgctttgtgtgcaaggagtcgaaaaccgatgttaaaaggtgcgtcgtcacacaatgtggcaagttttatcatgaggcctgtgtgaagaaatatccactcactgtgttcgaaagtagggggtttcggtgccccctgcactcctgcgtctcttgccacgcctcaaacccctcaaaccccaggcctagcaaaggtaagatgatgcggtgcgtgcggtgcccggttgcatatcacagcggtgatgcctgtctcgcagccggatgttccgtgattgcttcaaactcaatcatctgcacagcccactttacagctcggaaggggaagcggcatcacgcacacgttaatgtatcctggtgttttgtctgttctaagggcggttcactgctctgttgtgagtcttgtcctgcagccttccaccccgactgcctcaatattgagatgccagatggctcctggttctgtaacgactgtagagcagggaagaagttgcattttcaggacattatttgggtgaagctgggcaattacaggtggtggcccgcagaggtttgccaccccaaaaatgttccaccgaacatacagaaaatgaaacatgaaatcggcgagttccccgtattcttctttggctcgaaggactattattggacacaccaggccagggtgtttccctacatggagggagaccgtggaagtagataccaaggagttagaggcattggacgagtgtttaagaacgctttgcaggaagctgaagctagatttagggaaattaagcttcagcgcgaggccagggaaacacaggagagcgagagaaaacccccaccttacaaacacataaaggtgaataagccatatggaaaggtgcagatttacacagccgatatctccgaaatcccaaaatgtaactgtaagcccaccgatgagaacccttgcgggttcgactcagaatgtctgaacagaatgctgatgtttgagtgccaccctcaggtgtgcccggcaggggagttttgccaaaatcagtgcttcacaaaaaggcagtaccctgaaacaaaaatcatcaaaactgatggcaaagggtggggcctcgtagccaaaagagatatcagaaagggcgagtttgtgaatgagtacgtcggggagctgatagatgaagaggaatgcatggcacgcatcaagcatgctcacgagaatgacataacgcacttctacatgctgactattgacaaggatagaatcatcgacgccggtcctaagggcaactacagtaggttcatgaaccattcctgccagcctaactgtgaaactctgaaatggaccgttaatggcgatacgagggtagggctttttgctgtatgtgatatcccagctggcacagagctgacattcaattataatctggattgtctgggaaacgaaaagacagtgtgccgctgcggagctagcaactgttccggtttcctgggcgatcgcccaaaaaccagcacaaccctttctagtgaagagaaggggaagaaaactaaaaagaagacccgacgacgtcgagccaaaggggaaggaaaacggcagtctgaggacgagtgctttcgctgcggtgatggcggtcaactggtcctgtgcgaccggaagttttgcactaaggcttaccacctcagctgcctgggactggggaagcgtccattcggcaaatgggagtgcccatggcaccactgcgatgtatgcggcaagccaagcacatctttctgccacctctgtccaaattcattctgtaaggagcatcaggatgggactgcgttcagctgtacccctgatgggcgaagctactgctgtgagcatgatctgggcgctgccagtgtgcggtccactaaaacagaaaaacctccgccagagcctggcaagcccaaaggcaagagacgcagaagacggggttggaggcgcgttaccgagggaaaatag

SEQ ID NO: 234699 - DNA, 4098 bp, Artificial Sequence
  derived and/or modified sequence
atggagttttcaattaaacagtcacccctaagcgtccagagcgtggtgaaatgcattaaaatgaagcaggccccagaaatccttggatccgcaaatggaaaaacccctagttgcgaggtgaatcgcgagtgtagcgtcttcctttccaaagcacagctgtcatctagcctgcaagagggggtcatgcagaaattcaatggccacgacgcactgccatttatacctgctgataaactcaaggatctgacctcacgggttttcaacggcgagcccggtgcccacgatgcgaaactgcgatttgagagccaggagatgaaaggaataggcactccccctaacaccacacctattaagaatggttcccccgagattaagttgaaaataactaaaacttacatgaatggcaaacctctctttgagtctagcatttgcggagatagcgccgctgatgtctcacagtctgaggaaaatgggcagaagccagaaaacaaagctcggcgaaatcgcaagcggtctatcaaatacgattccctgctcgagcagggactggtcgaagctgcccttgtctctaaaataagtagtccttctgataagaaaattccggctaaaaaggaatcttgccccaacaccggtcgcgataaagatcatctgctcaagtacaacgtcggggatttggtgtggtcgaaagtttccggatacccgtggtggccatgtatggtctctgcagatccgctcttacattcttataccaagttgaagggacagaaaaaatcagctaggcaataccatgtacaatttttcggcgacgcccctgagcgcgcttggatcttcgagaaatctctggtcgcttttgaaggagaaggacagtttgaaaagctctgccaggagtccgccaaacaagcccctaccaaagccgaaaaaattaaactcctcaagcccatctccggcaaattgagggcacagtgggagatgggtattgtgcaagccgaagaagccgcttcaatgtcagtggaggagagaaaagccaaatttactttcctctacgtgggcgaccagctccatctaaacccgcaggtcgctaaggaggctggcatcgccgcagaaagcctcggagagatggccgagtcatctggcgtgagcgaggaggccgctgaaaacccgaagagcgtgagagaagaatgtatacctatgaaaagacgcagacgggctaagctgtgcagttcagccgagacgctcgagtctcatccagacatcggcaagtctacccctcagaagactgccgaggccgaccccaggcggggagtcggctccccacccggacgtaagaaaactacagtgtctatgcccagaagcaggaagggggacgctgcatcgcagttcctggtgttttgtcagaaacacagggatgaggttgttgcagaacaccccgatgcctctggggaggaaatcgaggagctgctgagaagccaatggagcctgctaagcgagaagcagcgagcccgttataataccaagttcgcgctcgtggcaccagtgcaagccgaggaggactccggtaatgtcaatggtaagaagcggaaccacactaaacggatccaagacccgacagaagatgctgaggcagaggacaccccaaggaagcggctgagaaccgataagcactccctgagaaaaagagatactattaccgataagactgcaagaacctctagctataaagctatggaggcagcctcctctcttaagagtcaagccgcaaccaagaacttgtctgatgcttgcaagcctcttaaaaagaggaatcgcgctagcacagcggctagtagtgcattggggttcagcaagtcctcaagcccatctgcatctctgacagagaatgaagtgtctgacagccccggagacgagcccagtgagtctccatatgaatccgcagatgaaacccagacggaagtgagcgtctctagcaagaagagcgagaggggtgttacagccaaaaaagagtatgtctgccagctgtgcgaaaagcctggttccttattgctgtgtgagggcccatgctgcggagccttccatctcgcctgtcttggactctcccggagaccggaaggccgattcacatgctcggaatgcgcctccgggatacattcatgcttcgtgtgcaaggagagcaaaacagatgttaagcggtgtgttgtaacccagtgcgggaaattttatcatgaggcttgtgtcaagaaatacccactaaccgtttttgagagtagaggctttagatgtccactgcattcttgcgtgtcttgtcacgcgtcaaaccctagcaaccctcgccctagtaaagggaaaatgatgagatgtgttcggtgcccagttgcctatcactcaggtgatgcatgtttggcagccggatgcagtgttattgcatctaattcgattatatgtacagcccatttcacggctagaaagggcaaaaggcatcacgcacatgtcaacgtttcttggtgcttcgtttgcagcaaaggcggatcactgttgtgttgtgagtcttgccctgccgcatttcatcctgactgtctgaacattgagatgcccgatggatcctggttttgtaacgactgtcgggctgggaagaaacttcactttcaagatatcatctgggtcaagctcggaaactaccgctggtggccagctgaggtttgtcacccaaaaaacgtgccacccaacatacaaaagatgaagcatgagattggtgaatttcccgtgttctttttcggcagtaaagattactactggacacatcaagccagggtgttcccttatatggaaggcgacagaggttcccggtaccaaggcgtgcggggaattggacgtgtcttcaaaaatgccctccaagaggctgaggcccgatttagagagataaaactccagcgggaggccagggagacccaggaaagcgagagaaagccgccaccttataagcatatcaaagtcaacaagccttatggcaaggtccagatttacacagccgacataagcgagataccaaaatgcaactgtaaacccacagatgagaatccttgtggctttgactcagaatgtctcaatcgtatgttgatgtttgagtgccatccccaggtgtgtccggcaggagagttctgccagaaccagtgcttcacaaagcgccaataccctgaaacgaaaattatcaaaacagatggcaaaggatggggtctggtggccaaacgggatattagaaaaggcgaattcgttaacgagtatgtaggcgagctgattgacgaggaggagtgcatggcacgaatcaagcacgctcacgagaacgatatcacccatttctacatgctgactatagataaggatcgcatcatagatgccggacctaaggggaactattcccgtttcatgaaccatagttgccagcctaattgcgaaaccctgaaatggacagtgaatggcgacactcgggttggtttattcgcagtatgtgacattcctgccggaactgagctgaccttcaattataacctcgattgtcttggaaacgaaaagactgtatgcaggtgcggcgcttctaattgtagcgggttcctgggtgacaggcctaagacttctaccactctgtcgagcgaggaaaaggggaagaagacaaaaaagaaaacccgacggaggcgtgcaaagggagaaggtaaaagacagtccgaggacgagtgcttccggtgtggagacggagggcagctggtactctgcgaccggaaattctgcacaaaagcctaccacttgagctgccttggactgggtaaaaggccgtttggaaaatgggagtgtccatggcaccattgtgacgtgtgtggcaaaccaagcacgtccttttgccatttgtgtccaaactctttctgtaaggaacaccaggatggaactgcttttagttgtacacccgatggtagatcatattgctgcgaacacgacctcggggcagccagcgtcagatccaccaagaccgaaaaacctccacccgaacccggaaagcctaaggggaagcgtcgaaggcggagggggtggcggcgagttaccgagggcaagtag

SEQ ID NO: 234700 - DNA, 4098 bp, Artificial Sequence
  derived and/or modified sequence
atggaattcagcatcaagcagagtccactttccgtgcaatctgtggtgaagtgcatcaaaatgaagcaggccccagagatactggggagtgctaatgggaagacgccctcatgtgaggttaatcgagaatgttcagtgttcctgagtaaggcccagctgagcagctctttgcaggagggagtgatgcagaagttcaatggccatgacgcacttccgttcattcctgccgacaagcttaaggacctcactagcagagtgttcaacggagaaccgggtgcacatgatgcaaagttaagattcgagtctcaggagatgaagggaatcggaaccccccctaacaccacacccattaaaaacggctctccggaaatcaaactgaaaatcaccaaaacgtacatgaacggcaaacctcttttcgaaagcagtatctgtggggattcagctgctgacgtgtcccagtccgaggaaaacggccagaagcccgagaacaaggccaggcgtaaccgtaaacgttctatcaagtatgactcacttctggagcaggggcttgttgaggccgctcttgttagcaagataagctccccatccgataaaaaaattccagccaaaaaagaaagttgtcctaacaccggcagagacaaagaccacttacttaaatataatgtgggagatttagtatggtctaaggtcagtggttatccctggtggccttgtatggtgagtgccgatccactgctccatagttacaccaagctcaagggtcagaagaaaagcgctcgtcagtaccatgtccaattcttcggggacgcgccagaacgcgcatggatttttgaaaaaagtctcgtagccttcgagggagaaggccagtttgaaaagctgtgtcaggaatctgcaaaacaggcccctacgaaagccgaaaaaatcaagttgctcaagcccatttcggggaagcttcgagcccagtgggagatgggaattgtgcaggctgaagaggcagcttctatgagtgtggaggaaaggaaagctaaatttacatttttatacgtgggcgatcagttacacctgaacccccaagtcgcgaaggaagccggaatagcagccgagtcactcggggaaatggccgaaagctcaggagtctcagaggaggctgcagagaatcccaagtccgtgagggaagagtgtatcccgatgaaacggcgaaggcgcgcaaaattgtgtagtagcgccgaaaccctggagagtcaccctgatattggtaagtcaactcctcagaagacggcggaagcagatccaaggagaggcgtcggaagtccgccaggcaggaaaaagacgactgtgagtatgccacggtcacgcaagggcgacgccgcttcccaattcctcgtattctgccagaaacacagggacgaagtagttgctgagcaccctgacgcatcgggcgaggagattgaggagctgctgcgaagccagtggtcattactttcagaaaaacagcgggcacgatacaataccaagttcgctctagtggcacctgtccaggccgaggaggacagcggcaacgtgaatggaaaaaagaggaaccacaccaaacggatccaggaccccacagaagacgccgaagccgaagataccccacgaaagcggttgcggacagataagcatagccttcgcaagcgtgatactatcactgataagaccgcacgcaccagctcatataaagctatggaagctgccagtagcctgaaatctcaggccgcaaccaaaaacttatccgacgcatgtaagccgttaaagaagcggaacagagccagcaccgccgctagctcagccttaggattttctaagagctcttctccctcagcttccctgacggaaaatgaagtctctgacagtcccggagacgaaccgtcagagagcccctatgaaagcgccgacgaaacacagaccgaggttagcgtgagcagcaagaagtcagaacgcggagtgacggccaagaaggaatacgtgtgccagctgtgtgagaagccaggttcccttttgctttgtgaggggccatgttgcggagcattccacctggcctgcttgggactaagccgaaggccagagggtaggttcacttgcagtgagtgcgcctcggggatccactcttgtttcgtgtgcaaagagagtaagaccgacgtgaagcggtgcgttgtgacccaatgcggaaaattctatcatgaggcctgtgttaagaagtaccccctcaccgtgttcgagagcagaggtttcagatgcccactgcactcgtgcgttagctgccacgcttccaatcccagcaatcctaggccctcaaaaggaaaaatgatgagatgcgttcgatgtcccgtggcctatcatagtggggacgcctgtttggccgcagggtgttccgttatcgcttctaactccattatctgtacagctcattttactgcccgaaagggcaaacgccatcacgcccacgttaatgtgagctggtgcttcgtgtgttccaagggcggaagtctgctgtgttgcgagtcctgtcccgctgccttccatcccgactgtctcaatatcgagatgcctgatgggtcatggttctgtaacgattgcagagccggaaaaaagctgcattttcaggacataatctgggtcaaattaggcaactatcgttggtggcccgcagaggtgtgccacccaaagaacgtacccccaaacattcagaaaatgaagcatgagataggagaattccccgttttcttcttcggctcaaaagactactactggacccatcaggctcgggtcttcccctacatggagggggatcgtggatccaggtaccagggcgtacgtgggattggtagagtcttcaagaacgctttacaggaggccgaggccaggtttcgcgaaataaagttacagcgcgaagctcgggaaacccaggagtctgagcggaaacctcccccatacaaacatatcaaggtgaacaaaccttacggcaaggtccagatctacacagccgacatttcagagattcctaagtgtaattgcaagccaacagatgaaaatccatgtgggttcgattcggagtgcctcaaccgtatgctgatgttcgaatgccacccccaggtctgcccagcgggtgaattttgtcagaatcaatgcttcacaaaaagacagtacccagagaccaagatcatcaaaaccgatggaaagggttggggacttgtcgcaaagagggacatcaggaaaggcgagtttgtcaacgaatacgtgggggagttgatagacgaggaggagtgcatggcgcgaattaagcatgcccatgaaaacgatatcacccacttttatatgctgacaattgataaggatcggatcatcgatgcaggtccaaaggggaactactcccggttcatgaatcattcgtgccagccgaactgcgaaacactgaagtggactgtgaatggcgacaccagagtgggcctgttcgcagtgtgtgatatccctgctggaaccgaattgacgtttaactataatctagactgtttggggaatgagaagactgtttgccggtgtggcgcttctaattgctccgggtttctgggggataggccgaagacgtctactactctctctagtgaggagaaagggaagaaaaccaaaaagaaaactaggagaaggcgggcaaagggagagggcaaacggcagtctgaagacgagtgttttagatgtggcgacgggggacagcttgtcttatgcgacagaaaattctgtactaaagcctatcatctatcctgcctgggactggggaaaagacctttcgggaaatgggaatgcccgtggcaccactgcgacgtgtgcggaaagccaagtaccagtttctgccatctttgtcctaactcattctgcaaagagcaccaggatgggaccgctttcagctgcacaccggacggtaggtcctactgttgcgagcacgacctcggggcagccagcgtgagatcaaccaagaccgagaaacctccgccagagccgggaaagcccaagggaaagcgtaggcggcgaaggggctggcgtcgagtgacagaaggtaaatag

SEQ ID NO: 234701 - DNA, 114 bp, Artificial Sequence
  derived and/or modified sequence
atggagttcagtattaagcagtcacccttaagcgttcaatctgttgttaagtgtatcaagatgaaacaggccccagagattttgggctccgccaacggtaaaacccccagctag

SEQ ID NO: 234702 - DNA, 4098 bp, Artificial Sequence
  derived and/or modified sequence
atggaattcagcataaagcagagcccactgtccgtgcagagtgttgtgaaatgcatcaaaatgaaacaggcaccggaaatattgggttcagcaaacggtaaaactccctcttgtgaagtcaaccgtgagtgttcagtcttcctatccaaagctcagttgagcagttcactgcaggaaggagttatgcagaagttcaacggtcacgatgcactgccatttattcctgccgacaagctgaaggacttaactagcagagtgtttaacggcgagcccggagcccatgatgccaaacttagatttgaatctcaggaaatgaagggcattggaacacctccaaacacgacccccattaaaaatggaagtcctgagattaagctcaagatcacaaagacatacatgaatgggaaacctttgtttgagtcgtccatttgcggcgacagtgctgcagacgtttcccagtccgaagagaacggccaaaaacccgaaaataaggctaggaggaatagaaagaggtctattaaatacgactcactgcttgagcagggcctagttgaagctgctctggtgtccaaaatcagctccccttccgataagaaaatccccgcaaagaaggagagctgcccgaacacaggacgcgataaagatcatctattgaagtataatgtcggtgacttggtgtggtctaaagtgtctggctacccatggtggccatgcatggtatctgccgatcccctgctgcattcctatactaagttaaagggccaaaagaaaagtgccagacagtatcacgtgcagttttttggcgatgctcccgaacgagcttggatctttgagaagagcttagtggcgttcgagggagaggggcaattcgaaaaattatgccaggaatcagcgaagcaagccccaaccaaagccgaaaaaatcaagctgctgaaacccatctccggcaagctgcgggctcagtgggaaatggggatcgtgcaggcagaagaggccgcatcaatgagtgtggaggagcgaaaagctaaattcacttttctgtacgtaggggatcagctgcacttaaatccccaggtggccaaagaggctggcattgccgctgaatccctgggggaaatggccgagtctagcggcgtatccgaagaagcagctgagaaccccaagtctgtcagggaggaatgcattccaatgaaacgacggcgtcgtgctaaactatgctcctccgctgagactctcgaaagtcaccccgatatcgggaaatctacaccacagaaaacagcagaagcagatccccgacggggtgtaggcagcccccctggcaggaaaaagacaactgtgtccatgcctcgaagtcggaaaggtgacgccgcatcccaatttcttgtcttttgccaaaaacatagagacgaggtggtagcagaacatcctgatgcgtcaggagaggaaattgaggaactgctgaggtcacagtggtcgctgttgagcgaaaagcagagggccagatacaacactaaatttgcattagttgctcccgtacaggcagaagaggatagtggcaacgtgaacggcaagaagcggaatcatacaaagaggatccaggacccgaccgaggatgccgaagctgaagataccccacgcaagagacttagaaccgacaaacattcccttagaaaacgggatacaattacagacaaaacggctcggaccagcagctataaggcaatggaagcagccagcagtctgaaatcgcaagcggctaccaagaacctgtccgacgcctgtaaaccattgaaaaaacgaaatagggcatccaccgcagcatctagcgccctgggattctccaagtcttcttccccctcagcttccctcaccgaaaacgaagttagcgattctcctggcgatgagcccagcgaaagtccatacgagtccgcggacgagactcagactgaagtaagtgtgagctcaaaaaaaagcgaacgtggagttactgcaaagaaggagtacgtctgtcagctttgtgagaaacctggttctcttctgctctgtgaagggccttgctgcggcgcattccaccttgcctgccttgggctaagccgcagacctgaagggaggttcacctgttcggaatgcgctagcggcattcacagctgtttcgtgtgcaaggaaagcaagactgacgtgaagcgctgcgtcgtgacccagtgcggcaagttttaccacgaagcttgcgtgaaaaaataccccttaacagttttcgagtcaagggggtttcgctgtcccttacatagttgtgtgtcttgtcacgcaagtaaccccagtaacccacgcccatctaagggcaagatgatgcgctgcgtgcgctgccctgtcgcatatcacagcggcgacgcttgtctggcagcaggatgtagcgtgatcgcctcaaacagtatcatatgtactgctcatttcactgctcgcaagggcaagaggcaccatgcacacgtgaatgtcagctggtgtttcgtgtgtagcaaagggggttctctgctgtgttgcgaatcctgtccagctgcgttccacccagactgcctcaacattgaaatgccagacgggtcttggttctgtaacgattgccgcgcaggcaaaaaactgcacttccaggatatcatttgggtcaagttgggaaattataggtggtggcccgctgaagtgtgccaccccaaaaatgtgcctcccaatatccagaagatgaaacatgagataggtgaattccctgtgtttttctttggcagtaaagattactattggacccatcaggcaagggtgtttccatatatggagggggatcggggatcacggtaccagggagtgcggggaatcggacgggtttttaagaatgcccttcaagaagcagaagccaggttccgggagatcaagctgcagagggaagcaagggaaacacaggagagcgagcgcaaacccccaccttataaacatattaaagtgaataaaccatacgggaaagtccagatttacactgctgacatctccgaaattccaaagtgcaattgtaaaccaaccgacgagaacccttgcgggtttgactccgagtgcctgaacaggatgctgatgtttgagtgccatcctcaggtttgtcccgcaggcgagttctgtcagaaccagtgttttaccaaacgtcagtaccccgagaccaagattataaaaacagacggcaaaggctggggcctcgtagctaaaagagatattcgtaaaggcgagttcgtgaatgagtatgtcggggaactgatcgatgaggaggaatgcatggctcgaattaagcacgctcacgagaatgacattacccacttttacatgctgactatagacaaggatcggatcatcgatgctgggcctaagggcaattactcacggttcatgaaccactcttgtcagccaaactgcgagactctgaagtggactgtaaacggcgacaccagggtgggactattcgccgtgtgcgatattcccgcaggtacagaactcacctttaactacaatctcgactgtcttggcaacgagaaaacagtctgccgctgcggcgcaagtaactgctctggcttcctcggagatagacctaagacaagcaccacactctcttctgaagagaaaggtaagaaaacaaagaagaaaacccggagacggagggctaaaggtgagggcaaaaggcagtccgaggacgagtgcttccgatgtggagatgggggacagctcgtgctgtgcgacagaaagttttgcacgaaagcctatcacctgtcatgtctagggctcggcaaaagaccttttggaaagtgggagtgcccatggcaccactgtgatgtctgcggtaaaccttcaacctccttttgtcacctttgtcccaactcattctgcaaggagcatcaggacggcactgccttctcgtgtacgcctgacgggaggtcttactgttgcgaacacgacttgggcgctgcctcagtacggagtactaaaaccgaaaagccccctccagaaccaggcaagccaaaaggcaagcggaggcggaggagaggctggagaagggtgacagaagggaaatag

SEQ ID NO: 234703 - DNA, 7534 bp, Artificial Sequence
  derived and/or modified sequence
tggtcttgaactcctgaccttgtgatccgctcgcctcagcctcccaaagtgctgggattacaggcatgagccaccgtgcctgtcctagaaccactggtaactcttaactgtgttctaagaacggaagcatctgggctggatggaatttagcatcaagcagagtcccctttctgttcagagtgttgtaaagtgcataaagatgaagcaggcaccagaaatcctcggcagtgccaacgggaagactccgagctgcgaggtgaaccgcgagtgttctgtgttcctcagcaaagcccagctctccagtagcctgcaggagggggtcatgcagaagtttaacggccacgacgccctgccctttattccagccgacaagctgaaagatcttacttcccgggtgtttaatggagaacccggcgcacacgatgccaaactgcgttttgagtcccaggaaatgaaagggattgggacaccccctaacactacccctatcaaaaatggctctccagaaattaagctgaaaatcaccaaaacatacatgaatgggaagcctctctttgaatcttccatttgtggtgacagtgctgctgatgtgtctcagtcagaagaaaatggacaaaaaccagaaaacaaggcgagaaggaacaggaagaggagcataaaatatgactccttgctggagcagggccttgtcgaagcagctcttgtgtctaagatctcaagtccttcagataaaaagattccagctaagaaagagtcttgtccaaacactggaagagacaaagaccacctgttgaaatacaacgttggtgatttggtgtggtccaaagtgtcgggttacccttggtggccttgcatggtttctgcagatccactccttcacagctataccaaacttaaaggtcagaaaaagagtgcacgccagtatcacgtacagttctttggtgacgccccagaaagagcttggatatttgagaagagcctcgtagcttttgaaggagaaggacagtttgaaaaattatgccaggaaagtgccaagcaggcacccacgaaagctgagaaaattaagctattgaaaccaatttcagggaaattgagggcccagtgggaaatgggcattgttcaagcagaagaagctgcaagcatgtcagtggaggagcggaaagccaagttcacctttctctatgtgggggaccagcttcatctcaaccctcaagtagccaaggaggctggcattgctgcagagtctttgggagaaatggcagaatcctcaggagtcagtgaagaagctgctgaaaaccccaagtctgtgagagaagagtgcattcccatgaagagaaggcggagggccaaactgtgtagctctgcagagaccctggagagtcaccccgacatagggaagagtactcctcaaaagacggcagaggctgaccccagaagaggagtagggtctcctcctgggaggaagaagaccacagtctccatgccacgaagcaggaagggagatgcagcatcccagtttttggtcttctgtcaaaaacacagggatgaggtggtagctgagcacccagatgcttcaggtgaggagattgaagagctgctcaggtcacagtggagtctgctgagtgagaagcagagagcacgctacaacaccaagtttgccctggtggcccctgtccaggctgaagaagactctggtaatgtaaatgggaaaaaaagaaaccacacaaagaggatacaggaccctacagaagatgctgaagctgaggacacacccaggaaaagactcaggacggacaagcacagtcttcggaagagagacacaatcactgacaaaacggccagaacaagctcttacaaggccatggaggcagcctcctcgctcaagagccaggcagcaacgaaaaatctgtctgatgcatgtaaaccactgaagaagcgaaatcgggcttccacggcagcatcttcagctcttgggtttagcaaaagttcatctccttctgcatccttaactgagaatgaggtctcggacagcccgggagacgagccctcggagtccccatacgaaagtgcagacgaaacacaaactgaagtatctgtctcatccaaaaagtctgagcgaggagtgactgccaaaaaggagtatgtgtgccagctgtgtgagaagccgggcagcctcctgctctgtgaaggaccctgctgcggagctttccacctcgcctgccttgggctttcccggaggccagaagggaggttcacctgcagcgagtgtgcctcagggattcactcatgtttcgtgtgtaaagagagcaagacagatgttaagcgctgtgtggtaactcagtgtggaaaattttaccatgaggcttgtgtgaaaaaataccctctgactgtatttgagagccgaggtttccgctgccccctccacagctgtgtgagctgccatgcttccaacccttcaaacccaaggccgtcaaaaggtaaaatgatgcggtgtgtccgctgccccgttgcctatcacagcggggatgcttgtctggcagcaggatgctcagtgatcgcctccaacagcatcatctgcactgcccacttcactgctcggaaggggaagcgacaccacgcccacgtcaacgtgagctggtgcttcgtgtgctccaaaggggggagccttctgtgctgtgagtcctgcccagcggccttccaccctgactgcctgaacatcgagatgcctgacggcagctggttctgcaatgactgcagggctgggaagaagctgcacttccaggatatcatttgggtgaaacttgggaactacagatggtggccggcagaagtttgccatcccaaaaatgttcccccaaatattcagaaaatgaagcacgagattggagaattccctgtgtttttctttgggtctaaagattattactggacgcatcaggcgcgagtgttcccgtacatggagggggaccggggcagccgctaccagggggtcagagggatcggaagagtcttcaaaaacgcactgcaagaagctgaagctcgttttcgtgaaattaagcttcagagggaagcccgagaaacacaggagagcgagcgcaagcccccaccatacaagcacatcaaggtgaataagccttacgggaaagtccagatctacacagcggatatttcagaaatccctaagtgcaactgcaagcccacagatgagaatccttgtggctttgattcggagtgtctgaacaggatgctgatgtttgagtgccacccgcaggtgtgtcccgcgggcgagttctgccagaaccagtgcttcaccaagcgccagtacccagagaccaagatcatcaagacagatggcaaagggtggggcctggtcgccaagagggacatcagaaagggagaatttgttaacgagtacgttggggagctgatcgacgaggaggagtgcatggcgagaatcaagcacgcacacgagaacgacatcacccacttctacatgctcactatagacaaggaccgtataatagacgctggccccaaaggaaactactctcgatttatgaatcacagctgccagcccaactgtgagaccctcaagtggacagtgaatggggacactcgtgtgggcctgtttgccgtctgtgacattcctgcagggacggagctgacttttaactacaacctcgattgtctgggcaatgaaaaaacggtctgccggtgtggagcctccaattgcagtggattcctcggggatagaccaaagacctcgacgaccctttcatcagaggaaaagggcaaaaagaccaagaagaaaacgaggcggcgcagagcaaaaggggaagggaagaggcagtcagaggacgagtgcttccgctgcggtgatggcgggcagctggtgctgtgtgaccgcaagttctgcaccaaggcctaccacctgtcctgcctgggccttggcaagcggcccttcgggaagtgggaatgtccttggcatcattgtgacgtgtgtggcaaaccttcgacttcattttgccacctctgccccaattcgttctgtaaggagcaccaggacgggacagccttcagctgcaccccggacgggcggtcctactgctgtgagcatgacttaggggcggcatcggtcagaagcaccaagactgagaagccccccccagagccagggaagccgaaggggaagaggcggcggcggaggggctggcggagagtcacagagggcaaatagcgccaggcggccgcttggccggatccaggggcggtgcagggcggccggccctgcctgcgggagagggcgagcatgaactggcccggaggacccagctcgagccgccaggacacagacgtacaggcctcctcgggagggagcgcctccccaccactgagccatcctcagcagcgtccgctgcgtctgcactgatgaccgtctgagcccagctcagcgttcctggacaaacagcctcactcctcagcgttaccgccacacttgaatttctccgaatgtcaaggttccctcccactctatttttttaggttaaagttaattggcatatggaatgttttaatctcctctgaaatgtgtagcgtaggcttttcccaagggtcgctagaaactcgtcttcgcgttgccccctttctggctctcagcgccgtcgccactcgggagaggctgggtgaggcccgtgtgaggactgaccctggattcctcgaaactgccattgtgatcattactctgctctttggaaatggctgtatcatttttttgtactaatgtgaattgttcctcagaaacgcttcttttccatcctagtgagaagctggccctgcaggtggtggcagcaatggtgttgtaagatttcctcccgtagttttttctcctcatggatttgaatgaaatgccaataacacgtccactttcaacgtgtagtttacgcggagcactttcgaggcctggccgggttgggcctacttctcacctgggcctatcttctgaactcgctaggttcttatcaacatttgggggataactttgtatatttttttcatttggcttttctttaccagtttctgatttttattctcaatatatttttgctaaacctatttcacaaatcaccaccgactgaagtgtgtgtttactgatgcggccctgagctccatggcgaaaggagtgactttgcagggcgtgagaccgcagtctgcttagagcacaggaagtgacaacttagggagccccgtagggcgctgcaggccccggggaccccagcacgtgggtctaaagagagacggagtctagctctcctgccacccagagtggcttccatctcagcactctgtgggtctggtgatggaagatgcagtctctgctgatcacatgtgccctctgccagggcacctactgagaggtgcggtcctgggggtggaggcctgcctggcaggtgtgcgtgcctcgtacgtgtgttatgggcactggtctaggccaggtatgacacccactctcctgtgagatttcactttagtttttaaaaggtccagttctacagagtgagacctatctatctgagtactacatatgttttaagacttggttctttttttgagggatccttgaccctgggaagtctggagcaccctgagaagggggcaccatgtgtgcctttgcccacgtgtcctgaggggctgcttgtctgggagggagggagagaacattcagcagcaggtgcttttttatggccttttcttaaaataacctaagggggacacatccatcttgcagagaagtttacagaactccccttgaaaactgctgctgaggctcctgttaaattttctgtggcatcttttatgccttggtaaaaactgcagtgtctttggacctgagagtggctactccgtggttttgtgacctgtaagcgtggggttcaggggtgtgtggccctgcagggtcccacgcctccctgagcactgactggaagtttcactggctggtggctgtcccttctcccatcagggtccccagcaaagttaactacacagaggacccaggggaaacgagctgtgtagccactgacttgctcgcgcggccgtggcctctgaggggcactcgccggttaagacagggtgggagtagtgctttccagttcagactctaacttctcccaaagtgtcctaagaaaatactggatcggctcatagatttatgctccttatgatgccctaacttggaaggttgttctagggacaggccgggcagtgtccccacacacaccttagagtcgaaggccccagggccccgctgtcacttgcccaaaagatcccttccggcaggtaagggactaccaatgcttacgtcaaaacagcagaatcggctttgcagtgcactttggggagcagatattaacttatttttgtgttggacagtagtgaaatcttgtgatttttaatcgctttgataatacttccaaattttatgatttttctgaaggaaataatgcaaacattttaaatatgtttctccccctttccaaaaactgttaaactaatgagcaagtaacactaactttgaatgtctctacaatacccgttgataactcagtggagccaggctttggggtagcggccctgagcttgcagggtttctcgccactggggctgaccacgcccccagctgtgaccgtgggtgtggctggctctcggccctgcccagctttgttctgaggacgtggtgacttcctgaacatcagcttcaatcctccatcattaatgtgaagcaaaacacaaaaaccgccccaatccctcaggattccttggcatccgaaaccagcatctgcacctaaacccatacccacccgtgtgcgcccacagggggatgtgtccgaatgggcagcttaaaatgtggtcacctgtgggggaaactcttcaggcacctgaagtgagaacccagctgtccgtcctcaggccggcctttcttccggcgacacccgtccatggctggctgggtccccttcgcagtgtttgtctgtcttgacatctaaaccccggcgtgtgcagtgcccatcttccaggactaccttattttccagaattaaacctgttttataattcaagttaatgcaaatgactgtcagttgccaaatatcttgatcctatgagtgtagttgatgactgtttgttagtcagtagagtaaaatgctgtgtccacggggtgtcacagcctcaccataccctgttgaggtgtgaaatgccccgtcagaaattaaatacaaacttaaatgtgcctattggtgtctaaacttcatacaatgtaaggtcagattccttttaggaatactgggtgctgtcaccaggtttgatagttagacttaaaaacttgaaattcactttttggggggagggatatactgaaatagagagttgagacttgccagttgggggaaaatagcatttaaaatggaaagctgtgtttggaaaattgtgtatgagtatttttgtattaaaaacattttaaaggcttttttcttaactt

SEQ ID NO: 234704 - DNA, 7706 bp, Artificial Sequence
  derived and/or modified sequence
tggtcttgaactcctgaccttgtgatccgctcgcctcagcctcccaaagtgctgggattacaggcatgagccaccgtgcctgtcctagaaccactggtaactcttaactgctgtctgcttttctgtggagactgcgggttgcagacaccagcagccccctattgctgcacgtcaggtgtcctccacctcagtactgtggacatctcgggccgcatagccctgttgcgcgggcatcctgtgcgttgcaggagatgcagcagcatccatgaccgcaacccatcagagtgttctaagaacggaagcatctgggctggatggaatttagcatcaagcagagtcccctttctgttcagagtgttgtaaagtgcataaagatgaagcaggcaccagaaatcctcggcagtgccaacgggaagactccgagctgcgaggtgaaccgcgagtgttctgtgttcctcagcaaagcccagctctccagtagcctgcaggagggggtcatgcagaagtttaacggccacgacgccctgccctttattccagccgacaagctgaaagatcttacttcccgggtgtttaatggagaacccggcgcacacgatgccaaactgcgttttgagtcccaggaaatgaaagggattgggacaccccctaacactacccctatcaaaaatggctctccagaaattaagctgaaaatcaccaaaacatacatgaatgggaagcctctctttgaatcttccatttgtggtgacagtgctgctgatgtgtctcagtcagaagaaaatggacaaaaaccagaaaacaaggcgagaaggaacaggaagaggagcataaaatatgactccttgctggagcagggccttgtcgaagcagctcttgtgtctaagatctcaagtccttcagataaaaagattccagctaagaaagagtcttgtccaaacactggaagagacaaagaccacctgttgaaatacaacgttggtgatttggtgtggtccaaagtgtcgggttacccttggtggccttgcatggtttctgcagatccactccttcacagctataccaaacttaaaggtcagaaaaagagtgcacgccagtatcacgtacagttctttggtgacgccccagaaagagcttggatatttgagaagagcctcgtagcttttgaaggagaaggacagtttgaaaaattatgccaggaaagtgccaagcaggcacccacgaaagctgagaaaattaagctattgaaaccaatttcagggaaattgagggcccagtgggaaatgggcattgttcaagcagaagaagctgcaagcatgtcagtggaggagcggaaagccaagttcacctttctctatgtgggggaccagcttcatctcaaccctcaagtagccaaggaggctggcattgctgcagagtctttgggagaaatggcagaatcctcaggagtcagtgaagaagctgctgaaaaccccaagtctgtgagagaagagtgcattcccatgaagagaaggcggagggccaaactgtgtagctctgcagagaccctggagagtcaccccgacatagggaagagtactcctcaaaagacggcagaggctgaccccagaagaggagtagggtctcctcctgggaggaagaagaccacagtctccatgccacgaagcaggaagggagatgcagcatcccagtttttggtcttctgtcaaaaacacagggatgaggtggtagctgagcacccagatgcttcaggtgaggagattgaagagctgctcaggtcacagtggagtctgctgagtgagaagcagagagcacgctacaacaccaagtttgccctggtggcccctgtccaggctgaagaagactctggtaatgtaaatgggaaaaaaagaaaccacacaaagaggatacaggaccctacagaagatgctgaagctgaggacacacccaggaaaagactcaggacggacaagcacagtcttcggaagagagacacaatcactgacaaaacggccagaacaagctcttacaaggccatggaggcagcctcctcgctcaagagccaggcagcaacgaaaaatctgtctgatgcatgtaaaccactgaagaagcgaaatcgggcttccacggcagcatcttcagctcttgggtttagcaaaagttcatctccttctgcatccttaactgagaatgaggtctcggacagcccgggagacgagccctcggagtccccatacgaaagtgcagacgaaacacaaactgaagtatctgtctcatccaaaaagtctgagcgaggagtgactgccaaaaaggagtatgtgtgccagctgtgtgagaagccgggcagcctcctgctctgtgaaggaccctgctgcggagctttccacctcgcctgccttgggctttcccggaggccagaagggaggttcacctgcagcgagtgtgcctcagggattcactcatgtttcgtgtgtaaagagagcaagacagatgttaagcgctgtgtggtaactcagtgtggaaaattttaccatgaggcttgtgtgaaaaaataccctctgactgtatttgagagccgaggtttccgctgccccctccacagctgtgtgagctgccatgcttccaacccttcaaacccaaggccgtcaaaaggtaaaatgatgcggtgtgtccgctgccccgttgcctatcacagcggggatgcttgtctggcagcaggatgctcagtgatcgcctccaacagcatcatctgcactgcccacttcactgctcggaaggggaagcgacaccacgcccacgtcaacgtgagctggtgcttcgtgtgctccaaaggggggagccttctgtgctgtgagtcctgcccagcggccttccaccctgactgcctgaacatcgagatgcctgacggcagctggttctgcaatgactgcagggctgggaagaagctgcacttccaggatatcatttgggtgaaacttgggaactacagatggtggccggcagaagtttgccatcccaaaaatgttcccccaaatattcagaaaatgaagcacgagattggagaattccctgtgtttttctttgggtctaaagattattactggacgcatcaggcgcgagtgttcccgtacatggagggggaccggggcagccgctaccagggggtcagagggatcggaagagtcttcaaaaacgcactgcaagaagctgaagctcgttttcgtgaaattaagcttcagagggaagcccgagaaacacaggagagcgagcgcaagcccccaccatacaagcacatcaaggtgaataagccttacgggaaagtccagatctacacagcggatatttcagaaatccctaagtgcaactgcaagcccacagatgagaatccttgtggctttgattcggagtgtctgaacaggatgctgatgtttgagtgccacccgcaggtgtgtcccgcgggcgagttctgccagaaccagtgcttcaccaagcgccagtacccagagaccaagatcatcaagacagatggcaaagggtggggcctggtcgccaagagggacatcagaaagggagaatttgttaacgagtacgttggggagctgatcgacgaggaggagtgcatggcgagaatcaagcacgcacacgagaacgacatcacccacttctacatgctcactatagacaaggaccgtataatagacgctggccccaaaggaaactactctcgatttatgaatcacagctgccagcccaactgtgagaccctcaagtggacagtgaatggggacactcgtgtgggcctgtttgccgtctgtgacattcctgcagggacggagctgacttttaactacaacctcgattgtctgggcaatgaaaaaacggtctgccggtgtggagcctccaattgcagtggattcctcggggatagaccaaagacctcgacgaccctttcatcagaggaaaagggcaaaaagaccaagaagaaaacgaggcggcgcagagcaaaaggggaagggaagaggcagtcagaggacgagtgcttccgctgcggtgatggcgggcagctggtgctgtgtgaccgcaagttctgcaccaaggcctaccacctgtcctgcctgggccttggcaagcggcccttcgggaagtgggaatgtccttggcatcattgtgacgtgtgtggcaaaccttcgacttcattttgccacctctgccccaattcgttctgtaaggagcaccaggacgggacagccttcagctgcaccccggacgggcggtcctactgctgtgagcatgacttaggggcggcatcggtcagaagcaccaagactgagaagccccccccagagccagggaagccgaaggggaagaggcggcggcggaggggctggcggagagtcacagagggcaaatagcgccaggcggccgcttggccggatccaggggcggtgcagggcggccggccctgcctgcgggagagggcgagcatgaactggcccggaggacccagctcgagccgccaggacacagacgtacaggcctcctcgggagggagcgcctccccaccactgagccatcctcagcagcgtccgctgcgtctgcactgatgaccgtctgagcccagctcagcgttcctggacaaacagcctcactcctcagcgttaccgccacacttgaatttctccgaatgtcaaggttccctcccactctatttttttaggttaaagttaattggcatatggaatgttttaatctcctctgaaatgtgtagcgtaggcttttcccaagggtcgctagaaactcgtcttcgcgttgccccctttctggctctcagcgccgtcgccactcgggagaggctgggtgaggcccgtgtgaggactgaccctggattcctcgaaactgccattgtgatcattactctgctctttggaaatggctgtatcatttttttgtactaatgtgaattgttcctcagaaacgcttcttttccatcctagtgagaagctggccctgcaggtggtggcagcaatggtgttgtaagatttcctcccgtagttttttctcctcatggatttgaatgaaatgccaataacacgtccactttcaacgtgtagtttacgcggagcactttcgaggcctggccgggttgggcctacttctcacctgggcctatcttctgaactcgctaggttcttatcaacatttgggggataactttgtatatttttttcatttggcttttctttaccagtttctgatttttattctcaatatatttttgctaaacctatttcacaaatcaccaccgactgaagtgtgtgtttactgatgcggccctgagctccatggcgaaaggagtgactttgcagggcgtgagaccgcagtctgcttagagcacaggaagtgacaacttagggagccccgtagggcgctgcaggccccggggaccccagcacgtgggtctaaagagagacggagtctagctctcctgccacccagagtggcttccatctcagcactctgtgggtctggtgatggaagatgcagtctctgctgatcacatgtgccctctgccagggcacctactgagaggtgcggtcctgggggtggaggcctgcctggcaggtgtgcgtgcctcgtacgtgtgttatgggcactggtctaggccaggtatgacacccactctcctgtgagatttcactttagtttttaaaaggtccagttctacagagtgagacctatctatctgagtactacatatgttttaagacttggttctttttttgagggatccttgaccctgggaagtctggagcaccctgagaagggggcaccatgtgtgcctttgcccacgtgtcctgaggggctgcttgtctgggagggagggagagaacattcagcagcaggtgcttttttatggccttttcttaaaataacctaagggggacacatccatcttgcagagaagtttacagaactccccttgaaaactgctgctgaggctcctgttaaattttctgtggcatcttttatgccttggtaaaaactgcagtgtctttggacctgagagtggctactccgtggttttgtgacctgtaagcgtggggttcaggggtgtgtggccctgcagggtcccacgcctccctgagcactgactggaagtttcactggctggtggctgtcccttctcccatcagggtccccagcaaagttaactacacagaggacccaggggaaacgagctgtgtagccactgacttgctcgcgcggccgtggcctctgaggggcactcgccggttaagacagggtgggagtagtgctttccagttcagactctaacttctcccaaagtgtcctaagaaaatactggatcggctcatagatttatgctccttatgatgccctaacttggaaggttgttctagggacaggccgggcagtgtccccacacacaccttagagtcgaaggccccagggccccgctgtcacttgcccaaaagatcccttccggcaggtaagggactaccaatgcttacgtcaaaacagcagaatcggctttgcagtgcactttggggagcagatattaacttatttttgtgttggacagtagtgaaatcttgtgatttttaatcgctttgataatacttccaaattttatgatttttctgaaggaaataatgcaaacattttaaatatgtttctccccctttccaaaaactgttaaactaatgagcaagtaacactaactttgaatgtctctacaatacccgttgataactcagtggagccaggctttggggtagcggccctgagcttgcagggtttctcgccactggggctgaccacgcccccagctgtgaccgtgggtgtggctggctctcggccctgcccagctttgttctgaggacgtggtgacttcctgaacatcagcttcaatcctccatcattaatgtgaagcaaaacacaaaaaccgccccaatccctcaggattccttggcatccgaaaccagcatctgcacctaaacccatacccacccgtgtgcgcccacagggggatgtgtccgaatgggcagcttaaaatgtggtcacctgtgggggaaactcttcaggcacctgaagtgagaacccagctgtccgtcctcaggccggcctttcttccggcgacacccgtccatggctggctgggtccccttcgcagtgtttgtctgtcttgacatctaaaccccggcgtgtgcagtgcccatcttccaggactaccttattttccagaattaaacctgttttataattcaagttaatgcaaatgactgtcagttgccaaatatcttgatcctatgagtgtagttgatgactgtttgttagtcagtagagtaaaatgctgtgtccacggggtgtcacagcctcaccataccctgttgaggtgtgaaatgccccgtcagaaattaaatacaaacttaaatgtgcctattggtgtctaaacttcatacaatgtaaggtcagattccttttaggaatactgggtgctgtcaccaggtttgatagttagacttaaaaacttgaaattcactttttggggggagggatatactgaaatagagagttgagacttgccagttgggggaaaatagcatttaaaatggaaagctgtgtttggaaaattgtgtatgagtatttttgtattaaaaacattttaaaggcttttttcttaa

SEQ ID NO: 234705 - DNA, 7827 bp, Artificial Sequence
  derived and/or modified sequence
gcatgagccaccgtgcctgtcctagaaccactggtaactcttaactgagacaagatttcgccatgttgcccaggctggtctcgaacttctgagctcaagcgatctacctgcctcgtcctcccaaagtgttggaattgcaggtgtgagccactgcacccggcccttgcctcatgtttgaatgataatttacctgggcataaaattctggacacttgtggtggcacgagctgtctgcttttctgtggagactgcgggttgcagacaccagcagccccctattgctgcacgtcaggtgtcctccacctcagtactgtggacatctcgggccgcatagccctgttgcgcgggcatcctgtgcgttgcaggagatgcagcagcatccatgaccgcaacccatcagagtgttctaagaacggaagcatctgggctggatggaatttagcatcaagcagagtcccctttctgttcagagtgttgtaaagtgcataaagatgaagcaggcaccagaaatcctcggcagtgccaacgggaagactccgagctgcgaggtgaaccgcgagtgttctgtgttcctcagcaaagcccagctctccagtagcctgcaggagggggtcatgcagaagtttaacggccacgacgccctgccctttattccagccgacaagctgaaagatcttacttcccgggtgtttaatggagaacccggcgcacacgatgccaaactgcgttttgagtcccaggaaatgaaagggattgggacaccccctaacactacccctatcaaaaatggctctccagaaattaagctgaaaatcaccaaaacatacatgaatgggaagcctctctttgaatcttccatttgtggtgacagtgctgctgatgtgtctcagtcagaagaaaatggacaaaaaccagaaaacaaggcgagaaggaacaggaagaggagcataaaatatgactccttgctggagcagggccttgtcgaagcagctcttgtgtctaagatctcaagtccttcagataaaaagattccagctaagaaagagtcttgtccaaacactggaagagacaaagaccacctgttgaaatacaacgttggtgatttggtgtggtccaaagtgtcgggttacccttggtggccttgcatggtttctgcagatccactccttcacagctataccaaacttaaaggtcagaaaaagagtgcacgccagtatcacgtacagttctttggtgacgccccagaaagagcttggatatttgagaagagcctcgtagcttttgaaggagaaggacagtttgaaaaattatgccaggaaagtgccaagcaggcacccacgaaagctgagaaaattaagctattgaaaccaatttcagggaaattgagggcccagtgggaaatgggcattgttcaagcagaagaagctgcaagcatgtcagtggaggagcggaaagccaagttcacctttctctatgtgggggaccagcttcatctcaaccctcaagtagccaaggaggctggcattgctgcagagtctttgggagaaatggcagaatcctcaggagtcagtgaagaagctgctgaaaaccccaagtctgtgagagaagagtgcattcccatgaagagaaggcggagggccaaactgtgtagctctgcagagaccctggagagtcaccccgacatagggaagagtactcctcaaaagacggcagaggctgaccccagaagaggagtagggtctcctcctgggaggaagaagaccacagtctccatgccacgaagcaggaagggagatgcagcatcccagtttttggtcttctgtcaaaaacacagggatgaggtggtagctgagcacccagatgcttcaggtgaggagattgaagagctgctcaggtcacagtggagtctgctgagtgagaagcagagagcacgctacaacaccaagtttgccctggtggcccctgtccaggctgaagaagactctggtaatgtaaatgggaaaaaaagaaaccacacaaagaggatacaggaccctacagaagatgctgaagctgaggacacacccaggaaaagactcaggacggacaagcacagtcttcggaagagagacacaatcactgacaaaacggccagaacaagctcttacaaggccatggaggcagcctcctcgctcaagagccaggcagcaacgaaaaatctgtctgatgcatgtaaaccactgaagaagcgaaatcgggcttccacggcagcatcttcagctcttgggtttagcaaaagttcatctccttctgcatccttaactgagaatgaggtctcggacagcccgggagacgagccctcggagtccccatacgaaagtgcagacgaaacacaaactgaagtatctgtctcatccaaaaagtctgagcgaggagtgactgccaaaaaggagtatgtgtgccagctgtgtgagaagccgggcagcctcctgctctgtgaaggaccctgctgcggagctttccacctcgcctgccttgggctttcccggaggccagaagggaggttcacctgcagcgagtgtgcctcagggattcactcatgtttcgtgtgtaaagagagcaagacagatgttaagcgctgtgtggtaactcagtgtggaaaattttaccatgaggcttgtgtgaaaaaataccctctgactgtatttgagagccgaggtttccgctgccccctccacagctgtgtgagctgccatgcttccaacccttcaaacccaaggccgtcaaaaggtaaaatgatgcggtgtgtccgctgccccgttgcctatcacagcggggatgcttgtctggcagcaggatgctcagtgatcgcctccaacagcatcatctgcactgcccacttcactgctcggaaggggaagcgacaccacgcccacgtcaacgtgagctggtgcttcgtgtgctccaaaggggggagccttctgtgctgtgagtcctgcccagcggccttccaccctgactgcctgaacatcgagatgcctgacggcagctggttctgcaatgactgcagggctgggaagaagctgcacttccaggatatcatttgggtgaaacttgggaactacagatggtggccggcagaagtttgccatcccaaaaatgttcccccaaatattcagaaaatgaagcacgagattggagaattccctgtgtttttctttgggtctaaagattattactggacgcatcaggcgcgagtgttcccgtacatggagggggaccggggcagccgctaccagggggtcagagggatcggaagagtcttcaaaaacgcactgcaagaagctgaagctcgttttcgtgaaattaagcttcagagggaagcccgagaaacacaggagagcgagcgcaagcccccaccatacaagcacatcaaggtgaataagccttacgggaaagtccagatctacacagcggatatttcagaaatccctaagtgcaactgcaagcccacagatgagaatccttgtggctttgattcggagtgtctgaacaggatgctgatgtttgagtgccacccgcaggtgtgtcccgcgggcgagttctgccagaaccagtgcttcaccaagcgccagtacccagagaccaagatcatcaagacagatggcaaagggtggggcctggtcgccaagagggacatcagaaagggagaatttgttaacgagtacgttggggagctgatcgacgaggaggagtgcatggcgagaatcaagcacgcacacgagaacgacatcacccacttctacatgctcactatagacaaggaccgtataatagacgctggccccaaaggaaactactctcgatttatgaatcacagctgccagcccaactgtgagaccctcaagtggacagtgaatggggacactcgtgtgggcctgtttgccgtctgtgacattcctgcagggacggagctgacttttaactacaacctcgattgtctgggcaatgaaaaaacggtctgccggtgtggagcctccaattgcagtggattcctcggggatagaccaaagacctcgacgaccctttcatcagaggaaaagggcaaaaagaccaagaagaaaacgaggcggcgcagagcaaaaggggaagggaagaggcagtcagaggacgagtgcttccgctgcggtgatggcgggcagctggtgctgtgtgaccgcaagttctgcaccaaggcctaccacctgtcctgcctgggccttggcaagcggcccttcgggaagtgggaatgtccttggcatcattgtgacgtgtgtggcaaaccttcgacttcattttgccacctctgccccaattcgttctgtaaggagcaccaggacgggacagccttcagctgcaccccggacgggcggtcctactgctgtgagcatgacttaggggcggcatcggtcagaagcaccaagactgagaagccccccccagagccagggaagccgaaggggaagaggcggcggcggaggggctggcggagagtcacagagggcaaatagcgccaggcggccgcttggccggatccaggggcggtgcagggcggccggccctgcctgcgggagagggcgagcatgaactggcccggaggacccagctcgagccgccaggacacagacgtacaggcctcctcgggagggagcgcctccccaccactgagccatcctcagcagcgtccgctgcgtctgcactgatgaccgtctgagcccagctcagcgttcctggacaaacagcctcactcctcagcgttaccgccacacttgaatttctccgaatgtcaaggttccctcccactctatttttttaggttaaagttaattggcatatggaatgttttaatctcctctgaaatgtgtagcgtaggcttttcccaagggtcgctagaaactcgtcttcgcgttgccccctttctggctctcagcgccgtcgccactcgggagaggctgggtgaggcccgtgtgaggactgaccctggattcctcgaaactgccattgtgatcattactctgctctttggaaatggctgtatcatttttttgtactaatgtgaattgttcctcagaaacgcttcttttccatcctagtgagaagctggccctgcaggtggtggcagcaatggtgttgtaagatttcctcccgtagttttttctcctcatggatttgaatgaaatgccaataacacgtccactttcaacgtgtagtttacgcggagcactttcgaggcctggccgggttgggcctacttctcacctgggcctatcttctgaactcgctaggttcttatcaacatttgggggataactttgtatatttttttcatttggcttttctttaccagtttctgatttttattctcaatatatttttgctaaacctatttcacaaatcaccaccgactgaagtgtgtgtttactgatgcggccctgagctccatggcgaaaggagtgactttgcagggcgtgagaccgcagtctgcttagagcacaggaagtgacaacttagggagccccgtagggcgctgcaggccccggggaccccagcacgtgggtctaaagagagacggagtctagctctcctgccacccagagtggcttccatctcagcactctgtgggtctggtgatggaagatgcagtctctgctgatcacatgtgccctctgccagggcacctactgagaggtgcggtcctgggggtggaggcctgcctggcaggtgtgcgtgcctcgtacgtgtgttatgggcactggtctaggccaggtatgacacccactctcctgtgagatttcactttagtttttaaaaggtccagttctacagagtgagacctatctatctgagtactacatatgttttaagacttggttctttttttgagggatccttgaccctgggaagtctggagcaccctgagaagggggcaccatgtgtgcctttgcccacgtgtcctgaggggctgcttgtctgggagggagggagagaacattcagcagcaggtgcttttttatggccttttcttaaaataacctaagggggacacatccatcttgcagagaagtttacagaactccccttgaaaactgctgctgaggctcctgttaaattttctgtggcatcttttatgccttggtaaaaactgcagtgtctttggacctgagagtggctactccgtggttttgtgacctgtaagcgtggggttcaggggtgtgtggccctgcagggtcccacgcctccctgagcactgactggaagtttcactggctggtggctgtcccttctcccatcagggtccccagcaaagttaactacacagaggacccaggggaaacgagctgtgtagccactgacttgctcgcgcggccgtggcctctgaggggcactcgccggttaagacagggtgggagtagtgctttccagttcagactctaacttctcccaaagtgtcctaagaaaatactggatcggctcatagatttatgctccttatgatgccctaacttggaaggttgttctagggacaggccgggcagtgtccccacacacaccttagagtcgaaggccccagggccccgctgtcacttgcccaaaagatcccttccggcaggtaagggactaccaatgcttacgtcaaaacagcagaatcggctttgcagtgcactttggggagcagatattaacttatttttgtgttggacagtagtgaaatcttgtgatttttaatcgctttgataatacttccaaattttatgatttttctgaaggaaataatgcaaacattttaaatatgtttctccccctttccaaaaactgttaaactaatgagcaagtaacactaactttgaatgtctctacaatacccgttgataactcagtggagccaggctttggggtagcggccctgagcttgcagggtttctcgccactggggctgaccacgcccccagctgtgaccgtgggtgtggctggctctcggccctgcccagctttgttctgaggacgtggtgacttcctgaacatcagcttcaatcctccatcattaatgtgaagcaaaacacaaaaaccgccccaatccctcaggattccttggcatccgaaaccagcatctgcacctaaacccatacccacccgtgtgcgcccacagggggatgtgtccgaatgggcagcttaaaatgtggtcacctgtgggggaaactcttcaggcacctgaagtgagaacccagctgtccgtcctcaggccggcctttcttccggcgacacccgtccatggctggctgggtccccttcgcagtgtttgtctgtcttgacatctaaaccccggcgtgtgcagtgcccatcttccaggactaccttattttccagaattaaacctgttttataattcaagttaatgcaaatgactgtcagttgccaaatatcttgatcctatgagtgtagttgatgactgtttgttagtcagtagagtaaaatgctgtgtccacggggtgtcacagcctcaccataccctgttgaggtgtgaaatgccccgtcagaaattaaatacaaacttaaatgtgcctattggtgtctaaacttcatacaatgtaaggtcagattccttttaggaatactgggtgctgtcaccaggtttgatagttagacttaaaaacttgaaattcactttttggggggagggatatactgaaatagagagttgagacttgccagttgggggaaaatagcatttaaaatggaaagctgtgtttggaaaattgtgtatgagtatttttgtattaaaaacattttaaaggcttttttcttaactta

SEQ ID NO: 234706 - DNA, 4251 bp, Artificial Sequence
  derived and/or modified sequence
cgctgcgcccgccgccgccgccgccccctccccgcctgggccctaccgccgcacggccccggccccctcccagcctgccgctccggagagccgcccgccgaggatgcgacgcaccgcagtgttctaagaacggaagcatctgggctggatggaatttagcatcaagcagagtcccctttctgttcagagtgttgtaaagtgcataaagatgaagcaggcaccagaaatcctcggcagtgccaacgggaagactccgagctgcgaggtgaaccgcgagtgttctgtgttcctcagcaaagcccagctctccagtagcctgcaggagggggtcatgcagaagtttaacggccacgacgccctgccctttattccagccgacaagctgaaagatcttacttcccgggtgtttaatggagaacccggcgcacacgatgccaaactgcgttttgagtcccaggaaatgaaagggattgggacaccccctaacactacccctatcaaaaatggctctccagaaattaagctgaaaatcaccaaaacatacatgaatgggaagcctctctttgaatcttccatttgtggtgacagtgctgctgatgtgtctcagtcagaagaaaatggacaaaaaccagaaaacaaggcgagaaggaacaggaagaggagcataaaatatgactccttgctggagcagggccttgtcgaagcagctcttgtgtctaagatctcaagtccttcagataaaaagattccagctaagaaagagtcttgtccaaacactggaagagacaaagaccacctgttgaaatacaacgttggtgatttggtgtggtccaaagtgtcgggttacccttggtggccttgcatggtttctgcagatccactccttcacagctataccaaacttaaaggtcagaaaaagagtgcacgccagtatcacgtacagttctttggtgacgccccagaaagagcttggatatttgagaagagcctcgtagcttttgaaggagaaggacagtttgaaaaattatgccaggaaagtgccaagcaggcacccacgaaagctgagaaaattaagctattgaaaccaatttcagggaaattgagggcccagtgggaaatgggcattgttcaagcagaagaagctgcaagcatgtcagtggaggagcggaaagccaagttcacctttctctatgtgggggaccagcttcatctcaaccctcaagtagccaaggaggctggcattgctgcagagtctttgggagaaatggcagaatcctcaggagtcagtgaagaagctgctgaaaaccccaagtctgtgagagaagagtgcattcccatgaagagaaggcggagggccaaactgtgtagctctgcagagaccctggagagtcaccccgacatagggaagagtactcctcaaaagacggcagaggctgaccccagaagaggagtagggtctcctcctgggaggaagaagaccacagtctccatgccacgaagcaggaagggagatgcagcatcccagtttttggtcttctgtcaaaaacacagggatgaggtggtagctgagcacccagatgcttcaggtgaggagattgaagagctgctcaggtcacagtggagtctgctgagtgagaagcagagagcacgctacaacaccaagtttgccctggtggcccctgtccaggctgaagaagactctggtaatgtaaatgggaaaaaaagaaaccacacaaagaggatacaggaccctacagaagatgctgaagctgaggacacacccaggaaaagactcaggacggacaagcacagtcttcggaagagagacacaatcactgacaaaacggccagaacaagctcttacaaggccatggaggcagcctcctcgctcaagagccaggcagcaacgaaaaatctgtctgatgcatgtaaaccactgaagaagcgaaatcgggcttccacggcagcatcttcagctcttgggtttagcaaaagttcatctccttctgcatccttaactgagaatgaggtctcggacagcccgggagacgagccctcggagtccccatacgaaagtgcagacgaaacacaaactgaagtatctgtctcatccaaaaagtctgagcgaggagtgactgccaaaaaggagtatgtgtgccagctgtgtgagaagccgggcagcctcctgctctgtgaaggaccctgctgcggagctttccacctcgcctgccttgggctttcccggaggccagaagggaggttcacctgcagcgagtgtgcctcagggattcactcatgtttcgtgtgtaaagagagcaagacagatgttaagcgctgtgtggtaactcagtgtggaaaattttaccatgaggcttgtgtgaaaaaataccctctgactgtatttgagagccgaggtttccgctgccccctccacagctgtgtgagctgccatgcttccaacccttcaaacccaaggccgtcaaaaggtaaaatgatgcggtgtgtccgctgccccgttgcctatcacagcggggatgcttgtctggcagcaggatgctcagtgatcgcctccaacagcatcatctgcactgcccacttcactgctcggaaggggaagcgacaccacgcccacgtcaacgtgagctggtgcttcgtgtgctccaaaggggggagccttctgtgctgtgagtcctgcccagcggccttccaccctgactgcctgaacatcgagatgcctgacggcagctggttctgcaatgactgcagggctgggaagaagctgcacttccaggatatcatttgggtgaaacttgggaactacagatggtggccggcagaagtttgccatcccaaaaatgttcccccaaatattcagaaaatgaagcacgagattggagaattccctgtgtttttctttgggtctaaagattattactggacgcatcaggcgcgagtgttcccgtacatggagggggaccggggcagccgctaccagggggtcagagggatcggaagagtcttcaaaaacgcactgcaagaagctgaagctcgttttcgtgaaattaagcttcagagggaagcccgagaaacacaggagagcgagcgcaagcccccaccatacaagcacatcaaggtgaataagccttacgggaaagtccagatctacacagcggatatttcagaaatccctaagtgcaactgcaagcccacagatgagaatccttgtggctttgattcggagtgtctgaacaggatgctgatgtttgagtgccacccgcaggtgtgtcccgcgggcgagttctgccagaaccagtgcttcaccaagcgccagtacccagagaccaagatcatcaagacagatggcaaagggtggggcctggtcgccaagagggacatcagaaagggagaatttgttaacgagtacgttggggagctgatcgacgaggaggagtgcatggcgagaatcaagcacgcacacgagaacgacatcacccacttctacatgctcactatagacaaggaccgtataatagacgctggccccaaaggaaactactctcgatttatgaatcacagctgccagcccaactgtgagaccctcaagtggacagtgaatggggacactcgtgtgggcctgtttgccgtctgtgacattcctgcagggacggagctgacttttaactacaacctcgattgtctgggcaatgaaaaaacggtctgccggtgtggagcctccaattgcagtggattcctcggggatagaccaaagacctcgacgaccctttcatcagaggaaaagggcaaaaagaccaagaagaaaacgaggcggcgcagagcaaaaggggaagggaagaggcagtcagaggacgagtgcttccgctgcggtgatggcgggcagctggtgctgtgtgaccgcaagttctgcaccaaggcctaccacctgtcctgcctgggccttggcaagcggcccttcgggaagtgggaatgtccttggcatcattgtgacgtgtgtggcaaaccttcgacttcattttgccacctctgccccaattcgttctgtaaggagcaccaggacgggacagccttcagctgcaccccggacgggcggtcctactgctgtgagcatgacttaggggcggcatcggtcagaagcaccaagactgagaagccccccccagagccagggaagccgaaggggaagaggcggcggcggaggggctggcggagagtcacagagggcaaatagcgcca

SEQ ID NO: 234707 - protein, 2048 aa, Artificial Sequence
  derived and/or modified sequence
MLRVIVESASNIPKTKFGKPDPIVSVIFKDEKKKTKKVDNELNPVWNEILEFDLRGIPLDFSSSLGIIVKDFETIGQNKLIGTATVALKDLTGDQSRSLPYKLISLLNEKGQDTGATIDLVIGYDPPSAPHPNDLSGPSVPGMGGDGEEDEGDEDRLDNAVRGPGPKGPVGTVSEAQLARRLTKVKNSRRMLSNKPQDFQIRVRVIEGRQLSGNNIRPVVKVHVCGQTHRTRIKRGNNPFFDELFFYNVNMTPSELMDEIISIRVYNSHSLRADCLMGEFKIDVGFVYDEPGHAVMRKWLLLNDPEDTSSGSKGYMKVSMFVLGTGDEPPPERRDRDNDSDDVESNLLLPAGIALRWVTFLLKIYRAEDIPQMDDAFSQTVKEIFGGNADKKNLVDPFVEVSFAGKKVCTNIIEKNANPEWNQVVNLQIKFPSVCEKIKLTIYDWDRLTKNDVVGTTYLHLSKIAASGGEVEVNTGETEVGFVPTFGPCYLNLYGSPREYTGFPDPYDELNTGKGEGVAYRGRILVELATFLEKTPPDKKLEPISNDDLLVVEKYQRRRKYSLSAVFHSATMLQDVGEAIQFEVSIGNYGNKFDTTCKPLASTTQYSRAVFDGNYYYYLPWAHTKPVVTLTSYWEDISHRLDAVNTLLAMAERLQTNIEALKSGIQGKIPANQLAELWLKLIDEVIEDTRYTLPLTEGKANVTVLDTQIRKLRSRSLSQIHEAAVRMRSEATDVKSTLAEIEDWLDKLMQLTEEPQNSMPDIIIWMIRGEKRLAYARIPAHQVLYSTSGENASGKYCGKTQTIFLKYPQEKNNGPKVPVELRVNIWLGLSAVEKKFNSFAEGTFTVFAEMYENQALMFGKWGTSGLVGRHKFSDVTGKIKLKREFFLPPKGWEWEGEWIVDPERSLLTEADAGHTEFTDEVYQNESRYPGGDWKPAEDTYTDANGDKAASPSELTCPPGWEWEDDAWSYDINRAVDEKGWEYGITIPPDHKPKSWVAAEKMYHTHRRRRLVRKRKKDLTQTASSTARAMEELQDQEGWEYASLIGWKFHWKQRSSDTFRRRRWRRKMAPSETHGAAAIFKLEGALGADTTEDGDEKSLEKQKHSATTVFGANTPIVSCNFDRVYIYHLRCYVYQARNLLALDKDSFSDPYAHICFLHRSKTTEIIHSTLNPTWDQTIIFDEVEIYGEPQTVLQNPPKVIMELFDNDQVGKDEFLGRSIFSPVVKLNSEMDITPKLLWHPVMNGDKACGDVLVTAELILRGKDGSNLPILPPQRAPNLYMVPQGIRPVVQLTAIEILAWGLRNMKNFQMASITSPSLVVECGGERVESVVIKNLKKTPNFPSSVLFMKVFLPKEELYMPPLVIKVIDHRQFGRKPVVGQCTIERLDRFRCDPYAGKEDIVPQLKASLLSAPPCRDIVIEMEDTKPLLASKLTEKEEEIVDWWSKFYASSGEHEKCGQYIQKGYSKLKIYNCELENVAEFEGLTDFSDTFKLYRGKSDENEDPSVVGEFKGSFRIYPLPDDPSVPAPPRQFRELPDSVPQECTVRIYIVRGLELQPQDNNGLCDPYIKITLGKKVIEDRDHYIPNTLNPVFGRMYELSCYLPQEKDLKISVYDYDTFTRDEKVGETIIDLENRFLSRFGSHCGIPEEYCVSGVNTWRDQLRPTQLLQNVARFKGFPQPILSEDGSRIRYGGRDYSLDEFEANKILHQHLGAPEERLALHILRTQGLVPEHVETRTLHSTFQPNISQGKLQMWVDVFPKSLGPPGPPFNITPRKAKKYYLRVIIWNTKDVILDEKSITGEEMSDIYVKGWIPGNEENKQKTDVHYRSLDGEGNFNWRFVFPFDYLPAEQLCIVAKKEHFWSIDQTEFRIPPRLIIQIWDNDKFSLDDYLGFLELDLRHTIIPAKSPEKCRLDMIPDLKAMNPLKAKTASLFEQKSMKGWWPCYAEKDGARVMAGKVEMTLEILNEKEADERPAGKGRDEPNMNPKLDLPNRPETSFLWFTNPCKTMKFIVWRRFKWVIIGLLFLLILLLFVAVLLYSLPNYLSMKIVKPNV

SEQ ID NO: 234708 - DNA, 6147 bp, Artificial Sequence
  derived and/or modified sequence
atgctgagagtgatcgtggagagcgccagcaacatccccaagaccaagttcggcaagcccgaccccatcgtgagcgtgatcttcaaggacgagaagaagaagaccaagaaggtggacaacgagctgaaccccgtgtggaacgagatcctggagttcgacctgagaggcatccccctggacttcagcagcagcctgggcatcatcgtgaaggacttcgagaccatcggccagaacaagctgatcggcaccgccaccgtggccctgaaggacctgaccggcgaccagagcagaagcctgccctacaagctgatcagcctgctgaacgagaagggccaggacaccggcgccaccatcgacctggtgatcggctacgacccccccagcgccccccaccccaacgacctgagcggccccagcgtgcccggcatgggcggcgacggcgaggaggacgagggcgacgaggacagactggacaacgccgtgagaggccccggccccaagggccccgtgggcaccgtgagcgaggcccagctggccagaagactgaccaaggtgaagaacagcagaagaatgctgagcaacaagccccaggacttccagatcagagtgagagtgatcgagggcagacagctgagcggcaacaacatcagacccgtggtgaaggtgcacgtgtgcggccagacccacagaaccagaatcaagagaggcaacaaccccttcttcgacgagctgttcttctacaacgtgaacatgacccccagcgagctgatggacgagatcatcagcatcagagtgtacaacagccacagcctgagagccgactgcctgatgggcgagttcaagatcgacgtgggcttcgtgtacgacgagcccggccacgccgtgatgagaaagtggctgctgctgaacgaccccgaggacaccagcagcggcagcaagggctacatgaaggtgagcatgttcgtgctgggcaccggcgacgagcccccccccgagagaagagacagagacaacgacagcgacgacgtggagagcaacctgctgctgcccgccggcatcgccctgagatgggtgaccttcctgctgaagatctacagagccgaggacatcccccagatggacgacgccttcagccagaccgtgaaggagatcttcggcggcaacgccgacaagaagaacctggtggaccccttcgtggaggtgagcttcgccggcaagaaggtgtgcaccaacatcatcgagaagaacgccaaccccgagtggaaccaggtggtgaacctgcagatcaagttccccagcgtgtgcgagaagatcaagctgaccatctacgactgggacagactgaccaagaacgacgtggtgggcaccacctacctgcacctgagcaagatcgccgccagcggcggcgaggtggaggtgaacaccggcgagaccgaggtgggcttcgtgcccaccttcggcccctgctacctgaacctgtacggcagccccagagagtacaccggcttccccgacccctacgacgagctgaacaccggcaagggcgagggcgtggcctacagaggcagaatcctggtggagctggccaccttcctggagaagaccccccccgacaagaagctggagcccatcagcaacgacgacctgctggtggtggagaagtaccagagaagaagaaagtacagcctgagcgccgtgttccacagcgccaccatgctgcaggacgtgggcgaggccatccagttcgaggtgagcatcggcaactacggcaacaagttcgacaccacctgcaagcccctggccagcaccacccagtacagcagagccgtgttcgacggcaactactactactacctgccctgggcccacaccaagcccgtggtgaccctgaccagctactgggaggacatcagccacagactggacgccgtgaacaccctgctggccatggccgagagactgcagaccaacatcgaggccctgaagagcggcatccagggcaagatccccgccaaccagctggccgagctgtggctgaagctgatcgacgaggtgatcgaggacaccagatacaccctgcccctgaccgagggcaaggccaacgtgaccgtgctggacacccagatcagaaagctgagaagcagaagcctgagccagatccacgaggccgccgtgagaatgagaagcgaggccaccgacgtgaagagcaccctggccgagatcgaggactggctggacaagctgatgcagctgaccgaggagccccagaacagcatgcccgacatcatcatctggatgatcagaggcgagaagagactggcctacgccagaatccccgcccaccaggtgctgtacagcaccagcggcgagaacgccagcggcaagtactgcggcaagacccagaccatcttcctgaagtacccccaggagaagaacaacggccccaaggtgcccgtggagctgagagtgaacatctggctgggcctgagcgccgtggagaagaagttcaacagcttcgccgagggcaccttcaccgtgttcgccgagatgtacgagaaccaggccctgatgttcggcaagtggggcaccagcggcctggtgggcagacacaagttcagcgacgtgaccggcaagatcaagctgaagagagagttcttcctgccccccaagggctgggagtgggagggcgagtggatcgtggaccccgagagaagcctgctgaccgaggccgacgccggccacaccgagttcaccgacgaggtgtaccagaacgagagcagataccccggcggcgactggaagcccgccgaggacacctacaccgacgccaacggcgacaaggccgccagccccagcgagctgacctgcccccccggctgggagtgggaggacgacgcctggagctacgacatcaacagagccgtggacgagaagggctgggagtacggcatcaccatcccccccgaccacaagcccaagagctgggtggccgccgagaagatgtaccacacccacagaagaagaagactggtgagaaagagaaagaaggacctgacccagaccgccagcagcaccgccagagccatggaggagctgcaggaccaggagggctgggagtacgccagcctgatcggctggaagttccactggaagcagagaagcagcgacaccttcagaagaagaagatggagaagaaagatggcccccagcgagacccacggcgccgccgccatcttcaagctggagggcgccctgggcgccgacaccaccgaggacggcgacgagaagagcctggagaagcagaagcacagcgccaccaccgtgttcggcgccaacacccccatcgtgagctgcaacttcgacagagtgtacatctaccacctgagatgctacgtgtaccaggccagaaacctgctggccctggacaaggacagcttcagcgacccctacgcccacatctgcttcctgcacagaagcaagaccaccgagatcatccacagcaccctgaaccccacctgggaccagaccatcatcttcgacgaggtggagatctacggcgagccccagaccgtgctgcagaacccccccaaggtgatcatggagctgttcgacaacgaccaggtgggcaaggacgagttcctgggcagaagcatcttcagccccgtggtgaagctgaacagcgagatggacatcacccccaagctgctgtggcaccccgtgatgaacggcgacaaggcctgcggcgacgtgctggtgaccgccgagctgatcctgagaggcaaggacggcagcaacctgcccatcctgcccccccagagagcccccaacctgtacatggtgccccagggcatcagacccgtggtgcagctgaccgccatcgagatcctggcctggggcctgagaaacatgaagaacttccagatggccagcatcaccagccccagcctggtggtggagtgcggcggcgagagagtggagagcgtggtgatcaagaacctgaagaagacccccaacttccccagcagcgtgctgttcatgaaggtgttcctgcccaaggaggagctgtacatgccccccctggtgatcaaggtgatcgaccacagacagttcggcagaaagcccgtggtgggccagtgcaccatcgagagactggacagattcagatgcgacccctacgccggcaaggaggacatcgtgccccagctgaaggccagcctgctgagcgcccccccctgcagagacatcgtgatcgagatggaggacaccaagcccctgctggccagcaagctgaccgagaaggaggaggagatcgtggactggtggagcaagttctacgccagcagcggcgagcacgagaagtgcggccagtacatccagaagggctacagcaagctgaagatctacaactgcgagctggagaacgtggccgagttcgagggcctgaccgacttcagcgacaccttcaagctgtacagaggcaagagcgacgagaacgaggaccccagcgtggtgggcgagttcaagggcagcttcagaatctaccccctgcccgacgaccccagcgtgcccgccccccccagacagttcagagagctgcccgacagcgtgccccaggagtgcaccgtgagaatctacatcgtgagaggcctggagctgcagccccaggacaacaacggcctgtgcgacccctacatcaagatcaccctgggcaagaaggtgatcgaggacagagaccactacatccccaacaccctgaaccccgtgttcggcagaatgtacgagctgagctgctacctgccccaggagaaggacctgaagatcagcgtgtacgactacgacaccttcaccagagacgagaaggtgggcgagaccatcatcgacctggagaacagattcctgagcagattcggcagccactgcggcatccccgaggagtactgcgtgagcggcgtgaacacctggagagaccagctgagacccacccagctgctgcagaacgtggccagattcaagggcttcccccagcccatcctgagcgaggacggcagcagaatcagatacggcggcagagactacagcctggacgagttcgaggccaacaagatcctgcaccagcacctgggcgcccccgaggagagactggccctgcacatcctgagaacccagggcctggtgcccgagcacgtggagaccagaaccctgcacagcaccttccagcccaacatcagccagggcaagctgcagatgtgggtggacgtgttccccaagagcctgggcccccccggcccccccttcaacatcacccccagaaaggccaagaagtactacctgagagtgatcatctggaacaccaaggacgtgatcctggacgagaagagcatcaccggcgaggagatgagcgacatctacgtgaagggctggatccccggcaacgaggagaacaagcagaagaccgacgtgcactacagaagcctggacggcgagggcaacttcaactggagattcgtgttccccttcgactacctgcccgccgagcagctgtgcatcgtggccaagaaggagcacttctggagcatcgaccagaccgagttcagaatcccccccagactgatcatccagatctgggacaacgacaagttcagcctggacgactacctgggcttcctggagctggacctgagacacaccatcatccccgccaagagccccgagaagtgcagactggacatgatccccgacctgaaggccatgaaccccctgaaggccaagaccgccagcctgttcgagcagaagagcatgaagggctggtggccctgctacgccgagaaggacggcgccagagtgatggccggcaaggtggagatgaccctggagatcctgaacgagaaggaggccgacgagagacccgccggcaagggcagagacgagcccaacatgaaccccaagctggacctgcccaacagacccgagaccagcttcctgtggttcaccaacccctgcaagaccatgaagttcatcgtgtggagaagattcaagtgggtgatcatcggcctgctgttcctgctgatcctgctgctgttcgtggccgtgctgctgtacagcctgcccaactacctgagcatgaagatcgtgaagcccaacgtgtag

SEQ ID NO: 234709 - DNA, 1338 bp, Artificial Sequence
  derived and/or modified sequence
atgctgagagtgatcgtggagagcgccagcaacatccccaagaccaagttcggcaagcccgaccccatcgtgagcgtgatcttcaaggacgagaagaagaagaccaagaaggtggacaacgagctgaaccccgtgtggaacgagatcctggagttcgacctgagaggcatccccctggacttcagcagcagcctgggcatcatcgtgaaggacttcgagaccatcggccagaacaagctgatcggcaccgccaccgtggccctgaaggacctgaccggcgaccagagcagaagcctgccctacaagctgatcagcctgctgaacgagaagggccaggacaccggcgccaccatcgacctggtgatcggctacgacccccccagcgccccccaccccaacgacctgagcggccccagcgtgcccggcatgggcggcgacggcgaggaggacgagggcgacgaggacagactggacaacgccgtgagaggccccggccccaagggccccgtgggcaccgtgagcgaggcccagctggccagaagactgaccaaggtgaagaacagcagaagaatgctgagcaacaagccccaggacttccagatcagagtgagagtgatcgagggcagacagctgagcggcaacaacatcagacccgtggtgaaggtgcacgtgtgcggccagacccacagaaccagaatcaagagaggcaacaaccccttcttcgacgagctgttcttctacaacgtgaacatgacccccagcgagctgatggacgagatcatcagcatcagagtgtacaacagccacagcctgagagccgactgcctgatgggcgagttcaagatcgacgtgggcttcgtgtacgacgagcccggccacgccgtgatgagaaagtggctgctgctgaacgaccccgaggacaccagcagcggcagcaagggctacatgaaggtgagcatgttcgtgctgggcaccggcgacgagcccccccccgagagaagagacagagacaacgacagcgacgacgtggagagcaacctgctgctgcccgccggcatcgccctgagatgggtgaccttcctgctgaagatctacagagccgaggacatcccccagatggacgacgccttcagccagaccgtgaaggagatcttcggcggcaacgccgacaagaagaacctggtggaccccttcgtggaggtgagcttcgccggcaagaaggtgtgcaccaacatcatcgagaagaacgccaaccccgagtggaaccaggtggtgaacctgcagatcaagttccccagcgtgtgcgagaagatcaagctgaccatctacgactggtag

SEQ ID NO: 234710 - DNA, 6147 bp, Artificial Sequence
  derived and/or modified sequence
atgctgcgcgttatcgttgaatctgccagcaatataccaaagactaagtttggcaagcccgatcctatcgtgagcgttattttcaaggacgagaaaaagaagaccaaaaaggtagataatgagttgaaccctgtgtggaacgaaatcctggaatttgacttgcgtggaataccactggatttcagttcctccctggggatcatagtgaaggatttcgaaacgatcggacaaaataaactgatcgggactgcaactgtggcactgaaagatcttaccggagatcaatctaggtccctcccttataaactaatttcattattgaatgaaaaaggacaggataccggggccaccattgatctggtcatcgggtacgatcctcccagcgcccctcatcctaacgacctcagtggtccaagcgtgcctggtatgggaggagatggtgaagaggacgagggcgatgaagaccggctcgataatgccgtccgaggccctggtccaaagggccccgttgggactgtgagcgaagcccaactggcccgacgcctcaccaaggtcaaaaatagtaggagaatgttgagcaataagccccaggactttcagattagagttagagtgatcgaaggacgccagctctccggtaacaacattcggcctgtggtaaaggtgcacgtgtgtgggcagactcaccgcactcgcatcaagagaggtaacaaccccttttttgatgagctattcttctataacgtgaacatgaccccgtccgagttaatggacgagataatttctatacgcgtctacaactcgcactctctccgagcggactgtctgatgggggagttcaagattgacgtaggcttcgtttacgatgagccagggcacgcagtcatgcggaaatggcttctcctcaacgatccagaggatacatcatcaggttccaaaggctacatgaaagttagtatgtttgtactggggacaggcgacgagccacctccggaacggagggatcgtgataatgatagcgatgacgtcgaatcaaatctgctgcttccagccggcatagcactccgctgggtgactttcttgttgaaaatctaccgagcagaggatatcccacaaatggatgatgccttctcacagactgttaaagaaatcttcggcgggaatgctgacaaaaagaatctggtggaccctttcgtcgaagtgtcattcgccggtaaaaaagtatgcaccaacattatcgagaaaaacgccaacccagaatggaaccaggttgttaacctgcagatcaagtttccgagtgtgtgtgagaaaataaaactcaccatatacgactgggacaggttaactaagaacgacgttgttggtactacttacttgcatctcagcaaaatcgccgcgtcaggcggggaggtggaagtcaatacgggggagacggaggtgggatttgtacccacgtttggaccgtgttacttgaatctatacggcagtcctagggaatacacaggattccccgatccttacgacgagcttaacacaggcaaaggagagggtgttgcttacagaggccgtattctcgttgagttggcaacattcctggaaaaaacaccgcccgataagaaactcgagcccatatctaacgatgacctcctcgttgtggagaaatatcaaaggagaaggaagtactcactgtcagccgtatttcatagcgcgacaatgctgcaagatgtcggagaggccattcagtttgaagtgtccatagggaattatggtaataagttcgacaccacctgcaagcctttggcttccaccactcagtactcacgggccgtgtttgatggcaattattactattacctcccatgggcgcatacaaagccagtggttaccctcactagttactgggaagacatatcccatagactggatgcagtaaacacgctcctggccatggccgagcgcctccagactaatatagaggccttgaagagcgggattcaaggcaagatccctgcaaatcagctcgccgaactgtggctcaagcttattgatgaggtgattgaggacacccgctacactcttccactgacggagggcaaggccaatgtcactgtactcgacacccaaattcgcaaactgagaagtcgatcgctgagccaaatccacgaggccgccgtcagaatgaggtcagaagctaccgacgtcaagtctaccctggcggagatagaagattggttggataaactgatgcagttgactgaggaaccccagaatagcatgcccgacatcattatttggatgatcagaggcgagaagcgtctggcctacgccagaattcccgcccatcaggtcctctacagtacctctggagagaacgcctccgggaagtactgcggtaaaacccagactatatttctgaagtatcctcaggagaagaacaatggcccaaaagtccctgtggaactgagagtcaacatttggctcggactgtccgccgtcgaaaagaagtttaattcatttgccgaaggaactttcacagtgtttgccgagatgtacgaaaaccaagcgctgatgttcgggaaatggggcacctctgggttggtcggaagacacaagttctccgatgtaactggcaaaatcaaactcaagagggagttttttctcccgcccaaagggtgggaatgggaaggcgaatggatagtcgatccggagcgctccctcctgaccgaagccgatgccggacataccgagtttactgacgaagtttatcagaatgaatcccggtatccagggggagactggaaaccagccgaagacacttacaccgatgccaatggcgacaaggcagccagcccgtcagagctcacttgtccacccggctgggagtgggaagacgacgcttggagctatgacatcaaccgtgccgtggatgaaaaggggtgggagtacggcattaccatccctccagatcacaagcccaaatcatgggtggcagccgagaagatgtatcacactcaccggagacgacgtcttgttcgtaaaagaaaaaaagacttgacacagacggcatcaagcactgccagggccatggaggaactccaggatcaggaggggtgggagtacgcctctctgatcgggtggaaattccattggaagcaaaggtcctcagatactttccggcgacggcggtggaggagaaagatggcacctagtgagacccacggcgctgccgccatttttaagctcgagggagctctcggagctgataccacggaagacggggatgaaaaatctctggagaagcagaagcatagtgctaccacagtctttggagccaacacacctatcgtgagctgtaattttgaccgcgtttacatctaccaccttaggtgctatgtgtatcaggcccggaacttactggcattggacaaagacagcttctccgacccttacgcacatatctgcttcttgcacaggtcaaagactaccgaaataatccactctacactcaacccaacttgggaccaaaccatcatctttgacgaggtggagatatacggcgagccccagacagtacttcagaatccacctaaggttatcatggagttatttgacaacgatcaggtgggtaaagacgaatttcttggacgtagtatcttttcccctgtggtgaaactcaactccgagatggacataaccccaaaactactgtggcatccagtgatgaatggagataaggcctgcggggacgttctcgtgactgctgagcttattttaaggggcaaggatggctcaaatctcccgatcctccctccacagcgagcccccaacctatatatggtgcctcaaggaatccgcccggtggtgcagttgacagctattgaaattctcgcgtgggggttacggaatatgaagaattttcagatggccagtattacatcaccctcactcgtcgtcgagtgcggcggcgagagggttgagtcagttgtgattaagaacctcaagaaaacgccaaactttccctcatctgtgctttttatgaaggtatttctccccaaagaagagctgtatatgccccccctggtaattaaggtgatcgatcatcgccagttcggcaggaagcccgtggtaggacagtgtacaatcgaacggctagatagattcaggtgtgacccctatgcgggaaaggaggatattgtcccccaactgaaggcctctctgctgtcagctcccccatgcagagatatagtcatcgaaatggaggacaccaaaccactccttgcctcaaagttgactgagaaagaggaggagattgtggattggtggtctaagttttatgcatcttctggggaacacgaaaaatgtgggcagtatattcagaaggggtatagtaagttgaagatctacaattgcgagcttgagaacgtcgccgagtttgagggtctgacagacttcagtgacacattcaagctctacaggggtaagtcggatgagaacgaagacccttccgtggtcggagagttcaaaggcagcttccgaatctaccctctccctgacgatcccagtgtgccagcgcctcccaggcagttccgcgaactccccgattcagtgcctcaggagtgcactgtaagaatttacattgtacgcgggcttgaactccagcctcaggataataatgggttgtgtgacccttatattaaaatcaccctgggcaagaaggtgattgaggatagggaccactacatccctaataccctgaacccagttttcggtcgaatgtacgaactttcctgctacctccctcaggagaaggacctgaagatatctgtctatgattacgatactttcactcgagacgaaaaagtcggcgaaactatcatcgacttagaaaaccgattcctgtctaggttcggaagccactgcggaattccagaggagtattgcgtgtctggagtcaatacctggcgggatcaactgaggcccacccagctccttcagaacgtcgcccgctttaagggctttccccagcccattctgagtgaggatggttccagaattcggtatggtggaagagattacagcttggacgaattcgaggccaataaaatcctacatcagcatctgggagctcccgaggaaaggcttgcactgcacatcttgagaacccaggggttggtcccggagcatgtcgagactagaacgctgcactctacttttcagcccaacatctcccaggggaagttacagatgtgggtggatgtgtttccaaagtctctggggcctcctggcccgcccttcaacattacccccaggaaggcaaagaagtattacctgcgcgtgatcatttggaacacaaaggatgtcatcctggacgagaaatccatcactggggaagagatgtctgacatatacgttaagggttggattcctggtaacgaggaaaataagcagaaaaccgacgtgcactatcgcagtctggatggcgagggtaacttcaactggcgctttgtatttcctttcgactaccttcctgcagagcagctctgcatcgttgcgaagaaggagcacttctggtctatagaccagacagaatttagaattccgccaaggcttatcatccagatctgggacaatgataaattttccctggatgattacctgggcttcctagaattggatctccgccacaccattatccccgccaaaagccccgagaagtgtcgtctggacatgattcctgacctgaaggcaatgaaccctttaaaggcaaagaccgcatcactgtttgagcagaagtctatgaaggggtggtggccatgttatgccgagaaagacggcgcgcgcgttatggcagggaaagttgaaatgaccttggagattctgaacgaaaaggaggcagatgagagaccagccggaaaaggtcgtgatgaacctaacatgaacccaaagctcgacctgccaaatcgccccgagactagcttcctgtggttcacaaatccgtgtaagactatgaaattcatcgtatggcgccggtttaaatgggtgatcattggcctgctttttttgctcatcctgctcctctttgtggctgtcctgctttactctcttcctaactacctgtctatgaagatcgtgaaacctaacgtgtag

SEQ ID NO: 234711 - DNA, 1338 bp, Artificial Sequence
  derived and/or modified sequence
atgttgcgggtgattgttgagtccgctagcaatatccccaagaccaagttcggcaagcctgatccaatcgttagtgtgatcttcaaagacgagaagaaaaagacgaaaaaggtggacaacgaattgaacccagtttggaatgagatcctagaattcgacctgagaggtatacccctcgattttagctctagtctgggcattatcgtgaaggacttcgaaaccatcgggcagaacaagttgatagggaccgcgacagtggctttaaaagaccttaccggagaccagtccaggtccttaccctacaagcttatttcactgcttaacgagaaggggcaggatacaggagcaacaatcgatctcgtgataggatatgaccccccttccgctccgcatcccaacgatttaagcggcccgtccgtgccaggtatgggtggtgacggcgaggaggatgaaggagatgaggaccgtttggacaacgccgtgcgaggacccgggcctaagggtcctgtaggcactgtttccgaagctcagctggcacgcaggctaaccaaggtgaagaactcccgccgtatgttgtctaataagccccaggatttccagatcagggtgcgcgtcatcgaggggagacagctgtcaggaaataacattcgaccggtcgtgaaagtgcacgtatgcgggcaaacgcatcggacacgtatcaagcgggggaataacccattcttcgacgaactgtttttttataacgtcaatatgactcccagcgagttaatggacgaaataatttcaattagggtttataacagccactccctgcgtgcagattgtcttatgggtgaattcaagatcgacgttggcttcgtttacgacgaaccgggtcatgctgttatgcggaaatggctcttactgaatgatcccgaagacaccagttctgggtccaagggctacatgaaggtgtcaatgttcgtgctgggcactggcgacgagcctcctcctgaaaggagggaccgagacaacgattctgacgacgttgaatctaaccttcttctgcctgcagggattgccttgcgctgggtgacatttttgcttaagatctacagggctgaggacatacctcaaatggacgacgccttctctcaaacagtcaaggaaatttttggcgggaatgctgataaaaaaaacttggtggacccgttcgtcgaggtgagcttcgctggcaagaaagtgtgcaccaacattatcgaaaagaatgctaaccccgagtggaaccaggttgtaaacctgcagatcaaatttccaagcgtgtgcgagaagattaagctgactatctatgactggtag

SEQ ID NO: 234712 - DNA, 6147 bp, Artificial Sequence
  derived and/or modified sequence
atgctgcgggtgattgtggagagcgccagcaacatccccaagaccaagtttgggaagccagaccccatcgtgtctgtcatcttcaaggatgagaagaagaagaccaagaaggtggacaatgagctgaaccctgtgtggaatgagatcctggagtttgacctgcggggcatccccctggacttcagcagcagcctgggcatcatcgtgaaggactttgagaccatcggccagaacaagctgattggaacagccaccgtggccctgaaggacctgaccggggaccagagccgcagcctgccctacaagctgatcagcctgctgaatgagaagggccaggacaccggggccaccatcgacctggtgattggctatgacccccccagcgccccccaccccaatgacctgagcggccccagcgtgcccggcatgggaggagatggagaagaagatgaaggagatgaggaccggctggacaatgctgtgcggggccctggccccaagggccctgtgggcaccgtgtctgaggcccagctggcccggcggctgaccaaggtgaagaacagcaggaggatgctgagcaacaagccccaggacttccagatccgggtgcgggtcatcgagggccggcagctgagcggcaacaacatccggcctgtggtgaaggtgcacgtgtgtggccagacccacaggacccgcatcaagaggggcaacaaccccttctttgatgagctgttcttctacaacgtgaacatgacccccagcgagctgatggatgagatcatcagcatccgggtgtacaacagccacagcctgcgggctgactgcctgatgggagagttcaagattgatgtgggctttgtgtatgatgagcccggccatgctgtgatgaggaagtggctgctgctgaatgaccctgaggacaccagcagcggcagcaagggctacatgaaggtgtccatgtttgtgctgggcactggagatgagcccccacctgagcggcgggaccgggacaatgacagtgatgatgtggagagcaacctgctgctgcctgctggcatcgccctgcgctgggtgaccttcctgctgaagatctacagagctgaggacatcccccagatggatgatgccttcagccagacagtgaaggagatctttggaggaaatgctgacaagaagaacctggtggacccctttgtggaggtgtcctttgctgggaagaaggtgtgcaccaacatcatcgagaagaatgccaaccctgagtggaaccaggtggtgaacctgcagatcaagttccccagcgtgtgtgagaagatcaagctgaccatctatgactgggaccggctgaccaagaatgatgtggtgggcaccacctacctgcacctgagcaagattgctgccagcggcggggaggtggaggtgaacacaggagaaacagaggtgggctttgtgcccaccttcggcccctgctacctgaacctgtatggcagcccccgggagtacacaggcttcccagacccctatgatgagctgaacacaggcaagggggagggcgtggcctaccggggccgcatcctggtggagctggccaccttcctggagaagaccccaccagacaagaagctggagcccatcagcaatgatgacctgctggtggtggagaagtaccagaggaggaggaagtacagcctgtctgctgtgttccacagcgccaccatgctgcaggatgtgggggaggccatccagtttgaggtgtccatcggcaactacggcaacaagtttgacaccacctgcaagcccctggccagcaccacccagtacagcagagctgtgtttgatggcaactactactactacctgccctgggcccacaccaagcctgtggtgaccctgaccagctactgggaggacatcagccaccggctggatgctgtgaacaccctgctggccatggccgagcggctgcagaccaacatcgaggccctgaagagcggcatccagggcaagatcccagccaaccagctggccgagctgtggctgaagctgattgatgaggtgattgaggacacccgctacaccctgcccctgacagagggcaaggccaacgtgacagtgctggacacccagatcaggaagctgcggagccgcagcctgagccagatccatgaagctgctgtgaggatgaggtctgaggccacagatgtgaagagcaccctggccgagattgaggactggctggacaagctgatgcagctgacagaggagccccagaacagcatgccagacatcatcatctggatgatccggggggagaagaggctggcctatgcccgcatcccagcccaccaggtgctgtacagcaccagcggggagaatgccagcggcaagtactgcggcaagacccagaccatcttcctgaagtacccccaggagaagaacaacggccccaaggtgcctgtggagctgcgggtgaacatctggctgggcctgtctgctgtggagaagaagttcaacagctttgctgagggcaccttcaccgtgtttgctgagatgtatgagaaccaggccctgatgtttgggaagtggggcaccagcggcctggtgggccgccacaagttcagtgatgtgacaggcaagatcaagctgaagcgggagttcttcctgccccccaagggctgggagtgggagggggagtggatcgtggaccctgagaggagcctgctgacagaagcagatgctggccacacagagttcacagatgaggtgtaccagaatgaaagccgctacccaggaggagactggaagccagctgaggacacctacacagatgccaacggggacaaggccgccagccccagcgagctgacctgccccccaggctgggagtgggaggatgatgcctggagctatgacatcaacagagctgtggatgagaagggctgggagtatggcatcaccatccccccagaccacaagcccaagtcctgggtggccgctgagaagatgtaccacacccacagaagaagaaggctggtgaggaagaggaagaaggacctgacccagacagccagcagcacagcccgggccatggaggagctgcaggaccaggagggctgggagtatgccagcctcatcggctggaagttccactggaagcagaggagcagtgacaccttcagaagaagacgctggaggaggaagatggcccccagcgagacccatggagctgctgccatcttcaagctggagggcgccctgggcgctgacaccacagaagatggagatgagaagagcctggagaagcagaagcacagcgccaccaccgtgtttggagccaacacccccatcgtgtcctgcaactttgacagagtgtacatctaccacctgcgctgctacgtgtaccaggccaggaacctgctggccctggacaaggacagcttcagtgacccctatgcccacatctgcttcctgcacaggagcaagaccacagagatcatccacagcaccctgaaccccacctgggaccagaccatcatctttgatgaggtggagatctatggagagccccagacagtgctgcagaacccccccaaggtgatcatggagctgtttgacaatgaccaggtgggcaaggatgagttcctgggccgcagcatcttcagccctgtggtgaagctgaacagcgagatggacatcacccccaagctgctgtggcaccctgtgatgaatggagacaaggcctgtggagatgtgctggtgacagctgagctgatcctgcggggcaaggatggcagcaacctgcccatcctgcccccccagagggcccccaacctgtacatggtgccccagggcatccggcctgtggtgcagctgacagccatcgagatcctggcctggggcctgaggaacatgaagaacttccagatggccagcatcaccagccccagcctggtggtggagtgtggcggggagcgggtggagagcgtggtgatcaagaacctgaagaagacccccaacttccccagctctgtgctcttcatgaaggtgttcctgcccaaggaggagctgtacatgccacccctggtgatcaaggtgattgaccaccggcagtttggaaggaagcctgtggtgggccagtgcaccatcgagcggctggaccgcttccgctgtgacccctatgccggcaaggaggacatcgtgccccagctgaaggccagcctgctgagcgccccaccctgccgggacatcgtgattgagatggaggacaccaagcccctgctggccagcaagctgacagagaaggaggaggagatcgtggactggtggagcaagttctacgccagcagcggggagcacgagaagtgtggccagtacatccagaagggctacagcaagctgaagatctacaactgtgagctggagaatgtggccgagtttgagggcctgacagacttcagtgacaccttcaagctgtaccggggcaagagtgatgaaaatgaagaccccagcgtggtgggggagttcaagggcagcttccgcatctaccccctgcctgatgaccccagcgtgcctgccccaccccggcagttccgggagctgcctgattctgtgccccaggagtgcaccgtgcgcatctacatcgtgcggggcctggagctgcagccccaggacaacaacggcctgtgtgacccctacatcaagatcaccctgggcaagaaggtgattgaagatcgggaccactacatccccaacaccctgaaccctgtgtttggaaggatgtatgagctgagctgctacctgccccaggagaaggacctgaagatctctgtgtatgactatgacaccttcaccagagatgagaaggtgggggagaccatcatcgacctggagaaccgcttcctgagccgcttcggcagccactgcggcatccctgaggagtactgtgtgtctggagtgaacacctggagggaccagctgcggcccacccagctgctgcagaatgtggcccgcttcaagggcttcccccagcccatcctgtctgaagatggcagccgcatccgctatggaggccgggactacagcctggatgaatttgaggccaacaagatcctgcaccagcacctgggcgcccctgaggagcggctggccctgcacatcctgcggacccagggcctggtgcctgagcacgtggagaccaggaccctgcacagcaccttccagcccaacatcagccagggcaagctgcagatgtgggtggatgtgttccccaagagcctgggccccccaggcccccccttcaacatcacccccaggaaggccaagaagtactacctgcgggtcatcatctggaacaccaaggatgtgatcctggatgagaagagcatcactggagaggagatgtctgacatctacgtgaagggctggatccctggaaatgaggagaacaagcagaagacagatgtgcactaccgcagcctggatggagagggcaacttcaactggaggtttgtgttcccctttgactacctgcctgctgagcagctgtgcatcgtggccaagaaggagcacttctggagcattgaccagacagagttccgcatcccccccaggctcatcatccagatctgggacaatgacaagttcagcctggatgactacctgggcttcctggagctggacctgcggcacaccatcatcccagccaagagccctgagaagtgccgcctggacatgatcccagacctgaaggccatgaaccccctgaaggccaagacagccagcctgtttgagcagaagtccatgaagggctggtggccctgctacgccgagaaggatggagcccgggtgatggccggcaaggtggagatgaccctggagatcctgaatgagaaggaggctgatgagaggcctgctgggaagggcagagatgagcccaacatgaaccccaagctggacctgcccaacagacctgagaccagcttcctgtggttcaccaacccctgcaagaccatgaagttcatcgtgtggaggcgcttcaagtgggtgatcatcggcctgctcttcctgctgatcctgctgctgtttgtggccgtgctgctgtacagcctgcccaactacctgtccatgaagatcgtgaagcccaacgtgtag

SEQ ID NO: 234713 - DNA, 1338 bp, Artificial Sequence
  derived and/or modified sequence
atgctgcgggtgattgtggagagcgccagcaacatccccaagaccaagtttgggaagccagaccccatcgtgtctgtcatcttcaaggatgagaagaagaagaccaagaaggtggacaatgagctgaaccctgtgtggaatgagatcctggagtttgacctgcggggcatccccctggacttcagcagcagcctgggcatcatcgtgaaggactttgagaccatcggccagaacaagctgattggaacagccaccgtggccctgaaggacctgaccggggaccagagccgcagcctgccctacaagctgatcagcctgctgaatgagaagggccaggacaccggggccaccatcgacctggtgattggctatgacccccccagcgccccccaccccaatgacctgagcggccccagcgtgcccggcatgggaggagatggagaagaagatgaaggagatgaggaccggctggacaatgctgtgcggggccctggccccaagggccctgtgggcaccgtgtctgaggcccagctggcccggcggctgaccaaggtgaagaacagcaggaggatgctgagcaacaagccccaggacttccagatccgggtgcgggtcatcgagggccggcagctgagcggcaacaacatccggcctgtggtgaaggtgcacgtgtgtggccagacccacaggacccgcatcaagaggggcaacaaccccttctttgatgagctgttcttctacaacgtgaacatgacccccagcgagctgatggatgagatcatcagcatccgggtgtacaacagccacagcctgcgggctgactgcctgatgggagagttcaagattgatgtgggctttgtgtatgatgagcccggccatgctgtgatgaggaagtggctgctgctgaatgaccctgaggacaccagcagcggcagcaagggctacatgaaggtgtccatgtttgtgctgggcactggagatgagcccccacctgagcggcgggaccgggacaatgacagtgatgatgtggagagcaacctgctgctgcctgctggcatcgccctgcgctgggtgaccttcctgctgaagatctacagagctgaggacatcccccagatggatgatgccttcagccagacagtgaaggagatctttggaggaaatgctgacaagaagaacctggtggacccctttgtggaggtgtcctttgctgggaagaaggtgtgcaccaacatcatcgagaagaatgccaaccctgagtggaaccaggtggtgaacctgcagatcaagttccccagcgtgtgtgagaagatcaagctgaccatctatgactggtag

SEQ ID NO: 234714 - DNA, 6680 bp, Artificial Sequence
  derived and/or modified sequence
atgctgcgagtgattgtggaatctgccagcaatatccctaaaacgaaatttggcaagccggatcctattgtttctgtcatttttaaggatgagaaaaagaaaacaaagaaagttgataatgaattgaaccctgtctggaatgagattttggagtttgacttgaggggtataccactggacttttcatcttcccttgggattattgtgaaagattttgagacaattggacaaaataaattaattggcacggcgactgtagccctgaaggacctgactggtgaccagagcagatccctgccgtacaagctgatctccctgctaaatgaaaaagggcaagatactggggccaccattgacttggtgatcggctatgatccgccttctgctccacatccaaatgacctgagcgggcccagcgtgccaggcatgggaggagatggggaagaagatgaaggtgatgaagacaggttggacaatgcagtcaggggccctgggcccaaggggccagttgggacggtgtcggaagctcagcttgctcggaggctcaccaaagtaaagaacagccggcggatgctgtcaaataagccacaggacttccagatccgcgtccgagtgattgagggccgacagttaagtggtaacaacataaggcctgtggtcaaagttcacgtctgtggccagacacaccgaacaagaatcaagagaggaaacaaccctttttttgatgagttgtttttctacaatgtcaacatgaccccttctgaattgatggatgagatcatcagcatccgggtttataattctcactctctgcgggcagattgtctgatgggggaatttaagattgatgttggatttgtttatgatgaacctggccatgctgtcatgagaaagtggcttcttctcaatgacccggaagataccagttcaggttctaaaggttatatgaaagtcagcatgtttgtcctgggaaccggagatgagcctcctcctgagagacgagatcgtgataatgacagtgatgatgtggagagtaatttgttactccctgctggcattgccctccggtgggtgaccttcttgctgaaaatctaccgagctgaggacatcccccagatggatgatgccttctcacagacagtaaaggaaatatttggaggcaatgcagataagaaaaatctcgtggatccttttgtagaagtttcctttgctggaaaaaaggtttgtacaaacataattgagaaaaatgcaaacccagagtggaatcaggtcgtcaatcttcagatcaagtttccttcagtgtgtgaaaaaataaaactaacaatatatgactgggaccgtcttactaaaaatgatgtagttggaacaacatatctacacctctctaaaattgctgcctctggtggggaagtggaagtaaacacaggagaaacagaggtaggctttgttccaacgtttggaccttgttacctgaatctttatggaagccccagagagtacacgggattcccagacccctatgatgagctgaatactggaaagggggaaggagttgcctacagaggcaggatcttggttgaattagccacttttcttgagaagacaccaccagataaaaagcttgagcccatttcaaatgatgacctgctggttgttgagaaataccagcgaaggcggaagtacagcctgtctgccgtgtttcattcagccaccatgttgcaagatgttggtgaggccattcagtttgaagtcagcattgggaactatggcaacaagtttgacaccacctgtaagcctttggcatcaacaactcagtacagccgtgctgtatttgatggcaactactattattacttgccttgggcccacaccaagccagttgttaccctgacttcatactgggaggatattagtcatcgcctggatgcggtgaacactctcctagctatggcagaacggctgcaaacaaatatagaagctctaaaatcagggatacaaggtaaaattcctgcaaaccagctggctgaattgtggctgaagctgatagatgaagttatagaagacacgagatacacgttgcctctcacagaaggaaaagccaacgtcacagttctcgatactcagatccgaaagctgcggtccaggtctctctcccaaatacatgaggcggctgtgaggatgaggtcggaagccacagatgtgaagtccacactggcagaaattgaggactggcttgataaattaatgcagctgactgaagagccacagaacagcatgcctgacatcatcatctggatgatccggggagagaagagactggcctatgcacgaattcccgcacatcaggtcttgtactccaccagtggtgagaatgcatctggaaaatactgtgggaaaacccaaaccatctttctgaagtatccacaggagaaaaacaacgggccaaaggtgcctgtggagttgcgagtgaacatctggctaggcttaagtgctgtggagaagaagtttaacagcttcgcagaaggaactttcaccgtctttgctgaaatgtatgaaaatcaagctctcatgtttggaaaatggggtacttctggattagtaggacgtcataagttttctgatgtcacaggaaaaataaaactcaagagggaattttttctgcctccaaaaggctgggaatgggaaggagagtggatagttgatcctgaaagaagcttgctgactgaggcagatgcaggtcacacggagttcactgatgaagtctatcagaacgagagccgctaccccgggggcgactggaagccggccgaggacacctacacggatgcgaacggcgataaagcagcatcacccagcgagttgacttgtcctccaggttgggaatgggaagatgatgcatggtcttatgacataaatcgagcggtggatgagaaaggctgggaatatggaatcaccattcctcctgatcataagcccaaatcctgggttgcagcagagaaaatgtaccacactcatagacggcgaaggctggtccgaaaacgcaagaaagatttaacacagactgcttcaagcaccgcaagggccatggaggaattgcaagaccaagagggctgggaatatgcttctctaattggctggaaatttcactggaaacaacgtagttcagataccttccgccgcagacgctggaggagaaaaatggctccttcagaaacacatggtgcagctgccatctttaaacttgaaggtgcccttggggcagacactaccgaagatggggatgagaagagcctggagaaacagaagcacagtgccaccactgtgttcggagcaaacacccccattgtttcctgcaattttgacagagtctacatctaccatctgcgctgctatgtctatcaagccagaaacctcttggctttagataaggatagcttttcagatccatatgctcatatctgtttcctccatcggagcaaaaccactgagatcatccattcaaccctgaatcccacgtgggaccaaacaattatattcgatgaagttgaaatctatggggaaccccaaacagttctacagaatccacccaaagttatcatggaactttttgacaatgaccaagtgggcaaagatgaatttttaggacgaagcattttctctcctgtggtgaaactgaactcagaaatggacatcacacccaaacttctctggcacccagtaatgaatggagacaaagcctgcggggatgttcttgtaactgcagagctgattctgaggggcaaggatggctccaaccttcccattcttccccctcaaagggcgccaaatctatacatggtcccccaggggatcaggcctgtggtccagctcactgccattgagattctagcttggggcttaagaaatatgaaaaacttccagatggcttctatcacatcccccagtcttgttgtggagtgtggaggagaaagggtggaatcggtggtgatcaaaaaccttaagaagacacccaactttccaagttctgttctcttcatgaaagtgttcttgcccaaggaggaattgtacatgcccccactggtgatcaaggtcatcgaccacaggcagtttgggcggaagcctgtcgtcggccagtgcaccatcgagcgcctggaccgctttcgctgtgacccttatgcagggaaagaggacatcgtcccacagctcaaagcctcccttctgtctgccccaccatgccgggacatcgttatcgaaatggaagacaccaaaccattactggcttctaagctgacagaaaaggaggaagaaatcgtggactggtggagtaaattttatgcttcctcaggggaacatgaaaaatgcggacagtatattcagaaaggctattccaagctcaagatatataattgtgaactagaaaatgtagcagaatttgagggcctgacagacttctcagatacgttcaagttgtaccgaggcaagtcggatgaaaatgaagatccttctgtggttggagagtttaagggctcctttcggatctaccctctgccggatgaccccagcgtgccagcccctcccagacagtttcgggaattacctgacagcgtcccacaggaatgcacggttaggatttacattgttcgaggcttagagctccagccccaggacaacaatggcctgtgtgacccttacataaaaataacactgggcaaaaaagtcattgaagaccgagatcactacattcccaacactctcaacccagtctttggcaggatgtacgaactgagctgctacttacctcaagaaaaagacctgaaaatttctgtctatgattatgacacctttacccgggatgaaaaagtaggagaaacaattattgatctggaaaaccgattcctttcccgctttgggtcccactgcggcataccagaggagtactgtgtttctggagtcaatacctggcgagatcaactgagaccaacacagctgcttcaaaatgtcgccagattcaaaggcttcccacaacccatcctttccgaagatgggagtagaatcagatatggaggacgagactacagcttggatgaatttgaagccaacaaaatcctgcaccagcacctcggggcccctgaagagcggcttgctcttcacatcctcaggactcaggggctggtccctgagcacgtggaaacaaggactttgcacagcaccttccagcccaacatttcccagggaaaacttcagatgtgggtggatgttttccccaagagtttggggccaccaggccctcctttcaacatcacaccccggaaagccaagaaatactacctgcgtgtgatcatctggaacaccaaggacgttatcttggacgagaaaagcatcacaggagaggaaatgagtgacatctacgtcaaaggctggattcctggcaatgaagaaaacaaacagaaaacagatgtccattacagatctttggatggtgaagggaattttaactggcgatttgttttcccgtttgactaccttccagccgaacaactctgtatcgttgcgaaaaaagagcatttctggagtattgaccaaacggaatttcgaatcccacccaggctgatcattcagatatgggacaatgacaagttttctctggatgactacttgggtttcctagaacttgacttgcgtcacacgatcattcctgcaaaatcaccagagaaatgcagattggacatgattccggacctcaaagccatgaacccccttaaagccaagacagcctccctctttgagcagaagtccatgaaaggatggtggccatgctacgcagagaaagatggcgcccgcgtaatggctgggaaagtggagatgacattggaaatcctcaacgagaaggaggccgacgagaggccagccgggaaggggcgggacgaacccaacatgaaccccaagctggacttaccaaatcgaccagaaacctccttcctctggttcaccaacccatgcaagaccatgaagttcatcgtgtggcgccgctttaagtgggtcatcatcggcttgctgttcctgcttatcctgctgctcttcgtggccgtgctcctctactctttgccgaactatttgtcaatgaagattgtaaagccaaatgtgtaacaaaggcaaaggcttcatttcaagagtcatccagcaatgagagaatcctgcctctgtagaccaacatccagtgtgattttgtgtctgagaccacaccccagtagcaggttacgccatgtcaccgagccccattgattcccagagggtcttagtcctggaaagtcaggccaacaagcaacgtttgcatcatgttatctcttaagtattaaaagttttattttctaaagtttaaatcatgtttttcaaaatatttttcaaggtggctggttccatttaaaaatcatctttttatatgtgtcttcggttctagacttcagcttttggaaattgctaaatagaattcaaaaatctctgcatcctgaggtgatatacttcatatttgtaatcaactgaaagagctgtgcattataaaatcagttagaatagttagaacaattcttatttatgcccacaaccattgctatattttgtatggatgtcataaaagtctatttaacctctgtaatgaaactaaataaaaatgtttcaccttt

SEQ ID NO: 234715 - DNA, 1519 bp, Artificial Sequence
  derived and/or modified sequence
gccctgggagaaatcctcccttcactgggagagaacttctctcccagggcggtgcgacccggagctccagcgccctagtctccacttcgtttgctgaaacttgctttctaccagctaagaaccatgctgcgagtgattgtggaatctgccagcaatatccctaaaacgaaatttggcaagccggatcctattgtttctgtcatttttaaggatgagaaaaagaaaacaaagaaagttgataatgaattgaaccctgtctggaatgagattttggagtttgacttgaggggtataccactggacttttcatcttcccttgggattattgtgaaagattttgagacaattggacaaaataaattaattggcacggcgactgtagccctgaaggacctgactggtgaccagagcagatccctgccgtacaagctgatctccctgctaaatgaaaaagggcaagatactggggccaccattgacttggtgatcggctatgatccgccttctgctccacatccaaatgacctgagcgggcccagcgtgccaggcatgggaggagatggggaagaagatgaaggtgatgaagacaggttggacaatgcagtcaggggccctgggcccaaggggccagttgggacggtgtcggaagctcagcttgctcggaggctcaccaaagtaaagaacagccggcggatgctgtcaaataagccacaggacttccagatccgcgtccgagtgattgagggccgacagttaagtggtaacaacataaggcctgtggtcaaagttcacgtctgtggccagacacaccgaacaagaatcaagagaggaaacaaccctttttttgatgagttgtttttctacaatgtcaacatgaccccttctgaattgatggatgagatcatcagcatccgggtttataattctcactctctgcgggcagattgtctgatgggggaatttaagattgatgttggatttgtttatgatgaacctggccatgctgtcatgagaaagtggcttcttctcaatgacccggaagataccagttcaggttctaaaggttatatgaaagtcagcatgtttgtcctgggaaccggagatgagcctcctcctgagagacgagatcgtgataatgacagtgatgatgtggagagtaatttgttactccctgctggcattgccctccggtgggtgaccttcttgctgaaaatctaccgagctgaggacatcccccagatggatgatgccttctcacagacagtaaaggaaatatttggaggcaatgcagataagaaaaatctcgtggatccttttgtagaagtttcctttgctggaaaaaaggtttgtacaaacataattgagaaaaatgcaaacccagagtggaatcaggtcgtcaatcttcagatcaagtttccttcagtgtgtgaaaaaataaaactaacaatatatgactggtgagttgaaaatacgtatgtgtctaattcaacataaaataaacattggatattgtgaaaca

SEQ ID NO: 234716 - DNA, 6147 bp, Artificial Sequence
  derived and/or modified sequence
atgctgcgggtgatcgtggagagcgccagcaacatccccaagaccaaattcggcaagcctgatccgatcgtgagtgtgattttcaaagacgagaagaaaaaaacgaaaaaagttgataacgaactcaacccggtgtggaatgagattttagaatttgacctccgcggtatcccacttgactttagttcctctctcgggatcattgttaaggatttcgagaccattgggcaaaataagctcataggtacagcaactgtggcccttaaggacctaacgggagatcaatcccgctcgctgccatacaagcttatatcccttctgaacgaaaagggtcaggatacaggcgcaaccatcgacctggtgattgggtacgaccctccttccgctcctcacccaaacgacctgagcggcccctccgtccctgggatgggaggagacggggaggaggacgagggcgacgaagacagactcgataatgctgtgagaggcccaggcccaaaaggaccggtgggtaccgtgtcagaggcacagctcgctcgccgcctcacaaaggtgaagaacagcagacgaatgttgtctaacaagccacaggactttcagatacgcgttcgggtcatcgagggacgccagctatctggaaacaatattcgaccagttgtcaaagttcacgtatgcggccaaacacacagaactcgaatcaaacgggggaataacccattctttgacgagctgttcttttataacgtcaatatgactccatcagaacttatggacgagatcatttcaatcagggtgtataattctcactctctccgggccgattgtctgatgggcgaattcaaaatagacgtcggcttcgtgtatgacgagccaggtcatgccgtgatgcggaagtggttgttgctgaatgacccagaagacacatcttccggcagcaagggctacatgaaagttagcatgtttgtcctcgggaccggggatgaaccaccccccgaaaggcgggacagagacaatgattctgacgatgttgaaagcaacctgttgttgccagcaggcatcgccctccgctgggtcaccttccttcttaaaatttatagggccgaggatattccccagatggacgatgccttcagccaaaccgtgaaagaaattttcggagggaacgccgacaagaagaatctggtcgacccgtttgttgaggttagctttgctggaaaaaaagtgtgcaccaacatcattgagaagaatgctaatcccgagtggaaccaagtggttaacctgcagattaaatttcccagcgtttgtgagaagatcaaactgacaatctatgactgggacagattgacaaaaaatgacgtggttgggactacatacctccacctgagcaagatcgctgcttccggaggcgaggtggaggtcaatactggagagacggaagttggttttgtgccaacatttggcccttgttaccttaacctgtatggctccccacgtgagtacactggctttccagatccttatgacgaactcaacacaggtaagggagaaggcgtcgcctaccgcgggcgaattcttgtggagctggctaccttcctggaaaaaacacccccagataaaaaactagaacccatttccaatgatgatctcctagtcgtcgagaagtaccagaggagacgtaaatatagcttgtcagctgtgttccacagcgccactatgctccaggacgtaggcgaagccatccaattcgaagtgagcatcggcaattatggcaataagttcgatacgacgtgtaaacctttggcgtccaccactcagtatagtcgggccgtgtttgacggcaattactactattatctcccctgggcccacacaaaacccgttgtgaccctgacgagctattgggaggacatctcgcacaggcttgatgccgtgaacaccctgctagccatggccgagcgcctacaaacaaatatcgaagcactgaagtctggcattcagggcaaaatcccagctaaccagctggcagagctttggcttaagctcatcgacgaagtgattgaggacacaaggtacaccctgcctctgaccgaagggaaagctaatgtcaccgtgctggatacccaaattaggaagcttcggagcagatccctgagccagatccatgaagcggctgtgagaatgcgatctgaagctactgacgtgaaatctacgcttgccgaaatcgaggattggttggacaaacttatgcagttgaccgaggaaccgcagaatagcatgccggacatcataatctggatgatccgaggggaaaagcgcctggcttatgcacgcattcccgcacaccaagtgctgtattccacctcaggtgaaaacgcttcaggcaaatactgcggaaagacacagacgatctttctgaagtacccacaggagaagaataacgggcctaaagtccccgtggagctcagggtgaacatttggctaggcctgtctgctgtcgagaaaaagtttaatagttttgccgagggtacatttactgtgttcgccgagatgtatgaaaatcaggcactgatgtttggaaaatggggcactagtggcttagtcggccgacacaagttctctgacgtcacggggaagataaagctgaagagggagttttttcttccgcccaagggatgggagtgggagggggaatggatcgtggatcccgaacgatctttgttgacagaagctgatgcaggtcatacagaattcaccgatgaagtgtaccaaaacgagagcagatatccaggaggcgattggaaacctgccgaggatacttatacagacgctaacggcgacaaggccgcatctccgagcgaactcacatgtcccccaggttgggaatgggaggacgacgcttggagttacgatattaatagggctgtagatgagaaagggtgggaatacgggatcaccatccctcctgaccataagcccaagtcgtgggtcgccgccgagaaaatgtaccacacgcataggcgccgaaggttagttaggaagagaaagaaagaccttacacaaactgcaagtagcacagctcgcgcgatggaggaacttcaggaccaggaggggtgggagtacgcctccctgatcggctggaaatttcactggaagcaaagatcctccgatacattccgccgtagacggtggcggcggaaaatggccccaagtgagacacacggcgccgcagccatttttaagctggaaggggcgctgggggcggataccacggaggatggtgacgagaaatctctggagaagcagaaacatagtgccaccacagtgtttggggcaaacacacctatcgtctcgtgtaactttgaccgtgtgtatatttaccacctcagatgttacgtctaccaggcacgcaacctactcgctttagacaaggacagtttttcagacccttatgcacatatatgcttcctgcaccggtccaagaccactgagatcattcacagcaccctgaatcctacttgggaccagacgattatctttgacgaagtggagatctacggggagccacagaccgtccttcagaatccaccaaaagtgataatggaactgttcgacaatgatcaagtgggaaaggacgagtttctgggcaggagtatctttagtcccgtcgtcaagctgaattccgagatggatatcaccccaaagctgctgtggcatcccgtgatgaacggggacaaagcctgcggggacgttttagtcacagccgagcttatcctgcgggggaaagatggctctaatttgcctatattgccccctcagagagcccccaatctttatatggtgccacaagggattagaccagtggtccagctcaccgcaatcgagattctggcctggggactacgcaatatgaaaaatttccagatggcatcaataactagccctagccttgttgtggaatgtggcggagaaagggtagagtcggtcgtcatcaaaaatctgaagaagactccaaattttccctcttctgtgctcttcatgaaggtgttccttcctaaagaggagctttacatgcctccgctggtaattaaagtgatcgatcacagacaatttggacgaaaacccgtagttgggcagtgtactatcgagagattggataggttcaggtgcgacccttatgccgggaaggaggatattgtccctcaattgaaagcatcccttctgtctgcgccgccttgccgcgatattgtaatagaaatggaagacactaaacctttgttggcgtcaaaactgactgagaaggaggaagaaatagtcgactggtggagcaaattctacgccagctccggggagcatgaaaaatgcggccagtatatccaaaaagggtactcaaagctcaaaatttataattgcgaactcgagaatgtcgctgaattcgaaggcttaacagacttcagcgacacctttaaattgtaccgggggaagagcgacgagaacgaagatccatccgtcgtgggcgagttcaagggtagcttcagaatctacccactgcctgatgatccatctgtccccgcccctccaaggcagtttcgagagttgccagattcagtgccacaggagtgcaccgtgcgcatttacatcgtccggggactggagcttcagccccaggacaacaacgggctatgtgatccatatattaagatcacactcggcaagaaggttatcgaggatcgggatcactatattcctaataccctgaatcctgtgttcggtaggatgtacgagctctcctgctacctgccacaagagaaagacttgaagatttcagtctatgattatgacacctttacccgcgatgagaaggtcggggagaccatcatagacctcgaaaacagatttctgtcccgattcgggtctcattgtggcattcccgaagaatattgcgtttccggtgtcaatacctggcgggatcaacttcgccccacccagctgctccagaatgtcgctaggttcaagggattcccacagccgatcctgtctgaggacggttcccggattaggtacgggggccgcgattacagcctagacgaatttgaagctaacaagattctgcatcagcatctcggcgcccccgaggaacggctggcactgcatatccttcgtacacaggggctcgttcccgagcacgtggaaaccagaactctccactcaacattccaacccaatataagccagggcaagctgcagatgtgggtggacgttttccccaagagcctgggccccccaggccctccctttaatattactccacggaaagctaaaaaatactacctgcgggttatcatatggaacactaaggatgtgatcttggatgagaaatctatcacaggtgaagaaatgagtgatatctatgtaaaagggtggattcccggtaatgaagagaacaagcagaagactgatgtccattatcgatccttagacggtgaaggaaattttaattggcgatttgtgttcccatttgattacctgcctgcggaacaactgtgtatcgtggcaaagaaggagcacttttggagtatcgaccagacagagtttaggattcctcctcggctaatcatccagatttgggataacgacaagttctcacttgatgactatctgggattcctggagttggacctacggcacacaattattccagctaagtcgcctgaaaagtgtcggctagacatgatccccgacctaaaagccatgaatcccctcaaagctaagacggcctcattattcgagcagaaatctatgaagggctggtggccttgctatgcagagaaggacggcgccagagttatggcaggcaaggtggagatgaccctcgagatcttgaatgagaaggaggcagacgaaagaccagccgggaagggtcgggacgaaccaaatatgaaccccaaactcgatctccctaatagaccagagacatccttcctctggtttaccaatccgtgtaagaccatgaagttcattgtgtggagaaggtttaaatgggtcatcatcgggctgctttttttacttattctgttactctttgtggcggtgctcttatactcgctaccaaattacctgagtatgaaaatcgtgaagcctaatgtgtag

SEQ ID NO: 234717 - DNA, 1338 bp, Artificial Sequence
  derived and/or modified sequence
atgctgcgggtgatcgtggagagcgccagcaacatccccaagaccaaattcgggaagcccgatcctatagtgtccgtgatatttaaggacgagaaaaagaagactaagaaggtggataacgagctgaaccccgtatggaatgaaatactcgagtttgatcttcgcggaattccgctggacttctcaagcagcttaggcattatagtgaaggacttcgagacaatcggccagaacaagctcatcggcacggccacagtcgcccttaaagacctgaccggagaccaatcacgctcactgccctataaattaatctcattactaaatgagaaggggcaggataccggcgcgactatagatctcgtgattggctatgatcctccgtcggccccacaccctaatgacctgtcaggaccgagcgttcctggaatgggaggcgacggagaggaggacgagggagacgaggatcggctggataatgcagtccgaggacccggccccaaggggccagtgggaaccgtctctgaggcgcagctggccagacggttaaccaaggtgaagaatagtcgcaggatgctgtcaaataaacctcaggactttcagattcgcgtgagggtcatagaggggcgccaactgtccggcaacaacatccgtcctgttgtgaaagtccatgtgtgcggccagacgcaccgcacaaggattaagcgtggcaacaaccctttctttgatgaattgttcttctataatgttaatatgacccccagtgagctcatggacgagatcatctccattcgagtgtataattcacatagcctcagggcagattgtctgatgggtgagttcaagatagacgtcggctttgtgtatgatgaacccggacacgccgtgatgcgaaaatggctgctgctcaacgatccagaagatacttccagcgggtctaaggggtatatgaaagtctctatgtttgtgcttggcacaggcgatgaacccccgcccgagcgcagagatagggataacgacagtgacgacgtggaatcgaatctccttttaccagctggcatcgctctccggtgggtgacattcttgttgaaaatttatcgggccgaagatatcccacagatggatgacgcgtttagccagacggttaaagagatttttggtggcaacgctgacaaaaagaacctggttgatccattcgttgaagttagctttgctggcaagaaggtgtgtaccaatatcattgaaaaaaacgccaatcctgaatggaaccaggtcgtaaatctacagatcaagtttccgtccgtgtgcgaaaaaattaaactgacaatttacgattggtag

SEQ ID NO: 234718 - DNA, 6146 bp, Artificial Sequence
  derived and/or modified sequence
atgctccgtgtcattgtggagagtgcatctaacatccctaagaccaaattcgggaaaccagacccaattgtctccgtgatctttaaagacgagaagaagaaaacaaagaaagtggataacgagctgaatcctgtatggaacgagatcctggagttcgaccttcgaggtatcccattagacttctcctcttctctgggcattatcgtaaaggattttgagacaattggacagaataagctgatcggaacggccaccgtggccctgaaggatctcaccggcgatcagtcaaggtctctgccctataagttaatctcactgctgaacgagaagggacaagatacaggcgctacaatcgatttggtgatcgggtacgatccaccttccgcaccccaccccaacgatctttccgggccatccgtccctgggatgggaggcgatggagaggaggatgagggcgatgaggatcggctcgataatgctgtgagaggacctggacctaagggtccagtagggactgtgtccgaagcccagctggctcgcaggctgacaaaagtgaagaactctcggaggatgctttccaataagccacaagattttcagatccgggtacgcgtcattgaaggtaggcaactgagcggaaacaacatcaggcctgtggtgaaggttcacgtgtgcggtcagacgcaccgcacaagaatcaagcgcggaaataaccctttcttcgatgagctgttcttctacaacgtgaatatgacgcctagtgagctaatggatgaaatcatatctatacgggtctacaattcccacagtttaagggctgattgccttatgggcgagttcaaaattgatgttgggtttgtctatgacgagcccggacacgctgtgatgcgtaaatggttactcctgaatgatccagaggacactagcagcgggtccaaaggttatatgaaagtaagcatgttcgttcttggcaccggggacgagccccctcccgagagacgggacagagacaatgactctgacgacgtcgaaagcaacctgctgctgccagctggaattgccctgcgctgggtgaccttcttacttaagatttaccgagccgaggatatcccacagatggacgatgcattttcccaaacagttaaagagattttcggagggaacgccgacaaaaagaacctcgtggatcccttcgtggaggtgagcttcgctggaaagaaagtatgtacgaatataattgagaagaacgcgaaccccgagtggaatcaggtggtgaatctccaaattaaattccctagcgtgtgcgaaaagattaaacttacgatttacgattgggaccggctaaccaagaatgatgtggtggggactacctacctccatctgtcaaaaatcgctgcttccggcggagaagtggaggtgaatacaggagagaccgaggtcggcttcgtgccaaccttcggcccttgttaccttaacttatacgggagcccccgagagtataccggattcccagatccttatgatgagttgaatacaggcaagggggagggcgttgcctaccgcggacgaatcctcgttgagctggccaccttcctcgaaaaaaccccaccagacaaaaagctggaacctatcagtaatgacgatctgttggtggttgagaaatatcagaggagacggaagtactcactctcggccgtgtttcacagcgccactatgctgcaggacgtcggcgaggctatccagtttgaggtgtcgattggaaattatggcaacaaattcgataccacttgtaaacctctcgcctccaccacgcagtacagcagagccgtgttcgatggcaattactactattacctgccttgggctcatacgaaaccagtggtaaccctgacaagctattgggaggacatctcacacagactggatgccgtgaacactcttttggcgatggctgagagactgcagacaaatattgaggcactgaaatctggtatccaggggaaaatccctgccaatcaactcgctgaactgtggctcaagctaattgacgaggttatcgaagatacaaggtatacactgcctctcactgagggcaaggccaatgtaacagtccttgacacccaaattcgcaaactgagatctagatccctgtcccagatccatgaggccgcagtgcgaatgcggtctgaggcgactgatgttaaaagcaccttagccgaaatagaagactggctggataagctgatgcagcttaccgaagagccccagaatagtatgccggatataatcatttggatgatccgaggcgagaaaaggcttgcatatgctcgcataccagctcaccaagtcctctacagcacttcaggtgagaatgcaagtggcaagtattgcggaaaaactcaaacaatctttctaaagtatcctcaggagaaaaataacgggccaaaggtgcctgttgagcttcgtgtgaatatatggcttggattaagtgctgtggagaagaaattcaacagctttgcggaaggtactttcaccgtttttgccgaaatgtatgagaatcaagcactgatgttcgggaagtggggtaccagcggcttggtaggacgccacaaattttcagacgttactggaaaaataaagctcaagagggagtttttcctgcctcccaaaggctgggagtgggaaggtgagtggatagtcgatcctgagcgatctttgttgacagaagccgacgccggtcatacagagttcacggatgaagtataccagaatgagtcccggtatcccggtggcgattggaagccggcagaagatacctatacagatgctaatggagacaaagcggcaagcccatcagagttgacctgtccccctggatgggagtgggaagacgatgcctggtcttacgacattaatagggccgtggatgaaaaagggtgggagtacggaattaccatccctccagatcacaaaccaaagtcatgggtcgctgctgagaaaatgtaccacacacatcgtagacgtcggctggtcagaaaaaggaagaaggacctgacccaaacggccagctctacagcacgggctatggaggaactacaggaccaagagggctgggaatatgctagcttgatcggctggaagtttcactggaagcagaggagctcagacacattcaggaggagaaggtggaggcgaaagatggccccttctgaaactcacggggctgcagcaatctttaagctcgagggggcattaggggctgacaccacggaggacggcgacgagaagtccctggaaaagcagaagcacagcgccaccaccgtctttggagcaaacaccccaattgtgtcctgtaattttgatagggtctatatctaccatctccggtgctacgtgtaccaggccaggaacctcctggcattggacaaagattcgttctctgatccctacgcgcatatttgttttttgcatagaagcaaaaccacagagatcattcacagcaccctaaatccaacctgggaccaaactatcatttttgatgaggttgagatctatggcgagccccaaaccgtgctgcagaacccccctaaagtgatcatggagctttttgacaatgatcaggtgggaaaagatgagtttctcggacgctcaatcttcagtcctgttgtcaagctgaacagcgaaatggatattacacccaaattgctctggcatcccgttatgaacggcgataaggcatgcggggacgtgctcgtgacggccgagctgatcttgagggggaaagatgggtccaacctccccattctgccaccccagagagcgccaaacctgtacatggttccccaggggattagaccagtagtacaattgaccgcaatcgaaatcctggcatgggggctgagaaacatgaaaaattttcagatggcatcaattacctccccatcgctggtggtcgagtgtggaggcgaacgggtggagagcgttgtcatcaagaatctgaagaagaccccaaacttcccgtcaagtgtcctttttatgaaagtcttcctgcccaaagaagaactctacatgcccccacttgtgattaaggtgattgatcaccgtcagttcgggcgtaagcccgtcgtcggccagtgcactattgaaaggctggaccgcttccgatgcgatccctacgccggtaaggaggacatcgtgccacaactcaaggccagcctcctatccgcacccccatgtcgagacattgtgatagaaatggaagatactaagcccctcctggcctctaaattaaccgagaaggaagaagagatcgtggactggtggagcaaattctatgcatcgtcaggagagcacgagaagtgcggacagtatatccagaagggctactccaagttaaagatctataattgtgaacttgaaaacgtcgccgaatttgaagggcttacggatttttctgatactttcaaactttacagggggaaatccgatgaaaacgaggacccctccgtagtgggagagttcaagggctcattccgcatttacccactaccagacgacccatccgtgcccgcacctcctcgccaattccgggaactgcccgactcagtccctcaggagtgcacagtaagaatctacatcgtgagagggctagaactgcagccacaagacaacaatggactgtgtgacccctatattaagattactctcggaaaaaaagttatcgaggatcgcgaccattatatccccaacaccctgaatcctgtctttggccgaatgtatgagctgtcttgctacctcccacaggagaaggatctgaagatctctgtgtacgattacgacacattcacccgggatgagaaggttggcgagacgattatcgacctggaaaacaggtttctcagtcggtttggttcccattgtgggatacccgaggagtactgtgtcagtggcgtaaacacgtggagggaccaacttcgtcctacccaactcctgcagaatgtagctcggttcaagggctttccccagcccattctaagtgaagatgggtcacgaattcgctacggcggtcgcgattattccctggacgagttcgaggccaataaaatcctgcaccaacatctgggggctcctgaagagcggctggcactccatatactgcgcacccagggattagtgccagagcatgtggagacccgtactctgcactccacatttcaacctaatatctcccagggcaagctgcagatgtgggttgatgtgttccctaaaagcctgggcccaccaggcccaccattcaacatcaccccacggaaggctaagaagtactacttgcgcgtgatcatctggaacacaaaggacgtcattctggatgaaaagtcaataacgggggaggaaatgtctgatatttacgtgaagggatggatccccggaaatgaggaaaacaaacagaagacagacgtgcactacagatctctggacggtgaggggaatttcaactggagattcgtgttcccgttcgactacctgcccgctgaacagctgtgcatcgtcgctaagaaagaacacttttggtctatcgatcaaacagaattccgcattccgccacgactcataattcagatctgggataacgataagttctcactggacgactatttggggttcctggaactcgacctgcggcacacaataatcccggcaaagtcaccagaaaaatgtcgcctggacatgattccagatcttaaagcaatgaaccctctgaaggcgaaaactgccagtctgttcgagcagaaaagcatgaaaggttggtggccttgctatgccgaaaaggatggcgcacgagtgatggccggaaaagtggagatgacattggagattctgaacgagaaggaggccgacgaacggccagccggaaaagggcgagatgagccaaacatgaatccgaagttggacctgcccaatcgaccggagactagctttctttggtttacaaacccctgcaaaactatgaagttcatagtgtggcgtaggtttaaatgggtaattattggcttgctgttccttctaatactgctgctctttgtggccgtcctgctctactcactgcccaactacttgagtatgaagatcgtcaaaccgaatgtgta

SEQ ID NO: 234719 - DNA, 1338 bp, Artificial Sequence
  derived and/or modified sequence
atgctccgagtgatcgttgagtctgctagtaacatcccaaagactaagttcggaaagcccgaccctatcgtgagtgtgatttttaaagacgagaagaaaaaaactaaaaaggtcgataacgaattgaatcctgtgtggaatgagattctggaattcgatctccgaggtattcctcttgatttttcctcgtccttaggaatcatcgtgaaagacttcgagacaattgggcagaataagctgattggcactgctacagttgcactaaaagatctcaccggggaccagagccggtcactcccttataagcttatctccctgctcaatgagaaaggccaggacactggcgcaaccatcgatctggttataggctatgaccccccttcagcgccacatcccaacgacttgagcggtcctagtgtgcctggaatgggaggagacggggaagaggatgagggcgacgaggacagactggacaacgcagtgaggggtccagggcctaagggccctgtggggactgtaagtgaggcccagcttgctcggaggttgacgaaggttaaaaactctagaaggatgctgtccaacaagcctcaagatttccagattcgggtgcgggtgatcgaagggaggcaactcagcggtaataacatcagacccgtcgtcaaggtccacgtgtgtggtcagactcatcgaacccggataaaacggggaaataatcccttctttgatgaactgttcttctacaatgttaacatgacaccctccgagctcatggacgaaatcatctctatcagggtgtacaatagccatagtctgcgcgcagattgtcttatgggagaattcaagatcgatgtcggcttcgtgtacgacgaacctggccatgccgtgatgagaaagtggttgctgctgaatgatcctgaagacacttctagcggcagcaaagggtatatgaaggtatcaatgttcgtgttaggcactggagatgagccgccaccggaacggcgtgacagggacaacgactccgatgacgtggagtctaacctgctgctacccgctggcatcgctcttaggtgggtcaccttcctccttaaaatataccgggcagaggacatcccccagatggatgatgctttcagtcaaacggttaaggaaatcttcggcggaaatgccgacaagaaaaacctcgtcgacccgttcgttgaagtcagttttgcagggaagaaggtatgcacaaatatcatcgagaagaatgccaacccagagtggaatcaggtcgtcaatctgcagattaagtttccctccgtttgcgagaagataaagcttacaatctatgactggtag

SEQ ID NO: 234720 - protein, 681 aa, Artificial Sequence
  derived and/or modified sequence
MSKTFLRPKVSSTKVTDWVDPSFDDFLECSGVSTITATSLGVNNSSHRRKNGPSTLESSRFPARKRGNLSSLEQIYGLENSKEYLSENEPWVDKYKPETQHELAVHKKKIEEVETWLKAQVLERQPKQGGSILLITGPPGCGKTTTLKILSKEHGIQVQEWINPVLPDFQKDDFKGMFNTESSFHMFPYQSQIAVFKEFLLRATKYNKLQMLGDDLRTDKKIILVEDLPNQFYRDSHTLHEVLRKYVRIGRCPLIFIISDSLSGDNNQRLLFPKEIQEECSISNISFNPVAPTIMMKFLNRIVTIEANKNGGKITVPDKTSLELLCQGCSGDIRSAINSLQFSSSKGENNLRPRKKGMSLKSDAVLSKSKRRKKPDRVFENQEVQAIGGKDVSLFLFRALGKILYCKRASLTELDSPRLPSHLSEYERDTLLVEPEEVVEMSHMPGDLFNLYLHQNYIDFFMEIDDIVRASEFLSFADILSGDWNTRSLLREYSTSIATRGVMHSNKARGYAHCQGGGSSFRPLHKPQWFLINKKYRENCLAAKALFPDFCLPALCLQTQLLPYLALLTIPMRNQAQISFIQDIGRLPLKRHFGRLKMEALTDREHGMIDPDSGDEAQLNGGHSAEESLGEPTQATVPETWSLPLSQNSASELPASQPQPFSAQGDMEENIIIEDYESDGT

SEQ ID NO: 234721 - DNA, 2046 bp, Artificial Sequence
  derived and/or modified sequence
atgagcaagaccttcctgagacccaaggtgagcagcaccaaggtgaccgactgggtggaccccagcttcgacgacttcctggagtgcagcggcgtgagcaccatcaccgccaccagcctgggcgtgaacaacagcagccacagaagaaagaacggccccagcaccctggagagcagcagattccccgccagaaagagaggcaacctgagcagcctggagcagatctacggcctggagaacagcaaggagtacctgagcgagaacgagccctgggtggacaagtacaagcccgagacccagcacgagctggccgtgcacaagaagaagatcgaggaggtggagacctggctgaaggcccaggtgctggagagacagcccaagcagggcggcagcatcctgctgatcaccggcccccccggctgcggcaagaccaccaccctgaagatcctgagcaaggagcacggcatccaggtgcaggagtggatcaaccccgtgctgcccgacttccagaaggacgacttcaagggcatgttcaacaccgagagcagcttccacatgttcccctaccagagccagatcgccgtgttcaaggagttcctgctgagagccaccaagtacaacaagctgcagatgctgggcgacgacctgagaaccgacaagaagatcatcctggtggaggacctgcccaaccagttctacagagacagccacaccctgcacgaggtgctgagaaagtacgtgagaatcggcagatgccccctgatcttcatcatcagcgacagcctgagcggcgacaacaaccagagactgctgttccccaaggagatccaggaggagtgcagcatcagcaacatcagcttcaaccccgtggcccccaccatcatgatgaagttcctgaacagaatcgtgaccatcgaggccaacaagaacggcggcaagatcaccgtgcccgacaagaccagcctggagctgctgtgccagggctgcagcggcgacatcagaagcgccatcaacagcctgcagttcagcagcagcaagggcgagaacaacctgagacccagaaagaagggcatgagcctgaagagcgacgccgtgctgagcaagagcaagagaagaaagaagcccgacagagtgttcgagaaccaggaggtgcaggccatcggcggcaaggacgtgagcctgttcctgttcagagccctgggcaagatcctgtactgcaagagagccagcctgaccgagctggacagccccagactgcccagccacctgagcgagtacgagagagacaccctgctggtggagcccgaggaggtggtggagatgagccacatgcccggcgacctgttcaacctgtacctgcaccagaactacatcgacttcttcatggagatcgacgacatcgtgagagccagcgagttcctgagcttcgccgacatcctgagcggcgactggaacaccagaagcctgctgagagagtacagcaccagcatcgccaccagaggcgtgatgcacagcaacaaggccagaggctacgcccactgccagggcggcggcagcagcttcagacccctgcacaagccccagtggttcctgatcaacaagaagtacagagagaactgcctggccgccaaggccctgttccccgacttctgcctgcccgccctgtgcctgcagacccagctgctgccctacctggccctgctgaccatccccatgagaaaccaggcccagatcagcttcatccaggacatcggcagactgcccctgaagagacacttcggcagactgaagatggaggccctgaccgacagagagcacggcatgatcgaccccgacagcggcgacgaggcccagctgaacggcggccacagcgccgaggagagcctgggcgagcccacccaggccaccgtgcccgagacctggagcctgcccctgagccagaacagcgccagcgagctgcccgccagccagccccagcccttcagcgcccagggcgacatggaggagaacatcatcatcgaggactacgagagcgacggcacctag

SEQ ID NO: 234722 - DNA, 2046 bp, Artificial Sequence
  derived and/or modified sequence
atgagcaagacgtttctccgcccgaaggttagtagcactaaggtgaccgattgggttgatccaagttttgatgacttcctcgaatgttccggagtcagcaccattaccgctactagcctcggcgttaacaactctagtcaccgaaggaaaaatggccctagcacacttgaatcaagccgattccccgcccggaagcggggaaatctgtcctcactggagcaaatctacgggctggaaaatagtaaggagtacctcagcgagaacgagccttgggtggataaatacaaaccagagacccagcacgagcttgcggtccataagaaaaagatcgaggaggtggagacttggctaaaagcccaggtgttagagaggcagcctaaacagggcgggtccatactcctcattaccgggccacctgggtgcggaaagaccaccacactcaaaattctgtccaaggaacatgggatccaggtgcaagagtggatcaacccagtgttaccggatttccagaaggacgacttcaaaggtatgtttaatactgagtctagcttccatatgttcccttaccagtctcagatagctgtgttcaaggagtttctcctgcgggccacaaaatacaacaagctccagatgctcggggacgacctgcggacggataaaaaaatcatcctagtggaggacttgcccaatcaattttaccgagacagccacacccttcatgaagtgctacgaaaatacgtgcgaatcggacggtgcccactgattttcattatttctgattctttgagtggcgacaacaatcagcgcttactgtttcccaaggaaatccaagaggaatgctccatttccaatatcagtttcaaccccgtggcacccaccattatgatgaagtttctcaatcgaattgtgacaattgaggcaaataagaatggaggaaagataaccgtccccgataagacatcactggaactcctgtgtcaaggctgcagcggcgatatcaggtcggctatcaactctcttcaatttagttccagtaaaggagaaaacaacctccgcccccgtaagaaaggtatgtcactaaagtccgacgcggtcctctccaaatcaaagcgccgcaaaaagcccgacagagttttcgagaatcaggaagtccaggccatcggaggtaaagacgtgagtctgtttctgttcagagcactgggtaagattctatattgcaaacgtgcaagcctgacggaactagactcccctcgcctgccatcgcacctgagtgaatacgagcgggacaccctgctggttgaaccggaggaggtggtggagatgagccatatgccaggcgatctttttaatctctacctgcatcaaaattacatcgattttttcatggagattgacgacatcgtccgtgcctctgagtttctctccttcgctgacatactctccggagactggaatactagatcactgcttagggagtactccacttcaattgcgactaggggcgtgatgcatagtaacaaggcccggggatatgctcactgccaagggggtggttcgagcttccggcctctgcacaagccccagtggtttctcatcaacaagaaataccgcgagaactgcctggctgccaaagcactttttccggacttttgtctacctgcattatgcctgcaaactcagctcctcccttatttggccctactgaccattcctatgaggaaccaggcccagatatctttcattcaggatattggtcgactgccactgaaaaggcattttggaagactgaaaatggaagctcttactgatagggagcacggtatgatcgacccagactcaggtgatgaagcacagctaaacggagggcatagcgcagaagaatcattaggagagcccacccaggccaccgtccccgaaacctggtccctgcccctgtcccagaattccgcctccgagctgcccgcgagccagccccaacctttctccgcccagggagatatggaggaaaacataatcattgaggattatgagagtgatggaacctag

SEQ ID NO: 234723 - DNA, 2046 bp, Artificial Sequence
  derived and/or modified sequence
atgtcgaagacctttctccgcccaaaggtgtccagcaccaaggttaccgattgggtcgacccaagctttgacgacttcctcgagtgcagcggggtctcaaccatcacggcaacctctctgggcgtgaataattccagtcaccggaggaagaacggcccctcaaccttggagagctcccgattccccgctagaaaaaggggaaatcttagctctctcgaacagatttatggcctggagaattcaaaggagtatctttctgagaacgagccctgggtggataagtacaagcctgagacccagcacgagctcgccgtgcacaaaaaaaaaattgaagaggtagaaacatggctcaaagctcaggtgttagagagacagccaaagcaaggcgggtctattttgctgattacaggcccaccaggatgcggaaaaaccacgaccctcaagatcctgtcaaaggagcatgggatccaggtacaggagtggattaaccccgtccttccagatttccagaaggacgacttcaaaggaatgttcaacacagaaagttctttccacatgtttccctaccagagccagatagcggtgtttaaggagttcctgctgcgggccaccaagtacaataagcttcaaatgttaggggacgatttacgtacagacaagaagatcatcttagtggaggacctgccgaatcagttttacagagacagtcacaccctgcatgaggtgctgaggaaatacgtgagaataggacgctgtccactgatcttcatcatatctgactctttgagcggcgataacaaccagcggctgctattcccgaaggagattcaggaagagtgctctatctcgaacatatcattcaaccccgtcgcccctaccattatgatgaaatttttgaacagaattgttaccatagaggctaacaaaaacggcggcaagattacagtcccagataaaacgagtttagaactgctatgccaaggctgcagtggtgatataaggagcgctatcaattctttacagttcagcagtagcaaaggcgagaacaacctgcgccccaggaagaaggggatgtccctgaagtctgatgccgtactgtccaagagtaaacggcgaaaaaagcctgatcgggtcttcgagaatcaggaagtccaagccatcggcggtaaagacgtttccctcttcctctttagggctcttggtaaaatattgtattgtaagcgagcttcactcaccgaactcgattcccctcggctcccttcccatctcagtgagtacgagagagataccttactcgtggagccggaggaagtcgtggagatgtcacacatgccgggtgacctgtttaatctttacctgcaccagaactatatcgatttttttatggagattgacgacatcgtaagagcatctgagttcctgtcgttcgccgacattctgtccggggactggaatacaaggagcctgctgcgcgaatattctacttcaatcgcaacgagaggggtcatgcatagtaataaggctcggggctatgctcattgccagggaggcggatcatcattccggccgctgcacaagccccagtggtttcttatcaataaaaagtaccgggaaaattgcctcgcagcgaaagccctgttcccggatttctgcctgcccgctctgtgcctgcagacacagctcctaccttacttggcccttctgaccatacctatgcgtaaccaggcccagatttcatttatccaagacataggaaggcttcctctgaagcgtcactttggacggctcaagatggaagcactgacagatcgcgagcatggtatgatcgacccggatagtggagatgaggcacagctgaacggcgggcactccgccgaggaatcacttggagagcccacgcaggccacggttcctgagacttggtccttgcctctaagtcaaaattcagcatctgagctccctgcctcccagccacaacctttcagtgcccagggggatatggaggagaatattatcatagaagactatgaatcagatggtacttag

SEQ ID NO: 234724 - DNA, 2046 bp, Artificial Sequence
  derived and/or modified sequence
atgagcaagaccttcctgcggcccaaggtgagcagcaccaaggtgacagactgggtggaccccagctttgatgacttcctggagtgcagcggcgtgtccaccatcacagccaccagcctgggcgtgaacaacagcagccacaggaggaagaatggccccagcaccctggagagcagccgcttccctgccaggaagaggggcaacctgagcagcctggagcagatctacggcctggagaacagcaaggagtacctgtctgaaaatgagccctgggtggacaagtacaagccagagacccagcacgagctggccgtgcacaagaagaagattgaggaggtggagacctggctgaaggcccaggtgctggagcggcagcccaagcagggcggcagcatcctgctgatcaccggccccccaggctgcggcaagaccaccaccctgaagatcctgagcaaggagcacggcatccaggtgcaggagtggatcaaccctgtgctgcctgacttccagaaggatgacttcaagggcatgttcaacacagagagcagcttccacatgttcccctaccagagccagattgctgtgttcaaggagttcctgctgcgggccaccaagtacaacaagctgcagatgctgggagatgacctgaggacagacaagaagatcatcctggtggaggacctgcccaaccagttctacagagacagccacaccctgcacgaggtgctgaggaaatatgtgagaattggccgctgccccctcatcttcatcatcagtgacagcctgagcggggacaacaaccagaggctgctcttccccaaggagatccaggaggagtgcagcatcagcaacatctccttcaaccctgtggcccccaccatcatgatgaagttcctgaaccgcatcgtgaccatcgaggccaacaagaatggaggcaagatcaccgtgcctgacaagaccagcctggagctgctgtgccagggctgcagcggggacatccgcagcgccatcaacagcctgcagttcagcagcagcaagggggagaacaacctgcggcccaggaagaagggcatgagcctgaagagtgatgctgtgctgagcaagagcaagaggaggaagaagccagacagagtgtttgagaaccaggaggtgcaggccatcggcggcaaggatgtgtccctcttcctgttccgggccctgggcaagatcctgtactgcaagagggccagcctgacagagctggacagcccccggctgcccagccacctgtctgaatatgaaagagacaccctgctggtggagcctgaggaggtggtggagatgagccacatgcctggggacctcttcaacctgtacctgcaccagaactacatcgacttcttcatggagattgatgacatcgtgcgggccagcgagttcctgagctttgctgacatcctgagcggggactggaacaccaggagcctgctgcgggagtacagcaccagcatcgccacccggggcgtgatgcacagcaacaaggcccggggctacgcccactgccagggcggcggcagcagcttccggcccctgcacaagccccagtggttcctgatcaacaagaagtaccgggagaactgcctggccgccaaggccctcttcccagacttctgcctgcctgccctgtgcctgcagacccagctgctgccctacctggccctgctgaccatccccatgaggaaccaggcccagatctccttcatccaggacatcggccgcctgcccctgaagaggcacttcggccgcctgaagatggaggccctgacagaccgggagcacggcatgattgatcctgattctggagatgaggcccagctgaatggaggccacagcgctgaggagagcctgggggagcccacccaggccaccgtgcctgagacctggagcctgcccctgagccagaacagcgccagcgagctgcctgccagccagccccagcccttcagcgcccagggcgacatggaggagaacatcatcatcgaggactatgaaagtgatggcacctag

SEQ ID NO: 234725 - DNA, 2046 bp, Artificial Sequence
  derived and/or modified sequence
atgagcaagaccttcctgcggcccaaggtgagcagcaccaaggtgactgattgggtggatccatcattcgacgattttctggaatgctcaggagtaagcaccataacggctacttccctaggcgtgaacaattcttctcatcgtagaaagaacggaccctccacacttgagtcatctcgatttcctgcccggaagagagggaacctgagttctctggaacagatttacggcttggagaacagtaaagagtacctgagtgagaatgaaccatgggtggacaagtacaaaccggaaacacagcatgaactcgcagttcacaaaaagaagatcgaagaggtggaaacctggttgaaagcccaggttctcgagagacagccgaaacaggggggttctattcttctgattaccggcccgcctggatgtggcaaaacaacaaccttgaaaatactgagcaaggagcacggtatacaggtgcaggaatggattaatcccgtgctaccggacttccagaaagacgattttaagggcatgttcaataccgagtccagttttcacatgttcccttaccagtcccagattgctgtgtttaaagaatttctcctaagagccactaagtacaataaactccaaatgttgggggatgacctgcgcaccgacaaaaaaattattctcgtcgaagatttgcctaaccagttctaccgggactcccacaccctccatgaggtgcttcgaaaatacgtccggattggccggtgtcccctgatttttatcatcagtgattccctctcgggagacaataaccagcgcctgctcttcccaaaagaaatacaggaggagtgctcaatcagcaatataagttttaaccccgttgcacctacgataatgatgaagtttttgaaccgtatcgtcaccattgaagctaataagaatggtggaaagattacagtgcccgacaagaccagcctcgagttgttgtgccagggctgctctggtgatatacgcagtgcaattaactcactacagttctccagttcgaaaggggaaaataatctgagacctaggaaaaagggaatgtctctgaagtccgacgctgtcctcagtaaatcaaagcgccgaaaaaagccggacagggtcttcgagaaccaggaggtacaggcaatcggcgggaaggacgtcagcctatttctctttagagccctgggcaagatactctattgtaagagagctagcctgacggagctagacagccccagactgccctcacacctcagcgagtacgaaagggacactctgttggtggagcctgaagaagtagtcgaaatgagccatatgccaggcgacttgttcaatctctatcttcatcaaaactatatcgacttcttcatggaaattgacgacattgtgcgggcatcagagtttctcagcttcgcagacatcctgagcggagactggaacaccaggtctttactcagggaatattccacctccatcgcaacacgaggtgtcatgcacagcaacaaggctagaggctacgcacactgtcaggggggaggctcgtcgtttcggccgctccataaaccccagtggttccttattaataagaagtaccgggagaactgcctagccgctaaggctctgttcccagatttctgccttccagccttgtgcctgcagacgcagctgctgccatacctggcccttctgactattcctatgcgcaaccaggcccagatcagctttatccaagatattggccggctaccccttaagcggcatttcggcaggctgaagatggaagctctcactgaccgcgagcatggtatgattgacccggatagtggagatgaagctcaactgaacggaggacacagcgcagaggagagcctgggagaaccaacccaggctacagtccccgaaacatggtcgctgccactttcccagaattctgccagtgagctccctgcttcacagccacagcctttttctgcccagggagacatggaggagaacatcattatcgaggattatgaatcggacggtacttag

SEQ ID NO: 234726 - DNA, 2046 bp, Artificial Sequence
  derived and/or modified sequence
atgagcaagaccttcctgcggcccaaggtgagcagcaccaaggtgaccgactgggtcgaccccagcttcgacgactttctggagtgttccggcgtctccacaatcacggccacatctctgggagttaacaattctagtcaccggagaaagaatggcccaagcacactggaatccagcaggttcccagcccgcaaaagaggaaaccttagttctctagaacagatttacgggttagaaaactccaaggagtacctctcggaaaatgaaccctgggtggacaaatacaaacctgaaacccagcatgagctggctgtacacaagaaaaagatcgaagaggtagagacctggctgaaagcccaagtgctagagcgccagcccaagcagggggggtctattttgctcatcacaggacctccaggctgcggaaaaaccacaacactcaaaatactgtcaaaggaacatggcattcaagttcaggagtggattaaccctgtcctcccagattttcaaaaagacgattttaagggtatgttcaataccgaaagtagcttccatatgttcccttatcagagccagatcgcggtgttcaaggaatttcttctgcgcgccaccaaatacaacaagctacagatgttgggcgacgatctccgcactgacaaaaagattatcctcgtggaagatctgcccaatcagttttatcgcgattcgcacacgctccacgaggtcctgagaaagtacgttcgaattggccggtgcccactgatcttcattatctctgatagcttaagcggcgacaacaatcaaagactattgttcccaaaagaaatccaggaggagtgtagcatctcgaacatctccttcaatcctgtcgcccccactattatgatgaagtttctcaatcgcattgtcacaattgaagccaacaaaaacggcggtaaaattaccgtgccagacaaaacctcacttgaactgctctgtcagggctgcagtggtgatataagaagcgccatcaactcacttcagtttagttcttcgaaaggggagaataacctgcgcccacggaaaaagggaatgtcgctgaaatctgacgctgtgctttctaagtccaagcgtagaaagaaacccgaccgagtgttcgaaaaccaggaggttcaggctatcggcggaaaagacgtttcactctttctgtttagggctcttggcaagattctttattgtaaaagagccagcctgactgagctagacagcccccggctcccctctcacctcagcgaatatgagcgcgacacattgttagtcgaacctgaagaggtggtggaaatgtcccacatgcctggagatctctttaacctgtacctacatcagaactacattgacttttttatggagatcgacgatatcgtgagggcctctgaatttcttagtttcgcagatatattaagcggcgactggaacacccgctcgttacttcgggaatacagcacaagcatcgccacccgtggagtgatgcactctaacaaagcaagggggtacgcccactgtcagggtggcggatcgagctttagaccactgcataaacctcagtggttccttattaacaaaaaatacagggagaattgtcttgctgccaaggcacttttccctgacttttgtctccctgcattgtgtctgcagacccagctcctgccctatttggcactactaactatccccatgaggaatcaagctcagatttctttcatccaggatattggtcgcctgccgctgaagagacattttgggaggctcaaaatggaagcactcactgatcgcgagcatggcatgatcgaccccgattcgggtgatgaggctcagctaaatggaggccactccgcagaagaatcactcggcgaaccaacccaggctacagtacctgagacatggtcactgcctttgagccaaaattcggcttccgaactccccgcaagccaaccgcagcccttctctgcccagggagacatggaagagaacatcatcattgaagactatgagtctgatggcacatag

SEQ ID NO: 234727 - DNA, 2046 bp, Artificial Sequence
  derived and/or modified sequence
atgtcgaagacttttctaaggcctaaggtgagttccaccaaggtgaccgattgggtggacccctcttttgatgatttcctggaatgcagcggtgtgtctaccatcaccgctacctccctgggggtgaataactcctcacatcgcaggaaaaatggacccagcacgctagagtcatctcgatttcccgctcggaagcgtggcaatctctcaagcttagaacagatttatgggcttgaaaattctaaagagtacttgtctgaaaatgaaccctgggtggacaaatataagcccgagacacagcacgaattagccgttcataagaagaagatcgaagaggtagagacctggctcaaggcacaagtcctggaacgccagcctaagcagggaggctccattctgctgattactggtcccccaggttgtggaaagaccacaacccttaagattttgagtaaagaacacggaatacaggtgcaggaatggatcaaccccgttttgcctgattttcagaaggacgactttaagggaatgttcaataccgagagtagctttcacatgttcccgtatcagtcccagatcgctgtgttcaaggaatttttgctgcgagccaccaagtacaataaattgcagatgcttggagacgacctcaggacggataagaaaatcatcctcgtggaggatctgccaaatcagttctaccgcgacagccacactcttcatgaggtccttcgtaaatacgttagaattggcaggtgtcccctgatatttatcatttctgacagcctatctggagataataatcaacggctgctctttccaaaagagattcaggaagaatgctccattagcaacatatcctttaacccagtggctccaaccatcatgatgaagtttttaaacaggattgtgacaattgaggccaacaagaacggtggtaagattaccgtgcccgacaaaacttctctagagctgttatgtcaggggtgctccggggacatacggtccgcaatcaactccctgcagttcagcagctccaaaggcgaaaacaacctcaggcctcggaaaaagggcatgtcgctgaaatccgatgcagtgctgtctaagagcaagagaaggaaaaagcccgatcgtgtctttgaaaatcaggaggtgcaggcgattgggggaaaggatgtatctctctttctgttcagggctttaggcaagatcctgtattgtaaacgagcgtccctcacagagctggacagtccaaggctgcctagccacctaagcgagtatgagagggatacactcctggtcgaaccagaagaagtggttgagatgagtcatatgccaggagatctttttaatctgtacctccaccagaactacattgactttttcatggagatagatgatattgtgcgtgcttctgaatttcttagcttcgctgatatcctatcgggagactggaacactcgatctctgctgcgcgagtacagcacttcaatcgctactcggggagtgatgcactcgaacaaagcccgagggtatgcccactgtcagggcggaggttccagcttccgcccattacacaaaccccagtggttcctgattaacaaaaagtatagagaaaattgtcttgccgctaaggctttatttcctgatttctgcctgcctgctctctgcctgcagactcagctgcttccatatttagctttactcaccatcccaatgcgcaatcaggcccagatttctttcatccaagacatagggaggctgcccttaaagaggcattttggcaggcttaagatggaggccctgacagacagagagcatgggatgatcgaccctgactctggtgatgaggctcagctgaacggaggccattctgcagaggaatcactaggggaacctacccaagccacagtaccggagacatggtcgctgcctctgtctcagaactctgcttccgagctccctgcaagtcagccccagcccttcagcgcccagggagatatggaggagaatattatcatcgaagattatgagtccgatgggacctag

SEQ ID NO: 234728 - DNA, 2046 bp, Artificial Sequence
  derived and/or modified sequence
atgtccaagacattcctcagacccaaggtgagctctactaaagtgacagactgggttgacccaagcttcgacgatttcttggagtgctccggcgtgagcacaataaccgcaactagtttaggtgtgaataactcttctcatcgacggaagaacggaccttctactctggagtctagcagattccccgcaaggaaacgagggaacctgagttctctggagcagatttacggactggagaattcaaaggagtaccttagtgaaaatgaaccttgggtagataagtataaaccagagacacagcacgagctggcagtgcataaaaaaaagatagaagaggtggagacgtggcttaaagcccaggtcctggaacgccagccgaagcagggaggaagcatcctcttaattacaggaccccctggctgcggtaagaccacaactttgaaaatcctctccaaggaacacggaatacaggtgcaggagtggattaaccccgtgctccctgatttccagaaagatgatttcaagggaatgtttaataccgagtcaagcttccacatgttcccctatcagtcacagattgccgtgttcaaggaatttttactgcgggcaacgaaatacaataagttgcagatgcttggggacgatctgagaactgataagaagatcatccttgtcgaagacctgccaaatcagttctatcgcgacagccataccttgcacgaagtgctgagaaagtacgtccgcattgggagatgcccactaatcttcattatctccgactctctgagtggggataacaaccagcggctgctttttccaaaggaaatccaggaggagtgctccattagcaacattagcttcaaccccgtggcacccaccatcatgatgaagttcctgaatagaatcgtgaccatcgaagccaataaaaacggagggaagatcaccgtaccagataaaaccagtctggagctgctctgccagggatgctcaggagacatcagaagcgctataaatagcctgcaattcagctcttctaaaggtgaaaacaacctgaggcctagaaagaaggggatgagcctgaaatctgatgccgtcctttcaaagagtaaaaggcgcaagaagcccgacagggtgttcgagaatcaggaggtgcaggccatcgggggaaaagatgtcagcctgttcttgttccgggctcttgggaaaatcctgtactgtaaacgcgctagcttgaccgagctagattctcccaggctgccctcccatctgtctgaatacgagcgcgataccttgctggtggaacctgaggaggttgtagagatgagtcatatgcctggggatctgtttaacctctatctgcaccagaactacatagacttcttcatggagattgacgatatcgtccgggcaagcgaatttctctcgttcgccgacatcctatctggcgactggaatacccgaagcctactgagagaatacagcacatccattgcaaccaggggagtgatgcattccaataaggcccgaggatacgcacattgtcaggggggtggctcctctttccggcctctacacaagccgcaatggttcttaatcaataagaagtatagggaaaattgtctggccgcaaaagccttattccccgacttctgtcttcctgccctgtgtctacaaacacagcttctgccttatctggcactgttaactataccgatgcggaatcaggcgcagatctcttttatccaggatattggcagacttccccttaaacgccattttgggaggttgaagatggaggctctgacagatcgtgaacacgggatgatcgaccctgattcaggggatgaggcacagttaaatgggggtcacagtgccgaagagtctctaggagaaccgacccaagccaccgtccccgagacttggtccctcccgcttagccaaaactctgcaagtgaactcccagcctctcagccacaaccatttagtgcccagggtgacatggaggaaaatataattatcgaagactatgaatctgatggcacttag

SEQ ID NO: 234729 - DNA, 2648 bp, Artificial Sequence
  derived and/or modified sequence
caagtgaattcatggtattttacttttttgggaaatactggaaatgaagacctgcaactgtaatttgaaataaggaaaactttaattttcagtataaaaattgctcaaatagaattgcctgattttaatgacaaaaggtaacagactgggttgacccatcatttgatgattttctagagtgtagtggcgtctctactattactgccacatcattaggtgtgaataactcaagtcatagaagaaaaaatgggccttctacattagaaagcagcagatttccagcgagaaaaagaggaaatctatcttccttagaacagatttatggtttagaaaattcaaaagaatatctgtctgaaaatgaaccatgggtggataaatataaaccagaaactcagcatgaacttgctgtgcataaaaagaaaattgaagaagtcgaaacctggttaaaagctcaagttttagaaaggcaaccaaaacagggtggatctattttattaataacaggtcctcctggatgtggaaagacaacgaccttaaaaatactatcaaaggagcatggtattcaagtacaagagtggattaatccagttttaccagacttccaaaaagatgatttcaaggggatgtttaatactgaatcaagcttccatatgtttccctatcagtctcagatagcagttttcaaagagtttctactaagagcgacaaagtataacaagttacaaatgcttggagatgatctgagaactgataagaagataattctggttgaagatttacctaaccagttttatcgggattctcatactttacatgaagttctaaggaagtatgtgaggattggtcgatgtcctcttatatttataatctcggacagtctcagtggagataataatcaaaggttattgtttcccaaagaaattcaggaagagtgttctatctcaaatattagtttcaaccctgtggcaccaacaattatgatgaaatttcttaatcgaatagtgactatagaagctaacaagaatggaggaaaaattactgtccctgacaaaacttctctagagttgctctgtcagggatgttctggtgatatcagaagtgcaataaacagcctccagttttcttcttcaaaaggagaaaacaacttacggccaaggaaaaaaggaatgtctttaaaatcagatgctgtgctgtcaaaatcaaaacgaagaaaaaaacctgatagggtttttgaaaatcaagaggtccaagctattggtggcaaagatgtttctctgtttctcttcagagctttggggaaaattctatattgtaaaagagcatctttaacagaattagactcacctcggttgccctctcatttatcagaatatgaacgggatacattacttgttgaacctgaggaggtagtagaaatgtcacacatgcctggagacttatttaatttatatcttcaccaaaactacatagatttcttcatggaaattgatgatattgtgagagccagtgaatttctgagttttgcagatatcctcagtggtgactggaatacacgctctttactcagggaatatagcacatctatagctacgagaggtgtgatgcattccaacaaagcccgaggatatgctcattgccaaggaggaggatcaagttttcgacccttgcacaaacctcagtggtttctaataaataaaaagtatcgggaaaattgcctggcagcaaaagcactttttcctgacttctgcctaccagctttatgcctccaaactcagctattgccataccttgctctactaaccattccaatgagaaatcaagctcagatttcttttatccaagatattggaaggctccctctgaagcgacactttggaagattgaaaatggaagccctgactgacagggaacatggaatgatagaccctgacagcggagatgaagcccagcttaatggaggacattctgcagaggaatctctgggtgaacccactcaagccactgtgccggaaacctggtctcttcctttgagtcagaatagtgccagtgaactgcctgctagccagccccagcccttttcagcccaaggagacatggaagaaaacataataatagaagactacgagagtgatgggacatagaagccagcctgctaatcagattgctacttcacagcttcatttttgtttcattcagtggtacttcagcagagttaatatgcttttctgatgaattacacaacagtttgttaattcttcattcttgtagtatttcatcacaagaaacctactcttctgtcatcttgaagtaaatagaagatcaagccttcaaatctcttaattttttcggtatttattaaatctgtgagtggtttaaggagcggtcagtgtgtataaagtgtgtttgaacattatgccaaatatcaagatgtgaaggactaattcaggatgcaaaaacgttattggggggttgtaaatatcaactattcaacagtttaggatgcaattacgagtgtaaactgtgtgccttatttacactttattgtctcccgcttctcagatagttttgatgtgttgtacagtggaatatcttagatactttttggaaagtatttacataagttatatcacaattaaaatgttgaattt

SEQ ID NO: 234730 - DNA, 2117 bp, Artificial Sequence
  derived and/or modified sequence
gtgaattatagtttaatgtactgcaagtcctaaactacggatgggaactattacagtttataatgtcaaaaacttttcttagaccaaaggtatcttccacaaaggtaacagactgggttgacccatcatttgatgattttctagagtgtagtggcgtctctactattactgccacatcattaggtgtgaataactcaagtcatagaagaaaaaatgggccttctacattagaaagcagcagatttccagcgagaaaaagaggaaatctatcttccttagaacagatttatggtttagaaaattcaaaagaatatctgtctgaaaatgaaccatgggtggataaatataaaccagaaactcagcatgaacttgctgtgcataaaaagaaaattgaagaagtcgaaacctggttaaaagctcaagttttagaaaggcaaccaaaacagggtggatctattttattaataacaggtcctcctggatgtggaaagacaacgaccttaaaaatactatcaaaggagcatggtattcaagtacaagagtggattaatccagttttaccagacttccaaaaagatgatttcaaggggatgtttaatactgaatcaagcttccatatgtttccctatcagtctcagatagcagttttcaaagagtttctactaagagcgacaaagtataacaagttacaaatgcttggagatgatctgagaactgataagaagataattctggttgaagatttacctaaccagttttatcgggattctcatactttacatgaagttctaaggaagtatgtgaggattggtcgatgtcctcttatatttataatctcggacagtctcagtggagataataatcaaaggttattgtttcccaaagaaattcaggaagagtgttctatctcaaatattagtttcaaccctgtggcaccaacaattatgatgaaatttcttaatcgaatagtgactatagaagctaacaagaatggaggaaaaattactgtccctgacaaaacttctctagagttgctctgtcagggatgttctggtgatatcagaagtgcaataaacagcctccagttttcttcttcaaaaggagaaaacaacttacggccaaggaaaaaaggaatgtctttaaaatcagatgctgtgctgtcaaaatcaaaacgaagaaaaaaacctgatagggtttttgaaaatcaagaggtccaagctattggtggcaaagatgtttctctgtttctcttcagagctttggggaaaattctatattgtaaaagagcatctttaacagaattagactcacctcggttgccctctcatttatcagaatatgaacgggatacattacttgttgaacctgaggaggtagtagaaatgtcacacatgcctggagacttatttaatttatatcttcaccaaaactacatagatttcttcatggaaattgatgatattgtgagagccagtgaatttctgagttttgcagatatcctcagtggtgactggaatacacgctctttactcagggaatatagcacatctatagctacgagaggtgtgatgcattccaacaaagcccgaggatatgctcattgccaaggaggaggatcaagttttcgacccttgcacaaacctcagtggtttctaataaataaaaagtatcgggaaaattgcctggcagcaaaagcactttttcctgacttctgcctaccagctttatgcctccaaactcagctattgccataccttgctctactaaccattccaatgagaaatcaagctcagatttcttttatccaagatattggaaggctccctctgaagcgacactttggaagattgaaaatggaagccctgactgacagggaacatggaatgatagaccctgacagcggagatgaagcccagcttaatggaggacattctgcagaggaatctctgggtgaacccactcaagccactgtgccggaaacctggtctcttcctttgagtcagaatagtgccagtgaactgcctgctagccagccccagcccttttcagcccaaggagacatggaagaaaacataataatagaagactacgagagtgatgggacatagaagccagcc

SEQ ID NO: 234731 - DNA, 3233 bp, Artificial Sequence
  derived and/or modified sequence
ccccgggaggccgtacctccgagaggctcggcgttgagcccgggtagggccaggtggctgccctttcacctagggtagtccctggtcgcctccgctcttcgcctaaaaggggatgcagctccgggaaagtaaggccgccgcggttgcggctatattatgtatatgtcttagagacgtgagtctatctctgccttcaagctttcctgggctctcgtcgctcctcctcccgacccgcccatcccatctggggatgagaagattgagggtgcagagccctgtcctgcagcggggatttgcgagctcaacccggcaccccactgattacaggattacgttggacgaatatttgagcttagtattccctgttcactgtgtggggtggtggtgggtcggctaggaatagtcttgaaggtctacctctgacatctcatttcagtaacctcgcatcttcagggacagttatctgctttttaaaggagcaagtgaattcatggtattttacttttttgggaaatactggaaatgaagacctgcaactgtaatttgaaataaggaaaactttaattttcagtataaaaattgctcaaatagaattgcctgattttaatgacaaaaggtgaattatagtttaatgtactgcaagtcctaaactacggatgggaactattacagtttataatgtcaaaaacttttcttagaccaaaggtatcttccacaaaggtaacagactgggttgacccatcatttgatgattttctagagtgtagtggcgtctctactattactgccacatcattaggtgtgaataactcaagtcatagaagaaaaaatgggccttctacattagaaagcagcagatttccagcgagaaaaagaggaaatctatcttccttagaacagatttatggtttagaaaattcaaaagaatatctgtctgaaaatgaaccatgggtggataaatataaaccagaaactcagcatgaacttgctgtgcataaaaagaaaattgaagaagtcgaaacctggttaaaagctcaagttttagaaaggcaaccaaaacagggtggatctattttattaataacaggtcctcctggatgtggaaagacaacgaccttaaaaatactatcaaaggagcatggtattcaagtacaagagtggattaatccagttttaccagacttccaaaaagatgatttcaaggggatgtttaatactgaatcaagcttccatatgtttccctatcagtctcagatagcagttttcaaagagtttctactaagagcgacaaagtataacaagttacaaatgcttggagatgatctgagaactgataagaagataattctggttgaagatttacctaaccagttttatcgggattctcatactttacatgaagttctaaggaagtatgtgaggattggtcgatgtcctcttatatttataatctcggacagtctcagtggagataataatcaaaggttattgtttcccaaagaaattcaggaagagtgttctatctcaaatattagtttcaaccctgtggcaccaacaattatgatgaaatttcttaatcgaatagtgactatagaagctaacaagaatggaggaaaaattactgtccctgacaaaacttctctagagttgctctgtcagggatgttctggtgatatcagaagtgcaataaacagcctccagttttcttcttcaaaaggagaaaacaacttacggccaaggaaaaaaggaatgtctttaaaatcagatgctgtgctgtcaaaatcaaaacgaagaaaaaaacctgatagggtttttgaaaatcaagaggtccaagctattggtggcaaagatgtttctctgtttctcttcagagctttggggaaaattctatattgtaaaagagcatctttaacagaattagactcacctcggttgccctctcatttatcagaatatgaacgggatacattacttgttgaacctgaggaggtagtagaaatgtcacacatgcctggagacttatttaatttatatcttcaccaaaactacatagatttcttcatggaaattgatgatattgtgagagccagtgaatttctgagttttgcagatatcctcagtggtgactggaatacacgctctttactcagggaatatagcacatctatagctacgagaggtgtgatgcattccaacaaagcccgaggatatgctcattgccaaggaggaggatcaagttttcgacccttgcacaaacctcagtggtttctaataaataaaaagtatcgggaaaattgcctggcagcaaaagcactttttcctgacttctgcctaccagctttatgcctccaaactcagctattgccataccttgctctactaaccattccaatgagaaatcaagctcagatttcttttatccaagatattggaaggctccctctgaagcgacactttggaagattgaaaatggaagccctgactgacagggaacatggaatgatagaccctgacagcggagatgaagcccagcttaatggaggacattctgcagaggaatctctgggtgaacccactcaagccactgtgccggaaacctggtctcttcctttgagtcagaatagtgccagtgaactgcctgctagccagccccagcccttttcagcccaaggagacatggaagaaaacataataatagaagactacgagagtgatgggacatagaagccagcctgctaatcagattgctacttcacagcttcatttttgtttcattcagtggtacttcagcagagttaatatgcttttctgatgaattacacaacagtttgttaattcttcattcttgtagtatttcatcacaagaaacctactcttctgtcatcttgaagtaaatagaagatcaagccttcaaatctcttaattttttcggtatttattaaatctgtgagtggtttaaggagcggtcagtgtgtataaagtgtgtttgaacattatgccaaatatcaagatgtgaaggactaattcaggatgcaaaaacgttattggggggttgtaaatatcaactattcaacagtttaggatgcaattacgagtgtaaactgtgtgccttatttacactttattgtctcccgcttctcagatagttttgatgtgttgtacagtggaatatcttagatactttttggaaagtatttacataagttatatcacaattaaaatgttgaatttaa

SEQ ID NO: 234732 - DNA, 2323 bp, Artificial Sequence
  derived and/or modified sequence
acctccgagaggctcggcgttgagcccgggtagggccaggtggctgccctttcacctagggtagtccctggtcgcctccgctcttcgcctaaaaggggatgcagctccgggaaacaagtgaattcatggtattttacttttttgggaaatactggaaatgaagacctgcaactgtaatttgaaataaggaaaactttaattttcagtataaaaattgctcaaatagaattgcctgattttaatgacaaaaggtaacagactgggttgacccatcatttgatgattttctagagtgtagtggcgtctctactattactgccacatcattaggtgtgaataactcaagtcatagaagaaaaaatgggccttctacattagaaagcagcagatttccagcgagaaaaagaggaaatctatcttccttagaacagatttatggtttagaaaattcaaaagaatatctgtctgaaaatgaaccatgggtggataaatataaaccagaaactcagcatgaacttgctgtgcataaaaagaaaattgaagaagtcgaaacctggttaaaagctcaagttttagaaaggcaaccaaaacagggtggatctattttattaataacaggtcctcctggatgtggaaagacaacgaccttaaaaatactatcaaaggagcatggtattcaagtacaagagtggattaatccagttttaccagacttccaaaaagatgatttcaaggggatgtttaatactgaatcaagcttccatatgtttccctatcagtctcagatagcagttttcaaagagtttctactaagagcgacaaagtataacaagttacaaatgcttggagatgatctgagaactgataagaagataattctggttgaagatttacctaaccagttttatcgggattctcatactttacatgaagttctaaggaagtatgtgaggattggtcgatgtcctcttatatttataatctcggacagtctcagtggagataataatcaaaggttattgtttcccaaagaaattcaggaagagtgttctatctcaaatattagtttcaaccctgtggcaccaacaattatgatgaaatttcttaatcgaatagtgactatagaagctaacaagaatggaggaaaaattactgtccctgacaaaacttctctagagttgctctgtcagggatgttctggtgatatcagaagtgcaataaacagcctccagttttcttcttcaaaaggagaaaacaacttacggccaaggaaaaaaggaatgtctttaaaatcagatgctgtgctgtcaaaatcaaaacgaagaaaaaaacctgatagggtttttgaaaatcaagaggtccaagctattggtggcaaagatgtttctctgtttctcttcagagctttggggaaaattctatattgtaaaagagcatctttaacagaattagactcacctcggttgccctctcatttatcagaatatgaacgggatacattacttgttgaacctgaggaggtagtagaaatgtcacacatgcctggagacttatttaatttatatcttcaccaaaactacatagatttcttcatggaaattgatgatattgtgagagccagtgaatttctgagttttgcagatatcctcagtggtgactggaatacacgctctttactcagggaatatagcacatctatagctacgagaggtgtgatgcattccaacaaagcccgaggatatgctcattgccaaggaggaggatcaagttttcgacccttgcacaaacctcagtggtttctaataaataaaaagtatcgggaaaattgcctggcagcaaaagcactttttcctgacttctgcctaccagctttatgcctccaaactcagctattgccataccttgctctactaaccattccaatgagaaatcaagctcagatttcttttatccaagatattggaaggctccctctgaagcgacactttggaagattgaaaatggaagccctgactgacagggaacatggaatgatagaccctgacagcggagatgaagcccagcttaatggaggacattctgcagaggaatctctgggtgaacccactcaagccactgtgccggaaacctggtctcttcctttgagtcagaatagtgccagtgaactgcctgctagccagccccagcccttttcagcccaaggagacatggaagaaaacataataatagaagactacgagagtgatgggacatagaagccagcctgctaatcagattgctacttcacagcttcatttttgtttcattcagtggtacttcagca

SEQ ID NO: 234733 - protein, 584 aa, Artificial Sequence
  derived and/or modified sequence
MNQHELAVHKKKIEEVETWLKAQVLERQPKQGGSILLITGPPGCGKTTTLKILSKEHGIQVQEWINPVLPDFQKDDFKGMFNTESSFHMFPYQSQIAVFKEFLLRATKYNKLQMLGDDLRTDKKIILVEDLPNQFYRDSHTLHEVLRKYVRIGRCPLIFIISDSLSGDNNQRLLFPKEIQEECSISNISFNPVAPTIMMKFLNRIVTIEANKNGGKITVPDKTSLELLCQGCSGDIRSAINSLQFSSSKGENNLRPRKKGMSLKSDAVLSKSKRRKKPDRVFENQEVQAIGGKDVSLFLFRALGKILYCKRASLTELDSPRLPSHLSEYERDTLLVEPEEVVEMSHMPGDLFNLYLHQNYIDFFMEIDDIVRASEFLSFADILSGDWNTRSLLREYSTSIATRGVMHSNKARGYAHCQGGGSSFRPLHKPQWFLINKKYRENCLAAKALFPDFCLPALCLQTQLLPYLALLTIPMRNQAQISFIQDIGRLPLKRHFGRLKMEALTDREHGMIDPDSGDEAQLNGGHSAEESLGEPTQATVPETWSLPLSQNSASELPASQPQPFSAQGDMEENIIIEDYESDGT

SEQ ID NO: 234734 - DNA, 1755 bp, Artificial Sequence
  derived and/or modified sequence
atgaaccagcacgagctggccgtgcacaagaagaagatcgaggaggtggagacctggctgaaggcccaggtgctggagagacagcccaagcagggcggcagcatcctgctgatcaccggcccccccggctgcggcaagaccaccaccctgaagatcctgagcaaggagcacggcatccaggtgcaggagtggatcaaccccgtgctgcccgacttccagaaggacgacttcaagggcatgttcaacaccgagagcagcttccacatgttcccctaccagagccagatcgccgtgttcaaggagttcctgctgagagccaccaagtacaacaagctgcagatgctgggcgacgacctgagaaccgacaagaagatcatcctggtggaggacctgcccaaccagttctacagagacagccacaccctgcacgaggtgctgagaaagtacgtgagaatcggcagatgccccctgatcttcatcatcagcgacagcctgagcggcgacaacaaccagagactgctgttccccaaggagatccaggaggagtgcagcatcagcaacatcagcttcaaccccgtggcccccaccatcatgatgaagttcctgaacagaatcgtgaccatcgaggccaacaagaacggcggcaagatcaccgtgcccgacaagaccagcctggagctgctgtgccagggctgcagcggcgacatcagaagcgccatcaacagcctgcagttcagcagcagcaagggcgagaacaacctgagacccagaaagaagggcatgagcctgaagagcgacgccgtgctgagcaagagcaagagaagaaagaagcccgacagagtgttcgagaaccaggaggtgcaggccatcggcggcaaggacgtgagcctgttcctgttcagagccctgggcaagatcctgtactgcaagagagccagcctgaccgagctggacagccccagactgcccagccacctgagcgagtacgagagagacaccctgctggtggagcccgaggaggtggtggagatgagccacatgcccggcgacctgttcaacctgtacctgcaccagaactacatcgacttcttcatggagatcgacgacatcgtgagagccagcgagttcctgagcttcgccgacatcctgagcggcgactggaacaccagaagcctgctgagagagtacagcaccagcatcgccaccagaggcgtgatgcacagcaacaaggccagaggctacgcccactgccagggcggcggcagcagcttcagacccctgcacaagccccagtggttcctgatcaacaagaagtacagagagaactgcctggccgccaaggccctgttccccgacttctgcctgcccgccctgtgcctgcagacccagctgctgccctacctggccctgctgaccatccccatgagaaaccaggcccagatcagcttcatccaggacatcggcagactgcccctgaagagacacttcggcagactgaagatggaggccctgaccgacagagagcacggcatgatcgaccccgacagcggcgacgaggcccagctgaacggcggccacagcgccgaggagagcctgggcgagcccacccaggccaccgtgcccgagacctggagcctgcccctgagccagaacagcgccagcgagctgcccgccagccagccccagcccttcagcgcccagggcgacatggaggagaacatcatcatcgaggactacgagagcgacggcacctag

SEQ ID NO: 234735 - DNA, 1755 bp, Artificial Sequence
  derived and/or modified sequence
atgaaccagcacgaactggctgtgcacaaaaagaagatcgaggaagtcgagacatggcttaaggctcaggtgctcgaacgacagcccaaacagggtggatcaattctgctgatcacagggccacctggatgtgggaaaacaaccacactgaagattctttccaaagaacatggtatccaggtccaggagtggatcaaccctgttctgcccgatttccagaaggatgactttaaggggatgttcaacaccgaaagctccttccatatgttcccataccagtcacagatcgcagtctttaaggagtttttgctgcgcgctacaaagtacaacaagctccaaatgctcggggacgaccttcggaccgacaagaaaattatcttagttgaggacctgcccaatcagttttacagagatagtcacacactccacgaggttcttaggaaatacgtgagaatcggcagatgtccgctaatctttatcatatccgatagcctgagtggcgacaataatcagagattgctatttccaaaggagatccaagaagaatgctctatctcaaacatcagcttcaacccagtcgcaccaacaatcatgatgaagtttctgaatcgaatcgttaccatcgaggctaataagaacggagggaaaattacggtgcctgacaagactagtctcgaactattgtgccagggctgcagcggggacattaggagcgccattaatagcctgcaatttagctcgtcaaagggcgagaacaacctccgccctagaaagaagggcatgtcattaaagtccgatgcggtgctgagcaagtcaaaacgaaggaagaagcccgatagggtatttgagaatcaggaggtgcaggcaatcggcggaaaggacgtatcattgttcctattccgcgcacttggaaaaatcctttactgcaagcgggccagtctgactgaactagactctcctaggctcccctcccacctgtctgagtacgagagagatacactgctcgtggaaccagaagaagtggttgaaatgagccatatgccaggggacctattcaacctctatctgcaccagaattacatcgactttttcatggaaattgatgacatagtgcgagcctccgagttcctaagcttcgcagacattctcagcggtgattggaacacgagatcattgctaagggaatacagcacctctatcgccacacgtggcgtgatgcactccaacaaagcacgcgggtatgcccactgccaggggggaggatcgagttttcgaccgcttcacaagccacaatggttcctgatcaataagaagtacagagaaaattgtctggctgcaaaagccctgtttcctgacttctgtctccccgcgctgtgtctgcagacacagttgttaccctatcttgccctgcttaccattcccatgcgaaaccaggctcagatctccttcattcaggatattggccgcctcccactgaaacgccatttcggccgcctcaagatggaggccctgaccgatagagaacatgggatgatcgacccagacagcggggacgaagctcagctcaacggcggacattcagcagaggagtcactgggcgaacccacccaggcaactgtgcccgagacctggtccctcccactgtctcagaactctgcatctgagctacccgcctcacaacctcagcccttctctgcccaaggcgacatggaagagaacattatcatcgaggattacgaaagtgacgggacatag

SEQ ID NO: 234736 - DNA, 1755 bp, Artificial Sequence
  derived and/or modified sequence
atgaaccagcacgagctggccgtgcacaagaagaagattgaggaggtggagacctggctgaaggcccaggtgctggagcggcagcccaagcagggcggcagcatcctgctgatcactggacctcctggctgtgggaagaccaccaccctgaagatcctgagcaaggagcacggcatccaggtgcaggagtggatcaaccctgtgctgcctgacttccagaaggatgacttcaagggcatgttcaacacagagagcagcttccacatgttcccctaccagagccagattgctgtgttcaaggagttcctgctgcgggccaccaagtacaacaagctgcagatgctgggagatgacctgaggacagacaagaagatcatcctggtggaggacctgcccaaccagttctacagagacagccacaccctgcacgaggtgctgaggaaatatgtgcgcatcggccgctgccccctcatcttcatcatcagtgacagcctgagcggggacaacaaccagaggctgctcttccccaaggagatccaggaggagtgcagcatcagcaacatctccttcaaccctgtggcccccaccatcatgatgaagttcctgaacagaattgtgaccatcgaggccaacaagaatggaggcaagatcaccgtgcctgacaagaccagcctggagctgctgtgccagggctgcagcggggacatccgcagcgccatcaacagcctgcagttcagcagcagcaaaggagagaacaacctgcggcccaggaagaagggcatgagcctgaagagtgatgctgtgctgagcaagagcaagaggaggaagaagccagacagagtgtttgagaaccaggaggtgcaggccatcggcggcaaggatgtgtccctcttcctgttccgggccctgggcaagatcctgtactgcaagagggccagcctgacagagctggacagcccccggctgcccagccacctgtctgaatatgagcgggacaccctgctggtggagcctgaggaggtggtggagatgagccacatgcctggggacctcttcaacctgtacctgcaccagaactacatcgacttcttcatggagattgatgacatcgtgcgggccagcgagttcctgagctttgctgacatcctgagcggggactggaacaccaggagcctgctgcgggagtacagcaccagcatcgccacccggggcgtgatgcacagcaacaaggcccggggctacgcccactgccagggcggcggcagcagcttccggcccctgcacaagccccagtggttcctgatcaacaagaagtaccgggagaactgcctggccgccaaggccctcttcccagacttctgcctgcctgccctgtgcctgcagacccagctgctgccctacctggccctgctgaccatccccatgaggaaccaggcccagatctccttcatccaggacatcggccgcctgcccctgaagaggcacttcggccgcctgaagatggaggccctgacagaccgggagcacggcatgattgatcctgacagcggagatgaggcccagctgaatggaggccacagcgctgaggagagcctgggggagcccacccaggccaccgtgcctgagacctggagcctgcccctgagccagaacagcgccagcgagctgcctgccagccagccccagcccttcagcgcccagggcgacatggaggagaacatcatcattgaagattatgaaagtgatggcacctag

SEQ ID NO: 234737 - DNA, 1755 bp, Artificial Sequence
  derived and/or modified sequence
atgaaccagcacgagctggccgtgcacaagaagaagatcgaggaggtggaaacttggctcaaagctcaggtactggagcggcagccgaaacagggtgggagcatcctgctcatcactgggccccctggatgtgggaaaactacaactctcaagatcctctcaaaagagcatggcatccaagtgcaagagtggatcaatcctgtgcttccagatttccaaaaggacgattttaaaggcatgttcaataccgagtccagttttcatatgttcccataccagagccaaatcgctgtgttcaaggagttcctcctgcgggccacaaagtacaataaactgcagatgctgggagacgatctgaggaccgacaagaaaatcatcctcgtggaggacctccctaaccaattctacagagatagtcatacactccacgaagttctcaggaagtacgttagaatcggccggtgtcctctcatctttataatctccgacagcttgtcaggggataacaatcagcgactcctatttcccaaggaaatccaggaggagtgcagtatttccaacataagctttaatccagtggcccccacaatcatgatgaagttcttgaacagaatcgtcacaatcgaggccaacaagaacggtggaaagatcacagttcctgacaagacctcactcgagctgctctgccaaggctgcagcggcgacatacgtagcgctatcaacagtctgcaattctcctcctctaaaggagagaataatttacggcctagaaagaagggcatgtccctgaaatccgatgccgttttgagtaagtctaagagaagaaagaaacccgacagagtgttcgaaaatcaggaagtccaggcaataggaggcaaggacgtttcactctttctatttcgcgctctgggcaagatactgtactgcaagagagcctccctcacagagctcgacagtccccgattaccatcccacctcagcgagtatgagcgggacactctgctagtggaacctgaggaagttgtggaaatgagccatatgcccggggatctgttcaacctctacctgcatcagaattatattgacttctttatggagattgatgatattgtgcgggcatctgagtttctgtcctttgcagacatactgtccggagactggaatacaaggtccctactccgggagtactccacatccatcgcaacacgaggcgttatgcactccaataaagcgaggggatacgctcactgccagggcggggggtcttcgtttcggcccctgcacaaaccacagtggttcctcatcaacaagaagtatagggaaaattgccttgcggccaaggccctatttcctgatttctgtctcccggcactttgtctgcaaacacaactcctcccctacctggctttgcttaccatccctatgaggaaccaggctcaaatctcattcattcaggacatcggacgcctgcccttgaaacgacacttcgggagactcaaaatggaagcgttgacagatcgggagcatggtatgattgacccagattcgggcgacgaggcacagctcaatggtggccattccgccgaggaaagcttgggggagccgacccaggccacagtgcccgagacatggtccctcccacttagccagaacagcgcttctgagctgcccgcatcacagcctcagcccttttccgcccagggcgatatggaagaaaacattattattgaagattacgagtccgatgggacctag

SEQ ID NO: 234738 - DNA, 1755 bp, Artificial Sequence
  derived and/or modified sequence
atgaatcagcacgagctggctgtgcacaagaagaagattgaagaagtcgagacatggctcaaagcccaggtgctggaaagacagcccaagcagggcggatccatattactgattacagggccaccaggctgtgggaagactactaccctcaaaatcctttctaaagaacacggcatacaagttcaggagtggattaacccagtgttacctgatttccagaaagatgacttcaagggaatgtttaacacagagagcagcttccatatgtttccttaccagagtcagattgccgtttttaaggagttcttgctgagggccactaaatataataaattgcagatgcttggcgacgaccttaggactgacaagaagataatccttgtggaggatctgcctaatcaattttatcgcgattcccacaccctgcatgaggtcctcaggaagtatgtgcgcatcgggcgttgtcccctgatctttatcatatctgattcactgagcggagataacaaccagagactcctgttccccaaggagattcaggaagaatgttccatttccaacatcagtttcaatcccgtcgcaccgacaatcatgatgaagtttctcaaccggattgtgacaattgaggcgaacaaaaacggagggaagattacggtgccagataagacttcactggagttactctgtcagggctgttcaggtgatatcagaagtgccattaactcactgcagtttagctctagtaagggcgagaataatctgagaccgcgaaagaagggaatgtctctgaaaagcgatgccgtcctgagcaagtctaagagaagaaaaaagcctgaccgagtgttcgaaaaccaggaagtgcaggctattggcggaaaagacgtgtccttgtttctgtttagagcacttggaaagatactatactgtaagcgggcaagcctcacagaactagacagcccccgtctgccttctcacttatcagagtacgagagagatacgctgttagtcgaaccagaggaggtagtggaaatgagtcacatgcccggagacctctttaacttgtacttacatcagaactatatcgacttcttcatggaaattgatgacattgtccgcgctagcgaattcctgtcatttgccgacatactgtccggagactggaataccaggtctctgctccgggagtacagtacatcgatagccacaagaggtgtcatgcactcaaataaagccagggggtatgcgcattgccagggagggggatctagtttccggccactacataagccacagtggttcctgataaataagaaatatagagaaaattgcctggccgctaaggccctattcccggacttttgccttcctgccctgtgcctccaaacgcagttgctgccttacttagccttgctcacaataccgatgagaaaccaggctcagataagctttatccaggacattgggagactgccccttaaacgacacttcgggcgactcaagatggaggcgctgaccgaccgggagcacggtatgatagaccccgactcaggcgatgaggcccagttgaatggtggacactcagcagaagaaagtcttggcgaaccaacccaagccactgtccccgagacttggtccttacctctgtcacagaatagcgcctctgagctgcccgctagtcagcctcaaccattttccgctcagggcgatatggaagaaaacattattatcgaagactatgaaagcgatggaacatag

SEQ ID NO: 234739 - DNA, 2135 bp, Artificial Sequence
  derived and/or modified sequence
caagtgaattcatggtattttacttttttgggaaatactggaaatgaagacctgcaactgtaatttgaaataaggaaaactttaattttcagtataaaaattgctcaaatagaattgcctgattttaatgacaaaagtatatgggagtccacatttatgtaagaaatgaaactataaaatgtataaataatttgcaaatcagaattgctgtcgaaagttttactataatgaaagatattttcatactctcaaaaatatagaggaaaggggccaagattatagtaccagtcacaatcttttgatgaggacgaaatgaatcagcatgaacttgctgtgcataaaaagaaaattgaagaagtcgaaacctggttaaaagctcaagttttagaaaggcaaccaaaacagggtggatctattttattaataacaggtcctcctggatgtggaaagacaacgaccttaaaaatactatcaaaggagcatggtattcaagtacaagagtggattaatccagttttaccagacttccaaaaagatgatttcaaggggatgtttaatactgaatcaagcttccatatgtttccctatcagtctcagatagcagttttcaaagagtttctactaagagcgacaaagtataacaagttacaaatgcttggagatgatctgagaactgataagaagataattctggttgaagatttacctaaccagttttatcgggattctcatactttacatgaagttctaaggaagtatgtgaggattggtcgatgtcctcttatatttataatctcggacagtctcagtggagataataatcaaaggttattgtttcccaaagaaattcaggaagagtgttctatctcaaatattagtttcaaccctgtggcaccaacaattatgatgaaatttcttaatcgaatagtgactatagaagctaacaagaatggaggaaaaattactgtccctgacaaaacttctctagagttgctctgtcagggatgttctggtgatatcagaagtgcaataaacagcctccagttttcttcttcaaaaggagaaaacaacttacggccaaggaaaaaaggaatgtctttaaaatcagatgctgtgctgtcaaaatcaaaacgaagaaaaaaacctgatagggtttttgaaaatcaagaggtccaagctattggtggcaaagatgtttctctgtttctcttcagagctttggggaaaattctatattgtaaaagagcatctttaacagaattagactcacctcggttgccctctcatttatcagaatatgaacgggatacattacttgttgaacctgaggaggtagtagaaatgtcacacatgcctggagacttatttaatttatatcttcaccaaaactacatagatttcttcatggaaattgatgatattgtgagagccagtgaatttctgagttttgcagatatcctcagtggtgactggaatacacgctctttactcagggaatatagcacatctatagctacgagaggtgtgatgcattccaacaaagcccgaggatatgctcattgccaaggaggaggatcaagttttcgacccttgcacaaacctcagtggtttctaataaataaaaagtatcgggaaaattgcctggcagcaaaagcactttttcctgacttctgcctaccagctttatgcctccaaactcagctattgccataccttgctctactaaccattccaatgagaaatcaagctcagatttcttttatccaagatattggaaggctccctctgaagcgacactttggaagattgaaaatggaagccctgactgacagggaacatggaatgatagaccctgacagcggagatgaagcccagcttaatggaggacattctgcagaggaatctctgggtgaacccactcaagccactgtgccggaaacctggtctcttcctttgagtcagaatagtgccagtgaactgcctgctagccagccccagcccttttcagcccaaggagacatggaagaaaacataataatagaagactacgagagtgatgggacatagaagccagcctgctaatcagattgctacttcacagcttcatttttgtttcattcagtggtacttcagca

SEQ ID NO: 234740 - protein, 670 aa, Artificial Sequence
  derived and/or modified sequence
MNQVTDWVDPSFDDFLECSGVSTITATSLGVNNSSHRRKNGPSTLESSRFPARKRGNLSSLEQIYGLENSKEYLSENEPWVDKYKPETQHELAVHKKKIEEVETWLKAQVLERQPKQGGSILLITGPPGCGKTTTLKILSKEHGIQVQEWINPVLPDFQKDDFKGMFNTESSFHMFPYQSQIAVFKEFLLRATKYNKLQMLGDDLRTDKKIILVEDLPNQFYRDSHTLHEVLRKYVRIGRCPLIFIISDSLSGDNNQRLLFPKEIQEECSISNISFNPVAPTIMMKFLNRIVTIEANKNGGKITVPDKTSLELLCQGCSGDIRSAINSLQFSSSKGENNLRPRKKGMSLKSDAVLSKSKRRKKPDRVFENQEVQAIGGKDVSLFLFRALGKILYCKRASLTELDSPRLPSHLSEYERDTLLVEPEEVVEMSHMPGDLFNLYLHQNYIDFFMEIDDIVRASEFLSFADILSGDWNTRSLLREYSTSIATRGVMHSNKARGYAHCQGGGSSFRPLHKPQWFLINKKYRENCLAAKALFPDFCLPALCLQTQLLPYLALLTIPMRNQAQISFIQDIGRLPLKRHFGRLKMEALTDREHGMIDPDSGDEAQLNGGHSAEESLGEPTQATVPETWSLPLSQNSASELPASQPQPFSAQGDMEENIIIEDYESDGT

SEQ ID NO: 234741 - protein, 505 aa, Artificial Sequence
  derived and/or modified sequence
MFNTESSFHMFPYQSQIAVFKEFLLRATKYNKLQMLGDDLRTDKKIILVEDLPNQFYRDSHTLHEVLRKYVRIGRCPLIFIISDSLSGDNNQRLLFPKEIQEECSISNISFNPVAPTIMMKFLNRIVTIEANKNGGKITVPDKTSLELLCQGCSGDIRSAINSLQFSSSKGENNLRPRKKGMSLKSDAVLSKSKRRKKPDRVFENQEVQAIGGKDVSLFLFRALGKILYCKRASLTELDSPRLPSHLSEYERDTLLVEPEEVVEMSHMPGDLFNLYLHQNYIDFFMEIDDIVRASEFLSFADILSGDWNTRSLLREYSTSIATRGVMHSNKARGYAHCQGGGSSFRPLHKPQWFLINKKYRENCLAAKALFPDFCLPALCLQTQLLPYLALLTIPMRNQAQISFIQDIGRLPLKRHFGRLKMEALTDREHGMIDPDSGDEAQLNGGHSAEESLGEPTQATVPETWSLPLSQNSASELPASQPQPFSAQGDMEENIIIEDYESDGT

SEQ ID NO: 234742 - protein, 169 aa, Artificial Sequence
  derived and/or modified sequence
MNQVTDWVDPSFDDFLECSGVSTITATSLGVNNSSHRRKNGPSTLESSRFPARKRGNLSSLEQIYGLENSKEYLSENEPWVDKYKPETQHELAVHKKKIEEVETWLKAQVLERQPKQGGSILLITGPPGCGKTTTLKILSKEHGIQVQEWINPVLPDFQKDDFKGMFNT

SEQ ID NO: 234743 - DNA, 2013 bp, Artificial Sequence
  derived and/or modified sequence
atgaaccaggtgaccgactgggtggaccccagcttcgacgacttcctggagtgcagcggcgtgagcaccatcaccgccaccagcctgggcgtgaacaacagcagccacagaagaaagaacggccccagcaccctggagagcagcagattccccgccagaaagagaggcaacctgagcagcctggagcagatctacggcctggagaacagcaaggagtacctgagcgagaacgagccctgggtggacaagtacaagcccgagacccagcacgagctggccgtgcacaagaagaagatcgaggaggtggagacctggctgaaggcccaggtgctggagagacagcccaagcagggcggcagcatcctgctgatcaccggcccccccggctgcggcaagaccaccaccctgaagatcctgagcaaggagcacggcatccaggtgcaggagtggatcaaccccgtgctgcccgacttccagaaggacgacttcaagggcatgttcaacaccgagagcagcttccacatgttcccctaccagagccagatcgccgtgttcaaggagttcctgctgagagccaccaagtacaacaagctgcagatgctgggcgacgacctgagaaccgacaagaagatcatcctggtggaggacctgcccaaccagttctacagagacagccacaccctgcacgaggtgctgagaaagtacgtgagaatcggcagatgccccctgatcttcatcatcagcgacagcctgagcggcgacaacaaccagagactgctgttccccaaggagatccaggaggagtgcagcatcagcaacatcagcttcaaccccgtggcccccaccatcatgatgaagttcctgaacagaatcgtgaccatcgaggccaacaagaacggcggcaagatcaccgtgcccgacaagaccagcctggagctgctgtgccagggctgcagcggcgacatcagaagcgccatcaacagcctgcagttcagcagcagcaagggcgagaacaacctgagacccagaaagaagggcatgagcctgaagagcgacgccgtgctgagcaagagcaagagaagaaagaagcccgacagagtgttcgagaaccaggaggtgcaggccatcggcggcaaggacgtgagcctgttcctgttcagagccctgggcaagatcctgtactgcaagagagccagcctgaccgagctggacagccccagactgcccagccacctgagcgagtacgagagagacaccctgctggtggagcccgaggaggtggtggagatgagccacatgcccggcgacctgttcaacctgtacctgcaccagaactacatcgacttcttcatggagatcgacgacatcgtgagagccagcgagttcctgagcttcgccgacatcctgagcggcgactggaacaccagaagcctgctgagagagtacagcaccagcatcgccaccagaggcgtgatgcacagcaacaaggccagaggctacgcccactgccagggcggcggcagcagcttcagacccctgcacaagccccagtggttcctgatcaacaagaagtacagagagaactgcctggccgccaaggccctgttccccgacttctgcctgcccgccctgtgcctgcagacccagctgctgccctacctggccctgctgaccatccccatgagaaaccaggcccagatcagcttcatccaggacatcggcagactgcccctgaagagacacttcggcagactgaagatggaggccctgaccgacagagagcacggcatgatcgaccccgacagcggcgacgaggcccagctgaacggcggccacagcgccgaggagagcctgggcgagcccacccaggccaccgtgcccgagacctggagcctgcccctgagccagaacagcgccagcgagctgcccgccagccagccccagcccttcagcgcccagggcgacatggaggagaacatcatcatcgaggactacgagagcgacggcacctag

SEQ ID NO: 234744 - DNA, 1518 bp, Artificial Sequence
  derived and/or modified sequence
atgttcaacaccgagagcagcttccacatgttcccctaccagagccagatcgccgtgttcaaggagttcctgctgagagccaccaagtacaacaagctgcagatgctgggcgacgacctgagaaccgacaagaagatcatcctggtggaggacctgcccaaccagttctacagagacagccacaccctgcacgaggtgctgagaaagtacgtgagaatcggcagatgccccctgatcttcatcatcagcgacagcctgagcggcgacaacaaccagagactgctgttccccaaggagatccaggaggagtgcagcatcagcaacatcagcttcaaccccgtggcccccaccatcatgatgaagttcctgaacagaatcgtgaccatcgaggccaacaagaacggcggcaagatcaccgtgcccgacaagaccagcctggagctgctgtgccagggctgcagcggcgacatcagaagcgccatcaacagcctgcagttcagcagcagcaagggcgagaacaacctgagacccagaaagaagggcatgagcctgaagagcgacgccgtgctgagcaagagcaagagaagaaagaagcccgacagagtgttcgagaaccaggaggtgcaggccatcggcggcaaggacgtgagcctgttcctgttcagagccctgggcaagatcctgtactgcaagagagccagcctgaccgagctggacagccccagactgcccagccacctgagcgagtacgagagagacaccctgctggtggagcccgaggaggtggtggagatgagccacatgcccggcgacctgttcaacctgtacctgcaccagaactacatcgacttcttcatggagatcgacgacatcgtgagagccagcgagttcctgagcttcgccgacatcctgagcggcgactggaacaccagaagcctgctgagagagtacagcaccagcatcgccaccagaggcgtgatgcacagcaacaaggccagaggctacgcccactgccagggcggcggcagcagcttcagacccctgcacaagccccagtggttcctgatcaacaagaagtacagagagaactgcctggccgccaaggccctgttccccgacttctgcctgcccgccctgtgcctgcagacccagctgctgccctacctggccctgctgaccatccccatgagaaaccaggcccagatcagcttcatccaggacatcggcagactgcccctgaagagacacttcggcagactgaagatggaggccctgaccgacagagagcacggcatgatcgaccccgacagcggcgacgaggcccagctgaacggcggccacagcgccgaggagagcctgggcgagcccacccaggccaccgtgcccgagacctggagcctgcccctgagccagaacagcgccagcgagctgcccgccagccagccccagcccttcagcgcccagggcgacatggaggagaacatcatcatcgaggactacgagagcgacggcacctag

SEQ ID NO: 234745 - DNA, 510 bp, Artificial Sequence
  derived and/or modified sequence
atgaaccaggtgaccgactgggtggaccccagcttcgacgacttcctggagtgcagcggcgtgagcaccatcaccgccaccagcctgggcgtgaacaacagcagccacagaagaaagaacggccccagcaccctggagagcagcagattccccgccagaaagagaggcaacctgagcagcctggagcagatctacggcctggagaacagcaaggagtacctgagcgagaacgagccctgggtggacaagtacaagcccgagacccagcacgagctggccgtgcacaagaagaagatcgaggaggtggagacctggctgaaggcccaggtgctggagagacagcccaagcagggcggcagcatcctgctgatcaccggcccccccggctgcggcaagaccaccaccctgaagatcctgagcaaggagcacggcatccaggtgcaggagtggatcaaccccgtgctgcccgacttccagaaggacgacttcaagggcatgttcaacacctag

SEQ ID NO: 234746 - DNA, 66 bp, Artificial Sequence
  derived and/or modified sequence
atgaaccaggtgaccgactgggtggaccccagcttcgacgacttcctggagtgcagcggcgtgtag

SEQ ID NO: 234747 - DNA, 2013 bp, Artificial Sequence
  derived and/or modified sequence
atgaaccaagtaaccgattgggtggacccctcattcgatgacttcctggagtgttccggcgtatccaccattacagctactagcctgggcgtcaataactcaagccatcgtagaaaaaacggtcctagtaccttggaaagtagtcgattccctgcacgcaagcgggggaatctgtcttccttggaacagatttacggcctagagaactccaaagaatatctttctgaaaatgaaccctgggtggataaatataagccagagactcaacatgaactggctgttcacaagaaaaagatcgaggaagtggagacatggttgaaggcgcaagtattggagcgccagccaaagcagggcgggtcaattctgctgataacaggccctcccggctgtgggaagactacaacattaaagattctgtccaaggagcacggcatccaggtgcaggaatggattaatccagtgctacctgactttcagaaggacgacttcaaaggaatgtttaataccgaatctagcttccacatgtttccctaccagagccagatcgcagtttttaaggaattcttacttcgggcaaccaaatacaacaagctacagatgcttggagatgatctgcgcaccgataagaaaataatcctggtcgaggacttgccgaaccagttctaccgggattcccataccttacacgaggtcctgcgcaagtacgtgcgaattgggagatgcccactcattttcattataagtgattctttgagcggtgacaataatcagcggttgctattccccaaagaaatccaggaggaatgtagcattagcaacatctcatttaaccctgtagcacctactatcatgatgaaattcctcaaccggatagttactattgaagccaacaagaacggcggaaagataaccgtccctgacaagacttcactggaactgctttgtcagggatgctccggtgacattcgtagcgcaatcaacagccttcagttcagttcatctaagggcgaaaacaatcttagaccaaggaagaagggtatgtccctgaaaagtgatgccgtattgagcaaatctaagagacgcaaaaagcccgatcgagtctttgaaaatcaagaggtgcaggccataggcggaaaggatgtgtcactctttctgttcagggccctgggcaaaatcctgtattgcaagcgagcctccctcacagagctggattcaccccggctcccatctcatttaagtgagtacgaacgggataccttacttgtcgaacccgaggaggttgtggaaatgagccacatgccgggtgatctgttcaatttgtacttacaccaaaactatattgacttcttcatggagatcgatgatatcgtgcgggcaagcgagttcctcagctttgccgatattctgagtggcgactggaatacacggtctcttctgagagagtactcaacttcgattgccacccggggtgtcatgcattccaataaggccagaggatacgcacattgccagggcggcggtagcagcttcagacccttgcataagccacaatggtttttgataaataagaagtatcgggaaaactgcctggccgccaaggcgctcttcccagacttctgcctccctgccttatgtctgcaaacacagctcctgccctatctggctctgctgacgataccaatgcgcaatcaggcccagatttcgtttatccaggatattggcaggctgcctctcaaaaggcatttcgggcgtttaaagatggaggccttgaccgatcgtgagcacgggatgattgaccctgattcaggggatgaggcgcaactaaacggcggccactctgctgaggaatccctgggtgagcccactcaggccactgtgccagagacatggtctcttccgctctcacagaatagcgctagcgagttgcctgcctcgcaacctcaacccttttccgcacagggcgacatggaggaaaacatcattatcgaggattacgaaagtgatggcacgtag

SEQ ID NO: 234748 - DNA, 2013 bp, Artificial Sequence
  derived and/or modified sequence
atgaatcaggtgactgactgggttgacccaagctttgacgactttcttgagtgctccggagttagcaccataacagctacatcgctgggcgttaataactcgagccaccgcagaaagaatggaccctcaaccctagagtcttcccggtttcccgctaggaaacgtggcaacctgagttctctcgagcaaatttatgggctggaaaactcaaaagagtaccttagtgaaaatgaaccttgggtcgacaaatacaaaccggaaacccaacacgaactagcagtgcataagaaaaagatcgaagaagtcgagacatggttgaaagctcaagttttggagagacagcctaagcagggcggcagtattctactgatcactgggccccccgggtgtgggaagacaactaccctgaagatactgagcaaagaacatggtattcaggtgcaagagtggatcaacccggtccttccagacttccagaaggacgacttcaaagggatgttcaatacggaaagtagtttccatatgtttccctatcagtcacaaatagccgtatttaaggaatttctcttgagagccacaaaatataataagctgcagatgctgggcgacgacttgaggaccgacaaaaaaattatcttggttgaggatctgccgaatcagttctatagagactctcatacactgcatgaggtcttgcgtaagtacgtcagaataggccgttgccctttaattttcataatctccgactcgctgtctggcgataacaatcaacgcctgctgttccccaaagaaatacaagaagaatgcagcatcagtaatatctcctttaatcctgtggctccaactatcatgatgaagtttctcaaccgcatcgtaactatcgaagccaacaagaacggaggaaagattactgtcccagataagacgagtctggagctgctttgtcaggggtgttccggggatattcgctcggcaattaactcgctccagttttccagcagcaagggtgaaaacaacctgagacctcgtaaaaaggggatgagcctgaaatcggatgcagtactttctaagtctaagaggaggaaaaagccagatagagtgttcgagaatcaggaggtccaagcaatcggggggaaggatgtctccctatttctgttccgcgcgttggggaaaatcctctactgcaagcgggcaagcttgaccgaactggacagtcctcgactgcccagtcatctgagtgagtatgagcgggacacactcctggtcgagcccgaagaagtggtcgagatgtcccacatgccaggagatctgttcaatctctacttacatcagaattacatcgatttttttatggagatcgacgacatcgtccgggcatcggaattcttgagctttgccgatatcctcagtggcgactggaacactcgatcattactgagagaatattccactagcattgccacccgaggcgtgatgcacagtaataaggctcggggatatgcccattgtcaggggggtggtagttcattcagacctctccacaagcctcaatggttcctcattaataaaaagtaccgagagaattgcctcgctgccaaggctctgtttccggacttttgcctgccagctctgtgtttgcagacccagctgctgccttacctcgccctgctgactatccccatgcgtaaccaggcccagatttccttcattcaggatatcgggagactgccgttaaagcgccatttcgggcgtcttaagatggaagctttaaccgaccgagagcacggtatgatcgatcctgactcaggagacgaggcccagctcaatggcggccactccgcagaagagtccctgggagaacctactcaagctacagtccctgagacctggtctctgccgcttagccagaactctgcttccgaactgccagcatctcaaccgcaaccattcagcgcacagggagatatggaggaaaatattatcatcgaagattacgagagcgatggcacttag

SEQ ID NO: 234749 - DNA, 2013 bp, Artificial Sequence
  derived and/or modified sequence
atgaatcaagtaacagattgggtggatccgagtttcgatgacttccttgagtgctccggggtgagtactatcacggccacttctctaggggttaataacagttctcaccggcggaagaatgggcccagcaccctggaatcatctaggttccctgctaggaaaagaggaaatttgtctagtttagagcagatctacggtctcgagaattctaaggagtacctaagcgagaatgagccatgggtcgataagtacaagccagagactcagcacgaactcgccgtgcacaaaaaaaagatcgaggaagtagagacctggttaaaggcgcaggtgctcgagagacagccgaagcaaggcggatcgatcctgctgattaccgggccaccagggtgcggtaaaacaactactttgaagatactgtctaaagaacacggtatccaggtgcaagagtggatcaaccccgttctgcctgacttccagaaggacgacttcaagggcatgtttaacaccgagtccagcttccacatgttcccctaccagagccagatcgccgtatttaaagagtttctcctcagggccacaaagtataacaaactgcagatgttaggagacgacctgagaactgacaagaagatcatactcgtagaggaccttccaaaccaattttacagagattctcacactctccatgaagtgctcaggaaatacgtgcgcatcgggcggtgccccctgatcttcatcatttcagattccctttccggggataataaccagaggttactcttccccaaggagatccaggaagagtgctcaatctcaaacatcagtttcaatccggtggcaccgacaattatgatgaaatttctgaacaggatcgtcactatagaggccaataagaacgggggcaaaatcactgtgcccgacaaaacctccctggagctgctttgtcaagggtgttccggcgacatccggagcgccatcaattcgctgcagttcagtagctcaaagggagaaaacaatctgcgcccccggaaaaaaggaatgtctcttaagtccgatgctgtcctgagcaagagcaagagaagaaagaaacccgatagagtcttcgaaaaccaggaagtgcaggcaataggcggtaaggacgtgagcctgttcctttttagggctctggggaagattctttattgtaaaagggcttccctgactgaactcgactccccacggctgccgtcccaccttagtgagtacgaacgagacacattattagtggagccggaggaggtggttgaaatgagccacatgcccggtgatttgtttaacttgtatttacaccaaaactatattgactttttcatggagattgatgatattgttcgagcctctgagttcctgagcttcgctgatattttatctggcgattggaatacaagaagtctgctgagagaatactctacctcaattgcgacccggggggtgatgcattcaaataaggctagaggatacgctcactgccagggggggggttcctctttccgcccactgcacaagccacaatggtttctgattaataaaaagtatagggagaattgtctcgctgcaaaagccctgtttccagacttttgtctcccggctctgtgtttacagacacagcttctcccgtacctggcactcctgaccatcccaatgagaaatcaggctcagatctcctttatccaggatattggacgtctgcctttaaaacgccatttcggtagattgaagatggaagccttaacagatagggaacatggcatgattgatccggacagcggcgacgaggcacagctgaatgggggtcactccgctgaggagtctcttggggaacccacccaggccaccgttcccgaaacatggtcgttgcccctgtcccagaactctgcctcagaacttccagcctcccagccccagccattttctgcccagggagacatggaagagaacattatcattgaggattatgagtccgacggcacttag

SEQ ID NO: 234750 - DNA, 2013 bp, Artificial Sequence
  derived and/or modified sequence
atgaatcaggtgactgattgggtcgacccttcatttgatgacttcctcgagtgctcaggcgtgagcaccataacagccaccagtctgggggtgaacaactctagccatcggcgaaaaaatggaccgtccaccctggagagcagcaggtttcccgcacgaaagcggggcaacttgtcctctctggaacaaatatacggtcttgaaaatagcaaggagtatctgtcggagaacgaaccttgggtggataaatataaacccgagacccagcatgagctggccgtccacaaaaaaaaaatcgaggaggttgaaacctggcttaaggctcaggtcctggaacggcagcctaaacagggtggctccattctcctgattactgggccaccaggatgcggaaagaccacaactctgaagattttgtcaaaagagcatggaatccaggtgcaagaatggattaatcccgtgctgccagactttcaaaaagacgatttcaagggaatgtttaataccgagtcctccttccacatgttcccatatcaatcacagatcgcggtcttcaaggagtttttattacgtgccacgaaatacaacaaactacagatgttgggggacgacttaaggacggataagaagataattctggtcgaagacctgcccaatcagttttatagagactctcacacgttgcacgaggtccttcgaaaatatgtgaggatcgggaggtgtccactgatcttcattatctcagacagcctgtccggagacaacaatcaacggctccttttccccaaggagatccaggaagagtgttccattagtaatatttcatttaacccggtagctccaactattatgatgaaatttctgaatcgaattgtcactatcgaggctaacaaaaacggaggcaagataactgtccctgacaaaacatcccttgaactgctttgccagggttgctcaggcgacatccggagcgcgattaatagtctccaattctctagtagcaagggcgaaaacaacctcagacctaggaaaaagggaatgtctttgaagtctgatgctgttctgagcaagagtaaacgtcggaaaaagcccgacagagtttttgaaaatcaagaggttcaggccatcggggggaaggacgtgtcattattcctattccgcgcattgggaaagatcctctattgtaaaagggcttccctaacagaacttgatagcccaaggttaccgtcccatttaagcgaatatgaacgcgatactcttttggttgaacccgaggaggtagtggaaatgagtcacatgcctggcgacctgttcaacctgtatctccaccaaaactatatcgatttcttcatggagattgatgatattgtccgggcctcggagtttttgagcttcgccgatatcctgtcaggggactggaacacacggagcctcctgagagaatactctacttcgatagccaccagaggggtgatgcacagtaacaaggctaggggctacgcacactgccaaggcgggggcagctcattccggccactacacaagcctcagtggtttcttataaacaaaaagtatcgcgagaattgtttggcagccaaagctctgttcccagacttttgccttcccgctttgtgcctgcaaacccaactattaccttacctcgcccttctaaccattccgatgagaaatcaagcccagatctcttttattcaggatattgggagactgcccctgaagaggcactttggacgcctgaaaatggaagcccttacggatcgggaacacggcatgatagacccggacagcggtgacgaagctcagcttaacggcggccactccgccgaagagtctctcggagagcccacccaagccacagtgcctgagacttggagcctgcccctgtcacagaattctgcctcagaattacccgcgtcccagccccaacccttttcagcacaaggagacatggaagaaaatattatcatcgaagattacgagtctgacggaacttag

SEQ ID NO: 234751 - DNA, 1518 bp, Artificial Sequence
  derived and/or modified sequence
atgtttaataccgaatcctcattccatatgttcccttaccagagtcagattgccgttttcaaagaatttttactgcgcgctactaaatacaacaaactacaaatgctgggcgatgacctccggacggataagaagatcatactggtggaggacctccctaaccagttttaccgagattctcataccctgcatgaagtgcttaggaaatacgtgcgaatcggacgttgtcccttgattttcattatctcggattctctctcaggagataacaatcagagactgctgtttccgaaagaaatccaggaagagtgttcaatctctaacatcagcttcaatcctgtggcccctaccatcatgatgaaattcctgaacaggattgtgacaatcgaggccaataagaatggcggcaaaattacggtacctgataagacaagcctggagctcttgtgtcaaggctgctccggcgatatccgctccgctatcaacagtcttcagtttagcagttccaagggggaaaacaacctcaggcctaggaaaaaaggtatgtccctgaaaagtgatgccgtgctcagcaaatccaagcgtagaaaaaagccagaccgtgtgttcgaaaatcaggaggtgcaagcaattgggggcaaggatgtctcattgttcttatttcgcgctcttggcaaaattttatactgcaagagagcgagtttaaccgagctggactcacctcggctgcctagccacttgagtgaatacgaacgcgatacgctcctcgtggaaccagaggaggttgtggaaatgagccatatgcctggggacctgtttaatttgtatctgcatcaaaattacatcgatttctttatggaaattgatgacattgtgagagcttctgaattccttagctttgctgacattttgtctggcgactggaatacacgctcgctactccgcgagtatagcacaagtatagccactcgcggcgtgatgcacagcaacaaggctagagggtacgcacactgccagggcgggggctctagctttaggccgctgcacaagccccagtggtttctgataaataagaagtatcgcgagaactgtcttgcagcaaaggcgctctttcctgatttttgtctccccgcactctgtctgcaaacacagctgctgccttaccttgcgctgctcacaatccccatgcgcaatcaggcacagatcagttttatccaagatataggaaggctgcccctaaaacggcattttggtagattgaaaatggaggcgctcacagatagggagcacggcatgattgacccagattccggtgacgaagctcaacttaacggaggccattctgctgaggaatcactgggagaacctacacaggccacagtgccggagacctggtccctgcccctgtctcagaatagtgcctcagaattaccggcaagtcaaccccagcctttctccgcgcagggagatatggaagagaatatcatcatcgaggactatgagtcggacgggacatag

SEQ ID NO: 234752 - DNA, 2013 bp, Artificial Sequence
  derived and/or modified sequence
atgaaccaagttaccgactgggtcgatccaagctttgacgacttcttggagtgtagcggcgtatccaccatcacagcaacatctctcggcgttaataacagctcacataggcgcaagaatggccccagtaccctggagtcaagccggtttccagcacggaagaggggtaatctgagtagccttgaacagatctacgggctggagaactctaaagaatatctgtccgagaatgagccgtgggtcgacaaatataagcctgagacccagcacgagctcgcagttcataaaaagaagattgaagaagtggagacctggctcaaggcccaagtcctcgagcgccagcccaagcaaggcgggtcaattctccttattactggcccccctggctgtggaaaaacaactaccctcaagattctgtcaaaagaacatggcatccaagtccaggaatggatcaatcctgtgttgcccgacttccaaaaggatgattttaaaggaatgttcaatactgaaagctctttccacatgtttccgtaccaatctcagatcgctgtatttaaagagttcctcttgcgggccacgaagtacaacaagttacagatgttgggtgatgacctgagaactgacaagaaaatcatcttggtggaggatttgccaaaccaattttatagggattctcatacactgcacgaggtgctgcgaaaatatgtgagaatcgggcgctgccctttaatctttataatttcagattctctgagcggggataataatcagcgcctgctttttcccaaggagatccaggaggagtgcagcattagcaacatcagttttaatccggtggctcctaccattatgatgaagttcctgaaccgaatagttactatcgaagccaataaaaacggcggaaagataaccgtcccagataaaacctctctcgaactgctgtgccaaggatgttccggtgacattcgcagtgcgatcaactcgctgcaattttctagttccaagggtgagaacaacctgaggccaaggaagaagggaatgagcctcaagtccgacgcagtgctgtcgaagagtaagcgccggaagaaaccagatagagtgtttgagaatcaggaagttcaggcgattgggggaaaagatgttagcctctttctttttagggcattaggcaaaattctgtattgtaagagagcgagcctgacagaactagacagcccaagacttcccagccacttgagcgaatacgagcgtgacacactgctcgtcgaacccgaggaggtagtggaaatgagccacatgccaggggaccttttcaacctctacctgcaccagaactacatcgactttttcatggagatcgatgacatcgtgcgggcgagtgaatttttgtcattcgctgatattctttccggcgactggaacacacggtcccttcttagagaatattctacatcaattgccactcgtggggttatgcatagtaataaggcacggggctacgctcattgccaaggcgggggtagctcattcaggcccctgcataagccccagtggttcctgatcaacaagaaatatcgcgagaattgcctggctgcaaaagccttgtttcctgatttctgcctgcctgccttgtgtctgcagactcaactgctgccgtacctggccctgctgactatccccatgcgaaaccaggcccaaatttcctttatccaagatattgggcgtttgccccttaaacgacatttcggccggctcaaaatggaggctctgactgatcgagagcacgggatgatagatcctgactccggcgatgaggcccagttgaatggaggacattcagccgaggagtctcttggtgaaccaacacaagccacggttcctgaaacgtggagcctgcccctgagccagaattcagcaagtgagctacccgcctctcaaccccagcccttttctgcccaaggcgatatggaagagaacattatcatagaggattatgagtcagacggcacttag

SEQ ID NO: 234753 - DNA, 510 bp, Artificial Sequence
  derived and/or modified sequence
atgaatcaggtgacagattgggttgatccatccttcgacgactttctcgaatgcagtggtgtgagtactattacagctacaagcctgggcgtaaataattccagtcacagaagaaagaacggacccagcactctggagagcagcagatttccagcacgaaagagaggaaatttatcatcattggagcagatttatggactcgagaacagtaaagagtatttgtcagagaacgaaccctgggtcgataagtacaagccagaaacccagcacgagctggctgttcacaagaaaaagatcgaggaggttgagacctggctcaaggcgcaggtcctggaacgccagcctaaacagggaggctctatcctcttaattacaggcccacctggatgtggcaagacgacaaccttgaagattctgtccaaggagcatggcatccaggttcaagagtggattaacccggtcctccctgacttccagaaagacgacttcaagggtatgtttaacacctag

SEQ ID NO: 234754 - DNA, 66 bp, Artificial Sequence
  derived and/or modified sequence
atgaaccaagttacagactgggtggatcccagtttcgacgattttctggagtgctccggggtctag

SEQ ID NO: 234755 - DNA, 1518 bp, Artificial Sequence
  derived and/or modified sequence
atgttcaataccgaaagtagttttcatatgtttccctaccagtcccagatcgcggtgttcaaggagttcctattgcgcgcgacaaagtataacaaactgcaaatgcttggcgatgaccttaggactgacaagaaaattatattggttgaggatttgcctaaccaattctatcgggattcacacaccctgcacgaagtattaagaaaatatgtgcgaattggccgctgccctctaattttcatcatatctgactcactgtcaggcgacaataatcaacgcctcctctttcctaaggaaattcaggaagaatgctctattagtaatatatcatttaatccagtcgccccaactatcatgatgaagttcctgaatagaatcgtcaccattgaagccaataaaaatggcggtaagattaccgtccccgataagacaagtttggaactcctgtgccagggctgctctggagatatccggtcagctataaattctctgcagttcagtagctctaaaggagagaacaacttgcgccctcgtaagaagggaatgagcctgaagtccgacgcagtcctgtctaaaagtaagaggagaaagaaacccgaccgggtttttgagaatcaggaggtgcaagctatcggcgggaaggacgttagcctttttctatttcgcgccttgggcaaaattctgtactgtaagagagcatcactgactgaactagatagtccccggctccccagccacttatctgagtacgagagagatacacttctggtcgagcccgaggaagtggtcgagatgtcacacatgccaggcgatctgttcaatctctatctccaccagaactatatagacttctttatggagattgacgacattgtgcgggcttcagagtttctgagcttcgcagacatactctcaggagattggaatacaaggtcactactaagggaatactcaacgtctattgcaactcgaggtgtgatgcactcaaataaagctcgggggtacgcccactgtcaaggaggtggatcgtctttccggccactgcataagccacagtggtttctgataaacaaaaagtaccgagaaaattgtctcgctgcaaaggcattattcccagatttctgtctccctgccctctgcctgcagacacagctgttaccatacctggctctgctgactatcccgatgaggaatcaggcgcagatcagcttcattcaggacatcggcagactccctttgaagcgtcactttgggagattgaagatggaggcattgacggacagggaacacggaatgatagaccccgacagtggagacgaggcccaactgaacggaggccactccgctgaagagtctcttggggaacctacccaggcgactgtgccggaaacttggagccttcctctgtcacagaactcagcctcagagctaccagcgagtcaacctcaacccttcagcgctcagggcgatatggaggagaatataatcattgaggactatgagagtgatgggacatag

SEQ ID NO: 234756 - DNA, 2013 bp, Artificial Sequence
  derived and/or modified sequence
atgaaccaggtgacagactgggtggaccccagctttgatgacttcctggagtgcagcggcgtgtccaccatcacagccaccagcctgggcgtgaacaacagcagccacaggaggaagaatggccccagcaccctggagagcagccgcttccctgccaggaagaggggcaacctgagcagcctggagcagatctacggcctggagaacagcaaggagtacctgtctgaaaatgagccctgggtggacaagtacaagccagagacccagcacgagctggccgtgcacaagaagaagattgaggaggtggagacctggctgaaggcccaggtgctggagcggcagcccaagcagggcggcagcatcctgctgatcactggacctcctggctgtgggaagaccaccaccctgaagatcctgagcaaggagcacggcatccaggtgcaggagtggatcaaccctgtgctgcctgacttccagaaggatgacttcaagggcatgttcaacacagagagcagcttccacatgttcccctaccagagccagattgctgtgttcaaggagttcctgctgcgggccaccaagtacaacaagctgcagatgctgggagatgacctgaggacagacaagaagatcatcctggtggaggacctgcccaaccagttctacagagacagccacaccctgcacgaggtgctgaggaaatatgtgcgcatcggccgctgccccctcatcttcatcatcagtgacagcctgagcggggacaacaaccagaggctgctcttccccaaggagatccaggaggagtgcagcatcagcaacatctccttcaaccctgtggcccccaccatcatgatgaagttcctgaacagaattgtgaccatcgaggccaacaagaatggaggcaagatcaccgtgcctgacaagaccagcctggagctgctgtgccagggctgcagcggggacatccgcagcgccatcaacagcctgcagttcagcagcagcaaaggagagaacaacctgcggcccaggaagaagggcatgagcctgaagagtgatgctgtgctgagcaagagcaagaggaggaagaagccagacagagtgtttgagaaccaggaggtgcaggccatcggcggcaaggatgtgtccctcttcctgttccgggccctgggcaagatcctgtactgcaagagggccagcctgacagagctggacagcccccggctgcccagccacctgtctgaatatgagcgggacaccctgctggtggagcctgaggaggtggtggagatgagccacatgcctggggacctcttcaacctgtacctgcaccagaactacatcgacttcttcatggagattgatgacatcgtgcgggccagcgagttcctgagctttgctgacatcctgagcggggactggaacaccaggagcctgctgcgggagtacagcaccagcatcgccacccggggcgtgatgcacagcaacaaggcccggggctacgcccactgccagggcggcggcagcagcttccggcccctgcacaagccccagtggttcctgatcaacaagaagtaccgggagaactgcctggccgccaaggccctcttcccagacttctgcctgcctgccctgtgcctgcagacccagctgctgccctacctggccctgctgaccatccccatgaggaaccaggcccagatctccttcatccaggacatcggccgcctgcccctgaagaggcacttcggccgcctgaagatggaggccctgacagaccgggagcacggcatgattgatcctgacagcggagatgaggcccagctgaatggaggccacagcgctgaggagagcctgggggagcccacccaggccaccgtgcctgagacctggagcctgcccctgagccagaacagcgccagcgagctgcctgccagccagccccagcccttcagcgcccagggcgacatggaggagaacatcatcattgaagattatgaaagtgatggcacctag

SEQ ID NO: 234757 - DNA, 1518 bp, Artificial Sequence
  derived and/or modified sequence
atgttcaacacagagagcagcttccacatgttcccctaccagagccagattgctgtgttcaaggagttcctgctgcgggccaccaagtacaacaagctgcagatgctgggagatgacctgaggacagacaagaagatcatcctggtggaggacctgcccaaccagttctacagagacagccacaccctgcacgaggtgctgaggaaatatgtgagaattggccgctgccccctcatcttcatcatcagtgacagcctgagcggggacaacaaccagaggctgctcttccccaaggagatccaggaggagtgcagcatcagcaacatctccttcaaccctgtggcccccaccatcatgatgaagttcctgaaccgcatcgtgaccatcgaggccaacaagaatggaggcaagatcaccgtgcctgacaagaccagcctggagctgctgtgccagggctgcagcggggacatccgcagcgccatcaacagcctgcagttcagcagcagcaagggggagaacaacctgcggcccaggaagaagggcatgagcctgaagagtgatgctgtgctgagcaagagcaagaggaggaagaagccagacagagtgtttgagaaccaggaggtgcaggccatcggcggcaaggatgtgtccctcttcctgttccgggccctgggcaagatcctgtactgcaagagggccagcctgacagagctggacagcccccggctgcccagccacctgtctgaatatgaaagagacaccctgctggtggagcctgaggaggtggtggagatgagccacatgcctggggacctcttcaacctgtacctgcaccagaactacatcgacttcttcatggagattgatgacatcgtgcgggccagcgagttcctgagctttgctgacatcctgagcggggactggaacaccaggagcctgctgcgggagtacagcaccagcatcgccacccggggcgtgatgcacagcaacaaggcccggggctacgcccactgccagggcggcggcagcagcttccggcccctgcacaagccccagtggttcctgatcaacaagaagtaccgggagaactgcctggccgccaaggccctcttcccagacttctgcctgcctgccctgtgcctgcagacccagctgctgccctacctggccctgctgaccatccccatgaggaaccaggcccagatctccttcatccaggacatcggccgcctgcccctgaagaggcacttcggccgcctgaagatggaggccctgacagaccgggagcacggcatgattgatcctgattctggagatgaggcccagctgaatggaggccacagcgctgaggagagcctgggggagcccacccaggccaccgtgcctgagacctggagcctgcccctgagccagaacagcgccagcgagctgcctgccagccagccccagcccttcagcgcccagggcgacatggaggagaacatcatcatcgaggactatgaaagtgatggcacctag

SEQ ID NO: 234758 - DNA, 510 bp, Artificial Sequence
  derived and/or modified sequence
atgaaccaggtgacagactgggtggaccccagctttgatgacttcctggagtgcagcggcgtgtccaccatcacagccaccagcctgggcgtgaacaacagcagccacaggaggaagaatggccccagcaccctggagagcagccgcttccctgccaggaagaggggcaacctgagcagcctggagcagatctacggcctggagaacagcaaggagtacctgtctgaaaatgagccctgggtggacaagtacaagccagagacccagcacgagctggccgtgcacaagaagaagattgaggaggtggagacctggctgaaggcccaggtgctggagcggcagcccaagcagggcggcagcatcctgctgatcactggacctcctggctgtgggaagaccaccaccctgaagatcctgagcaaggagcacggcatccaggtgcaggagtggatcaaccctgtgctgcctgacttccagaaggatgacttcaagggcatgttcaacacctag

SEQ ID NO: 234759 - DNA, 66 bp, Artificial Sequence
  derived and/or modified sequence
atgaaccaggtgacagactgggtggaccccagctttgatgacttcctggagtgcagcggcgtgtag

SEQ ID NO: 234760 - DNA, 2013 bp, Artificial Sequence
  derived and/or modified sequence
atgaaccaggtgaccgactgggtggaccccagcttcgacgacttcttggaatgcagtggagtatctactattacagccacatccctgggcgtcaataactctagccaccgcagaaagaacggaccatctaccctggagtccagtagattccccgctaggaaacgagggaaccttagttctcttgagcagatctatggcctcgaaaactctaaagagtacctttcagagaacgaaccttgggtcgacaagtacaagcctgaaacacaacacgagctggcggtccataaaaaaaagatagaggaggtggagacatggctcaaagcacaggttctcgagcgacaacccaaacaggggggcagcatcttgctgatcactggaccacccggctgcggcaagactactaccctcaagatactgagtaaggaacatgggatccaggtgcaggagtggattaatccagtcctgccagactttcaaaaggatgactttaagggtatgtttaatacagagtcgtcttttcatatgtttccctatcaaagccagatcgctgtgtttaaggagttccttctaagagcgaccaagtacaacaaactgcaaatgctgggcgacgatctgaggacagataagaagatcatcctcgtcgaagatctgcctaaccaattctaccgggattctcatacgctacacgaggtccttcggaagtatgtccggatagggcgatgtcctttgatctttattatttctgattccctgagtggcgataataatcagcggctgctgttcccaaaagagatccaggaggagtgctcaatctcaaacatctccttcaaccctgtggctcctactattatgatgaagtttcttaacaggatcgttactatagaggctaataagaatggcgggaagataactgtgccggataaaacatctttggagttactgtgtcaagggtgtagcggagacatccgcagcgctatcaattcgctccaattttcttcatcaaagggcgagaacaatctgcgcccgagaaaaaagggaatgtccttgaagtcagacgccgtgctaagcaagagcaagagaagaaagaagccagatagggtgttcgaaaatcaggaagtgcaagccatcggcggcaaggacgtgagcctgtttctctttcgggccctgggcaagatcctgtattgtaaacgggccagtctaaccgaactcgactcgccccgtctgcccagccaccttagcgaatacgaaagagatactttactggtggaaccagaggaagtggtggaaatgtcccacatgccaggagacctgttcaatctgtatctgcaccagaattatattgattttttcatggagatcgacgacattgtgagagctagcgagttcctctcttttgctgacatcttatccggcgactggaataccaggagtttgttaagggagtactcaaccagtatcgccactcggggggttatgcatagtaacaaggcccgaggatatgcacactgtcagggtggcggaagttcctttcggcctttgcataagccccagtggttccttattaacaagaagtatagagagaattgtctcgccgcaaaggctttgtttcctgatttctgtctgccagccttatgcctccagacccagcttctgccgtatctggctcttcttacaatccctatgcgaaaccaggcacaaatttcatttattcaggacattggccggctacctctgaaacgacatttcggaagactgaagatggaggccctgaccgaccgcgaacacgggatgattgaccccgactcaggagacgaagcccagctcaacggtggacactctgcagaggagagcctaggggaaccaacacaggccaccgtgcctgaaacctggagcctccctctcagccagaattcagctagtgagctgcccgcttctcagccccaaccgttctcagcccagggagatatggaggaaaatatcattatcgaggactacgagtctgatgggacctag

SEQ ID NO: 234761 - DNA, 2013 bp, Artificial Sequence
  derived and/or modified sequence
atgaaccaggtgaccgactgggtggaccccagcttcgacgacttcctggaatgctctggagtgagcacaatcacagctacgagtctgggggtgaacaatagctctcaccggcggaagaacgggccctccacgctggaatcatcaagatttcccgcccgcaagcgggggaacctgtccagcctggaacaaatatacgggctggagaactcaaaagagtatctgtctgagaatgaaccctgggtggataagtataagccagagacccagcatgagcttgctgttcacaagaagaagatagaggaagtcgaaacctggctgaaagcacaggtcctcgagagacagcccaaacagggaggaagtatcctgctgatcactggccccccaggctgcgggaaaacgacaactctcaagatactatccaaagagcacggcatccaggttcaggaatggataaaccccgtccttcccgactttcaaaaagatgacttcaagggaatgtttaataccgaatccagctttcacatgttcccttatcagagtcagatcgcggtatttaaagaattcctcctgagggctacaaaatacaacaaactccagatgctgggggatgacctgcggactgacaaaaaaatcattctcgttgaagacctgcctaaccaattctaccgggatagccataccctccacgaagtgctccgcaagtacgtgcgtatcggccgctgccctctaattttcattatttccgacagcttgagtggcgacaacaaccagcggctgcttttccccaaagagatccaggaagaatgctccatctcaaatatctctttcaaccctgtggctccaacgattatgatgaaatttctgaatcgcatcgtgacaatcgaggcaaataagaatgggggtaaaattaccgttcccgacaaaacatcgttggaactattatgtcaaggctgctcgggcgacatcaggagcgccataaatagcctccaattctcctcgagcaaaggtgagaacaacctcagacctcggaaaaaaggcatgtctctcaaatctgacgcagttctgagtaaaagtaaacggagaaagaaaccggatagggtctttgaaaaccaggaggtccaggcaattggaggaaaagacgtctccctgttcctgtttagggctctgggcaaaattctctattgcaaaagagccagcttaaccgaactggattcacccaggttaccatcacatttgtcagagtatgagagagatactctactggtggagccggaagaagtggtggagatgtcccatatgccaggcgatctattcaacctatatctacaccagaattatattgacttcttcatggaaatcgacgacatagtccgagcctctgagttcttgagctttgctgacatcttaagcggcgactggaatacccgcagtcttctcagggagtattctacctccatcgcaacacggggcgttatgcactcaaacaaagcccgggggtacgcgcactgccagggcggaggttcttcttttcgaccacttcacaagccacagtggttcctgataaacaagaagtatagagagaactgcctcgccgctaaggctttgttccctgatttttgtttgccagctttgtgcctccagacgcaactcctgccatatttagcattgctgacaattcctatgcgcaaccaggcgcagatcagttttattcaagacatcggacgcttgccgctgaaaagacatttcgggaggctgaaaatggaggccctcactgaccgcgagcacggtatgattgatcctgactctggggacgaagcccaacttaatgggggccactcggccgaggaatccctcggcgagcctactcaagccaccgtgccagagacatggtctctgcctttgtcccagaactcagcttcagaactgcccgccagtcaacctcagcccttttctgcgcagggtgatatggaggaaaacataattatcgaggattacgaatcagatgggacttag

SEQ ID NO: 234762 - DNA, 2013 bp, Artificial Sequence
  derived and/or modified sequence
atgaaccaggtgaccgactgggtggaccccagcttcgacgacttcctagaatgtagcggagtttctaccataacagccaccagcctgggtgttaataattcaagccatcgccggaaaaatggaccttccacactagagtcttcccgtttccctgcccggaaacgcggtaatttgtcctctttggagcagatttatgggcttgagaatagcaaggaatatctttcagagaatgaaccttgggttgacaagtataagccagaaacacagcacgaactggctgtccacaaaaagaagattgaggaagtggagacctggctaaaagctcaggtgttggaaaggcagcctaaacagggaggttcaattctgctgattacagggccgcctggctgtgggaaaaccactacactcaaaatcctaagtaaagaacatggcatccaggtgcaggaatggattaaccctgttctccccgatttccagaaagatgattttaaaggcatgtttaacaccgaaagtagcttccatatgttcccatatcagagtcagatcgcagtattcaaggagttcctgctgagggccaccaagtacaacaagttacagatgctgggcgatgacctgcgtacagacaagaaaatcattctagttgaggatctgcctaaccagttctatagagactcacacactctgcatgaagtcctccggaagtacgttcggatcggtagatgtcctctgatatttatcattagcgattcccttagcggcgacaacaatcagcgcctcttattccccaaagagatccaagaagaatgcagtatcagtaacatcagttttaacccggtggctccaaccattatgatgaagttcctaaatcggatcgtaaccattgaggcaaacaaaaacggaggtaagatcacagtgcctgataaaaccagccttgagctgttgtgtcagggatgctcaggtgacatccggtcagctatcaactctcttcagttcagtagtagtaagggcgaaaacaacctccggcccaggaaaaaaggtatgagcctgaagagtgatgccgtgttatctaagtctaagcgtagaaaaaaaccagaccgggtgttcgaaaatcaggaggtgcaagcaattggaggaaaggacgtgagtctctttttattcagagcattgggtaagatcctatactgcaagcgcgcatctctgaccgagttggatagtccaagactcccgtcacacctgtctgagtatgagcgggatactctactggttgaaccagaagaggtcgtggagatgtcccatatgcccggagacttgtttaatctttacctgcatcaaaactatatcgacttcttcatggaaatcgacgacattgtgagagccagcgaattcttgagctttgcagacattctgagtggggattggaatacccgctctttgctccgagaatactcaaccagtatcgctacgaggggagtgatgcactctaataaggcgcggggctacgctcactgccagggtggagggtcatccttcaggcccctccacaagccccaatggtttctcattaataagaagtaccgggagaattgtttggccgctaaggctttattcccagatttctgtctgcccgccctctgcttgcagacacagctgctgccctatctggccctcctgactatacccatgaggaatcaggcgcagatcagctttattcaggacatcggtaggctgccactgaagaggcattttgggagactgaagatggaagcgctaactgaccgggaacacgggatgattgaccctgactccggagatgaggctcaactcaatgggggtcactccgctgaggaatctcttggggaacccacacaggccactgtgcctgagacctggtctctccctctgagccagaatagtgcgtcagaattgcctgctagtcagccccaaccattttcagcgcaaggcgacatggaggaaaacatcattatcgaagactacgagtctgatggtacctag

SEQ ID NO: 234763 - DNA, 2013 bp, Artificial Sequence
  derived and/or modified sequence
atgaaccaggtgaccgactgggtggaccccagcttcgacgacttcctggagtgctcgggtgttagcaccataaccgcaacttctttgggggttaacaacagtagccatagacggaagaatggtcctagcacattagagtcaagcagatttccagctcgtaagcgcgggaacctgagttcgctggagcagatttatgggctagagaatagtaaggaatatctttctgagaatgaaccctgggtggacaagtataaacctgaaacccagcacgagctagctgtacacaagaagaagatagaggaagtggagacatggcttaaagcacaagtcctggaaaggcagccaaagcaagggggcagtatcctcctgattacgggtccgcctggatgcggcaagacgacaaccctgaagatactctccaaagaacatggcattcaagtgcaggaatggatcaatcctgttctacccgatttccagaaagacgattttaaggggatgttcaacaccgagagctcctttcatatgttcccataccagagtcagattgcagtcttcaaagagtttctgctccgggcaaccaaatacaacaagctccagatgctgggagatgacctgcgcacagacaagaagataatactcgtagaggatctgcccaaccagttttaccgggactcacatacgttacacgaagtcttgcggaagtatgtgaggattgggcgctgccccctgattttcatcatctccgatagcttatctggcgacaataaccaaaggctgctgttccctaaggagattcaggaagaatgcagtatttcgaatatctcctttaaccctgtcgcccctacaatcatgatgaaatttctgaatcggatcgtcacaatcgaagcaaataaaaatggtgggaagattactgtacccgacaagactagtttggaactgctgtgtcaggggtgttcgggcgacatccggagtgccataaatagcctgcagttttctagcagcaagggggaaaacaatctgaggcctaggaaaaagggtatgtcattaaaatctgacgcagtcctgtcaaaatccaagcggcggaagaaaccagaccgtgtttttgaaaaccaggaagtgcaggccatagggggcaaggatgtatcattatttctattccgcgctttgggcaagattttatactgcaagcgggcttccctgaccgagctcgacagtcctcgcctcccgtctcatctgtctgagtatgaacgcgataccctgctggttgaaccagaggaagtggttgagatgagtcatatgcccggggatctctttaatctatacctacaccaaaactacatagattttttcatggagatcgacgacatcgtaagggcctccgagttcctgtctttcgctgatatcttgtcgggcgattggaatacaagaagccttcttagagaatactccacttctatagctacacggggagtgatgcattccaataaggctaggggctacgcccattgccagggaggaggaagttcgttccggcccctccataaaccccagtggtttctcatcaacaagaaatatagagaaaactgcttggctgcgaaagccctgttccccgacttttgcctgccagcgctgtgcctgcagacacagttgcttccataccttgcccttttgaccataccgatgagaaatcaagcgcagatctcattcatacaggatatcggcaggctgccactaaaaagacactttggaagactgaaaatggaggccctgacggatagagagcatggaatgattgaccccgactcaggcgatgaagcccaactaaacggcggtcatagcgctgaggagtccttaggggagccaacgcaagcgactgtcccagagacatggtctttgccactgtcccagaattccgcctctgaactgccagctagtcagccgcaaccttttagtgctcagggtgatatggaagagaacataatcatcgaggattacgagtcagacggaacttag

SEQ ID NO: 234764 - DNA, 1518 bp, Artificial Sequence
  derived and/or modified sequence
atgttcaacaccgagagcagcttccacatgttcccctaccagagccagatcgcagtcttcaaggagtttttactgcgggctaccaagtataacaaattacagatgctaggggatgacctgcgcacagataaaaagatcattcttgtggaagacctgcctaaccagttctaccgggattcgcacacactccatgaagtgctcaggaagtacgttcgaatcggcaggtgtcccttaatcttcatcatctccgattcactctcaggtgataataaccagaggctcctgttcccaaaggagatccaggaggagtgtagcatatccaacataagcttcaatcccgtcgcgcctacaattatgatgaagtttctgaatcgtatagttaccattgaggccaataaaaatggcggcaagattaccgttcccgataagacatctctcgaacttctgtgccaaggctgcagcggcgatatccgtagtgcaatcaattctctgcaatttagtagcagcaaaggcgagaataacctgcgcccccgcaaaaaaggcatgtctctcaaaagtgacgctgtgttgagcaagagtaagcgaagaaagaagccagaccgggtgttcgagaatcaggaggtacaggcaatcggtggaaaagatgtcagtctgtttctgttcagagcactggggaaaattctttattgcaagcgtgcctctctgactgagcttgactccccacggctgcctagccacttgtcagaatatgagcgcgatactctgctggtggagcccgaagaggtggtggagatgtcacacatgcccggagacctgttcaatttgtatctgcaccagaattatattgacttctttatggaaatcgacgatattgtccgggctagcgaattcctgagcttcgcagacatcctctccggtgattggaacacgcgctctctgctgagagagtactcaacctccatcgctaccaggggggtcatgcactccaacaaagcccgaggctatgcccactgtcagggcgggggctctagcttcagaccattgcacaaaccacagtggttcttgatcaataaaaagtatcgcgaaaattgtcttgcagccaaagcgttgtttcccgatttctgcctgccagccttatgcctccagacgcagctgcttccctacctcgccctgttgacaatcccaatgcggaatcaagcacagataagcttcatacaggatatcggccgactgcctctgaaaaggcacttcgggagactcaagatggaggccctgaccgacagagagcatggaatgatcgaccccgacagcggcgacgaagctcagcttaatggcggacactccgccgaggaatctctcggggaaccaactcaagctaccgtccctgagacttggtccctgcctttgagtcagaactcggccagtgagctccccgctagccagccccagccattcagcgcacaaggagatatggaagagaatattattattgaggactatgagtctgacggaacctag

SEQ ID NO: 234765 - DNA, 2013 bp, Artificial Sequence
  derived and/or modified sequence
atgaaccaggtgaccgactgggtggaccccagcttcgacgacttcctggagtgcagtggcgtgtctacgatcaccgcgacttctctgggtgtgaacaattctagccacagaagaaagaatgggccctccaccctggaaagctctagatttcccgctcgtaagagaggcaacctgtcatccttagaacagatctacggccttgagaactcaaaagagtacttgtcagagaacgagccttgggtagataaatataagccagaaacgcaacatgagttggccgtgcataagaaaaaaatcgaggaggtcgaaacttggttaaaagcccaggtcctagagcgccagcccaagcaggggggcagcatccttctgatcaccggtcctccggggtgcgggaagactactaccctgaaaatcctgagtaaggagcatgggatccaggtacaggaatggattaacccggtgctacctgattttcagaaggatgatttcaagggcatgttcaatacagaatccagtttccacatgttcccttatcagtctcagatcgccgtgttcaaggagtttctgcttcgcgctaccaagtataacaagctgcaaatgttgggagacgaccttcgcaccgataagaaaataatcttggtcgaggatctccccaatcagttctatcgagatagtcatactttgcacgaagtcttgaggaagtacgtgcggatcggccgatgtcccctaatcttcataatttctgactcactgtcaggggacaacaaccaaagactgcttttccctaaggaaattcaggaagagtgttctatttctaacatatccttcaatccggttgctccaaccattatgatgaaatttctaaatcggatcgtcacaatcgaggccaataagaatggcggcaaaatcacagtgcccgacaagacgagtctcgagctgctctgccagggctgttccggtgacatccggtcggctattaactccctccagttttcaagctctaaaggagaaaacaacttacggccccgtaagaaaggtatgagcctgaaatccgacgctgtgcttagcaaaagcaagcgtcggaaaaaacccgacagagtgttcgagaaccaggaagtccaagccattgggggcaaagatgtgagcctgttcctcttccgcgcactgggtaagatcctctattgcaaaagagcctcgctgacggaactagacagcccacgcttgccctcccatctatctgaatacgaaagggacacactgctagtcgagccagaggaagtggttgagatgagtcacatgcccggcgacctgtttaatctgtacctgcaccagaattatatcgactttttcatggaaatagatgacatcgtgagagccagcgaattcctgagttttgcggacattttgtccggtgactggaatacgagatccttgttgcgcgagtatagtacgtctatcgcaacacgcggcgttatgcatagcaacaaggccagggggtatgctcattgtcaggggggagggtcatctttccggcctctgcacaaaccacaatggttccttattaacaagaaataccgggaaaattgtctcgcagccaaggccctgttccctgacttctgtctccccgcgctgtgtttacagacacaactgcttccgtacctagcccttctcaccatcccgatgcgtaatcaggctcagatctcattcatccaagatatcggaagattacctctgaagaggcactttggtagattgaaaatggaagccttaacagacagagagcacgggatgatcgaccctgattctggagacgaagctcagctcaacggaggccacagcgcggaggagtcactcggcgaacccacccaggcaacagttccggagacttggagtctgcctttatctcagaattctgcctccgaactcccagctagccagcctcagcccttctctgcccagggcgatatggaggaaaacattatcattgaggactacgaaagcgacgggacatag

SEQ ID NO: 234766 - DNA, 510 bp, Artificial Sequence
  derived and/or modified sequence
atgaaccaggtgaccgactgggtggaccccagcttcgacgacttcctagaatgtagcggcgtctctacaatcacagcaacaagcctgggggtgaacaactcgagccatcggcggaaaaacggaccctctaccctggagagttccagatttccagctcgtaaacgcgggaatttgagctcactagagcagatttacggactggagaatagcaaagaatatctgtcagagaatgagccatgggtggataaatacaaaccggaaacacaacacgaactcgctgtgcacaagaagaagatcgaggaagtggagacatggctcaaggcccaggtgctggagagacagcctaaacagggcggttccatactcctgataactgggcccccaggttgcggcaaaactacaacgttaaagattttaagtaaggaacacggaatccaagtgcaggagtggataaacccagtactgcccgacttccaaaaggacgatttcaagggcatgtttaacacctag

SEQ ID NO: 234767 - DNA, 66 bp, Artificial Sequence
  derived and/or modified sequence
atgaaccaggtgaccgactgggtggaccccagcttcgacgacttcctggagtgcagtggagtctag

SEQ ID NO: 234768 - DNA, 1518 bp, Artificial Sequence
  derived and/or modified sequence
atgttcaacaccgagagcagcttccacatgttcccctaccagagccagatcgcagtctttaaggaattcttgttgcgggccactaagtataataagttgcagatgcttggcgacgacttacggactgataagaagatcattttggtcgaagatttacccaaccagttctatcgggacagtcatactctccacgaggtgctgcggaaatacgtgagaattggacgatgtccgttgattttcatcatcagcgactccctcagcggcgacaataaccagaggcttctcttccccaaggagatccaggaggaatgttccattagtaacatctctttcaatccagtggcccccacaatcatgatgaagttccttaaccgcattgttaccattgaggccaacaaaaacggaggtaaaataaccgtgcccgacaaaacttctttagagctgctctgtcaagggtgctccggtgacattcggtctgctattaacagcctccagttctcctctagcaagggggagaacaatctgaggccacggaaaaaggggatgtctctaaagagtgatgctgtactgagcaaaagtaagagaagaaagaaacccgatagggtattcgagaaccaggaagttcaagcaataggtggaaaggacgtgtcccttttcctttttagggcactgggaaaaattctatactgcaagcgtgcctccctcactgagttggatagtccacggctcccgtcacacttgtctgagtatgagcgcgatacactcttggtggaacccgaagaggtggtcgagatgtcgcacatgcctggagatctgtttaacctgtatctgcaccagaactacatagattttttcatggagatcgacgacattgtccgagcgtctgagttcctcagcttcgccgatatattgtctggggactggaacactcgatctttactgcgggaatacagcacctctatcgccaccagaggggtgatgcacagcaacaaggcacgcggatatgcccactgccagggcgggggcagttccttccggccactgcataaaccgcagtggtttttaatcaataagaagtacagagagaactgcttggccgctaaggcccttttcccggatttttgtctgcccgctctgtgcctgcagactcagctgctcccttatttggccctcctgacgatcccaatgagaaaccaggcccagatatcgtttatccaggacattgggcggctcccgctcaaacgacactttgggagattgaaaatggaggcactcacagacagagaacatggaatgatcgatcctgattccggagatgaggctcagctgaatggcggtcactccgctgaagagagcctgggcgaaccaacacaggctacggtgcctgagacctggagtctgccgctgagccagaacagtgcatccgagctgcccgccagccagccccagcctttttccgcccagggcgatatggaggaaaacataattatcgaagactatgaatccgacggcacgtag

SEQ ID NO: 234769 - DNA, 2013 bp, Artificial Sequence
  derived and/or modified sequence
atgaatcaggtcaccgattgggttgacccaagctttgacgactttttagaatgctccggcgtatctaccattacagccacctcgttgggtgtgaataactcttcccaccgcagaaaaaacggccctagcacactggaaagctcacgctttccagcaagaaagcgcggtaacttgtcttctcttgaacaaatttacggactggagaattcaaaagagtacctgtccgagaacgagccatgggttgacaaatataaacccgagactcagcacgagctcgcggtccataagaagaaaattgaagaggttgaaacctggcttaaggctcaggttctcgagcggcagcccaagcagggaggcagcatcttgctgataacaggcccacctggatgcggaaagacaactaccttgaaaatcctttcaaaagagcacgggatccaggtccaggagtggattaatcctgttttgccagactttcaaaaggacgactttaaaggcatgttcaacacggaatcgagctttcacatgtttccatatcagtcacagatcgccgtgttcaaagagtttctactcagagcaactaagtataacaaattacagatgttaggtgacgatttacgaacagacaaaaaaataattcttgtggaggatctcccaaatcagttctaccgcgattcccacactctgcatgaggtgttacgaaagtatgtgagaattggaagatgtccactgatatttatcattagtgattcgctgagcggcgacaacaaccagcggctgctgtttcccaaagaaattcaagaggagtgtagcatcagtaatatcagtttcaacccagtcgcaccgaccattatgatgaaattcctaaaccggattgtcacaattgaggcaaataaaaacggtgggaagattaccgtcccagataaaacaagccttgaactgttgtgtcagggctgttctggcgatatacggtctgcaattaatagtctgcaattctcaagtagtaaaggtgaaaacaatctccgtcccaggaagaaaggcatgagccttaagagtgacgccgttttgtcaaagagtaagaggcggaaaaaacccgacagggtgttcgagaaccaggaggttcaggctatcggtgggaaagacgtttcactcttcctctttagggcccttggaaagattttgtactgtaaacgggcatccctgactgagctggatagcccacgactcccctcccacctgtcagaatacgagagggataccctgctggtggagcctgaggaagtcgtggagatgagtcatatgcctggtgacctgttcaacctgtatcttcatcaaaattacattgacttttttatggaaattgacgacatcgtccgagcgtcagaattcctatctttcgccgacatcttatccggcgactggaatacaagatctcttctcagggagtacagtacctctatcgccacacgaggggtgatgcactccaacaaggctcgcggatatgcccactgccagggtggaggctcttccttccggcctctccataaaccacaatggttcctgatcaataagaaataccgagaaaattgtctggcagcgaaggccctgttccccgacttttgtctcccggctttgtgccttcagacccagttactcccttatttggcccttttgacaattcccatgcgcaatcaggctcagatctccttcatacaggatattggacgcctgcctttgaaacgacacttcggcaggctgaaaatggaggccctgactgaccgagaacatggtatgattgatccagatagtggcgacgaagcccagctgaacggcggacactccgcggaggaaagcttgggcgagcccacacaggccacagtgcctgaaacgtggtccctgcccctcagtcagaatagcgcgtcggaactgcctgcgagccaaccccagcccttttctgctcagggcgatatggaagaaaacatcataatcgaggactacgaaagcgacggcacctag

SEQ ID NO: 234770 - DNA, 2013 bp, Artificial Sequence
  derived and/or modified sequence
atgaaccaggtgacggattgggtcgatccaagttttgatgacttcctggagtgctctggggtttctaccataacagctacatccctgggagtgaataacagcagccataggcgcaaaaacggtccttcaacactggaaagtagccgcttccccgctcggaagagaggcaacttgagcagcctggaacagatctacggattggagaactccaaggagtacctgagcgaaaatgagccatgggtcgataagtacaagccggagactcagcacgaactggcagtccataagaaaaagattgaggaggttgaaacatggcttaaggcacaggtgttagaacggcagccgaagcaaggaggctccatacttctgatcaccggccctccaggttgtggcaagacaactactttaaagatcctttccaaagagcatgggatacaggtccaggagtggatcaatcctgtgcttcccgacttccagaaggatgattttaaaggaatgttcaatacagagtcctccttccacatgtttccatatcagagccagatcgccgtttttaaggaattcttattacgggctacaaaatataacaaattacagatgctcggcgacgacctgcggacagataagaagatcatccttgtggaagatctcccaaaccagttctacagggactctcacaccctgcacgaagtactcagaaagtatgtcagaatcgggaggtgtccccttatcttcattatttcagacagcctgtccggagataacaatcagcgcctactctttccaaaggagattcaagaggaatgctccatatccaacatttcttttaatcctgtcgctcccacaattatgatgaagttcttaaatcgaatcgtaaccatagaagcaaataaaaatggcggtaaaatcaccgtcccagataaaaccagcctggagctgctgtgtcagggatgcagtggtgatatcaggtccgcgatcaatagcctgcagttctcctcatccaaaggagaaaataacttgcgccctcgcaagaagggaatgtccctgaagtcagacgcggttctgagcaagtcgaagaggagaaagaaaccagatcgtgtgtttgagaaccaagaggttcaggcaatcggcggaaaggacgtatcgttgttcctgttcagggcactgggcaaaatcttgtactgtaaacgggcttctctcacggagctggactccccaaggctcccctctcacctgtctgagtatgagcgtgataccctgctagtggaaccagaagaggtggtggagatgagccatatgcccggagacctgtttaacctctatcttcaccaaaactatattgacttcttcatggagattgatgatattgtgagggcaagcgagtttcttagtttcgccgacatcctttctggggactggaatacccgatcattattgagggaatattcaacatcaattgccacaaggggcgtaatgcattctaacaaagccagaggctacgcccattgtcagggtggaggcagcagcttcaggcctttacataaaccacaatggtttctgatcaacaagaagtatcgcgagaattgtttggcggcaaaggccctgttccccgacttctgtctgcctgcgctatgcctgcagacacaactgttgccctatctggctctcctgaccattcctatgagaaatcaggctcagatttcctttattcaagacattgggagactccctttaaagaggcatttcggtcggttgaaaatggaagccctaaccgaccgcgagcatgggatgatcgatcccgacagtggagatgaagctcagctgaatggcggacactcggctgaggagtcattaggcgagcctacccaggctactgtgccagaaacctggtcactcccattgtcacaaaattcagccagcgaattgcccgcttcccagccccagccctttagcgcccaaggggacatggaagaaaacatcatcatcgaggattacgaatcggacgggacctag

SEQ ID NO: 234771 - DNA, 2013 bp, Artificial Sequence
  derived and/or modified sequence
atgaatcaggttacagactgggtcgatccttcttttgatgacttcctcgaatgttcaggggtttccactattacagccacgagcttgggagtcaacaactctagccaccgccgaaaaaacggtccctcgacgctggagtcctctcggtttcccgctcgaaagaggggaaatctgagttctctcgagcagatatatggtctggagaacagtaaggagtatctgtccgaaaatgagccctgggtggataagtacaaaccagagacacagcacgagctggccgtccataagaagaagatcgaggaagtggaaacatggctgaaggctcaggtcttagaaagacaacctaaacagggtggctccattctacttataacgggtcctcccggatgcggaaaaaccactacattaaagatcctgagtaaagaacacggaatccaggtgcaggagtggattaaccccgtgctgccagactttcagaaggatgactttaaaggcatgtttaacacagagagtagctttcacatgttcccctaccagtctcagattgcagtgttcaaggagtttctattaagggcaacaaaatacaataaactgcagatgttgggcgatgatctgagaacggataagaaaattatacttgtggaggatttgccgaatcaattttaccgtgacagccatacgctgcacgaggtattgcggaaatatgttagaatcggcaggtgcccactgatattcattattagtgactctctctccggtgacaacaaccagaggctgctgttccccaaggagattcaggaggagtgctcaatctcaaatatcagtttcaacccagtggcacctaccatcatgatgaagtttctgaacagaattgtgacgatcgaggccaacaagaatggcggtaagatcaccgtaccagacaaaacctcgctggagcttctgtgtcaaggctgctccggggacattaggagtgccataaactcactacagttttcatcgtccaagggcgagaacaatcttagacctcgtaaaaagggtatgagtctgaagagcgacgccgtcctaagcaagtcaaaaaggcgcaaaaaaccagaccgggtgtttgaaaatcaggaggtccaggcgattggaggaaaagatgtttcactgttcctgttccgggctttagggaaaatcttgtactgcaaacgggcatcgctcaccgagttggattccccgcgtctcccgtctcacttatccgaatatgagagagatacattgcttgttgagccagaggaagttgtggagatgtctcacatgcctggagacctatttaatttgtatctgcaccagaactacatagactttttcatggaaattgatgacatcgttagagcttccgagttcctgagtttcgcagacatactgagcggagattggaatacgcggagtctgcttcgggaatacagtacatctattgccacccggggtgtaatgcattccaacaaggcgaggggatacgcccactgccagggcggagggagcagctttcggcctttacacaagccgcagtggttcctgattaacaagaaatacagagagaattgcttagccgctaaagccctatttcctgacttttgtctgccggcattgtgcctccagactcagctgcttccatacctggcactgttaactatacctatgagaaaccaagctcagatttcattcatccaagatattggccgtctccctcttaagaggcacttcggaagattgaagatggaggcacttaccgatcgcgagcatggaatgattgatcctgattccggagatgaagcacaattgaacggaggtcatagtgcagaagagtcactgggtgaaccgacccaagcaaccgttcctgaaacatggagcctgccactgtcccagaactcggcctcagagcttccagcttcacaaccacagccttttagcgcccagggggacatggaggaaaacatcataattgaagactatgagtccgatgggacatag

SEQ ID NO: 234772 - DNA, 2013 bp, Artificial Sequence
  derived and/or modified sequence
atgaaccaggtgaccgactgggtcgatccttcgtttgatgactttctggagtgctctggcgtgtccacaattaccgctaccagcctgggggttaataactccagtcaccgacgtaagaacgggcctagtacgttggaaagcagccgcttcccagcacgcaagaggggcaacctgagttccctcgagcagatttatggccttgaaaacagcaaggaatatctgtccgagaatgagccctgggtggataagtacaaacccgagactcagcacgagcttgcggtccataagaagaagatagaagaagtggaaacttggctgaaagcccaggtgctcgagagacagcccaaacaggggggatcaatcctcctcatcactggtccaccgggttgtggaaaaaccacgacactgaagatcctgtctaaggagcatggcattcaggtacaggagtggatcaaccctgtgctgcccgatttccagaaggacgattttaaggggatgttcaacacggaaagctcctttcatatgttcccctaccaaagccagattgccgttttcaaagagtttcttctccgagccaccaagtacaacaaactgcaaatgctgggcgacgacctgcgcactgataagaagatcatcctggtagaagatctgcccaaccagttttatagagacagtcacaccctccacgaagtgctacggaaatatgtgcgaatcgggagatgtccgctgatcttcataatttccgatagcctaagcggagacaataaccaacgcctgctgtttcccaaggagatccaagaggaatgctccatctctaatattagctttaaccctgtagcacctactatcatgatgaaattcctcaatagaatcgtgactattgaagccaataaaaatggtggcaagattaccgtgccagataaaactagcctggaactgctttgccagggatgttccggcgacatccggtccgctattaatagcctgcagttttctagttccaagggtgaaaataacctaagacctagaaaaaaaggcatgtccctgaagagtgatgccgtcctgtccaaaagcaagaggcgcaaaaaacccgatcgggtcttcgaaaatcaggaagtacaggccataggtggcaaagatgtgtcattatttctgtttcgagccctcggcaagatcctgtactgcaaacgcgcatctctcacagaactggattcaccacgtcttccttcccatctcagcgagtatgaacgtgacaccctcctggtggaaccagaagaggtggttgaaatgtcccatatgcccggagatctctttaatctgtatcttcaccagaactacatcgacttctttatggagatagatgacattgttagggcatccgaatttctgagtttcgcagacatccttagtggagactggaacacccggtccctgttacgggagtacagcactagtattgcaactcggggagtcatgcactcgaataaggcacgcggatatgctcactgccaagggggtggatcctccttcaggcctttacacaagccgcaatggttcctgattaataagaaataccgggaaaactgtctcgcggctaaagcactttttcccgatttctgtttgcccgctctctgtttgcagacccagctactgccgtacttggccctgctgacaattcctatgcggaaccaagcccagatctctttcatacaggacatcggcaggctacccctgaaacgccatttcggcagattaaaaatggaggccctgacagacagggaacatggcatgattgatcccgactccggggatgaagcacaattgaacggtgggcatagcgccgaagagtcactgggagaacctactcaagccactgtacctgaaacttggagtcttccgctgtctcagaactctgctagtgagctgcctgcctcacagcctcaacctttttcagcacagggtgatatggaggaaaacatcattatcgaggactatgaatccgatggtacttag

SEQ ID NO: 234773 - DNA, 1518 bp, Artificial Sequence
  derived and/or modified sequence
atgttcaacaccgaaagttcttttcacatgttcccatatcagagccagatcgcggttttcaaggaatttctgcttcgagccacaaagtacaataaacttcagatgttgggagacgacctgagaaccgataaaaagatcatcctggtggaagatttgcccaatcagttttatagggactcccatactctgcatgaggtgctgagaaagtatgttaggatagggcgttgcccactgatctttattatctcagactctttatccggtgacaataaccaacggctcctctttccaaaagagatccaggaggaatgttccatctcaaacatctctttcaacccggttgctccgacgatcatgatgaagtttcttaaccggatagtaaccattgaggcgaataaaaatggaggaaagatcaccgtacccgacaaaacctcattggaacttctgtgtcaaggctgctctggggacatacgctccgcaataaattctcttcagttttcatcttccaagggcgaaaataacttacgtcctagaaagaagggcatgtcgctgaaatccgatgccgtgctgtccaaaagtaagagacggaagaagcccgaccgcgtgttcgaaaatcaggaagtgcaagcaatcggaggcaaagacgttagcctgtttctgttccgcgcactcggcaagatactgtattgcaaaagagccagtctgacggaactggactcgcctaggttaccaagccacctgtccgagtacgaacgagacacattactcgtcgagcctgaggaagtagtggaaatgtcacacatgcctggagatttatttaacctgtatctccaccagaattatatagactttttcatggaaattgatgacattgtgagggcaagtgaattcttatctttcgctgacatcctgtcgggggattggaacacgcggtctctgttgcgcgagtactctaccagtatcgcgacccgtggtgtgatgcattcgaacaaggcacgaggatatgctcattgccagggaggaggcagtagctttcgacccctgcacaagccccaatggtttctgatcaacaagaagtacagggaaaattgtctggcagccaaggcactattccctgacttctgcctcccagccctctgtctacagacgcaactgctgccgtacttggccctgttgacaattcctatgaggaatcaagctcagattagttttatacaggacatagggagactcccactaaaaagacacttcggtcgactcaagatggaggctctcacggacagagagcatggaatgatagaccctgactcaggcgacgaggcccagctgaacggaggacatagcgccgaggaaagtcttggtgaaccaacacaggctaccgtcccagaaacatggtctctgccgctttcccagaattccgccagcgagctccctgcctcacagcctcagccgttcagtgcccaaggagacatggaagagaacatcatcattgaggattacgagtcagacggcacatag

SEQ ID NO: 234774 - DNA, 2013 bp, Artificial Sequence
  derived and/or modified sequence
atgaatcaggtaaccgactgggtggatccctcatttgatgattttctcgagtgttccggagtgagcaccatcacagcaacatctctcggcgtcaataattcctcacatcgcaggaagaacgggcctagcaccctcgaatccagtaggttcccagcgagaaaacgcggaaatctcagctccctggagcagatctatgggctggagaactccaaggagtatttaagcgaaaacgaaccctgggtcgacaagtataaacccgaaacccagcatgaactggccgtccataaaaaaaaaatcgaagaggtagagacctggcttaaggcccaggtgctcgagcgccagccaaagcagggcggttccatcctgcttattactggccctccaggttgtggcaagactacaaccctgaagatcctctcaaaggaacacgggattcaagtacaagagtggattaacccagttctgcctgactttcaaaaggacgatttcaagggcatgtttaacacagagtcatcattccacatgttcccatatcagtcacaaatagctgtgttcaaggagttcttgctgcgggctactaaatataacaagttgcagatgctgggcgatgatttgcggacggacaagaagatcatcctggtggaggatttgcctaaccagttctatcgcgatagtcatactttacacgaagttttgcgcaagtatgtccggatcggccgatgcccactgattttcatcatttctgactccttgagtggcgataataatcagagactgctgtttcccaaagagattcaggaggagtgttctatttctaacattagctttaaccctgtcgcccctaccattatgatgaaattccttaatcggattgtgaccatagaggcgaataagaacggcggaaaaataaccgtgcccgacaaaacatcactggagctactctgccagggatgttctggcgacatcagatcagctatcaattcactccagttctctagctccaagggagagaataacttgagaccgagaaaaaagggcatgagtctcaagtccgatgcagttctatcaaagtccaaaaggcgaaaaaagcccgatagggtgttcgaaaaccaggaagtgcaagctattggcggaaaagatgtaagcctttttctgtttcgagctctgggaaagatactgtattgcaaaagagcttccctgactgagctggatagccccaggttaccctcccacctcagcgagtacgagcgtgacaccctgcttgtggagcccgaggaggttgtggaaatgtcacacatgcctggagatctattcaatctctacctccaccaaaattacatcgacttttttatggagatcgacgatatagtgagagccagtgaattcctgagttttgctgacattctgagcggggattggaacactcggtctctcctccgcgagtacagtacctcgatcgctacacgtggagtcatgcacagcaataaagccaggggttatgcccattgtcagggcggagggagctctttcaggccgcttcacaagccacagtggtttctgattaacaagaaatatcgggaaaactgcttagccgctaaagctctttttcctgatttttgtctgcccgctttatgtctccaaacacagcttctcccttacctggcattgctgaccatacccatgcgtaaccaggcccagatcagctttatacaggacattggccgactgccactgaagcgccacttcggtagactcaaaatggaagcacttacagatcgagagcatggtatgatagacccggattctggcgacgaggcccaactgaacggaggccattcagccgaggagtctttgggtgaacctactcaggcgaccgtacccgagacttggtccttacccttgtcgcagaacagtgcttcagagctgccggcatcccagccccagcccttctctgcccaaggagacatggaagaaaacattattatcgaggattacgagtcggatggcacttag

SEQ ID NO: 234775 - DNA, 510 bp, Artificial Sequence
  derived and/or modified sequence
atgaatcaggtgactgactgggtggaccccagttttgacgacttcctggaatgttccggggtgagcacgattaccgctacgagcctgggtgtgaacaactcttctcacagacgtaaaaacggcccttcaaccctggaatcttcacggttccctgcccgaaaaagagggaacctgtcatcactggagcagatttatggtctcgaaaatagtaaggaatacctgtctgagaatgagccatgggtagataagtataagcccgagacacagcacgagttggctgttcacaagaaaaaaatcgaggaggtcgagacatggcttaaagcccaagtgcttgaacggcagcctaagcaggggggtagcattctgctcatcacagggcctcctggctgcggaaagactacaacactcaagatcctgtctaaggaacatggcatccaagtgcaagaatggatcaatcccgtgttacccgatttccagaaagacgacttcaagggaatgtttaatacttag

SEQ ID NO: 234776 - DNA, 66 bp, Artificial Sequence
  derived and/or modified sequence
atgaatcaggttactgactgggtggacccgagctttgatgacttcctggaatgctctggtgtgtag

SEQ ID NO: 234777 - DNA, 1518 bp, Artificial Sequence
  derived and/or modified sequence
atgttcaacaccgagtccagctttcacatgtttccatatcaatcgcagattgcagtgtttaaggagtttcttctcagggccacaaagtataataaattgcagatgttgggagatgatctccggaccgacaagaaaataatcttggttgaggacctgccaaatcaattctatcgtgacagtcacacactgcatgaggtgctgcggaagtacgtgcggattggaaggtgtcctctcatcttcattattagcgactcactgtcaggggacaacaatcaaaggcttctgtttccgaaagaaattcaagaagagtgtagcattagcaacattagctttaatcctgtggcacccacaattatgatgaagttcctcaaccgcattgtgactatcgaagcaaacaaaaatggaggcaagatcactgtccctgataagacttcactcgagcttctgtgccagggatgttccggcgacatcagatcagccattaattctcttcaattcagctcctccaaaggggagaataatctgagacccaggaagaagggaatgtctctcaaatctgatgctgtactgagcaagtccaagcgaaggaagaaacctgatagggttttcgagaaccaggaagtccaagctattgggggaaaggacgtgtcgctctttctgttcagagccctcgggaagattctttactgcaagagagcctctctcaccgaactggattctcctcgactcccatcccatttaagcgaatacgagcgggacactctgctcgtggagcccgaggaagttgtcgagatgtctcacatgccaggcgatctgtttaacctctatctacaccagaattatattgacttcttcatggagatcgatgacatcgtgagagcgagtgaattcctgtctttcgccgatattctgagcggagactggaatactaggtccctgcttagggaatacagcacgtccatcgcgacccgaggtgtaatgcacagcaataaggcacgcggttacgcccactgccagggtggtggatcaagtttcaggccactgcacaagccgcagtggttcttgatcaacaagaaatatagggaaaactgtttagctgcaaaggcgctgtttccagacttctgcctgccagcactgtgccttcagacacagctgctgccctacttggctttgctcacaatacctatgagaaatcaagcccaaatttcttttattcaggacattggtcgtctgcctcttaaacgtcacttcggcagactgaagatggaagcactgaccgatcgcgaacacggcatgatcgacccggacagcggtgacgaggcacagctgaatggcggacattctgccgaagaaagcctcggtgaacccacccaggccaccgtacccgagacctggagtctaccactctcccagaacagtgcatcagagcttcccgcttcccaacctcagcctttctcagctcagggagatatggaggagaatattatcattgaagactatgaaagcgatggaacctag

SEQ ID NO: 234778 - DNA, 3164 bp, Artificial Sequence
  derived and/or modified sequence
acctgtataccttttgaaacgtcacagtctctaatcgtgaacgatttggggcggagggctgaacaatgtgttttctagtgtgtcgaggtgtttataggctatgtgtgcctccaaactgtaaagtagtccagtatactttccaatgtataagtttgtagaccttaaacttttcttctggctaacttaaaatcgttgaattcactagtttgcataaacatttaagaatttgaaaacacggttgaaaaacagtgttaccaagaaattttgtaataacatgttcaaatgaagacaaaaattttacagtttaagacttaaattcttcgtccacagcaagtgaattcatggtattttacttttttgggaaatactggaaatgaagacctgcaactgtaatttgaaataaggaaaactttaattttcagtataaaaattgctcaaatagaattgcctgattttaatgacaaaagtatatgggagtccacatttatgtaagaaatgaaactataaaatgtataaataatttgcaaatcagaattgctgtcgaaagttttactataatgaaagatattttcatactctcaaaaatatagaggaaaggggccaagattatagtaccagtcacaatcttttgatgaggacgaaatgaatcaggtaacagactgggttgacccatcatttgatgattttctagagtgtagtggcgtctctactattactgccacatcattaggtgtgaataactcaagtcatagaagaaaaaatgggccttctacattagaaagcagcagatttccagcgagaaaaagaggaaatctatcttccttagaacagatttatggtttagaaaattcaaaagaatatctgtctgaaaatgaaccatgggtggataaatataaaccagaaactcagcatgaacttgctgtgcataaaaagaaaattgaagaagtcgaaacctggttaaaagctcaagttttagaaaggcaaccaaaacagggtggatctattttattaataacaggtcctcctggatgtggaaagacaacgaccttaaaaatactatcaaaggagcatggtattcaagtacaagagtggattaatccagttttaccagacttccaaaaagatgatttcaaggggatgtttaatactgaatcaagcttccatatgtttccctatcagtctcagatagcagttttcaaagagtttctactaagagcgacaaagtataacaagttacaaatgcttggagatgatctgagaactgataagaagataattctggttgaagatttacctaaccagttttatcgggattctcatactttacatgaagttctaaggaagtatgtgaggattggtcgatgtcctcttatatttataatctcggacagtctcagtggagataataatcaaaggttattgtttcccaaagaaattcaggaagagtgttctatctcaaatattagtttcaaccctgtggcaccaacaattatgatgaaatttcttaatcgaatagtgactatagaagctaacaagaatggaggaaaaattactgtccctgacaaaacttctctagagttgctctgtcagggatgttctggtgatatcagaagtgcaataaacagcctccagttttcttcttcaaaaggagaaaacaacttacggccaaggaaaaaaggaatgtctttaaaatcagatgctgtgctgtcaaaatcaaaacgaagaaaaaaacctgatagggtttttgaaaatcaagaggtccaagctattggtggcaaagatgtttctctgtttctcttcagagctttggggaaaattctatattgtaaaagagcatctttaacagaattagactcacctcggttgccctctcatttatcagaatatgaacgggatacattacttgttgaacctgaggaggtagtagaaatgtcacacatgcctggagacttatttaatttatatcttcaccaaaactacatagatttcttcatggaaattgatgatattgtgagagccagtgaatttctgagttttgcagatatcctcagtggtgactggaatacacgctctttactcagggaatatagcacatctatagctacgagaggtgtgatgcattccaacaaagcccgaggatatgctcattgccaaggaggaggatcaagttttcgacccttgcacaaacctcagtggtttctaataaataaaaagtatcgggaaaattgcctggcagcaaaagcactttttcctgacttctgcctaccagctttatgcctccaaactcagctattgccataccttgctctactaaccattccaatgagaaatcaagctcagatttcttttatccaagatattggaaggctccctctgaagcgacactttggaagattgaaaatggaagccctgactgacagggaacatggaatgatagaccctgacagcggagatgaagcccagcttaatggaggacattctgcagaggaatctctgggtgaacccactcaagccactgtgccggaaacctggtctcttcctttgagtcagaatagtgccagtgaactgcctgctagccagccccagcccttttcagcccaaggagacatggaagaaaacataataatagaagactacgagagtgatgggacatagaagccagcctgctaatcagattgctacttcacagcttcatttttgtttcattcagtggtacttcagcagagttaatatgcttttctgatgaattacacaacagtttgttaattcttcattcttgtagtatttcatcacaagaaacctactcttctgtcatcttgaagtaaatagaagatcaagccttcaaatctcttaattttttcggtatttattaaatctgtgagtggtttaaggagcggtcagtgtgtataaagtgtgtttgaacattatgccaaatatcaagatgtgaaggactaattcaggatgcaaaaacgttattggggggttgtaaatatcaactattcaacagtttaggatgcaattacgagtgtaaactgtgtgccttatttacactttattgtctcccgcttctcagatagttttgatgtgttgtacagtggaatatcttagatactttttggaaagtatttacataagttatatcacaattaaaatgttgaatttaa

SEQ ID NO: 234779 - DNA, 2789 bp, Artificial Sequence
  derived and/or modified sequence
agcccgggtagggccaggtggctgccctttcacctagggtagtccctggtcgcctccgctcttcgcctaaaaggggatgcagctccgggaaatatatgggagtccacatttatgtaagaaatgaaactataaaatgtataaataatttgcaaatcagaattgctgtcgaaagttttactataatgaaagatattttcatactctcaaaaatatagaggaaaggggccaagattatagtaccagtcacaatcttttgatgaggacgaaatgaatcaggtaacagactgggttgacccatcatttgatgattttctagagtgtagtggcgtctctactattactgccacatcattaggtgtgaataactcaagtcatagaagaaaaaatgggccttctacattagaaagcagcagatttccagcgagaaaaagaggaaatctatcttccttagaacagatttatggtttagaaaattcaaaagaatatctgtctgaaaatgaaccatgggtggataaatataaaccagaaactcagcatgaacttgctgtgcataaaaagaaaattgaagaagtcgaaacctggttaaaagctcaagttttagaaaggcaaccaaaacagggtggatctattttattaataacaggtcctcctggatgtggaaagacaacgaccttaaaaatactatcaaaggagcatggtattcaagtacaagagtggattaatccagttttaccagacttccaaaaagatgatttcaaggggatgtttaatactgaatcaagcttccatatgtttccctatcagtctcagatagcagttttcaaagagtttctactaagagcgacaaagtataacaagttacaaatgcttggagatgatctgagaactgataagaagataattctggttgaagatttacctaaccagttttatcgggattctcatactttacatgaagttctaaggaagtatgtgaggattggtcgatgtcctcttatatttataatctcggacagtctcagtggagataataatcaaaggttattgtttcccaaagaaattcaggaagagtgttctatctcaaatattagtttcaaccctgtggcaccaacaattatgatgaaatttcttaatcgaatagtgactatagaagctaacaagaatggaggaaaaattactgtccctgacaaaacttctctagagttgctctgtcagggatgttctggtgatatcagaagtgcaataaacagcctccagttttcttcttcaaaaggagaaaacaacttacggccaaggaaaaaaggaatgtctttaaaatcagatgctgtgctgtcaaaatcaaaacgaagaaaaaaacctgatagggtttttgaaaatcaagaggtccaagctattggtggcaaagatgtttctctgtttctcttcagagctttggggaaaattctatattgtaaaagagcatctttaacagaattagactcacctcggttgccctctcatttatcagaatatgaacgggatacattacttgttgaacctgaggaggtagtagaaatgtcacacatgcctggagacttatttaatttatatcttcaccaaaactacatagatttcttcatggaaattgatgatattgtgagagccagtgaatttctgagttttgcagatatcctcagtggtgactggaatacacgctctttactcagggaatatagcacatctatagctacgagaggtgtgatgcattccaacaaagcccgaggatatgctcattgccaaggaggaggatcaagttttcgacccttgcacaaacctcagtggtttctaataaataaaaagtatcgggaaaattgcctggcagcaaaagcactttttcctgacttctgcctaccagctttatgcctccaaactcagctattgccataccttgctctactaaccattccaatgagaaatcaagctcagatttcttttatccaagatattggaaggctccctctgaagcgacactttggaagattgaaaatggaagccctgactgacagggaacatggaatgatagaccctgacagcggagatgaagcccagcttaatggaggacattctgcagaggaatctctgggtgaacccactcaagccactgtgccggaaacctggtctcttcctttgagtcagaatagtgccagtgaactgcctgctagccagccccagcccttttcagcccaaggagacatggaagaaaacataataatagaagactacgagagtgatgggacatagaagccagcctgctaatcagattgctacttcacagcttcatttttgtttcattcagtggtacttcagcagagttaatatgcttttctgatgaattacacaacagtttgttaattcttcattcttgtagtatttcatcacaagaaacctactcttctgtcatcttgaagtaaatagaagatcaagccttcaaatctcttaattttttcggtatttattaaatctgtgagtggtttaaggagcggtcagtgtgtataaagtgtgtttgaacattatgccaaatatcaagatgtgaaggactaattcaggatgcaaaaacgttattggggggttgtaaatatcaactattcaacagtttaggatgcaattacgagtgtaaactgtgtgccttatttacactttattgtctcccgcttctcagatagttttgatgtgttgtacagtggaatatcttagatactttttggaaagtatttacataagttatatcacaattaaaatgttgaatttaa

SEQ ID NO: 234780 - DNA, 2943 bp, Artificial Sequence
  derived and/or modified sequence
cgagaggctcggcgttgagcccgggtagggccaggtggctgccctttcacctagggtagtccctggtcgcctccgctcttcgcctaaaaggggatgcagctccgggaaacaagtgaattcatggtattttacttttttgggaaatactggaaatgaagacctgcaactgtaatttgaaataaggaaaactttaattttcagtataaaaattgctcaaatagaattgcctgattttaatgacaaaagtatatgggagtccacatttatgtaagaaatgaaactataaaatgtataaataatttgcaaatcagaattgctgtcgaaagttttactataatgaaagatattttcatactctcaaaaatatagaggaaaggggccaagattatagtaccagtcacaatcttttgatgaggacgaaatgaatcaggtaacagactgggttgacccatcatttgatgattttctagagtgtagtggcgtctctactattactgccacatcattaggtgtgaataactcaagtcatagaagaaaaaatgggccttctacattagaaagcagcagatttccagcgagaaaaagaggaaatctatcttccttagaacagatttatggtttagaaaattcaaaagaatatctgtctgaaaatgaaccatgggtggataaatataaaccagaaactcagcatgaacttgctgtgcataaaaagaaaattgaagaagtcgaaacctggttaaaagctcaagttttagaaaggcaaccaaaacagggtggatctattttattaataacaggtcctcctggatgtggaaagacaacgaccttaaaaatactatcaaaggagcatggtattcaagtacaagagtggattaatccagttttaccagacttccaaaaagatgatttcaaggggatgtttaatactgaatcaagcttccatatgtttccctatcagtctcagatagcagttttcaaagagtttctactaagagcgacaaagtataacaagttacaaatgcttggagatgatctgagaactgataagaagataattctggttgaagatttacctaaccagttttatcgggattctcatactttacatgaagttctaaggaagtatgtgaggattggtcgatgtcctcttatatttataatctcggacagtctcagtggagataataatcaaaggttattgtttcccaaagaaattcaggaagagtgttctatctcaaatattagtttcaaccctgtggcaccaacaattatgatgaaatttcttaatcgaatagtgactatagaagctaacaagaatggaggaaaaattactgtccctgacaaaacttctctagagttgctctgtcagggatgttctggtgatatcagaagtgcaataaacagcctccagttttcttcttcaaaaggagaaaacaacttacggccaaggaaaaaaggaatgtctttaaaatcagatgctgtgctgtcaaaatcaaaacgaagaaaaaaacctgatagggtttttgaaaatcaagaggtccaagctattggtggcaaagatgtttctctgtttctcttcagagctttggggaaaattctatattgtaaaagagcatctttaacagaattagactcacctcggttgccctctcatttatcagaatatgaacgggatacattacttgttgaacctgaggaggtagtagaaatgtcacacatgcctggagacttatttaatttatatcttcaccaaaactacatagatttcttcatggaaattgatgatattgtgagagccagtgaatttctgagttttgcagatatcctcagtggtgactggaatacacgctctttactcagggaatatagcacatctatagctacgagaggtgtgatgcattccaacaaagcccgaggatatgctcattgccaaggaggaggatcaagttttcgacccttgcacaaacctcagtggtttctaataaataaaaagtatcgggaaaattgcctggcagcaaaagcactttttcctgacttctgcctaccagctttatgcctccaaactcagctattgccataccttgctctactaaccattccaatgagaaatcaagctcagatttcttttatccaagatattggaaggctccctctgaagcgacactttggaagattgaaaatggaagccctgactgacagggaacatggaatgatagaccctgacagcggagatgaagcccagcttaatggaggacattctgcagaggaatctctgggtgaacccactcaagccactgtgccggaaacctggtctcttcctttgagtcagaatagtgccagtgaactgcctgctagccagccccagcccttttcagcccaaggagacatggaagaaaacataataatagaagactacgagagtgatgggacatagaagccagcctgctaatcagattgctacttcacagcttcatttttgtttcattcagtggtacttcagcagagttaatatgcttttctgatgaattacacaacagtttgttaattcttcattcttgtagtatttcatcacaagaaacctactcttctgtcatcttgaagtaaatagaagatcaagccttcaaatctcttaattttttcggtatttattaaatctgtgagtggtttaaggagcggtcagtgtgtataaagtgtgtttgaacattatgccaaatatcaagatgtgaaggactaattcaggatgcaaaaacgttattggggggttgtaaatatcaactattcaacagtttaggatgcaattacgagtgtaaactgtgtgccttatttacactttattgtctcccgcttctcagatagttttgatgtgttgtacagtggaatatcttagatactttttggaaagtatttacataagttatatcacaattaaaatgttgaatttaa

SEQ ID NO: 234781 - DNA, 3060 bp, Artificial Sequence
  derived and/or modified sequence
gaggccgtacctccgagaggctcggcgttgagcccgggtagggccaggtggctgccctttcacctagggtagtccctggtcgcctccgctcttcgcctaaaaggggatgcagctccgggaaacaagtgaattcatggtattttacttttttgggaaatactggaaatgaagacctgcaactgtaatttgaaataaggaaaactttaattttcagtataaaaattgctcaaatagaattgcctgattttaatgacaaaaggtgaattatagtttaatgtactgcaagtcctaaactacggatgggaactattacagtttataatgtcaaaaacttttcttagaccaaaggtatcttccacaaagtatatgggagtccacatttatgtaagaaatgaaactataaaatgtataaataatttgcaaatcagaattgctgtcgaaagttttactataatgaaagatattttcatactctcaaaaatatagaggaaaggggccaagattatagtaccagtcacaatcttttgatgaggacgaaatgaatcaggtaacagactgggttgacccatcatttgatgattttctagagtgtagtggcgtctctactattactgccacatcattaggtgtgaataactcaagtcatagaagaaaaaatgggccttctacattagaaagcagcagatttccagcgagaaaaagaggaaatctatcttccttagaacagatttatggtttagaaaattcaaaagaatatctgtctgaaaatgaaccatgggtggataaatataaaccagaaactcagcatgaacttgctgtgcataaaaagaaaattgaagaagtcgaaacctggttaaaagctcaagttttagaaaggcaaccaaaacagggtggatctattttattaataacaggtcctcctggatgtggaaagacaacgaccttaaaaatactatcaaaggagcatggtattcaagtacaagagtggattaatccagttttaccagacttccaaaaagatgatttcaaggggatgtttaatactgaatcaagcttccatatgtttccctatcagtctcagatagcagttttcaaagagtttctactaagagcgacaaagtataacaagttacaaatgcttggagatgatctgagaactgataagaagataattctggttgaagatttacctaaccagttttatcgggattctcatactttacatgaagttctaaggaagtatgtgaggattggtcgatgtcctcttatatttataatctcggacagtctcagtggagataataatcaaaggttattgtttcccaaagaaattcaggaagagtgttctatctcaaatattagtttcaaccctgtggcaccaacaattatgatgaaatttcttaatcgaatagtgactatagaagctaacaagaatggaggaaaaattactgtccctgacaaaacttctctagagttgctctgtcagggatgttctggtgatatcagaagtgcaataaacagcctccagttttcttcttcaaaaggagaaaacaacttacggccaaggaaaaaaggaatgtctttaaaatcagatgctgtgctgtcaaaatcaaaacgaagaaaaaaacctgatagggtttttgaaaatcaagaggtccaagctattggtggcaaagatgtttctctgtttctcttcagagctttggggaaaattctatattgtaaaagagcatctttaacagaattagactcacctcggttgccctctcatttatcagaatatgaacgggatacattacttgttgaacctgaggaggtagtagaaatgtcacacatgcctggagacttatttaatttatatcttcaccaaaactacatagatttcttcatggaaattgatgatattgtgagagccagtgaatttctgagttttgcagatatcctcagtggtgactggaatacacgctctttactcagggaatatagcacatctatagctacgagaggtgtgatgcattccaacaaagcccgaggatatgctcattgccaaggaggaggatcaagttttcgacccttgcacaaacctcagtggtttctaataaataaaaagtatcgggaaaattgcctggcagcaaaagcactttttcctgacttctgcctaccagctttatgcctccaaactcagctattgccataccttgctctactaaccattccaatgagaaatcaagctcagatttcttttatccaagatattggaaggctccctctgaagcgacactttggaagattgaaaatggaagccctgactgacagggaacatggaatgatagaccctgacagcggagatgaagcccagcttaatggaggacattctgcagaggaatctctgggtgaacccactcaagccactgtgccggaaacctggtctcttcctttgagtcagaatagtgccagtgaactgcctgctagccagccccagcccttttcagcccaaggagacatggaagaaaacataataatagaagactacgagagtgatgggacatagaagccagcctgctaatcagattgctacttcacagcttcatttttgtttcattcagtggtacttcagcagagttaatatgcttttctgatgaattacacaacagtttgttaattcttcattcttgtagtatttcatcacaagaaacctactcttctgtcatcttgaagtaaatagaagatcaagccttcaaatctcttaattttttcggtatttattaaatctgtgagtggtttaaggagcggtcagtgtgtataaagtgtgtttgaacattatgccaaatatcaagatgtgaaggactaattcaggatgcaaaaacgttattggggggttgtaaatatcaactattcaacagtttaggatgcaattacgagtgtaaactgtgtgccttatttacactttattgtctcccgcttctcagatagttttgatgtgttgtacagtggaatatcttagatactttttggaaagtatttacataagttatatcacaattaaaatgttgaatttaa

SEQ ID NO: 234782 - DNA, 3002 bp, Artificial Sequence
  derived and/or modified sequence
gcaacgcccgcgagggtcggctcccggggcgctgacaaccgcctcgtggccctcggccggcctctgaagagggcagtgaggggcccccacctgggcgcccgatgcccagagcactctgcgcccccagcctgccccagcccagtccctcccggccgcgcgccctgaccgcaagtgaattcatggtattttacttttttgggaaatactggaaatgaagacctgcaactgtaatttgaaataaggaaaactttaattttcagtataaaaattgctcaaatagaattgcctgattttaatgacaaaagtatatgggagtccacatttatgtaagaaatgaaactataaaatgtataaataatttgcaaatcagaattgctgtcgaaagttttactataatgaaagatattttcatactctcaaaaatatagaggaaaggggccaagattatagtaccagtcacaatcttttgatgaggacgaaatgaatcaggtaacagactgggttgacccatcatttgatgattttctagagtgtagtggcgtctctactattactgccacatcattaggtgtgaataactcaagtcatagaagaaaaaatgggccttctacattagaaagcagcagatttccagcgagaaaaagaggaaatctatcttccttagaacagatttatggtttagaaaattcaaaagaatatctgtctgaaaatgaaccatgggtggataaatataaaccagaaactcagcatgaacttgctgtgcataaaaagaaaattgaagaagtcgaaacctggttaaaagctcaagttttagaaaggcaaccaaaacagggtggatctattttattaataacaggtcctcctggatgtggaaagacaacgaccttaaaaatactatcaaaggagcatggtattcaagtacaagagtggattaatccagttttaccagacttccaaaaagatgatttcaaggggatgtttaatactgaatcaagcttccatatgtttccctatcagtctcagatagcagttttcaaagagtttctactaagagcgacaaagtataacaagttacaaatgcttggagatgatctgagaactgataagaagataattctggttgaagatttacctaaccagttttatcgggattctcatactttacatgaagttctaaggaagtatgtgaggattggtcgatgtcctcttatatttataatctcggacagtctcagtggagataataatcaaaggttattgtttcccaaagaaattcaggaagagtgttctatctcaaatattagtttcaaccctgtggcaccaacaattatgatgaaatttcttaatcgaatagtgactatagaagctaacaagaatggaggaaaaattactgtccctgacaaaacttctctagagttgctctgtcagggatgttctggtgatatcagaagtgcaataaacagcctccagttttcttcttcaaaaggagaaaacaacttacggccaaggaaaaaaggaatgtctttaaaatcagatgctgtgctgtcaaaatcaaaacgaagaaaaaaacctgatagggtttttgaaaatcaagaggtccaagctattggtggcaaagatgtttctctgtttctcttcagagctttggggaaaattctatattgtaaaagagcatctttaacagaattagactcacctcggttgccctctcatttatcagaatatgaacgggatacattacttgttgaacctgaggaggtagtagaaatgtcacacatgcctggagacttatttaatttatatcttcaccaaaactacatagatttcttcatggaaattgatgatattgtgagagccagtgaatttctgagttttgcagatatcctcagtggtgactggaatacacgctctttactcagggaatatagcacatctatagctacgagaggtgtgatgcattccaacaaagcccgaggatatgctcattgccaaggaggaggatcaagttttcgacccttgcacaaacctcagtggtttctaataaataaaaagtatcgggaaaattgcctggcagcaaaagcactttttcctgacttctgcctaccagctttatgcctccaaactcagctattgccataccttgctctactaaccattccaatgagaaatcaagctcagatttcttttatccaagatattggaaggctccctctgaagcgacactttggaagattgaaaatggaagccctgactgacagggaacatggaatgatagaccctgacagcggagatgaagcccagcttaatggaggacattctgcagaggaatctctgggtgaacccactcaagccactgtgccggaaacctggtctcttcctttgagtcagaatagtgccagtgaactgcctgctagccagccccagcccttttcagcccaaggagacatggaagaaaacataataatagaagactacgagagtgatgggacatagaagccagcctgctaatcagattgctacttcacagcttcatttttgtttcattcagtggtacttcagcagagttaatatgcttttctgatgaattacacaacagtttgttaattcttcattcttgtagtatttcatcacaagaaacctactcttctgtcatcttgaagtaaatagaagatcaagccttcaaatctcttaattttttcggtatttattaaatctgtgagtggtttaaggagcggtcagtgtgtataaagtgtgtttgaacattatgccaaatatcaagatgtgaaggactaattcaggatgcaaaaacgttattggggggttgtaaatatcaactattcaacagtttaggatgcaattacgagtgtaaactgtgtgccttatttacactttattgtctcccgcttctcagatagttttgatgtgttgtacagtggaatatcttagatactttttggaaagtatttacataagttatatcacaattaaaatgttgaatttaa

SEQ ID NO: 234783 - DNA, 859 bp, Artificial Sequence
  derived and/or modified sequence
ctcgcatcttcagggacagttatctgctttttaaaggagcaagtgaattcatggtattttacttttttgggaaatactggaaatgaagacctgcaactgtaatttgaaataaggaaaactttaattttcagtataaaaattgctcaaatagaattgcctgattttaatgacaaaagtatatgggagtccacatttatgtaagaaatgaaactataaaatgtataaataatttgcaaatcagaattgctgtcgaaagttttactataatgaaagatattttcatactctcaaaaatatagaggaaaggggccaagattatagtaccagtcacaatcttttgatgaggacgaaatgaatcaggtaacagactgggttgacccatcatttgatgattttctagagtgtagtggcgtctctactattactgccacatcattaggtgtgaataactcaagtcatagaagaaaaaatgggccttctacattagaaagcagcagatttccagcgagaaaaagaggaaatctatcttccttagaacagatttatggtttagaaaattcaaaagaatatctgtctgaaaatgaaccatgggtggataaatataaaccagaaactcagcatgaacttgctgtgcataaaaagaaaattgaagaagtcgaaacctggttaaaagctcaagttttagaaaggcaaccaaaacagggtggatctattttattaataacaggtcctcctggatgtggaaagacaacgaccttaaaaatactatcaaaggagcatggtattcaagtacaagagtggattaatccagttttaccagacttccaaaaagatgatttcaaggggatgtttaatactg

SEQ ID NO: 234784 - DNA, 496 bp, Artificial Sequence
  derived and/or modified sequence
gggtcggctcccggggcgctgacaaccgcctcgtggccctcggccggcctctgaagagggcagtgaggggcccccacctgggcgcccgatgcccagagcactctgcgcccccagcctgccccagcccagtccctcccggccgcgcgccctgaccggtgaattatagtttaatgtactgcaagtcctaaactacggatgggaactattacagtttataatgtcaaaaacttttcttagaccaaaggtatcttccacaaagtatatgggagtccacatttatgtaagaaatgaaactataaaatgtataaataatttgcaaatcagaattgctgtcgaaagttttactataatgaaagatattttcatactctcaaaaatatagaggaaaggggccaagattatagtaccagtcacaatcttttgatgaggacgaaatgaatcaggtaacagactgggttgacccatcatttgatgattttctagagtgtagtggcgt

SEQ ID NO: 234785 - protein, 802 aa, Artificial Sequence
  derived and/or modified sequence
MAGTSERSLISSISQPKAIECFEVKKKAFLTHGRYHGSGATPPKTKDPKPETFCGQTGLPTMEVRINVSRQQVEKVFGLEEYWCQCVAWSSSGTTKSQKAYIRIAYLRKNFEQEPLAKEVSLEQGIVLPCRPPEGIPPAEVEWLRNEDLVDPSLDPNVYITREHSLVVRQARLADTANYTCVAKNIVARRRSASAAVIVYVDGSWSPWSKWSACGLDCTHWRSRECSDPAPRNGGEECQGTDLDTRNCTSDLCVHTASGPEDVALYVGLIAVAVCLVLLLLVLILVYCRKKEGLDSDVADSSILTSGFQPVSIKPSKADNPHLLTIQPDLSTTTTTYQGSLCPRQDGPSPKFQLTNGHLLSPLGGGRHTLHHSSPTSEAEEFVSRLSTQNYFRSLPRGTSNMTYGTFNFLGGRLMIPNTGISLLIPPDAIPRGKIYEIYLTLHKPEDVRLPLAGCQTLLSPIVSCGPPGVLLTRPVILAMDHCGEPSPDSWSLRLKKQSCEGSWEDVLHLGEEAPSHLYYCQLEASACYVFTEQLGRFALVGEALSVAAAKRLKLLLFAPVACTSLEYNIRVYCLHDTHDALKEVVQLEKQLGGQLIQEPRVLHFKDSYHNLRLSIHDVPSSLWKSKLLVSYQEIPFYHIWNGTQRYLHCTFTLERVSPSTSDLACKLWVWQVEGDGQSFSINFNITKDTRFAELLALESEAGVPALVGPSAFKIPFLIRQKIISSLDPPCRRGADWRTLAQKLHLDSHLSFFASKPSPTAMILNLWEARHFPNGNLSQLAAAVAGLGQPDAGLFTVSEAEC

SEQ ID NO: 234786 - protein, 842 aa, Artificial Sequence
  derived and/or modified sequence
MAVRPGLWPALLGIVLAAWLRGSGAQQSATVANPVPGANPDLLPHFLVEPEDVYIVKNKPVLLVCKAVPATQIFFKCNGEWVRQVDHVIERSTDGSSGLPTMEVRINVSRQQVEKVFGLEEYWCQCVAWSSSGTTKSQKAYIRIAYLRKNFEQEPLAKEVSLEQGIVLPCRPPEGIPPAEVEWLRNEDLVDPSLDPNVYITREHSLVVRQARLADTANYTCVAKNIVARRRSASAAVIVYVDGSWSPWSKWSACGLDCTHWRSRECSDPAPRNGGEECQGTDLDTRNCTSDLCVHTASGPEDVALYVGLIAVAVCLVLLLLVLILVYCRKKEGLDSDVADSSILTSGFQPVSIKPSKADNPHLLTIQPDLSTTTTTYQGSLCPRQDGPSPKFQLTNGHLLSPLGGGRHTLHHSSPTSEAEEFVSRLSTQNYFRSLPRGTSNMTYGTFNFLGGRLMIPNTGISLLIPPDAIPRGKIYEIYLTLHKPEDVRLPLAGCQTLLSPIVSCGPPGVLLTRPVILAMDHCGEPSPDSWSLRLKKQSCEGSWEDVLHLGEEAPSHLYYCQLEASACYVFTEQLGRFALVGEALSVAAAKRLKLLLFAPVACTSLEYNIRVYCLHDTHDALKEVVQLEKQLGGQLIQEPRVLHFKDSYHNLRLSIHDVPSSLWKSKLLVSYQEIPFYHIWNGTQRYLHCTFTLERVSPSTSDLACKLWVWQVEGDGQSFSINFNITKDTRFAELLALESEAGVPALVGPSAFKIPFLIRQKIISSLDPPCRRGADWRTLAQKLHLDSHLSFFASKPSPTAMILNLWEARHFPNGNLSQLAAAVAGLGQPDAGLFTVSEAEC

SEQ ID NO: 234787 - DNA, 2409 bp, Artificial Sequence
  derived and/or modified sequence
atggccggcaccagcgagagaagcctgatcagcagcatcagccagcccaaggccatcgagtgcttcgaggtgaagaagaaggccttcctgacccacggcagataccacggcagcggcgccaccccccccaagaccaaggaccccaagcccgagaccttctgcggccagaccggcctgcccaccatggaggtgagaatcaacgtgagcagacagcaggtggagaaggtgttcggcctggaggagtactggtgccagtgcgtggcctggagcagcagcggcaccaccaagagccagaaggcctacatcagaatcgcctacctgagaaagaacttcgagcaggagcccctggccaaggaggtgagcctggagcagggcatcgtgctgccctgcagaccccccgagggcatcccccccgccgaggtggagtggctgagaaacgaggacctggtggaccccagcctggaccccaacgtgtacatcaccagagagcacagcctggtggtgagacaggccagactggccgacaccgccaactacacctgcgtggccaagaacatcgtggccagaagaagaagcgccagcgccgccgtgatcgtgtacgtggacggcagctggagcccctggagcaagtggagcgcctgcggcctggactgcacccactggagaagcagagagtgcagcgaccccgcccccagaaacggcggcgaggagtgccagggcaccgacctggacaccagaaactgcaccagcgacctgtgcgtgcacaccgccagcggccccgaggacgtggccctgtacgtgggcctgatcgccgtggccgtgtgcctggtgctgctgctgctggtgctgatcctggtgtactgcagaaagaaggagggcctggacagcgacgtggccgacagcagcatcctgaccagcggcttccagcccgtgagcatcaagcccagcaaggccgacaacccccacctgctgaccatccagcccgacctgagcaccaccaccaccacctaccagggcagcctgtgccccagacaggacggccccagccccaagttccagctgaccaacggccacctgctgagccccctgggcggcggcagacacaccctgcaccacagcagccccaccagcgaggccgaggagttcgtgagcagactgagcacccagaactacttcagaagcctgcccagaggcaccagcaacatgacctacggcaccttcaacttcctgggcggcagactgatgatccccaacaccggcatcagcctgctgatcccccccgacgccatccccagaggcaagatctacgagatctacctgaccctgcacaagcccgaggacgtgagactgcccctggccggctgccagaccctgctgagccccatcgtgagctgcggcccccccggcgtgctgctgaccagacccgtgatcctggccatggaccactgcggcgagcccagccccgacagctggagcctgagactgaagaagcagagctgcgagggcagctgggaggacgtgctgcacctgggcgaggaggcccccagccacctgtactactgccagctggaggccagcgcctgctacgtgttcaccgagcagctgggcagattcgccctggtgggcgaggccctgagcgtggccgccgccaagagactgaagctgctgctgttcgcccccgtggcctgcaccagcctggagtacaacatcagagtgtactgcctgcacgacacccacgacgccctgaaggaggtggtgcagctggagaagcagctgggcggccagctgatccaggagcccagagtgctgcacttcaaggacagctaccacaacctgagactgagcatccacgacgtgcccagcagcctgtggaagagcaagctgctggtgagctaccaggagatccccttctaccacatctggaacggcacccagagatacctgcactgcaccttcaccctggagagagtgagccccagcaccagcgacctggcctgcaagctgtgggtgtggcaggtggagggcgacggccagagcttcagcatcaacttcaacatcaccaaggacaccagattcgccgagctgctggccctggagagcgaggccggcgtgcccgccctggtgggccccagcgccttcaagatccccttcctgatcagacagaagatcatcagcagcctggaccccccctgcagaagaggcgccgactggagaaccctggcccagaagctgcacctggacagccacctgagcttcttcgccagcaagcccagccccaccgccatgatcctgaacctgtgggaggccagacacttccccaacggcaacctgagccagctggccgccgccgtggccggcctgggccagcccgacgccggcctgttcaccgtgagcgaggccgagtgctag

SEQ ID NO: 234788 - DNA, 2529 bp, Artificial Sequence
  derived and/or modified sequence
atggccgtgagacccggcctgtggcccgccctgctgggcatcgtgctggccgcctggctgagaggcagcggcgcccagcagagcgccaccgtggccaaccccgtgcccggcgccaaccccgacctgctgccccacttcctggtggagcccgaggacgtgtacatcgtgaagaacaagcccgtgctgctggtgtgcaaggccgtgcccgccacccagatcttcttcaagtgcaacggcgagtgggtgagacaggtggaccacgtgatcgagagaagcaccgacggcagcagcggcctgcccaccatggaggtgagaatcaacgtgagcagacagcaggtggagaaggtgttcggcctggaggagtactggtgccagtgcgtggcctggagcagcagcggcaccaccaagagccagaaggcctacatcagaatcgcctacctgagaaagaacttcgagcaggagcccctggccaaggaggtgagcctggagcagggcatcgtgctgccctgcagaccccccgagggcatcccccccgccgaggtggagtggctgagaaacgaggacctggtggaccccagcctggaccccaacgtgtacatcaccagagagcacagcctggtggtgagacaggccagactggccgacaccgccaactacacctgcgtggccaagaacatcgtggccagaagaagaagcgccagcgccgccgtgatcgtgtacgtggacggcagctggagcccctggagcaagtggagcgcctgcggcctggactgcacccactggagaagcagagagtgcagcgaccccgcccccagaaacggcggcgaggagtgccagggcaccgacctggacaccagaaactgcaccagcgacctgtgcgtgcacaccgccagcggccccgaggacgtggccctgtacgtgggcctgatcgccgtggccgtgtgcctggtgctgctgctgctggtgctgatcctggtgtactgcagaaagaaggagggcctggacagcgacgtggccgacagcagcatcctgaccagcggcttccagcccgtgagcatcaagcccagcaaggccgacaacccccacctgctgaccatccagcccgacctgagcaccaccaccaccacctaccagggcagcctgtgccccagacaggacggccccagccccaagttccagctgaccaacggccacctgctgagccccctgggcggcggcagacacaccctgcaccacagcagccccaccagcgaggccgaggagttcgtgagcagactgagcacccagaactacttcagaagcctgcccagaggcaccagcaacatgacctacggcaccttcaacttcctgggcggcagactgatgatccccaacaccggcatcagcctgctgatcccccccgacgccatccccagaggcaagatctacgagatctacctgaccctgcacaagcccgaggacgtgagactgcccctggccggctgccagaccctgctgagccccatcgtgagctgcggcccccccggcgtgctgctgaccagacccgtgatcctggccatggaccactgcggcgagcccagccccgacagctggagcctgagactgaagaagcagagctgcgagggcagctgggaggacgtgctgcacctgggcgaggaggcccccagccacctgtactactgccagctggaggccagcgcctgctacgtgttcaccgagcagctgggcagattcgccctggtgggcgaggccctgagcgtggccgccgccaagagactgaagctgctgctgttcgcccccgtggcctgcaccagcctggagtacaacatcagagtgtactgcctgcacgacacccacgacgccctgaaggaggtggtgcagctggagaagcagctgggcggccagctgatccaggagcccagagtgctgcacttcaaggacagctaccacaacctgagactgagcatccacgacgtgcccagcagcctgtggaagagcaagctgctggtgagctaccaggagatccccttctaccacatctggaacggcacccagagatacctgcactgcaccttcaccctggagagagtgagccccagcaccagcgacctggcctgcaagctgtgggtgtggcaggtggagggcgacggccagagcttcagcatcaacttcaacatcaccaaggacaccagattcgccgagctgctggccctggagagcgaggccggcgtgcccgccctggtgggccccagcgccttcaagatccccttcctgatcagacagaagatcatcagcagcctggaccccccctgcagaagaggcgccgactggagaaccctggcccagaagctgcacctggacagccacctgagcttcttcgccagcaagcccagccccaccgccatgatcctgaacctgtgggaggccagacacttccccaacggcaacctgagccagctggccgccgccgtggccggcctgggccagcccgacgccggcctgttcaccgtgagcgaggccgagtgctag

SEQ ID NO: 234789 - DNA, 2409 bp, Artificial Sequence
  derived and/or modified sequence
atggcaggaacaagtgaaaggtctctgatttcctcaatcagccagccaaaggcgattgagtgtttcgaggtgaagaagaaggcattcctgacacacggaaggtaccacggcagtggagccacacctcctaaaactaaggatccgaaacccgaaacattctgtggccagaccggactgcctactatggaagttaggattaacgttagcaggcagcaagtagaaaaagtgtttggtctggaggaatactggtgtcagtgcgtggcctggagcagcagtgggacgacaaagagccaaaaagcctacatccggatcgcatatttgcggaagaattttgaacaggagcctttagcaaaggaggtctccctcgagcagggcatagttttaccatgcagaccccccgagggcatcccgccagctgaggtggagtggttgaggaatgaggacctggtggacccctctttagaccccaatgtgtacattactcgggagcactcgctggtagtgagacaggcccgactggcagacacagccaattatacatgtgttgccaaaaacattgtggccagaagaagatccgcgtccgctgctgtcatcgtgtatgtggatggcagctggtccccctggagcaaatggtcggcttgtggcctcgattgcacccactggaggagtcgagaatgttctgaccctgcacctcgaaacgggggggaagagtgtcagggaaccgacttggacactcgaaactgtacgtcagatctgtgtgtgcacactgccagcggaccggaagacgtagccctatacgttgggctgattgcggtggccgtgtgtttagttttactcctattagtgcttattctcgtctactgtaggaagaaggagggactggactccgatgtagccgactcttctatccttacttccgggtttcagccagtctccatcaagccttctaaggccgataacccacacctcctgaccattcagcctgatttgtccactacgactactacttaccagggcagcctgtgtccccgtcaggacggaccttcaccaaagttccagctcaccaacggacatctcctgtcccctctgggaggcgggagacatacactgcaccattcatctcccacttcagaagcggaagagttcgtctcacggctgtctacccaaaactattttcggtccctgccgcggggcacaagcaacatgacttacgggacctttaacttcctgggagggaggctaatgatacctaacaccggaatctctctcctgattccccccgacgcgattcctcgggggaagatatacgagatctacctgactctgcataagccggaggacgttcggctgcccctggcaggctgtcagaccttactgagtccaatcgtaagttgtggtcctcctggggtgcttcttaccagacccgtgatcttagcgatggaccactgtggcgagccatccccagattcatggtccctgcgcctgaaaaagcaatcttgtgaggggtcttgggaggatgtattacacctgggtgaggaagccccctcacacctgtactattgccaattggaggcctccgcgtgttacgtgtttaccgagcaattagggcgcttcgcactcgtcggcgaagcgctctccgttgcagcagccaagagactgaaattgcttctgttcgcccctgtggcctgcacatctttggaatacaatatcagagtctattgccttcatgatactcacgatgctctcaaggaggtcgtccaactggagaagcagctgggtgggcagttgatccaagagcctagagtcctacatttcaaagattcatatcataacctgcgattgtctatccacgacgtccctagttccctgtggaagagcaagctactagtctcctaccaggaaattccattttatcacatatggaacgggactcaacgttatctccattgtacctttactctggagcgcgtttctccatccacatctgacttggcatgcaaactctgggtatggcaggtggagggagacggtcagagttttagtatcaacttcaatatcacaaaggacacccggttcgctgagttactggcgctggaaagtgaagccggggtgcctgctctcgtgggacctagtgcctttaagatcccctttcttattaggcagaaaatcatttcaagcctggatcccccatgccgtcgtggggcagactggcgcacactggcgcagaagctccacctcgacagtcatctgtcattctttgcatcaaaaccctcacctaccgcaatgattcttaatctgtgggaagctcgacattttccgaacggaaaccttagccagctcgccgcagcggtggccggacttggacagcccgatgccggtttattcactgtgtcagaggctgagtgttag

SEQ ID NO: 234790 - DNA, 2529 bp, Artificial Sequence
  derived and/or modified sequence
atggctgttcgacccggtctgtggccagccctactgggcatcgtcctggccgcttggttgcgggggtctggggcacaacagagtgctaccgtcgcaaaccccgtaccaggtgctaaccccgatttgctccctcattttctggttgagcccgaggacgtgtacattgtcaagaataaacctgtgcttttggtttgcaaagctgtgcccgcgacgcaaatatttttcaaatgcaacggggaatgggtcaggcaggtggatcatgtcattgaacgcagcactgatgggtcctccggcctgcctaccatggaagtccgcattaacgtctctcgccagcaggttgaaaaggtgttcggactggaggaatattggtgccaatgtgtggcatggtcttcctcaggcactactaaatctcagaaggcatacatccgcatcgcctatctgcggaagaacttcgagcaagaaccactggccaaggaggtctcattggagcaggggatagtgctcccgtgtcggcctcccgaggggattccccccgccgaggtcgaatggctacgcaacgaagatttagtcgatcctagcctggaccctaacgtgtacatcactagagagcacagcttggtcgtccgccaggccaggctggctgatacagcaaactacacctgcgtcgccaagaatatcgtcgcccggcgacggtccgcatccgctgctgttatcgtctacgtagacggctcatggtccccatggtcaaagtggtccgcctgcggcctcgactgtacacactggaggagcagagaatgctcagaccctgcaccccggaatggaggagaggagtgccagggcaccgatctggatacccggaactgcacaagcgatttatgcgtacacaccgcctccggtcctgaagacgtggccctttacgtcggcctaattgcagttgccgtgtgtttggtgctgttacttctggtgctcattctggtttactgccgcaagaaagaggggctggattctgacgtcgccgactctagcattcttacttccggcttccaacctgttagtatcaagccctccaaggcagataacccacaccttcttaccatacaacctgatctctcaaccaccactacaacataccaggggtcattgtgcccgagacaggacggtccgtcacctaaatttcagctgactaacggacatttgctgtcacctctgggcggcgggagacatacactgcatcatagtagcccaaccagtgaggcggaggagtttgtatcgaggctgtccacgcagaactattttcggagcctgccaagggggacctcaaacatgacctacggtactttcaatttcttggggggacgcctgatgattccaaacacaggcatttcactcctcatacccccagatgcgatcccacgtgggaaaatttacgagatctatctgaccctccataagccggaagacgtaaggttgcctcttgccggatgccagaccctcctatctcctattgtctcatgtggaccaccgggagtcctcttgaccaggcccgtcattttagcaatggatcactgtggcgagccctccccagattcttggagtcttcgcctgaaaaagcaatcttgcgagggtagctgggaagacgttcttcacctgggagaagaagcaccttcccacctatactactgccagcttgaggcttcggcttgttacgtattcaccgagcagctgggccggttcgcgttagtgggcgaggctctgagtgttgctgctgctaagagactcaagttgctgctgttcgcacccgtcgcatgcacttcgttggaatataacatcagggtgtactgtctgcatgacactcatgatgctctgaaagaagttgttcaattggaaaagcagttgggcggtcaactcattcaggagccaagagtcctccactttaaggatagctaccataatctcagattgtcaattcacgacgttccgagctcgctgtggaagtctaagctccttgtctcataccaggaaatccccttctaccacatctggaacggcacacagaggtacctgcattgtaccttcacccttgaacgggtctctccttccacaagtgatctcgcatgtaaactgtgggtgtggcaggtggagggggacggacagtcattctccattaattttaacattactaaggatacccggtttgctgaactgttagcactggagagtgaggcaggagtgcccgccctggtcggcccttccgcatttaagattccgtttttaatccgtcagaagattataagctccctcgatcccccttgtcgaagaggcgcagattggcgtaccctagcccagaaactccatctggacagtcacctttctttttttgcctcaaagccctcccccacagcgatgatccttaatctgtgggaggcaagacactttcctaacggcaatctgtctcagctggccgcagccgtggcagggcttggacagccggacgcagggctgttcacagtttcggaggccgagtgttag

SEQ ID NO: 234791 - DNA, 2409 bp, Artificial Sequence
  derived and/or modified sequence
atggccggcaccagcgagaggagcctcatcagcagcatcagccagcccaaggccatcgagtgctttgaggtgaagaagaaggccttcctgacccacggccgctaccacggcagcggggccaccccacccaagaccaaggaccccaagccagagaccttctgtggccagacaggcctgcccaccatggaggtgcgcatcaacgtgtcccggcagcaggtggagaaggtgtttggcctggaggagtactggtgccagtgtgtggcctggagcagcagcggcaccaccaagagccagaaggcctacatccgcatcgcctacctgaggaagaactttgagcaggagcccctggccaaggaggtgtccctggagcagggcatcgtgctgccctgccggcccccagagggcatccccccagctgaggtggagtggctgagaaatgaagacctggtggaccccagcctggaccccaacgtgtacatcacccgggagcacagcctggtggtgcggcaggcccggctggccgacacagccaactacacctgtgtggccaagaacatcgtggcccggcggcgcagcgccagcgctgctgtgattgtgtatgtggatggctcctggagcccctggagcaagtggagcgcctgtggcctggactgcacccactggaggagcagagaatgtagtgaccctgcccccagaaatggaggagaggagtgccagggcacagacctggacaccaggaactgcaccagtgacctgtgtgtgcacacagccagcggcccagaagatgtggccctgtatgtgggcctgattgctgtggccgtgtgcctggtgctgctgctgctggtgctgatcctggtgtactgcaggaagaaggagggcctggacagtgatgtggccgacagcagcatcctgaccagcggcttccagcctgtgtccatcaagcccagcaaggctgacaacccccacctgctgaccatccagcctgacctgagcaccaccaccaccacctaccagggcagcctgtgcccccggcaggacggccccagccccaagttccagctgaccaacggccacctgctgagccccctgggcggcggccgccacaccctgcaccacagcagccccaccagcgaggccgaggagtttgtgtcccggctgagcacccagaactacttccgcagcctgccccggggcaccagcaacatgacctacggcaccttcaacttcctgggcggccgcctgatgatccccaacacaggcatcagcctgctgatccccccagatgccatcccccggggcaagatctatgagatctacctgaccctgcacaagccagaagatgtgcggctgcccctggccggctgccagaccctgctgagccccatcgtgtcctgtggccccccaggagtgctgctgaccaggcctgtgatcctggccatggaccactgtggggagcccagcccagacagctggagcctgcggctgaagaagcagagctgtgagggctcctgggaggatgtgctgcacctgggggaggaggcccccagccacctgtactactgccagctggaggccagcgcctgctacgtgttcacagagcagctgggccgctttgccctggtgggggaggccctgtctgtggccgccgccaagaggctgaagctgctgctgtttgcccctgtggcctgcaccagcctggagtacaacatccgggtgtactgcctgcatgacacccatgatgccctgaaggaggtggtgcagctggagaagcagctgggcggccagctgatccaggagccccgggtgctgcacttcaaggacagctaccacaacctgcggctgagcatccatgatgtgcccagcagcctgtggaagagcaagctgctggtgtcctaccaggagatccccttctaccacatctggaatggcacccagcgctacctgcactgcaccttcaccctggagcgggtgagccccagcaccagtgacctggcctgcaagctgtgggtgtggcaggtggagggagatggccagagcttcagcatcaacttcaacatcaccaaggacaccaggtttgctgagctgctggccctggagagcgaggccggcgtgcctgccctggtgggccccagcgccttcaagatccccttcctgatccggcagaagatcatcagcagcctggaccccccctgcagaagaggagctgactggaggaccctggcccagaagctgcacctggacagccacctgtccttctttgccagcaagcccagccccacagccatgatcctgaacctgtgggaggcccggcacttccccaacggcaacctgagccagctggccgctgctgtggccggcctgggccagccagatgctggcctcttcaccgtgtctgaggctgaatgttag

SEQ ID NO: 234792 - DNA, 2529 bp, Artificial Sequence
  derived and/or modified sequence
atggctgtgcggcccggcctgtggccagccctgctgggcatcgtgctggccgcctggctgcggggcagcggggcccagcagagcgccaccgtggccaaccctgtgcctggggccaacccagacctgctgccccacttcctggtggagccagaagatgtgtacatcgtgaagaacaagcctgtgctgctggtgtgcaaggctgtgcctgccacccagatcttcttcaagtgcaatggagagtgggtgcggcaggtggaccacgtgattgaaagaagcacagatggcagcagcggcctgcccaccatggaggtgcgcatcaacgtgtcccggcagcaggtggagaaggtgtttggcctggaggagtactggtgccagtgtgtggcctggagcagcagcggcaccaccaagagccagaaggcctacatccgcatcgcctacctgaggaagaactttgagcaggagcccctggccaaggaggtgtccctggagcagggcatcgtgctgccctgccggcccccagagggcatccccccagctgaggtggagtggctgagaaatgaagacctggtggaccccagcctggaccccaacgtgtacatcacccgggagcacagcctggtggtgcggcaggcccggctggccgacacagccaactacacctgtgtggccaagaacatcgtggcccggcggcgcagcgccagcgctgctgtgattgtgtatgtggatggctcctggagcccctggagcaagtggagcgcctgtggcctggactgcacccactggaggagcagagaatgtagtgaccctgcccccagaaatggaggagaggagtgccagggcacagacctggacaccaggaactgcaccagtgacctgtgtgtgcacacagccagcggcccagaagatgtggccctgtatgtgggcctgattgctgtggccgtgtgcctggtgctgctgctgctggtgctgatcctggtgtactgcaggaagaaggagggcctggacagtgatgtggccgacagcagcatcctgaccagcggcttccagcctgtgtccatcaagcccagcaaggctgacaacccccacctgctgaccatccagcctgacctgagcaccaccaccaccacctaccagggcagcctgtgcccccggcaggacggccccagccccaagttccagctgaccaacggccacctgctgagccccctgggcggcggccgccacaccctgcaccacagcagccccaccagcgaggccgaggagtttgtgtcccggctgagcacccagaactacttccgcagcctgccccggggcaccagcaacatgacctacggcaccttcaacttcctgggcggccgcctgatgatccccaacacaggcatcagcctgctgatccccccagatgccatcccccggggcaagatctatgagatctacctgaccctgcacaagccagaagatgtgcggctgcccctggccggctgccagaccctgctgagccccatcgtgtcctgtggccccccaggagtgctgctgaccaggcctgtgatcctggccatggaccactgtggggagcccagcccagacagctggagcctgcggctgaagaagcagagctgtgagggctcctgggaggatgtgctgcacctgggggaggaggcccccagccacctgtactactgccagctggaggccagcgcctgctacgtgttcacagagcagctgggccgctttgccctggtgggggaggccctgtctgtggccgccgccaagaggctgaagctgctgctgtttgcccctgtggcctgcaccagcctggagtacaacatccgggtgtactgcctgcatgacacccatgatgccctgaaggaggtggtgcagctggagaagcagctgggcggccagctgatccaggagccccgggtgctgcacttcaaggacagctaccacaacctgcggctgagcatccatgatgtgcccagcagcctgtggaagagcaagctgctggtgtcctaccaggagatccccttctaccacatctggaatggcacccagcgctacctgcactgcaccttcaccctggagcgggtgagccccagcaccagtgacctggcctgcaagctgtgggtgtggcaggtggagggagatggccagagcttcagcatcaacttcaacatcaccaaggacaccaggtttgctgagctgctggccctggagagcgaggccggcgtgcctgccctggtgggccccagcgccttcaagatccccttcctgatccggcagaagatcatcagcagcctggaccccccctgcagaagaggagctgactggaggaccctggcccagaagctgcacctggacagccacctgtccttctttgccagcaagcccagccccacagccatgatcctgaacctgtgggaggcccggcacttccccaacggcaacctgagccagctggccgctgctgtggccggcctgggccagccagatgctggcctcttcaccgtgtctgaggctgaatgttag

SEQ ID NO: 234793 - DNA, 2409 bp, Artificial Sequence
  derived and/or modified sequence
atggccggcaccagcgagcggagcctgatcagcagcatcagccagcctaaggcgattgagtgcttcgaggtgaagaaaaaggccttcctgactcacggacggtatcatggttccggtgcaactcctcctaagaccaaagatccaaaacctgagactttctgtggtcagacaggcctgccgacaatggaggtgagaatcaatgtgagtcggcagcaggtcgagaaggttttcggtctggaagagtattggtgtcaatgtgtggcctggtctagttccggtacaactaaatctcagaaggcctatattcggattgcatacttgcggaaaaactttgaacaggagccgttggctaaggaggtgtctcttgaacaggggattgtgcttccctgcaggccaccagaaggaataccccctgctgaggtcgagtggctcaggaatgaagatttagtggacccctcactcgatccaaatgtatatattacccgcgagcactcgcttgtggtgagacaagccaggcttgctgacactgctaattatacatgtgttgctaaaaacatcgtagcgagaaggcggtctgctagtgccgccgtgattgtctacgttgacggatcatggagtccatggtctaagtggagcgcttgtgggcttgattgtactcactggagatcccgggaatgctctgacccagccccccggaatggaggagaagaatgtcagggaaccgacctggacacccggaactgtacatctgacctttgtgtgcacacagcatctggaccagaagatgtggctctgtatgtaggcctgattgctgtcgccgtatgtctggtactgttgctgctcgttctcatcctggtctactgcagaaagaaggagggattggatagcgacgtggccgactccagcatcctgacgtctggctttcaacccgtctcaattaaaccttccaaggccgacaatcctcatctgctgacaatccagccggatctgtcaactaccaccaccacataccaaggaagtttatgccctcggcaggacggtcccagtcccaaattccagctgacaaatggacatctattatctcccctgggaggggggcgacatacactacatcacagctcgccgacatctgaggcagaagagtttgtaagccggctcagcacccagaattatttcaggtcgctgccccgtggcacgagcaatatgacctacgggacttttaatttcctagggggacggctgatgatcccaaacactggtataagtctgctgatcccccccgacgccatcccacgtggaaaaatttatgagatctacctgaccctgcacaagcctgaggatgtacggctgcctctggctggctgccagaccctcctgtctcccattgtttcatgcgggccgccgggagtgctgttaacaagacctgttattctagccatggatcattgtggagagcctagcccagacagctggtccctgcgccttaagaaacagagctgcgagggcagttgggaagacgtcctgcatttaggagaagaagcaccctctcatctgtactactgccaactggaagcgagcgcatgctatgtgtttacagagcagctaggacgctttgcattagttggggaggccctgtccgtagctgctgcaaagcgcctaaagctgctactatttgcccctgttgcatgtacttctctggaatataatattcgggtctattgcctccacgacactcacgatgccctgaaagaggttgtacagctggagaaacagctaggggggcagctgatacaggagcctagggtacttcacttcaaggattcgtatcacaacttgcgattatcaatacatgatgtcccgtcttcactttggaagtcaaaacttttggtgtcctaccaggaaatccccttttatcatatttggaatggcacccagagatatctgcactgtactttcaccttggagcgcgtgagcccatctaccagtgacttagcttgtaagctgtgggtgtggcaggtcgagggagacggccaaagtttttccataaacttcaatatcaccaaggacaccaggtttgctgaactgctggcactggagtccgaagccggcgtccccgcattggttggcccttccgccttcaaaattcctttcctgataagacaaaaaataattagtagcctcgatcctccctgtcgaaggggcgcggactggcggactcttgcacagaagctacacctagatagccacttgagcttctttgcatctaaaccttcacccaccgctatgatcttaaatctgtgggaagcgcgccactttccgaacggcaatcttagccagctcgccgcagcagtggcggggctaggccagcccgacgccgggttgttcacagtgtccgaggcagagtgctag

SEQ ID NO: 234794 - DNA, 2529 bp, Artificial Sequence
  derived and/or modified sequence
atggccgtgcggcccggcctgtggcccgccctgctgggcatcgtgctcgctgcgtggctccgaggcagtggggcccaacagagcgctacagtggccaatcctgtgcccggagccaaccccgatctccttccgcactttctggtagagcccgaagatgtatacatcgtgaaaaataagcccgttctgctcgtgtgcaaggctgtacctgctacccaaattttttttaagtgtaatggtgagtgggttcgacaggtggaccatgtgattgaacgctctacagatgggtccagcggacttccaacgatggaggtgaggatcaatgtgagtcgccaacaggtggagaaggtgtttggtctggaagagtactggtgtcagtgtgtagcctggtccagcagcggtacgaccaagtctcagaaggcctatattcggatcgcttaccttcgcaagaactttgaacaggaacctctcgccaaagaagtctccctggagcagggtatcgtcctgccatgtagacctccagagggaattccccctgctgaagttgaatggctgaggaacgaggatcttgtagacccgtcgttagatcccaacgtatacatcacccgagagcacagcctggttgtcagacaggccagactggctgacaccgcaaattatacttgtgtggccaagaatatcgtcgcccggcggagaagtgcatcggccgcggtaatcgtttatgtcgatgggtcctggtccccctggtcaaagtggagcgcctgtggacttgactgcacacattggcgcagccgcgagtgcagtgatcctgcccctcgtaacgggggggaggagtgccagggcacagaccttgatacccgtaactgtacgagtgacctgtgcgtgcacactgcaagcgggcccgaagatgtggccctctatgtcggcctgatcgcagtagccgtgtgtctggtgctgctgctgctggtgctgatcttggtgtactgccggaagaaagagggccttgactctgacgtggccgatagttccatattgacatctggatttcaacccgtttccatcaaaccttccaaagcagacaacccgcacctactcactatacaaccggacttgagtactaccacaacaacctatcagggaagtttgtgcccacggcaggatggaccatcccccaagtttcagctgaccaatggccatctgctgtctccgctggggggcggccgccacactctgcatcacagttcgcccacatcggaggccgaggagttcgtctcaagactgagcacacagaattattttagaagtctgcctcgagggactagtaacatgacttatggaacctttaattttttaggagggagactgatgatccccaacacgggcatttcactgctgatccccccagacgctatcccccggggtaagatctatgagatctacctgacgctccacaaaccagaggacgtgcggcttccactggccgggtgtcaaaccctgttgtcaccaatagtctcatgtggacctcccggcgtgctgttgactagaccagtaatactcgctatggatcactgtggcgagccctctcctgatagttggtctctacgcctgaagaagcagtcctgtgaaggttcatgggaggacgtgctgcacctgggcgaagaagcccctagccacctgtattattgtcagcttgaagcttcagcttgttacgtgtttacagaacagctgggacgcttcgccctggtaggagaagccctatccgtggccgctgccaagaggctcaagctactgctctttgcccccgtggcttgcacgagtctggaatacaacatccgagtgtactgtctccatgatacacacgacgcactcaaggaggtggtgcagctggaaaagcagctcggcggccagcttattcaagaaccccgtgtgcttcatttcaaggactcctaccataatctgaggctgtcaattcatgacgtcccttcttctctgtggaagtcaaagcttctggtgtcttaccaggaaattcccttctaccacatatggaatggcactcagaggtacttgcactgcacctttacactcgagagagttagccccagcacatcagaccttgcttgtaagctttgggtttggcaggttgagggtgacgggcagagcttttccatcaactttaacatcacaaaagatacgaggttcgctgaacttttagcgcttgagtcagaggctggcgtgcccgccttggttggaccatcagccttcaagattccattcctgatccgacagaagattatttcctctctggatccaccatgccgcagaggtgccgattggcggacgctggcccaaaagctgcacctcgatagccaccttagtttcttcgccagtaagccgtctcccacagctatgatcctcaacctctgggaggcgagacattttccaaacggaaacctgtcccagctcgcagcggctgtggctggattagggcaacctgatgccggactctttaccgttagtgaagccgaatgctag

SEQ ID NO: 234795 - DNA, 2409 bp, Artificial Sequence
  derived and/or modified sequence
atggccggaacctctgagcggtctctgataagctccatttcacagccaaaggcaattgagtgctttgaggtgaagaaaaaagcatttcttacccacggacggtaccacggatcaggagccaccccccctaaaactaaggatccgaagcctgagacattttgtggccaaacaggattacctactatggaagtccgcattaacgtgagtagacaacaggtcgagaaggtattcggccttgaggaatactggtgtcagtgcgtggcttggtctagttctgggactacaaaatcacagaaagcatacatacggattgcttacctgaggaagaattttgagcaggagcccctggcaaaggaggtctctctcgaacagggtatcgtgctcccctgtcgacctccggaggggattccccctgccgaggtggagtggttaaggaacgaagacctagtggatccctccctggaccctaacgtttacattacgcgagagcactctctcgtcgtcagacaggctcggctggcagacacggctaactatacctgtgtcgctaagaatatcgtggccagaaggagaagcgcatctgctgcagtgattgtgtatgtcgacggctcctggtcaccttggtccaaatggtccgcttgcggcctcgattgtacacactggagatctagggagtgcagtgacccagcacctcggaacggaggggaggagtgccagggaacagaccttgacactagaaactgtacatccgacctgtgtgtacacacagctagcgggccagaggacgttgccctctacgtcggcctaatcgctgtggctgtatgcctggtgctcctcttactggtgctgatactggtgtactgccgaaaaaaggaaggactcgactccgacgtcgctgacagctcgattctgacttctggctttcagccggtttcaataaaaccatccaaggccgataaccctcatctgctaacaatccagccggacctgtcaactaccacgactacatatcagggatctctgtgccctaggcaggacggaccttcccccaagttccagctgacgaatgggcatctgttatcacccctgggaggaggcaggcacaccttacaccactcttcccccacttccgaggctgaagagtttgtgagccggctatccacccagaactatttcagatctttgcccaggggcactagtaatatgacctatggcacgtttaactttttaggcggtcgcctgatgattcctaatacaggtatttcactgcttattccacccgacgccatcccaaggggcaagatatatgaaatctatctgaccctgcacaaaccggaggatgttcggctgccactggccggatgtcagactctactttctccaattgtgagttgtggacccccaggggtgttactaactaggcccgttatcctggccatggaccattgcggcgagccatcccccgactcctggagcctccggctgaagaagcaatcatgtgaaggatcctgggaggatgtccttcacctgggggaggaagccccatctcatttgtattactgccagctggaggcatcagcctgctacgtgttcaccgagcagctcggtagattcgctctggtcggcgaagccctaagcgtggccgctgcaaagcgcctcaaactgctgctatttgccccagttgcatgtacctcactcgagtacaacatacgcgtttattgccttcatgacacacatgacgcgctaaaagaggtggtgcaactggaaaagcagcttggaggtcagctgatccaagagcctagggtccttcatttcaaggacagctaccataaccttcgactgtccatccatgatgtcccgtctagcctgtggaagagcaagttgttagtatcatatcaggagatcccgttttatcacatctggaatggcactcagaggtatctacactgcaccttcacattggaacgggtgtcacccagcacctctgacctggcctgcaagctgtgggtgtggcaggtagaaggtgatgggcaaagcttctcaatcaactttaatattaccaaggacacaaggtttgctgaactgttagcgctggagagcgaggctggagtcccagccctcgtgggtccgtctgcatttaaaataccctttttaattaggcagaaaattatctcctctttagaccccccatgcagacgtggtgccgactggcgcacactcgcccaaaaacttcacctagactcccacttgtcattttttgccagcaagccctctcccacagccatgattttaaatctgtgggaagccagacactttccgaacggaaatctttcccagctggctgcagctgtggctgggcttggtcaacctgatgccggtctgttcaccgttagcgaagcagaatgctag

SEQ ID NO: 234796 - DNA, 2529 bp, Artificial Sequence
  derived and/or modified sequence
atggcagttaggcccggactgtggccagcattgctgggcatcgttcttgccgcttggttgcgaggctctggcgcacagcaaagcgccaccgttgccaatccagtccccggtgctaatcctgacctactgccgcactttcttgtggagccggaggacgtgtatattgtcaagaacaaacccgtgctgctggtgtgcaaggctgtccccgcaacccagatcttctttaaatgtaacggcgagtgggtgagacaggttgatcatgtcatcgaaaggtctacagacggttcctcaggcttacccactatggaggtccgaattaatgtatcgcggcaacaggtggagaaggtgtttggtcttgaagagtactggtgccagtgtgtcgcttggagttcttctgggaccactaaaagtcaaaaggcttatatccgaattgcttatcttcgtaagaatttcgagcaagagccactggccaaggaagtatctctggagcaagggatagtgttgccctgtaggcccccagaggggatcccacctgctgaagtcgaatggctgcggaatgaggatctggtggatccaagcctggatccgaacgtgtatattacccgagagcacagcttggtggtgcgacaggctcgccttgccgacacggcaaattacacatgcgtggccaagaacattgtggcacggaggaggtcagcttctgctgccgtcatcgtgtacgtcgacggtagctggtccccttggtcaaagtggtctgcttgcggcctggactgtacacattggcggagtagagagtgtagcgatccagccccaaggaacggtggagaagaatgccaagggaccgacctggataccagaaactgcacaagtgatctgtgcgttcatacagcatccgggcctgaggatgtggccctttacgtcgggctgatcgctgtggccgtgtgtctggtcttgttactgttggtgttaatactagtgtattgtcgaaaaaaagagggattagactccgatgtagccgacagctctattctgacctctggattccagcccgtctctattaaaccatccaaagctgacaatcctcatctcctgactattcagcccgatctgtcaactacaaccacaacttaccagggctccttgtgccctagacaggatggaccttcaccaaagtttcagctgacgaatggtcacctgctttccccacttggcggaggtaggcacacattgcaccattccagtccaacttctgaagccgaggagttcgtatcaagactaagtacacagaattacttcagatcactgcccagaggaacatctaacatgacctacggcactttcaacttcctaggtggcaggctgatgatacctaacaccgggatttcactcctcattcctcccgacgccattccgaggggcaagatttatgaaatttacctgaccctccacaaaccagaggacgttcgtttgccgttagcgggttgtcagacactgctgagtccaatcgtaagctgcggcccacccggagtgctgctcacacgcccagtaatactggccatggaccattgcggtgaaccctcacctgactcatggtccctgcgactgaaaaaacagtcatgtgaaggctcctgggaggacgtgcttcacctgggcgaagaggcaccctcccatctttactattgccagcttgaagcttccgcatgctacgtttttacagagcagcttgggagatttgcccttgtgggagaggcactgtccgtggccgctgccaagcgactaaaactgctgctatttgccccagtggcttgcacttcccttgagtataacattcgcgtgtattgcttgcacgacactcatgacgccttgaaagaagtcgtgcagttagagaaacagctgggcggacaactgattcaggaacccagagtcctgcatttcaaagattcatatcacaacctgaggctgagcattcacgatgtcccatcttcactctggaaaagcaagctgcttgtttcataccaggaaatcccgttttaccacatatggaatgggactcagcgataccttcattgtacgttcactctggagcgggtctccccgagcacctcagatctggcctgcaaactgtgggtgtggcaggtggaaggcgatgggcaatctttttctatcaattttaacattaccaaggatacacgctttgcggaactcctcgccctggagagcgaggctggggtgccagccttagtggggccatcagcctttaagataccattcttgatccgccagaagatcatcagtagcttagatcctccatgtagaagaggcgctgattggagaacactggcccagaaactgcaccttgactctcatctctccttttttgccagtaaaccatcaccgacagctatgatcctcaatctctgggaagcacggcatttccctaatggcaacctatcccagcttgccgcagcagtcgccggactggggcagcctgacgcgggtttgtttaccgtgtcagaagctgagtgctag

SEQ ID NO: 234797 - DNA, 3419 bp, Artificial Sequence
  derived and/or modified sequence
atggccggaacatctgaacgttcattgatctcatcgatttctcaacccaaagccatcgagtgctttgaggtgaagaaaaaggctttccttacccacggcagataccacggcagtggcgccacgccgccaaagaccaaagaccccaaaccagaaacgttctgtggtcagacagggctgcccaccatggaggtccgcattaatgtctcaaggcagcaggtcgagaaggtgttcgggctggaggaatactggtgccagtgcgtggcatggagctcctcgggcaccaccaagagtcagaaggcctacatccgcatagcctatttgcgcaagaacttcgagcaggagccgctggccaaggaggtgtccctggagcagggcatcgtgctgccctgccgtccaccggagggcatccctccagccgaggtggagtggctccggaacgaggacctggtggacccgtccctggaccccaatgtatacatcacgcgggagcacagcctggtggtgcgacaggcccgccttgctgacacggccaactacacctgcgtggccaagaacatcgtggcacgtcgccgcagcgcctccgctgctgtcatcgtctacgtggacggcagctggagcccgtggagcaagtggtcggcctgtgggctggactgcacccactggcggagccgtgagtgctctgacccagcaccccgcaacggaggggaggagtgccagggcactgacctggacacccgcaactgtaccagtgacctctgtgtacacactgcttctggccctgaggacgtggccctctatgtgggcctcatcgccgtggccgtctgcctggtcctgctgctgcttgtcctcatcctcgtttattgccggaagaaggaggggctggactcagatgtggctgactcgtccattctcacctcaggcttccagcccgtcagcatcaagcccagcaaagcagacaacccccatctgctcaccatccagccggacctcagcaccaccaccaccacctaccagggcagtctctgtccccggcaggatgggcccagccccaagttccagctcaccaatgggcacctgctcagccccctgggtggcggccgccacacactgcaccacagctctcccacctctgaggccgaggagttcgtctcccgcctctccacccagaactacttccgctccctgccccgaggcaccagcaacatgacctatgggaccttcaacttcctcgggggccggctgatgatccctaatacaggaatcagcctcctcatccccccagatgccataccccgagggaagatctatgagatctacctcacgctgcacaagccggaagacgtgaggttgcccctagctggctgtcagaccctgctgagtcccatcgttagctgtggaccccctggcgtcctgctcacccggccagtcatcctggctatggaccactgtggggagcccagccctgacagctggagcctgcgcctcaaaaagcagtcgtgcgagggcagctgggaggatgtgctgcacctgggcgaggaggcgccctcccacctctactactgccagctggaggccagtgcctgctacgtcttcaccgagcagctgggccgctttgccctggtgggagaggccctcagcgtggctgccgccaagcgcctcaagctgcttctgtttgcgccggtggcctgcacctccctcgagtacaacatccgggtctactgcctgcatgacacccacgatgcactcaaggaggtggtgcagctggagaagcagctggggggacagctgatccaggagccacgggtcctgcacttcaaggacagttaccacaacctgcgcctatccatccacgatgtgcccagctccctgtggaagagtaagctccttgtcagctaccaggagatccccttttatcacatctggaatggcacgcagcggtacttgcactgcaccttcaccctggagcgtgtcagccccagcactagtgacctggcctgcaagctgtgggtgtggcaggtggagggcgacgggcagagcttcagcatcaacttcaacatcaccaaggacacaaggtttgctgagctgctggctctggagagtgaagcgggggtcccagccctggtgggccccagtgccttcaagatccccttcctcattcggcagaagataatttccagcctggacccaccctgtaggcggggtgccgactggcggactctggcccagaaactccacctggacagccatctcagcttctttgcctccaagcccagccccacagccatgatcctcaacctgtgggaggcgcggcacttccccaacggcaacctcagccagctggctgcagcagtggctggactgggccagccagacgctggcctcttcacagtgtcggaggctgagtgctgaggccggccaggcccgacacctacactctcaccagctttggcacccaccaaggacaggcagaagccggacaggggcccttccccacaccggggagagctgctcggacaggccccctcccggccgaagctgtcccttaatgctggtccttcagaccctgcccgaactcccacctctccatggcctgcctagccaggctggcactgccactcacactcggccccagggcccaggagggacagtgcctggagcctgggccaggcccagcccatctgtgtgtgtgtatgtgcgtgtgatgctacctctcctcccgtccctctccaggggccccgcatacacacggccatgcacgcacacactgggcctgggccagggccccagagctcctgcctgagctggaccttatgcaaacatttctgtgcctgctgggtaggggcacgtctgaggggccctgctccaagcctgcaggaccgagggccacagccggacagggggtagcccctggattcaggcacacgaccaccacacgagcacgtgccacgcatgcctcgtgtgctcatctcacacacacccccctcccgggtcacgcagacaccccccaaccacacacatctcatgctgtacacctgaggctgctcacgtctcacgcccagtgttggtgcacatttgcctctcacatgctgccctctccacccacccagggacaccccacggctcctccctgcccctgcccctcccccagccttgaggtgccctgcccggcggggcctgtgaatatgcaatgggagtcccaggctgtacagtggtgagtgtgtgtgtggcgtggcgtgcccgtccccagggctggctggtgccccacgcggggcctgtcatgtgaagctcgtgtcctgactttgtcttaagtgcattcacgcacttactcttggccttatgtacacagccttgcccggccgccggggcacataggggttttatcgggcgtgaatgtaaataaattatatatatatattgct

SEQ ID NO: 234798 - DNA, 3812 bp, Artificial Sequence
  derived and/or modified sequence
accggcccgctctccggctgcgggctccgcggcgcggctggctcggtgcgcggcgcggctggcgctgcgctccgccccggctgcattgctgcgctcccgtgcccaagggagccacgcgccgcgtgcgcccggcagccggccgcccggaggcagcgcagtccgctggcatgggccccgggggcgccccgagctggggctccgggctgaggcgctaaagccgccctcccgcccgcggggccccgcgcccggcccgcccgcctgcccgcccgcggccatggccgtccggcccggcctgtggccagcgctcctgggcatagtcctcgccgcttggctccgcggctcgggtgcccagcagagtgccaccgtggccaacccagtgcctggtgccaacccggacctgcttccccacttcctggtggagcccgaggatgtgtacatcgtcaagaacaagccagtgctgcttgtgtgcaaggccgtgcccgccacgcagatcttcttcaagtgcaacggggagtgggtgcgccaggtggaccacgtgatcgagcgcagcacagacgggagcagtgggctgcccaccatggaggtccgcattaatgtctcaaggcagcaggtcgagaaggtgttcgggctggaggaatactggtgccagtgcgtggcatggagctcctcgggcaccaccaagagtcagaaggcctacatccgcatagcctatttgcgcaagaacttcgagcaggagccgctggccaaggaggtgtccctggagcagggcatcgtgctgccctgccgtccaccggagggcatccctccagccgaggtggagtggctccggaacgaggacctggtggacccgtccctggaccccaatgtatacatcacgcgggagcacagcctggtggtgcgacaggcccgccttgctgacacggccaactacacctgcgtggccaagaacatcgtggcacgtcgccgcagcgcctccgctgctgtcatcgtctacgtggacggcagctggagcccgtggagcaagtggtcggcctgtgggctggactgcacccactggcggagccgtgagtgctctgacccagcaccccgcaacggaggggaggagtgccagggcactgacctggacacccgcaactgtaccagtgacctctgtgtacacactgcttctggccctgaggacgtggccctctatgtgggcctcatcgccgtggccgtctgcctggtcctgctgctgcttgtcctcatcctcgtttattgccggaagaaggaggggctggactcagatgtggctgactcgtccattctcacctcaggcttccagcccgtcagcatcaagcccagcaaagcagacaacccccatctgctcaccatccagccggacctcagcaccaccaccaccacctaccagggcagtctctgtccccggcaggatgggcccagccccaagttccagctcaccaatgggcacctgctcagccccctgggtggcggccgccacacactgcaccacagctctcccacctctgaggccgaggagttcgtctcccgcctctccacccagaactacttccgctccctgccccgaggcaccagcaacatgacctatgggaccttcaacttcctcgggggccggctgatgatccctaatacaggaatcagcctcctcatccccccagatgccataccccgagggaagatctatgagatctacctcacgctgcacaagccggaagacgtgaggttgcccctagctggctgtcagaccctgctgagtcccatcgttagctgtggaccccctggcgtcctgctcacccggccagtcatcctggctatggaccactgtggggagcccagccctgacagctggagcctgcgcctcaaaaagcagtcgtgcgagggcagctgggaggatgtgctgcacctgggcgaggaggcgccctcccacctctactactgccagctggaggccagtgcctgctacgtcttcaccgagcagctgggccgctttgccctggtgggagaggccctcagcgtggctgccgccaagcgcctcaagctgcttctgtttgcgccggtggcctgcacctccctcgagtacaacatccgggtctactgcctgcatgacacccacgatgcactcaaggaggtggtgcagctggagaagcagctggggggacagctgatccaggagccacgggtcctgcacttcaaggacagttaccacaacctgcgcctatccatccacgatgtgcccagctccctgtggaagagtaagctccttgtcagctaccaggagatccccttttatcacatctggaatggcacgcagcggtacttgcactgcaccttcaccctggagcgtgtcagccccagcactagtgacctggcctgcaagctgtgggtgtggcaggtggagggcgacgggcagagcttcagcatcaacttcaacatcaccaaggacacaaggtttgctgagctgctggctctggagagtgaagcgggggtcccagccctggtgggccccagtgccttcaagatccccttcctcattcggcagaagataatttccagcctggacccaccctgtaggcggggtgccgactggcggactctggcccagaaactccacctggacagccatctcagcttctttgcctccaagcccagccccacagccatgatcctcaacctgtgggaggcgcggcacttccccaacggcaacctcagccagctggctgcagcagtggctggactgggccagccagacgctggcctcttcacagtgtcggaggctgagtgctgaggccggccaggcccgacacctacactctcaccagctttggcacccaccaaggacaggcagaagccggacaggggcccttccccacaccggggagagctgctcggacaggccccctcccggccgaagctgtcccttaatgctggtccttcagaccctgcccgaactcccacctctccatggcctgcctagccaggctggcactgccactcacactcggccccagggcccaggagggacagtgcctggagcctgggccaggcccagcccatctgtgtgtgtgtatgtgcgtgtgatgctacctctcctcccgtccctctccaggggccccgcatacacacggccatgcacgcacacactgggcctgggccagggccccagagctcctgcctgagctggaccttatgcaaacatttctgtgcctgctgggtaggggcacgtctgaggggccctgctccaagcctgcaggaccgagggccacagccggacagggggtagcccctggattcaggcacacgaccaccacacgagcacgtgccacgcatgcctcgtgtgctcatctcacacacacccccctcccgggtcacgcagacaccccccaaccacacacatctcatgctgtacacctgaggctgctcacgtctcacgcccagtgttggtgcacatttgcctctcacatgctgccctctccacccacccagggacaccccacggctcctccctgcccctgcccctcccccagccttgaggtgccctgcccggcggggcctgtgaatatgcaatgggagtcccaggctgtacagtggtgagtgtgtgtgtggcgtggcgtgcccgtccccagggctggctggtgccccacgcggggcctgtcatgtgaagctcgtgtcctgactttgtcttaagtgcattcacgcacttactcttggccttatgtacacagccttgcccggccgccggggcacataggggttttatcgggcgtgaatgtaaataaattatatatatatattgc

SEQ ID NO: 234799 - protein, 709 aa, Artificial Sequence
  derived and/or modified sequence
MAADSREEKDGELNVLDDILTEVPEQDDELYNPESEQDKNEKKGSKRKSDRMESTDTKRQKPSVHSRQLVSKPLSSSVSNNKRIVSTKGKSATEYKNEEYQRSERNKRLDADRKIRLSSSASREPYKNQPEKTCVRKRDPERRAKSPTPDGSERIGLEVDRRASRSSQSSKEEVNSEEYGSDHETGSSGSSDEQGNNTENEEEGVEEDVEEDEEVEEDAEEDEEVDEDGEEEEEEEEEEEEEEEEEEEEYEQDERDQKEEGNDYDTRSEASDSGSESVSFTDGSVRSGSGTDGSDEKKKERKRARGISPIVFDRSGSSASESYADQTSKLKYVLQDARFFLIKSNNHENVSLAKAKGVWSTLPVNEKKLNLAFRSARSVILIFSVRESGKFQGFARLSSESHHGGSPIHWVLPAGMSAKMLGGVFKIDWICRRELPFTKSAHLTNPWNEHKPVKIGRDGQEIELECGTQLCLLFPPDESIDLYQVIHKMRHKRRMHSQPRSRGRPSRREPVRDVGRRRPEDYDIHNSRKKPRIDYPPEFHQRPGYLKDPRYQEVDRRFSGVRRDVFLNGSYNDYVREFHNMGPPPPWQGMPPYPGMEQPPHHPYYQHHAPPPQAHPPYSGHHPVPHEARYRDKRVHDYDMRVDDFLRRTQAVVSGRRSRPRERDRERERDRPRDNRRDRERDRGRDRERERERLCDRDRDRGERGRYRR

SEQ ID NO: 234800 - DNA, 2130 bp, Artificial Sequence
  derived and/or modified sequence
atggccgccgacagcagagaggagaaggacggcgagctgaacgtgctggacgacatcctgaccgaggtgcccgagcaggacgacgagctgtacaaccccgagagcgagcaggacaagaacgagaagaagggcagcaagagaaagagcgacagaatggagagcaccgacaccaagagacagaagcccagcgtgcacagcagacagctggtgagcaagcccctgagcagcagcgtgagcaacaacaagagaatcgtgagcaccaagggcaagagcgccaccgagtacaagaacgaggagtaccagagaagcgagagaaacaagagactggacgccgacagaaagatcagactgagcagcagcgccagcagagagccctacaagaaccagcccgagaagacctgcgtgagaaagagagaccccgagagaagagccaagagccccacccccgacggcagcgagagaatcggcctggaggtggacagaagagccagcagaagcagccagagcagcaaggaggaggtgaacagcgaggagtacggcagcgaccacgagaccggcagcagcggcagcagcgacgagcagggcaacaacaccgagaacgaggaggagggcgtggaggaggacgtggaggaggacgaggaggtggaggaggacgccgaggaggacgaggaggtggacgaggacggcgaggaggaggaggaggaggaggaggaggaggaggaggaggaggaggaggaggaggaggagtacgagcaggacgagagagaccagaaggaggagggcaacgactacgacaccagaagcgaggccagcgacagcggcagcgagagcgtgagcttcaccgacggcagcgtgagaagcggcagcggcaccgacggcagcgacgagaagaagaaggagagaaagagagccagaggcatcagccccatcgtgttcgacagaagcggcagcagcgccagcgagagctacgccgaccagaccagcaagctgaagtacgtgctgcaggacgccagattcttcctgatcaagagcaacaaccacgagaacgtgagcctggccaaggccaagggcgtgtggagcaccctgcccgtgaacgagaagaagctgaacctggccttcagaagcgccagaagcgtgatcctgatcttcagcgtgagagagagcggcaagttccagggcttcgccagactgagcagcgagagccaccacggcggcagccccatccactgggtgctgcccgccggcatgagcgccaagatgctgggcggcgtgttcaagatcgactggatctgcagaagagagctgcccttcaccaagagcgcccacctgaccaacccctggaacgagcacaagcccgtgaagatcggcagagacggccaggagatcgagctggagtgcggcacccagctgtgcctgctgttcccccccgacgagagcatcgacctgtaccaggtgatccacaagatgagacacaagagaagaatgcacagccagcccagaagcagaggcagacccagcagaagagagcccgtgagagacgtgggcagaagaagacccgaggactacgacatccacaacagcagaaagaagcccagaatcgactacccccccgagttccaccagagacccggctacctgaaggaccccagataccaggaggtggacagaagattcagcggcgtgagaagagacgtgttcctgaacggcagctacaacgactacgtgagagagttccacaacatgggccccccccccccctggcagggcatgcccccctaccccggcatggagcagcccccccaccacccctactaccagcaccacgccccccccccccaggcccaccccccctacagcggccaccaccccgtgccccacgaggccagatacagagacaagagagtgcacgactacgacatgagagtggacgacttcctgagaagaacccaggccgtggtgagcggcagaagaagcagacccagagagagagacagagagagagagagagacagacccagagacaacagaagagacagagagagagacagaggcagagacagagagagagagagagagagactgtgcgacagagacagagacagaggcgagagaggcagatacagaagatag

SEQ ID NO: 234801 - DNA, 2130 bp, Artificial Sequence
  derived and/or modified sequence
atggccgccgactcccgcgaagagaaggacggggagcttaacgtgctggacgatatcttgacagaggtgccagagcaggacgacgagttgtacaaccccgagtccgagcaagacaagaatgaaaaaaagggtagcaagcgcaaaagcgataggatggaatccaccgacactaaaagacaaaagccgtctgtgcacagcagacagcttgtgtctaaacctctaagcagctctgtttcgaacaataagcggatagtgtccacaaagggaaagtctgcgacagagtataagaacgaggagtaccaacggagcgaacgtaataaaagactcgacgccgatcggaagattcgactgtcatcttctgcctcaagagaaccgtacaaaaaccagcctgaaaaaacatgcgtgcggaagcgtgatcccgaaagacgcgcaaagtcccctactccagacggtagcgaacggataggcctggaagtagacaggagggcgagcagaagttctcagagcagcaaagaagaagttaattctgaagaatacggcagcgaccacgaaactggatcttctgggtcctctgatgagcaggggaataacacggaaaacgaagaggagggggtggaagaggatgtcgaggaagacgaggaggtggaagaagacgccgaagaggacgaagaggttgacgaggacggagaggaggaagaagaggaggaggaggaggaggaagaagaggaagaggaggaggaggaggagtacgagcaggacgagagggaccagaaggaagaagggaacgattacgacactcgctccgaggcctcagatagtggaagcgaatcagtgtccttcactgacggaagcgtgaggtcagggtcgggcacagatggatcggacgaaaagaagaaagagagaaagagggctcgcggaatcagccctatcgtctttgacagatcgggctcaagtgcttctgagagctacgctgatcaaacatccaaacttaagtacgtcttgcaagatgcccgatttttcctaatcaaatctaataaccatgagaatgtgtctctcgccaaagctaagggcgtgtggagcacactgcccgtaaacgaaaagaagctcaatctagcatttaggagtgcccggagtgttatccttatcttttccgtgcgggaatcaggaaaattccaaggattcgcacgtctgagctccgagtcccatcacggcgggtcgccaattcactgggtgctgcccgcgggtatgtctgcaaagatgttaggtggcgttttcaaaatcgactggatatgtcgccgagagctaccattcactaaaagcgcccaccttaccaatccatggaatgaacataagccggttaagattggtagggatggccaagagatagagctggagtgcgggacacagctttgcctccttttccccccagatgagagcatcgatctgtatcaagtcatccacaagatgcgccataagcggcgcatgcattcccagcctaggtcccggggcaggcccagtcgccgcgaaccagttagagatgttggaaggaggaggcctgaagattacgacatccacaatagtagaaaaaagccccggattgactacccacctgagttccatcaacggcccggctaccttaaggaccctcggtaccaggaagtcgatagaagattcagcggagtgagaagggacgtgtttctgaatggatcctacaatgactacgtgcgtgaatttcataatatgggccccccacccccctggcaagggatgcctccatacccaggcatggaacagcctccccatcacccttactatcagcaccatgcgcccccccctcaggcccaccctccctattccggtcatcacccagtgcctcatgaagcacgctaccgcgataaaagggtgcatgactatgatatgcgggtagatgatttcctccgccggacccaggccgtagtcagcgggcgccgaagtaggcccagagagcgggacagagaacgcgaacgggacagaccccgtgacaatcggagagaccgagaacgcgatcggggcagggatcgcgagcgtgagcgggaacgtttatgcgacagagacagggatagaggcgaacgtgggcggtacaggcgatag

SEQ ID NO: 234802 - DNA, 2130 bp, Artificial Sequence
  derived and/or modified sequence
atggctgctgacagtcgggaagagaaggacggcgagttgaacgtcctggacgatattctcacagaggttccagaacaggatgatgagttgtacaatcctgagtctgaacaagacaaaaacgaaaaaaaaggatccaaacgcaaatcagatcgtatggagagcactgataccaagcgccagaaaccttccgtgcacagcagacagctggtgtccaaaccactcagctcctcagtgtccaataataagcggatcgtttctaccaagggaaagtccgcaaccgagtacaagaacgaggagtatcagaggtctgaacggaataagcgacttgatgcagatcgaaagatccgcttatctagttctgcctctcgcgagccgtacaagaaccaacctgagaaaacttgtgtccgtaaaagggatccagagagaagggcaaaatcacctacgcccgacggctctgagaggattgggctggaggttgatcggagggccagcagatctagtcaaagttccaaggaagaagtgaatagcgaggaatacggtagcgatcacgagacaggtagctctgggagttcagatgagcaaggcaacaatacagagaatgaggaggaaggagtcgaagaagacgtggaggaggatgaggaagtggaggaggacgcagaagaagatgaagaggtggatgaggacggagaagaagaagaggaagaggaagaggaagaagaagaagaagaggaggaagaggaagaagaatacgagcaagacgagagggatcaaaaggaggagggaaatgactacgacacaagatccgaggcttctgacagtggcagcgaaagtgtttccttcacggatgggagtgtccgctctggttctggaactgacggcagcgatgagaaaaagaaggagcgcaagcgggcaagaggaatctcccctatcgtctttgaccggtccgggtcctccgccagcgagtcctacgccgaccaaaccagtaagctaaaatatgttctgcaagacgcccggttctttctgatcaagtccaacaaccacgaaaatgtgtctctggctaaggccaaaggtgtgtggagcaccctgcccgttaatgagaaaaaactgaacctggcgttcagaagcgctcgatctgtgatcctcatcttctcggttcgcgagagtggaaaattccagggatttgctcgactgtcctctgagagtcaccacgggggatcaccgatccactgggtccttcccgctggcatgtcggcaaagatgcttggcggcgtgttcaagattgactggatctgtcgccgagagctgccctttacaaaatctgctcatctgaccaacccctggaacgagcacaaacctgtaaagatcgggcgcgatggacaggaaatcgagcttgaatgtggaacacagctttgcctgctatttccacctgacgagagcatcgatctataccaggtgattcacaagatgcgccataaacggagaatgcattcacaacctcgatcgagggggcgccccagcaggcgggagcccgtcagggatgttgggaggagaagacccgaagactatgacatacataactcaagaaagaaaccgcgcattgactaccccccggaattccaccagcgacccggatatctaaaggatccccggtatcaggaagtcgacagaaggtttagcggggtgcggcgggatgtcttccttaacggtagttacaatgactacgtgagagagttccacaacatgggccctccgcctccctggcagggcatgcccccatatcccggaatggaacaaccaccgcaccatccctactaccaacatcacgccccgcctcctcaggctcaccctccatactccggacatcatcctgtacctcatgaagccaggtatagggacaaacgggtacatgactacgatatgcgggtggatgactttctcaggcggacacaggctgtggtaagcggaaggagatccagacctagggaaagagaccgggaaagagagcgagatcggccgcgagacaatagaagagaccgtgaacgggacagaggcagggaccgggaacgcgaacgggagagactctgcgacagagaccgcgaccggggtgaacgaggtagataccggcgatag

SEQ ID NO: 234803 - DNA, 2130 bp, Artificial Sequence
  derived and/or modified sequence
atggctgctgacagccgggaggagaaggatggagagctgaatgtgctggatgacatcctgacagaggtgcctgagcaggatgatgagctgtacaaccctgagagcgagcaggacaagaatgagaagaagggcagcaagaggaagagtgacaggatggagagcacagacaccaagaggcagaagcccagcgtgcacagccggcagctggtgtccaagcccctgagcagctctgtgagcaacaacaagagaattgtgtccaccaagggcaagagcgccacagagtacaagaatgaggagtaccagaggagtgaaagaaacaagaggctggatgctgacaggaagatccggctgagcagcagcgccagccgggagccctacaagaaccagcctgagaagacctgtgtgaggaagagggaccctgagcggcgggccaagagccccaccccagatggcagcgagagaattggcctggaggtggacagaagagccagccgcagcagccagagcagcaaggaggaggtgaacagcgaggagtatggcagtgaccatgaaacaggcagcagcggcagcagtgatgagcagggcaacaacacagaaaatgaggaggagggcgtggaggaggatgtggaggaggatgaggaggtggaggaggatgctgaagaagatgaggaggtggatgaagatggagaggaggaggaggaggaggaggaggaggaggaggaggaggaggaggaggaggaggaggagtatgagcaggatgagcgggaccagaaggaggagggcaatgactatgacaccaggtctgaggccagtgacagcggcagcgagagcgtgtccttcacagatggctctgtgcgcagcggcagcggcacagatggcagtgatgagaagaagaaggagaggaagagggcccggggcatcagccccatcgtgtttgacagaagtggcagcagcgccagcgagagctatgctgaccagaccagcaagctgaagtatgtgctgcaggatgcccgcttcttcctgatcaagagcaacaaccatgaaaatgtgtccctggccaaggccaagggcgtgtggagcaccctgcctgtgaatgagaagaagctgaacctggccttccgcagcgcccggagcgtcatcctgatcttctctgtgcgggagagcggcaagttccagggctttgcccggctgagcagcgagagccaccacggcggcagccccatccactgggtgctgcctgctggcatgtctgccaagatgctgggcggcgtcttcaagattgactggatctgccggcgggagctgcccttcaccaagagcgcccacctgaccaacccctggaatgagcacaagcctgtgaagattggaagagatggccaggagattgagctggagtgtggcacccagctgtgcctgctcttccccccagatgagagcattgacctgtaccaggtgatccacaagatgaggcacaagaggaggatgcacagccagcccaggagccggggccggcccagcagaagagagcctgtgagagatgtgggcagaagaagacctgaggactatgacatccacaacagcaggaagaagcccagaattgactacccacctgagttccaccagaggcctggctacctgaaggacccccgctaccaggaggtggaccggcgcttctctggagtgagaagagatgtgttcctgaatggcagctacaatgactatgtgcgggagttccacaacatgggccccccaccaccctggcagggcatgccaccctacccaggcatggagcagcccccccaccacccctactaccagcaccacgcccccccaccccaggcccaccccccctacagcggccaccaccctgtgccccatgaggcccgctacagagacaagagggtgcatgactatgacatgagggtggatgacttcctgcggaggacccaggccgtggtgtctggccgccgcagccggccccgggagcgggaccgggagcgggagcgggaccggccccgggacaacagaagagaccgggagcgggaccggggccgggaccgggagcgggagcgggagcggctgtgtgaccgggaccgggacagaggagagcggggccgctacagaagatag

SEQ ID NO: 234804 - DNA, 2130 bp, Artificial Sequence
  derived and/or modified sequence
atggccgccgacagccgggaggagaaggacggcgagctgaacgtgctggacgacatactgacagaagtcccagagcaagatgacgaattatataaccccgagagtgaacaggacaagaatgaaaagaagggcagcaagaggaaaagcgaccgaatggagtctacggatactaaacggcagaagccatcagttcattcacggcagctcgtgtccaagccactgagttcttctgtgtcgaataataaacgtattgtgagtactaaggggaaaagcgctaccgaatacaagaacgaggaatatcagaggagtgaaaggaataaaagactagacgctgaccgaaagatcagactcagctcctctgcctcccgcgagccatataaaaaccaacccgagaaaacttgcgtgcgcaaacgcgaccctgagcggcgggctaagtcacccactccagacggcagtgagcggattgggttggaggtggaccgacgagcctctcgatctagtcagtcatcaaaggaggaggtgaattctgaggaatatggttctgatcacgaaaccggcagcagtgggtcctcagacgagcagggaaataacacggaaaacgaggaagagggcgttgaagaggacgttgaagaagacgaagaggtggaggaggacgctgaagaagatgaagaggttgacgaagatggagaagaggaagaagaggaggaagaggaggaggaagaagaggaggaggaagaagaagaagaatatgagcaagatgaacgtgatcagaaagaggaaggcaacgactacgacacaagatctgaagcttctgacagcggttctgaatccgtgtccttcaccgatggttcagtgagaagtggcagtggaactgatgggagtgacgagaaaaaaaaagagcgcaagagagcccgcggcatttcccctattgttttcgaccggtcgggatctagcgcaagtgaatcttatgccgatcagacctcgaaactcaaatacgtactgcaggacgcacgattctttctgatcaaaagtaacaatcacgagaacgtgtctctggccaaggccaagggggtatggagcacactccccgtgaacgagaagaaactgaatctcgctttcaggtctgctaggtcagtgattctgattttttctgtgcgtgaaagtgggaaatttcagggttttgcaaggctcagctccgaatcgcaccacggcgggtcccctatccactgggtgttgcctgcgggtatgtctgccaagatgctggggggagtttttaagatcgactggatctgtcgacgcgagttgccttttacaaagtccgcacacctcaccaatccctggaacgaacacaagcccgtgaagatcggacgagatggccaggaaatcgagctggaatgcggcacccaactgtgcctccttttcccgcccgacgagagcatcgatttgtatcaggtcatccacaaaatgcgccataaaagacggatgcactcccagcctaggagccgggggaggccatctcgtagggaacctgtgagggacgtggggcgccggagacctgaggactatgacatacataactcaagaaaaaagcctagaatcgactaccctcccgagttccatcaacgaccaggctaccttaaggatcctcggtaccaagaggttgataggagattttccggcgtgcggcgcgacgtcttcctgaacgggtcatacaatgactatgtgagagagttccacaacatgggaccgcctccaccatggcagggcatgccgccctaccccggaatggaacagcctccccaccatccttactatcagcatcacgccccaccaccacaggctcaccctccctatagcggccatcaccccgttccccacgaggcgcgctacagggacaagcgcgtacacgattatgacatgcgggtggacgactttttaagacgtacccaagcggtggtaagcggtcggcgatcccgcccccgggagcgtgatagagagagggagcgcgacagacccagagataacaggcgcgacagggaacgtgatagagggcgagatcgagaacgggagcgggaaaggctgtgtgatcgcgaccgagacagaggagagcgtggtaggtacagaagatag

SEQ ID NO: 234805 - DNA, 2130 bp, Artificial Sequence
  derived and/or modified sequence
atggccgccgacagccgggaggagaaggacggcgagctgaacgtgttggatgatatacttactgaagtgccagaacaagacgacgaactttacaacccagagtccgagcaagacaagaacgaaaaaaagggttccaaaaggaagagtgatcgaatggagagtacagacacgaagcgccagaaaccgtcagtacatagcaggcagctcgtatcaaagcctctgagttcatctgtttctaacaataagagaattgtgtccacaaaggggaagtctgcgacagaatataagaacgaggagtaccagaggagtgagagaaacaagcgactggacgcagaccgtaagatcaggctgtcatcttcggcatctagagaaccgtataaaaatcagcccgagaagacctgcgtgcgaaagagagacccggagcggagggccaaaagccccactcctgatggatcagaaagaataggacttgaagtagacaggcgtgccagtcggagtagtcagtcttctaaggaagaagtcaactccgaggagtacgggagtgatcacgagacaggatcttccggaagctccgacgaacagggaaataacacagagaatgaagaggagggagttgaggaagatgtggaggaagatgaagaagttgaagaagacgccgaggaggacgaggaagtcgatgaggacggggaagaagaggaagaggaagaggaagaagaggaggaagaggaagaggaggaggaggaagaatacgaacaggatgagcgagaccagaaagaagaggggaatgactacgatactaggtccgaagccagcgacagcgggtccgaaagcgtgagctttacggatggcagtgtgagatctggttctggcaccgacgggtccgacgagaaaaaaaaggaacggaaaagagcaagggggattagccccatcgtttttgataggagcgggtcttccgctagtgagtcatacgccgaccaaacctccaagcttaaatacgtccttcaggatgcaaggttcttcctgattaagtctaacaatcatgagaacgtgtcactcgcaaaggccaaaggcgtttggagcaccctgcccgtgaatgagaagaagctcaacctggcctttagaagtgccagaagcgtcatcctgattttctcagtgagagaaagtggaaaattccaaggctttgcacggcttagtagcgagagccatcacgggggctcacccattcactgggtacttccggctgggatgagcgccaaaatgctgggcggtgtttttaagattgattggatctgcagacgcgaactccccttcaccaaaagcgcccaccttactaacccatggaacgaacacaagcccgtcaagattggtcgcgatgggcaagagatcgagctcgaatgtgggacgcagctgtgtctgctttttcctccagacgaatctatagatttgtatcaggtgattcacaagatgcgtcacaagaggcgtatgcatagtcagccccggtctagggggaggccatctcggagagagcctgtgcgcgatgtgggacggagaagacctgaggattacgatattcataatagccgtaagaagcctagaattgactaccccccggaattccaccagcgccccgggtacctgaaagaccctcgttaccaagaggtggataggcggttctccggggttaggcgagacgtgtttctcaacggcagttataacgactatgttcgggagtttcataacatgggccctcccccaccttggcaggggatgccaccgtatcccggcatggaacaacctccacatcatccctactaccagcatcatgccccacccccacaggcccatcccccttacagtggtcatcatcctgtcccccacgaagcgcggtatcgagataagcgcgttcatgattacgacatgagagttgacgatttcctccgacgaacccaggcagtcgtgtcaggccgaagatccagaccgagggaacgggatagagaaagagaaagagatcgcccgcgagacaataggagagatcgtgagcgtgaccgaggcagggatcgggagagagaacgggagcgtctgtgtgatcgcgaccgcgatcgcggagaacggggccggtataggagatag

SEQ ID NO: 234806 - DNA, 2130 bp, Artificial Sequence
  derived and/or modified sequence
atggcggctgattcccgtgaggaaaaggatggggaactaaacgtccttgatgatatcctaacggaagtgcctgagcaggatgacgagctctataaccctgagtccgagcaagataagaacgagaagaagggatccaaacggaagagtgacaggatggaatccacagacacaaaaaggcagaaaccttccgtgcactctcgtcagctggtctccaaaccattgtccagctcggtttccaacaacaaacgcattgtctctacaaaaggcaagagtgccaccgagtataagaatgaggagtaccagcgcagcgagcgaaacaaacggctcgacgccgaccgcaagatccgcctgagcagttctgcatcacgggaaccttataagaatcaaccggagaaaacctgcgtgcggaagcgtgacccagaacggagagctaagtcgcccactcccgacggctctgaacggataggactagaggtagatagacgcgcatccaggtcctcccagagcagcaaggaagaagtgaacagtgaggagtacgggtcagaccatgaaaccggttctagcgggtctagcgacgaacaggggaataatacagagaacgaggaagagggagttgaggaggatgttgaggaagacgaggaggttgaggaggacgccgaagaggatgaggaagtggacgaggacggggaagaggaggaagaggaggaagaggaagaagaggaggaagaggaggaggaggaggaagaatatgagcaggacgagagggaccagaaagaagaaggaaatgattatgacacccgctctgaggcttcagattcggggtcggagagtgtctcttttacagatggttctgtgaggtcaggctctggaacggacggatcagatgagaagaaaaaggagcgcaagcgcgctcgaggcatctctcccatcgtcttcgaccggtcaggatcatcagcgagtgaaagctacgctgatcagaccagtaagctcaagtatgttctgcaggatgctcgcttttttctgattaagtctaataatcacgagaatgtctccctagcaaaagccaaaggtgtctggtctaccctaccagtgaacgagaagaagctgaacctggcgtttagatctgcaaggtctgtcatcctcattttctctgtgcgagagtccggcaaattccagggttttgcaagactcagctccgagtcccatcacggcggatcaccaatacactgggtgctgccagctgggatgtctgctaagatgctgggtggcgtcttcaagatcgattggatttgcaggcgggagcttccatttacaaaaagcgctcatctgaccaacccatggaacgaacataagcccgtgaaaattggcagggatggccaggagattgagctggaatgtggcacgcagttatgccttttgttcccccctgacgagtccatcgacttataccaggtgattcacaaaatgcgccacaagagacggatgcacagtcagcctaggtccaggggcagaccgtccagacgagagccggttcgtgatgtgggaagaagacgcccagaagattatgatatccacaactctcgaaagaagcctagaattgactacccaccagaattccatcagagacccggttacctgaaggaccctaggtatcaggaagtggatcgacgcttcagcggtgtgcggagagacgtcttcctcaatggaagctataatgattatgttagggagttccacaacatggggcctccgcctccttggcaggggatgcccccataccctggcatggagcaaccccctcatcatccctactaccagcaccatgcacccccaccacaggcccaccctccatattctggacaccaccctgtgcctcacgaggctcggtaccgtgacaagagagttcacgactacgacatgcgagtcgacgatttcttgcgtcgcacacaggctgttgtgtcgggacgcagaagtagaccgagggagcgcgatcgcgaacgcgagcgggatcgcccacgtgataatcgtcgggatagggagcgggaccgcggtagagaccgcgagcgagagagggagaggctgtgcgacagggaccgggatcgcggagaacggggacggtaccggagatag

SEQ ID NO: 234807 - DNA, 2130 bp, Artificial Sequence
  derived and/or modified sequence
atggctgccgattctcgggaggaaaaagatggagagctgaatgtgctggacgacatactcacagaggtgcctgagcaggacgatgagctttacaatcctgaatcagagcaggataaaaacgagaagaaaggttctaaacgcaaaagcgacagaatggagagtaccgacacaaagaggcaaaaaccatctgtacacagccgacaattggtgtcaaagcccctcagcagttcagtatcaaacaataaaagaatcgtgtcaacaaagggcaaatccgctactgaatacaaaaatgaggagtaccagcgcagcgagaggaacaaaaggctggacgcggacagaaagatacgactaagcagcagcgcttctcgcgaaccttacaagaaccagcctgaaaagacttgtgtgcgcaaacgcgacccagaacgcagggctaaatctcccacgcctgacggcagcgagcggataggccttgaagtcgaccggagagcctccagatcaagccaatcaagcaaagaggaggtgaatagtgaagagtatggctccgatcatgaaaccggcagttccgggtcttcagatgaacaggggaataatacagaaaacgaagaagagggcgtggaggaagatgtcgaggaagacgaagaggtcgaggaggatgccgaagaggacgaggaggtggacgaggacggcgaggaggaggaggaagaggaggaagaggaggaggaagaggaggaggaggaagaggaagaatatgagcaggacgaaagggatcagaaggaggaaggcaatgattatgatactcggtctgaagctagcgacagtggtagtgagtccgtctcatttacagatggctccgtgcgaagcggatctgggaccgacggctccgacgaaaagaagaaggagaggaagcgcgcaaggggcatttcaccaatcgtctttgatcggtctggtagtagtgcctccgagagctacgctgatcagacctccaaactaaagtatgtccttcaggacgccagattctttcttatcaagtcaaataaccacgaaaacgtgtcactcgcgaaggctaagggggtctggagtacattgcctgtcaacgagaagaagcttaatcttgccttccgctctgccaggagcgttatactgattttctcagtgagagagagtggtaaatttcaggggttcgcgcgtctttctagcgagagccaccatggaggtagccccatccactgggtactgcctgcaggaatgtctgctaagatgctcggaggcgttttcaaaatcgattggatctgtagaagggagctacctttcacgaagtcagcccatctgactaacccctggaatgagcacaagccagtcaaaatcggcagagatggacaggaaatcgaactggagtgtggcacccagctgtgtttgctgttcccccctgatgagtcaattgacctgtatcaggtaattcataagatgcggcacaaacgcaggatgcattcccagccacggtccagaggaaggccctcgcgccgtgagccagttagggatgttgggaggagaaggccagaggattacgacattcataactcccgcaagaaaccaaggatcgactatcctcccgaattccaccaaagaccgggttacctaaaagatcctaggtatcaggaagtcgacagaaggttcagcggtgtgagaagagacgtttttctgaacggcagttataatgattatgtgagggagttccacaacatggggcctcctcctccatggcagggcatgcccccataccctggaatggagcagccaccccatcacccctactatcaacatcatgcaccacctccccaggctcaccccccatactcagggcaccaccctgttcctcacgaggctcggtaccgcgacaaacgcgtgcatgactatgatatgcgggtggatgattttctacgacgaacacaggcggttgtgagcggccgtcgcagtagacccagggagcgggaccgggagagagaacgcgaccgacctagagataaccgcagggatcgggagcgagatcgcggtagggatcgcgagcgagagcgggagcggttgtgtgatcgagaccgtgaccggggagaacgcggacgttatcggcgttag

SEQ ID NO: 234808 - DNA, 3244 bp, Artificial Sequence
  derived and/or modified sequence
tttcgggagcgggattgtttcgcgcaggaagcaggctccattttagcgccgcccgccgtcgccatctgtttcccttccctcccccatacctagcccgagtctgagccctaacgagaaggctgggcctaggccgctggatgctggagtgaaaggaagggagaaagggaaaaagcgggaagagtcgagaaggctgagtgttaagaggccaagtgcgacgcgcgtatccgggcagacggactgacggacgggcccgtgcttctgccgcggctgcggcgcccgcgcgagtcgcgtctaagcggcggcggcggtggcagcggcggaaaccgaaggggagccatggcggctgacagtcgggaggagaaagatggagaacttaatgttctggatgatattttaactgaagtaccagaacaagatgatgaactgtataatccagagagtgaacaagataaaaatgagaaaaagggatcaaaaagaaaaagtgatcgaatggaatctactgataccaaacgacaaaagccttctgtccattctagacaactggtttctaagccactgagctcatctgttagcaataacaaaagaatagttagtacaaaaggaaagtcagccacagagtataaaaatgaggaatatcaaagatctgaaagaaacaagcgtctagatgctgatcggaaaattcgtctatcaagtagtgcctccagagaaccttataagaatcaacctgaaaaaacctgtgtccggaaaagggatcctgaaaggagggccaaatctcctacgccagatggttctgagagaattgggcttgaagtggatagacgtgcaagcagatccagccagtcttctaaggaagaagtgaactctgaagaatatggctctgaccatgagactggcagcagtggttcttctgatgagcaagggaacaacactgagaatgaggaggaaggagtggaagaagatgtggaggaagatgaagaagtagaagaagatgcagaagaagatgaagaggtggatgaagatggagaggaggaggaggaagaggaggaggaggaagaggaggaggaggaggaggaagaagaagaatatgaacaggatgagagagaccagaaagaggagggaaatgattatgacactcgaagtgaggccagtgactctggttctgaatctgtttccttcacagatgggtctgtcagatctggttcaggcacagatggatcagatgagaaaaagaaggaaaggaagagagctagaggcatatctccaattgtttttgatagaagtggaagctctgcatcagagtcatatgcagatcaaaccagtaaactcaaatatgtgcttcaagatgcaagatttttcctcataaagagtaacaaccatgagaatgtgtctcttgccaaagcgaagggtgtatggtccacgctccctgtaaatgagaagaaattaaatcttgcatttagatctgcaaggagtgttatcttaatattttctgtcagagagagtggaaaatttcaagggtttgcaagactttcttcagaatcacatcacggaggatctcctatacactgggtgcttccagcaggaatgagtgctaaaatgctgggaggtgtctttaaaattgactggatttgcaggcgtgaattacccttcactaagtcggctcatctcaccaatccttggaatgaacataaaccagtaaagatcggacgtgatggacaggaaattgaacttgaatgtggaacccagctttgtcttctgtttccccccgatgaaagtattgacttgtatcaggtcattcataaaatgcgtcacaagagaagaatgcattctcagccccgatcacgaggacgtccatcccgtcgagaaccagtccgggatgtgggaaggcgtcgaccagaagattatgatattcataacagcagaaagaaaccaaggattgactatccccctgagtttcaccagagaccagggtatttaaaggatccacgataccaggaagtggacagacgattttcaggagttcgccgagatgtgtttttaaatgggtcctacaatgattatgtgagggaatttcataacatgggaccaccaccaccttggcaaggaatgcccccttacccaggaatggaacaacctccacaccatccttactatcagcaccatgctccacctcctcaagctcatcccccttactcaggacatcatccagtaccacatgaagcaagatacagagataaacgagtacatgattatgatatgagggtggatgatttccttcgtcgcacacaagctgttgtcagtggccggagaagtagaccccgtgaaagagaccgggaacgagagcgagaccgccctagagataacagacgagacagagagcgagatagaggacgtgatagagaaagagaaagagagcgattatgtgatcgagacagagaccgaggggagagaggtcgatatagaagataatgggcttttggaagcactgattgtttaaagatacaaaaaatcttgtattttttttttgtgtgtgtttacaagtagtaaatttattttcagctgtctgcctatgaagttcattgtgtagaaggatttattatgaccccctttgttccaagcatgcagtatcataagaactggaaaaactcaaatccgccaaaaatccacagctgacagttgaattgacacttttattggggcagaatggaacagtccaagaatgtagatactgattctttctccataaatgttcttatagtgtgttcatcctagagttatttttttgtttgtttttttcctttttggatcttgattgataactgccatgatattttgctttgatgtgtttctacatgtagttgcacacggttcagtaaaaataatgctgctatcgagtatgcaaatattgaagtatgatggtttgactgtatggcagtgttgtagcagcctcttgtttttttccccattgcctctttttttaaaaaacttataaagtcactttttatttttcctcagtcttcaatgacgagagcaatattaagaagacattgctatctaatttttaatctttttaaatgaaaaattcctatgttcagtagcgtggttgatgctattgtttagccttcccctccaaattgtatacattggcttggaatgttcacaacttgcgtgcgtggcagcggaagacgattcccatattctacattgctactgttttgtataaaataaattggtaaagattgacggt

SEQ ID NO: 234809 - DNA, 6195 bp, Artificial Sequence
  derived and/or modified sequence
gtaaacagcgcagggcatttcgggagcgggattgtttcgcgcaggaagcaggctccattttagcgccgcccgccgtcgccatctgtttcccttccctcccccatacctagcccgagtctgagccctaacgagaaggctgggcctaggccgctggatgctggagtgaaaggaagggagaaagggaaaaagcgggaagagtcgagaaggctgagtgttaagaggccaagtgcgacgcgcgtatccgggcagacggactgacggacgggcccgtgcttctgccgcggctgcggcgcccgcgcgagtcgcgtctaagcggcggcggcggtggcagcggcggaaaccgaaggggagccatggcggctgacagtcgggaggagaaagatggagaacttaatgttctggatgatattttaactgaagtaccagaacaagatgatgaactgtataatccagagagtgaacaagataaaaatgagaaaaagggatcaaaaagaaaaagtgatcgaatggaatctactgataccaaacgacaaaagccttctgtccattctagacaactggtttctaagccactgagctcatctgttagcaataacaaaagaatagttagtacaaaaggaaagtcagccacagagtataaaaatgaggaatatcaaagatctgaaagaaacaagcgtctagatgctgatcggaaaattcgtctatcaagtagtgcctccagagaaccttataagaatcaacctgaaaaaacctgtgtccggaaaagggatcctgaaaggagggccaaatctcctacgccagatggttctgagagaattgggcttgaagtggatagacgtgcaagcagatccagccagtcttctaaggaagaagtgaactctgaagaatatggctctgaccatgagactggcagcagtggttcttctgatgagcaagggaacaacactgagaatgaggaggaaggagtggaagaagatgtggaggaagatgaagaagtagaagaagatgcagaagaagatgaagaggtggatgaagatggagaggaggaggaggaagaggaggaggaggaagaggaggaggaggaggaggaagaagaagaatatgaacaggatgagagagaccagaaagaggagggaaatgattatgacactcgaagtgaggccagtgactctggttctgaatctgtttccttcacagatgggtctgtcagatctggttcaggcacagatggatcagatgagaaaaagaaggaaaggaagagagctagaggcatatctccaattgtttttgatagaagtggaagctctgcatcagagtcatatgcagatcaaaccagtaaactcaaatatgtgcttcaagatgcaagatttttcctcataaagagtaacaaccatgagaatgtgtctcttgccaaagcgaagggtgtatggtccacgctccctgtaaatgagaagaaattaaatcttgcatttagatctgcaaggagtgttatcttaatattttctgtcagagagagtggaaaatttcaagggtttgcaagactttcttcagaatcacatcacggaggatctcctatacactgggtgcttccagcaggaatgagtgctaaaatgctgggaggtgtctttaaaattgactggatttgcaggcgtgaattacccttcactaagtcggctcatctcaccaatccttggaatgaacataaaccagtaaagatcggacgtgatggacaggaaattgaacttgaatgtggaacccagctttgtcttctgtttccccccgatgaaagtattgacttgtatcaggtcattcataaaatgcgtcacaagagaagaatgcattctcagccccgatcacgaggacgtccatcccgtcgagaaccagtccgggatgtgggaaggcgtcgaccagaagattatgatattcataacagcagaaagaaaccaaggattgactatccccctgagtttcaccagagaccagggtatttaaaggatccacgataccaggaagtggacagacgattttcaggagttcgccgagatgtgtttttaaatgggtcctacaatgattatgtgagggaatttcataacatgggaccaccaccaccttggcaaggaatgcccccttacccaggaatggaacaacctccacaccatccttactatcagcaccatgctccacctcctcaagctcatcccccttactcaggacatcatccagtaccacatgaagcaagatacagagataaacgagtacatgattatgatatgagggtggatgatttccttcgtcgcacacaagctgttgtcagtggccggagaagtagaccccgtgaaagagaccgggaacgagagcgagaccgccctagagataacagacgagacagagagcgagatagaggacgtgatagagaaagagaaagagagcgattatgtgatcgagacagagaccgaggggagagaggtcgatatagaagataatgggcttttggaagcactgattgtttaaagatacaaaaaatcttgtattttttttttgtgtgtgtttacaagtagtaaatttattttcagctgtctgcctatgaagttcattgtgtagaaggatttattatgaccccctttgttccaagcatgcagtatcataagaactggaaaaactcaaatccgccaaaaatccacagctgacagttgaattgacacttttattggggcagaatggaacagtccaagaatgtagatactgattctttctccataaatgttcttatagtgtgttcatcctagagttatttttttgtttgtttttttcctttttggatcttgattgataactgccatgatattttgctttgatgtgtttctacatgtagttgcacacggttcagtaaaaataatgctgctatcgagtatgcaaatattgaagtatgatggtttgactgtatggcagtgttgtagcagcctcttgtttttttccccattgcctctttttttaaaaaacttataaagtcactttttatttttcctcagtcttcaatgacgagagcaatattaagaagacattgctatctaatttttaatctttttaaatgaaaaattcctatgttcagtagcgtggttgatgctattgtttagccttcccctccaaattgtatacattggcttggaatgttcacaacttgcgtgcgtggcagcggaagacgattcccatattctacattgctactgttttgtataaaataaattggtaaagattgacggttatcttttgtatctttttcttatccaattgcaggtttgttttattatgcaataatggacataaaagcatgctttttgttcaggaattttaggaaccccatttgctttttttgaggcacactttagcagaaatgattgacctaggcctgttgcattaaaagcttacttctatttctaacataagatacacagagttatgttaataatttggttaagtatttatacacctgataacattttgagtctactctgatcacagaatcgtttatttaggttttctatttgttgttttagtcttctgtaagtgaacgactttgtacatgctttctactttacttcataaatggacttttaaccctcttgtattagttctgtattttaagttaactgtccagttctcccagtggtaaccaactataacatagaaatagagccgctcaagaaaacagtttatgaaataatttttttgaattttttcttgagttacacctggagttttggcctttggaatttggcctttataaacattaggaatatttgaatgtttgatttttttatagtatcaacagttgtactgtgtaccagatcacatagtacagttttacatttaatctatattggcctgaaaagaacaacacaggcactttactcttaaaggatataataaactatagttatactgcattcatattcataccagcatgtagtatctttccctgcattcacagaagttttatttacaatgacaaaactaaagcctgaggatttgttttaaatctgcattgtggtagagaggaaaaagtacttttaaggaaacctgggttctagttttgtcattgtctttaattaaaccggttagtgatacatggtaagtcacttcattggcattttgtgtattcatcagtaagctagacaagatgatagctacagtttaagaatttctgtaaccattatacaaaactggtaggtaatattaaaggtattttcctgaaataataggaataaatactgagcactttgtatgcaatagagactttgtgcttttatatacagactcatttaaatgggctcagagaggctagtaaacttgcccaagattagaaaggtagtaattgatgggccaagattttacccatgtttttatttggtgtttctaaaccacctcatcacttttgaaaaaacagtatataaattaataaatgttttggagatggagtctgtcgcccaggtggagggcagtggcatgatcttggctcactgcaacctcctgcctcagcctcccgaatggctgggactacaggcacccaccaccacaccccgctaatttttgtaattttagtagagatggggttccaacatgttggccaggctggtctcaaactcgacctcaagtgacctcacctgcctcagcctcctaaagtgttgggattacaggcgtgagccactgcacctggcctgagatttttaaacattaacatttccttcaggcttaagcagaggatttttctaaagtgccatccaattagatgttaagttatgctttgtatgttgagcttagtattgagtcgatctattttaaaaagccaacattaagtttttaccaagtatctggcactattctaaacaattctgttggctcacataatcatcactgttttctcctttcctaatttttaaaataaacttaccggaacattgtataaaaaatgcaagatttttttctgtacagaagagtcagtatataaaaatcagtatgttttatttaatattcgtacacatgacagcttttgtcactgtgagaagacatggtttctttcgtgtactccactgtgctgtgattctaacaatctacattagtatgatgtgttcagatgaaaaacagaaaattcagtcattccgagtttagaaatccggtcagggattttattggctggagtaatagttcaaaggagtgaaaattcaagcatgtaatttttggatttgatttcctccataatgatttcctccataatggctttttttcaagcatggtctaatttttcagaaaatggccattatctccaagcttccattgtccatgtagtttcagtggcaggagagagactattttcctcccagtgtccatgtcagttccccaaaaggactgaatagccatgttggttttggagccagccgtaatccaatctgtatttccaaggaaatggggttctttgtctcccagcattgggaagcaagagaggcacatgttatggtcacctctgtgaggattacatcaggaaggacagtctccaaaagacatggacagaggaaatttagcagatgtccattaaatcaggatctcatacaagttataacacctgaatgtttgacttttcagagtattttgccatcacaggtgtggcatcttgcccttggatatatctacattctgctgtagaatgtcgtggtctttctgagggtcacatacatcctgtcttgtcataatgttaaccattaagagtcctcaggggcatggaattgaagaaggaactgttgccagcagttaactgaccaagctagagttccctgacccaacgtaagggtgactgtgacacacatggataattttagcttcatgtttaagattttgttatttgggtaggaaacattccaaatgcagtttgaaacacatattaaaattgaggcacacaggaaagaactggctcaagtttagtccccaagttccttatagtaggaataggaatccttagagtataagcaatccatgcatagtattctgttatctatcatgtagatcatttaatctctaattttttggggtggggattctcttgtttctaaatcttacactttcagtttcttctgtgtcttaaatatagattattgactattgtcttaaatactaataaatacattaaatgtatcttaaatacta

SEQ ID NO: 234810 - DNA, 375 bp, Artificial Sequence
  derived and/or modified sequence
atgacccccaacgagcaccccgccttcaagcacctgttcaacaaggcccacctggccccccccctgatccacctgaccctgagcggccacagcacctgcttcagagagcacagagtgggcggcaaggtgaccgaccagcaggaccccaaggccgaggagttcttcctggtgcagaacaagatgaagagcctgccctgcctgctgctgagcacccagaccagacagcccagcgacttcagcatcttcagcccccccttcctgcccttctacagcaccaagccccccctgagcagctggcccgtgctgaacgagctgctgggcaccccccccagaagaggcggcggcagagccgagggcctgctgaccagccagtag

SEQ ID NO: 234811 - DNA, 375 bp, Artificial Sequence
  derived and/or modified sequence
atgaccccaaacgaacaccccgcctttaagcatttgttcaacaaagctcatctcgcccccccactgatccacctgaccctgagtgggcattccacatgcttcagggagcatagggtcgggggcaaagtgacagaccagcaagaccctaaggctgaggagttcttcctggtgcagaataaaatgaaatctctgccttgtttattgttgtcaacccagacacgacaaccctccgacttttctatctttagtccacccttcttgcccttttacagtactaagcccccacttagtagttggcccgtgctgaacgaacttctcggcacccccccccgtcgagggggagggcgcgctgaaggactattaacaagtcagtag

SEQ ID NO: 234812 - DNA, 375 bp, Artificial Sequence
  derived and/or modified sequence
atgaccccaaacgaacatccggccttcaagcacctgtttaataaggctcatctcgccccgcctctcattcacctcaccttgagcgggcactcgacctgtttcagggaacaccgagtcggaggaaaagttaccgaccaacaagatcccaaagctgaggagttctttctggtccagaacaagatgaaatccttgccgtgcctcctgttgagcacccagactagacaacctagtgatttcagcatattttccccgcccttcctgcccttttactccacaaaacctcctctgagcagttggccagtcttgaatgaactgttgggcacgccacctcggaggggaggcggacgggcggagggtttgctgacctcgcagtag

SEQ ID NO: 234813 - DNA, 375 bp, Artificial Sequence
  derived and/or modified sequence
atgacccccaacgagcaccccgccttcaagcacctgttcaacaaggcacatctcgcaccccctctcatccatctgaccctgagtggccattccacttgcttcagagagcatcgggtaggcggaaaagtcacagatcaacaggatccaaaagctgaggaatttttccttgtgcaaaacaagatgaaaagcctgccctgcctgctgctgagcacccagactcgtcagccaagtgacttctccatctttagtcctccctttctaccattttattctacgaagccaccattgtcttcctggcccgtgctaaatgaattactggggaccccaccacggagggggggtgggagggcggaaggtctgcttaccagccagtag

SEQ ID NO: 234814 - DNA, 375 bp, Artificial Sequence
  derived and/or modified sequence
atgacccccaacgagcaccccgccttcaagcacctgttcaacaaggcccacctagctcctcccctgatacatctaaccctgtccggacactctacgtgtttcagagagcatagggttggtggcaaggtcactgaccaacaggaccctaaggccgaggagtttttccttgtccaaaataagatgaagtctcttccctgcctcctgctgtcaacacagacccgacagccatctgacttcagcatattcagccccccatttctgcccttctatagtacgaagccgcccttatccagttggcccgtcttgaatgagttgttagggaccccgccccggagggggggcggtagggccgaaggccttctgacatcccagtag

SEQ ID NO: 234815 - DNA, 375 bp, Artificial Sequence
  derived and/or modified sequence
atgacccccaacgagcaccccgccttcaagcacctgttcaacaaggcccacctggctcctcctctgattcacctcaccctcagcggacattcaacctgttttcgggagcaccgggttggaggcaaggtaacagatcaacaggatccaaaagcagaggaattttttctggtacagaacaagatgaaatctctgccttgtctcctactctctacacagacccgccagccgtcagacttttccatttttagtcctcccttcctaccgttttatagcacgaaacctcctctgtcgtcatggcccgtgctcaatgagctgctagggactcctcctaggagggggggtgggcgggcggaaggcttgcttacatctcagtag

SEQ ID NO: 234816 - DNA, 375 bp, Artificial Sequence
  derived and/or modified sequence
atgactcccaatgagcacccagcttttaaacatttgttcaataaggcccatcttgcacctccactgatccacctgaccctgagcggacacagcacctgttttcgtgagcacagggtaggcggaaaggtcacagaccagcaggatcctaaggcggaggaattctttctggtacaaaacaagatgaaaagtctcccgtgccttctgctcagtacccaaacgcgtcagcctagcgatttttctatcttttcccctcctttcctgccattctactccaccaaacctcccctgtccagctggcctgttctgaatgagttactgggcactcctcctcgcaggggagggggtagagcagaggggctcctcacctcccagtag

SEQ ID NO: 234817 - protein, 788 aa, Artificial Sequence
  derived and/or modified sequence
MLCGRWRRCRRPPEEPPVAAQVAAQVAAPVALPSPPTPSDGGTKRPGLRALKKMGLTEDEDVRAMLRGSRLRKIRSRTWHKERLYRLQEDGLSVWFQRRIPRAPSQHIFFVQHIEAVREGHQSEGLRRFGGAFAPARCLTIAFKGRRKNLDLAAPTAEEAQRWVRGLTKLRARLDAMSQRERLDPWIHSYLHRADSNQDSKMSFKEIKSLLRMVNVDMNDMYAYLLFKECDHSNNDRLEGAEIEEFLRRLLKRPELEEIFHQYSGEDRVLSAPELLEFLEDQGEEGATLARAQQLIQTYELNETAKQHELMTLDGFMMYLLSPEGAALDNTHTCVFQDMNQPLAHYFISSSHNTYLTDSQIGGPSSTEAYDRAFAQGCRCVELDCWEGPGGEPVIYHGHTLTSKILFRDVVQAVRDHAFTLSPYPVILSLENHCGLEQQAAMARHLCTILGDMLVTQALDSPNPEELPSPEQLKGRVLVKGKKLPAARSEDGRALSDREEEEEDDEEEEEEVEAAAQRRLAKQISPELSALAVYCHATRLRLHPAPNAPQPCQVSSLSERKAKKLIREAGNSFVRHNARQLTRVYPLGLRMNSANYSPQEMWNSGCQLVALNFQTPGYEMDLNAGRFLVNGQCGYVLKPACLRQPDSTFDPEYPGPPRTTLSIQVLTAQQLPKLNAEKPHSIVDPLVRIEIHGVPADCARQETDYVLNNGFNPRWGQTLQFQLRAPELALVRFVVEDYDATSPNDFVGQFTLPLSSLKQGYRHIHLLSKDGASLSPATLFIQIRIQRS

SEQ ID NO: 234818 - DNA, 2367 bp, Artificial Sequence
  derived and/or modified sequence
atgctgtgcggcagatggagaagatgcagaagaccccccgaggagccccccgtggccgcccaggtggccgcccaggtggccgcccccgtggccctgcccagcccccccacccccagcgacggcggcaccaagagacccggcctgagagccctgaagaagatgggcctgaccgaggacgaggacgtgagagccatgctgagaggcagcagactgagaaagatcagaagcagaacctggcacaaggagagactgtacagactgcaggaggacggcctgagcgtgtggttccagagaagaatccccagagcccccagccagcacatcttcttcgtgcagcacatcgaggccgtgagagagggccaccagagcgagggcctgagaagattcggcggcgccttcgcccccgccagatgcctgaccatcgccttcaagggcagaagaaagaacctggacctggccgcccccaccgccgaggaggcccagagatgggtgagaggcctgaccaagctgagagccagactggacgccatgagccagagagagagactggacccctggatccacagctacctgcacagagccgacagcaaccaggacagcaagatgagcttcaaggagatcaagagcctgctgagaatggtgaacgtggacatgaacgacatgtacgcctacctgctgttcaaggagtgcgaccacagcaacaacgacagactggagggcgccgagatcgaggagttcctgagaagactgctgaagagacccgagctggaggagatcttccaccagtacagcggcgaggacagagtgctgagcgcccccgagctgctggagttcctggaggaccagggcgaggagggcgccaccctggccagagcccagcagctgatccagacctacgagctgaacgagaccgccaagcagcacgagctgatgaccctggacggcttcatgatgtacctgctgagccccgagggcgccgccctggacaacacccacacctgcgtgttccaggacatgaaccagcccctggcccactacttcatcagcagcagccacaacacctacctgaccgacagccagatcggcggccccagcagcaccgaggcctacgacagagccttcgcccagggctgcagatgcgtggagctggactgctgggagggccccggcggcgagcccgtgatctaccacggccacaccctgaccagcaagatcctgttcagagacgtggtgcaggccgtgagagaccacgccttcaccctgagcccctaccccgtgatcctgagcctggagaaccactgcggcctggagcagcaggccgccatggccagacacctgtgcaccatcctgggcgacatgctggtgacccaggccctggacagccccaaccccgaggagctgcccagccccgagcagctgaagggcagagtgctggtgaagggcaagaagctgcccgccgccagaagcgaggacggcagagccctgagcgacagagaggaggaggaggaggacgacgaggaggaggaggaggaggtggaggccgccgcccagagaagactggccaagcagatcagccccgagctgagcgccctggccgtgtactgccacgccaccagactgagactgcaccccgcccccaacgccccccagccctgccaggtgagcagcctgagcgagagaaaggccaagaagctgatcagagaggccggcaacagcttcgtgagacacaacgccagacagctgaccagagtgtaccccctgggcctgagaatgaacagcgccaactacagcccccaggagatgtggaacagcggctgccagctggtggccctgaacttccagacccccggctacgagatggacctgaacgccggcagattcctggtgaacggccagtgcggctacgtgctgaagcccgcctgcctgagacagcccgacagcaccttcgaccccgagtaccccggcccccccagaaccaccctgagcatccaggtgctgaccgcccagcagctgcccaagctgaacgccgagaagccccacagcatcgtggaccccctggtgagaatcgagatccacggcgtgcccgccgactgcgccagacaggagaccgactacgtgctgaacaacggcttcaaccccagatggggccagaccctgcagttccagctgagagcccccgagctggccctggtgagattcgtggtggaggactacgacgccaccagccccaacgacttcgtgggccagttcaccctgcccctgagcagcctgaagcagggctacagacacatccacctgctgagcaaggacggcgccagcctgagccccgccaccctgttcatccagatcagaatccagagaagctag

SEQ ID NO: 234819 - DNA, 2367 bp, Artificial Sequence
  derived and/or modified sequence
atgctgtgtggtaggtggagacgttgcaggcggccgccagaggagcccccagtggccgcccaggtagcagctcaggtggcagcgcccgtggctctaccaagtccgcctacgccctccgacggcggtacaaaaagacccgggctgcgagcccttaaaaaaatggggctgacggaagatgaagacgtaagggctatgctccgaggatcccgtctgcggaaaatcaggagcagaacttggcataaggagagactctaccgcttgcaggaagatggcctttctgtgtggtttcagaggagaatacccagagcccctagtcagcatatcttcttcgtgcagcatatcgaagcggtgcgggagggtcatcagagcgagggtcttaggcggtttggaggcgcgttcgcgcctgccagatgtcttactatcgcatttaagggccgccggaagaacctggaccttgcagcgcctactgccgaagaagcccagcggtgggttcgcgggctcactaaactgcgggcacgcctggatgcaatgtcccagcgggaaaggctagatccctggattcactcctacttgcatcgagcagattccaatcaggatagcaagatgtcctttaaagaaattaaatccctcctgaggatggtaaatgtggacatgaatgatatgtacgcgtatcttctgtttaaagagtgcgaccactctaataacgataggctggagggcgccgagatagaggagttcctccgcaggctgctgaaaagaccagagctcgaggagatcttccaccagtactcaggagaggatcgcgtgcttagcgcccctgaactcctggagttccttgaagatcagggagaagaaggggcaacactggcccgcgctcagcagctgatccagacctacgagctaaacgaaactgccaaacagcacgaactgatgaccctggacggctttatgatgtatctgctctccccagagggggctgcgttagacaatacccacacctgcgtgttccaggatatgaatcagcctcttgctcattatttcatcagctcttctcacaatacgtatctgactgatagccagataggcggcccctcaagcactgaggcctacgaccgcgccttcgctcaggggtgcaggtgtgtggagctggactgctgggagggccccggcggtgaaccagtgatttaccacggccacacactgacaagcaaaatcctgtttcgtgacgtggtacaggccgtgagagaccacgccttcactctttctccttaccccgtcatcctgtcactggagaatcactgtgggcttgaacaacaggctgctatggcgcggcatttgtgtaccattctgggcgatatgttggtgacacaagcccttgatagcccaaatcctgaggagctcccatcccccgaacagttaaaaggcagagtgctggtaaaggggaaaaagcttcctgcagccagaagcgaggacgggagggccctgagcgatagagaggaggaggaagaggacgatgaagaggaagaagaagaagtcgaggcggctgcccagcggcgattagccaagcagatttctcccgagctgagcgccctcgctgtgtattgtcatgccaccagattgaggctccaccccgccccgaatgcaccacaaccgtgtcaggtgtcctccctaagcgaacgaaaagccaagaaattaatacgggaagccgggaactctttcgtgagacacaatgcacgtcaactgaccagggtatatccacttggcctacgcatgaattccgcgaactactctccacaagagatgtggaacagcggttgtcaactggtcgcactcaactttcaaactcccggctacgaaatggatcttaacgccggacgttttctcgttaatggccaatgtgggtacgtgctcaaacctgcctgtctgagacagccggattcaaccttcgaccctgagtacccgggaccacctcgcacgaccctctcaatacaggtcttaaccgcccagcagttgcctaagctaaacgccgagaagccgcactcaatcgtggaccctctagtccgaatcgaaattcatggggtcccagccgactgtgcacgccaggaaactgactatgtgcttaacaacggatttaaccctaggtggggacaaacccttcaattccagctcagggcccccgagctggcgctggttcggttcgtagtcgaagactatgacgctacatcaccaaacgatttcgtaggtcagttcacgctgcctctgtcaagcttaaaacagggctatcggcacattcaccttctctccaaagacggcgccagcctaagccccgccactctgttcatacagattcgaatccaacgtagctag

SEQ ID NO: 234820 - DNA, 2367 bp, Artificial Sequence
  derived and/or modified sequence
atgctgtgtggccgctggaggcgctgccggcggcccccagaggagccccctgtggccgcccaggtggccgcccaggtggccgcccctgtggccctgcccagcccccccacccccagtgatggcggcaccaagaggcctggcctgcgggccctgaagaagatgggcctgacagaagatgaagatgtgcgggccatgctgcggggcagccggctgaggaagatccgcagcaggacctggcacaaggagcggctgtaccgcctgcaggaggatggcctgtctgtgtggttccagaggcgcatcccccgggcccccagccagcacatcttctttgtgcagcacatcgaggccgtgcgggagggccaccagagcgagggcctgcggagatttggaggagcctttgccccagcccgctgcctgaccatcgccttcaagggccgcaggaagaacctggacctggccgcccccacagctgaggaggcccagcgctgggtgcggggcctgaccaagctgcgggcccggctggatgccatgagccagcgggagcggctggacccctggatccacagctacctgcacagagctgacagcaaccaggacagcaagatgtccttcaaggagatcaagagcctgctgaggatggtgaatgtggacatgaatgacatgtatgcctacctgctcttcaaggaatgtgaccacagcaacaatgaccggctggagggcgctgagattgaggagttcctgcggcggctgctgaagaggcctgagctggaggagatcttccaccagtacagcggggaggacagagtgctgagcgcccctgagctgctggagttcctggaggaccagggcgaggagggcgccaccctggcccgggcccagcagctgatccagacctatgagctgaatgaaacagccaagcagcacgagctgatgaccctggatggcttcatgatgtacctgctgagccctgagggcgccgccctggacaacacccacacctgtgtgttccaggacatgaaccagcccctggcccactacttcatcagcagcagccacaacacctacctgacagacagccagattggaggccccagcagcacagaggcctatgaccgggcctttgcccagggctgccgctgtgtggagctggactgctgggagggccctggaggagagcctgtgatctaccacggccacaccctgaccagcaagatcctcttcagagatgtggtgcaggccgtgcgggaccacgccttcaccctgagcccctaccctgtgatcctgagcctggagaaccactgcggcctggagcagcaggccgccatggcccggcacctgtgcaccatcctgggggacatgctggtgacccaggccctggacagccccaaccctgaggagctgcccagccctgagcagctgaagggccgggtgctggtgaagggcaagaagctgcctgctgcccggagtgaagatggccgggccctgagtgaccgggaggaggaggaggaggatgatgaggaggaggaggaggaggtggaggccgccgcccagaggcggctggccaagcagatcagccctgagctgagcgccctggccgtgtactgccacgccacccggctgcggctgcacccagccccaaatgccccccagccctgccaggtgagcagcctgtctgagaggaaggccaagaagctgatccgggaggccggcaacagctttgtgcgccacaatgcccggcagctgaccagggtgtaccccctgggcctgaggatgaacagcgccaactacagcccccaggagatgtggaacagcggctgccagctggtggccctgaacttccagaccccaggctatgagatggacctgaatgccggccgcttcctggtgaatggccagtgtggctacgtgctgaagccagcctgcctgcggcagcctgacagcacctttgatcctgagtacccaggcccccccaggaccaccctgagcatccaggtgctgacagcccagcagctgcccaagctgaatgctgagaagccccacagcatcgtggaccccctggtgagaattgagatccacggcgtgcctgctgactgtgcccggcaggagacagattatgtgctgaacaacggcttcaacccccgctggggccagaccctgcagttccagctgcgggcccctgagctggccctggtgcgctttgtggtggaggactatgatgccaccagccccaatgactttgtgggccagttcaccctgcccctgagcagcctgaagcagggctaccgccacatccacctgctgagcaaggatggagccagcctgagccctgccaccctcttcatccagatccgcatccagaggagctag

SEQ ID NO: 234821 - DNA, 2367 bp, Artificial Sequence
  derived and/or modified sequence
atgctgtgcggccggtggcggcggtgccggcggccccccgaggagccccccgtggccgcacaggtggctgctcaggtggcagcccccgtggccttaccaagtccccctactcccagcgatggaggtacaaagagaccaggtttacgggcactaaagaagatgggcctgacagaggacgaggatgtgcgtgccatgcttaggggatctcggctccgaaaaatccgatctagaacatggcataaagagaggctctacaggctgcaagaagatggcctgtctgtgtggttccagcggaggattccacgggcaccgtctcaacacattttcttcgtgcagcacatcgaggccgtgagagaaggccaccagtcagagggcctcaggaggtttgggggtgcctttgctcctgccaggtgcttgacaatcgctttcaagggcagacgcaaaaatcttgatctagcggcgccaacggctgaggaggctcaaagatgggtccgcggccttactaagctgagggctaggctagacgcaatgtcacaaagagagagattagatccgtggatccatagttacttgcaccgcgctgacagtaatcaggactccaagatgtctttcaaagaaattaaaagtttactgcggatggtgaatgtggatatgaatgatatgtatgcatatctgctgttcaaagaatgcgaccacagtaataacgaccggctggaaggcgctgaaattgaagagttcctgcgccgcctgctgaagcggcctgaactagaggagatttttcaccagtatagcggcgaagatcgcgtgcttagcgccccagaactgttggagtttcttgaggatcagggggaagaaggggccacactggccagggctcagcaacttattcaaacatatgagctcaatgagacagccaagcagcatgaattaatgaccctcgacggttttatgatgtacctcttatcccccgaaggagcagcactggataatacccatacctgcgtgtttcaggacatgaatcagccccttgcacactatttcatcagctcctcccacaacacttatcttactgactcacagatcggtggcccatcttccacggaggcctatgacagggctttcgcgcagggatgtagatgcgtggaactggactgctgggagggacctggcggggagcccgtcatttatcacggtcacaccctgacttctaagattctgttcagagacgtggtgcaagcagtgcgagatcatgccttcaccctgtccccatacccagtcattttgtcccttgaaaatcactgtggtttggagcaacaggccgccatggctagacacttgtgcacaattcttggagacatgctggtgacccaggccctggactcccccaatcccgaagagctgccatcacccgagcagctgaaagggagggtcctagtaaaggggaagaagttaccggcagctagatccgaggatggccgggctctctcagacagagaggaggaggaagaggatgatgaggaagaagaggaggaagttgaggccgcagctcagaggcgcctagccaagcagatctcacctgaactcagcgctctggccgtctattgtcatgcaactagactacggttgcaccctgctccaaatgctcctcagccctgtcaggtgtcatccttgagcgagcgtaaagccaagaaattaatcagagaagccggtaattcctttgtgcgtcataacgcaaggcagttaactagagtgtatcccttaggcctgcggatgaacagtgccaattattcaccccaggagatgtggaactctggttgccagctggtggcactgaatttccagacacctggctatgagatggatctgaacgccggtagattcttggttaacggacagtgtgggtacgtgctaaagcccgcctgtctgcgacagccagacagcactttcgatccggagtatcctggccctcccaggacaacactaagtatccaggttcttacagctcaacagctgcccaagctaaacgcggagaagccgcatagtatcgtggaccccctggtaagaatcgaaattcacggcgtacctgccgactgcgcccgacaggaaacagactatgtgttgaacaatggtttcaacccacgctggggccagactctgcagtttcagctgagagcccccgaattagcccttgttcgcttcgttgttgaggattacgacgcaacttcacctaacgacttcgttgggcagtttacactccctctgagctccctcaaacagggatataggcatatccacctccttagtaaagatggcgcctcgctgtcgccagctactctctttattcagatccgcatccagagatcgtag

SEQ ID NO: 234822 - DNA, 3456 bp, Artificial Sequence
  derived and/or modified sequence
gctaagtttcttcgctcgccgcctcgctcagagccggggccgggccagagcggcgccccgctgccctgtccccgcgtgcagaccccgggcccggccccggccccccgccaagccatgctgtgcggccgctggaggcgttgccgccgcccgcccgaggagcccccggtggccgcccaggtcgcagcccaagtcgcggcgccggtcgctctcccgtccccgccgactccctccgatggcggcaccaagaggcccgggctgcgggcgctgaagaagatgggcctgacggaggacgaggacgtgcgcgccatgctgcggggctcccggctccgcaagatccgctcgcgcacgtggcacaaggagcggctgtaccggctgcaggaggacggcctgagcgtgtggttccagcggcgcatcccgcgtgcgccatcgcagcacatcttcttcgtgcagcacatcgaggcggtccgcgagggccaccagtccgagggcctgcggcgcttcgggggtgccttcgcgccagcgcgctgcctcaccatcgccttcaagggccgccgcaagaacctggacctggcggcgcccacggctgaggaagcgcagcgctgggtgcgcggtctgaccaagctccgcgcgcgcctggacgccatgagccagcgcgagcggctagacccctggatccactcctatctgcaccgggctgactccaaccaggacagcaagatgagcttcaaggagatcaagagcctgctgagaatggtcaacgtggacatgaacgacatgtacgcctacctcctcttcaaggagtgtgaccactccaacaacgaccgtctagagggggctgagatcgaggagttcctgcggcggctgctgaagcggccggagctggaggagatcttccatcagtactcgggcgaggaccgcgtgctgagtgcccctgagctgctggagttcctggaggaccagggcgaggagggcgccacactggcccgcgcccagcagctcattcagacctatgagctcaacgagacagccaagcagcatgagctgatgacactggatggcttcatgatgtacctgttgtcgccggagggggctgccttggacaacacccacacgtgtgtgttccaggacatgaaccagccccttgcccactacttcatctcttcctcccacaacacctatctgactgactcccagatcggggggcccagcagcaccgaggcctatgacagggcctttgcccagggatgccgctgcgtggagctggactgctgggaggggccaggaggggagcccgtcatctatcatggccataccctcacctccaagattctcttccgggacgtggtccaagccgtgcgcgaccatgccttcacgctgtccccttaccctgtcatcctatccctggagaaccactgcgggctggagcagcaggctgccatggcccgccacctctgcaccatcctgggggacatgctggtgacacaggcgctggactccccaaatcccgaggagctgccatccccagagcagctgaagggccgggtcctggtgaagggaaagaagttgcccgctgctcggagcgaggatggccgggctctgtcggatcgggaggaggaggaggaggatgacgaggaggaagaagaggaggtggaggctgcagcgcagaggcggctggccaagcagatctccccggagctgtcggccctggctgtgtactgccacgccacccgcctgcgactgcaccctgcccccaacgccccacaaccctgccaggtcagctccctcagcgagcgcaaagccaagaaactcattcgggaggcagggaacagctttgtcaggcacaatgcccgccagctgacccgcgtgtacccgctggggctgcggatgaactcagccaactacagtccccaggagatgtggaactcgggctgtcagctggtggccttgaacttccagacgccaggctacgagatggacctcaatgccgggcgcttcctagtcaatgggcagtgtggctacgtcctaaaacctgcctgcctgcggcaacctgactcgacctttgaccccgagtacccaggacctcccagaaccactctcagcatccaggtgctgactgcacagcagctgcccaagctgaatgccgagaagccacactccattgtggaccccctggtgcgcattgagatccatggggtgcccgcagactgtgcccggcaggagactgactacgtgctcaacaatggcttcaacccccgctgggggcagaccctgcagttccagctgcgggctccggagctggcactggtccggtttgtggtggaagattatgacgccacctcccccaatgactttgtgggccagtttacactgcctcttagcagcctaaagcaagggtaccgccacatacacctgctttccaaggacggggcctcactgtcaccagccacgctcttcatccaaatccgcatccagcgctcctgagggcccacctcactcgccttggggttctgcgagtgccagtccacatcccctgcagagccctctcctcctctggagtcaggtggtgggagtaccagccccccagcccacccacttggcccactcagcccattcaccaggcgctggtctcacctgggtgctgagggctgcctgggcccctcctgaagaacagaaaggtgttcatgtgacttcagtgagctccaaccctggggccctgagatggccccagctcctcttgtcctcagcccacccctcattgtgacttatgaggagcaagcctgttgctgccaggagacttggggagcaggacacttgtgggccctcagttcccctctgtcctcccgtgggccatcccagcctccttcccccagaggagcgcagtcactccacttggccccgaccccgagcttagcccctaagccctcctttaccccaggccttcctggactcctccctccagctccggaacctgagctccccttcccttctcaaagcaagaagggagcgctgaggcatgaagccctggggaaactggcagtaggttttggtttttattttttgagacagggtctcgctccgtcgcccaggctggagtgcaatgttgcaatcatggctcactgcagctttgaactcccaggctcaagcgatcctcccatctcagcctcctgagtagctgggactacaggcacaggccaccaaacctggctaatgtttaaattttatgtagagatggcggggggggcgggggtctccctatgttgcccaggctggtctcgagctcctgacctcaagtgatcctcctgccccagcattccaaagtgctgggattacaggtgtgagccactgcctggcctggccgtaggtttgtaactgtttcatagaagagccctggagaagacagtagaatgagcctatctagtttaaaaaataaagaagcacgttgatttcaccaccgcc

SEQ ID NO: 234823 - DNA, 2367 bp, Artificial Sequence
  derived and/or modified sequence
atgctgtgtggcaggtggcggagatgccgccgtccccctgaagagccacctgtggccgcacaagtagctgctcaggtcgctgcccctgtggccctgccatcccccccaacccccagtgacgggggtactaagcgcccagggctgcgagccctcaaaaagatgggactgactgaagatgaggatgttcgggctatgttgcgcggatccagacttcggaagataaggagtcggacctggcacaaagaacggttgtatcgcctgcaggaagatggattgagtgtctggttccagaggaggattcctagagccccttcacagcatatcttctttgtgcagcacattgaggctgtgagggagggacaccagagcgaaggtctcaggaggtttggcggtgcctttgcgcctgccaggtgcctgactatagccttcaagggcagacggaagaacctggatctggctgctcctacggcggaagaggcccaaaggtgggtgcgcggtctgaccaaacttagggctcggctcgacgcaatgagccagcgggagcggctagacccctggattcactcctacctccatcgggcagattctaatcaggacagcaaaatgtcttttaaggaaattaaatctctactccggatggtgaatgtagacatgaacgatatgtacgcctatctgctgtttaaagaatgtgaccactcaaataacgatcgtctggaaggcgctgaaattgaggagtttctgagaaggctgctgaagcggccagagctggaggagatcttccatcaatactccggggaagacagggttttgtctgctcctgaactgctggagttcctggaggaccaaggggaggaaggcgcaacactggctcgtgcccagcagcttattcagacgtatgagttaaacgaaactgccaagcagcacgaactgatgaccctcgatggcttcatgatgtacctgctgtcacctgaaggggctgcactcgataacactcacacttgtgtgttccaggacatgaaccaaccgctagctcactattttatctcctcctcccataatacatatctgactgactctcaaatcggcggtccctcctcaacggaggcatacgaccgggcttttgcccaggggtgcaggtgtgttgaacttgactgctgggagggccctggtggcgagcccgttatctaccatgggcacactttgacatccaaaatccttttcagagatgtcgtccaggctgttagggatcatgcattcaccttgagtccataccccgtcattttaagcctggagaaccactgcggattagagcagcaggctgctatggctcgccacctgtgtaccatcctaggagacatgctcgttacccaagcgctggacagccctaaccccgaggagctgccgagccccgagcagctgaagggacgtgtcctcgtgaaagggaagaaactgcctgcagcaaggagtgaagacggaagggcattgagcgaccgcgaggaggaagaggaagatgacgaagaagaagaggaagaagttgaagcggctgcacagagacgcctcgccaagcagatatctcccgagctttcagcattggcagtttactgtcacgctactcgcctgagacttcatcctgcccctaacgctccccagccttgccaagtgagcagcctgtcagagaggaaggctaagaagctcatccgcgaagccggaaactcatttgtgcggcataatgccagacaattgacacgagtttacccattgggactgcggatgaattcagcaaactatagtccacaggaaatgtggaattctggctgccagctggtggcacttaacttccaaacccctggttatgagatggatctgaacgccggaagattcttggttaatggacagtgtggctacgttctgaagcccgcatgcctgcgacaacccgacagcacgtttgatccagagtacccaggaccccctcggaccaccctaagcatccaggtgctgacggcacagcagttaccgaagctaaatgccgagaagcctcactctatcgtggaccctcttgtgcggatcgaaattcatggcgtgcccgcagattgtgctcgccaagagactgattacgtcctgaacaatgggttcaaccctcggtggggacagactttacagtttcagttgcgtgcgccagagctggcccttgttaggtttgttgtcgaggactacgacgcgaccagtcctaatgatttcgtgggacagtttaccctgccactatccagccttaagcagggctacagacacattcacttacttagcaaggacggggcatctctctcaccggcaactctgttcattcagatcaggattcagcgctcctag

SEQ ID NO: 234824 - DNA, 557 bp, Artificial Sequence
  derived and/or modified sequence
tgtttccgtggagacgctctcggcgtcccctgtctccgctccggcggagccaggcttcggaatcactgagagaggagggggcagcgccaacgcccagcacctgccgccggtgggggactgacttcggcggaacggaaaactggagttgtttccctgggccagtgcaccgaggctgaagtctataagcctggagagaccatcagcagtaatctgcaaatgtgggggccaaacttagagattgtagctgtgatacaagagccaaccagcagatcaaagagtacaccaaatttcttctgaataccaacagtggaatggcttcaggcggccttttgatctttgtctcagcacccgatgatgccacactgtagcactgcccacttgctagcactggcggaggttcctgtgggtcctcctaacaggctgattcagcctgagctcctggggctaagctcatttggtagcagccaaagagtccgaaatgaccaccctgcccccactgcccatgacacgcccgaagcttacagccttagccagacagaagctgccttgctcctcca

SEQ ID NO: 234825 - protein, 861 aa, Artificial Sequence
  derived and/or modified sequence
MNQPGGAAAPQADGASAAGRKSTASRERLKRSQKSTKVEGPEPVPAEASLSAEQGTMTEVKVKTELPDDYIQEVIWQGEAKEEKKAVSKDGTSDVPAEICVVIGGVRNQQTLGSYECGICGKKYKYYNCFQTHVRAHRDTEATSGEGASQSNNFRYTCDICGKKYKYYSCFQEHRDLHAVDVFSVEGAPENRADPFDQGVVATDEVKEEPPEPFQKIGPMNNITSDIFKKKEVRQCQKRETGNYTCEFCGKQYKYYTPYQEHVALHAPIKSAFSRRVEGKAQNHFEETNSSSQNSSEPYTCGACGIQFQFYNNLLEHMQSHAADNENNIASNQSRSPPAVVEEKWKPQAQRNSANNTTTSGLTPNSMIPEKERQNIAERLLRVMCADLGALSVVSGKEFLKLAQTLVDSGARYGAFSVTEILGNFNTLALKHLPRMYNQVKVKVTCALGSNACLGIGVTCHSQSVGPDSCYILTAYQAEGNHIKSYVLGVKGADIRDSGDLVHHWVQNVLSEFVMSEIRTVYVTDCRVSTSAFSKAGMCLRCSACALNSVVQSVLSKRTLQARSMHEVIELLNVCEDLAGSTGLAKETFGSLEETSPPPCWNSVTDSLLLVHERYEQICEFYSRAKKMNLIQSLNKHLLSNLAAILTPVKQAVIELSNESQPTLQLVLPTYVRLEKLFTAKANDAGTVSKLCHLFLEALKENFKVHPAHKVAMILDPQQKLRPVPPYQHEEIIGKVCELINEVKESWAEEADFEPAAKKPRSAAVENPAAQEDDRLGKNEVYDYLQEPLFQATPDLFQYWSCVTQKHTKLAKLAFWLLAVPAVGARSGCVNMCEQALLIKRRRLLSPEDMNKLMFLKSNML

SEQ ID NO: 234826 - DNA, 2586 bp, Artificial Sequence
  derived and/or modified sequence
atgaaccagcccggcggcgccgccgccccccaggccgacggcgccagcgccgccggcagaaagagcaccgccagcagagagagactgaagagaagccagaagagcaccaaggtggagggccccgagcccgtgcccgccgaggccagcctgagcgccgagcagggcaccatgaccgaggtgaaggtgaagaccgagctgcccgacgactacatccaggaggtgatctggcagggcgaggccaaggaggagaagaaggccgtgagcaaggacggcaccagcgacgtgcccgccgagatctgcgtggtgatcggcggcgtgagaaaccagcagaccctgggcagctacgagtgcggcatctgcggcaagaagtacaagtactacaactgcttccagacccacgtgagagcccacagagacaccgaggccaccagcggcgagggcgccagccagagcaacaacttcagatacacctgcgacatctgcggcaagaagtacaagtactacagctgcttccaggagcacagagacctgcacgccgtggacgtgttcagcgtggagggcgcccccgagaacagagccgaccccttcgaccagggcgtggtggccaccgacgaggtgaaggaggagccccccgagcccttccagaagatcggccccatgaacaacatcaccagcgacatcttcaagaagaaggaggtgagacagtgccagaagagagagaccggcaactacacctgcgagttctgcggcaagcagtacaagtactacaccccctaccaggagcacgtggccctgcacgcccccatcaagagcgccttcagcagaagagtggagggcaaggcccagaaccacttcgaggagaccaacagcagcagccagaacagcagcgagccctacacctgcggcgcctgcggcatccagttccagttctacaacaacctgctggagcacatgcagagccacgccgccgacaacgagaacaacatcgccagcaaccagagcagaagcccccccgccgtggtggaggagaagtggaagccccaggcccagagaaacagcgccaacaacaccaccaccagcggcctgacccccaacagcatgatccccgagaaggagagacagaacatcgccgagagactgctgagagtgatgtgcgccgacctgggcgccctgagcgtggtgagcggcaaggagttcctgaagctggcccagaccctggtggacagcggcgccagatacggcgccttcagcgtgaccgagatcctgggcaacttcaacaccctggccctgaagcacctgcccagaatgtacaaccaggtgaaggtgaaggtgacctgcgccctgggcagcaacgcctgcctgggcatcggcgtgacctgccacagccagagcgtgggccccgacagctgctacatcctgaccgcctaccaggccgagggcaaccacatcaagagctacgtgctgggcgtgaagggcgccgacatcagagacagcggcgacctggtgcaccactgggtgcagaacgtgctgagcgagttcgtgatgagcgagatcagaaccgtgtacgtgaccgactgcagagtgagcaccagcgccttcagcaaggccggcatgtgcctgagatgcagcgcctgcgccctgaacagcgtggtgcagagcgtgctgagcaagagaaccctgcaggccagaagcatgcacgaggtgatcgagctgctgaacgtgtgcgaggacctggccggcagcaccggcctggccaaggagaccttcggcagcctggaggagaccagcccccccccctgctggaacagcgtgaccgacagcctgctgctggtgcacgagagatacgagcagatctgcgagttctacagcagagccaagaagatgaacctgatccagagcctgaacaagcacctgctgagcaacctggccgccatcctgacccccgtgaagcaggccgtgatcgagctgagcaacgagagccagcccaccctgcagctggtgctgcccacctacgtgagactggagaagctgttcaccgccaaggccaacgacgccggcaccgtgagcaagctgtgccacctgttcctggaggccctgaaggagaacttcaaggtgcaccccgcccacaaggtggccatgatcctggacccccagcagaagctgagacccgtgcccccctaccagcacgaggagatcatcggcaaggtgtgcgagctgatcaacgaggtgaaggagagctgggccgaggaggccgacttcgagcccgccgccaagaagcccagaagcgccgccgtggagaaccccgccgcccaggaggacgacagactgggcaagaacgaggtgtacgactacctgcaggagcccctgttccaggccacccccgacctgttccagtactggagctgcgtgacccagaagcacaccaagctggccaagctggccttctggctgctggccgtgcccgccgtgggcgccagaagcggctgcgtgaacatgtgcgagcaggccctgctgatcaagagaagaagactgctgagccccgaggacatgaacaagctgatgttcctgaagagcaacatgctgtag

SEQ ID NO: 234827 - DNA, 2586 bp, Artificial Sequence
  derived and/or modified sequence
atgaatcagcccgggggcgccgctgcgccccaggcagacggtgcctccgccgcaggtcggaagtccaccgcctctcgcgaaagactgaagcgttcccagaagtcaacaaaggtggagggtccagagccagtcccagccgaggcgagcctaagcgcagagcagggcacgatgactgaggtgaaagtgaaaactgagctgcccgatgactacatccaggaggtgatctggcagggcgaagctaaggaggagaagaaggcagttagtaaggacgggacctcggacgtgccagccgagatttgcgtcgtgattggcggagttagaaatcagcagaccctggggagctatgaatgtgggatatgtggtaagaagtataaatactacaattgtttccagacacacgtgcgcgctcatagggacaccgaggcgaccagcggggaaggtgcctcccagtccaataacttccgctacacctgtgatatctgtggcaaaaaatacaagtactacagttgctttcaggagcatagggatttacacgctgttgatgtcttttcggtggaaggcgcaccagagaaccgagccgatcctttcgaccagggtgtcgtggctacggacgaggtcaaggaagaacctcccgagccctttcagaaaatcggccctatgaataacataacatctgatatcttcaaaaaaaaggaggtgagacagtgccagaagagggagacaggcaactacacttgtgagttttgtggtaagcagtataaatattataccccctaccaggagcatgttgctctgcacgcccctattaagtcagcctttagccgtcgagtcgagggaaaggcgcagaatcatttcgaggagactaacagctcatcccagaactcaagcgaaccatatacgtgcggcgcttgcggcatccaatttcagttttacaacaacttgctggagcatatgcagagtcacgctgcagataacgagaacaacattgcctcaaatcagtccagatcgcccccggctgtggtggaggagaagtggaagccccaggcccaaagaaactctgctaacaacacgaccacttctggtctcaccccaaacagcatgataccggagaaggagagacagaacatagctgaaaggttgttaagggtcatgtgcgccgatctgggtgcactgtctgtcgtgtctgggaaggagtttttgaaactggcccagaccctggtggacagcggggcacgttacggcgcctttagcgtgactgagattctgggcaatttcaacactctggctctgaaacatctgccccgaatgtataaccaggtgaaggtgaaagtgacatgcgcactgggctctaatgcctgtctgggcattggggttacttgccatagtcagtccgtgggtccagacagttgttacatcttgaccgcttaccaggccgaggggaatcacattaaatcctacgtactgggcgttaagggcgcagacattagagactccggcgatcttgtacatcattgggtccaaaacgtacttagtgaatttgttatgtcagagatcagaacagtgtacgttaccgactgtagggtgtcaacatccgccttttcaaaggccggaatgtgtttacggtgcagtgcctgcgcgctcaattctgtggtacagagcgtactatccaaacggacattgcaggctagaagcatgcatgaggtcatcgaactactcaacgtgtgtgaagacctggccgggtctacaggacttgccaaagagaccttcggcagccttgaggaaacttccccaccaccctgctggaacagcgtaaccgactctttgctgctcgtgcacgagagatatgagcaaatatgcgagttttattcacgagcaaagaaaatgaaccttattcagagtctgaacaagcatctgctttctaacctagctgccattttaactccagtgaagcaggcagtaatcgaactgtccaatgaatctcaaccaacacttcagctggttctgccaacctatgtgcggctcgagaagctgtttaccgccaaggccaatgacgccggaaccgtgtctaagctctgtcacctatttctggaagctttaaaggaaaactttaaagtgcatcctgcacataaagttgcgatgatactggacccccaacaaaagctccgaccagtgccaccgtaccaacatgaagaaatcatcggaaaagtgtgtgaactgattaacgaggtcaaggagagctgggccgaagaggccgacttcgagccagcagccaaaaaaccacggagtgcggcagtggaaaatccagcagcccaggaggacgaccgcctgggtaaaaacgaggtttatgattacctacaggaaccgctttttcaggccacacccgacctgtttcaatactggagctgcgtgacacaaaaacacactaagctcgcaaaactggcattctggctcctggccgttcctgctgtcggcgccagaagcggttgtgtaaatatgtgcgagcaggccctgctgattaaaaggagaaggctgctctcaccagaggacatgaataagctgatgttcctgaaatctaacatgttatag

SEQ ID NO: 234828 - DNA, 2586 bp, Artificial Sequence
  derived and/or modified sequence
atgaaccagcccggcggggccgccgccccccaggctgatggagccagcgctgctggcaggaagagcacagccagccgggagcggctgaagaggagccagaagagcaccaaggtggagggccctgagcctgtgcctgctgaggccagcctgtctgctgagcagggcaccatgacagaggtgaaggtgaagacagagctgcctgatgactacatccaggaggtgatctggcagggcgaggccaaggaggagaagaaggctgtgtccaaggatggcaccagtgatgtgcctgctgagatctgtgtggtgattggaggagtgaggaaccagcagaccctgggcagctatgaatgtggcatctgtgggaagaagtacaagtactacaactgcttccagacccacgtgcgggcccaccgggacacagaggccaccagcggggagggcgccagccagagcaacaacttccgctacacctgtgacatctgtgggaagaagtacaagtactacagctgcttccaggagcaccgggacctgcatgctgtggatgtgttttctgtggagggcgcccctgagaacagagctgacccctttgaccagggcgtggtggccacagatgaggtgaaggaggagcccccagagcccttccagaagattggccccatgaacaacatcaccagtgacatcttcaagaagaaggaggtgcggcagtgccagaagcgggagactggaaactacacctgtgagttctgtgggaagcagtacaagtactacaccccctaccaggagcacgtggccctgcacgcccccatcaagagcgccttcagcagaagagtggagggcaaggcccagaaccactttgaggagaccaacagcagcagccagaacagcagcgagccctacacctgtggggcctgtggcatccagttccagttctacaacaacctgctggagcacatgcagagccacgccgctgacaatgaaaacaacatcgccagcaaccagagccgcagccccccagctgtggtggaggagaagtggaagccccaggcccagagaaattctgccaacaacaccaccaccagcggcctgacccccaacagcatgatccctgagaaggagcggcagaacattgctgagcggctgctgcgggtgatgtgtgccgacctgggcgccctgtctgtggtgtctgggaaggagttcctgaagctggcccagaccctggtggacagcggggcccgctatggagccttctctgtgacagagatcctgggcaacttcaacaccctggccctgaagcacctgcccaggatgtacaaccaggtgaaggtgaaggtgacctgtgccctgggcagcaatgcctgcctgggcatcggcgtgacctgccacagccagagcgtgggccctgacagctgctacatcctgacagcctaccaggccgagggcaaccacatcaagagctatgtgctgggcgtgaagggagctgacatccgggacagcggggacctggtgcaccactgggtgcagaatgtgctgtctgaatttgtgatgtctgagatcagaacagtgtatgtgacagactgccgggtgtccaccagcgccttcagcaaggccggcatgtgcctgcgctgcagcgcctgtgccctgaacagcgtggtgcagagcgtgctgagcaagaggaccctgcaggcccgctccatgcatgaggtgattgagctgctgaatgtgtgtgaggacctggccggcagcacaggcctggccaaggagaccttcggcagcctggaggagaccagccccccaccctgctggaacagcgtgacagacagcctgctgctggtgcatgaaagatatgagcagatctgtgagttctacagccgggccaagaagatgaacctgatccagagcctgaacaagcacctgctgagcaacctggccgccatcctgacccctgtgaagcaggccgtcatcgagctgagcaatgaaagccagcccaccctgcagctggtgctgcccacctacgtgcggctggagaagctgttcaccgccaaggccaatgatgctggcaccgtgtccaagctgtgccacctgttcctggaggccctgaaggagaacttcaaggtgcacccagcccacaaggtggccatgatcctggacccccagcagaagctgcggcctgtgcccccctaccagcacgaggagatcatcggcaaggtgtgtgagctgatcaatgaggtgaaggagagctgggccgaggaggccgactttgagcctgctgccaagaagcccaggtctgctgctgtggagaacccagctgcccaggaggatgaccggctgggcaagaatgaggtgtatgactacctgcaggagcccctcttccaggccaccccagacctcttccagtactggagctgtgtgacccagaagcacaccaagctggccaagctggccttctggctgctggccgtgcctgctgtgggcgcccggagcggctgtgtgaacatgtgtgagcaggccctgctgatcaagagaagaaggctgctgagccctgaggacatgaacaagctgatgttcctgaagagcaacatgctgtag

SEQ ID NO: 234829 - DNA, 2586 bp, Artificial Sequence
  derived and/or modified sequence
atgaaccagcccggcggcgccgccgccccccaggccgacggcgcctctgctgctggacggaaatctacggctagtcgcgagcgactgaaaagaagccaaaagtctacaaaagtggagggccccgagcctgttcctgccgaagcaagtctctcagcagagcaaggtactatgaccgaggtgaaggtaaagacagagctacccgatgactacattcaggaagtcatctggcagggcgaggctaaggaagaaaaaaaggcagtcagtaaggatggaacaagcgatgtgccagcggaaatttgcgtcgtcatcgggggggtcaggaaccagcagacattgggatcctacgagtgcggcatatgcggtaaaaaatacaagtactataattgttttcagacacatgtccgcgcacacagggatacagaggccacttcaggagagggagcctctcagtccaacaactttaggtatacatgcgacatatgcggaaaaaagtataaatattatagctgcttccaggagcatcgcgatttgcacgccgttgacgtgttctcagtcgagggcgcacccgaaaatcgggccgacccatttgaccagggggtcgtggcaacggatgaggtgaaagaagaaccaccggagccattccagaagatcggacccatgaacaacattacatctgatattttcaaaaaaaaggaggtccggcagtgccagaagcgggagaccggcaattatacatgcgagttctgtgggaagcagtacaaatattatacaccataccaggaacatgtggccctgcatgctcccattaagtccgcattcagtcgccgagttgagggcaaagctcagaatcatttcgaggagacgaattccagtagccagaacagttccgagccctacacgtgtggcgcctgtggcatacagttccaattttacaataacttattagagcatatgcagtcacatgcagccgacaatgaaaacaacattgcatctaatcaatctagaagtcccccggccgtcgttgaagagaaatggaagcctcaggcacagcggaattctgctaacaacaccactacctctggtctgactcccaatagcatgatccccgaaaaggaaagacaaaacatcgcggaaaggctcctgcgcgttatgtgcgccgatctgggagcgctcagcgtggtgtccggtaaagagttccttaaactggcacaaactctggtagatagcggggcacgttatggcgcgttcagtgttaccgagatccttggcaacttcaacacattggctctgaagcatttacctaggatgtacaaccaggtaaaagtgaaagtcacctgtgccctcggcagtaatgcctgtttgggcatcggtgtaacttgccactcccagtccgttggtcccgacagttgctacattctcacagcctatcaggccgagggcaaccatattaagtcctatgtgctgggcgtgaagggggccgatatcagagactccggtgacctggtccaccattgggttcagaatgtgttgtccgaatttgttatgtctgaaattcgaaccgtctacgttaccgactgccgcgtgtcaacctcagcctttagtaaggcaggtatgtgcttgcgctgcagtgcttgtgcattgaactccgtggtccagagtgttctctccaagcgaacactgcaagcccggtccatgcacgaggtgatcgagttattgaacgtatgtgaagatctcgcagggagcaccggactggctaaagagaccttcggcagcctggaagagaccagtccacccccgtgttggaacagcgtgactgactcccttctactcgtccacgagaggtacgagcaaatctgcgaattctactcacgggctaagaaaatgaatttaatccagtctctgaataaacacctgctgagcaatctggccgccattcttaccccagttaaacaggctgtcattgagctgagtaatgaatcacaaccaaccctccagttggtgctccctacctatgtgcggttggagaaactcttcaccgcaaaagcaaacgacgcgggcaccgtgagcaaattgtgccatctgtttcttgaagcccttaaggaaaactttaaggtgcatcccgcacataaagtcgcaatgatcctggatcctcagcagaaactgcgaccagtgcccccttatcagcacgaggaaattattggaaaggtgtgtgagctcatcaatgaagtgaaggagtcttgggcagaggaggccgacttcgagcccgccgctaagaagcctcggtccgctgccgtagaaaaccctgccgcccaggaggatgaccgcctgggtaagaatgaggtgtacgattatctgcaagagcccctctttcaggctactccagacctgttccagtattggtcttgtgtgacccagaaacatactaagttagcaaagttggccttttggctcctggcagtccccgcagtcggcgcccgttccggctgcgtaaacatgtgcgaacaggccctcttgatcaagcgtcgcagactactgtctccggaggatatgaataagcttatgtttctgaaaagtaacatgttatag

SEQ ID NO: 234830 - DNA, 2586 bp, Artificial Sequence
  derived and/or modified sequence
atgaaccaacctgggggagccgcagcgcctcaggctgatggcgcaagcgctgccggacgaaagagcacagcctcccgagagcgattgaagaggtcgcaaaagtctaccaaagtggaaggccctgagcctgttcccgctgaggcttccctctcagcagagcagggcacaatgacagaggtaaaggtgaagaccgagctccctgacgactatattcaggaggtgatctggcagggcgaagcgaaggaggagaaaaaggccgtctccaaggacggtaccagtgatgtgccagccgagatctgcgtggttattggcggagtaagaaatcagcagacactgggctcatacgaatgcggaatttgcggaaaaaagtacaagtattacaactgcttccagactcacgtcagagctcatcgcgacacagaggccactagtggcgaaggcgcttctcaaagcaacaatttcagatacacatgcgatatttgcggcaaaaaatacaagtactattcctgttttcaggaacacagagatttgcacgccgtagatgtgttttctgtggaaggggctcctgaaaaccgggcagatccttttgaccagggcgttgttgccacagacgaagtgaaggaagaacccccagagccattccagaaaattggtcccatgaacaatatcactagcgacattttcaaaaagaaagaggttagacagtgccagaaacgtgagacaggtaactatacctgcgagttttgcggcaagcagtacaagtactacacaccctaccaggaacacgtcgccctgcatgcgcctatcaagtcagcgttcagtcggcgtgtcgagggcaaggcacaaaatcactttgaggagacaaactcttcctcccaaaacagttcagaaccttatacatgtggcgcttgtggcattcagttccagttctacaacaatctgctggaacatatgcagtcccacgcggctgacaacgagaataacattgccagcaaccaaagcaggtcacccccagcagtggtggaagagaaatggaagcctcaggctcagagaaatagcgctaacaatacaaccacctccggactgaccccaaactccatgattcctgagaaggagcgccagaatattgccgagcgactgctgcgcgtgatgtgcgctgacctgggggctctctccgttgtctctggaaaggagttccttaagctggcacagactctggtcgattccggcgcacggtatggggcatttagcgtcacggaaattcttggaaacttcaacacactggcactaaagcatctgcctcggatgtacaatcaggtcaaagtgaaagtaacatgcgccctggggtctaatgcctgcctgggaatcggagtgacctgccactcacagtcagtgggaccagattcctgttatattctaaccgcataccaggccgaagggaaccacattaaatcctatgtgctgggcgtgaagggcgcagacatcagggattccggggatttggtgcaccactgggtacaaaacgttctttccgagtttgtaatgtctgagattcgcacagtgtacgtgactgactgccgagttagcacttccgcattctccaaagctggaatgtgcctccgctgcagtgcctgtgccctgaactccgttgtgcagtctgtgctgtccaaaaggaccctacaggccaggtccatgcacgaggttattgaactcctgaatgtatgcgaggaccttgccggttctacaggtctcgccaaagaaacctttggatccctcgaagagacttctccgcctccatgctggaattcagtcaccgatagtctgctgctagtgcatgaaagatatgagcagatttgtgagttttactcccgcgcaaagaagatgaacctgatacagtctcttaataagcacctgctgagtaatctcgccgcaatcctgacccctgtgaaacaggcagtgatcgaattatcaaatgaatcccagcccacgctgcagctggtactgcctacctacgttcgactcgagaaactgtttaccgcaaaagccaacgatgccggtacggtctctaagctgtgccatctctttctcgaggctcttaaagagaactttaaagtgcaccccgcacataaagtcgccatgattctggatcctcagcaaaagctacgcccagttcctccctatcagcacgaagaaattatcggaaaggtctgcgagctgattaatgaggtaaaggagtcttgggctgaggaggcagacttcgagcctgccgctaagaagcctcgttcggcagccgttgaaaatccagcagctcaggaggacgaccggttaggaaaaaatgaggtgtacgactaccttcaagaacccctgtttcaagccacccccgacctatttcagtactggtcttgcgtgacccagaaacacaccaaactggccaaattagccttttggcttctggccgttccggctgtaggggctaggagcggctgtgtgaacatgtgcgagcaggcccttctgataaagcgccgacgactcctctctccagaggatatgaacaagttgatgttcctcaagtcaaatatgttgtag

SEQ ID NO: 234831 - DNA, 9109 bp, Artificial Sequence
  derived and/or modified sequence
ggcggcggcggcggcggcggcggcggcattgtgcgcgcaccagcagcccggcccgggaggagcaggacgcgccggggccgcctcctcccgcacggacccatgaaccagccgggcggcgcggcggctccgcaggctgacggagccagtgcagccggaaggaaaagcactgcgagcagggagcgcttgaagcgcagccagaagagcaccaaggtggagggcccagagccagtgccagccgaggcctcgctgagtgccgagcaaggaacgatgacggaggtgaaggtgaagacagagctgcccgatgactacatccaggaggtgatctggcagggcgaggccaaggaggagaagaaggcggtcagcaaggatgggaccagcgacgtgcctgccgagatctgcgtggtgatcggcggcgtccgcaaccagcagacccttgggtcttacgaatgcggaatctgtggcaagaagtacaagtattacaactgcttccagacccacgtgcgggcgcaccgagacaccgaagccacctcaggggagggagcctcccaaagcaacaatttcaggtacacatgtgatatctgcgggaagaagtacaaatactacagctgtttccaagagcaccgagacctgcacgcagtggatgtgtttagtgtggaaggggcccctgagaaccgggcagaccccttcgaccaaggtgtcgtggccacggacgaggtgaaggaggagcccccggagccattccagaaaatcgggccaatgaacaatattacatcagacatttttaagaagaaagaagttaggcagtgccaaaagagagaaactggcaattacacctgtgaattctgcggcaaacagtacaagtactacactccctaccaggagcatgtggccttacacgcccccatcaaaagcgctttcagtcggagagtagaaggcaaagcacaaaaccactttgaagagacgaacagcagttcgcagaactccagcgaaccctacacctgcggcgcctgtgggatccagttccagttctacaacaacctgttggagcacatgcagtcccatgcagctgacaatgaaaacaacattgcctccaaccagtcccgatcgccacctgctgttgtagaagagaagtggaaacctcaggcccagaggaacagtgccaataacaccactaccagtggtttaacacccaacagcatgatccccgaaaaggagcggcagaacatcgcagagcggctgttgagggtcatgtgtgccgacctgggtgcactgagcgtggtcagcgggaaggagttcctgaagttggcccagaccttagtagacagtggtgcccgctatggggccttctcggtcactgaaatcctgggcaacttcaacacgctggcgctgaagcacctgccacgcatgtacaaccaggtgaaggtgaaagtgacctgtgccttgggcagcaatgcctgcctaggcatcggtgtcacctgccactcccagagtgttggccctgactcctgctacatcctcacagcctaccaggccgagggcaaccacatcaagagctatgtgcttggtgtgaagggtgcggacattcgcgacagcggtgaccttgtgcaccactgggtgcagaacgtgctgtcggagttcgtgatgtcggagatcaggacagtgtacgtgacggattgccgggtgagcacgtccgccttctccaaggccggcatgtgccttcgctgctcagcctgtgccttgaactcggtggtgcagagcgtgctgagcaagcggacactgcaggcccgcagcatgcacgaggtcatcgagctgctcaacgtgtgcgaggacctggcgggctccacgggcctggccaaggagaccttcgggtcgctggaggagacgtctccaccaccctgctggaactcggtgacggactcactgttgctggtgcatgagcgctatgagcagatctgcgagttctacagccgggccaagaagatgaacctcatccagagcctcaacaagcacctgctcagcaacctggcggccatcctgacgccggtgaagcaggcagtcatcgagctgagcaacgagagccagcccaccctgcagctggtgctgcccacctacgtcaggctggagaagctgttcacggccaaggccaacgacgcaggcactgtcagcaagctctgccacctcttcctggaggcgctcaaggagaacttcaaggtgcacccggcccacaaggtggccatgatcctggacccgcagcagaagctgcggcctgtgccaccctaccagcacgaggagatcatcggcaaggtctgtgagctcatcaacgaggtgaaggagtcctgggccgaggaggccgacttcgagcccgctgccaagaagccccgctctgctgccgtcgagaaccccgcagctcaggaagatgatcggctaggcaaaaatgaagtgtacgattacctgcaggagcccctcttccaggctacccctgatctcttccagtactggtcgtgcgttacccaaaagcacacaaaactcgccaagctcgccttctggctcctggcggttccggccgtgggcgccagaagcgggtgtgtaaatatgtgtgaacaagcgcttctaatcaaacggaggcggctgctcagtccagaagatatgaataaactcatgtttctgaaatccaacatgctttaagacttgacttcgggggaaaaaaaaagaaaaagagaagataacattagaaaaaaaccacacaacactgtcacaaagaaaaggaatttaagttctaaacactgtggacctcattataaatgccccctggaaacttaagtgctttttttatatgtgtgtgtgtgcgtgtatgtacacagccacacgtgtgtgcacgtgtctgaacacgtgctgtggttgtgggggtgtgggggggtctctgtgctcatctccatggccagagaaactttgcacacacgcacacacacacacacacacacacacacacacacgaccctggtgcgtgtacatacgcctgtgcttggacgggtgtgcattgaactgggcgtgtcaggaaagctgagcgattgggaaagagggagatgtttcacctccttttctcagtaagggggctttagaagactccgctttcaggtgtgcagattggcagaaagctgatgttgtgaaatgttcaggcagctgagatctgaagtgacttgacgctctctgtccttcaccccggtcctccttttccctctttgaccctcttccagccctcctaccctcctgatcccattgtgcacccccccacacactcggctgctctgctgtggactctccacactgcatcagatggacggtttctgcactggactttgtttcttgttcaccttcagggcattgagctgctgcctttgagataccccttgggtgtcccggggcagccgccttagaaacacacctatctatctccccaaatcaggaaaggagacttaaagagtataaagctgacattttgctttttaatataagagaggagaaaaagacatttttcagagaagtatagatactgtctccactccctaataatttctctccctaacattttagcaatttttaccttgtttgggggttcattttgtttcttcagatttgatttagactctgctaggaggcactgaatgtctataacttatgttttggagttttgtttttttacttgccccttttgttcctcaagtcacactgtaaactagctcatctctgtggtgtactcagtatcctacagtctttcttggccttccctgtacagttcagttttcacatattcgaacggccaagaccaggttcttggctgtgctatttggagaccaggcgttggggaggattcacgggttccacagctgcggggtttggtggccgtaggggaagcagtggtttgggagttctgaatgtaagcgccagagctgccctcctggtccgctgtgcgtggtacccagtgtgcatcacactactcaccccctcccggaccctggcagtccacagcgactccgaagtcagcccatagtcacatccaccacacctcagacctgccacagcctctcctcacttcccaggaccctgaggcttccaggagctctgctgcccacagccctcggggtcctcactcacacctccgacttccaggacggcagtgagcatggtgccttgtggccccaacagttgatgttccgagggtgggatggtgtttggccatgttcgactcgatgctgtgaaagatgtcttcaggcttttctctcctgttcccccagctgtgagcaaattaggttctacacacacagttcggatgccaagggtgacaccccattcccttcacaagaggcggttctgtcacaaatcagcactccacccccaccacacctctcagtgaatgaagtgctggtggtctcactcccctggtgacccttagccgtgggatggggtggttacactaaggcttcaagctgagaatggccatcatggcgggaggctgtttgcaaaggcaccttctgtcatcctggggttggctaagtcaactccaccccttcccaataataaagcatcactcaactgtgagatacctcgactacaaaaagcactgtaccacagccctctccccctgggtccatgacaggagcagggagtaaagttgattgcaaacctcatgaaggcttaggatcatggacctggaacatagtgtttgggggccaagcctgcacactttgcctcatgagaactcacccagctctccccttgaaacttggacacactgaaatggatcaaagtgggccatttccacatttgctccagcaaactgtggtctcaggaactaccatgccatttcctctcctggagaagttctaggtattacctccacaacatttccaactgggggactgagcccacttatcagagaagagccgccatccacactggagcaggaacagggagaaatccagacaggaacctcatgtcacttcctagggaatatgggaagaaacatcagcagactttatgatgtcagttgggcctttggaggcattctggaaggtggcctcagcatcactgatgattgacagatgctacagcaaaaggtccctctagcgttgcttgactgctggggaagggacagtgaccggcactttgacccacacaaggataggagctgcctactttgtgtggtaggtgagagcagagcctgggagcccatcctccctctacttggagcaaagttgtgctggtgatgccccattattgggccagttgattagaaaataggcatttcactttcttggaaagccatcggactaagcccagatgtgcatttagagcactcagcattcttctctttgaagcatgggatgtctgtcctccaggaagagatttgatcttaggttgttacctccctttcacttcttttccacctcaattcaatacttaggggttggcttgcctctgcaggtttgatgtgaatgccactgggtactcagaaagctgtcctctggggctgccttgtccagttagataacaagatagcagatgattgtttcttgcaacctctggttccctccggaaactggtgtcaccaacaggaaaggctgtaccaaggtgccctcttctcagacaggctgttctcagagtgcaaatcctgctgcaactaacagcttaataaaacccaaagatctcacaggtccagccactggcccctttatctccaacaatatccacctcaccaaattctagttcagccaaaggattgagacaggctcttccagttcatctcctggtgtccagcctgaccttcacatctggaaggattttgtcgtctgcctcccagttctgggtccactgtaggtctttccatcacaagcctttgggggatctgggaccaggaatttgggccgtttctaccatattctcagcagcctaaggtggtggcctgctgatgtggagactactcaccttgagccatgtggtccccaggacagaaatggcctttgttttgacatacatggacccaaaaggggaggtgaagaaaacacacctccacctggcaagtttttctccctcatctgaggtcagttgcttcaccaacaaagcccaagccaagaactgcagcgttgagggttgtccctcggagtggagtagcccaaggaatctcaggtccaccaagagcattggtaccatctgggccacgggtggatgcctttgttctggcacagttctccacttcccgattcctggctcagccagccaggcctccctctaatggcatttagtaaccaggaaacaaaacacatgccacctgagcaaaactgcctgcacttcatctctggaggttcgctgcacagaggccacctgccgcatcaccagtgaggaagctttgccaccatcctgcttggcagcttcacacttgacatctgaggattggtttttggctggaaaaagggtaccagggtttcctggcaaggacaggagagcagtgcagtgacacagatgagaagctgtgagtctccaggattcaaggaagccaccaggtgtgcaggctgggaagagacatctctttcagtttgaccctttatctcctgcacttttaaagaaacaccagagaaaaaatctacaaggcgtgtttccactgaagctgaacctctgcctttaggagtcccctatatttgagcaaggccacctgcttcccctggacttgagctggactccttgaagagtgggcttctggagagatgttaggaatatagcacatgctctctgggggccacagggtcattgggaaggtttgaaatgaagatgggatgtggctggaacagcctgtgagatggctccattggggacactcccctcatcttgtcatcacgatggatatgctggaagaggaggtgtcccagtgagccgcccgaagttcatagctttgccctcgccttggcaacagcggcaatgcctctatctctgggatgcatcttaaggagggctcctaacaaggccgatgatttagacagaacaagagactaagtaaggtccggctatcccgtggagccagtagtaggtgggagctcctgtccccgccagccctgctccagcccccgtgtccagctgggccagtggaagaactgggaaggaggaagcccctccctttcactgtggctaatgtttgctaggccagttatggtgaaccaatgatacagtgttttccctcttaacgttcccctcctggttttgccttttcagggttttctgggggattttgttgtagtagttgcttttcttcctctctcatttgggtttgaggattgtggtcgggggagccctggctttcaccaaaggagcccagtggtttctgtggaagaggcgcccactcccactttaatgagggtgaagattgtcaggtcactgtttgacatattcatgccccgtcccttccccccccacccccccgcccacccaccacgggtgtcgctttaaagagtcaattcttgtacagagaaggatttgctaggtttgcatttgggtgttagcatcacgacccacgagggccctgcccaaccgtgcgtcccatggggcaccttgactcttcaaaccaaaattccttaaaggggcacagcccagccttgtccgcaacctcaggggcctgggattcctgtggcgcttcctgaattccaggttggcacagatgatgaggtctgagaccagccggaaggaggggctcctgccataacccaggtgccagccggtctccgcctaggaccttccctcccgcccagccagggtgggcggcatcctacgcggtgaaacgagctcatggactgacccggggctgggcctcgccagccaggagagagcgagggccgcacggcagggctggcccaggcagctcgtccagggccattcagatcccaagcatcaggaaatcattttgtacaaccacccgaagcagagatattttttaagaagcgtaaattattttcagttgttttctgatcctgcctttttcttttccccacaacttcacgccagtgagtcgttcacatcaggtaaatcttgagaaagccttggtgccctcctccccaccccccactcagtaaccacgtgcgtgcacccccgcatcctttctcagtagttaagacgttctaggcaataccatagacacatctgactgtgtctctctctttgagtgcaagaaactcaagtcatcttaaaaaaaaaaaaatacaaaaaaaatttacaaaaaaacaaacacaaaaaaaatatcttttttaggccagagttttctacaggtattaatgaatatttttcttaatccttataagttttatgtgtttaatatttcttaataccggtagcattaatttatacttttgtagcaacacaatatttttataaacagccggtgcttggctcaagtcttcacgaggggtttaggcagggccatcttggggaccctgtgtaccatgtactgtatttaaaaaaaaaaaaagttacctattgtcacacttgctgtgttaattaacaaaagatgttgtgtgcggtctcctgtatcggtgtggatccaacagctctccagggagtcacattgcatgggggttgagttgacggttcttgtgatatgtaaacccccgagaccaaacttgagggtttatttagggttttctgtttgtcctttgggtttttgtttcactttgttttggtgccgtttctccatttacagccaaatcagtttcatgatgttcaaaacatttactgatgtcaaatggaggaaaggaacagaaaaaaagatttttacaaagtaataaaatttaaaactgagctgtttaatgttgctgtttttacctgtctgttcttgtccaaaagtggaacattcccagggagaagaggaaggttccactcggttctttaagtcgccaaaagccccagcccgggattcagtacctcccctgccccccgaattcttgcagcactatttcccagttggttgatgccaaggcaaaaagataacttttaacagttagagaggatcagttgcttaaatgatttcatgtcagtgttgtatttatggttttacaataaaacaacctttagg

SEQ ID NO: 234832 - protein, 971 aa, Artificial Sequence
  derived and/or modified sequence
MQTACQAVQHQRGRRQYNKLRNLLKDARHDCILFANEFQQCCYLPRERGESMEKWQTRSIYNAAVWYYHHCQDRMPIVMVTEDEEAIQQYGSETEGVFVITFKNYLDNFWPDLKAAHELCDSILQSRRERENESQESHGKEYPEHLPLEVLEAGIKSGRYIQGILNVNKHRAQIEAFVRLQGASSKDSDLVSDILIHGMKARNRSIHGDVVVVELLPKNEWKGRTVALCENDCDDKASGESPSEPMPTGRVVGILQKNWRDYVVTFPSKEEVQSQGKNAQKILVTPWDYRIPKIRISTQQAETLQDFRVVVRIDSWESTSVYPNGHFVRVLGRIGDLEGEIATILVENSISVIPFSEAQMCEMPVNTPESPWKVSPEEEQKRKDLRKSHLVFSIDPKGCEDVDDTLSVRTLNNGNLELGVHIADVTHFVAPNSYIDIEARTRATTYYLADRRYDMLPSVLSADLCSLLGGVDRYAVSIMWELDKASYEIKKVWYGRTIIRSAYKLFYEAAQELLDGNLSVVDDIPEFKDLDEKSRQAKLEELVWAIGKLTDIARHVRAKRDGCGALELEGVEVCVQLDDKKNIHDLIPKQPLEVHETVAECMILANHWVAKKIWESFPHQALLRQHPPPHQEFFSELRECAKAKGFFIDTRSNKTLADSLDNANDPHDPIVNRLLRSMATQAMSNALYFSTGSCAEEEFHHYGLALDKYTHFTSPIRRYSDIVVHRLLMAAISKDKKMEIKGNLFSNKDLEELCRHINNRNQAAQHSQKQSTELFQCMYFKDKDPATEERCISDGVIYSIRTNGVLLFIPRFGIKGAAYLKNKDGLVISCGPDSCSEWKPGSLQRFQNKITSTTTDGESVTFHLFDHVTVRISIQASRCHSDTIRLEIISNKPYKIPNTELIHQSSPLLKSELVKEVTKSVEEAQLAQEVKVNIIQEEYQEYRQTKGRSLYTLLEEIRDLALLDVSNNYGI

SEQ ID NO: 234833 - protein, 253 aa, Artificial Sequence
  derived and/or modified sequence
MEKWQTRSIYNAAVWYYHHCQDRMPIVMVTEDEEAIQQYGSETEGVFVITFKNYLDNFWPDLKAAHELCDSILQSRRERENESQESHGKEYPEHLPLEVLEAGIKSGRYIQGILNVNKHRAQIEAFVRLQGASSKDSDLVSDILIHGMKARNRSIHGDVVVVELLPKNEWKGRTVALCENDCDDKASGESPSEPMPTGLQGGRAHRFLGVNICVSKWTFCACFRKNRRSGRGNCNHPGGKQYFSYSFLRSSDV

SEQ ID NO: 234834 - protein, 150 aa, Artificial Sequence
  derived and/or modified sequence
MEKWQTRSIYNAAVWYYHHCQDRMPIVMVTEDEEAIQQYGSETEGVFVITFKNYLDNFWPDLKAAHELCDSILQSRRERENESQESHGKEYPEHLPLEVLEAGIKSGRYIQGILNVNKHRAQIEAFVRLQGASSKDSDLVSDILIHGMKA

SEQ ID NO: 234835 - protein, 57 aa, Artificial Sequence
  derived and/or modified sequence
MQTACQAVQHQRGRRQYNKLRNLLKDARHDCILFANEFQQCCYLPRERGESMEKWQT

SEQ ID NO: 234836 - protein, 97 aa, Artificial Sequence
  derived and/or modified sequence
MQTACQAVQHQRGRRQYNKLRNLLKDARHDCILFANEFQQCCYLPRERGESMEKWQTRSIYNAAVWYYHHCQDRMPIVMVTEDEEAIQQYGSETEGV

SEQ ID NO: 234837 - protein, 103 aa, Artificial Sequence
  derived and/or modified sequence
MQTACQAVQHQRGRRQYNKLRNLLKDARHDCILFANEFQQCCYLPRERGESMEKWQTRSIYNAAVWYYHHCQDRMPIVMVTEDEEAIQQYGSETEGVFVITFK

SEQ ID NO: 234838 - DNA, 2916 bp, Artificial Sequence
  derived and/or modified sequence
atgcagacagcatgccaggctgttcagcatcagaggggtagaaggcagtataacaaactgagaaacctgctgaaggatgctcgacatgattgtatcttgttcgcaaacgaattccagcagtgttgctacttaccccgcgagcgtggggagtctatggagaaatggcaaacgcgttctatttacaatgcagccgtttggtattatcaccattgccaggaccgcatgcctattgtgatggtcacagaagacgaggaggcaattcagcagtacggatcagaaacagagggtgtttttgtgataacatttaaaaattacctggataacttctggcccgatctcaaagctgctcatgagctctgcgactctatcctgcaaagccggcgggaaagggaaaatgaaagccaggagagtcatggaaaagagtatcccgaacacttaccattggaagttctggaggccggaatcaaatcggggcggtatattcaggggatcctgaatgttaataagcatcgcgcgcaaatcgaggctttcgtcaggcttcagggggcctcatctaaggactctgatttggtgtcagacatcctgatccacggaatgaaggcaagaaatcgcagtatccatggcgatgtcgtggttgtggaattgttacccaagaatgagtggaaaggaagaacggtggctctgtgcgagaacgattgtgatgataaggcttctggcgaatccccatcagagcccatgcccactgggcgtgtagtgggcattctccaaaagaattggcgggactacgttgtgacctttccttcaaaggaagaggtgcagagccaaggaaaaaatgcccagaaaattcttgtgacgccctgggactaccgcatcccaaagatacgaatttctacccagcaggcagagaccctgcaggatttccgggttgtggtcagaatcgacagctgggagagcaccagtgtgtacccgaatggccattttgtgagagttctcggccgcatcggtgatctggagggcgagatagccacgatcctggttgaaaactccatcagtgtgatccctttcagcgaagcccagatgtgcgagatgcccgtgaacactcccgagtctccttggaaagtgagtcccgaagaggaacaaaagcgaaaagacctgagaaaaagccacctcgtgttttctattgaccctaagggctgcgaagatgtggacgacacactatcggtgcgaacgttgaacaatggaaatttggaattgggagtgcacattgccgatgtgacgcatttcgtggcacctaatagttacattgacattgaggcccggactagggccacaacctattaccttgccgacagaagatatgatatgctccccagcgtgctgtccgccgacctttgcagcttactgggcggtgtcgataggtatgcagtgtctatcatgtgggagttagataaagctagttacgaaatcaaaaaggtttggtacggacggacaattattcgttccgcatacaagctgttctacgaagcagcccaggagctcctagacggcaatctgagcgtcgtcgacgatatcccagagttcaaagacctagacgagaaatcacgtcaggccaaattagaggagctcgtctgggcgatcggtaaattaaccgatattgcgcgccatgttagggcaaaaagggatggttgtggcgccctcgagctggagggagtggaggtttgcgtccaactggatgacaaaaagaacattcacgatctcattcctaaacaacccttggaagtgcacgagactgtcgccgaatgcatgattctggccaaccactgggtggccaagaaaatctgggagtccttcccccaccaggccctgctccgacaacacccacctccgcatcaggaattcttctcagagttgcgtgaatgcgcaaaagccaaggggttcttcatcgacacacggagtaataagaccttggcagactccctggacaatgccaacgatccccacgacccgattgtgaatcggctgctgcggtcaatggccacacaagccatgtctaacgcattgtactttagcactggaagctgtgcagaagaagagttccaccactatggactagcccttgataaatatactcactttaccagccctatccggcgatacagcgacatagtggtgcacagacttttaatggcagcaatatcaaaagacaagaaaatggagatcaagggcaatcttttcagtaataaggacctggaagagctgtgtcggcatatcaacaataggaaccaggctgcacagcacagtcagaagcagtctacagaactgtttcaatgtatgtattttaaggacaaggaccccgctacagaagagcgctgcattagcgatggggttatctactccatacggacaaacggagtgcttctcttcattccgcgctttggaatcaaaggggctgcctacctgaagaacaaggatgggttagtgatctcttgcggcccagacagttgttccgagtggaaacccggctccttacaacggttccagaacaaaatcacctccaccacaacagacggtgaatcggttacatttcacctgttcgaccatgttacagtgaggatcagcattcaggcttcacggtgtcattccgacacaattcggctcgagattattagcaacaaaccttacaagatacctaatacggaactaattcatcaaagcagcccactgctgaaaagcgagctagtgaaagaagtgaccaaatctgtcgaggaggctcagctggctcaagaggttaaggtgaatataattcaagaggagtatcaggagtacagacagactaaaggaaggtccctatacacattgctagaagaaatccgggatttggctctactcgatgtctcgaataattatgggatttag

SEQ ID NO: 234839 - DNA, 2916 bp, Artificial Sequence
  derived and/or modified sequence
atgcagacagcctgccaggccgtgcagcaccagaggggccggcggcagtacaacaagctgaggaacctgctgaaggatgcccggcatgactgcatcctgtttgccaatgagttccagcagtgctgctacctgccccgggagcggggggagagcatggagaagtggcagaccaggagcatctacaatgctgctgtgtggtactaccaccactgccaggacaggatgcccatcgtgatggtgacagaagatgaggaggccatccagcagtatggcagcgagacagagggcgtgtttgtgatcaccttcaagaactacctggacaacttctggccagacctgaaggccgcccacgagctgtgtgacagcatcctgcagagcagaagagaaagagaaaatgaaagccaggagagccacggcaaggagtacccagagcacctgcccctggaggtgctggaggccggcatcaagagcggccgctacatccagggcatcctgaatgtgaacaagcaccgggcccagatcgaggcctttgtgcggctgcagggcgccagcagcaaggacagcgacctggtgtctgacatcctgattcatggcatgaaggccaggaacagaagcatccatggagatgtggtggtggtggagctgctgcccaagaatgagtggaagggccgcacagtggccctgtgtgaaaatgactgtgatgacaaggccagcggggagagccccagcgagcccatgcccaccggccgggtggtgggcatcctgcagaagaactggagggactatgtggtgaccttccccagcaaggaggaggtgcagagccagggcaagaatgcccagaagatcctggtgaccccctgggactaccgcatccccaagatccgcatcagcacccagcaggccgagaccctgcaggacttccgggtggtggtgagaattgacagctgggagagcacctctgtgtaccccaacggccactttgtgcgggtgctgggccgcatcggggacctggagggggagatcgccaccatcctggtggagaacagcatcagcgtcatccccttcagcgaggcccagatgtgtgagatgcctgtgaacaccccagagagcccctggaaggtgtccccagaggaggagcagaagaggaaggacctgaggaagagccacctggtgttcagcattgaccccaagggctgtgaagatgtggatgacaccctgtctgtgaggaccctgaacaatggaaacctggagctgggcgtgcacatcgcagatgtgacccactttgtggcccccaacagctacattgatattgaggcccggacccgggccaccacctactacctggccgacagaagatatgacatgctgcccagcgtgctgtctgctgacctgtgcagcctgctgggcggcgtggacagatatgctgtgtccatcatgtgggagctggacaaggccagctatgagatcaagaaggtgtggtacggccgcaccatcatccgcagcgcctacaagctgttctatgaagctgcccaggagctgctggatggcaacctgtctgtggtggatgacatccctgagttcaaggacctggatgagaagagccggcaggccaagctggaggagctggtgtgggccatcggcaagctgacagacatcgcccggcacgtgcgggccaagagagatggctgtggggccctggagctggagggcgtggaggtgtgtgtgcagctggatgacaagaagaacatccatgacctgatccccaagcagcccctggaggtgcatgaaacagtggccgagtgcatgatcctggccaaccactgggtggccaagaagatctgggagagcttcccccaccaggccctgctgcggcagcaccccccaccccaccaggagttcttcagcgagctgagagaatgtgccaaggccaagggcttcttcatcgacaccaggagcaacaagaccctggccgacagcctggacaatgccaatgacccccatgaccccatcgtgaaccggctgctgcgctccatggccacccaggccatgagcaatgccctgtacttcagcacaggcagctgtgccgaggaggagttccaccactacggcctggccctggacaagtacacccacttcaccagccccatccgccgctacagcgacatcgtggtgcaccggctgctgatggccgccatcagcaaggacaagaagatggagatcaagggcaacctcttcagcaacaaggacctggaggagctgtgccgccacatcaacaacagaaaccaggccgcccagcacagccagaagcagagcacagagctgttccagtgcatgtacttcaaggacaaggaccctgccacagaggagcgctgcatcagtgatggagtcatctacagcatccgcaccaatggagtgctgctcttcatcccccgcttcggcatcaagggagctgcctacctgaagaacaaggatggcctggtgatcagctgtggccctgacagctgcagcgagtggaagccaggcagcctgcagcgcttccagaacaagatcaccagcaccaccacagatggagagagcgtgaccttccacctgtttgaccacgtgacagtgcgcatcagcatccaggccagccgctgccacagcgacaccatccggctggagatcatcagcaacaagccctacaagatccccaacacagagctgatccaccagagcagccccctgctgaagtctgagctggtgaaggaggtgaccaagtctgtggaggaggcccagctggcccaggaggtgaaggtgaacatcatccaggaggagtaccaggagtaccggcagaccaagggccgcagcctgtacaccctgctggaggagatccgggacctggccctgctggatgtgagcaacaactacggcatctag

SEQ ID NO: 234840 - DNA, 2916 bp, Artificial Sequence
  derived and/or modified sequence
atgcagaccgcctgccaggccgtgcagcaccagcggggccggcggcagtataataagctccgcaatctcctcaaggacgcaagacacgattgcatcctgtttgccaacgagttccagcaatgctgctacctacctagagaaagaggggagtccatggagaaatggcagacccgcagtatctataacgcagccgtttggtactatcaccactgtcaggatcggatgccaatcgtcatggtcactgaagacgaggaggccattcagcagtacggctcagagaccgaaggagtgttcgtgattaccttcaagaattatcttgataatttttggcccgatctgaaagcagcgcacgaattgtgcgattcaatccttcagagcaggagagaaagagaaaacgagtctcaggagtctcacggcaaggagtatccagaacatttaccattggaggttctggaggctgggatcaaaagtggccgatacattcagggcatcctgaacgtgaataaacaccgagcacaaatagaggccttcgtgcgattgcagggcgcctcaagtaaagatagcgatctggtgtctgacatcctgatccacggcatgaaggcccgcaaccggtctatccatggcgatgtagtcgtggtcgagttgttacctaagaacgagtggaaggggaggaccgtggctctgtgtgagaacgattgtgatgataaggcgtcaggcgagtctccttccgagcccatgccaactggccgcgtggtagggattctgcagaaaaactggagggactacgtggtaactttccctagcaaagaagaggttcagtctcaaggaaaaaacgctcaaaaaatcctcgtgaccccctgggactaccgcatccccaaaatacggatatctacccagcaagctgaaacccttcaggattttagggtggttgtgcggatcgactcatgggagagcacatccgtgtaccccaatggacactttgtaagggtcctgggcagaatcggagacctggagggagagatcgctaccatcttagttgaaaatagcatcagtgtcatccccttttcagaggcccagatgtgtgagatgcctgttaatacccctgaatcaccatggaaggtctctccagaggaggagcagaaacgaaaggacctgaggaagagtcatctagtgttcagtatcgatcccaaagggtgtgaagacgtggatgataccttgagtgtcagaactctgaataacggaaatctcgagctgggcgtccacatcgctgacgtgacgcatttcgtggctccaaactcttatatcgacatagaggcacgcacacgcgccaccacctattacctcgctgatagacggtacgatatgcttccatccgtgctgagcgctgacttatgttccctcctgggtggtgtggaccgctatgctgtgagcatcatgtgggaattggataaagccagctacgagatcaagaaggtttggtacggaagaactataatacgcagcgcgtacaagctgttctacgaagccgctcaagagcttctggatggcaatctctccgtcgtggatgacattcccgagttcaaagacttggacgaaaaaagccgacaggctaaactggaggaactggtatgggcgatcgggaaactcaccgacatagcccgccatgttagagccaaaagagacggttgcggtgctttggagctagaaggcgtggaagtgtgtgtgcaactcgacgataaaaagaatattcacgacttgataccaaagcagcctcttgaagttcatgagacagtggcagaatgtatgatccttgccaatcactgggtggcaaaaaagatctgggagagctttccacaccaggctcttctacggcagcaccccccaccacaccaggagttctttagcgaattgagagaatgcgcaaaagccaagggtttttttatcgatacgagatctaacaaaactttggctgacagcctggataacgctaatgatccacacgacccgattgtcaatcgcttattgcgctccatggcgacccaggccatgtctaatgccctttactttagcacaggatcgtgtgccgaagaggagttccaccactacgggctcgctttagataagtatacgcattttacaagccctattagacgctactccgacatcgtcgtacatagactcctgatggccgccatctccaaagataagaaaatggaaattaaaggcaacctcttctctaacaaggatttagaggagctgtgccggcatatcaacaatcggaatcaggctgcacagcattctcaaaagcagtccacagagttgtttcagtgtatgtacttcaaagacaaggatccagctacagaagagaggtgtatcagcgacggggtgatctactcgataagaaccaacggggtgctgctattcatcccaagatttgggattaagggcgctgcctatctcaagaacaaggacgggctcgtgatctcatgcgggccagatagctgctctgagtggaaacccggcagtctacagcgatttcagaacaaaattacttccacaacgacggacggcgagtccgtgacatttcacctgttcgaccacgtgacagtgcgaatttccatccaagcttcacggtgccacagtgatacaattcggctagagataatctctaataaaccctataagatcccaaatacagaactcattcaccaaagctcccccctcctaaaaagtgagttagtcaaggaagtcactaaaagcgtagaagaggctcagctagctcaggaggtcaaggtgaacataattcaggaagagtatcaggaatatcggcaaacgaaggggcgatccctgtacacactgctcgaagagatccgggaccttgctcttctggatgtctcgaataactacggaatttag

SEQ ID NO: 234841 - DNA, 2916 bp, Artificial Sequence
  derived and/or modified sequence
atgcagaccgcctgtcaggcggtacagcatcagcggggaaggcgccagtacaataagcttcgtaacttgctcaaggatgcacggcacgactgtatcctgttcgcaaacgagtttcaacagtgctgctatctgcctagagagagaggcgagtctatggagaaatggcagactagaagcatttacaatgcagcagtttggtattaccaccactgtcaggatcgtatgccaattgtaatggtgacggaagatgaggaggcaatccagcaatacgggtctgaaacagagggggtattcgtgattacttttaagaattatctggataacttctggcccgatctaaaggccgcacacgagctctgtgactccatactgcagagccgccgtgaacgggagaatgaaagtcaagaatctcacgggaaggagtatcctgaacatctacctttggaggtgcttgaggccggaatcaaatccggtcggtatatacagggaattctgaacgtgaataaacacagagctcaaatcgaggcgttcgtgcggcttcaaggggcatcatccaaggacagcgatctggtcagcgacatactgatccatggaatgaaggccaggaacaggtcgatccacggcgatgttgtggttgtggagcttcttccaaaaaacgagtggaagggcagaaccgtggcgctgtgtgagaatgattgtgatgacaaggcgtccggtgaaagtccctctgagcccatgccaactggacgagtcgttggtatccttcaaaagaactggcgcgactacgtggtgacctttccctccaaggaggaggtgcagtctcagggcaaaaatgcgcagaagatcttagtaacaccctgggattataggatccctaaaatccgcatcagcacacaacaggccgagactctgcaggatttccgagtcgtggtcaggattgattcgtgggagtccacctctgtataccccaacggccacttcgtaagagtgctcgggcgaataggagaccttgaaggggaaatcgctacaatcctcgtcgaaaactctatctctgtaatacccttctcggaagcacagatgtgcgagatgccagtgaacacacctgaatctccttggaaggtctcacctgaagaggaacagaagcggaaagatctcagaaagagtcatctggtgtttagtattgatcccaaaggctgtgaggatgttgatgacaccctctccgttcgtaccctgaataatggaaatctggaactcggtgtacatattgctgatgtgacccactttgttgcacccaattcctacatcgatatagaggcgagaacacgggctacgacatattatctggctgatagacgctacgacatgttgccctcagtgctgagtgcagatttgtgctcactcctcgggggagttgaccgttacgccgtgtctataatgtgggagctagataaagcatcttacgagataaaaaaggtgtggtatggacggaccatcatccggagtgcatacaagctattttacgaggctgcccaggagttgctcgacggaaatctgtccgttgtcgatgacatccccgagttcaaggatttagatgagaagagtagacaagccaaattagaggagctggtgtgggccatcggaaagttaaccgacattgccagacatgtccgcgctaaacgggacgggtgcggagctctcgaactggagggggtggaggtgtgcgtgcagcttgatgataagaaaaacatccacgacctgattcctaagcagccactcgaggtgcacgagaccgtggctgaatgcatgatcctggctaaccattgggttgctaaaaagatctgggaatcttttccacatcaggccttattgcggcaacacccccctccccaccaagaatttttttcagagttaagagagtgtgccaaggcaaagggtttctttatagatacccggtctaataagacactggccgatagcctggataatgcaaatgacccgcatgaccccatcgttaataggttgcttcgcagtatggccacccaggctatgtcgaatgctctgtatttttccactgggtcgtgcgctgaggaggagttccaccactatggcttggcccttgataaatacactcattttaccagccctatacgacgctatagcgatatcgtggtgcatcggttgttgatggctgctattagtaaggataaaaagatggagatcaagggtaatcttttttccaacaaagatctcgaagagctatgtagacatattaataatcggaatcaggctgctcagcactcacagaagcagtccacagagttgtttcaatgcatgtatttcaaggacaaggacccagccacagaggaaaggtgcatttccgatggagtgatttatagtatcagaaccaatggagtgctcctattcattccccgattcggcatcaagggggcagcatatctgaaaaataaagacggcttggtcatttcctgcggaccagacagctgttctgagtggaagcccggtagcttacagaggtttcagaataaaattacctccactacaacagatggagagtctgtcacctttcacctcttcgaccacgtgaccgtgagaatcagcatacaggcatcccgctgtcacagcgataccatccgactggagatcatctcaaataagccatacaagatcccaaacactgagttgatccatcagtcctctccactcctcaaaagcgagctggtaaaagaggtcacaaagtcagtcgaagaggcgcagctggctcaagaggtaaaggtcaatattatccaggaagaataccaggagtaccgccagacaaagggaagaagtctctacacactgttagaagagatcagagacctggcattgttggatgtgtccaacaattacggcatctag

SEQ ID NO: 234842 - DNA, 2916 bp, Artificial Sequence
  derived and/or modified sequence
atgcagaccgcctgccaggccgtgcagcaccagagaggcagaagacagtacaacaagctgagaaacctgctgaaggacgccagacacgactgcatcctgttcgccaacgagttccagcagtgctgctacctgcccagagagagaggcgagagcatggagaagtggcagaccagaagcatctacaacgccgccgtgtggtactaccaccactgccaggacagaatgcccatcgtgatggtgaccgaggacgaggaggccatccagcagtacggcagcgagaccgagggcgtgttcgtgatcaccttcaagaactacctggacaacttctggcccgacctgaaggccgcccacgagctgtgcgacagcatcctgcagagcagaagagagagagagaacgagagccaggagagccacggcaaggagtaccccgagcacctgcccctggaggtgctggaggccggcatcaagagcggcagatacatccagggcatcctgaacgtgaacaagcacagagcccagatcgaggccttcgtgagactgcagggcgccagcagcaaggacagcgacctggtgagcgacatcctgatccacggcatgaaggccagaaacagaagcatccacggcgacgtggtggtggtggagctgctgcccaagaacgagtggaagggcagaaccgtggccctgtgcgagaacgactgcgacgacaaggccagcggcgagagccccagcgagcccatgcccaccggcagagtggtgggcatcctgcagaagaactggagagactacgtggtgaccttccccagcaaggaggaggtgcagagccagggcaagaacgcccagaagatcctggtgaccccctgggactacagaatccccaagatcagaatcagcacccagcaggccgagaccctgcaggacttcagagtggtggtgagaatcgacagctgggagagcaccagcgtgtaccccaacggccacttcgtgagagtgctgggcagaatcggcgacctggagggcgagatcgccaccatcctggtggagaacagcatcagcgtgatccccttcagcgaggcccagatgtgcgagatgcccgtgaacacccccgagagcccctggaaggtgagccccgaggaggagcagaagagaaaggacctgagaaagagccacctggtgttcagcatcgaccccaagggctgcgaggacgtggacgacaccctgagcgtgagaaccctgaacaacggcaacctggagctgggcgtgcacatcgccgacgtgacccacttcgtggcccccaacagctacatcgacatcgaggccagaaccagagccaccacctactacctggccgacagaagatacgacatgctgcccagcgtgctgagcgccgacctgtgcagcctgctgggcggcgtggacagatacgccgtgagcatcatgtgggagctggacaaggccagctacgagatcaagaaggtgtggtacggcagaaccatcatcagaagcgcctacaagctgttctacgaggccgcccaggagctgctggacggcaacctgagcgtggtggacgacatccccgagttcaaggacctggacgagaagagcagacaggccaagctggaggagctggtgtgggccatcggcaagctgaccgacatcgccagacacgtgagagccaagagagacggctgcggcgccctggagctggagggcgtggaggtgtgcgtgcagctggacgacaagaagaacatccacgacctgatccccaagcagcccctggaggtgcacgagaccgtggccgagtgcatgatcctggccaaccactgggtggccaagaagatctgggagagcttcccccaccaggccctgctgagacagcacccccccccccaccaggagttcttcagcgagctgagagagtgcgccaaggccaagggcttcttcatcgacaccagaagcaacaagaccctggccgacagcctggacaacgccaacgacccccacgaccccatcgtgaacagactgctgagaagcatggccacccaggccatgagcaacgccctgtacttcagcaccggcagctgcgccgaggaggagttccaccactacggcctggccctggacaagtacacccacttcaccagccccatcagaagatacagcgacatcgtggtgcacagactgctgatggccgccatcagcaaggacaagaagatggagatcaagggcaacctgttcagcaacaaggacctggaggagctgtgcagacacatcaacaacagaaaccaggccgcccagcacagccagaagcagagcaccgagctgttccagtgcatgtacttcaaggacaaggaccccgccaccgaggagagatgcatcagcgacggcgtgatctacagcatcagaaccaacggcgtgctgctgttcatccccagattcggcatcaagggcgccgcctacctgaagaacaaggacggcctggtgatcagctgcggccccgacagctgcagcgagtggaagcccggcagcctgcagagattccagaacaagatcaccagcaccaccaccgacggcgagagcgtgaccttccacctgttcgaccacgtgaccgtgagaatcagcatccaggccagcagatgccacagcgacaccatcagactggagatcatcagcaacaagccctacaagatccccaacaccgagctgatccaccagagcagccccctgctgaagagcgagctggtgaaggaggtgaccaagagcgtggaggaggcccagctggcccaggaggtgaaggtgaacatcatccaggaggagtaccaggagtacagacagaccaagggcagaagcctgtacaccctgctggaggagatcagagacctggccctgctggacgtgagcaacaactacggcatctag

SEQ ID NO: 234843 - protein, 798 aa, Artificial Sequence
  derived and/or modified sequence
MNLQPIFWIGLISSVCCVFAQTDENRCLKANAKSCGECIQAGPNCGWCTNSTFLQEGMPTSARCDDLEALKKKGCPPDDIENPRGSKDIKKNKNVTNRSKGTAEKLKPEDITQIQPQQLVLRLRSGEPQTFTLKFKRAEDYPIDLYYLMDLSYSMKDDLENVKSLGTDLMNEMRRITSDFRIGFGSFVEKTVMPYISTTPAKLRNPCTSEQNCTSPFSYKNVLSLTNKGEVFNELVGKQRISGNLDSPEGGFDAIMQVAVCGSLIGWRNVTRLLVFSTDAGFHFAGDGKLGGIVLPNDGQCHLENNMYTMSHYYDYPSIAHLVQKLSENNIQTIFAVTEEFQPVYKELKNLIPKSAVGTLSANSSNVIQLIIDAYNSLSSEVILENGKLSEGVTISYKSYCKNGVNGTGENGRKCSNISIGDEVQFEISITSNKCPKKDSDSFKIRPLGFTEEVEVILQYICECECQSEGIPESPKCHEGNGTFECGACRCNEGRVGRHCECSTDEVNSEDMDAYCRKENSSEICSNNGECVCGQCVCRKRDNTNEIYSGKFCECDNFNCDRSNGLICGGNGVCKCRVCECNPNYTGSACDCSLDTSTCEASNGQICNGRGICECGVCKCTDPKFQGQTCEMCQTCLGVCAEHKECVQCRAFNKGEKKDTCTQECSYFNITKVESRDKLPQPVQPDPVSHCKEKDVDDCWFYFTYSVNGNNEVMVHVVENPECPTGPDIIPIVAGVVAGIVLIGLALLLIWKLLMIIHDRREFAKFEKEKMNAKWDTGENPIYKSAVTTVVNPKYEGK

SEQ ID NO: 234844 - protein, 825 aa, Artificial Sequence
  derived and/or modified sequence
MNLQPIFWIGLISSVCCVFAQTDENRCLKANAKSCGECIQAGPNCGWCTNSTFLQEGMPTSARCDDLEALKKKGCPPDDIENPRGSKDIKKNKNVTNRSKGTAEKLKPEDITQIQPQQLVLRLRSGEPQTFTLKFKRAEDYPIDLYYLMDLSYSMKDDLENVKSLGTDLMNEMRRITSDFRIGFGSFVEKTVMPYISTTPAKLRNPCTSEQNCTSPFSYKNVLSLTNKGEVFNELVGKQRISGNLDSPEGGFDAIMQVAVCGSLIGWRNVTRLLVFSTDAGFHFAGDGKLGGIVLPNDGQCHLENNMYTMSHYYDYPSIAHLVQKLSENNIQTIFAVTEEFQPVYKELKNLIPKSAVGTLSANSSNVIQLIIDAYNSLSSEVILENGKLSEGVTISYKSYCKNGVNGTGENGRKCSNISIGDEVQFEISITSNKCPKKDSDSFKIRPLGFTEEVEVILQYICECECQSEGIPESPKCHEGNGTFECGACRCNEGRVGRHCECSTDEVNSEDMDAYCRKENSSEICSNNGECVCGQCVCRKRDNTNEIYSGKFCECDNFNCDRSNGLICGGNGVCKCRVCECNPNYTGSACDCSLDTSTCEASNGQICNGRGICECGVCKCTDPKFQGQTCEMCQTCLGVCAEHKECVQCRAFNKGEKKDTCTQECSYFNITKVESRDKLPQPVQPDPVSHCKEKDVDDCWFYFTYSVNGNNEVMVHVVENPECPTGPDIIPIVAGVVAGIVLIGLALLLIWKLLMIIHDRREFAKFEKEKMNAKWDTSLSVAQPGVQWCDISSLQPLTSRFQQFSCLSLPSTWDYRVKILFIRVP

SEQ ID NO: 234845 - protein, 49 aa, Artificial Sequence
  derived and/or modified sequence
MNLQPIFWIGLISSVCCVFAQTDENRCLKANAKSCGECIQAGPNCGWCT

SEQ ID NO: 234846 - protein, 89 aa, Artificial Sequence
  derived and/or modified sequence
MNLQPIFWIGLISSVCCVFAQTDENRCLKANAKSCGECIQAGPNCGWCTNSTFLQEGMPTSARCDDLEALKKKGCPPDDIENPRGSKDI

SEQ ID NO: 234847 - protein, 136 aa, Artificial Sequence
  derived and/or modified sequence
MNLQPIFWIGLISSVCCVFAQTDENRCLKANAKSCGECIQAGPNCGWCTNSTFLQEGMPTSARCDDLEALKKKGCPPDDIENPRGSKDIKKNKNVTNRSKGTAEKLKPEDITQIQPQQLVLRLRSGEPQTFTLKFK

SEQ ID NO: 234848 - protein, 125 aa, Artificial Sequence
  derived and/or modified sequence
MNLQPIFWIGLISSVCCVFAQTDENRCLKANAKSCGECIQAGPNCGWCTNSTFLQEGMPTSARCDDLEALKKKGCPPDDIENPRGSKDIKKNKNVTNRSKGTAEKLKPEDITQIQPQQLVLRLRS

SEQ ID NO: 234849 - protein, 163 aa, Artificial Sequence
  derived and/or modified sequence
MNLQPIFWIGLISSVCCVFAQTDENRCLKANAKSCGECIQAGPNCGWCTNSTFLQEGMPTSARCDDLEALKKKGCPPDDIENPRGSKDIKKNKNVTNRSKGTAEKLKPEDITQIQPQQLVLRLRSGEPQTFTLKFKRAEDYPIDLYYLMDLSYSMKDDLENVK

SEQ ID NO: 234850 - protein, 152 aa, Artificial Sequence
  derived and/or modified sequence
MNLQPIFWIGLISSVCCVFAQTDENRCLKANAKSCGECIQAGPNCGWCTNSVSKTFLQEGMPTSARCDDLEALKKKGCPPDDIENPRGSKDIKKNKNVTNRSKGTAEKLKPEDITQIQPQQLVLRLRSGEPQTFTLKFKRAEDYPIDLYYLM

SEQ ID NO: 234851 - protein, 104 aa, Artificial Sequence
  derived and/or modified sequence
MNLQPIFWIGLISSVCCVFAQTDENRCLKANAKSCGECIQAGPNCGWCTNSTFLQEGMPTSARCDDLEALKKKGCPPDDIENPRGSKDIKKNKNVTNRSKGTAE

SEQ ID NO: 234852 - protein, 143 aa, Artificial Sequence
  derived and/or modified sequence
MNLQPIFWIGLISSVCCVFAQTDENRCLKANAKSCGECIQAGPNCGWCTNSTFLQEGMPTSARCDDLEALKKKGCPPDDIENPRGSKDIKKNKNVTNRSKGTAEKLKPEDITQIQPQQLVLRLRSGEPQTFTLKFKRAEDYPI

SEQ ID NO: 234853 - DNA, 2397 bp, Artificial Sequence
  derived and/or modified sequence
atgaacctgcagcccatcttctggatcggcctgatcagcagcgtgtgctgcgtgttcgcccagaccgacgagaacagatgcctgaaggccaacgccaagagctgcggcgagtgcatccaggccggccccaactgcggctggtgcaccaacagcaccttcctgcaggagggcatgcccaccagcgccagatgcgacgacctggaggccctgaagaagaagggctgcccccccgacgacatcgagaaccccagaggcagcaaggacatcaagaagaacaagaacgtgaccaacagaagcaagggcaccgccgagaagctgaagcccgaggacatcacccagatccagccccagcagctggtgctgagactgagaagcggcgagccccagaccttcaccctgaagttcaagagagccgaggactaccccatcgacctgtactacctgatggacctgagctacagcatgaaggacgacctggagaacgtgaagagcctgggcaccgacctgatgaacgagatgagaagaatcaccagcgacttcagaatcggcttcggcagcttcgtggagaagaccgtgatgccctacatcagcaccacccccgccaagctgagaaacccctgcaccagcgagcagaactgcaccagccccttcagctacaagaacgtgctgagcctgaccaacaagggcgaggtgttcaacgagctggtgggcaagcagagaatcagcggcaacctggacagccccgagggcggcttcgacgccatcatgcaggtggccgtgtgcggcagcctgatcggctggagaaacgtgaccagactgctggtgttcagcaccgacgccggcttccacttcgccggcgacggcaagctgggcggcatcgtgctgcccaacgacggccagtgccacctggagaacaacatgtacaccatgagccactactacgactaccccagcatcgcccacctggtgcagaagctgagcgagaacaacatccagaccatcttcgccgtgaccgaggagttccagcccgtgtacaaggagctgaagaacctgatccccaagagcgccgtgggcaccctgagcgccaacagcagcaacgtgatccagctgatcatcgacgcctacaacagcctgagcagcgaggtgatcctggagaacggcaagctgagcgagggcgtgaccatcagctacaagagctactgcaagaacggcgtgaacggcaccggcgagaacggcagaaagtgcagcaacatcagcatcggcgacgaggtgcagttcgagatcagcatcaccagcaacaagtgccccaagaaggacagcgacagcttcaagatcagacccctgggcttcaccgaggaggtggaggtgatcctgcagtacatctgcgagtgcgagtgccagagcgagggcatccccgagagccccaagtgccacgagggcaacggcaccttcgagtgcggcgcctgcagatgcaacgagggcagagtgggcagacactgcgagtgcagcaccgacgaggtgaacagcgaggacatggacgcctactgcagaaaggagaacagcagcgagatctgcagcaacaacggcgagtgcgtgtgcggccagtgcgtgtgcagaaagagagacaacaccaacgagatctacagcggcaagttctgcgagtgcgacaacttcaactgcgacagaagcaacggcctgatctgcggcggcaacggcgtgtgcaagtgcagagtgtgcgagtgcaaccccaactacaccggcagcgcctgcgactgcagcctggacaccagcacctgcgaggccagcaacggccagatctgcaacggcagaggcatctgcgagtgcggcgtgtgcaagtgcaccgaccccaagttccagggccagacctgcgagatgtgccagacctgcctgggcgtgtgcgccgagcacaaggagtgcgtgcagtgcagagccttcaacaagggcgagaagaaggacacctgcacccaggagtgcagctacttcaacatcaccaaggtggagagcagagacaagctgccccagcccgtgcagcccgaccccgtgagccactgcaaggagaaggacgtggacgactgctggttctacttcacctacagcgtgaacggcaacaacgaggtgatggtgcacgtggtggagaaccccgagtgccccaccggccccgacatcatccccatcgtggccggcgtggtggccggcatcgtgctgatcggcctggccctgctgctgatctggaagctgctgatgatcatccacgacagaagagagttcgccaagttcgagaaggagaagatgaacgccaagtgggacaccggcgagaaccccatctacaagagcgccgtgaccaccgtggtgaaccccaagtacgagggcaagtag

SEQ ID NO: 234854 - DNA, 150 bp, Artificial Sequence
  derived and/or modified sequence
atgaacctgcagcccatcttctggatcggcctgatcagcagcgtgtgctgcgtgttcgcccagaccgacgagaacagatgcctgaaggccaacgccaagagctgcggcgagtgcatccaggccggccccaactgcggctggtgcacctag

SEQ ID NO: 234855 - DNA, 270 bp, Artificial Sequence
  derived and/or modified sequence
atgaacctgcagcccatcttctggatcggcctgatcagcagcgtgtgctgcgtgttcgcccagaccgacgagaacagatgcctgaaggccaacgccaagagctgcggcgagtgcatccaggccggccccaactgcggctggtgcaccaacagcaccttcctgcaggagggcatgcccaccagcgccagatgcgacgacctggaggccctgaagaagaagggctgcccccccgacgacatcgagaaccccagaggcagcaaggacatctag

SEQ ID NO: 234856 - DNA, 411 bp, Artificial Sequence
  derived and/or modified sequence
atgaacctgcagcccatcttctggatcggcctgatcagcagcgtgtgctgcgtgttcgcccagaccgacgagaacagatgcctgaaggccaacgccaagagctgcggcgagtgcatccaggccggccccaactgcggctggtgcaccaacagcaccttcctgcaggagggcatgcccaccagcgccagatgcgacgacctggaggccctgaagaagaagggctgcccccccgacgacatcgagaaccccagaggcagcaaggacatcaagaagaacaagaacgtgaccaacagaagcaagggcaccgccgagaagctgaagcccgaggacatcacccagatccagccccagcagctggtgctgagactgagaagcggcgagccccagaccttcaccctgaagttcaagtag

SEQ ID NO: 234857 - DNA, 378 bp, Artificial Sequence
  derived and/or modified sequence
atgaacctgcagcccatcttctggatcggcctgatcagcagcgtgtgctgcgtgttcgcccagaccgacgagaacagatgcctgaaggccaacgccaagagctgcggcgagtgcatccaggccggccccaactgcggctggtgcaccaacagcaccttcctgcaggagggcatgcccaccagcgccagatgcgacgacctggaggccctgaagaagaagggctgcccccccgacgacatcgagaaccccagaggcagcaaggacatcaagaagaacaagaacgtgaccaacagaagcaagggcaccgccgagaagctgaagcccgaggacatcacccagatccagccccagcagctggtgctgagactgagaagctag

SEQ ID NO: 234858 - DNA, 492 bp, Artificial Sequence
  derived and/or modified sequence
atgaacctgcagcccatcttctggatcggcctgatcagcagcgtgtgctgcgtgttcgcccagaccgacgagaacagatgcctgaaggccaacgccaagagctgcggcgagtgcatccaggccggccccaactgcggctggtgcaccaacagcaccttcctgcaggagggcatgcccaccagcgccagatgcgacgacctggaggccctgaagaagaagggctgcccccccgacgacatcgagaaccccagaggcagcaaggacatcaagaagaacaagaacgtgaccaacagaagcaagggcaccgccgagaagctgaagcccgaggacatcacccagatccagccccagcagctggtgctgagactgagaagcggcgagccccagaccttcaccctgaagttcaagagagccgaggactaccccatcgacctgtactacctgatggacctgagctacagcatgaaggacgacctggagaacgtgaagtag

SEQ ID NO: 234859 - DNA, 459 bp, Artificial Sequence
  derived and/or modified sequence
atgaacctgcagcccatcttctggatcggcctgatcagcagcgtgtgctgcgtgttcgcccagaccgacgagaacagatgcctgaaggccaacgccaagagctgcggcgagtgcatccaggccggccccaactgcggctggtgcaccaacagcgtgagcaagaccttcctgcaggagggcatgcccaccagcgccagatgcgacgacctggaggccctgaagaagaagggctgcccccccgacgacatcgagaaccccagaggcagcaaggacatcaagaagaacaagaacgtgaccaacagaagcaagggcaccgccgagaagctgaagcccgaggacatcacccagatccagccccagcagctggtgctgagactgagaagcggcgagccccagaccttcaccctgaagttcaagagagccgaggactaccccatcgacctgtactacctgatgtag

SEQ ID NO: 234860 - DNA, 315 bp, Artificial Sequence
  derived and/or modified sequence
atgaacctgcagcccatcttctggatcggcctgatcagcagcgtgtgctgcgtgttcgcccagaccgacgagaacagatgcctgaaggccaacgccaagagctgcggcgagtgcatccaggccggccccaactgcggctggtgcaccaacagcaccttcctgcaggagggcatgcccaccagcgccagatgcgacgacctggaggccctgaagaagaagggctgcccccccgacgacatcgagaaccccagaggcagcaaggacatcaagaagaacaagaacgtgaccaacagaagcaagggcaccgccgagtag

SEQ ID NO: 234861 - DNA, 432 bp, Artificial Sequence
  derived and/or modified sequence
atgaacctgcagcccatcttctggatcggcctgatcagcagcgtgtgctgcgtgttcgcccagaccgacgagaacagatgcctgaaggccaacgccaagagctgcggcgagtgcatccaggccggccccaactgcggctggtgcaccaacagcaccttcctgcaggagggcatgcccaccagcgccagatgcgacgacctggaggccctgaagaagaagggctgcccccccgacgacatcgagaaccccagaggcagcaaggacatcaagaagaacaagaacgtgaccaacagaagcaagggcaccgccgagaagctgaagcccgaggacatcacccagatccagccccagcagctggtgctgagactgagaagcggcgagccccagaccttcaccctgaagttcaagagagccgaggactaccccatctag

SEQ ID NO: 234862 - DNA, 2397 bp, Artificial Sequence
  derived and/or modified sequence
atgaacctgcaaccaatcttctggattggactgatatcatccgtatgttgtgtgtttgcccagacggacgagaatagatgcctaaaagctaacgctaaatcatgcggggagtgcattcaggctgggccaaactgtggctggtgcactaattctacctttctccaggagggaatgcctactagtgccaggtgcgacgatctggaagcgctgaagaaaaaaggctgtccaccagacgatattgagaatcccaggggatccaaggatatcaaaaagaacaaaaatgttacaaacagatcaaagggtacagcggagaagcttaaaccagaagacattacgcaaatccagccccagcagctggtcttgcgcttaaggagcggggaaccgcagacattcaccctgaagttcaagagggcggaagattaccctatagacctctattacctgatggacttgagctattctatgaaggatgacctggaaaatgtaaagtcgctggggactgacctcatgaacgaaatgcgccgtattacgtccgacttcagaatcgggttcgggtccttcgttgaaaagaccgtgatgccctacattagcaccacgcccgcaaaattaaggaatccatgcacatcagaacaaaattgcaccagtcctttttcctataaaaacgtgctttccctgaccaataaaggagaggtcttcaacgagctggtgggtaagcagagaattagcggtaatctcgacagccccgagggcgggttcgatgcaattatgcaagtcgcggtatgcggcagcttaattggatggagaaacgttactagactgctggtgttctcaacagatgcaggcttccactttgctggggacggaaaacttggcggcatcgtgcttccaaatgacggacagtgccacctcgagaacaacatgtacaccatgtctcactattatgactatcctagtatcgcacacctggtgcagaaactatctgaaaacaacatccagacaatctttgccgtaaccgaagagttccagcccgtttacaaagagttgaagaatctgatacctaagagcgccgtaggaacgttgagcgccaactcttctaacgtcatccagcttatcattgacgcttataattcactgagctcagaagtcatcctggagaacgggaagctgtctgaaggagtaaccataagctacaaaagttattgtaagaatggagttaacggtacaggagaaaacgggcggaagtgcagtaatatatcgattggcgacgaggttcagttcgagatcagcataacgagtaacaaatgcccaaagaaagattccgatagctttaagatcaggccattggggtttactgaggaggttgaggtgatcctgcagtacatctgtgaatgcgaatgccagtcggagggcatccccgagagtcctaaatgtcacgagggcaatgggacctttgagtgtggtgcttgtaggtgcaatgagggccgcgtgggccgacattgtgaatgctctaccgacgaagtgaacagcgaagatatggacgcatattgtaggaaagagaacagtagcgaaatttgttctaacaatggagaatgcgtatgtgggcagtgtgtatgtagaaaaagggacaacactaatgagatctattcagggaagttttgcgaatgtgataactttaactgcgaccggtcaaatggcctgatatgtgggggaaatggagtttgcaagtgtcgcgtgtgcgaatgcaaccctaactatactggcagtgcatgtgactgctcgctggatacttctacttgcgaggctagcaacggacaaatctgtaatggccgcggtatttgcgaatgcggagtttgcaaatgtacagatcctaagttccagggtcagacatgtgagatgtgccagacatgtctgggagtttgcgccgagcataaggagtgtgtgcagtgtagggcgttcaacaagggagaaaagaaagacacttgtacccaggaatgcagttacttcaacatcaccaaggtggagagcagagataagctgcctcagccggtccaaccggatcctgtttctcactgcaaagagaaggacgtggatgattgctggttttattttacctatagtgtcaatggcaacaacgaagtcatggtgcatgttgtggagaatcccgagtgtccgaccgggccagacataattccgatagttgcgggcgtcgtagctggaattgtgctgatcggactggcactgctcttgatctggaagttgcttatgattatccatgatcgaagggaatttgctaaatttgaaaaggaaaagatgaacgcgaaatgggacacaggggagaacccaatttataaaagcgcagtgacaacagtcgtgaatccaaagtacgaaggaaaatag

SEQ ID NO: 234863 - DNA, 2397 bp, Artificial Sequence
  derived and/or modified sequence
atgaatctgcagcccatattttggatcgggctcatcagctctgtgtgctgtgtgttcgctcagacagatgagaacaggtgcctcaaagctaacgcaaaaagctgcggagagtgtattcaggcaggccccaactgcggctggtgcacaaatagcacctttctgcaggaggggatgccgacttctgcccgttgtgacgacttagaggctttgaaaaaaaaggggtgcccgccagacgacattgagaacccaaggggctccaaggatattaagaagaacaaaaacgtgaccaatcggagtaaggggacggcagagaaattaaagcctgaggatattacacagatccagccacagcaactcgtcctccggctgcggtcgggcgagccccagacttttacgttgaagtttaagcgagccgaggattaccctatcgatctctactatctcatggatttaagttatagcatgaaagacgatttggagaacgttaagagtctagggacagatctgatgaatgagatgcggcggataacatctgatttcaggatcgggttcggctcgttcgtggaaaagacggtcatgccttatatctcgacaacacctgctaagttgaggaacccttgtacatcagagcagaactgtacatcccccttcagttacaagaatgtgttgtctctaacgaataagggggaagtcttcaatgagttggtcggaaagcagagaataagcggcaatcttgactcgcccgaaggtggctttgatgcaatcatgcaagtggccgtgtgcggtagcctcatcggttggcgcaacgtgacacgattgctggtcttctctactgatgcagggtttcactttgccggtgacgggaagcttgggggcattgtgctccccaatgacggccagtgccacctggaaaataatatgtacactatgtcacattattacgactacccttctatagcccaccttgtccaaaagctgtctgagaacaatattcagacaatttttgccgtgacggaggaatttcagcctgtctataaggagctgaaaaaccttattcctaagagtgccgttggcactctttcggctaattccagcaacgtcatccaactgataatagatgcctacaatagcttgagtagtgaagtcattctggagaacggaaagctgtcagaaggagtcactatttcctacaagtcctattgcaaaaacggagtgaacgggactggggaaaatggcagaaaatgctccaacatcagcatcggggacgaggtccagttcgaaattagcattacttccaataaatgcccaaaaaaggatagcgacagctttaagattagaccgttgggatttaccgaggaggtggaagtgattctgcagtacatttgcgagtgcgagtgtcagagcgaaggcatacccgaaagtccaaaatgtcacgagggcaatggaacttttgaatgcggcgcctgcagatgcaacgagggacgggtcggcaggcactgcgagtgtagcactgatgaggtgaatagtgaggatatggacgcatattgtcgcaaagagaactccagcgaaatctgcagcaacaatggggaatgcgtctgcgggcagtgtgtgtgccggaagcgggataacaccaatgaaatttactccggaaagttttgcgagtgtgataattttaattgcgaccgttcaaacgggttaatctgcggaggtaacggagtttgcaagtgcagagtgtgtgagtgtaaccccaactacactggctcggcctgtgactgctcactggataccagtacctgtgaggcatctaacggccaaatctgcaatggccggggcatctgtgagtgcggcgtttgtaaatgtacggaccccaaatttcaaggacagacatgcgaaatgtgccagacctgcctcggcgtgtgtgcggagcacaaggaatgtgttcagtgtcgtgctttcaataagggtgaaaaaaaagacacatgtacgcaagaatgcagctatttcaatatcacaaaggtggaaagccgggacaaattgccacagccagtgcagccagaccctgtgagtcattgcaaagagaaggacgtggatgactgctggttctacttcacctacagcgttaacgggaacaatgaagtgatggtgcacgtcgtggagaaccccgagtgtcctaccggtcctgatatcatacctatcgtcgctggcgtcgtggctggaattgttctgattggtttggctcttctgctcatctggaaactactcatgattatacacgaccgacgcgagttcgccaagtttgagaaggagaagatgaatgcgaagtgggataccggggaaaaccccatatacaaatcggcagtgaccacagtagtgaaccccaaatatgaaggcaaatag

SEQ ID NO: 234864 - DNA, 150 bp, Artificial Sequence
  derived and/or modified sequence
atgaacctacagcccattttctggataggcctcattagctccgtctgttgcgtcttcgcacaaacagatgagaaccgctgtctaaaagccaacgccaaaagctgcggcgagtgtattcaagccggacccaattgcgggtggtgcacttag

SEQ ID NO: 234865 - DNA, 270 bp, Artificial Sequence
  derived and/or modified sequence
atgaacctacagcctatattttggattgggctgattagcagcgtatgctgcgtctttgcccagacggacgagaatcggtgtctgaaagctaatgcaaagtcgtgtggggagtgcatccaggctggtcctaactgcgggtggtgtactaattctacgttccttcaggagggtatgcctacctcagcccgctgtgatgatctggaagctctgaagaaaaagggttgtccacctgacgacatcgaaaatcctcgtggatccaaagacatttag

SEQ ID NO: 234866 - DNA, 411 bp, Artificial Sequence
  derived and/or modified sequence
atgaacctccaacccattttctggatcggcttgatttcgtcggtatgttgcgtctttgcacagactgacgaaaatcgttgcctgaaagccaatgcaaagtcatgtggggagtgtatccaggcaggacctaattgcggctggtgcaccaattcaacattcctgcaggaggggatgcctaccagtgcaagatgtgacgacttagaggctcttaaaaaaaagggatgccccccagacgatatagaaaatccgagaggatcaaaggatattaagaaaaacaaaaatgtgactaatcggtcgaagggtaccgccgagaaacttaaaccggaggatatcactcaaatacagcctcagcagctggtcctccgcctgaggagcggcgagccccagacgttcaccctaaagtttaaatag

SEQ ID NO: 234867 - DNA, 378 bp, Artificial Sequence
  derived and/or modified sequence
atgaacctgcagccgatcttctggatcgggctgatcagttccgtgtgctgcgtgttcgcccagaccgacgaaaaccgctgcttgaaggccaacgccaagtcctgcggcgagtgcatccaggcaggacccaattgcggttggtgcacaaactccaccttcctccaggagggtatgcccacctctgccaggtgtgacgacctcgaagcgcttaaaaaaaagggttgtccgccagacgacatcgaaaacccccgggggagcaaggacatcaagaagaataagaatgtgaccaaccgctcgaagggcacagctgagaagttgaaacctgaagatatcactcagattcagccacagcaactggtgctcaggttacggtcttag

SEQ ID NO: 234868 - DNA, 492 bp, Artificial Sequence
  derived and/or modified sequence
atgaacctgcagcccattttctggataggtctgataagtagtgtttgttgtgtattcgcccaaaccgacgaaaataggtgcctgaaagctaacgccaaatcatgcggggagtgcattcaagccggcccaaactgcggatggtgtacaaactccacctttctgcaggaaggcatgcctacatccgccagatgtgacgatctggaagctctgaagaagaaaggatgtccacctgatgatatagagaatccacggggctccaaggatataaaaaagaacaagaatgtcacaaatcggtccaaaggaactgcagagaaattgaagccagaggacatcacacagattcaaccacagcaattggtgcttaggttgcgaagtggagagccacaaacttttacgctgaagtttaagagagcggaagactatcccattgacctgtactatctcatggatctgagctacagcatgaaggatgacctagaaaacgttaagtag

SEQ ID NO: 234869 - DNA, 459 bp, Artificial Sequence
  derived and/or modified sequence
atgaacttgcagcccatcttctggatcggtctgatttcttctgtatgctgcgttttcgcgcagacagatgagaaccgatgtctaaaagccaatgccaagtcctgtggtgagtgcatccaggccggacccaactgtggatggtgcacaaacagtgtttctaagaccttcctgcaggaggggatgcccacctctgcccggtgcgatgatctcgaggccctgaagaaaaagggatgtccgccagatgatatagagaacccacgggggtcaaaggatattaagaagaataagaacgtgactaataggagtaaaggtacagctgaaaaacttaagcccgaagacatcacacagatacagccccagcagctggtgcttaggttgaggagcggagaaccccaaaccttcacccttaagttcaaaagggctgaggactaccccatcgatctctattacctcatgtag

SEQ ID NO: 234870 - DNA, 315 bp, Artificial Sequence
  derived and/or modified sequence
atgaatcttcaacctattttttggattggactcatctccagtgtctgctgtgtgtttgcccaaaccgacgagaatcggtgtctaaaagcaaatgcaaagtcttgcggcgagtgtattcaggccgggcctaattgcggatggtgtaccaactctacattcctccaggagggtatgcccaccagcgccaggtgtgatgatcttgaggcattgaagaagaaaggctgcccgccagacgatatcgaaaaccctcgagggtccaaggatatcaagaagaataaaaatgttaccaaccgcagtaagggcacagccgaatag

SEQ ID NO: 234871 - DNA, 432 bp, Artificial Sequence
  derived and/or modified sequence
atgaacctgcagccaatcttctggattgggctcattagcagtgtctgttgcgtcttcgcacagaccgatgagaaccggtgtctgaaagccaacgctaagtcctgtggcgagtgcattcaggcaggacccaactgtgggtggtgcactaactccacctttcttcaagagggaatgcctacgtcagcgagatgcgatgacctggaggccctaaagaagaagggatgccctccggatgacatagagaacccccgcgggagcaaggacattaaaaagaacaagaatgtgaccaaccggtccaaaggtacagctgagaaactcaagccggaggacataacccagatccagccacagcagctggtgctccggctcaggtcaggggagccacagaccttcacattaaaattcaagcgcgctgaggactacccgatatag

SEQ ID NO: 234872 - DNA, 2397 bp, Artificial Sequence
  derived and/or modified sequence
atgaacctgcagcccatcttctggattggcctcatcagctctgtgtgctgcgtgtttgcccagacagatgagaaccgctgcctgaaggccaatgccaagagctgtggggagtgcatccaggccggccccaactgtggctggtgcaccaacagcaccttcctgcaggagggcatgcccaccagcgcccgctgtgatgacctggaggccctgaagaagaagggctgccccccagatgacatcgagaacccccggggcagcaaggacatcaagaagaacaagaatgtgaccaacagaagcaagggcacagctgagaagctgaagccagaggacatcacccagatccagccccagcagctggtgctgcggctgcggtctggagagccccagaccttcaccctgaagttcaagagagctgaggactaccccatcgacctgtactacctgatggacctgagctacagcatgaaggatgacctggagaatgtgaagagcctgggcacagacctgatgaatgagatgaggcgcatcaccagtgacttccgcatcggcttcggcagctttgtggagaagacagtgatgccctacatcagcaccaccccagccaagctgaggaacccctgcaccagcgagcagaactgcaccagccccttctcctacaagaatgtgctgagcctgaccaacaagggggaggtgttcaatgagctggtgggcaagcagaggatcagcggcaacctggacagccctgagggcggctttgatgccatcatgcaggtggccgtgtgtggcagcctgattggctggagaaatgtgacccggctgctggtgttcagcacagatgctggcttccactttgctggagatggcaagctgggcggcatcgtgctgcccaatgatggccagtgccacctggagaacaacatgtacaccatgagccactactatgactaccccagcatcgcccacctggtgcagaagctgtctgagaacaacatccagaccatctttgctgtgacagaggagttccagcctgtgtacaaggagctgaagaacctgatccccaagtctgctgtgggcaccctgagcgccaacagcagcaatgtcatccagctgatcattgatgcctacaacagcctgagcagcgaggtgatcctggagaatggcaagctgtctgagggcgtgaccatctcctacaagagctactgcaagaatggagtgaatggcaccggggagaatggaaggaagtgcagcaacatcagcattggagatgaggtgcagtttgagatcagcatcaccagcaacaagtgccccaagaaggacagcgacagcttcaagatccggcccctgggcttcacagaggaggtggaggtgatcctgcagtacatctgtgaatgtgagtgccagagcgagggcatccctgagagccccaagtgccacgagggcaatggcacctttgaatgtggggcctgccgctgcaatgaaggccgggtgggccgccactgtgaatgttccacagatgaggtgaacagcgaggacatggatgcctactgcaggaaagaaaacagcagcgagatctgcagcaacaacggggagtgtgtgtgtggccagtgtgtgtgcaggaagagggacaacaccaatgagatctacagcggcaagttctgtgaatgtgacaacttcaactgtgacaggagcaatggcctcatctgtggcggcaatggagtgtgcaagtgccgggtgtgtgagtgcaaccccaactacacaggcagcgcctgtgactgcagcctggacaccagcacctgtgaggccagcaatggccagatctgcaatggccggggcatctgtgaatgtggggtgtgcaagtgcacagaccccaagttccagggccagacctgtgagatgtgccagacctgcctgggcgtgtgtgccgagcacaaggaatgtgtgcagtgccgggccttcaacaagggggagaagaaggacacctgcacccaggagtgcagctacttcaacatcaccaaggtggagagccgggacaagctgccccagcctgtgcagcctgaccctgtgagccactgcaaggagaaggatgtggatgactgctggttctacttcacctacagcgtgaatggaaataatgaggtgatggtgcacgtggtggagaaccctgagtgccccactggaccagacatcatccccatcgtggccggcgtggtggccggcatcgtgctgattggcctggccctgctgctgatctggaagctgctgatgatcatccatgaccggcgggagtttgccaagtttgagaaggagaagatgaatgccaagtgggacacaggagagaaccccatctacaagtctgctgtgaccaccgtggtgaaccccaagtatgagggcaagtag

SEQ ID NO: 234873 - DNA, 150 bp, Artificial Sequence
  derived and/or modified sequence
atgaacctgcagcccatcttctggattggcctcatcagctctgtgtgctgcgtgtttgcccagacagatgagaaccgctgcctgaaggccaatgccaagagctgtggggagtgcatccaggccggccccaactgtggctggtgcacctag

SEQ ID NO: 234874 - DNA, 270 bp, Artificial Sequence
  derived and/or modified sequence
atgaacctgcagcccatcttctggattggcctcatcagctctgtgtgctgcgtgtttgcccagacagatgagaaccgctgcctgaaggccaatgccaagagctgtggggagtgcatccaggccggccccaactgtggctggtgcaccaacagcaccttcctgcaggagggcatgcccaccagcgcccgctgtgatgacctggaggccctgaagaagaagggctgccccccagatgacatcgagaacccccggggcagcaaggacatctag

SEQ ID NO: 234875 - DNA, 411 bp, Artificial Sequence
  derived and/or modified sequence
atgaacctgcagcccatcttctggattggcctcatcagctctgtgtgctgcgtgtttgcccagacagatgagaaccgctgcctgaaggccaatgccaagagctgtggggagtgcatccaggccggccccaactgtggctggtgcaccaacagcaccttcctgcaggagggcatgcccaccagcgcccgctgtgatgacctggaggccctgaagaagaagggctgccccccagatgacatcgagaacccccggggcagcaaggacatcaagaagaacaagaatgtgaccaacagaagcaagggcacagctgagaagctgaagccagaggacatcacccagatccagccccagcagctggtgctgcggctgcggtctggagagccccagaccttcaccctgaagttcaagtag

SEQ ID NO: 234876 - DNA, 378 bp, Artificial Sequence
  derived and/or modified sequence
atgaacctgcagcccatcttctggattggcctcatcagctctgtgtgctgcgtgtttgcccagacagatgagaaccgctgcctgaaggccaatgccaagagctgtggggagtgcatccaggccggccccaactgtggctggtgcaccaacagcaccttcctgcaggagggcatgcccaccagcgcccgctgtgatgacctggaggccctgaagaagaagggctgccccccagatgacatcgagaacccccggggcagcaaggacatcaagaagaacaagaatgtgaccaacagaagcaagggcacagctgagaagctgaagccagaggacatcacccagatccagccccagcagctggtgctgcggctgcggagctag

SEQ ID NO: 234877 - DNA, 492 bp, Artificial Sequence
  derived and/or modified sequence
atgaacctgcagcccatcttctggattggcctcatcagctctgtgtgctgcgtgtttgcccagacagatgagaaccgctgcctgaaggccaatgccaagagctgtggggagtgcatccaggccggccccaactgtggctggtgcaccaacagcaccttcctgcaggagggcatgcccaccagcgcccgctgtgatgacctggaggccctgaagaagaagggctgccccccagatgacatcgagaacccccggggcagcaaggacatcaagaagaacaagaatgtgaccaacagaagcaagggcacagctgagaagctgaagccagaggacatcacccagatccagccccagcagctggtgctgcggctgcggtctggagagccccagaccttcaccctgaagttcaagagagctgaggactaccccatcgacctgtactacctgatggacctgagctacagcatgaaggatgacctggagaatgtgaagtag

SEQ ID NO: 234878 - DNA, 459 bp, Artificial Sequence
  derived and/or modified sequence
atgaacctgcagcccatcttctggattggcctcatcagctctgtgtgctgcgtgtttgcccagacagatgagaaccgctgcctgaaggccaatgccaagagctgtggggagtgcatccaggccggccccaactgtggctggtgcaccaacagcgtgtccaagaccttcctgcaggagggcatgcccaccagcgcccgctgtgatgacctggaggccctgaagaagaagggctgccccccagatgacatcgagaacccccggggcagcaaggacatcaagaagaacaagaatgtgaccaacagaagcaaaggaacagctgagaagctgaagccagaggacatcacccagatccagccccagcagctggtgctgcggctgcggagcggggagccccagaccttcaccctgaagttcaagagagctgaggactaccccatcgacctgtactacctgatgtag

SEQ ID NO: 234879 - DNA, 315 bp, Artificial Sequence
  derived and/or modified sequence
atgaacctgcagcccatcttctggattggcctcatcagctctgtgtgctgcgtgtttgcccagacagatgagaaccgctgcctgaaggccaatgccaagagctgtggggagtgcatccaggccggccccaactgtggctggtgcaccaacagcaccttcctgcaggagggcatgcccaccagcgcccgctgtgatgacctggaggccctgaagaagaagggctgccccccagatgacatcgagaacccccggggcagcaaggacatcaagaagaacaagaatgtgaccaacagaagcaagggcacagctgagtag

SEQ ID NO: 234880 - DNA, 432 bp, Artificial Sequence
  derived and/or modified sequence
atgaacctgcagcccatcttctggattggcctcatcagctctgtgtgctgcgtgtttgcccagacagatgagaaccgctgcctgaaggccaatgccaagagctgtggggagtgcatccaggccggccccaactgtggctggtgcaccaacagcaccttcctgcaggagggcatgcccaccagcgcccgctgtgatgacctggaggccctgaagaagaagggctgccccccagatgacatcgagaacccccggggcagcaaggacatcaagaagaacaagaatgtgaccaacagaagcaagggcacagctgagaagctgaagccagaggacatcacccagatccagccccagcagctggtgctgcggctgcggtctggagagccccagaccttcaccctgaagttcaagagagctgaggactaccccatctag

SEQ ID NO: 234881 - DNA, 3640 bp, Artificial Sequence
  derived and/or modified sequence
agcgggagtcgcggaacagcaggcccgagcccaccgcgccgggccccggacgccgcgcggaaaagatgaatttacaaccaattttctggattggactgatcagttcagtttgctgtgtgtttgctcaaacagatgaaaatagatgtttaaaagcaaatgccaaatcatgtggagaatgtatacaagcagggccaaattgtgggtggtgcacaaattcaacatttttacaggaaggaatgcctacttctgcacgatgtgatgatttagaagccttaaaaaagaagggttgccctccagatgacatagaaaatcccagaggctccaaagatataaagaaaaataaaaatgtaaccaaccgtagcaaaggaacagcagagaagctcaagccagaggatattactcagatccaaccacagcagttggttttgcgattaagatcaggggagccacagacatttacattaaaattcaagagagctgaagactatcccattgacctctactaccttatggacctgtcttactcaatgaaagacgatttggagaatgtaaaaagtcttggaacagatctgatgaatgaaatgaggaggattacttcggacttcagaattggatttggctcatttgtggaaaagactgtgatgccttacattagcacaacaccagctaagctcaggaacccttgcacaagtgaacagaactgcaccagcccatttagctacaaaaatgtgctcagtcttactaataaaggagaagtatttaatgaacttgttggaaaacagcgcatatctggaaatttggattctccagaaggtggtttcgatgccatcatgcaagttgcagtttgtggatcactgattggctggaggaatgttacacggctgctggtgttttccacagatgccgggtttcactttgctggagatgggaaacttggtggcattgttttaccaaatgatggacaatgtcacctggaaaataatatgtacacaatgagccattattatgattatccttctattgctcaccttgtccagaaactgagtgaaaataatattcagacaatttttgcagttactgaagaatttcagcctgtttacaaggagctgaaaaacttgatccctaagtcagcagtaggaacattatctgcaaattctagcaatgtaattcagttgatcattgatgcatacaattccctttcctcagaagtcattttggaaaacggcaaattgtcagaaggcgtaacaataagttacaaatcttactgcaagaacggggtgaatggaacaggggaaaatggaagaaaatgttccaatatttccattggagatgaggttcaatttgaaattagcataacttcaaataagtgtccaaaaaaggattctgacagctttaaaattaggcctctgggctttacggaggaagtagaggttattcttcagtacatctgtgaatgtgaatgccaaagcgaaggcatccctgaaagtcccaagtgtcatgaaggaaatgggacatttgagtgtggcgcgtgcaggtgcaatgaagggcgtgttggtagacattgtgaatgcagcacagatgaagttaacagtgaagacatggatgcttactgcaggaaagaaaacagttcagaaatctgcagtaacaatggagagtgcgtctgcggacagtgtgtttgtaggaagagggataatacaaatgaaatttattctggcaaattctgcgagtgtgataatttcaactgtgatagatccaatggcttaatttgtggaggaaatggtgtttgcaagtgtcgtgtgtgtgagtgcaaccccaactacactggcagtgcatgtgactgttctttggatactagtacttgtgaagccagcaacggacagatctgcaatggccggggcatctgcgagtgtggtgtctgtaagtgtacagatccgaagtttcaagggcaaacgtgtgagatgtgtcagacctgccttggtgtctgtgctgagcataaagaatgtgttcagtgcagagccttcaataaaggagaaaagaaagacacatgcacacaggaatgttcctattttaacattaccaaggtagaaagtcgggacaaattaccccagccggtccaacctgatcctgtgtcccattgtaaggagaaggatgttgacgactgttggttctattttacgtattcagtgaatgggaacaacgaggtcatggttcatgttgtggagaatccagagtgtcccactggtccagacatcattccaattgtagctggtgtggttgctggaattgttcttattggccttgcattactgctgatatggaagcttttaatgataattcatgacagaagggagtttgctaaatttgaaaaggagaaaatgaatgccaaatgggacacgggtgaaaatcctatttataagagtgccgtaacaactgtggtcaatccgaagtatgagggaaaatgagtactgcccgtgcaaatcccacaacactgaatgcaaagtagcaatttccatagtcacagttaggtagctttagggcaatattgccatggttttactcatgtgcaggttttgaaaatgtacaatatgtataatttttaaaatgttttattattttgaaaataatgttgtaattcatgccagggactgacaaaagacttgagacaggatggttactcttgtcagctaaggtcacattgtgcctttttgaccttttcttcctggactattgaaatcaagcttattggattaagtgatatttctatagcgattgaaagggcaatagttaaagtaatgagcatgatgagagtttctgttaatcatgtattaaaactgatttttagctttacaaatatgtcagtttgcagttatgcagaatccaaagtaaatgtcctgctagctagttaaggattgttttaaatctgttattttgctatttgcctgttagacatgactgatgacatatctgaaagacaagtatgttgagagttgctggtgtaaaatacgtttgaaatagttgatctacaaaggccatgggaaaaattcagagagttaggaaggaaaaaccaatagctttaaaacctgtgtgccattttaagagttacttaatgtttggtaacttttatgccttcactttacaaattcaagccttagataaaagaaccgagcaattttctgctaaaaagtccttgatttagcactatttacatacaggccatactttacaaagtatttgctgaatggggaccttttgagttgaatttattttattatttttattttgtttaatgtctggtgctttctgtcacctcttctaatcttttaatgtatttgtttgcaattttggggtaagactttttttatgagtactttttctttgaagttttagcggtcaatttgcctttttaatgaacatgtgaagttatactgtggctatgcaacagctctcacctacgcgagtcttactttgagttagtgccataacagaccactgtatgtttacttctcaccatttgagttgcccatcttgtttcacactagtcacattcttgttttaagtgcctttagttttaacagttcactttttacagtgctatttactgaagttatttattaaatatgcctaaaatacttaaatcgga

SEQ ID NO: 234882 - DNA, 3784 bp, Artificial Sequence
  derived and/or modified sequence
gagccagcccagccgcgttccgaacgtgagggtcgccggcctgggcgctgtcacgtcggggctgccggagctgcgggggaccgggcccgaacggcccctgacacctgcggtctcccgccgggctgggcaagcgcagatgaatttacaaccaattttctggattggactgatcagttcagtttgctgtgtgtttgctcaaacagatgaaaatagatgtttaaaagcaaatgccaaatcatgtggagaatgtatacaagcagggccaaattgtgggtggtgcacaaattcaacatttttacaggaaggaatgcctacttctgcacgatgtgatgatttagaagccttaaaaaagaagggttgccctccagatgacatagaaaatcccagaggctccaaagatataaagaaaaataaaaatgtaaccaaccgtagcaaaggaacagcagagaagctcaagccagaggatattactcagatccaaccacagcagttggttttgcgattaagatcaggggagccacagacatttacattaaaattcaagagagctgaagactatcccattgacctctactaccttatggacctgtcttactcaatgaaagacgatttggagaatgtaaaaagtcttggaacagatctgatgaatgaaatgaggaggattacttcggacttcagaattggatttggctcatttgtggaaaagactgtgatgccttacattagcacaacaccagctaagctcaggaacccttgcacaagtgaacagaactgcaccagcccatttagctacaaaaatgtgctcagtcttactaataaaggagaagtatttaatgaacttgttggaaaacagcgcatatctggaaatttggattctccagaaggtggtttcgatgccatcatgcaagttgcagtttgtggatcactgattggctggaggaatgttacacggctgctggtgttttccacagatgccgggtttcactttgctggagatgggaaacttggtggcattgttttaccaaatgatggacaatgtcacctggaaaataatatgtacacaatgagccattattatgattatccttctattgctcaccttgtccagaaactgagtgaaaataatattcagacaatttttgcagttactgaagaatttcagcctgtttacaaggagctgaaaaacttgatccctaagtcagcagtaggaacattatctgcaaattctagcaatgtaattcagttgatcattgatgcatacaattccctttcctcagaagtcattttggaaaacggcaaattgtcagaaggcgtaacaataagttacaaatcttactgcaagaacggggtgaatggaacaggggaaaatggaagaaaatgttccaatatttccattggagatgaggttcaatttgaaattagcataacttcaaataagtgtccaaaaaaggattctgacagctttaaaattaggcctctgggctttacggaggaagtagaggttattcttcagtacatctgtgaatgtgaatgccaaagcgaaggcatccctgaaagtcccaagtgtcatgaaggaaatgggacatttgagtgtggcgcgtgcaggtgcaatgaagggcgtgttggtagacattgtgaatgcagcacagatgaagttaacagtgaagacatggatgcttactgcaggaaagaaaacagttcagaaatctgcagtaacaatggagagtgcgtctgcggacagtgtgtttgtaggaagagggataatacaaatgaaatttattctggcaaattctgcgagtgtgataatttcaactgtgatagatccaatggcttaatttgtggaggaaatggtgtttgcaagtgtcgtgtgtgtgagtgcaaccccaactacactggcagtgcatgtgactgttctttggatactagtacttgtgaagccagcaacggacagatctgcaatggccggggcatctgcgagtgtggtgtctgtaagtgtacagatccgaagtttcaagggcaaacgtgtgagatgtgtcagacctgccttggtgtctgtgctgagcataaagaatgtgttcagtgcagagccttcaataaaggagaaaagaaagacacatgcacacaggaatgttcctattttaacattaccaaggtagaaagtcgggacaaattaccccagccggtccaacctgatcctgtgtcccattgtaaggagaaggatgttgacgactgttggttctattttacgtattcagtgaatgggaacaacgaggtcatggttcatgttgtggagaatccagagtgtcccactggtccagacatcattccaattgtagctggtgtggttgctggaattgttcttattggccttgcattactgctgatatggaagcttttaatgataattcatgacagaagggagtttgctaaatttgaaaaggagaaaatgaatgccaaatgggacacgggtgaaaatcctatttataagagtgccgtaacaactgtggtcaatccgaagtatgagggaaaatgagtactgcccgtgcaaatcccacaacactgaatgcaaagtagcaatttccatagtcacagttaggtagctttagggcaatattgccatggttttactcatgtgcaggttttgaaaatgtacaatatgtataatttttaaaatgttttattattttgaaaataatgttgtaattcatgccagggactgacaaaagacttgagacaggatggttactcttgtcagctaaggtcacattgtgcctttttgaccttttcttcctggactattgaaatcaagcttattggattaagtgatatttctatagcgattgaaagggcaatagttaaagtaatgagcatgatgagagtttctgttaatcatgtattaaaactgatttttagctttacaaatatgtcagtttgcagttatgcagaatccaaagtaaatgtcctgctagctagttaaggattgttttaaatctgttattttgctatttgcctgttagacatgactgatgacatatctgaaagacaagtatgttgagagttgctggtgtaaaatacgtttgaaatagttgatctacaaaggccatgggaaaaattcagagagttaggaaggaaaaaccaatagctttaaaacctgtgtgccattttaagagttacttaatgtttggtaacttttatgccttcactttacaaattcaagccttagataaaagaaccgagcaattttctgctaaaaagtccttgatttagcactatttacatacaggccatactttacaaagtatttgctgaatggggaccttttgagttgaatttattttattatttttattttgtttaatgtctggtgctttctgtcacctcttctaatcttttaatgtatttgtttgcaattttggggtaagactttttttatgagtactttttctttgaagttttagcggtcaatttgcctttttaatgaacatgtgaagttatactgtggctatgcaacagctctcacctacgcgagtcttactttgagttagtgccataacagaccactgtatgtttacttctcaccatttgagttgcccatcttgtttcacactagtcacattcttgttttaagtgcctttagttttaacagttcactttttacagtgctatttactgaagttatttattaaatatgcctaaaatacttaaatcggatgtcttgactctgatgtattttatcaggttgtgtgcatgaaatttttatagattaaagaagttgaggaaaagc

SEQ ID NO: 234883 - DNA, 500 bp, Artificial Sequence
  derived and/or modified sequence
gaacagcaggcccgagcccaccgcgccgggccccggacgccgcgcggaaaagatacctgatcagagaagcagtttgatgtactaaaggcttctcgattgggagacaggaaacctgggtgtcagtgccgggtctgccactgaatttctgtgtgacctttgtcagagtactgtacttccagagcgttggtttccacatctaccctataaagcagcctgcatgtttctctcattctctcgttcgaggagttggaggatagctgctgcctgatggaaaggcaaaaaagtccgcaggcatagagagtggaaagaaggaacagcatactaggctggtttgaaaaacaatcaattgctagatgaatttacaaccaattttctggattggactgatcagttcagtttgctgtgtgtttgctcaaacagatgaaaatagatgtttaaaagcaaatgccaaatcatgtggagaatgtatacaagcagggccaaattgtgggtggtgcaca

SEQ ID NO: 234884 - DNA, 569 bp, Artificial Sequence
  derived and/or modified sequence
agcccgcgggagaggcccagcgggagtcgcggaacagcaggcccgagcccaccgcgccgggccccggacgccgcgcggaaaagatacctgatcagagaagcagtttgatgtactaaaggcttctcgattgggagacaggaaacctgggtgtcagtgccgggtctgccactgaatttctgtgtgacctttgtcagagtactgtacttccagagcgttggtttccacatctaccctataaagcagcctgcatgtttctctcattctctcgttcgaggagttggaggatagctgctgcctgatatgaatttacaaccaattttctggattggactgatcagttcagtttgctgtgtgtttgctcaaacagatgaaaatagatgtttaaaagcaaatgccaaatcatgtggagaatgtatacaagcagggccaaattgtgggtggtgcacaaattcaacatttttacaggaaggaatgcctacttctgcacgatgtgatgatttagaagccttaaaaaagaagggttgccctccagatgacatagaaaatcccagaggctccaaagatataaa

SEQ ID NO: 234885 - DNA, 445 bp, Artificial Sequence
  derived and/or modified sequence
acacctgcggtctcccgccgggctgggcaagcgcagatgaatttacaaccaattttctggattggactgatcagttcagtttgctgtgtgtttgctcaaacagatgaaaatagatgtttaaaagcaaatgccaaatcatgtggagaatgtatacaagcagggccaaattgtgggtggtgcacaaattcaacatttttacaggaaggaatgcctacttctgcacgatgtgatgatttagaagccttaaaaaagaagggttgccctccagatgacatagaaaatcccagaggctccaaagatataaagaaaaataaaaatgtaaccaaccgtagcaaaggaacagcagagaagctcaagccagaggatattactcagatccaaccacagcagttggttttgcgattaagatcaggggagccacagacatttacattaaaattcaaga

SEQ ID NO: 234886 - DNA, 552 bp, Artificial Sequence
  derived and/or modified sequence
agtgcaaacgcagtgagtcatccgcagggcgtgcggagtgtgccggctgggtccctgcagcccccaagcccggagggatgcgggaaaatcgctcttggaagatgcaattgctttaataatcgactttcacccttagtagcagaaaaacgaccgtggccacagtaccacaaagtctctgatgaatttacaaccaattttctggattggactgatcagttcagtttgctgtgtgtttgctcaaacagatgaaaatagatgtttaaaagcaaatgccaaatcatgtggagaatgtatacaagcagggccaaattgtgggtggtgcacaaattcaacatttttacaggaaggaatgcctacttctgcacgatgtgatgatttagaagccttaaaaaagaagggttgccctccagatgacatagaaaatcccagaggctccaaagatataaagaaaaataaaaatgtaaccaaccgtagcaaaggaacagcagagaagctcaagccagaggatattactcagatccaaccacagcagttggttttgcgattaagatc

SEQ ID NO: 234887 - DNA, 585 bp, Artificial Sequence
  derived and/or modified sequence
aatgaaaagtggtcaaacaacttaacatggtgccagttttcctaagcgtgcttgccactgattgtaatgcttttattgtttggcttcttgataaatgaatttacaaccaattttctggattggactgatcagttcagtttgctgtgtgtttgctcaaacagatgaaaatagatgtttaaaagcaaatgccaaatcatgtggagaatgtatacaagcagggccaaattgtgggtggtgcacaaattcaacatttttacaggaaggaatgcctacttctgcacgatgtgatgatttagaagccttaaaaaagaagggttgccctccagatgacatagaaaatcccagaggctccaaagatataaagaaaaataaaaatgtaaccaaccgtagcaaaggaacagcagagaagctcaagccagaggatattactcagatccaaccacagcagttggttttgcgattaagatcaggggagccacagacatttacattaaaattcaagagagctgaagactatcccattgacctctactaccttatggacctgtcttactcaatgaaagacgatttggagaatgtaaaaag

SEQ ID NO: 234888 - DNA, 540 bp, Artificial Sequence
  derived and/or modified sequence
agcccgcgggagaggcccagcgggagtcgcggaacagcaggcccgagcccaccgcgccgggccccggacgccgcgcggaaaagatgaatttacaaccaattttctggattggactgatcagttcagtttgctgtgtgtttgctcaaacagatgaaaatagatgtttaaaagcaaatgccaaatcatgtggagaatgtatacaagcagggccaaattgtgggtggtgcacaaattcagtaagtaagacatttttacaggaaggaatgcctacttctgcacgatgtgatgatttagaagccttaaaaaagaagggttgccctccagatgacatagaaaatcccagaggctccaaagatataaagaaaaataaaaatgtaaccaaccgtagcaaaggaacagcagagaagctcaagccagaggatattactcagatccaaccacagcagttggttttgcgattaagatcaggggagccacagacatttacattaaaattcaagagagctgaagactatcccattgacctctactaccttatgg

SEQ ID NO: 234889 - DNA, 546 bp, Artificial Sequence
  derived and/or modified sequence
agaaatcttaaagtagaagcgtcacaggacttgttcttccaaatgctgcatggcaaatattattaggaaatatacttaacatttatttatttttattctcaataaggagttacattcaaagtaactggaagtgacggatgagaaaaatatatctaggttggtgcacacagccatctggtcgaccttagacacgggaaggcaagcaccccctggttgaccttagacatggaaagatgaatttacaaccaattttctggattggactgatcagttcagtttgctgtgtgtttgctcaaacagatgaaaatagatgtttaaaagcaaatgccaaatcatgtggagaatgtatacaagcagggccaaattgtgggtggtgcacaaattcaacatttttacaggaaggaatgcctacttctgcacgatgtgatgatttagaagccttaaaaaagaagggttgccctccagatgacatagaaaatcccagaggctccaaagatataaagaaaaataaaaatgtaaccaaccgtagcaaaggaacagcagaga

SEQ ID NO: 234890 - DNA, 562 bp, Artificial Sequence
  derived and/or modified sequence
gagtttctgtgcacacactctcctgcctgctgccacgtaagacgtgccttttgcctgccgccatgtaatatgtgcctttgctcctccttcgccttctgccatgattgtgaggtctccccagccatgctgaactatgaatttacaaccaattttctggattggactgatcagttcagtttgctgtgtgtttgctcaaacagatgaaaatagatgtttaaaagcaaatgccaaatcatgtggagaatgtatacaagcagggccaaattgtgggtggtgcacaaattcaacatttttacaggaaggaatgcctacttctgcacgatgtgatgatttagaagccttaaaaaagaagggttgccctccagatgacatagaaaatcccagaggctccaaagatataaagaaaaataaaaatgtaaccaaccgtagcaaaggaacagcagagaagctcaagccagaggatattactcagatccaaccacagcagttggttttgcgattaagatcaggggagccacagacatttacattaaaattcaagagagctgaagactatcccatt

SEQ ID NO: 234891 - DNA, 2397 bp, Artificial Sequence
  derived and/or modified sequence
atgaacctgcagcccatcttctggatcggcctgatcagcagcgtgtgttgtgtgttcgcacagaccgacgaaaatagatgtctgaaagcgaacgccaagtcatgtggagaatgtatacaagctggcccaaattgtggttggtgtaccaacagtactttcctgcaggaaggaatgccgactagcgcgcggtgcgatgatcttgaggctctcaaaaagaaggggtgtcctccagatgatatagagaatcctcgtggctctaaggatattaaaaagaataagaatgtcaccaaccgctccaaagggactgctgaaaaactgaaacctgaggatattacacagatccagcctcagcagttagttttgcggctcagatcgggggagcctcaaacttttacactgaagttcaagagggccgaagattaccccatcgacctctactatctaatggatctgtcctattctatgaaggacgaccttgaaaatgtgaagtccctcggtactgaccttatgaacgaaatgcgccgaatcacaagtgacttccgcatcgggttcggttcttttgtggagaaaacagtgatgccttacatctctaccacaccggccaagctccgcaacccatgcacatccgagcagaattgtaccagtccgttttcctacaagaatgttctgtcattgaccaataaaggcgaggtatttaacgagctggtgggcaaacagcgcatttctggcaacctcgactcccccgagggcggcttcgatgccatcatgcaggtggcggtgtgcggaagcctaatcggatggagaaacgtgaccaggcttttggtgttctccaccgacgccgggtttcatttcgcgggggatggaaaattgggaggaattgtgttacccaacgatgggcagtgccacttggagaataacatgtacaccatgagtcactactatgactacccttctattgcgcatctggtccagaaactgagcgagaataacatccagacaatctttgccgtaaccgaggagtttcagcctgtgtacaaggaacttaaaaatttgatacccaagtcagccgttgggactttgtcggctaacagctccaatgttatacagttgatcatcgatgcctataattctctgagctctgaggtgattctagaaaatgggaaactcagcgagggcgtgaccattagttacaaaagttattgcaaaaatggagtaaacggaactggcgagaatggtagaaagtgcagcaatatctctatcggcgatgaagtgcagttcgagatcagcattactagtaacaaatgtcccaaaaaagattctgattccttcaagattcgccccctgggcttcaccgaggaggtggaggttatccttcagtatatctgtgagtgcgagtgtcagagcgaaggaatacccgagagtcctaaatgccatgagggcaatggaacatttgagtgtggcgcatgccggtgcaatgaggggcgcgtcgggcgacattgtgagtgtagcacagatgaagttaattctgaggacatggatgcgtactgtaggaaagaaaattcttccgagatctgttcaaataatggcgagtgtgtttgtgggcagtgcgtgtgtagaaagagagataacacaaatgaaatctacagcggtaagttttgcgagtgtgataatttcaactgcgatcgctccaacggccttatctgcggcggaaatggggtatgtaaatgccgggtctgcgaatgcaacccaaactatactggtagcgcctgtgattgcagtctcgacacctccacctgcgaggcttcaaatggccaaatatgtaatggccgagggatttgcgagtgtggggtctgcaaatgtaccgaccctaaatttcaagggcagacctgtgagatgtgccaaacctgtttaggagtgtgtgccgaacacaaagagtgcgttcagtgccgcgcctttaacaagggtgagaagaaggatacgtgcacccaggaatgcagctatttcaacatcaccaaagtcgaatcgcgcgataagctgccccaaccagtgcaacccgatcccgttagccactgtaaggaaaaagatgtggatgactgttggttctacttcacatattccgtgaacggaaataatgaagttatggtgcacgtggtagaaaatcctgaatgtccaacgggacccgatatcattccgattgtcgctggagtggttgccggcatagtactcattggcctggccctgttgttgatctggaagctgttgatgattattcatgacagacgggagtttgcgaaattcgagaaagaaaaaatgaacgcaaagtgggatactggagagaatccaatttataaatcagcggtgacgactgtcgtcaatccaaaatacgaagggaagtag

SEQ ID NO: 234892 - DNA, 2397 bp, Artificial Sequence
  derived and/or modified sequence
atgaacctgcagcccatcttctggatcggcctgatcagcagcgtgtgctgtgtgttcgcacagaccgacgaaaatcggtgtctcaaggccaacgcaaaaagctgcggtgagtgtatccaggcaggcccaaactgcgggtggtgtactaactccacctttttgcaggaggggatgccgacatctgctaggtgtgatgatcttgaagctctgaaaaaaaagggctgccccccggacgacatcgagaatccaaggggctctaaagacatcaagaagaataaaaacgtcaccaacagatcgaagggaacggccgagaagcttaaacctgaggatatcactcagatccaacctcagcagctcgttctccggctcaggtccggggagccccagacattcaccctcaaatttaagcgggccgaagactatcctattgacttatactatctgatggacctgagctacagtatgaaagatgatctggagaatgtcaaatctctggggaccgatcttatgaacgagatgcgaagaataacaagtgacttccgcatcggtttcggaagcttcgttgaaaagaccgtgatgccctatatcagtaccacacccgccaaactccggaacccttgcacatccgagcagaattgcacatcccctttttcttacaagaacgtgctctccctcactaacaaaggagaagtctttaacgagctagtggggaaacagaggatcagtggcaacttagattctcctgaggggggcttcgacgcaatcatgcaggtggcagtttgcggctcactcatagggtggcggaatgtcactcggttgctggtcttctctacggatgccggctttcattttgcgggcgatggaaagcttggcggtattgtgctgcctaatgacggtcagtgtcatctcgagaataatatgtacaccatgtcccactactatgattatccctcaattgcacatctggttcagaagcttagcgaaaataacatacagaccattttcgctgtaactgaggaatttcagcccgtctataaggagctgaagaacctgattcctaagtcagctgtggggacactgtccgccaacagctccaacgttatccagcttattattgacgcctacaatagtttatcaagcgaggtgattttagagaacggaaaactgtccgagggagtcaccatctcatacaagagctattgcaagaatggtgtcaatgggactggcgaaaatggacgaaaatgttctaacatttccattggggacgaagtgcaattcgagatcagcatcacctccaacaagtgcccaaagaaagactctgatagtttcaaaatccgccctcttggcttcactgaagaggtcgaggtcatattacagtatatctgcgagtgtgaatgtcagagtgaagggatccctgagagcccaaaatgtcatgaaggaaacggaactttcgagtgcggagcctgccggtgtaacgaaggccgggtcgggcgccactgcgagtgtagcactgatgaggtgaacagcgaagacatggatgcttactgtaggaaagagaactctagtgaaatctgctctaacaatggtgagtgcgtctgcggacagtgtgtatgtaggaagcgagacaacactaatgaaatttatagtggcaaattttgcgaatgtgacaatttcaattgcgatcgttctaatgggttgatctgtgggggtaatggcgtgtgcaagtgccgggtgtgcgaatgtaaccctaactatactggctcagcctgcgattgtagcctggatacttccacctgcgaggcctctaatggacagatttgcaatggccgcggaatctgtgaatgtggggtgtgcaagtgtactgacccgaaatttcagggccagacctgtgaaatgtgtcaaacttgtcttggagtgtgcgcggaacataaagagtgtgtccagtgcagggcttttaataaaggagagaaaaaagacacgtgcacccaagagtgttcttatttcaacataacaaaggtggagtctcgcgacaaacttccccaacccgtgcagccggacccagtttctcactgtaaggagaaagacgtagatgactgttggttttatttcacgtactcagtgaatggtaataatgaagtcatggtccacgtggtggagaatccagagtgtcccaccgggcctgatatcattcctatcgtggctggcgtggtcgctggtatcgtgttgatcggacttgctctgttactcatttggaaactgctcatgattatccacgacagaagagagttcgcaaagttcgagaaagagaaaatgaatgcaaaatgggatactggtgagaaccccatttataagagcgcagttacaaccgtggttaacccgaagtatgaggggaaatag

SEQ ID NO: 234893 - DNA, 150 bp, Artificial Sequence
  derived and/or modified sequence
atgaacctgcagcccatcttctggatcggcctgatcagcagcgtgtgttgtgtgttcgctcagacagacgagaaccgatgtctgaaggccaatgcgaaatcctgcggtgagtgcattcaggctggccctaactgtgggtggtgtacatag

SEQ ID NO: 234894 - DNA, 270 bp, Artificial Sequence
  derived and/or modified sequence
atgaacctgcagcccatcttctggatcggcctgatcagcagcgtgtgctgcgtgtttgcgcagactgatgaaaatcgatgccttaaagccaatgctaagtcctgcggagagtgcatacaggccggccccaactgcggatggtgcaccaactccacttttctccaggagggtatgcccaccagcgccaggtgcgacgatttagaggcactaaaaaaaaagggctgtccacctgatgatatagagaaccctagaggaagtaaggacatttag

SEQ ID NO: 234895 - DNA, 411 bp, Artificial Sequence
  derived and/or modified sequence
atgaacctgcagcccatcttctggatcggcctgatcagcagcgtgtgctgtgtgttcgctcagactgacgagaacagatgtctgaaggccaacgccaagtcttgcggcgagtgtattcaggccggtcctaactgtgggtggtgcacgaacagcacctttcttcaagaaggaatgcctacaagcgcccgctgcgatgatctcgaagccttgaagaaaaagggatgtccacccgacgatatcgaaaacccaagagggtctaaggatatcaaaaagaacaaaaacgtgacgaacaggagcaaaggtacagcagaaaagcttaagcccgaagacatcacccagattcaaccccagcagctggtcctacggctacgttctggtgaaccacagactttcaccctgaaattcaagtag

SEQ ID NO: 234896 - DNA, 378 bp, Artificial Sequence
  derived and/or modified sequence
atgaacctgcagcccatcttctggatcggcctgatcagcagcgtgtgttgcgtgtttgcccagaccgacgaaaatcggtgtctgaaagccaatgcaaaatcatgtggcgaatgcatccaggccggccctaattgtgggtggtgcacgaattctacctttctacaagaagggatgcctacctcagctagatgtgacgacctggaagccctaaaaaaaaagggctgcccccctgacgatatagaaaatcctaggggttctaaggatatcaagaaaaacaagaatgtgactaacagatccaaaggaactgccgaaaaactgaagcccgaggatattactcagattcaacctcagcagctggttctccgcctgaggtcttag

SEQ ID NO: 234897 - DNA, 492 bp, Artificial Sequence
  derived and/or modified sequence
atgaacctgcagcccatcttctggatcggcctgatcagcagcgtgtgttgcgtgttcgcacaaactgatgagaatcggtgtctaaaagcaaacgccaaatcctgtggggagtgcatacaagcagggcccaattgtggttggtgcacaaatagcacattcctgcaagaggggatgcctacctcagcccgctgtgacgacctggaagcgctgaaaaagaagggttgccctccggatgacatcgaaaatccaagggggagcaaagatataaaaaaaaacaaaaatgtgaccaatcgcagtaaggggacggctgagaagctgaagcctgaagatatcacgcagattcagccgcaacaattagttctgcgattgcggtctggtgagcctcagaccttcactcttaagttcaaaagagctgaggattatccgattgacctctattatctgatggacctttcatactctatgaaggatgatctcgagaatgtgaaatag

SEQ ID NO: 234898 - DNA, 459 bp, Artificial Sequence
  derived and/or modified sequence
atgaacctgcagcccatcttctggatcggcctgatcagcagcgtgtgttgcgtctttgctcagacggacgaaaaccgatgcctaaaggcgaatgccaagagctgtggcgagtgcatccaggctggacccaactgcgggtggtgcactaacagtgtaagcaaaacctttctgcaagaggggatgcccacatctgctcggtgtgacgatctggaggctttaaagaaaaagggctgtccccctgatgacattgagaaccctagaggctccaaagacataaagaagaacaagaacgttaccaacagaagtaagggcaccgctgaaaaactgaagccagaggacattactcagatccagccgcagcagctcgtcctgcgactcaggagcggagaaccccagacattcacgcttaaattcaaaagagccgaagactacccaatcgatttgtactatctgatgtag

SEQ ID NO: 234899 - DNA, 315 bp, Artificial Sequence
  derived and/or modified sequence
atgaacctgcagcccatcttctggatcggcctgatcagcagcgtgtgttgcgtattcgcacaaactgacgagaaccgctgcctcaaggcaaatgccaagagttgcggtgaatgtattcaagccggccctaattgcggctggtgcacaaacagtacttttcttcaagagggaatgcccacgagtgcacgctgcgacgatctggaagctctcaagaagaaaggatgcccgcccgacgacatcgagaatcctcggggctccaaggatatcaagaagaataagaacgttactaatcgtagcaagggaacagccgagtag

SEQ ID NO: 234900 - DNA, 432 bp, Artificial Sequence
  derived and/or modified sequence
atgaacctgcagcccatcttctggatcggcctgatcagcagcgtgtgctgtgtgttcgcgcagaccgacgagaaccgatgccttaaggccaatgcaaaatcctgcggggagtgcatccaagcaggacctaactgtggatggtgtaccaactctaccttccttcaagaggggatgcccactagtgcccggtgtgacgatctggaggcactcaagaagaaagggtgcccccccgatgatattgagaatcctcgcggttcaaaagacataaagaagaacaagaatgtgactaatagatccaaaggcacggccgaaaagctgaaaccggaagatatcacccagatccagcctcaacaacttgtcctgagactgagatcgggcgaaccgcagacgttcaccctgaagtttaagagggcagaggattacccaatctag

SEQ ID NO: 234901 - DNA, 2397 bp, Artificial Sequence
  derived and/or modified sequence
atgaacttacagcctatattttggatcgggctgatttcctcagtttgctgcgtgtttgcccagacagatgagaacaggtgtcttaaagcaaatgctaaatcctgtggggaatgcatccaggctggaccaaattgtggctggtgtactaatagcactttcttacaagaaggtatgcccacaagcgccagatgcgatgatctggaggctctcaagaaaaaaggttgtcccccagacgacatcgagaaccctaggggatcaaaggacatcaagaaaaataagaacgtgaccaatcgtagcaaagggacagccgaaaagctcaagccagaagacataacccagattcagcctcagcagcttgtcctcagactccgctccggtgagccacagaccttcactctgaaattcaagcgagctgaggactacccgatcgatctgtactatttgatggacctgagttactccatgaaagatgacctggaaaatgtgaaatctcttgggacagaccttatgaatgagatgcgacggatcacatccgactttcggatcggtttcgggtcctttgtcgaaaagacagtcatgccctatatttcaacaaccccagcaaaacttcgtaacccttgcacttctgagcagaattgtacctcccccttttcttataagaacgtgctcagccttacgaacaaaggtgaagtttttaacgagttagtgggaaagcagaggatctctggaaacctggacagcccagagggcggatttgatgccatcatgcaagtggctgtctgtgggtccctcatcgggtggcgtaacgtcactagattacttgtgttttctaccgatgcaggatttcatttcgctggcgatggcaagcttggcggaatcgtactgccgaatgacggtcagtgtcacctagaaaataacatgtatactatgagtcattattatgactaccctagcatcgctcatttggtgcagaagcttagtgagaacaacatccagactatctttgcggtaactgaggaattccagccagtgtacaaagaacttaagaaccttatccccaagagtgccgtggggacgttgtctgccaactcttcaaacgtgatccaactcataattgatgcatataatagcctctcctccgaagtgattctggagaacggcaagctgagtgagggggtaaccattagctacaagagttactgtaagaatggcgtgaacggcacgggggaaaatggcagaaaatgtagtaacattagtattggcgacgaggtacagttcgaaatctccattacatcaaataaatgtcccaagaaggattcagactcttttaagattcgacctctggggttcacagaggaagtggaagtaatcctccagtacatctgcgagtgcgagtgccaatcagaagggattcctgagtctccaaaatgccacgagggcaatgggacctttgagtgcggtgcgtgccggtgcaatgaagggagggtgggacgccactgtgagtgctctaccgacgaggtgaacagcgaagatatggacgcctactgcagaaaggagaactccagtgagatctgttccaataacggtgagtgcgtttgtggccagtgtgtgtgtcgcaaaagggacaacacaaatgaaatctatagcgggaaattctgtgagtgcgacaattttaattgcgaccgcagcaacggcctaatatgcggcggaaatggcgtctgcaagtgccgcgtttgcgagtgcaaccctaactacacaggtagtgcctgtgactgctctctcgatacatctacatgtgaagcctctaacggacagatttgcaatggcagggggatttgtgaatgtggggtttgtaagtgtacagaccctaagtttcaaggacagacctgtgaaatgtgtcagacctgcctgggagtatgcgccgagcataaggagtgtgtgcagtgccgagcctttaataagggtgagaaaaaagatacatgtacccaagagtgttcctattttaatataacaaaggtggagagccgggacaaactgcctcagccagttcaaccagaccccgtgtcacactgcaaagagaaagatgtggacgattgttggttctatttcacttattcggtgaatggcaataacgaagtgatggtacacgtcgtggaaaaccctgagtgcccgaccggcccagatattataccaatcgttgctggggtggtggctggaatagtgctgatcggattagccctattactcatttggaaactgctgatgatcatccatgaccgacgagaatttgccaaattcgagaaggagaagatgaacgccaagtgggacacaggagagaaccctatctataaaagcgcagtaaccacggtggtgaaccctaagtatgaagggaaatag

SEQ ID NO: 234902 - DNA, 2397 bp, Artificial Sequence
  derived and/or modified sequence
atgaatctgcagccgatcttctggatcggccttatctcatccgtatgctgtgtgtttgcgcaaaccgatgagaaccgttgcttgaaggccaacgctaagagttgtggagaatgcatccaagccggaccaaattgcggctggtgtaccaactccacgttcctgcaggagggcatgcctacgtctgctcgctgcgatgacctggaggctctaaaaaaaaaggggtgtccaccggacgacattgagaaccccagaggcagcaaggatattaagaagaacaagaacgttaccaaccgcagcaaaggtacagccgagaagctgaagccagaggatatcacgcagatccagccgcaacagcttgtgctgcggcttcggtctggtgagcctcagactttcaccctgaagttcaagagggctgaggattatccgattgatctgtactacctgatggacttatcgtactccatgaaggatgacctggagaatgttaagagtctggggacagatctcatgaatgagatgaggcgcatcacttcagatttcaggattgggttcggcagttttgtagagaaaacagtgatgccatatatctccactactcctgcgaagcttagaaatccctgtacttcagaacagaattgcacttctcccttcagctacaaaaatgtactcagcttaacaaacaagggagaggtctttaatgaactcgtggggaagcagcgcatttccgggaacctggacagccctgaaggtggcttcgacgccatcatgcaagtcgccgtgtgcggctcactgatcggttggcggaatgtcacacgcctgctggtgttcagcaccgacgctggattccactttgcgggagatggcaaacttggcggaatcgttctccccaacgacggccaatgtcacctggagaataacatgtacactatgtcccattactatgattacccttccattgcgcatctggtgcagaaattgagtgagaataacattcagaccattttcgctgtgacagaggagtttcagcctgtttacaaagagcttaaaaacctaatcccgaaaagcgcggtgggcaccctgagcgctaattcatccaatgtgatccagttgataatagatgcgtacaattctctgtcatccgaagtgattttggaaaacggcaagctttccgaaggggtgaccatttcttacaagtcatactgcaaaaatggtgtgaacggaaccggggagaacggaagaaagtgcagcaacatctcaataggagatgaggtgcaatttgagatatccatcacttccaacaagtgccctaagaaggattccgactcctttaagatcaggcccctaggctttacagaggaagtggaggtgatattgcaatatatctgtgaatgcgagtgtcagtctgaaggaataccggaaagcccaaagtgccacgagggtaatggcacattcgagtgtggcgcttgcagatgtaatgaaggccgtgtagggcgtcactgcgaatgctccaccgatgaggtcaattccgaggacatggacgcatattgtcgtaaagaaaattcttctgaaatatgtagcaacaatggggagtgtgtgtgcggtcagtgtgtttgcaggaaacgcgacaataccaacgagatatacagtggaaaattctgcgagtgtgataatttcaattgcgaccgttcaaatggactgatctgtggaggtaacggggtgtgcaagtgcagagtctgcgagtgcaatcccaactatactggcagcgcgtgcgattgcagcctggacacgagcacttgcgaggcctccaatggacagatttgtaatggacgaggtatatgtgagtgcggtgtctgcaagtgtacagatcccaaatttcaggggcaaacctgcgaaatgtgccagacctgcctgggggtgtgcgctgagcacaaagagtgcgtgcagtgtcgtgcttttaataaaggcgagaagaaagacacctgtacacaagagtgtagctatttcaacattacaaaggttgaatcaagggacaagctcccccagcctgtccaaccagatcccgtttcacattgtaaagaaaaggatgtcgatgattgttggttttactttacttattcagttaacgggaataacgaagtcatggtgcatgttgtggagaatccagagtgcccaaccgggccagatatcatccccatagtggcgggagtggtggctggaatcgtcttgataggattagctctgctgctcatctggaaactattgatgattatccacgaccggagggagttcgcaaaatttgagaaagaaaagatgaatgctaagtgggatacaggtgagaatccaatctacaagtctgcagtgactaccgtggtgaatcctaaatatgaaggaaaatag

SEQ ID NO: 234903 - DNA, 150 bp, Artificial Sequence
  derived and/or modified sequence
atgaatctgcagcccattttctggatcggcctaatctcctccgtctgctgtgtgtttgcacaaacagatgaaaataggtgtctcaaggcaaatgctaaatcttgcggggagtgcatccaggcaggtcctaactgtggttggtgtacgtag

SEQ ID NO: 234904 - DNA, 270 bp, Artificial Sequence
  derived and/or modified sequence
atgaatctccaacccattttttggatcgggttgatctcttccgtgtgctgtgtgttcgctcaaacagacgaaaaccgctgtctcaaggccaatgctaaatcctgcggtgagtgcattcaggctggccctaattgtgggtggtgcacaaactccactttcctccaagaaggtatgccaacctccgcaagatgtgacgaccttgaggcattaaaaaagaagggttgcccacccgatgatatcgagaatcctcgcggatcaaaggatatctag

SEQ ID NO: 234905 - DNA, 411 bp, Artificial Sequence
  derived and/or modified sequence
atgaacctgcaacctattttttggattgggctgattagcagcgtgtgttgtgtttttgcacagaccgatgaaaaccgctgcctgaaggccaacgcaaagtcttgcggcgagtgcatccaggccggacctaattgcggttggtgcacaaacagcacatttctgcaggagggcatgccgacatcagcgcgatgcgacgatctggaggctctcaaaaagaaaggatgcccccctgatgacatcgagaacccccgaggaagcaaggatataaagaagaacaaaaatgttacgaatagatcaaagggcacggctgagaagttaaagcccgaggatatcacccagattcagccgcagcagttagtgctacggctgagatccggggaacctcagacattcacattaaagttcaagtag

SEQ ID NO: 234906 - DNA, 378 bp, Artificial Sequence
  derived and/or modified sequence
atgaacctacaaccaatcttctggattggtctgatctcctcggtgtgttgtgtcttcgctcagactgacgagaataggtgcctgaaggccaacgcgaagtcatgcggagaatgtatccaggcaggacccaattgcggctggtgcacaaactcaaccttcttgcaggaaggtatgcccacctccgcgcgatgtgacgatctagaggctttgaagaagaagggctgtccgccagatgatattgagaaccctaggggctctaaggacatcaagaagaacaagaatgtgacgaatcggagtaaaggcacggccgaaaagctgaagcccgaggacatcacacaaatccagccacaacagttagtgctgaggctaaggtcctag

SEQ ID NO: 234907 - DNA, 492 bp, Artificial Sequence
  derived and/or modified sequence
atgaacttacagcccatcttttggataggcctgataagtagcgtgtgctgcgtgtttgcgcaaactgacgaaaatagatgcctgaaggctaatgccaaatcctgcggcgaatgtatccaggctggtcccaattgcggctggtgtaccaattccacatttttgcaggaggggatgccaacctccgctcgctgtgacgacttggaagcgctcaagaagaaaggatgcccaccagatgatatcgaaaatccccgtggctccaaagacattaagaagaataagaatgtgactaaccggagtaagggaaccgcggagaagcttaagcctgaagacatcacacaaatacaaccccagcagctcgtgctgcggctgaggtctggggaaccccagacattcactctgaaattcaagcgcgcagaggattacccaattgatctgtattaccttatggacctgagctatagtatgaaggatgacttggagaatgtcaaatag

SEQ ID NO: 234908 - DNA, 459 bp, Artificial Sequence
  derived and/or modified sequence
atgaacctgcagcctattttctggatcggcctgatttcctcagtttgctgcgtctttgcccagacagacgaaaacaggtgtctgaaagccaatgccaaatcctgcggtgagtgcattcaggcaggtcccaactgcggttggtgcactaactctgtgtcgaagacctttctgcaggagggcatgccgacttcagctcgttgtgacgacctcgaggccctgaagaaaaaaggctgcccacccgacgatattgaaaatcccaggggaagcaaggatataaagaagaacaaaaacgtgacaaaccggagcaaagggacggcagagaaactgaaacctgaagacatcacccagatccaacctcaacagctggtcttgcgcttgagaagcggtgagccccaaacatttacactgaagttcaaaagagcagaggactatcctatcgatctatattacctgatgtag

SEQ ID NO: 234909 - DNA, 315 bp, Artificial Sequence
  derived and/or modified sequence
atgaacctacaacctattttctggattggtctcatctcatctgtgtgctgtgttttcgcgcaaacagacgagaatagatgccttaaggccaatgctaaatcatgcggggagtgcatccaggctggtccaaactgtgggtggtgcacaaactccacgtttcttcaggaagggatgcccacctccgcaagatgcgacgacctcgaggccctgaaaaaaaagggatgcccccctgacgatatcgaaaatccaaggggcagtaaggacattaaaaagaacaaaaatgtgacaaacaggagcaagggtaccgctgagtag

SEQ ID NO: 234910 - DNA, 432 bp, Artificial Sequence
  derived and/or modified sequence
atgaatctgcagcccatcttctggatcggcctgatttcatcagtgtgttgcgtgttcgcacagaccgacgagaaccgctgcctgaaagcaaatgctaagtcatgcggcgaatgtatccaggccggtccaaactgtggatggtgtactaatagtacattcctgcaggaaggcatgccaactagtgctagatgcgatgatctggaggctctcaagaaaaaaggatgcccccctgatgacatcgagaatcctcgcggatccaaggatatcaaaaagaataagaacgtcaccaacagatcgaagggaaccgctgagaaactaaagcccgaggatatcacacagatccagccgcagcagctggtgctgagattgagaagtggtgagccgcagacttttaccctaaagtttaaaagagctgaggattacccaatatag

SEQ ID NO: 234911 - DNA, 2397 bp, Artificial Sequence
  derived and/or modified sequence
atgaacctccagcctattttctggattggattgatctcttcagtctgctgtgtctttgcccaaaccgacgaaaatagatgtctaaaagcgaatgcaaagagctgcggggagtgtatccaagccggaccgaactgcggatggtgcacaaactcaacgtttcttcaggagggtatgcccacatccgctagatgcgacgatttggaagctttgaaaaaaaaagggtgccctcccgatgatatcgagaaccctaggggctcaaaagacattaaaaagaacaagaacgttaccaatcgatctaaagggacagccgagaagcttaagccagaagacatcacccagatccaaccacaacaacttgtcctccgtttaaggtccggggaaccacagactttcacactgaagtttaagcgggccgaggactatcccattgacctctattacctcatggacctgagctactctatgaaagacgacctcgagaacgtcaagtcactgggaactgacctaatgaacgaaatgagacgcattacaagtgattttaggataggcttcgggagcttcgttgagaagactgtgatgccctacatcagcacaacacctgctaaactgagaaacccatgtacatctgaacagaattgcaccagcccgttctcttacaaaaacgtgttgtctctgaccaataagggagaagtgttcaatgaactggtgggcaaacaacgtataagcggcaacctcgacagtcctgaaggcggcttcgatgcgatcatgcaggtcgccgtctgtggctcactgatagggtggcgcaatgtgacccgacttcttgtgttttccacagacgcaggattccacttcgccggagatggaaagcttggcggtatcgttctgccaaacgatgggcagtgccatctggagaacaacatgtacaccatgagtcattactatgattacccatctatagcccatctcgtgcagaagctctcagagaataatatccagaccatatttgccgtaacagaggagtttcagcccgtctataaagagctgaagaaccttattcccaagtccgcggtgggtaccttgtcagccaactcatctaacgtgattcagctgattatagacgcatacaacagtctgtcatctgaggttattctcgagaatggcaagctaagtgaaggagtcactatttcctataagtcctattgcaaaaatggtgtaaatggtacaggcgagaatggccgcaaatgctccaacatatccattggcgatgaggttcagtttgagattagtatcaccagcaataaatgtccaaaaaaggactccgactccttcaagatcaggcccttagggtttaccgaagaagtggaggttatattacagtacatttgtgaatgcgagtgccagtccgaggggatcccagagtctcccaaatgccacgagggaaatggcacatttgagtgcggcgcttgtcgatgtaacgagggaagagtgggtcgccactgtgagtgctccacggatgaagtcaatagcgaagacatggacgcctattgcaggaaagaaaactcaagcgaaatctgttccaataatggggagtgtgtctgcggacagtgcgtctgtagaaagagagacaataccaatgagatctacagtgggaaattttgtgagtgtgacaatttcaactgcgatcgctctaatggcttgatctgcggcggaaacggggtatgtaagtgtagagtctgcgaatgtaatcctaattacacaggatccgcatgcgattgttccctcgacactagtacctgtgaggccagtaacgggcaaatttgtaacggccgcggaatctgtgaatgtggcgtgtgcaaatgcaccgaccccaagtttcagggacagacctgcgagatgtgtcagacatgcctgggtgtgtgcgccgagcataaagaatgtgtgcagtgtagggctttcaataaaggtgagaaaaaggacacctgcacccaggagtgctcctactttaatattaccaaagtggaatctcgggataagctcccacaacctgtgcaacccgaccctgttagtcattgcaaggaaaaggatgtagatgactgctggttttattttacctattccgtaaacggcaataacgaagtaatggtccacgtcgtcgagaatccagaatgtccaacaggacctgatatcattccaatcgtagccggggttgtggcaggcatagttctcattgggctcgccctgttgctgatctggaagctgctcatgatcatccacgatagacgcgagtttgccaagtttgagaaagaaaagatgaacgccaaatgggacaccggcgagaacccgatctacaaaagcgccgtcaccactgttgtcaatcctaagtatgaaggcaaatag

SEQ ID NO: 234912 - DNA, 2397 bp, Artificial Sequence
  derived and/or modified sequence
atgaacctccaaccaatattttggatcggactgattagctctgtttgttgcgtgttcgcacagaccgacgaaaatagatgtctaaaggctaatgcaaagagttgcggagaatgcatacaagccgggccaaattgcggctggtgcaccaattcgacctttctgcaggaagggatgcccacgtccgccagatgcgatgacctggaggctctgaagaaaaaaggctgccccccggatgacatagaaaatcccagaggttctaaagatattaagaagaacaagaacgtgaccaataggagtaaagggactgccgaaaagttgaaaccagaggatattactcaaattcagccgcagcagctcgttcttagactaagatcgggggagccacagacgttcacccttaaatttaagcgagcagaagactacccgattgatctctattatctcatggacttaagctatagcatgaaggacgacttggagaatgtgaaatcacttggaaccgacctgatgaacgaaatgaggcgcatcacgtccgatttccggattggctttggtagttttgtagaaaaaaccgtcatgccctacatcagtaccacccctgccaaactgcgaaatccatgtacaagtgaacagaattgtacatcgccctttagctataagaacgtgctctctcttacaaataagggcgaagtgttcaatgaattggtgggcaagcagaggatctctggtaatctggactcaccggaaggcggatttgatgctatcatgcaggtggccgtgtgcggctccttaatcggatggaggaacgtaactagactcctcgtcttttctactgacgcaggcttccatttcgccggggacggaaaacttgggggcattgtgctgccgaatgatggtcagtgtcacttagaaaacaatatgtacactatgtctcattactacgactatcccagcatagcccacttagtccaaaagctgagcgaaaacaatattcaaacgatcttcgccgttaccgaggagttccagccggtgtacaaggaacttaaaaatctcatccctaagagtgccgtgggcactctgtctgccaactccagcaacgtgattcagttaatcattgatgcatacaatagccttagctcagaagttatcctggagaatggaaagctgagtgagggtgtcactataagctacaaaagctactgcaaaaatggtgtgaatgggactggcgagaacggacgcaaatgttccaatattagcatcggagacgaagtgcagtttgagattagtattacatccaacaaatgtccaaagaaggattcggacagtttcaagatccggccactcggattcaccgaagaggttgaggtaatcttacagtacatctgcgagtgcgagtgtcagagtgagggcatcccagagagtccgaagtgtcatgaaggcaacggtacttttgagtgtggggcgtgcaggtgtaatgagggtcgagtgggtcgtcactgcgaatgtagtacagatgaggttaactcagaggacatggacgcctattgtcgcaaggaaaatagttctgagatatgcagcaacaatggagaatgcgtgtgcggccagtgcgtctgtagaaaaagggacaacaccaatgagatctattcggggaagttctgcgagtgtgacaatttcaattgtgatagaagcaatggcctgatttgtggcggtaatggcgtttgcaaatgtagggtgtgtgaatgtaatcctaactacaccggcagtgcctgtgactgctctctcgacacttctacatgtgaagcttcaaacggtcagatctgcaatggaagaggcatttgtgaatgtggcgtctgcaagtgcacggaccccaaattccagggtcagacgtgcgagatgtgccagacatgtctcggcgtgtgtgcagagcataaggaatgcgtgcaatgccgagcatttaataaaggagagaaaaaagatacgtgtacccaagagtgctcttactttaatatcactaaagtcgaaagtagggataagttgccccagcctgtgcagccagatccagttagtcattgcaaggaaaaggatgtggatgactgttggttttatttcacatatagcgtgaacggtaataacgaggtgatggtgcacgtcgtcgagaacccagaatgccctacaggacctgatatcatacctatcgtcgccggcgtcgtggccggaattgtgcttatagggttggcactgctcttgatttggaagctcttgatgattatccacgaccggagggaattcgccaaattcgagaaagaaaagatgaatgcaaaatgggacaccggagagaacccaatttataaatcagcagtaacaactgtagtgaatccaaagtacgagggtaagtag

SEQ ID NO: 234913 - DNA, 150 bp, Artificial Sequence
  derived and/or modified sequence
atgaatctgcagccaatcttttggataggactaattagtagtgtgtgttgtgtcttcgcccaaactgacgagaacagatgtctgaaagctaatgcaaagtcctgtggagaatgtattcaagccggccccaactgtggatggtgcacatag

SEQ ID NO: 234914 - DNA, 270 bp, Artificial Sequence
  derived and/or modified sequence
atgaatcttcagcctattttctggattggactgatatcaagcgtgtgctgtgttttcgcccagaccgatgaaaaccgatgcctgaaagccaatgcgaaatcttgtggggaatgtatccaggccggaccaaactgcgggtggtgtaccaattcaactttcttgcaggaggggatgccaaccagcgccagatgcgacgacctggaagcccttaagaaaaagggatgcccacccgatgacattgagaacccaagggggagcaaagatatttag

SEQ ID NO: 234915 - DNA, 411 bp, Artificial Sequence
  derived and/or modified sequence
atgaacctgcagccgatcttctggataggactgattagctctgtgtgctgtgtcttcgcacagactgatgaaaaccgatgtctaaaggcgaacgcaaagtcctgtggggagtgtattcaggccgggccaaactgtgggtggtgcactaactccacttttctccaggaaggaatgcctaccagcgcgagatgcgacgacctagaggctctgaaaaaaaaaggctgcccccccgacgatattgaaaatccacgcggtagcaaagacattaagaaaaataagaacgttacgaatcgatcaaaaggaaccgccgagaagcttaaacctgaagacattactcagatccagccacaacaactcgtgctgcgcctgcggagtggtgagccacagacgttcacacttaagtttaagtag

SEQ ID NO: 234916 - DNA, 378 bp, Artificial Sequence
  derived and/or modified sequence
atgaatctgcagcccatattctggatcggtcttatcagcagcgtgtgttgtgtatttgcccaaacagacgagaaccggtgtttaaaggccaatgcgaagagttgtggtgaatgcatccaagctgggccaaactgtggttggtgcacaaactctacgttcctgcaagaaggaatgccgacttccgcaaggtgcgacgacctggaagctcttaaaaagaaaggctgtccacccgacgacatcgagaatccgagaggctctaaagatattaaaaagaacaaaaatgtgacgaacaggagcaagggcaccgccgaaaagctcaaacccgaagatataacccaaatccagccccagcagcttgttcttaggcttcgatcttag

SEQ ID NO: 234917 - DNA, 492 bp, Artificial Sequence
  derived and/or modified sequence
atgaatttgcagcctattttttggatcgggctaataagcagcgtgtgctgcgtcttcgcacagacggacgaaaacaggtgcctgaaagcaaacgccaagtcatgtggcgagtgtatacaagccggaccaaactgcgggtggtgcactaacagcacattccttcaagaaggcatgccgacatccgcccggtgtgacgatctggaggctctgaaaaaaaagggctgtccacccgacgacattgagaacccacgcggctctaaggacattaagaaaaacaagaacgtaactaataggagtaagggaacggccgagaaacttaaacctgaggatataacgcaaatccagcctcaacagttggtcctccgcttacgttcgggcgaaccccaaacctttacactcaaattcaagagagccgaagattatcctatagacctgtattaccttatggacctttcttattctatgaaagatgacctggaaaacgtgaagtag

SEQ ID NO: 234918 - DNA, 459 bp, Artificial Sequence
  derived and/or modified sequence
atgaatctgcaaccaatattctggattggacttatttccagcgtgtgctgtgtcttcgcgcaaaccgacgaaaacaggtgcctgaaagccaatgccaagtcgtgtggagagtgcatccaggccggccccaattgtggatggtgcacaaacagcgtgtccaagaccttcctgcaagaagggatgccaacctcagctagatgtgacgaccttgaagcactcaaaaagaaaggatgcccgcccgacgacatcgagaacccgcgtgggtcaaaagacattaaaaagaataaaaatgttaccaatcgcagcaaaggcactgccgaaaagctgaagcccgaagatatcacccaaatccaaccccagcagcttgtattgagactcaggagcggtgagccccagacgtttacgctgaagtttaagcgggctgaagactatcctattgatttgtattatttgatgtag

SEQ ID NO: 234919 - DNA, 315 bp, Artificial Sequence
  derived and/or modified sequence
atgaaccttcagcccattttctggatcggactgatttcaagcgtgtgctgtgtgtttgcccaaaccgacgaaaatcgctgtcttaaagcaaacgctaagagctgtggagagtgcatccaagccgggcctaattgtgggtggtgtactaattcgactttccttcaagagggcatgcccacaagtgcaagatgtgacgatttggaggccctgaaaaaaaaggggtgccccccagacgatattgaaaatccacgggggtccaaagatatcaaaaagaacaagaatgtgacaaaccgctcaaagggaaccgccgagtag

SEQ ID NO: 234920 - DNA, 432 bp, Artificial Sequence
  derived and/or modified sequence
atgaatttgcaacctatcttctggattggtctgattagctccgtgtgttgcgtcttcgcccaaactgatgagaatcggtgtttaaaagccaatgccaagagctgcggcgagtgtatccaggctgggcctaattgtgggtggtgtaccaactcaacttttcttcaggaaggtatgcccacatccgcccgttgcgatgaccttgaagcactgaagaagaaaggttgcccgcccgacgacattgagaacccaaggggcagcaaagacatcaaaaaaaacaagaacgtaacaaatcgttccaaaggtacggccgaaaagttaaagcctgaagatataacccagatccaaccacagcaactggtcctgagattaagatctggtgagccccagacatttactttgaagttcaagagggcagaagactatcctatttag

SEQ ID NO: 234921 - DNA, 2397 bp, Artificial Sequence
  derived and/or modified sequence
atgaatctacagccaatattctggatcggcttgatatccagcgtttgttgcgtgttcgcccaaaccgatgaaaatcgctgtctgaaggcaaatgcgaaaagttgcggagaatgtattcaggctgggccgaactgtggctggtgtacaaatagcacattcttacaggaaggaatgccaacatctgccaggtgcgacgacttagaagcactcaagaagaaaggctgcccaccagacgatattgagaaccctagaggcagtaaagacatcaagaagaataagaacgtgaccaacagaagtaaaggaactgcagaaaaactgaaaccagaagatatcactcaaattcagcctcaacaacttgttctgcgtcttagatcaggggaacctcagaccttcactcttaaatttaagagagcagaggactatccaatcgacctgtattacctgatggatctaagctactcaatgaaagacgatctggagaacgtgaagtctttagggacagacctgatgaatgagatgcgccgcattacttctgattttcgtatcggctttggctcattcgttgaaaaaacagttatgccttacatttctactacgccagctaaattacggaatccctgcacttccgagcagaactgcacatctcctttcagctacaaaaacgtgttaagcttgaccaataagggcgaggtgtttaacgaactggtgggaaagcaaagaatatctggcaacctggattcccccgagggtggcttcgatgccataatgcaagtggctgtgtgtggaagcttgatcggctggcgcaatgtcacacgcttgttggtgttctccacagacgctggtttccacttcgctggcgatggcaaattaggtggaatcgtcctgccaaacgatggtcagtgccatttagagaataatatgtacaccatgtcgcactactacgattacccctccatcgcccacctggtccagaagctaagtgaaaacaatatccaaactattttcgccgtaaccgaggagttccaaccagtttacaaggagctgaaaaatttaatccctaagtccgccgtcgggaccctttccgctaacagtagcaacgtaattcagttgattatcgacgcgtataatagtctgtcgtctgaagtcatactagagaacgggaagttaagtgaaggcgttacaattagttataaatcctactgcaagaatggagtaaatgggaccggtgaaaatggaagaaaatgtagtaacatttcaatcggtgacgaggtgcagttcgaaataagcataacatcaaacaagtgcccaaagaaggacagtgactcttttaagattagaccactgggcttcaccgaagaggttgaggtgatcctgcaatacatttgcgagtgcgagtgccaatctgaaggaattcctgaatcccccaagtgtcatgaagggaacggtacattcgaatgtggtgcctgtcggtgtaatgaagggcgggttggtaggcattgtgagtgcagtacagacgaggtaaatagtgaagatatggatgcttactgtaggaaagagaacagcagcgaaatttgttccaataatggtgagtgcgtttgcggacagtgtgtttgtaggaaaagagacaatacaaatgagatttattcgggcaagttctgcgaatgtgacaactttaactgtgatcgaagcaacggattaatctgtggagggaacggggtctgcaaatgtagggtgtgtgagtgtaatccaaactacaccggttccgcctgcgattgtagtcttgacacatccacctgcgaggcctccaacggtcagatatgtaatggtagaggcatctgcgaatgtggagtttgtaagtgtactgatccaaaattccagggccagacgtgcgagatgtgccagacgtgcctgggcgtgtgtgcagaacataaggagtgtgtgcagtgcagggcattcaataaaggagagaaaaaagacacgtgtacccaggagtgttcctattttaatattacgaaagttgaatcccgggataaactgccccagcccgtgcagcccgaccccgtttcccactgtaaagagaaagatgtagacgactgttggttttattttacatacagtgtcaatggaaacaacgaagttatggtgcacgttgttgaaaatccggaatgcccaacaggtccagacatcatccctatagtcgcgggagtcgtggccggaatcgtgctcatcggcttggcacttttgttgatctggaagctgctgatgatcattcatgatcggagagaatttgccaaatttgaaaaggaaaaaatgaatgctaaatgggatactggagagaacccgatatacaagtccgcggtcactaccgtcgtgaatccaaaatatgaagggaaatag

SEQ ID NO: 234922 - DNA, 2397 bp, Artificial Sequence
  derived and/or modified sequence
atgaacctgcagcctatcttttggatcggactgatatcttcagtgtgttgcgtcttcgcccagaccgacgagaaccgctgtcttaaggccaacgctaaatcatgcggcgaatgtatacaagctggacctaactgtggctggtgtaccaactccacattcctgcaggaaggaatgccaacatcagctaggtgtgacgatcttgaagcactcaaaaagaaaggatgcccaccagatgatatagagaacccccgggggagtaaggacatcaaaaagaacaagaacgtcactaatagatctaaaggtaccgcagagaagttgaaaccagaagatataacacaaatccagccacagcaactagtcttgaggctcaggagcggtgaaccccaaacctttacacttaaattcaaacgtgccgaagactatcccattgacctttactatctgatggacctgtcctattccatgaaagacgacctagagaacgtcaaatcactgggcacggatcttatgaacgagatgcgcaggatcacctctgacttcagaatcggattcgggtcattcgtggagaagaccgtgatgccctacatttcgaccacaccagcaaaattacgaaatccatgcacgagcgaacagaattgcaccagtccattctcctacaaaaatgtgctttcacttacaaataagggcgaggttttcaacgagctagtgggaaaacaaagaatctcaggcaatctcgactccccagaaggcggatttgacgccattatgcaggtggccgtgtgtggctcgctgattggatggcggaatgtcactcgcctcctagtcttctcaacagatgcgggttttcactttgccggagacgggaagcttgggggtatcgtgcttccgaatgatggccaatgtcatttggaaaataacatgtatacaatgtcacactactatgattacccctctatagcacacctggttcagaagctgtccgaaaacaacatccagactatcttcgcagtcactgaagagttccagcccgtttataaagaattgaagaatctgatacccaagagcgccgtgggtactttgtccgccaactcctctaacgtcattcagttgataatcgatgcttacaattcactgtcaagcgaggtgattctggaaaacggaaaactaagtgagggcgttacaatctcttataaatcttactgtaagaacggcgtcaatggaaccggcgagaatgggcgaaagtgttccaacatttctatcggcgacgaagtgcagttcgaaataagcattactagcaataagtgtcccaagaaagactcagactcttttaaaattaggcccctagggttcactgaggaagttgaggtcatactgcaatatatttgtgagtgcgaatgccagtccgaaggcattcccgaatccccaaaatgtcatgaaggaaatgggactttcgagtgcggagcatgccgctgcaatgaaggcagagttggcagacactgtgagtgctccaccgatgaagtgaatagtgaggacatggacgcctattgccgtaaggaaaactcttcagaaatttgtagtaacaatggcgagtgtgtgtgcgggcagtgtgtgtgtcgtaaaagagataacacgaatgaaatctacagcggcaaattttgcgagtgtgacaactttaactgcgatcgttcaaacggcttgatttgcgggggaaatggggtctgtaagtgcagagtgtgcgaatgcaatcctaactacacaggatctgcttgtgattgctctctcgatactagtacatgtgaggcttcaaacggtcagatatgtaacgggcgtgggatctgtgaatgcggcgtttgtaagtgtactgatcctaaattccagggccaaacatgtgaaatgtgccagacgtgtctaggggtatgtgcagaacataaggaatgtgtgcaatgtagggcattcaacaaaggtgaaaaaaaagatacatgcacgcaggaatgcagttatttcaacatcaccaaagtggaatccagagacaaattaccacagccagtccaaccagatccagtttctcattgtaaagagaaggacgtcgacgactgctggttttatttcacatatagcgtgaacggtaataacgaggtgatggtgcacgtcgtcgagaacccagaatgccctacaggacctgatatcatacctatcgtcgccggcgtcgtggccggaattgtgcttatagggttggcactgctcttgatttggaagctcttgatgattatccacgaccggagggaattcgccaaattcgagaaagaaaagatgaatgcaaaatgggacaccggagagaacccaatttataaatcagcagtaacaactgtagtgaatccaaagtacgagggtaagtag

SEQ ID NO: 234923 - DNA, 411 bp, Artificial Sequence
  derived and/or modified sequence
atgaacctgcagccgatcttctggataggactgattagctctgtgtgctgtgtcttcgcacagactgatgaaaaccgatgtctaaaggcgaacgcaaagtcctgtggggagtgtattcaggccgggccaaactgtgggtggtgcactaactccacttttctccaggaaggaatgcctaccagcgcgagatgcgacgacctagaggctctgaaaaaaaaaggctgcccccccgacgatattgaaaatccacgcggtagcaaagacattaagaaaaataagaacgttacgaatcgatcaaaaggaacagctgaaaaactgaagcccgaagatatcacccagattcaaccccaacagcttgtgctgagactgagaagtggcgaaccacagacctttactctgaaattcaaatag

SEQ ID NO: 234924 - DNA, 378 bp, Artificial Sequence
  derived and/or modified sequence
atgaacctacaaccaatcttttggataggactaatctccagcgtgtgctgtgtgttcgcccagaccgatgagaacaggtgccttaaagccaatgcaaagagctgcggagagtgcattcaagctggacccaactgtgggtggtgtactaattccactttcctgcaggaaggcatgcccactagcgctagatgcgacgatttagaagcacttaagaaaaaaggttgccctcccgatgacatcgagaaccctagaggctccaaagacatcaaaaaaaacaagaacgtgacgaacaggtcgaagggtactgcggaaaaacttaaacccgaggacattacccagatccagccccaacagcttgtgttaagactccggtcatag

SEQ ID NO: 234925 - DNA, 492 bp, Artificial Sequence
  derived and/or modified sequence
atgaatctacagccgatattctggattggcctcataagtagcgtgtgctgcgtgttcgcccagacggatgagaataggtgcttaaaagccaatgctaagagttgtggggaatgcattcaggctgggcccaactgtggatggtgtaccaactctaccttcttgcaggagggtatgcccaccagtgcccgatgtgatgatttagaagcattgaagaaaaaaggatgcccgcccgatgacatagaaaaccccaggggatccaaagacattaaaaagaacaaaaacgtgacaaatcggagcaagggaactgcagaaaaacttaagcctgaggatataacccaaattcagccccaacaactagtcctacgcctgcgctcgggagaaccccaaacatttacactcaaattcaagcgagctgaagattatcccattgatctctactacctgatggatctgagctattctatgaaggatgatttagagaacgtgaagtag

SEQ ID NO: 234926 - DNA, 459 bp, Artificial Sequence
  derived and/or modified sequence
atgaatctgcaaccaatattctggattggacttatttccagcgtgtgctgtgtcttcgcgcaaaccgacgaaaacaggtgcctgaaagccaatgccaagtcgtgtggagagtgcatccaggccggccccaattgtggatggtgcacaaacagcgtgtccaagaccttcctgcaagaagggatgccaacctcagctagatgtgacgaccttgaagcactcaaaaagaaaggatgcccgcccgacgacatcgagaacccgcgtgggtcaaaagacattaaaaagaataaaaatgttaccaatcgctccaaaggtaccgcagagaaactaaagccggaggacattacacaaattcagcctcagcagcttgtgttacgactccgcagcggcgagccccagacctttaccctcaaattcaaacgcgccgaggactatcccatagatctgtactatttaatgtag

SEQ ID NO: 234927 - DNA, 315 bp, Artificial Sequence
  derived and/or modified sequence
atgaaccttcagcccattttctggatcggactgatttcaagcgtgtgctgtgtgtttgcccaaaccgacgaaaatcgctgtcttaaagcaaacgctaagagctgtggagagtgcatccaagccgggcctaattgtgggtggtgtactaattcgactttccttcaagagggcatgcccacaagtgcaagatgtgacgatttggaggccctgaaaaaaaaggggtgccccccagacgatattgaaaatccacgggggtccaaagatatcaaaaagaacaagaatgtgacaaaccgctcaaagggcacagcggaatag

SEQ ID NO: 234928 - DNA, 432 bp, Artificial Sequence
  derived and/or modified sequence
atgaacctgcagccaatcttttggatcggattgatctctagtgtgtgttgcgtctttgcccagacagatgagaatcggtgcctgaaagcgaacgctaagagctgtggcgaatgtatacaggcaggacccaactgcggatggtgtacgaattccacattcctgcaagaaggcatgcctacaagtgctcggtgcgacgatctagaggccctcaagaagaagggatgcccgcctgacgatatcgagaatccccgcggatccaaggacatcaagaaaaacaagaacgttaccaatcgatcgaagggcacggcagagaaactaaaaccggaggatatcacacaaattcagcctcaacagctagtcctgagactcaggtcaggagaacctcaaacatttaccctgaaatttaaacgcgctgaggattatccaatctag

SEQ ID NO: 234929 - RNA, 2397 nt, Artificial Sequence
  derived and/or modified sequence
augaaccuccagccuauuuucuggauuggauugaucucuucagucugcugugucuuugcccaaaccgacgaaaauagaugucuaaaagcgaaugcaaagagcugcggggaguguauccaagccggaccgaacugcggauggugcacaaacucaacguuucuucaggaggguaugcccacauccgcuagaugcgacgauuuggaagcuuugaaaaaaaaagggugcccucccgaugauaucgagaacccuaggggcucaaaagacauuaaaaagaacaagaacguuaccaaucgaucuaaagggacagccgagaagcuuaagccagaagacaucacccagauccaaccacaacaacuuguccuccguuuaagguccggggaaccacagacuuucacacugaaguuuaagcgggccgaggacuaucccauugaccucuauuaccucauggaccugagcuacucuaugaaagacgaccucgagaacgucaagucacugggaacugaccuaaugaacgaaaugagacgcauuacaagugauuuuaggauaggcuucgggagcuucguugagaagacugugaugcccuacaucagcacaacaccugcuaaacugagaaacccauguacaucugaacagaauugcaccagcccguucucuuacaaaaacguguugucucugaccaauaagggagaaguguucaaugaacuggugggcaaacaacguauaagcggcaaccucgacaguccugaaggcggcuucgaugcgaucaugcaggucgccgucuguggcucacugauaggguggcgcaaugugacccgacuucuuguguuuuccacagacgcaggauuccacuucgccggagauggaaagcuuggcgguaucguucugccaaacgaugggcagugccaucuggagaacaacauguacaccaugagucauuacuaugauuacccaucuauagcccaucucgugcagaagcucucagagaauaauauccagaccauauuugccguaacagaggaguuucagcccgucuauaaagagcugaagaaccuuauucccaaguccgcgguggguaccuugucagccaacucaucuaacgugauucagcugauuauagacgcauacaacagucugucaucugagguuauucucgagaauggcaagcuaagugaaggagucacuauuuccuauaaguccuauugcaaaaaugguguaaaugguacaggcgagaauggccgcaaaugcuccaacauauccauuggcgaugagguucaguuugagauuaguaucaccagcaauaaauguccaaaaaaggacuccgacuccuucaagaucaggcccuuaggguuuaccgaagaaguggagguuauauuacaguacauuugugaaugcgagugccaguccgaggggaucccagagucucccaaaugccacgagggaaauggcacauuugagugcggcgcuugucgauguaacgagggaagagugggucgccacugugagugcuccacggaugaagucaauagcgaagacauggacgccuauugcaggaaagaaaacucaagcgaaaucuguuccaauaauggggagugugucugcggacagugcgucuguagaaagagagacaauaccaaugagaucuacagugggaaauuuugugagugugacaauuucaacugcgaucgcucuaauggcuugaucugcggcggaaacgggguauguaaguguagagucugcgaauguaauccuaauuacacaggauccgcaugcgauuguucccucgacacuaguaccugugaggccaguaacgggcaaauuuguaacggccgcggaaucugugaauguggcgugugcaaaugcaccgaccccaaguuucagggacagaccugcgagaugugucagacaugccugggugugugcgccgagcauaaagaaugugugcaguguagggcuuucaauaaaggugagaaaaaggacaccugcacccaggagugcuccuacuuuaauauuaccaaaguggaaucucgggauaagcucccacaaccugugcaacccgacccuguuagucauugcaaggaaaaggauguagaugacugcugguuuuauuuuaccuauuccguaaacggcaauaacgaaguaaugguccacgucgucgagaauccagaauguccaacaggaccugauaucauuccaaucguagccgggguuguggcaggcauaguucucauugggcucgcccuguugcugaucuggaagcugcucaugaucauccacgauagacgcgaguuugccaaguuugagaaagaaaagaugaacgccaaaugggacaccggcgagaacccgaucuacaaaagcgccgucaccacuguugucaauccuaaguaugaaggcaaauag

SEQ ID NO: 234930 - RNA, 2397 nt, Artificial Sequence
  derived and/or modified sequence
augaaccuccaaccaauauuuuggaucggacugauuagcucuguuuguugcguguucgcacagaccgacgaaaauagaugucuaaaggcuaaugcaaagaguugcggagaaugcauacaagccgggccaaauugcggcuggugcaccaauucgaccuuucugcaggaagggaugcccacguccgccagaugcgaugaccuggaggcucugaagaaaaaaggcugccccccggaugacauagaaaaucccagagguucuaaagauauuaagaagaacaagaacgugaccaauaggaguaaagggacugccgaaaaguugaaaccagaggauauuacucaaauucagccgcagcagcucguucuuagacuaagaucgggggagccacagacguucacccuuaaauuuaagcgagcagaagacuacccgauugaucucuauuaucucauggacuuaagcuauagcaugaaggacgacuuggagaaugugaaaucacuuggaaccgaccugaugaacgaaaugaggcgcaucacguccgauuuccggauuggcuuugguaguuuuguagaaaaaaccgucaugcccuacaucaguaccaccccugccaaacugcgaaauccauguacaagugaacagaauuguacaucgcccuuuagcuauaagaacgugcucucucuuacaaauaagggcgaaguguucaaugaauuggugggcaagcagaggaucucugguaaucuggacucaccggaaggcggauuugaugcuaucaugcagguggccgugugcggcuccuuaaucggauggaggaacguaacuagacuccucgucuuuucuacugacgcaggcuuccauuucgccggggacggaaaacuugggggcauugugcugccgaaugauggucagugucacuuagaaaacaauauguacacuaugucucauuacuacgacuaucccagcauagcccacuuaguccaaaagcugagcgaaaacaauauucaaacgaucuucgccguuaccgaggaguuccagccgguguacaaggaacuuaaaaaucucaucccuaagagugccgugggcacucugucugccaacuccagcaacgugauucaguuaaucauugaugcauacaauagccuuagcucagaaguuauccuggagaauggaaagcugagugagggugucacuauaagcuacaaaagcuacugcaaaaauggugugaaugggacuggcgagaacggacgcaaauguuccaauauuagcaucggagacgaagugcaguuugagauuaguauuacauccaacaaauguccaaagaaggauucggacaguuucaagauccggccacucggauucaccgaagagguugagguaaucuuacaguacaucugcgagugcgagugucagagugagggcaucccagagaguccgaagugucaugaaggcaacgguacuuuugaguguggggcgugcagguguaaugagggucgagugggucgucacugcgaauguaguacagaugagguuaacucagaggacauggacgccuauugucgcaaggaaaauaguucugagauaugcagcaacaauggagaaugcgugugcggccagugcgucuguagaaaaagggacaacaccaaugagaucuauucggggaaguucugcgagugugacaauuucaauugugauagaagcaauggccugauuuguggcgguaauggcguuugcaaauguagggugugugaauguaauccuaacuacaccggcagugccugugacugcucucucgacacuucuacaugugaagcuucaaacggucagaucugcaauggaagaggcauuugugaauguggcgucugcaagugcacggaccccaaauuccagggucagacgugcgagaugugccagacaugucucggcgugugugcagagcauaaggaaugcgugcaaugccgagcauuuaauaaaggagagaaaaaagauacguguacccaagagugcucuuacuuuaauaucacuaaagucgaaaguagggauaaguugccccagccugugcagccagauccaguuagucauugcaaggaaaaggauguggaugacuguugguuuuauuucacauauagcgugaacgguaauaacgaggugauggugcacgucgucgagaacccagaaugcccuacaggaccugauaucauaccuaucgucgccggcgucguggccggaauugugcuuauaggguuggcacugcucuugauuuggaagcucuugaugauuauccacgaccggagggaauucgccaaauucgagaaagaaaagaugaaugcaaaaugggacaccggagagaacccaauuuauaaaucagcaguaacaacuguagugaauccaaaguacgaggguaaguag

SEQ ID NO: 234931 - RNA, 150 nt, Artificial Sequence
  derived and/or modified sequence
augaaucugcagccaaucuuuuggauaggacuaauuaguaguguguguugugucuucgcccaaacugacgagaacagaugucugaaagcuaaugcaaaguccuguggagaauguauucaagccggccccaacuguggauggugcacauag

SEQ ID NO: 234932 - RNA, 270 nt, Artificial Sequence
  derived and/or modified sequence
augaaucuucagccuauuuucuggauuggacugauaucaagcgugugcuguguuuucgcccagaccgaugaaaaccgaugccugaaagccaaugcgaaaucuuguggggaauguauccaggccggaccaaacugcgggugguguaccaauucaacuuucuugcaggaggggaugccaaccagcgccagaugcgacgaccuggaagcccuuaagaaaaagggaugcccacccgaugacauugagaacccaagggggagcaaagauauuuag

SEQ ID NO: 234933 - RNA, 411 nt, Artificial Sequence
  derived and/or modified sequence
augaaccugcagccgaucuucuggauaggacugauuagcucugugugcugugucuucgcacagacugaugaaaaccgaugucuaaaggcgaacgcaaaguccuguggggaguguauucaggccgggccaaacuguggguggugcacuaacuccacuuuucuccaggaaggaaugccuaccagcgcgagaugcgacgaccuagaggcucugaaaaaaaaaggcugcccccccgacgauauugaaaauccacgcgguagcaaagacauuaagaaaaauaagaacguuacgaaucgaucaaaaggaaccgccgagaagcuuaaaccugaagacauuacucagauccagccacaacaacucgugcugcgccugcggaguggugagccacagacguucacacuuaaguuuaaguag

SEQ ID NO: 234934 - RNA, 378 nt, Artificial Sequence
  derived and/or modified sequence
augaaucugcagcccauauucuggaucggucuuaucagcagcguguguuguguauuugcccaaacagacgagaaccgguguuuaaaggccaaugcgaagaguuguggugaaugcauccaagcugggccaaacugugguuggugcacaaacucuacguuccugcaagaaggaaugccgacuuccgcaaggugcgacgaccuggaagcucuuaaaaagaaaggcuguccacccgacgacaucgagaauccgagaggcucuaaagauauuaaaaagaacaaaaaugugacgaacaggagcaagggcaccgccgaaaagcucaaacccgaagauauaacccaaauccagccccagcagcuuguucuuaggcuucgaucuuag

SEQ ID NO: 234935 - RNA, 492 nt, Artificial Sequence
  derived and/or modified sequence
augaauuugcagccuauuuuuuggaucgggcuaauaagcagcgugugcugcgucuucgcacagacggacgaaaacaggugccugaaagcaaacgccaagucauguggcgaguguauacaagccggaccaaacugcggguggugcacuaacagcacauuccuucaagaaggcaugccgacauccgcccggugugacgaucuggaggcucugaaaaaaaagggcuguccacccgacgacauugagaacccacgcggcucuaaggacauuaagaaaaacaagaacguaacuaauaggaguaagggaacggccgagaaacuuaaaccugaggauauaacgcaaauccagccucaacaguugguccuccgcuuacguucgggcgaaccccaaaccuuuacacucaaauucaagagagccgaagauuauccuauagaccuguauuaccuuauggaccuuucuuauucuaugaaagaugaccuggaaaacgugaaguag

SEQ ID NO: 234936 - RNA, 459 nt, Artificial Sequence
  derived and/or modified sequence
augaaucugcaaccaauauucuggauuggacuuauuuccagcgugugcugugucuucgcgcaaaccgacgaaaacaggugccugaaagccaaugccaagucguguggagagugcauccaggccggccccaauuguggauggugcacaaacagcguguccaagaccuuccugcaagaagggaugccaaccucagcuagaugugacgaccuugaagcacucaaaaagaaaggaugcccgcccgacgacaucgagaacccgcgugggucaaaagacauuaaaaagaauaaaaauguuaccaaucgcagcaaaggcacugccgaaaagcugaagcccgaagauaucacccaaauccaaccccagcagcuuguauugagacucaggagcggugagccccagacguuuacgcugaaguuuaagcgggcugaagacuauccuauugauuuguauuauuugauguag

SEQ ID NO: 234937 - RNA, 315 nt, Artificial Sequence
  derived and/or modified sequence
augaaccuucagcccauuuucuggaucggacugauuucaagcgugugcuguguguuugcccaaaccgacgaaaaucgcugucuuaaagcaaacgcuaagagcuguggagagugcauccaagccgggccuaauugugggugguguacuaauucgacuuuccuucaagagggcaugcccacaagugcaagaugugacgauuuggaggcccugaaaaaaaaggggugccccccagacgauauugaaaauccacggggguccaaagauaucaaaaagaacaagaaugugacaaaccgcucaaagggaaccgccgaguag

SEQ ID NO: 234938 - RNA, 432 nt, Artificial Sequence
  derived and/or modified sequence
augaauuugcaaccuaucuucuggauuggucugauuagcuccguguguugcgucuucgcccaaacugaugagaaucgguguuuaaaagccaaugccaagagcugcggcgaguguauccaggcugggccuaauugugggugguguaccaacucaacuuuucuucaggaagguaugcccacauccgcccguugcgaugaccuugaagcacugaagaagaaagguugcccgcccgacgacauugagaacccaaggggcagcaaagacaucaaaaaaaacaagaacguaacaaaucguuccaaagguacggccgaaaaguuaaagccugaagauauaacccagauccaaccacagcaacugguccugagauuaagaucuggugagccccagacauuuacuuugaaguucaagagggcagaagacuauccuauuuag

SEQ ID NO: 234939 - RNA, 2397 nt, Artificial Sequence
  derived and/or modified sequence
augaaucuacagccaauauucuggaucggcuugauauccagcguuuguugcguguucgcccaaaccgaugaaaaucgcugucugaaggcaaaugcgaaaaguugcggagaauguauucaggcugggccgaacuguggcugguguacaaauagcacauucuuacaggaaggaaugccaacaucugccaggugcgacgacuuagaagcacucaagaagaaaggcugcccaccagacgauauugagaacccuagaggcaguaaagacaucaagaagaauaagaacgugaccaacagaaguaaaggaacugcagaaaaacugaaaccagaagauaucacucaaauucagccucaacaacuuguucugcgucuuagaucaggggaaccucagaccuucacucuuaaauuuaagagagcagaggacuauccaaucgaccuguauuaccugauggaucuaagcuacucaaugaaagacgaucuggagaacgugaagucuuuagggacagaccugaugaaugagaugcgccgcauuacuucugauuuucguaucggcuuuggcucauucguugaaaaaacaguuaugccuuacauuucuacuacgccagcuaaauuacggaaucccugcacuuccgagcagaacugcacaucuccuuucagcuacaaaaacguguuaagcuugaccaauaagggcgagguguuuaacgaacuggugggaaagcaaagaauaucuggcaaccuggauucccccgaggguggcuucgaugccauaaugcaaguggcuguguguggaagcuugaucggcuggcgcaaugucacacgcuuguugguguucuccacagacgcugguuuccacuucgcuggcgauggcaaauuagguggaaucguccugccaaacgauggucagugccauuuagagaauaauauguacaccaugucgcacuacuacgauuaccccuccaucgcccaccugguccagaagcuaagugaaaacaauauccaaacuauuuucgccguaaccgaggaguuccaaccaguuuacaaggagcugaaaaauuuaaucccuaaguccgccgucgggacccuuuccgcuaacaguagcaacguaauucaguugauuaucgacgcguauaauagucugucgucugaagucauacuagagaacgggaaguuaagugaaggcguuacaauuaguuauaaauccuacugcaagaauggaguaaaugggaccggugaaaauggaagaaaauguaguaacauuucaaucggugacgaggugcaguucgaaauaagcauaacaucaaacaagugcccaaagaaggacagugacucuuuuaagauuagaccacugggcuucaccgaagagguugaggugauccugcaauacauuugcgagugcgagugccaaucugaaggaauuccugaaucccccaagugucaugaagggaacgguacauucgaauguggugccugucgguguaaugaagggcggguugguaggcauugugagugcaguacagacgagguaaauagugaagauauggaugcuuacuguaggaaagagaacagcagcgaaauuuguuccaauaauggugagugcguuugcggacaguguguuuguaggaaaagagacaauacaaaugagauuuauucgggcaaguucugcgaaugugacaacuuuaacugugaucgaagcaacggauuaaucuguggagggaacggggucugcaaauguagggugugugaguguaauccaaacuacaccgguuccgccugcgauuguagucuugacacauccaccugcgaggccuccaacggucagauauguaaugguagaggcaucugcgaauguggaguuuguaaguguacugauccaaaauuccagggccagacgugcgagaugugccagacgugccugggcgugugugcagaacauaaggagugugugcagugcagggcauucaauaaaggagagaaaaaagacacguguacccaggaguguuccuauuuuaauauuacgaaaguugaaucccgggauaaacugccccagcccgugcagcccgaccccguuucccacuguaaagagaaagauguagacgacuguugguuuuauuuuacauacagugucaauggaaacaacgaaguuauggugcacguuguugaaaauccggaaugcccaacagguccagacaucaucccuauagucgcgggagucguggccggaaucgugcucaucggcuuggcacuuuuguugaucuggaagcugcugaugaucauucaugaucggagagaauuugccaaauuugaaaaggaaaaaaugaaugcuaaaugggauacuggagagaacccgauauacaaguccgcggucacuaccgucgugaauccaaaauaugaagggaaauag

SEQ ID NO: 234940 - RNA, 2397 nt, Artificial Sequence
  derived and/or modified sequence
augaaccugcagccuaucuuuuggaucggacugauaucuucaguguguugcgucuucgcccagaccgacgagaaccgcugucuuaaggccaacgcuaaaucaugcggcgaauguauacaagcuggaccuaacuguggcugguguaccaacuccacauuccugcaggaaggaaugccaacaucagcuaggugugacgaucuugaagcacucaaaaagaaaggaugcccaccagaugauauagagaacccccgggggaguaaggacaucaaaaagaacaagaacgucacuaauagaucuaaagguaccgcagagaaguugaaaccagaagauauaacacaaauccagccacagcaacuagucuugaggcucaggagcggugaaccccaaaccuuuacacuuaaauucaaacgugccgaagacuaucccauugaccuuuacuaucugauggaccuguccuauuccaugaaagacgaccuagagaacgucaaaucacugggcacggaucuuaugaacgagaugcgcaggaucaccucugacuucagaaucggauucgggucauucguggagaagaccgugaugcccuacauuucgaccacaccagcaaaauuacgaaauccaugcacgagcgaacagaauugcaccaguccauucuccuacaaaaaugugcuuucacuuacaaauaagggcgagguuuucaacgagcuagugggaaaacaaagaaucucaggcaaucucgacuccccagaaggcggauuugacgccauuaugcagguggccguguguggcucgcugauuggauggcggaaugucacucgccuccuagucuucucaacagaugcggguuuucacuuugccggagacgggaagcuuggggguaucgugcuuccgaaugauggccaaugucauuuggaaaauaacauguauacaaugucacacuacuaugauuaccccucuauagcacaccugguucagaagcuguccgaaaacaacauccagacuaucuucgcagucacugaagaguuccagcccguuuauaaagaauugaagaaucugauacccaagagcgccguggguacuuuguccgccaacuccucuaacgucauucaguugauaaucgaugcuuacaauucacugucaagcgaggugauucuggaaaacggaaaacuaagugagggcguuacaaucucuuauaaaucuuacuguaagaacggcgucaauggaaccggcgagaaugggcgaaaguguuccaacauuucuaucggcgacgaagugcaguucgaaauaagcauuacuagcaauaagugucccaagaaagacucagacucuuuuaaaauuaggccccuaggguucacugaggaaguugaggucauacugcaauauauuugugagugcgaaugccaguccgaaggcauucccgaauccccaaaaugucaugaaggaaaugggacuuucgagugcggagcaugccgcugcaaugaaggcagaguuggcagacacugugagugcuccaccgaugaagugaauagugaggacauggacgccuauugccguaaggaaaacucuucagaaauuuguaguaacaauggcgagugugugugcgggcagugugugugucguaaaagagauaacacgaaugaaaucuacagcggcaaauuuugcgagugugacaacuuuaacugcgaucguucaaacggcuugauuugcgggggaaauggggucuguaagugcagagugugcgaaugcaauccuaacuacacaggaucugcuugugauugcucucucgauacuaguacaugugaggcuucaaacggucagauauguaacgggcgugggaucugugaaugcggcguuuguaaguguacugauccuaaauuccagggccaaacaugugaaaugugccagacgugucuagggguaugugcagaacauaaggaaugugugcaauguagggcauucaacaaaggugaaaaaaaagauacaugcacgcaggaaugcaguuauuucaacaucaccaaaguggaauccagagacaaauuaccacagccaguccaaccagauccaguuucucauuguaaagagaaggacgucgacgacugcugguuuuauuucacauauagcgugaacgguaauaacgaggugauggugcacgucgucgagaacccagaaugcccuacaggaccugauaucauaccuaucgucgccggcgucguggccggaauugugcuuauaggguuggcacugcucuugauuuggaagcucuugaugauuauccacgaccggagggaauucgccaaauucgagaaagaaaagaugaaugcaaaaugggacaccggagagaacccaauuuauaaaucagcaguaacaacuguagugaauccaaaguacgaggguaaguag

SEQ ID NO: 234941 - RNA, 411 nt, Artificial Sequence
  derived and/or modified sequence
augaaccugcagccgaucuucuggauaggacugauuagcucugugugcugugucuucgcacagacugaugaaaaccgaugucuaaaggcgaacgcaaaguccuguggggaguguauucaggccgggccaaacuguggguggugcacuaacuccacuuuucuccaggaaggaaugccuaccagcgcgagaugcgacgaccuagaggcucugaaaaaaaaaggcugcccccccgacgauauugaaaauccacgcgguagcaaagacauuaagaaaaauaagaacguuacgaaucgaucaaaaggaacagcugaaaaacugaagcccgaagauaucacccagauucaaccccaacagcuugugcugagacugagaaguggcgaaccacagaccuuuacucugaaauucaaauag

SEQ ID NO: 234942 - RNA, 378 nt, Artificial Sequence
  derived and/or modified sequence
augaaccuacaaccaaucuuuuggauaggacuaaucuccagcgugugcuguguguucgcccagaccgaugagaacaggugccuuaaagccaaugcaaagagcugcggagagugcauucaagcuggacccaacugugggugguguacuaauuccacuuuccugcaggaaggcaugcccacuagcgcuagaugcgacgauuuagaagcacuuaagaaaaaagguugcccucccgaugacaucgagaacccuagaggcuccaaagacaucaaaaaaaacaagaacgugacgaacaggucgaaggguacugcggaaaaacuuaaacccgaggacauuacccagauccagccccaacagcuuguguuaagacuccggucauag

SEQ ID NO: 234943 - RNA, 492 nt, Artificial Sequence
  derived and/or modified sequence
augaaucuacagccgauauucuggauuggccucauaaguagcgugugcugcguguucgcccagacggaugagaauaggugcuuaaaagccaaugcuaagaguuguggggaaugcauucaggcugggcccaacuguggaugguguaccaacucuaccuucuugcaggaggguaugcccaccagugcccgaugugaugauuuagaagcauugaagaaaaaaggaugcccgcccgaugacauagaaaaccccaggggauccaaagacauuaaaaagaacaaaaacgugacaaaucggagcaagggaacugcagaaaaacuuaagccugaggauauaacccaaauucagccccaacaacuaguccuacgccugcgcucgggagaaccccaaacauuuacacucaaauucaagcgagcugaagauuaucccauugaucucuacuaccugauggaucugagcuauucuaugaaggaugauuuagagaacgugaaguag

SEQ ID NO: 234944 - RNA, 459 nt, Artificial Sequence
  derived and/or modified sequence
augaaucugcaaccaauauucuggauuggacuuauuuccagcgugugcugugucuucgcgcaaaccgacgaaaacaggugccugaaagccaaugccaagucguguggagagugcauccaggccggccccaauuguggauggugcacaaacagcguguccaagaccuuccugcaagaagggaugccaaccucagcuagaugugacgaccuugaagcacucaaaaagaaaggaugcccgcccgacgacaucgagaacccgcgugggucaaaagacauuaaaaagaauaaaaauguuaccaaucgcuccaaagguaccgcagagaaacuaaagccggaggacauuacacaaauucagccucagcagcuuguguuacgacuccgcagcggcgagccccagaccuuuacccucaaauucaaacgcgccgaggacuaucccauagaucuguacuauuuaauguag

SEQ ID NO: 234945 - RNA, 315 nt, Artificial Sequence
  derived and/or modified sequence
augaaccuucagcccauuuucuggaucggacugauuucaagcgugugcuguguguuugcccaaaccgacgaaaaucgcugucuuaaagcaaacgcuaagagcuguggagagugcauccaagccgggccuaauugugggugguguacuaauucgacuuuccuucaagagggcaugcccacaagugcaagaugugacgauuuggaggcccugaaaaaaaaggggugccccccagacgauauugaaaauccacggggguccaaagauaucaaaaagaacaagaaugugacaaaccgcucaaagggcacagcggaauag

SEQ ID NO: 234946 - RNA, 432 nt, Artificial Sequence
  derived and/or modified sequence
augaaccugcagccaaucuuuuggaucggauugaucucuaguguguguugcgucuuugcccagacagaugagaaucggugccugaaagcgaacgcuaagagcuguggcgaauguauacaggcaggacccaacugcggaugguguacgaauuccacauuccugcaagaaggcaugccuacaagugcucggugcgacgaucuagaggcccucaagaagaagggaugcccgccugacgauaucgagaauccccgcggauccaaggacaucaagaaaaacaagaacguuaccaaucgaucgaagggcacggcagagaaacuaaaaccggaggauaucacacaaauucagccucaacagcuaguccugagacucaggucaggagaaccucaaacauuuacccugaaauuuaaacgcgcugaggauuauccaaucuag

SEQ ID NO: 234947 - protein, 181 aa, Artificial Sequence
  derived and/or modified sequence
MFFASHTEEEVSVTVPEVQKEIVTEEKIHVAISKRVEPPPKVPELPEKPAPEEVAPVPIPKKVEPPAPKVPEVPKKPVPEEKKPVPVPKKEPAAPPKVPEVPKKPVPEEKIPVPVAKKKEAPPAKVPEIPKKKVPEERKPVPRKEEEVPPPPKVPALPKKPVPEEKVAVPVPVAKKAPPPR

SEQ ID NO: 234948 - DNA, 457 bp, Artificial Sequence
  derived and/or modified sequence
ccaattccactgatcctgtgaaggctgcccaatttgagatgagtaatcccagccatctccttttcttcctgccttgtcccttctctcctgtttcctctctttttgcctttgttaatgcaaaattaaaatggagactgggcctgaaaactcctgagcaaacaaagccacccgggccttagaaatagccttatcattgcttaaactgcaaacataagtgaaactcaagttggattgtaactaaaaataggtaatacttaacttggatcatttctggtaaatatttatgttagacagaaataagatttaaccctagccaatcgtaagcagccaactaacataattatgtgactaagaacacttcaataaggtacctcacccaaaagacaattatgtaactgcaaacctatcaaatttctttattttgcttccacattttcccaataaatacttgcctgtg

SEQ ID NO: 234949 - DNA, 405 bp, Artificial Sequence
  derived and/or modified sequence
atgatccctgtgcggggcctgtggtactgctacctgcaggtgaagaaggtgcggctgcgggaggccgagcggctgggccccaagagccagtgcccagcagaatgtggggccgcctcctggatctcctgggtgctgcagcaccagcagctgctggccagcgagtgggccaccaaggatggccggggcacctggggcagcaagcccagctgcaccgtgcctgccctgagcgccaccagccagctgctgcagctgggccgcctgaacagcgacctgcagtttgtgcggcagagggccaagaagtctgtgagcagccccagcctgctgcagttctggtgctgcctgagccggctgtccttccacgccctgaaccagaagatcaacagcaccaacatcaacatcacctag

SEQ ID NO: 234950 - DNA, 543 bp, Artificial Sequence
  derived and/or modified sequence
aaggtgcccgaggtgcccaagaagcccgtgctggaggagaagcccgccgtgcccgtgcccgagagagccgagagccccccccccgaggtgtacgaggagcccgaggagatcgcccccgaggaggagatcgcccccgaggaggagaagcccgtgcccgtggccgaggaggaggagcccgaggtgcccccccccgccgtgcccgaggagcccaagaagatcatccccgagaagaaggtgcccgtgatcaagaagcccgaggcccccccccccaaggagcccgagcccgagaaggtgatcgagaagcccaagctgaagcccagaccccccccccccccccccgccccccccaaggaggacgtgaaggagaagatcttccagctgaaggccatccccaagaagaaggtgcccgagaagccccaggtgcccgagaaggtggagctgacccccctgaaggtgcccggcggcgagaagaaggtgagaaagctgctgcccgagagaaagcccgagcccaaggaggaggtggtgctgaagagcggcatctag

SEQ ID NO: 234951 - DNA, 546 bp, Artificial Sequence
  derived and/or modified sequence
atgttcttcgccagccacaccgaggaggaggtgagcgtgaccgtgcccgaggtgcagaaggagatcgtgaccgaggagaagatccacgtggccatcagcaagagagtggagcccccccccaaggtgcccgagctgcccgagaagcccgcccccgaggaggtggcccccgtgcccatccccaagaaggtggagccccccgcccccaaggtgcccgaggtgcccaagaagcccgtgcccgaggagaagaagcccgtgcccgtgcccaagaaggagcccgccgccccccccaaggtgcccgaggtgcccaagaagcccgtgcccgaggagaagatccccgtgcccgtggccaagaagaaggaggccccccccgccaaggtgcccgagatccccaagaagaaggtgcccgaggagagaaagcccgtgcccagaaaggaggaggaggtgccccccccccccaaggtgcccgccctgcccaagaagcccgtgcccgaggagaaggtggccgtgcccgtgcccgtggccaagaaggcccccccccccagatag

SEQ ID NO: 234952 - DNA, 543 bp, Artificial Sequence
  derived and/or modified sequence
aaagtcccagaagtgcctaaaaaacccgtgctggaagagaagcccgcggtgccagtgcccgagcgcgccgagtcacctccacccgaggtgtacgaagagccagaggagattgcaccagaagaagagattgcaccagaagaggagaagcctgtgccagtggccgaggaggaggaaccagaagtgcccccgcctgccgtgcctgaggaacccaaaaaaatcattcctgagaagaaggtgcccgttatcaagaaaccagaggcccctccccccaaggagccagagcccgagaaggttatcgagaagcctaagttaaagccccggccccccccacctcctccagcccccccaaaagaggatgtcaaagagaagatttttcagctgaaggccatacccaagaaaaaagtgccagaaaagcctcaggtcccagagaaggtggagctcacaccacttaaagtccccggtggggaaaagaaggtccggaagctcctgccagaacggaagcccgaacctaaggaagaggttgtgctcaagtcgggcatctag

SEQ ID NO: 234953 - DNA, 546 bp, Artificial Sequence
  derived and/or modified sequence
atgttcttcgcctcacataccgaggaggaggtaagtgtgacagtacctgaggtacagaaggagattgtgactgaggagaaaatccacgtggccatctcaaaacgggtggagcccccacctaaagtcccggaactgcccgagaaacccgcccccgaggaggttgcaccggtgccaatccccaaaaaggtagagcccccggctcctaaggtccctgaggtgcccaaaaaaccagtgcctgaggaaaaaaagcccgtacccgtccctaagaaggagccagcagcaccacctaaggtacccgaagtgcctaaaaagccagtgcctgaagagaaaatacccgtacctgtggcaaagaagaaagaggcaccccctgcaaaagtcccggagatacccaaaaaaaaggtgcctgaagagagaaaaccggtgcctcggaaggaggaagaggttcccccaccccccaaagtcccagcactgcctaagaaacccgttccggaagaaaaggtggccgtgccagttcccgtggcgaagaaagcccccccccctcgctag

SEQ ID NO: 234954 - DNA, 543 bp, Artificial Sequence
  derived and/or modified sequence
aaggtgcctgaggtgcccaagaagcctgtgctggaggagaagccagctgtgcctgtgcctgagagagctgagagccccccacctgaggtgtatgaggagcctgaggagatcgcccctgaggaggagatcgcccctgaggaggagaagcctgtgcctgtggccgaggaggaggagcctgaggtgcccccacctgctgtgcctgaggagcccaagaagatcatccctgagaagaaggtgcctgtgatcaagaagccagaggcccccccacccaaggagcctgagcctgagaaggtgattgagaagcccaagctgaagccccggcccccacctcctcctccagccccacccaaggaggatgtgaaggagaagatcttccagctgaaggccatccccaagaagaaggtgcctgagaagccccaggtgcctgagaaggtggagctgacccccctgaaggtgcctggaggagagaagaaggtgaggaagctgctgcctgagaggaagccagagcccaaggaggaggtggtgctgaagagcggcatctag

SEQ ID NO: 234955 - DNA, 546 bp, Artificial Sequence
  derived and/or modified sequence
atgttctttgccagccacacagaggaggaggtgtctgtgacagtgcctgaggtgcagaaggagatcgtgacagaggagaagatccacgtggccatcagcaagagggtggagcccccacccaaggtgcctgagctgcctgagaagccagcccctgaggaggtggcccctgtgcccatccccaagaaggtggagcccccagcccccaaggtgcctgaggtgcccaagaagcctgtgcctgaggagaagaagcctgtgcctgtgcccaagaaggagcctgctgccccacccaaggtgcctgaggtgcccaagaagcctgtgcctgaggagaagatccctgtgcctgtggccaagaagaaggaggcccccccagccaaggtgcctgagatccccaagaagaaggtgcctgaggagaggaagcctgtgcccaggaaggaggaggaggtgcccccaccacccaaggtgcctgccctgcccaagaagcctgtgcctgaggagaaggtggccgtgcctgtgcctgtggccaagaaggcccctcctccaagatag

SEQ ID NO: 234956 - DNA, 543 bp, Artificial Sequence
  derived and/or modified sequence
aaggtgcccgaggtgcccaagaagcccgtgctggaggagaagcccgcggtccctgtgcccgagagggccgaatcacctccacctgaagtctatgaagaacccgaggagatcgctccagaagaagaaatagcccctgaggaagaaaaacctgtaccagtggctgaagaagaggaacccgaggtgcctccacccgccgtgcccgaagaacctaagaaaattattcccgaaaagaaggttcctgtgatcaagaaacctgaggctcctccccccaaagagcccgagcccgaaaaggtgatagaaaaaccaaaactgaagccccggcccccaccacccccgcctgcacctccgaaagaggatgttaaggagaagatatttcaactgaaggccattccaaagaagaaggtgcctgaaaagcctcaggtgcctgaaaaggtggaactgacaccactgaaggttcctggcggggaaaagaaagttaggaaactgctccccgaaaggaagcccgaaccaaaggaagaggtagtactcaagagcggcatctag

SEQ ID NO: 234957 - DNA, 546 bp, Artificial Sequence
  derived and/or modified sequence
atgttcttcgccagccacaccgaggaggaggtgagcgtgaccgtgccggaagtccagaaggaaattgtgacagaggaaaagattcacgtagcaatatctaagagggtcgaacccccacccaaagtgcccgaactgccggaaaagcccgcccctgaagaggtggcccccgtgccaattccaaagaaggtggagcctcccgccccaaaagtgcccgaagtgcctaaaaaaccagtgccagaagaaaaaaaaccggttcccgtccccaagaaggaacccgcagcaccccctaaagtccccgaagtgcctaagaagcccgtgcctgaggagaagatacctgtcccagtggccaaaaaaaaggaggccccacccgcgaaggtcccggaaattccaaagaagaaggtacccgaggagcgaaagccagtgccacgcaaggaggaagaagtccctcctcctcctaaggtcccggcgttacccaagaagccagtccccgaggagaaagtggcagtccccgtgcctgtggccaaaaaggccccacctcctaggtag

SEQ ID NO: 234958 - DNA, 543 bp, Artificial Sequence
  derived and/or modified sequence
aaagtacccgaagttccaaaaaaacctgtgctggaggagaaaccagccgtgccggtgccagagcgcgcagagtccccaccccctgaggtctacgaggagccagaggaaatcgctcctgaagaggaaattgcgcctgaagaggagaagccggtgcctgtagccgaggaggaagagcccgaggtgcctcctcctgccgtaccagaagagccaaagaagatcattcctgagaagaaagtgcccgttatcaagaagcccgaggcgcctcctccgaaggagcccgagcctgagaaggtgattgaaaaacccaagctgaaacccagacctccccctccccctccagcccctcctaaagaagacgttaaggagaagatctttcaactgaaggccattcctaaaaaaaaggtcccagagaaacctcaggtacccgaaaaggtcgaactgacacccctgaaggtcccaggcggtgagaagaaggtgagaaaactgctgccagaaaggaagccagagcccaaggaagaagttgtacttaagagcggtatatag

SEQ ID NO: 234959 - DNA, 546 bp, Artificial Sequence
  derived and/or modified sequence
atgttcttcgccagtcacactgaagaggaggtttccgtcacagttcctgaggtgcagaaggaaatcgtgacagaggaaaagatacatgtagccatctccaagcgcgttgagccgccacctaaggtgcctgagctgcctgagaagccagccccagaggaagttgctcccgtacctatccctaagaaggtggagccacccgcacctaaggttcctgaagttcccaagaagcccgtgcctgaggagaaaaagcctgtaccagtgcccaagaaggagccagcagcacctcccaaagtccctgaagtgcctaagaaacccgtgcccgaagagaagatccctgtccctgtagctaaaaaaaaggaagccccaccagccaaggtgccagagatacctaagaagaaggtccccgaggagcgcaaacctgtaccacgtaaggaagaggaagtgcctcccccaccaaaagtgcccgctttaccaaaaaaaccagtgccagaagagaaggttgctgtgccagtgcctgttgcaaaaaaggcccctccacccaggtag

SEQ ID NO: 234960 - DNA, 540 bp, Artificial Sequence
  derived and/or modified sequence
aaagtgccagaagtgccaaagaaacctgtcttggaagagaaaccagctgttcctgttccagaaagagcggagtctcctcccccagaagtatatgaagaacctgaggaaattgctcctgaagaggaaattgctcctgaagaggaaaagccagttcctgttgcagaagaggaggaaccagaggttccacctccagcagtgcctgaagagcccaagaagatcatcccagagaagaaagttcctgtcatcaaaaaaccagaagcaccgcctcctaaagaacctgaacctgaaaaggttattgagaagccaaaactcaaaccaagacccccacctcctccacctgctccacctaaggaagatgtgaaggagaaaatattccaacttaaagctattccaaagaagaaagttcctgaaaaacctcaggttccagaaaaagtggagcttacacctctgaaagtgcctggaggtgaaaagaaagttcgcaaattacttccggaacgtaaacctgaaccaaaggaagaagttgttctgaaaagcggtata

SEQ ID NO: 234961 - protein, 5604 aa, Artificial Sequence
  derived and/or modified sequence
MTTQAPTFTQPLQSVVVLEGSTATFEAHISGFPVPEVSWFRDGQVISTSTLPGVQISFSDGRAKLTIPAVTKANSGRYSLKATNGSGQATSTAELLVKAETAPPNFVQRLQSMTVRQGSQVRLQVRVTGIPTPVVKFYRDGAEIQSSLDFQISQEGDLYSLLIAEAYPEDSGTYSVNATNSVGRATSTAELLVQGEEEVPAKKTKTIVSTAQISESRQTRIEKKIEAHFDARSIATVEMVIDGAAGQQLPHKTPPRIPPKPKSRSPTPPSIAAKAQLARQQSPSPIRHSPSPVRHVRAPTPSPVRSVSPAARISTSPIRSVRSPLLMRKTQASTVATGPEVPPPWKQEGYVASSSEAEMRETTLTTSTQIRTEERWEGRYGVQEQVTISGAAGAAASVSASASYAAEAVATGAKEVKQDADKSAAVATVVAAVDMARVREPVISAVEQTAQRTTTTAVHIQPAQEQVRKEAEKTAVTKVVVAADKAKEQELKSRTKEVITTKQEQMHVTHEQIRKETEKTFVPKVVISAAKAKEQETRISEEITKKQKQVTQEAIRQETEITAASMVVVATAKSTKLETVPGAQEETTTQQDQMHLSYEKIMKETRKTVVPKVIVATPKVKEQDLVSRGREGITTKREQVQITQEKMRKEAEKTALSTIAVATAKAKEQETILRTRETMATRQEQIQVTHGKVDVGKKAEAVATVVAAVDQARVREPREPGHLEESYAQQTTLEYGYKERISAAKVAEPPQRPASEPHVVPKAVKPRVIQAPSETHIKTTDQKGMHISSQIKKTTDLTTERLVHVDKRPRTASPHFTVSKISVPKTEHGYEASIAGSAIATLQKELSATSSAQKITKSVKAPTVKPSETRVRAEPTPLPQFPFADTPDTYKSEAGVEVKKEVGVSITGTTVREERFEVLHGREAKVTETARVPAPVEIPVTPPTLVSGLKNVTVIEGESVTLECHISGYPSPTVTWYREDYQIESSIDFQITFQSGIARLMIREAFAEDSGRFTCSAVNEAGTVSTSCYLAVQVSEEFEKETTAVTEKFTTEEKRFVESRDVVMTDTSLTEEQAGPGEPAAPYFITKPVVQKLVEGGSVVFGCQVGGNPKPHVYWKKSGVPLTTGYRYKVSYNKQTGECKLVISMTFADDAGEYTIVVRNKHGETSASASLLEEADYELLMKSQQEMLYQTQVTAFVQEPKVGETAPGFVYSEYEKEYEKEQALIRKKMAKDTVVVRTYVEDQEFHISSFEERLIKEIEYRIIKTTLEELLEEDGEEKMAVDISESEAVESGFDSRIKNYRILEGMGVTFHCKMSGYPLPKIAWYKDGKRIKHGERYQMDFLQDGRASLRIPVVLPEDEGIYTAFASNIKGNAICSGKLYVEPAAPLGAPTYIPTLEPVSRIRSLSPRSVSRSPIRMSPARMSPARMSPARMSPARMSPGRRLEETDESQLERLYKPVFVLKPVSFKCLEGQTARFDLKVVGRPMPETFWFHDGQQIVNDYTHKVVIKEDGTQSLIIVPATPSDSGEWTVVAQNRAGRSSISVILTVEAVEHQVKPMFVEKLKNVNIKEGSRLEMKVRATGNPNPDIVWLKNSDIIVPHKYPKIRIEGTKGEAALKIDSTVSQDSAWYTATAINKAGRDTTRCKVNVEVEFAEPEPERKLIIPRGTYRAKEIAAPELEPLHLRYGQEQWEEGDLYDKEKQQKPFFKKKLTSLRLKRFGPAHFECRLTPIGDPTMVVEWLHDGKPLEAANRLRMINEFGYCSLDYGVAYSRDSGIITCRATNKYGTDHTSATLIVKDEKSLVEESQLPEGRKGLQRIEELERMAHEGALTGVTTDQKEKQKPDIVLYPEPVRVLEGETARFRCRVTGYPQPKVNWYLNGQLIRKSKRFRVRYDGIHYLDIVDCKSYDTGEVKVTAENPEGVIEHKVKLEIQQREDFRSVLRRAPEPRPEFHVHEPGKLQFEVQKVDRPVDTTETKEVVKLKRAERITHEKVPEESEELRSKFKRRTEEGYYEAITAVELKSRKKDESYEELLRKTKDELLHWTKELTEEEKKALAEEGKITIPTFKPDKIELSPSMEAPKIFERIQSQTVGQGSDAHFRVRVVGKPDPECEWYKNGVKIERSDRIYWYWPEDNVCELVIRDVTAEDSASIMVKAINIAGETSSHAFLLVQAKQLITFTQELQDVVAKEKDTMATFECETSEPFVKVKWYKDGMEVHEGDKYRMHSDRKVHFLSILTIDTSDAEDYSCVLVEDENVKTTAKLIVEGAVVEFVKELQDIEVPESYSGELECIVSPENIEGKWYHNDVELKSNGKYTITSRRGRQNLTVKDVTKEDQGEYSFVIDGKKTTCKLKMKPRPIAILQGLSDQKVCEGDIVQLEVKVSLESVEGVWMKDGQEVQPSDRVHIVIDKQSHMLLIEDMTKEDAGNYSFTIPALGLSTSGRVSVYSVDVITPLKDVNVIEGTKAVLECKVSVPDVTSVKWYLNDEQIKPDDRVQAIVKGTKQRLVINRTHASDEGPYKLIVGRVETNCNLSVEKIKIIRGLRDLTCTETQNVVFEVELSHSGIDVLWNFKDKEIKPSSKYKIEAHGKIYKLTVLNMMKDDEGKYTFYAGENMTSGKLTVAGGAISKPLTDQTVAESQEAVFECEVANPDSKGEWLRDGKHLPLTNNIRSESDGHKRRLIIAATKLDDIGEYTYKVATSKTSAKLKVEAVKIKKTLKNLTVTETQDAVFTVELTHPNVKGVQWIKNGVVLESNEKYAISVKGTIYSLRIKNCAIVDESVYGFRLGRLGASARLHVETVKIIKKPKDVTALENATVAFEVSVSHDTVPVKWFHKSVEIKPSDKHRLVSERKVHKLMLQNISPSDAGEYTAVVGQLECKAKLFVETLHITKTMKNIEVPETKTASFECEVSHFNVPSMWLKNGVEIEMSEKFKIVVQGKLHQLIIMNTSTEDSAEYTFVCGNDQVSATLTVTPIMITSMLKDINAEEKDTITFEVTVNYEGISYKWLKNGVEIKSTDKCQMRTKKLTHSLNIRNVHFGDAADYTFVAGKATSTATLYVEARHIEFRKHIKDIKVLEKKRAMFECEVSEPDITVQWMKDDQELQITDRIKIQKEKYVHRLLIPSTRMSDAGKYTVVAGGNVSTAKLFVEGRDVRIRSIKKEVQVIEKQRAVVEFEVNEDDVDAHWYKDGIEINFQVQERHKYVVERRIHRMFISETRQSDAGEYTFVAGRNRSSVTLYVNAPEPPQVLQELQPVTVQSGKPARFCAVISGRPQPKISWYKEEQLLSTGFKCKFLHDGQEYTLLLIEAFPEDAAVYTCEAKNDYGVATTSASLSVEVPEVVSPDQEMPVYPPAIITPLQDTVTSEGQPARFQCRVSGTDLKVSWYSKDKKIKPSRFFRMTQFEDTYQLEIAEAYPEDEGTYTFVASNAVGQVSSTANLSLEAPESILHERIEQEIEMEMKELFSEGESEHSERDTRDAFSDSEDIDHKSMAAKRYASRISSTSSWPEYFKPSFTQKLTFKYVLEGEPVVFTCRLIACPTPEMTWFHNNRPIPTGLRRIIKAESDLHHHSSSLEIKRVQDRDSGSYRLLAINSEGSAESTASLLVIQKGQDEKYLEFLKRAERTHENVEALVERGEDRIKVDLRFTGSPFNKKQDVEQKGMMRTIHFKTMSSAKKTDYMYDEEYLESKSDIRGWLNVGESFLDKETKVKLQRLREARKTLMEKKKLSLLDTSSEISSRTLRSEASDKDILFSREDMKIRSMSDLAESYKVDHSAESIVQNPHALSNQMDQNIESEELPTSFQTIVDEEIFQTEIRMSQEALVKESLPKDHLYGEILVNENTQARGQLEEIMANTTIGESSTYITNVCEKEEVYETPENVSQAITPHASESFGTLVNVEESEEIASERIKKDDLRELQLSASTRIDEFKTEQKEENMRFFENSFRKRPQRCPPSFLQEIESQEVYEGDSCNFVCHFQGYPQPIVTWYNNDMPIPRNQNFIIHSLENYSILTLSSVHHQNEGSITCVLFNQYGTVKTTSMLKVKAKQKHDVKAHKVPVFHDYLDEEEELALVFDQAKGAHPSMSQEGQTNLHLLKTNPPVPPSGDTELLSFPVEIQVTAATPIPEQDKESKEVFQTEELEPKAMPQDQVTQSPKHRFVFLSDITNEPPKMLQEMPKHARCREGDSIILECLISGEPQPVVTWFQNGVLLKQNQKFQFEEVNCSHQLYIKDVNSQDSGKYKCVAENNSGAVESVSDLTVEPVTYRENSQFENIGEIYGKYSRDQQLQDQGESVRAHFYDYPAGPFTPWTNVKEYSVRDYFQSLETIEQIDQKEQVRCIPSREKIPRFVHGASRTIKISKPIRAEFIQCQAEGKERHVSEKSKLHQAEGTVYPFVDDFSDVTIKKEIRNNFGKLGRSEKENVQECAQSDYLPNIHSERISDSYNTKDSSAIVYEESLGEEIHYPGKKVKHRIIEFEKLHVEKGVLEKRPTRTSIVNPPQKKIDDKAFSLKQRESRSSNLNANMYQAEKMSPNTESDSSNIAINLKLLSSQTHKEFDAQEREQQEKISLIDKPAISKRAEHESPITFDLKQFHTQIKHTDVKFQELDSGQPEEAYFKIQHPADTENIVFDLKQMYSHIGDPALEFQGQETREQQEIHYKEKIPSPETLQPDTHNISKSVQNNVFASQEISSSQELSNRTMVEKSSIDENSISLEKEVRHVQEQNLDILKTDLSLKSFSEEIYSESCALLPTSSADIEETDLSEKSCPLENGGRSSISHLKKAASEEKPLGVGEMEEECTLEPELAAFPKQDGGTQEYTDATLEDHRGDVQEADTLHRQLSLSQCFPLLMTEEQQNPGEQISTNIHASGEEKCYEEVQVQNEASFSTLEGEMIETSFSQNIPKLDEAHTTEAAESETSLTQYLLAAGKREVPETKDTRDQAKLVQSESITSMEVEEVTFNTVYEYYNQKQESLGRPLSPESDISIGVGSTTSEEISELDQFYTPPSSVEYFESPKSPDLYFNPSDITKQSSIHSGGETVERYSTPLGEVAERYSTPSEGEVGERYSTPPGETLERYSTPPGETLERYSTPPGETLERYSTPPGETLERYSTPPGETLERYSTPPGEALERYSIPTGGPNPTGTFKTYPSKIEREDGTPNEHFYTPTEERGSAYEIWRSDSFGTPNEAIEPKDNEMPPSFIEPLTKRKVYENTTLGFIVEVEGLPVPGVKWYRNKSLLEPDERIKMERVGNVCSLEISNIQKGEGGEYMCHAVNIIGEAKSFANVDIMPQEERVVALPPPVTHQHVMEFDLEHTTSSRTPSPQEIVLEVELSEKDVKEFEKQVKIVTVPEFTPDHKSMIVSLDVLPFNFVDPNMDSREGEDKELKIDLEVFEMPPRFIMPICDFKIPENSDAVFKCSVIGIPTPEVKWYKEYMCIEPDNIKYVISEEKGSHTLKIRNVCLSDSATYRCRAVNCVGEAICRGFLTMGDSEIFAVIAKKSKVTLSSLMEELVLKSNYTDSFFEFQVVEGPPRFIKGISDCYAPIGTAAYFQCLVRGSPRPTVYWYKDGKLVQGRRFTVEESGTGFHNLFITSLVKSDEGEYRCVATNKSGMAESFAALTLT

SEQ ID NO: 234962 - protein, 145 aa, Artificial Sequence
  derived and/or modified sequence
EDTYQLEIAEAYPEDEGTYTFVASNAVGQVSSTANLSLEAPESILHERIEQEIEMEMKELFSEGESEHSERDTRDAFSDSEDIDHKSMAAKRYASRISSTSSWPEYFKPSFTQKLTFKYVLEGEPVVFTCRLIACPTPEMTWFHN

SEQ ID NO: 234963 - DNA, 219 bp, Artificial Sequence
  derived and/or modified sequence
atgtcataccaacaacagcagtgcaaacagccatgtcagccccctccagtatgccctactccgaaatgtcctgagccctgcccgcctccgaagtgccccgagccttgtccaagccctaaatgcccccagccgtgcccccctcagcagtgtcagcagaaatatcctcctgtcaccccctctccgccctgccagccaaagtgtcctccaaaaagtaaatag

SEQ ID NO: 234964 - DNA, 2658 bp, Artificial Sequence
  derived and/or modified sequence
atggtggagaagagcagcatcgacgagaacagcatcagcctggagaaggaggtgagacacgtgcaggagcagaacctggacatcctgaagaccgacctgagcctgaagagcttcagcgaggagatctacagcgagagctgcgccctgctgcccaccagcagcgccgacatcgaggagaccgacctgagcgagaagagctgccccctggagaacggcggcagaagcagcatcagccacctgaagaaggccgccagcgaggagaagcccctgggcgtgggcgagatggaggaggagtgcaccctggagcccgagctggccgccttccccaagcaggacggcggcacccaggagtacaccgacgccaccctggaggaccacagaggcgacgtgcaggaggccgacaccctgcacagacagctgagcctgagccagtgcttccccctgctgatgaccgaggagcagcagaaccccggcgagcagatcagcaccaacatccacgccagcggcgaggagaagtgctacgaggaggtgcaggtgcagaacgaggccagcttcagcaccctggagggcgagatgatcgagaccagcttcagccagaacatccccaagctggacgaggcccacaccaccgaggccgccgagagcgagaccagcctgacccagtacctgctggccgccggcaagagagaggtgcccgagaccaaggacaccagagaccaggccaagctggtgcagagcgagagcatcaccagcatggaggtggaggaggtgaccttcaacaccgtgtacgagtactacaaccagaagcaggagagcctgggcagacccctgagccccgagagcgacatcagcatcggcgtgggcagcaccaccagcgaggagatcagcgagctggaccagttctacaccccccccagcagcgtggagtacttcgagagccccaagagccccgacctgtacttcaaccccagcgacatcaccaagcagagcagcatccacagcggcggcgagaccgtggagagatacagcacccccctgggcgaggtggccgagagatacagcacccccagcgagggcgaggtgggcgagagatacagcaccccccccggcgagaccctggagagatacagcaccccccccggcgagaccctggagagatacagcaccccccccggcgaggccctggagagatacagcatccccaccggcggccccaaccccaccggcaccttcaagacctaccccagcaagatcgagagagaggacggcacccccaacgagcacttctacacccccaccgaggagagaggcagcgcctacgagatctggagaagcgacagcttcggcacccccaacgaggccatcgagcccaaggacaacgagatgccccccagcttcatcgagcccctgaccaagagaaaggtgtacgagaacaccaccctgggcttcatcgtggaggtggagggcctgcccgtgcccggcgtgaagtggtacagaaacaagagcctgctggagcccgacgagagaatcaagatggagagagtgggcaacgtgtgcagcctggagatcagcaacatccagaagggcgagggcggcgagtacatgtgccacgccgtgaacatcatcggcgaggccaagagcttcgccaacgtggacatcatgccccaggaggagagagtggtggccctgcccccccccgtgacccaccagcacgtgatggagttcgacctggagcacaccaccagcagcagaacccccagcccccaggagatcgtgctggaggtggagctgagcgagaaggacgtgaaggagttcgagaagcaggtgaagatcgtgaccgtgcccgagttcacccccgaccacaagagcatgatcgtgagcctggacgtgctgcccttcaacttcgtggaccccaacatggacagcagagagggcgaggacaaggagctgaagatcgacctggaggtgttcgagatgccccccagattcatcatgcccatctgcgacttcaagatccccgagaacagcgacgccgtgttcaagtgcagcgtgatcggcatccccacccccgaggtgaagtggtacaaggagtacatgtgcatcgagcccgacaacatcaagtacgtgatcagcgaggagaagggcagccacaccctgaagatcagaaacgtgtgcctgagcgacagcgccacctacagatgcagagccgtgaactgcgtgggcgaggccatctgcagaggcttcctgaccatgggcgacagcgagatcttcgccgtgatcgccaagaagagcaaggtgaccctgagcagcctgatggaggagctggtgctgaagagcaactacaccgacagcttcttcgagttccaggtggtggagggcccccccagattcatcaagggcatcagcgactgctacgcccccatcggcaccgccgcctacttccagtgcctggtgagaggcagccccagacccaccgtgtactggtacaaggacggcaagctggtgcagggcagaagattcaccgtggaggagagcggcaccggcttccacaacctgttcatcaccagcctggtgaagagcgacgagggcgagtacagatgcgtggccaccaacaagagcggcatggccgagagcttcgccgccctgaccctgacctag

SEQ ID NO: 234965 - DNA, 16815 bp, Artificial Sequence
  derived and/or modified sequence
atgaccacccaggcccccaccttcacccagcccctgcagagcgtggtggtgctggagggcagcaccgccaccttcgaggcccacatcagcggcttccccgtgcccgaggtgagctggttcagagacggccaggtgatcagcaccagcaccctgcccggcgtgcagatcagcttcagcgacggcagagccaagctgaccatccccgccgtgaccaaggccaacagcggcagatacagcctgaaggccaccaacggcagcggccaggccaccagcaccgccgagctgctggtgaaggccgagaccgccccccccaacttcgtgcagagactgcagagcatgaccgtgagacagggcagccaggtgagactgcaggtgagagtgaccggcatccccacccccgtggtgaagttctacagagacggcgccgagatccagagcagcctggacttccagatcagccaggagggcgacctgtacagcctgctgatcgccgaggcctaccccgaggacagcggcacctacagcgtgaacgccaccaacagcgtgggcagagccaccagcaccgccgagctgctggtgcagggcgaggaggaggtgcccgccaagaagaccaagaccatcgtgagcaccgcccagatcagcgagagcagacagaccagaatcgagaagaagatcgaggcccacttcgacgccagaagcatcgccaccgtggagatggtgatcgacggcgccgccggccagcagctgccccacaagaccccccccagaatcccccccaagcccaagagcagaagccccaccccccccagcatcgccgccaaggcccagctggccagacagcagagccccagccccatcagacacagccccagccccgtgagacacgtgagagcccccacccccagccccgtgagaagcgtgagccccgccgccagaatcagcaccagccccatcagaagcgtgagaagccccctgctgatgagaaagacccaggccagcaccgtggccaccggccccgaggtgccccccccctggaagcaggagggctacgtggccagcagcagcgaggccgagatgagagagaccaccctgaccaccagcacccagatcagaaccgaggagagatgggagggcagatacggcgtgcaggagcaggtgaccatcagcggcgccgccggcgccgccgccagcgtgagcgccagcgccagctacgccgccgaggccgtggccaccggcgccaaggaggtgaagcaggacgccgacaagagcgccgccgtggccaccgtggtggccgccgtggacatggccagagtgagagagcccgtgatcagcgccgtggagcagaccgcccagagaaccaccaccaccgccgtgcacatccagcccgcccaggagcaggtgagaaaggaggccgagaagaccgccgtgaccaaggtggtggtggccgccgacaaggccaaggagcaggagctgaagagcagaaccaaggaggtgatcaccaccaagcaggagcagatgcacgtgacccacgagcagatcagaaaggagaccgagaagaccttcgtgcccaaggtggtgatcagcgccgccaaggccaaggagcaggagaccagaatcagcgaggagatcaccaagaagcagaagcaggtgacccaggaggccatcagacaggagaccgagatcaccgccgccagcatggtggtggtggccaccgccaagagcaccaagctggagaccgtgcccggcgcccaggaggagaccaccacccagcaggaccagatgcacctgagctacgagaagatcatgaaggagaccagaaagaccgtggtgcccaaggtgatcgtggccacccccaaggtgaaggagcaggacctggtgagcagaggcagagagggcatcaccaccaagagagagcaggtgcagatcacccaggagaagatgagaaaggaggccgagaagaccgccctgagcaccatcgccgtggccaccgccaaggccaaggagcaggagaccatcctgagaaccagagagaccatggccaccagacaggagcagatccaggtgacccacggcaaggtggacgtgggcaagaaggccgaggccgtggccaccgtggtggccgccgtggaccaggccagagtgagagagcccagagagcccggccacctggaggagagctacgcccagcagaccaccctggagtacggctacaaggagagaatcagcgccgccaaggtggccgagcccccccagagacccgccagcgagccccacgtggtgcccaaggccgtgaagcccagagtgatccaggcccccagcgagacccacatcaagaccaccgaccagaagggcatgcacatcagcagccagatcaagaagaccaccgacctgaccaccgagagactggtgcacgtggacaagagacccagaaccgccagcccccacttcaccgtgagcaagatcagcgtgcccaagaccgagcacggctacgaggccagcatcgccggcagcgccatcgccaccctgcagaaggagctgagcgccaccagcagcgcccagaagatcaccaagagcgtgaaggcccccaccgtgaagcccagcgagaccagagtgagagccgagcccacccccctgccccagttccccttcgccgacacccccgacacctacaagagcgaggccggcgtggaggtgaagaaggaggtgggcgtgagcatcaccggcaccaccgtgagagaggagagattcgaggtgctgcacggcagagaggccaaggtgaccgagaccgccagagtgcccgcccccgtggagatccccgtgaccccccccaccctggtgagcggcctgaagaacgtgaccgtgatcgagggcgagagcgtgaccctggagtgccacatcagcggctaccccagccccaccgtgacctggtacagagaggactaccagatcgagagcagcatcgacttccagatcaccttccagagcggcatcgccagactgatgatcagagaggccttcgccgaggacagcggcagattcacctgcagcgccgtgaacgaggccggcaccgtgagcaccagctgctacctggccgtgcaggtgagcgaggagttcgagaaggagaccaccgccgtgaccgagaagttcaccaccgaggagaagagattcgtggagagcagagacgtggtgatgaccgacaccagcctgaccgaggagcaggccggccccggcgagcccgccgccccctacttcatcaccaagcccgtggtgcagaagctggtggagggcggcagcgtggtgttcggctgccaggtgggcggcaaccccaagccccacgtgtactggaagaagagcggcgtgcccctgaccaccggctacagatacaaggtgagctacaacaagcagaccggcgagtgcaagctggtgatcagcatgaccttcgccgacgacgccggcgagtacaccatcgtggtgagaaacaagcacggcgagaccagcgccagcgccagcctgctggaggaggccgactacgagctgctgatgaagagccagcaggagatgctgtaccagacccaggtgaccgccttcgtgcaggagcccaaggtgggcgagaccgcccccggcttcgtgtacagcgagtacgagaaggagtacgagaaggagcaggccctgatcagaaagaagatggccaaggacaccgtggtggtgagaacctacgtggaggaccaggagttccacatcagcagcttcgaggagagactgatcaaggagatcgagtacagaatcatcaagaccaccctggaggagctgctggaggaggacggcgaggagaagatggccgtggacatcagcgagagcgaggccgtggagagcggcttcgacagcagaatcaagaactacagaatcctggagggcatgggcgtgaccttccactgcaagatgagcggctaccccctgcccaagatcgcctggtacaaggacggcaagagaatcaagcacggcgagagataccagatggacttcctgcaggacggcagagccagcctgagaatccccgtggtgctgcccgaggacgagggcatctacaccgccttcgccagcaacatcaagggcaacgccatctgcagcggcaagctgtacgtggagcccgccgcccccctgggcgcccccacctacatccccaccctggagcccgtgagcagaatcagaagcctgagccccagaagcgtgagcagaagccccatcagaatgagccccgccagaatgagccccgccagaatgagccccgccagaatgagccccgccagaatgagccccggcagaagactggaggagaccgacgagagccagctggagagactgtacaagcccgtgttcgtgctgaagcccgtgagcttcaagtgcctggagggccagaccgccagattcgacctgaaggtggtgggcagacccatgcccgagaccttctggttccacgacggccagcagatcgtgaacgactacacccacaaggtggtgatcaaggaggacggcacccagagcctgatcatcgtgcccgccacccccagcgacagcggcgagtggaccgtggtggcccagaacagagccggcagaagcagcatcagcgtgatcctgaccgtggaggccgtggagcaccaggtgaagcccatgttcgtggagaagctgaagaacgtgaacatcaaggagggcagcagactggagatgaaggtgagagccaccggcaaccccaaccccgacatcgtgtggctgaagaacagcgacatcatcgtgccccacaagtaccccaagatcagaatcgagggcaccaagggcgaggccgccctgaagatcgacagcaccgtgagccaggacagcgcctggtacaccgccaccgccatcaacaaggccggcagagacaccaccagatgcaaggtgaacgtggaggtggagttcgccgagcccgagcccgagagaaagctgatcatccccagaggcacctacagagccaaggagatcgccgcccccgagctggagcccctgcacctgagatacggccaggagcagtgggaggagggcgacctgtacgacaaggagaagcagcagaagcccttcttcaagaagaagctgaccagcctgagactgaagagattcggccccgcccacttcgagtgcagactgacccccatcggcgaccccaccatggtggtggagtggctgcacgacggcaagcccctggaggccgccaacagactgagaatgatcaacgagttcggctactgcagcctggactacggcgtggcctacagcagagacagcggcatcatcacctgcagagccaccaacaagtacggcaccgaccacaccagcgccaccctgatcgtgaaggacgagaagagcctggtggaggagagccagctgcccgagggcagaaagggcctgcagagaatcgaggagctggagagaatggcccacgagggcgccctgaccggcgtgaccaccgaccagaaggagaagcagaagcccgacatcgtgctgtaccccgagcccgtgagagtgctggagggcgagaccgccagattcagatgcagagtgaccggctacccccagcccaaggtgaactggtacctgaacggccagctgatcagaaagagcaagagattcagagtgagatacgacggcatccactacctggacatcgtggactgcaagagctacgacaccggcgaggtgaaggtgaccgccgagaaccccgagggcgtgatcgagcacaaggtgaagctggagatccagcagagagaggacttcagaagcgtgctgagaagagcccccgagcccagacccgagttccacgtgcacgagcccggcaagctgcagttcgaggtgcagaaggtggacagacccgtggacaccaccgagaccaaggaggtggtgaagctgaagagagccgagagaatcacccacgagaaggtgcccgaggagagcgaggagctgagaagcaagttcaagagaagaaccgaggagggctactacgaggccatcaccgccgtggagctgaagagcagaaagaaggacgagagctacgaggagctgctgagaaagaccaaggacgagctgctgcactggaccaaggagctgaccgaggaggagaagaaggccctggccgaggagggcaagatcaccatccccaccttcaagcccgacaagatcgagctgagccccagcatggaggcccccaagatcttcgagagaatccagagccagaccgtgggccagggcagcgacgcccacttcagagtgagagtggtgggcaagcccgaccccgagtgcgagtggtacaagaacggcgtgaagatcgagagaagcgacagaatctactggtactggcccgaggacaacgtgtgcgagctggtgatcagagacgtgaccgccgaggacagcgccagcatcatggtgaaggccatcaacatcgccggcgagaccagcagccacgccttcctgctggtgcaggccaagcagctgatcaccttcacccaggagctgcaggacgtggtggccaaggagaaggacaccatggccaccttcgagtgcgagaccagcgagcccttcgtgaaggtgaagtggtacaaggacggcatggaggtgcacgagggcgacaagtacagaatgcacagcgacagaaaggtgcacttcctgagcatcctgaccatcgacaccagcgacgccgaggactacagctgcgtgctggtggaggacgagaacgtgaagaccaccgccaagctgatcgtggagggcgccgtggtggagttcgtgaaggagctgcaggacatcgaggtgcccgagagctacagcggcgagctggagtgcatcgtgagccccgagaacatcgagggcaagtggtaccacaacgacgtggagctgaagagcaacggcaagtacaccatcaccagcagaagaggcagacagaacctgaccgtgaaggacgtgaccaaggaggaccagggcgagtacagcttcgtgatcgacggcaagaagaccacctgcaagctgaagatgaagcccagacccatcgccatcctgcagggcctgagcgaccagaaggtgtgcgagggcgacatcgtgcagctggaggtgaaggtgagcctggagagcgtggagggcgtgtggatgaaggacggccaggaggtgcagcccagcgacagagtgcacatcgtgatcgacaagcagagccacatgctgctgatcgaggacatgaccaaggaggacgccggcaactacagcttcaccatccccgccctgggcctgagcaccagcggcagagtgagcgtgtacagcgtggacgtgatcacccccctgaaggacgtgaacgtgatcgagggcaccaaggccgtgctggagtgcaaggtgagcgtgcccgacgtgaccagcgtgaagtggtacctgaacgacgagcagatcaagcccgacgacagagtgcaggccatcgtgaagggcaccaagcagagactggtgatcaacagaacccacgccagcgacgagggcccctacaagctgatcgtgggcagagtggagaccaactgcaacctgagcgtggagaagatcaagatcatcagaggcctgagagacctgacctgcaccgagacccagaacgtggtgttcgaggtggagctgagccacagcggcatcgacgtgctgtggaacttcaaggacaaggagatcaagcccagcagcaagtacaagatcgaggcccacggcaagatctacaagctgaccgtgctgaacatgatgaaggacgacgagggcaagtacaccttctacgccggcgagaacatgaccagcggcaagctgaccgtggccggcggcgccatcagcaagcccctgaccgaccagaccgtggccgagagccaggaggccgtgttcgagtgcgaggtggccaaccccgacagcaagggcgagtggctgagagacggcaagcacctgcccctgaccaacaacatcagaagcgagagcgacggccacaagagaagactgatcatcgccgccaccaagctggacgacatcggcgagtacacctacaaggtggccaccagcaagaccagcgccaagctgaaggtggaggccgtgaagatcaagaagaccctgaagaacctgaccgtgaccgagacccaggacgccgtgttcaccgtggagctgacccaccccaacgtgaagggcgtgcagtggatcaagaacggcgtggtgctggagagcaacgagaagtacgccatcagcgtgaagggcaccatctacagcctgagaatcaagaactgcgccatcgtggacgagagcgtgtacggcttcagactgggcagactgggcgccagcgccagactgcacgtggagaccgtgaagatcatcaagaagcccaaggacgtgaccgccctggagaacgccaccgtggccttcgaggtgagcgtgagccacgacaccgtgcccgtgaagtggttccacaagagcgtggagatcaagcccagcgacaagcacagactggtgagcgagagaaaggtgcacaagctgatgctgcagaacatcagccccagcgacgccggcgagtacaccgccgtggtgggccagctggagtgcaaggccaagctgttcgtggagaccctgcacatcaccaagaccatgaagaacatcgaggtgcccgagaccaagaccgccagcttcgagtgcgaggtgagccacttcaacgtgcccagcatgtggctgaagaacggcgtggagatcgagatgagcgagaagttcaagatcgtggtgcagggcaagctgcaccagctgatcatcatgaacaccagcaccgaggacagcgccgagtacaccttcgtgtgcggcaacgaccaggtgagcgccaccctgaccgtgacccccatcatgatcaccagcatgctgaaggacatcaacgccgaggagaaggacaccatcaccttcgaggtgaccgtgaactacgagggcatcagctacaagtggctgaagaacggcgtggagatcaagagcaccgacaagtgccagatgagaaccaagaagctgacccacagcctgaacatcagaaacgtgcacttcggcgacgccgccgactacaccttcgtggccggcaaggccaccagcaccgccaccctgtacgtggaggccagacacatcgagttcagaaagcacatcaaggacatcaaggtgctggagaagaagagagccatgttcgagtgcgaggtgagcgagcccgacatcaccgtgcagtggatgaaggacgaccaggagctgcagatcaccgacagaatcaagatccagaaggagaagtacgtgcacagactgctgatccccagcaccagaatgagcgacgccggcaagtacaccgtggtggccggcggcaacgtgagcaccgccaagctgttcgtggagggcagagacgtgagaatcagaagcatcaagaaggaggtgcaggtgatcgagaagcagagagccgtggtggagttcgaggtgaacgaggacgacgtggacgcccactggtacaaggacggcatcgagatcaacttccaggtgcaggagagacacaagtacgtggtggagagaagaatccacagaatgttcatcagcgagaccagacagagcgacgccggcgagtacaccttcgtggccggcagaaacagaagcagcgtgaccctgtacgtgaacgcccccgagcccccccaggtgctgcaggagctgcagcccgtgaccgtgcagagcggcaagcccgccagattctgcgccgtgatcagcggcagaccccagcccaagatcagctggtacaaggaggagcagctgctgagcaccggcttcaagtgcaagttcctgcacgacggccaggagtacaccctgctgctgatcgaggccttccccgaggacgccgccgtgtacacctgcgaggccaagaacgactacggcgtggccaccaccagcgccagcctgagcgtggaggtgcccgaggtggtgagccccgaccaggagatgcccgtgtacccccccgccatcatcacccccctgcaggacaccgtgaccagcgagggccagcccgccagattccagtgcagagtgagcggcaccgacctgaaggtgagctggtacagcaaggacaagaagatcaagcccagcagattcttcagaatgacccagttcgaggacacctaccagctggagatcgccgaggcctaccccgaggacgagggcacctacaccttcgtggccagcaacgccgtgggccaggtgagcagcaccgccaacctgagcctggaggcccccgagagcatcctgcacgagagaatcgagcaggagatcgagatggagatgaaggagctgttcagcgagggcgagagcgagcacagcgagagagacaccagagacgccttcagcgacagcgaggacatcgaccacaagagcatggccgccaagagatacgccagcagaatcagcagcaccagcagctggcccgagtacttcaagcccagcttcacccagaagctgaccttcaagtacgtgctggagggcgagcccgtggtgttcacctgcagactgatcgcctgccccacccccgagatgacctggttccacaacaacagacccatccccaccggcctgagaagaatcatcaaggccgagagcgacctgcaccaccacagcagcagcctggagatcaagagagtgcaggacagagacagcggcagctacagactgctggccatcaacagcgagggcagcgccgagagcaccgccagcctgctggtgatccagaagggccaggacgagaagtacctggagttcctgaagagagccgagagaacccacgagaacgtggaggccctggtggagagaggcgaggacagaatcaaggtggacctgagattcaccggcagccccttcaacaagaagcaggacgtggagcagaagggcatgatgagaaccatccacttcaagaccatgagcagcgccaagaagaccgactacatgtacgacgaggagtacctggagagcaagagcgacatcagaggctggctgaacgtgggcgagagcttcctggacaaggagaccaaggtgaagctgcagagactgagagaggccagaaagaccctgatggagaagaagaagctgagcctgctggacaccagcagcgagatcagcagcagaaccctgagaagcgaggccagcgacaaggacatcctgttcagcagagaggacatgaagatcagaagcatgagcgacctggccgagagctacaaggtggaccacagcgccgagagcatcgtgcagaacccccacgccctgagcaaccagatggaccagaacatcgagagcgaggagctgcccaccagcttccagaccatcgtggacgaggagatcttccagaccgagatcagaatgagccaggaggccctggtgaaggagagcctgcccaaggaccacctgtacggcgagatcctggtgaacgagaacacccaggccagaggccagctggaggagatcatggccaacaccaccatcggcgagagcagcacctacatcaccaacgtgtgcgagaaggaggaggtgtacgagacccccgagaacgtgagccaggccatcaccccccacgccagcgagagcttcggcaccctggtgaacgtggaggagagcgaggagatcgccagcgagagaatcaagaaggacgacctgagagagctgcagctgagcgccagcaccagaatcgacgagttcaagaccgagcagaaggaggagaacatgagattcttcgagaacagcttcagaaagagaccccagagatgcccccccagcttcctgcaggagatcgagagccaggaggtgtacgagggcgacagctgcaacttcgtgtgccacttccagggctacccccagcccatcgtgacctggtacaacaacgacatgcccatccccagaaaccagaacttcatcatccacagcctggagaactacagcatcctgaccctgagcagcgtgcaccaccagaacgagggcagcatcacctgcgtgctgttcaaccagtacggcaccgtgaagaccaccagcatgctgaaggtgaaggccaagcagaagcacgacgtgaaggcccacaaggtgcccgtgttccacgactacctggacgaggaggaggagctggccctggtgttcgaccaggccaagggcgcccaccccagcatgagccaggagggccagaccaacctgcacctgctgaagaccaacccccccgtgccccccagcggcgacaccgagctgctgagcttccccgtggagatccaggtgaccgccgccacccccatccccgagcaggacaaggagagcaaggaggtgttccagaccgaggagctggagcccaaggccatgccccaggaccaggtgacccagagccccaagcacagattcgtgttcctgagcgacatcaccaacgagccccccaagatgctgcaggagatgcccaagcacgccagatgcagagagggcgacagcatcatcctggagtgcctgatcagcggcgagccccagcccgtggtgacctggttccagaacggcgtgctgctgaagcagaaccagaagttccagttcgaggaggtgaactgcagccaccagctgtacatcaaggacgtgaacagccaggacagcggcaagtacaagtgcgtggccgagaacaacagcggcgccgtggagagcgtgagcgacctgaccgtggagcccgtgacctacagagagaacagccagttcgagaacatcggcgagatctacggcaagtacagcagagaccagcagctgcaggaccagggcgagagcgtgagagcccacttctacgactaccccgccggccccttcaccccctggaccaacgtgaaggagtacagcgtgagagactacttccagagcctggagaccatcgagcagatcgaccagaaggagcaggtgagatgcatccccagcagagagaagatccccagattcgtgcacggcgccagcagaaccatcaagatcagcaagcccatcagagccgagttcatccagtgccaggccgagggcaaggagagacacgtgagcgagaagagcaagctgcaccaggccgagggcaccgtgtaccccttcgtggacgacttcagcgacgtgaccatcaagaaggagatcagaaacaacttcggcaagctgggcagaagcgagaaggagaacgtgcaggagtgcgcccagagcgactacctgcccaacatccacagcgagagaatcagcgacagctacaacaccaaggacagcagcgccatcgtgtacgaggagagcctgggcgaggagatccactaccccggcaagaaggtgaagcacagaatcatcgagttcgagaagctgcacgtggagaagggcgtgctggagaagagacccaccagaaccagcatcgtgaaccccccccagaagaagatcgacgacaaggccttcagcctgaagcagagagagagcagaagcagcaacctgaacgccaacatgtaccaggccgagaagatgagccccaacaccgagagcgacagcagcaacatcgccatcaacctgaagctgctgagcagccagacccacaaggagttcgacgcccaggagagagagcagcaggagaagatcagcctgatcgacaagcccgccatcagcaagagagccgagcacgagagccccatcaccttcgacctgaagcagttccacacccagatcaagcacaccgacgtgaagttccaggagctggacagcggccagcccgaggaggcctacttcaagatccagcaccccgccgacaccgagaacatcgtgttcgacctgaagcagatgtacagccacatcggcgaccccgccctggagttccagggccaggagaccagagagcagcaggagatccactacaaggagaagatccccagccccgagaccctgcagcccgacacccacaacatcagcaagagcgtgcagaacaacgtgttcgccagccaggagatcagcagcagccaggagctgagcaacagaaccatggtggagaagagcagcatcgacgagaacagcatcagcctggagaaggaggtgagacacgtgcaggagcagaacctggacatcctgaagaccgacctgagcctgaagagcttcagcgaggagatctacagcgagagctgcgccctgctgcccaccagcagcgccgacatcgaggagaccgacctgagcgagaagagctgccccctggagaacggcggcagaagcagcatcagccacctgaagaaggccgccagcgaggagaagcccctgggcgtgggcgagatggaggaggagtgcaccctggagcccgagctggccgccttccccaagcaggacggcggcacccaggagtacaccgacgccaccctggaggaccacagaggcgacgtgcaggaggccgacaccctgcacagacagctgagcctgagccagtgcttccccctgctgatgaccgaggagcagcagaaccccggcgagcagatcagcaccaacatccacgccagcggcgaggagaagtgctacgaggaggtgcaggtgcagaacgaggccagcttcagcaccctggagggcgagatgatcgagaccagcttcagccagaacatccccaagctggacgaggcccacaccaccgaggccgccgagagcgagaccagcctgacccagtacctgctggccgccggcaagagagaggtgcccgagaccaaggacaccagagaccaggccaagctggtgcagagcgagagcatcaccagcatggaggtggaggaggtgaccttcaacaccgtgtacgagtactacaaccagaagcaggagagcctgggcagacccctgagccccgagagcgacatcagcatcggcgtgggcagcaccaccagcgaggagatcagcgagctggaccagttctacaccccccccagcagcgtggagtacttcgagagccccaagagccccgacctgtacttcaaccccagcgacatcaccaagcagagcagcatccacagcggcggcgagaccgtggagagatacagcacccccctgggcgaggtggccgagagatacagcacccccagcgagggcgaggtgggcgagagatacagcaccccccccggcgagaccctggagagatacagcaccccccccggcgagaccctggagagatacagcaccccccccggcgagaccctggagagatacagcaccccccccggcgagaccctggagagatacagcaccccccccggcgagaccctggagagatacagcaccccccccggcgaggccctggagagatacagcatccccaccggcggccccaaccccaccggcaccttcaagacctaccccagcaagatcgagagagaggacggcacccccaacgagcacttctacacccccaccgaggagagaggcagcgcctacgagatctggagaagcgacagcttcggcacccccaacgaggccatcgagcccaaggacaacgagatgccccccagcttcatcgagcccctgaccaagagaaaggtgtacgagaacaccaccctgggcttcatcgtggaggtggagggcctgcccgtgcccggcgtgaagtggtacagaaacaagagcctgctggagcccgacgagagaatcaagatggagagagtgggcaacgtgtgcagcctggagatcagcaacatccagaagggcgagggcggcgagtacatgtgccacgccgtgaacatcatcggcgaggccaagagcttcgccaacgtggacatcatgccccaggaggagagagtggtggccctgcccccccccgtgacccaccagcacgtgatggagttcgacctggagcacaccaccagcagcagaacccccagcccccaggagatcgtgctggaggtggagctgagcgagaaggacgtgaaggagttcgagaagcaggtgaagatcgtgaccgtgcccgagttcacccccgaccacaagagcatgatcgtgagcctggacgtgctgcccttcaacttcgtggaccccaacatggacagcagagagggcgaggacaaggagctgaagatcgacctggaggtgttcgagatgccccccagattcatcatgcccatctgcgacttcaagatccccgagaacagcgacgccgtgttcaagtgcagcgtgatcggcatccccacccccgaggtgaagtggtacaaggagtacatgtgcatcgagcccgacaacatcaagtacgtgatcagcgaggagaagggcagccacaccctgaagatcagaaacgtgtgcctgagcgacagcgccacctacagatgcagagccgtgaactgcgtgggcgaggccatctgcagaggcttcctgaccatgggcgacagcgagatcttcgccgtgatcgccaagaagagcaaggtgaccctgagcagcctgatggaggagctggtgctgaagagcaactacaccgacagcttcttcgagttccaggtggtggagggcccccccagattcatcaagggcatcagcgactgctacgcccccatcggcaccgccgcctacttccagtgcctggtgagaggcagccccagacccaccgtgtactggtacaaggacggcaagctggtgcagggcagaagattcaccgtggaggagagcggcaccggcttccacaacctgttcatcaccagcctggtgaagagcgacgagggcgagtacagatgcgtggccaccaacaagagcggcatggccgagagcttcgccgccctgaccctgacctag

SEQ ID NO: 234966 - DNA, 2658 bp, Artificial Sequence
  derived and/or modified sequence
atggtggaaaagtcttctattgacgagaattcaatttctctggaaaaggaggtgcggcacgtccaagaacaaaacttggacatcctgaagaccgatctatctctcaaaagctttagcgaggagatttactctgagtcttgcgcgctgcttcctacttcaagcgccgatattgaagaaactgatctgtccgagaaatcctgtcctttggagaacggcggacgaagtagcatcagtcacctgaagaaagctgccagcgaggagaagccgctgggagtgggcgagatggaggaggagtgtacactggaaccggaattagctgcttttccgaagcaggatggcgggactcaggaatatacggatgccacactggaagaccaccgcggcgacgtgcaggaagccgatacactgcatagacaacttagcctctctcagtgttttcccctgttgatgaccgaagagcagcagaatccgggagaacaaatctcgactaatattcacgctagcggcgaagagaagtgttatgaggaagttcaagtgcagaatgaggcatcatttagcaccctggaaggggaaatgatcgaaacttcattctcccagaacattcccaagttggatgaggctcacaccacagaggccgccgagtctgaaacaagcttaacacagtatctgctcgctgctggcaaaagggaagtgcctgagactaaggataccagggatcaggcgaagttggtgcaaagcgagtcaattacttcaatggaggttgaagaggttacctttaatactgtgtacgaatactataaccagaagcaggaatcactcggcagaccactaagtcccgaatccgatataagcattggcgtgggctcaaccacctccgaggaaattagtgaactagaccagttttacacaccaccgtccagcgtggaatatttcgaaagtcccaagtcccccgacctgtatttcaacccatcagacattactaagcagagcagcatacattcagggggcgaaacagtcgaaaggtactcgaccccccttggcgaggtcgcagagcggtactccaccccctcagagggggaggtgggagagagatacagcaccccgcctggggaaaccttggagaggtattctacacccccaggggagacactcgagcggtacagtactcccccaggagaggctcttgaacgctacagcatccccactggggggcctaaccccacggggactttcaaaacctacccttccaagatcgaacgagaggacggtacacctaatgagcatttttacacccccaccgaggaacgcggcagtgcatacgaaatctggcgaagcgactcttttggcacccctaacgaagctattgaaccaaaggacaatgagatgcctccgtcgtttatcgagcccttaactaagcgcaaagtttatgagaacactaccctgggcttcatcgttgaggtggagggattaccggtcccaggggtcaaatggtataggaataaatccctattggagcccgacgaaagaatcaaaatggagagggtggggaatgtttgctcgctggagatatctaacattcagaaaggggaagggggagagtacatgtgccacgctgtgaacattataggcgaggcgaagtcttttgccaacgtggacataatgccacaggaggaacgcgtcgtagccctgccaccacccgtcacccaccagcatgtaatggagttcgacctggagcatactacttctagtaggaccccaagcccacaagaaatcgtcctggaggtggaactgtcagagaaggatgtaaaagaatttgaaaaacaggttaagattgtgaccgtgcccgagtttactccagatcacaagtctatgattgtcagtttagatgtgcttcccttcaattttgtcgacccaaacatggactccagggaaggagaggataaggagcttaagatcgatctggaggtttttgagatgcctccacgcttcatcatgcccatttgtgatttcaagattcccgagaattccgacgcggtcttcaaatgttctgtcatcggaattcccacgcccgaggtgaagtggtataaggaatacatgtgcatcgagcctgacaacataaaatacgtaatttcagaagagaaggggtcccatacgctcaaaatccggaatgtgtgtctgagcgacagcgccacgtacaggtgtagggccgtgaactgcgtgggggaagcgatttgtagaggctttttgacaatgggagatagcgagattttcgccgtcatcgccaagaaatccaaggttactctgtctagcctgatggaagagctggtactgaaatcaaactacactgatagtttcttcgaattccaagtcgtggagggccctcctcggtttataaaagggatttccgactgctatgcacctatagggacagccgcatacttccaatgtctggtgcggggatccccacgcccaacagtgtactggtacaaggacggtaaacttgtacagggacgtcgatttacggtggaagaatcagggactgggttccacaatttgtttatcacaagcctggtaaagtcagatgagggcgaataccggtgcgtggccaccaacaagagtggcatggccgagtcgttcgccgctttgactttgacctag

SEQ ID NO: 234967 - DNA, 16815 bp, Artificial Sequence
  derived and/or modified sequence
atgactacacaggctcccacatttacacagcccctacagtctgtggtcgtcttggaaggcagcacagccactttcgaagctcacatttctggcttcccagtaccggaggtgtcctggtttcgagatggacaggtcatatccacctcgactctgccaggcgtccaaatatctttttccgatggacgggcaaaactgaccatcccggccgtgaccaaagctaactcaggccggtattcgctgaaggcgacaaacggatcaggacaggccacttcgaccgcggagctcctggtcaaagccgaaacagctccacctaacttcgttcagcgcttgcagtcaatgaccgtaaggcagggctcacaagtccgtcttcaggtcagagtcactggaattccaacaccagtggtcaagttctaccgggatggcgccgagatccagagttctctagactttcagatctcccaggagggagacttgtacagcctgctcatcgcagaagcctatccggaggactctgggacctactccgtgaatgcaaccaattcggtcggtcgggccacttctactgctgagttgctagtgcagggagaggaagaagtacctgccaagaagacgaaaacgatagttagcacagcacagatctcagagagccgacagactaggattgagaaaaagattgaggcacactttgatgcaagaagtattgcaaccgttgagatggtaatcgacggagctgccggtcagcaactccctcacaaaacaccccctcgcatccctcccaagccgaaaagccgctcacccacccctccctccatcgcagctaaggcccaactggcccgtcagcagtccccatcccccatcagacacagccctagtccagtacgtcacgtgagagctcctaccccgagccctgtgcgaagcgtgtcccctgccgcacgcatctccacttctcccattcgcagcgtcaggtcacccctcctgatgaggaagacgcaagctagcacagtggccactggaccagaggtgcctcccccatggaaacaggaagggtatgtggccagcagtagcgaagctgagatgagggagaccacactgacgacctccactcagatccgcacggaagagaggtgggaaggtcgctatggggtccaagagcaagtgacaatcagtggagctgcaggggccgctgcaagtgtctcggcttccgcctcttatgcagcagaagcagtggcaaccggcgccaaagaagtgaagcaggacgccgacaagagtgccgctgtggccaccgtcgttgcagcagtggacatggcacgggtaagagagcctgtcatcagcgcagtggagcagactgcccagcgtaccacgaccactgctgtgcacatccagcctgcccaggaacaggtgagaaaggaggcagagaaaaccgccgtgaccaaggtggtcgttgccgccgataaggctaaagagcaagagctgaaatcacgaaccaaagaagtcataacgacaaaacaggaacagatgcatgtcacacacgaacaaatccggaaagagacggagaagacgtttgtccccaaggtcgtaatatcagccgccaaggctaaagagcaggagacaagaatttctgaggaaattactaagaaacagaaacaggtcacgcaggaagcaatacggcaggaaaccgagattacggccgcatcgatggtcgttgttgcgacggccaagtccactaaacttgaaacggtgcccggcgcacaagaggagactacaactcagcaagatcagatgcacctcagttacgagaagattatgaaagagaccaggaagactgtggtgcccaaagtgattgtggccaccccgaaagtgaaggaacaggacctggtatcaaggggcagagaaggaatcaccacaaagcgcgagcaggtacagattacccaggagaaaatgcgcaaggaagcggagaagacggccctctcaactatcgctgttgccaccgcaaaggccaaggagcaggagaccattttgagaacgagagagaccatggcaacacgacaggagcagatccaggttacacacggaaaggtggacgtcggcaagaaagcagaggcggtggctaccgtggttgcggccgttgaccaggctcgtgtaagggaacctagggaacctggccatctggaggagtcctatgcccagcagaccacactggagtatggatacaaagagcgcatcagtgctgctaaggtggctgaaccaccgcagcgacccgcatcagaaccacacgtggttccaaaggcagttaaacccagagtgattcaggccccatctgagacccacatcaaaacaactgaccagaaagggatgcacatttcgtcccagatcaagaaaaccaccgatctgaccacagagcgattagtccacgttgataaacggccacgcaccgcctccccacatttcacagtttccaaaatctctgtgccaaaaaccgagcatgggtacgaagcatccattgctggctctgcaatcgcaaccctccagaaggaactgtccgctacctcaagcgcgcagaagatcaccaaaagtgtgaaagcacctacggtgaaaccctccgagacgcgcgttagagccgaacctactcccctgccacagttcccctttgccgatacaccggacacatataagagtgaggccggggttgaagtgaagaaagaggtgggcgttagtattaccggcacaaccgtcagggaagagagattcgaagtgcttcatgggcgcgaagccaaggtgactgaaaccgcaagagtccccgcccctgtggaaatcccagtcactccacccactttggtctccggcttgaagaatgtgacagttatcgagggggaatctgtgactctggagtgccatatctcaggctatccatccccaacagtgacctggtatcgggaagattaccagattgagtctagtatcgacttccagataactttccagtcaggaatcgcgagattgatgataagagaagcattcgctgaggattctggtagattcacttgttctgccgtcaacgaggccggaaccgtatctacatcctgttacctggccgtgcaggtgtcagaggaatttgagaaggaaactacggcagtgacagagaagtttacaacggaggagaaaagatttgtggaatccagagacgtggtcatgacagatacctctctcactgaggagcaggcaggcccaggcgaaccagccgccccttattttataacgaagcccgtggtgcagaagctggtggaggggggaagcgtagtctttggatgccaggtgggagggaaccccaagccccacgtttactggaaaaagtccggggttcctcttaccactggatataggtacaaagtcagctacaacaaacagacaggtgagtgtaaattagtgatttcaatgacattcgctgacgatgccggggagtacaccattgtcgtgcgcaataaacacggagaaacctcggcgtccgcatccctgctggaagaggcagattatgaactcctgatgaagagccagcaggagatgttgtaccagacccaggttaccgcctttgtgcaggagccaaaggttggggagacggcaccaggcttcgtgtactctgaatacgagaaggaatatgagaaggaacaggcactgatcagaaagaaaatggccaaagacactgtcgtggtgaggacatatgtagaggatcaggagtttcacatctcgtcatttgaagagaggcttattaaagagatagagtaccggatcatcaagactacactggaagagttgctggaggaggacggcgaggaaaaaatggcggtggatatttccgaatctgaagccgtcgaatctgggttcgatagccgcatcaagaactacagaattctggaaggcatgggtgtaacattccattgtaaaatgtccgggtacccactgcctaaaatcgcctggtataaagatgggaaaagaatcaagcacggcgaacggtaccagatggactttcttcaggacggacgtgccagtctgcggattcctgttgtgttaccggaagatgagggtatctacacagcttttgccagcaatatcaaaggaaatgccatctgcagcggcaagctgtacgtggagccagctgccccgcttggcgctcctacctacattccgacattggagcctgtaagccgtattcgatcactgtctcccaggagtgtttcacgtagcccaatccgaatgagccccgcccgaatgtctccggccaggatgagtcccgccaggatgagtccggcacgtatgagccctggcaggaggctcgaagaaaccgacgagtcccaactggagcgcctgtataaacccgtgtttgtgctgaagcctgtgagctttaaatgtctcgagggccaaaccgctagattcgatttaaaagtggtgggacggcctatgcccgaaacattttggttccacgacgggcagcagattgttaacgattacacccataaagtagtcataaaagaggacggaacacaaagcttgatcatagtgcctgctactccctccgattctggtgaatggaccgttgtggcccagaaccgggccggtcgcagttcaatctcggtcatactcaccgttgaagctgtagaacatcaagtgaaacccatgttcgtagaaaagctaaagaatgtgaatattaaggagggtagtcgcttagagatgaaggtgagagcaaccggaaaccccaaccccgatatcgtgtggctgaagaacagcgacattattgtgcctcataaatacccaaagatcagaattgaaggtacaaaaggcgaagctgcattgaagatcgattctaccgtgagccaggatagcgcatggtacaccgccacggccattaacaaggctgggagagacactactagatgtaaggttaacgtggaggtagagttcgctgaaccggaaccggaacggaagttgattatcccgcgggggacctacagggccaaggagattgctgctccagaattagagcccctccacctgagatacggacaggaacagtgggaagagggagacctgtacgacaaggagaaacagcagaagcctttcttcaagaagaagctcacaagtcttcggttgaagagatttggtcctgcccacttcgagtgcaggttgacacccatcggcgaccccacaatggtggttgaatggctccacgatggcaaacccctggaagcggcaaatagattgaggatgataaatgaatttggctactgcagcctggactatggcgtcgcgtattctagagactccgggattataacttgcagggccactaataaatatgggacggaccatacttctgccacactaatcgtgaaagatgaaaagtccctggttgaggagagtcagctgcctgaaggcagaaaaggactgcagagaatcgaggagctggaacgtatggcccatgagggagccttaacaggggttacgacagatcagaaagagaagcagaagcccgatattgtgctttatcctgagcctgttagggtgctggagggcgaaactgctaggttcaggtgtcgggttacaggatacccccaacctaaggtgaattggtacctgaacggccaattgataagaaagtcgaagcgatttcgggtgagatacgacggtatccattatctcgacattgttgactgtaagagctacgatacaggtgaagtcaaagttaccgctgaaaacccggaaggcgtcattgagcacaaagtcaaattggagatccaacaacgcgaagatttccgatcggtgctgagacgggctcctgagcccagaccggaattccatgttcatgagcccggcaagttacagttcgaagtgcaaaaagtggacagaccggtcgataccactgaaaccaaggaggtcgtcaagctaaaacgcgccgagcgcatcactcatgagaaagtgcctgaggagagtgaagaactgcgctccaagtttaaacgccgaacagaagaggggtactacgaggcaattaccgccgtggagctcaaatcccgcaagaaggacgaatcttacgaggaactactgcgcaaaaccaaggacgaactgttgcactggacaaaagaattaactgaggaggagaagaaagcactggccgaggagggcaaaattaccatccctacgtttaagcctgacaagattgaactcagccccagcatggaggcccctaaaatttttgaaagaatacaatctcagacagtggggcaaggctccgatgcgcacttccgggttagagtggtgggaaagccggatcctgaatgtgagtggtacaagaatggtgtcaagatagaaaggtctgaccggatttattggtactggcctgaggataatgtctgcgaactcgtaatacgggatgttacggccgaggattctgcaagtattatggtcaaggcaataaatattgctggtgagaccagctctcacgcatttctgctggtacaggctaagcagctgatcacattcacccaagagctgcaggacgtagtcgcaaaagagaaggacaccatggccacctttgaatgcgagacctcagagccgtttgtaaaggtgaaatggtacaaggatggcatggaagtacacgagggcgacaagtaccgaatgcactcagatcgtaaggtacacttccttagcattcttactatcgacacctctgacgcggaagattatagctgcgtactggtggaggatgagaacgtaaagaccacagctaagctgatcgttgagggcgccgttgtcgagttcgtgaaggagctgcaagacattgaggtgcctgagtcctattctggagagctggaatgcatcgtctctcccgaaaacatcgaaggaaagtggtaccacaatgacgtcgagttgaagtccaatggaaagtacaccatcacatcaagacggggaaggcagaacctcactgtgaaagacgttactaaggaagatcagggagagtattcctttgtcattgacggcaagaagaccacctgcaagctgaagatgaagcctagacctattgctatactgcagggtctgagtgaccagaaggtgtgtgagggcgatatcgtgcaattggaggtaaaagtgtcactcgaatccgtagagggagtttggatgaaagacggtcaggaggtccagccaagtgaccgcgtccatattgtgatagacaagcagagtcacatgttactaatcgaagacatgactaaagaagatgctgggaattactcattcactataccggctctcggtctgagcacctctgggcgcgtttcagtttacagcgtggatgtgatcactcccctgaaagatgttaacgtcatcgaagggacgaaggccgtactggagtgcaaggtctccgtacccgacgtgaccagcgtgaaatggtacctgaatgatgagcaaattaaacccgatgacagagtgcaggctattgtgaagggaaccaaacagcgcctggtcatcaatcgaactcacgcttctgacgaaggtccgtataagctgattgtgggtcgcgtggaaacaaactgcaatttgtccgtagaaaagattaaaattatacggggcctgagggatctcacttgtactgaaacccagaatgtggtatttgaggtcgaactgagccattctggcatcgacgtcctgtggaacttcaaagacaaagagatcaagccatcttcaaaatacaaaattgaagctcatggaaaaatctataagctgactgtactcaacatgatgaaggatgatgaaggtaagtacactttttacgccggcgagaacatgacctcgggcaaactgaccgtagcaggaggcgccatcagtaagcctcttaccgatcagactgtggcagagagtcaggaagcagtgttcgagtgcgaggtggcaaaccccgatagtaagggtgaatggctgcgagacgggaaacacctccctctgaccaataatataaggtctgagtccgatgggcacaagagacgactgataattgctgccaccaagcttgatgatataggcgagtacacctacaaggttgcaacatccaaaaccagcgcaaagttgaaagttgaagccgtcaagatcaagaagacattaaaaaacctgaccgtgaccgaaacccaagacgcagtatttacagtcgaactcactcaccccaatgtgaagggtgtgcagtggattaagaacggtgttgtcctcgaatccaatgaaaaatacgctattagcgttaaggggacaatttatagtctaaggattaaaaactgtgcgatcgtggatgaatctgtttatggattcagactcgggcggttgggagccagcgctcgcctgcatgttgaaacagtgaaaatcattaagaagcctaaagatgtgaccgcgctggagaacgccacagtagctttcgaagtgtccgtctcccatgacacggttcctgttaaatggttccataagagcgtggaaatcaaaccctccgataagcatagactcgtgagcgaaagaaaggtgcataaactcatgctgcagaatatctctccgagcgatgcaggagagtacaccgccgttgttggacagcttgagtgcaaggctaaactgtttgtcgagaccctccacattaccaagactatgaaaaacatcgaggttcccgagaccaagaccgcctctttcgagtgcgaagtgagtcattttaatgtccctagtatgtggcttaagaacggcgtggaaattgagatgtccgagaagttcaaaatcgtcgttcagggaaaacttcaccagctcattatcatgaatacgagcacagaagactcagccgagtatactttcgtgtgcggcaacgaccaggtctcggcaacactgaccgttacaccgattatgatcacatcgatgctgaaggatatcaacgcagaggaaaaagacacaattactttcgaagtgaccgtcaactatgaaggcatttcatacaaatggttgaagaacggtgtggaaattaagagtacagataagtgtcagatgaggactaagaaattgacgcattcactgaacattcggaacgtgcacttcggggatgccgccgattacactttcgtggcgggaaaggcaactagcactgctactctttacgttgaagctaggcacatcgagtttcgaaagcatatcaaggacatcaaggtgctcgagaagaaacgcgcaatgttcgagtgcgaggtgtccgaacccgacatcacagtgcaatggatgaaagatgaccaagagctacagatcactgatcgaatcaaaatacagaaggagaagtacgtccatcgactgctgattccctccacaaggatgtctgacgccggcaaatacactgtcgttgccggtgggaatgtgagcacagccaagttatttgtggagggccgtgatgttcgcataagatccattaagaaggaagtacaggtgattgaaaagcagcgagccgttgtcgaatttgaagtcaatgaagacgacgttgatgcacattggtacaaggacggcattgagatcaattttcaggtgcaagagcggcataagtacgtggtggagcggcgcatacaccgcatgttcatttccgagacgagacaatctgacgcaggcgaatatactttcgtggctgggcgcaaccgcagctctgtcacactgtacgtgaacgcgcccgagcctcctcaagtcctgcaggagctgcagcccgtaactgtgcagagcggtaaaccagcgagattctgtgctgtcataagcggccgaccccaaccgaagatctcctggtacaaggaagagcaactcctgagcacaggattcaaatgtaagttcttacacgacgggcaggaatacacactgcttctcatcgaagccttcccagaagatgcggccgtctacacgtgcgaggctaagaacgattatggggtcgccactacgtcagcttctctgtctgttgaagtacctgaggttgtgtccccagaccaggagatgccagtatatccccctgcaatcatcacaccgttacaagacacagtgacctctgagggacagcctgctcgatttcagtgtagagtgagtggtacagatttgaaggtctcctggtacagtaaggataagaagatcaagccttctcgcttttttcgcatgacacaatttgaagatacatatcagctcgaaattgccgaagcttatcccgaggacgaaggcacctacacatttgtggcttcaaacgcagtcggccaggtttccagtaccgcaaatctttccctagaagcccctgagtccatactgcacgagcggatagaacaggagatcgagatggagatgaaagagctgttttctgaaggggaatctgagcactcggagagggacacaagagacgcgtttagtgacagtgaagacattgatcacaaatccatggccgctaaacggtatgcatcccgcatcagttccacctccagttggcctgaatacttcaagccgtcattcacgcagaaactgacctttaagtatgtgttagagggagagccagtggtcttcacttgtcggttaatcgcttgtcctacaccagagatgacgtggtttcacaataatcgcccaatacccaccggccttcgccgaataattaaggctgagtcagatctgcaccaccattcctccagcttggaaatcaagcgtgtccaggatcgggactctggatcttatcgcctccttgctattaacagtgagggttcagccgaaagtactgctagtctgctggtaatccagaagggccaggatgagaagtacctagagttccttaaaagagcagaaaggacccacgagaatgtagaggccttagtcgaacgaggcgaagatagaattaaagtggatctgagatttacaggtagcccatttaacaagaagcaagacgtggaacaaaagggaatgatgagaacaatccattttaaaactatgtcgtcagccaaaaagacagactacatgtacgacgaggaatatctggaatcaaagagcgatattcgcgggtggctgaacgtcggcgagtccttcctcgataaagagacgaaagtgaagcttcaaagattgcgggaggcgcggaagactctgatggagaaaaagaaactgtcactgctggacacgtcctctgagatttcatctcgaacgctgaggtccgaggcaagcgacaaagatatcctttttagcagggaggacatgaagatcagaagcatgtctgacctcgctgaaagctacaaagtagaccattctgccgagagcattgtacaaaaccctcacgccctgtctaatcaaatggatcagaacatcgagtctgaggagcttccgacgtcttttcagaccattgtagacgaagagatctttcagacagaaataaggatgagtcaggaagcacttgttaaagagtcacttcccaaggaccacctctatggggagattcttgtcaacgagaatacacaagcccgcggccagctcgaggaaatcatggccaataccactattggcgaaagtagtacatatatcaccaacgtgtgtgagaaagaagaggtctacgagacgcctgagaatgtgagtcaggcaataacgccacatgcaagcgagagctttggcactctggtgaatgtcgaggaaagcgaggaaattgcatccgagaggatcaaaaaggacgatctacgtgagttacaattgtctgcatcaacccgcatcgatgagtttaagacagaacagaaggaagaaaatatgagattctttgaaaatagcttccggaagagaccccaacggtgccctccaagtttcctccaggagatcgaaagccaagaggtgtacgaaggtgacagttgcaactttgtgtgccacttccagggatatcctcagccaatcgtaacatggtacaacaacgatatgccgatccctcggaaccagaatttcattatccacagtctggagaactattccattttgacgctgtccagcgtacaccatcagaacgaagggagcatcacctgcgtgttgtttaatcaatacgggactgtgaaaaccacgagcatgctgaaggtgaaggctaaacagaaacacgacgtaaaggctcacaaggtgcccgtgtttcacgactacctggacgaggaggaggagctggctctagtctttgatcaagctaaaggggcccacccgagcatgtcgcaggagggccagacaaacctgcaccttttaaaaaccaacccgcccgtgccaccctctggggacacagagctgctttcctttcccgtcgagattcaagttaccgcagcgacacccatcccagagcaagacaaggagtctaaagaagtgtttcagaccgaagaacttgagccaaaggctatgcctcaagaccaggtaactcagtcacctaaacaccgattcgtgtttctctccgatatcactaacgagccccctaagatgttgcaggagatgcctaagcacgcacgatgcagagaaggagacagtatcattctggagtgtttaattagcggagagccccagccagtggttacctggttccagaatggcgtgctgcttaaacagaatcagaagttccagtttgaagaggtgaactgctctcaccagctgtatatcaaagacgtcaatagccaggatagtggcaagtacaaatgtgtggcggagaacaatagcggggccgtagagtctgtaagtgacctgactgttgagccagtaacttacagagaaaattcacaattcgaaaatatcggcgagatttatggaaaatactctcgggaccagcagctgcaggaccagggggagtcagtgcgcgcccacttttacgactatcccgccggtcctttcactccctggactaatgtgaaagagtactcagtcagggattatttccagtccctcgagaccatcgagcaaatagatcaaaaagagcaggtgcgctgcattccctcaagggaaaagatcccacgctttgtgcacggcgctagtagaaccataaaaatttcgaaaccaatacgtgctgagttcattcaatgtcaggctgagggcaaagagaggcatgtctccgaaaaatccaagcttcaccaagcagaaggcacagtctaccctttcgtagacgacttctccgatgtgacaatcaagaaagagattcgaaacaacttcgggaaattgggcagatctgagaaggaaaacgttcaagagtgcgcccagagtgactacttaccaaatatccatagtgaacgcatctccgatagctacaatactaaggatagttctgcaattgtgtacgaagaatctctcggcgaggaaatccattatccaggcaaaaaagttaagcaccggattattgaattcgaaaagctgcacgtcgaaaagggtgtgctggagaagaggcctacccgtacctccattgtgaatccgccccagaaaaagatcgacgacaaggctttcagcctcaagcagcgtgagagcaggtccagtaatctaaatgcaaacatgtatcaggctgagaaaatgagtccaaatactgaatccgacagctccaacatagctatcaacctcaaactgctgagtagccagacacacaaagaatttgacgcccaagagagagaacaacaagaaaagatttctcttatcgataagcctgctatcagcaaaagagcagagcatgagtctcccattaccttcgatctgaagcagtttcacactcagattaagcacactgacgtgaagttccaggagctggattccgggcagccagaagaggcgtattttaaaattcagcaccccgcagatactgagaatattgttttcgacctaaagcagatgtactctcatatcggcgatcccgcgctcgagttccaggggcaagagactagggagcagcaagaaatccattacaaggagaagatccccagccccgagacactgcagcctgatactcataatatcagcaagtcagttcagaacaacgtgtttgcctctcaggaaatttcatccagccaggagctaagcaaccgaactatggtggagaagagctctatagatgagaatagcatctcgttagaaaaagaagtcagacacgtgcaagaacagaacttggatatcctaaaaaccgacctgtccctcaaatcgtttagtgaggaaatttattccgagtcttgcgctctgctgcctactagcagcgccgacattgaggaaacggacctgtctgagaagagctgtcccctggagaacggaggtcgcagtagcatctctcacctcaaaaaagcagcatccgaggaaaaacctctgggagtgggcgagatggaggaggaatgcactctggaaccggaacttgctgctttcccaaaacaggacggaggcacccaggaatatacagacgccaccctggaagaccacagaggcgatgttcaggaagctgatacactccacaggcaattaagcctgtcgcaatgcttcccccttctcatgacggaggaacagcagaatcctggggagcagatctcgactaacatacatgcgtccggcgaagagaaatgttatgaggaggtgcaggtccagaacgaggcctcattctctacgctagagggtgaaatgattgagacgtctttcagccagaatatccctaagctcgacgaggcccacaccactgaagcagcagagtctgaaacctcacttactcagtatctcctcgcagctggcaaacgggaggtgcccgagactaaggacaccagggatcaagctaaattagtgcagagtgagtcaatcacctctatggaagtggaagaggtcaccttcaacactgtgtacgagtactacaaccaaaaacaagagtcccttggccgacccctgtcacctgagagcgatatctccatcggagtgggctcaaccacttccgaagagatttcggaactagaccagttctatacccctccttcctcggtggagtattttgaatcaccaaagtcacctgacctgtattttaatccttcagatataactaaacagagttctatccatagcgggggggagaccgtcgagcggtacagtaccccactgggcgaggttgctgaacgatatagcactccctcagagggggaggtcggagagcgatacagcacacctcctggagagactcttgagagatacagcacgccacccggggaaacgctggagcgttatagcacaccacccggcgagaccctggagcgctattccaccccccccggcgagactctggagcgctattcgacccccccaggggagactctggagcggtacagcacacctcctggcgaagccttagaacggtactctatccctaccggtggacctaaccccacaggtacgttcaagacttatccaagcaagattgagagggaggatggcacaccaaatgagcacttctacactccaacagaggagaggggctccgcatacgagatctggagaagcgactcatttggcactcccaatgaggccatcgagcctaaggataacgagatgcctcccagctttatcgagcccttgacaaaacgtaaagtttacgaaaataccactttgggattcattgtcgaggtggaaggtctgcccgtgccaggtgtgaaatggtatcgaaacaagagcttgcttgagcccgatgagcggattaaaatggaaagagtcggtaatgtttgctcattggagatttcaaacattcagaagggtgagggcggcgagtacatgtgtcacgcggttaatattattggcgaagccaagtcattcgccaacgtggacataatgccccaagaagagcgggttgtggcactccccccacctgttacccaccagcacgtgatggagttcgaccttgaacatactaccagttctcgaactccttcccctcaggagattgtgctagaggtggagctctccgagaaagatgtaaaggaattcgaaaagcaggtgaagatcgtaaccgtgcccgaattcacccccgaccacaaatccatgattgtgtcactcgacgtgctcccgtttaactttgtagatcctaatatggactctcgagagggcgaagataaggagctcaagattgatctggaggtgttcgagatgccccccagatttattatgcctatttgcgatttcaagattcccgagaacagtgacgcggtcttcaaatgcagtgtaatcggcatcccaaccccggaggtgaaatggtataaagaatatatgtgcattgagccagacaacattaagtacgtgatttctgaggagaagggaagtcataccttgaaaatacggaacgtgtgcctttccgatagtgctacttatcgatgccgcgccgtgaactgcgtgggcgaggcaatatgtagaggtttcctgaccatgggcgatagcgaaatcttcgctgtgatcgctaagaagagcaaagtgacactgagtagtttgatggaagagctggtgctgaagtcaaactatacagacagcttcttcgagtttcaggtggtggagggccccccccggtttataaaaggtatctccgactgttatgctcccatcgggaccgccgcctacttccagtgtctggttagagggtctccacggccaactgtttattggtacaaagatggaaagcttgtgcaaggcaggcgcttcactgttgaagaaagtgggacaggcttccacaatttgtttatcaccagcctggttaagagtgatgaaggtgagtacagatgtgttgctaccaacaaatctgggatggctgagagttttgccgccctgacattgacatag

SEQ ID NO: 234968 - DNA, 2658 bp, Artificial Sequence
  derived and/or modified sequence
atggtggagaagagcagcattgatgaaaattccatcagcctggagaaggaggtgcgccacgtgcaggagcagaacctggacatcctgaagacagacctgagcctgaagagcttcagcgaggagatctacagcgagagctgtgccctgctgcccaccagcagcgctgacatcgaggagacagacctgtctgagaagagctgccccctggagaatggaggccgcagcagcatcagccacctgaagaaggccgccagcgaggagaagcccctgggcgtgggggagatggaggaggagtgcaccctggagcctgagctggccgccttccccaagcaggacggcggcacccaggagtacacagatgccaccctggaggaccacagaggagatgtgcaggaggccgacaccctgcaccggcagctgagcctgagccagtgcttccccctgctgatgacagaggagcagcagaaccctggagagcagatcagcaccaacatccacgccagcggggaggagaagtgctatgaggaggtgcaggtgcagaatgaggccagcttcagcaccctggagggggagatgattgagaccagcttcagccagaacatccccaagctggatgaggcccacaccacagaggccgctgagagcgagaccagcctgacccagtacctgctggccgccggcaagcgggaggtgcctgagaccaaggacacccgggaccaggccaagctggtgcagagcgagagcatcacctccatggaggtggaggaggtgaccttcaacacagtgtatgagtactacaaccagaagcaggagagcctgggccggcccctgagccctgagagtgacatcagcattggagtgggcagcaccaccagcgaggagatcagcgagctggaccagttctacaccccacccagctctgtggagtactttgagagccccaagagcccagacctgtacttcaaccccagcgacatcaccaagcagagcagcatccacagcggcggggagaccgtggagcgctacagcacccccctgggggaggtggccgagcgctacagcaccccatctgagggggaggtgggggagcgctacagcaccccacctggagagaccctggagcgctacagcaccccacctggagagaccctggagcgctacagcaccccacctggagaggccctggagcgctacagcatccccaccggcggccccaaccccaccggcaccttcaagacctaccccagcaagattgaaagagaagatggcaccccaaatgagcacttctacacccccacagaggagcggggcagcgcctatgagatctggaggagtgacagctttggcaccccaaatgaggccatcgagcccaaggacaatgagatgcctccttccttcatcgagcccctgaccaagaggaaggtgtatgagaacaccaccctgggcttcatcgtggaggtggagggcctgcctgtgcctggggtgaagtggtacagaaacaagagcctgctggagccagatgagcgcatcaagatggagcgggtgggcaatgtgtgcagcctggagatcagcaacatccagaagggggagggcggggagtacatgtgccacgctgtgaacatcatcggggaggccaagagctttgccaacgtggacatcatgccccaggaggagcgggtggtggccctgcccccacctgtgacccaccagcacgtgatggagtttgacctggagcacaccaccagcagcaggacccccagcccccaggagatcgtgctggaggtggagctgtctgagaaggatgtgaaggagtttgagaagcaggtgaagatcgtgacagtgcctgagttcaccccagaccacaagtccatgattgtgtccctggatgtgctgcccttcaactttgtggaccccaacatggacagccgggagggggaggacaaggagctgaagattgacctggaggtgtttgagatgccaccccgcttcatcatgcccatctgtgacttcaagatccctgagaacagtgatgctgtgttcaagtgcagcgtgattggcatccccaccccagaggtgaagtggtacaaggagtacatgtgcattgaaccagacaacatcaagtatgtgatcagcgaggagaagggcagccacaccctgaagatcagaaatgtgtgcctgagtgacagcgccacctaccgctgcagagctgtgaactgtgtgggggaggccatctgccggggcttcctgaccatgggagacagcgagatctttgctgtgattgccaagaagagcaaggtgaccctgagcagcctgatggaggagctggtgctgaagagcaactacacagacagcttctttgagttccaggtggtggagggccccccacgcttcatcaagggcatcagtgactgctacgcccccatcggcacagctgcctacttccagtgcctggtgcggggcagcccccggcccaccgtgtactggtacaaggatggcaagctggtgcagggccgccgcttcaccgtggaggagagcggcaccggcttccacaacctcttcatcaccagcctggtgaagagtgatgaaggagagtaccgctgtgtggccaccaacaagagcggcatggccgagagctttgctgccctgaccctgacctag

SEQ ID NO: 234969 - DNA, 16815 bp, Artificial Sequence
  derived and/or modified sequence
atgaccacccaggcccccaccttcacccagcccctgcagagcgtggtggtgctggagggcagcacagccacctttgaggcccacatcagcggcttccctgtgcctgaggtgtcctggttcagagatggccaggtgatcagcaccagcaccctgcccggggtgcagatctccttcagtgatggccgggccaagctgaccatcccagctgtgaccaaggccaacagcggccgctacagcctgaaggccaccaacggcagcggccaggccaccagcacagctgagctgctggtgaaggccgagacagccccacccaactttgtgcagaggctgcagagcatgacagtgcggcagggcagccaggtgcggctgcaggtgcgggtgacaggcatccccacccctgtggtgaagttctacagagatggagctgagatccagagcagcctggacttccagatcagccaggagggggacctgtacagcctgctgattgctgaggcctacccagaagattctggcacctacagcgtgaatgccaccaacagcgtgggccgggccaccagcacagctgagctgctggtgcagggcgaggaggaggtgcctgccaagaagaccaagaccatcgtgtccacagcccagatcagcgagagccggcagaccagaattgagaagaagattgaggcccactttgatgcccggagcatcgccaccgtggagatggtgattgatggagctgctggccagcagctgccccacaagaccccaccccgcatcccccccaagcccaagagccgcagccccaccccacccagcattgctgccaaggcccagctggcccggcagcagagccccagccccatccgccacagccccagccctgtgagacatgtgcgggcccccacccccagccctgtgcgctctgtgtccccagctgcccgcatcagcaccagccccatccgctctgtgcgcagccccctgctgatgaggaagacccaggccagcacagtggccactggacctgaggtgcccccaccctggaagcaggagggctacgtggccagcagcagcgaggccgagatgagggagaccaccctgaccaccagcacccagatcagaacagaggagcgctgggagggccgctatggagtgcaggagcaggtgaccatctctggagctgctggagctgctgcctctgtgtctgccagcgccagctatgctgctgaggccgtggccactggagccaaggaggtgaagcaggatgctgacaagtctgctgctgtggccaccgtggtggccgctgtggacatggcccgggtgcgggagcctgtgatctctgctgtggagcagacagcccagaggaccaccaccacagctgtgcacatccagcctgcccaggagcaggtgaggaaggaggccgagaagacagctgtgaccaaggtggtggtggccgctgacaaggccaaggagcaggagctgaagagcaggaccaaggaggtgatcaccaccaagcaggagcagatgcacgtgacccatgagcagatcaggaaggagacagagaagacctttgtgcccaaggtggtgatctctgctgccaaggccaaggagcaggagacccgcatcagcgaggagatcaccaagaagcagaagcaggtgacccaggaggccatccggcaggagacagagatcacagctgcctccatggtggtggtggccacagccaagagcaccaagctggagaccgtgcctggggcccaggaggagaccaccacccagcaggaccagatgcacctgtcctatgagaagatcatgaaggagaccaggaagacagtggtgcccaaggtgattgtggccacccccaaggtgaaggagcaggacctggtgtcccggggccgggagggcatcaccaccaagcgggagcaggtgcagatcacccaggagaagatgaggaaggaggccgagaagacagccctgagcaccatcgctgtggccacagccaaggccaaggagcaggagaccatcctgcggacccgggagaccatggccacccggcaggagcagatccaggtgacccacggcaaggtggatgtgggcaagaaggccgaggccgtggccaccgtggtggccgctgtggaccaggcccgggtgcgggagccccgggagcccggccacctggaggagagctatgcccagcagaccaccctggagtatggctacaaggagcgcatctctgctgccaaggtggccgagcccccccagaggcctgccagcgagccccacgtggtgcccaaggctgtgaagcccagggtcatccaggcccccagcgagacccacatcaagaccacagaccagaagggcatgcacatcagcagccagatcaagaagaccacagacctgaccacagagcggctggtgcacgtggacaagaggcccaggacagccagcccccacttcaccgtgtccaagatctctgtgcccaagacagagcacggctatgaggccagcattgctggcagcgccatcgccaccctgcagaaggagctgagcgccaccagcagcgcccagaagatcaccaagtctgtgaaggcccccaccgtgaagcccagcgagaccagggtgcgggcagagcccacccccctgccccagttcccctttgctgacaccccagacacctacaagtctgaggccggcgtggaggtgaagaaggaggtgggcgtgtccatcaccggcaccaccgtgcgggaggagagatttgaggtgctgcacggccgggaggccaaggtgacagaaacagcccgggtgcctgcccctgtggagatccctgtgaccccacccaccctggtgtctggcctgaagaatgtgacagtgattgaaggagagagcgtgaccctggagtgccacatcagcggctaccccagccccaccgtgacctggtaccgggaggactaccagatcgagagcagcattgacttccagatcaccttccagagcggcatcgcccggctgatgatccgggaggcctttgctgaggacagcggccgcttcacctgcagcgctgtgaatgaagctggcaccgtgtccaccagctgctacctggccgtgcaggtgtctgaggagtttgagaaggagaccacagctgtgacagagaagttcaccacagaggagaagagatttgtggagagcagagatgtggtgatgacagacaccagcctgacagaggagcaggccggccctggagagcctgctgccccctacttcatcaccaagcctgtggtgcagaagctggtggagggcggctctgtggtgtttggctgccaggtgggcggcaaccccaagccccacgtgtactggaagaagagcggcgtgcccctgaccaccggctaccgctacaaggtgtcctacaacaagcagacaggagagtgcaagctggtgatctccatgacctttgctgatgatgctggggagtacaccatcgtggtgaggaacaagcacggggagaccagcgccagcgccagcctgctggaggaggccgactatgagctgctgatgaagagccagcaggagatgctgtaccagacccaggtgacagcctttgtgcaggagcccaaggtgggggagacagcccctggctttgtgtacagtgaatatgagaaggagtatgagaaggagcaggccctgatcaggaagaagatggccaaggacacagtggtggtgaggacctacgtggaggaccaggagttccacatcagcagctttgaggagcggctcatcaaggagattgagtaccgcatcatcaagaccaccctggaggagctgctggaggaggatggagaggagaagatggctgtggacatcagcgagagcgaggccgtggagagcggctttgacagccgcatcaagaactaccgcatcctggagggcatgggcgtgaccttccactgcaagatgagcggctaccccctgcccaagatcgcctggtacaaggatggcaagaggatcaagcatggagagcgctaccagatggacttcctgcaggacggccgggccagcctgcgcatccctgtggtgctgcctgaagatgagggcatctacacagcctttgccagcaacatcaagggaaatgccatctgcagcggcaagctgtatgtggagcctgctgcccccctgggcgcccccacctacatccccaccctggagcctgtgagccgcatccgcagcctgagccccaggtctgtgagccgcagccccatccgcatgagccctgccaggatgagccctgccaggatgagccctgccaggatgagccctgccaggatgagccctggaagaaggctggaggagacagatgagagccagctggagcggctgtacaagcctgtgtttgtgctgaagcctgtgtccttcaagtgcctggagggccagacagccaggtttgacctgaaggtggtgggccggcccatgcctgagaccttctggttccatgatggccagcagatcgtgaatgactacacccacaaggtggtgatcaaggaggatggcacccagagcctcatcatcgtgcctgccacccccagcgacagcggggagtggacagtggtggcccagaacagagctggccgcagcagcatcagcgtcatcctgactgtggaggccgtggagcaccaggtgaagcccatgtttgtggagaagctgaagaatgtgaacatcaaggagggcagccggctggagatgaaggtgcgggccaccggcaaccccaacccagacatcgtgtggctgaagaacagcgacatcatcgtgccccacaagtaccccaagatccgcatcgagggcaccaagggggaggccgccctgaagattgacagcacagtgtcccaggacagcgcctggtacacagccacagccatcaacaaggccggccgggacaccacccgctgcaaggtgaatgtggaggtggagtttgctgagcctgagcctgagaggaagctgatcatcccccggggcacctaccgggccaaggagattgctgcccctgagctggagcccctgcacctgcgctatggccaggagcagtgggaggagggggacctgtatgacaaggagaagcagcagaagcccttcttcaagaagaagctgaccagcctgcggctgaagagatttggacctgcccactttgaatgtcggctgacccccatcggggaccccaccatggtggtggagtggctgcatgatggcaagcccctggaggccgccaaccggctgaggatgatcaatgaatttggctactgcagcctggactatggagtggcctacagccgggacagcggcatcatcacctgccgggccaccaacaagtatggaacagaccacaccagcgccaccctgattgtgaaggatgagaagagcctggtggaggagagccagctgcctgagggcaggaagggcctgcagagaattgaggagctggagaggatggcccacgagggcgccctgactggagtgaccacagaccagaaggagaagcagaagccagacatcgtgctgtacccagagcctgtgcgggtgctggagggggagacagcccgcttccgctgccgggtgacaggctacccccagcccaaggtgaactggtacctgaatggccagctgatcaggaagagcaagcgcttccgggtgcgctatgatggcatccactacctggacatcgtggactgcaagagctatgacacaggagaggtgaaggtgacagcagaaaatcctgagggcgtgattgagcacaaggtgaagctggagatccagcagcgggaggacttccgctctgtgctgcggcgggcccctgagcccaggcctgagttccacgtgcatgagcccgggaagctgcagtttgaggtgcagaaggtggacaggcctgtggacaccacagagaccaaggaggtggtgaagctgaagagagctgagcgcatcacccatgagaaggtgcctgaggagagcgaggagctgcggagcaagttcaagagaagaacagaggagggctactatgaggccatcacagctgtggagctgaagagcaggaagaaggatgagagctatgaggagctgctgaggaagaccaaggatgagctgctgcactggaccaaggagctgacagaggaggagaagaaggccctggccgaggagggcaagatcaccatccccaccttcaagccagacaagattgagctgagccccagcatggaggcccccaagatctttgagcgcatccagagccagacagtgggccagggcagtgatgcccacttccgggtgcgggtggtgggcaagccagaccctgaatgtgagtggtacaagaatggagtgaagattgaaagaagtgaccgcatctactggtactggccagaggacaacgtgtgtgagctggtgatcagagatgtgacagctgaggacagcgccagcatcatggtgaaggccatcaacattgctggggagaccagcagccacgccttcctgctggtgcaggccaagcagctgatcaccttcacccaggagctgcaggatgtggtggccaaggagaaggacaccatggccacctttgaatgtgagaccagcgagccctttgtgaaggtgaagtggtacaaggatggcatggaggtgcatgaaggagacaagtacaggatgcacagcgacaggaaggtgcacttcctgagcatcctgaccatcgacaccagtgatgctgaggactacagctgtgtgctggtggaggatgaaaatgtgaagaccacagccaagctgattgtggagggcgctgtggtggagtttgtgaaggagctgcaggacatcgaggtgcctgagagctacagcggggagctggagtgcatcgtgtccccagaaaatattgagggcaagtggtaccacaatgatgtggagctgaagagcaatggcaagtacaccatcaccagcagaagaggccggcagaacctgactgtgaaggatgtgaccaaggaggaccagggcgagtacagctttgtgattgatggcaagaagaccacctgcaagctgaagatgaagccccggcccatcgccatcctgcagggcctgagtgaccagaaggtgtgtgagggggacatcgtgcagctggaggtgaaggtgtccctggagagcgtggagggcgtgtggatgaaggatggccaggaggtgcagcccagcgacagagtgcacatcgtgattgacaagcagagccacatgctgctgattgaggacatgaccaaggaggatgctggcaactacagcttcaccatcccagccctgggcctgagcaccagcggccgggtgtctgtgtacagcgtggatgtgatcacccccctgaaggatgtgaatgtgattgagggcaccaaggctgtgctggagtgcaaggtgtctgtgcctgatgtgacctctgtgaagtggtacctgaatgatgagcagatcaagccagatgacagagtgcaggccatcgtgaagggcaccaagcagaggctggtgatcaacagaacccacgccagtgatgagggcccctacaagctgattgtgggccgggtggagaccaactgcaacctgtctgtggagaagatcaagatcatccggggcctgcgggacctgacctgcacagagacccagaatgtggtgtttgaggtggagctgagccacagcggcattgatgtgctgtggaacttcaaggacaaggagatcaagcccagcagcaagtacaagattgaggcccacggcaagatctacaagctgactgtgctgaacatgatgaaggatgatgagggcaagtacaccttctacgccggggagaacatgaccagcggcaagctgactgtggccggcggggccatcagcaagcccctgacagaccagacagtggccgagagccaggaggccgtgtttgaatgtgaggtggccaacccagacagcaaaggagagtggctgagagatggcaagcacctgcccctgaccaacaacatccgctctgagagtgatggccacaagaggaggctcatcatcgccgccaccaagctggatgacatcggggagtacacctacaaggtggccaccagcaagaccagcgccaagctgaaggtggaggccgtgaagatcaagaagaccctgaagaacctgactgtgacagagacccaggatgctgtgttcaccgtggagctgacccaccccaacgtgaagggcgtgcagtggatcaagaatggagtggtgctggagagcaatgagaagtatgccatctctgtgaagggcaccatctacagcctgcgcatcaagaactgtgccatcgtggatgaatctgtgtatggcttccggctgggccgcctgggcgccagcgcccggctgcacgtggagaccgtgaagatcatcaagaagcccaaggatgtgacagccctggagaatgccaccgtggcctttgaggtgtctgtgtcccatgacacagtgcctgtgaagtggttccacaagtctgtggagatcaagcccagcgacaagcaccggctggtgtctgagaggaaggtgcacaagctgatgctgcagaacatcagccccagtgatgctggggagtacacagctgtggtgggccagctggagtgcaaggccaagctgtttgtggagaccctgcacatcaccaagaccatgaagaacatcgaggtgcctgagaccaagacagccagctttgaatgtgaggtgagccacttcaacgtgcccagcatgtggctgaagaatggagtggagattgagatgtctgagaagttcaagatcgtggtgcagggcaagctgcaccagctgatcatcatgaacaccagcacagaggacagcgctgagtacacctttgtgtgtggaaatgaccaggtgtctgccaccctgactgtgacccccatcatgatcacctccatgctgaaggacatcaatgctgaggagaaggacaccatcacctttgaggtgacagtgaactatgagggcatctcctacaagtggctgaagaatggagtggagatcaagagcacagacaagtgccagatgaggaccaagaagctgacccacagcctgaacatcagaaatgtgcactttggagatgctgctgactacacctttgtggccggcaaggccaccagcacagccaccctgtatgtggaggcccggcacatcgagttcaggaagcacatcaaggacatcaaggtgctggagaagaagagggccatgtttgaatgtgaggtgtctgagccagacatcaccgtgcagtggatgaaggatgaccaggagctgcagatcacagaccgcatcaagatccagaaggagaagtatgtgcaccggctgctgatccccagcaccaggatgtctgatgctgggaagtacacagtggtggccggcggcaatgtgtccacagccaagctgtttgtggagggcagagatgtgcgcatccgcagcatcaagaaggaggtgcaggtgattgagaagcagagagctgtggtggagtttgaggtgaatgaagatgatgtggatgcccactggtacaaggatggcatcgagatcaacttccaggtgcaggagcggcacaagtatgtggtggagcggcgcatccacaggatgttcatcagcgagacccggcagagtgatgctggggagtacacctttgtggccggcaggaacagaagctctgtgaccctgtatgtgaatgcccctgagcccccccaggtgctgcaggagctgcagcctgtgacagtgcagagcggcaagccagcccgcttctgtgccgtcatcagcggccggccccagcccaagatctcctggtacaaggaggagcagctgctgagcacaggcttcaagtgcaagttcctgcatgatggccaggagtacaccctgctgctgattgaggccttcccagaagatgctgctgtgtacacctgtgaggccaagaatgactatggagtggccaccaccagcgccagcctgtctgtggaggtgcctgaggtggtgtccccagaccaggagatgcctgtgtaccccccagccatcatcacccccctgcaggacacagtgaccagcgagggccagcctgcccgcttccagtgccgggtgtctggaacagacctgaaggtgtcctggtacagcaaggacaagaagatcaagcccagccgcttcttcaggatgacccagtttgaggacacctaccagctggagattgctgaggcctacccagaagatgagggcacctacacctttgtggccagcaatgctgtgggccaggtgagcagcacagccaacctgagcctggaggcccctgagagcatcctgcacgagcgcatcgagcaggagattgagatggagatgaaggagctgttcagcgagggggagagcgagcacagcgagcgggacaccagagatgccttcagtgacagcgaggacatcgaccacaagtccatggccgccaagagatatgccagccgcatcagcagcaccagctcctggccagagtacttcaagcccagcttcacccagaagctgaccttcaagtatgtgctggagggggagcctgtggtgttcacctgccgcctcatcgcctgccccaccccagagatgacctggttccacaacaaccggcccatccccaccggcctgcggcgcatcatcaaggccgagagtgacctgcaccaccacagcagcagcctggagatcaagagggtgcaggaccgggacagcggcagctaccgcctgctggccatcaacagcgagggcagcgctgagagcacagccagcctgctggtgatccagaagggccaggatgagaagtacctggagttcctgaagagagctgagaggacccatgaaaatgtggaggccctggtggagcggggggaggaccgcatcaaggtggacctgcgcttcaccggcagccccttcaacaagaagcaggatgtggagcagaagggcatgatgaggaccatccacttcaagaccatgagcagcgccaagaagacagactacatgtatgatgaggagtacctggagagcaagagtgacatccggggctggctgaatgtgggggagagcttcctggacaaggagaccaaggtgaagctgcagaggctgcgggaggccaggaagaccctgatggagaagaagaagctgagcctgctggacaccagcagcgagatcagcagcaggaccctgcggtctgaggccagtgacaaggacatcctcttcagccgggaggacatgaagatccgctccatgtctgacctggccgagagctacaaggtggaccacagcgctgagagcatcgtgcagaacccccacgccctgagcaaccagatggaccagaacatcgagagcgaggagctgcccaccagcttccagaccatcgtggatgaggagatcttccagacagagatccgcatgagccaggaggccctggtgaaggagagcctgcccaaggaccacctgtatggagagatcctggtgaatgaaaacacccaggcccggggccagctggaggagatcatggccaacaccaccatcggggagagcagcacctacatcaccaacgtgtgtgagaaggaggaggtgtatgagaccccagaaaatgtgtcccaggccatcaccccccacgccagcgagagctttggcaccctggtgaatgtggaggagagcgaggagatcgccagcgagcgcatcaagaaggatgacctgcgggagctgcagctgagcgccagcaccagaattgatgagttcaagacagagcagaaggaggagaacatgaggttctttgagaacagcttcaggaagaggccccagcgctgccccccatccttcctgcaggagattgagagccaggaggtgtatgaaggagacagctgcaactttgtgtgccacttccagggctacccccagcccatcgtgacctggtacaacaatgacatgcccatccccaggaaccagaacttcatcatccacagcctggagaactacagcatcctgaccctgagctctgtgcaccaccagaatgaaggcagcatcacctgtgtgctcttcaaccagtatggcaccgtgaagaccacctccatgctgaaggtgaaggccaagcagaagcatgatgtgaaggcccacaaggtgcctgtgttccatgactacctggatgaggaggaggagctggccctggtgtttgaccaggccaagggggcccaccccagcatgagccaggagggccagaccaacctgcacctgctgaagaccaacccccctgtgcccccatctggggacacagagctgctgtccttccctgtggagatccaggtgacagctgccacccccatccctgagcaggacaaggagagcaaggaggtgttccagacagaggagctggagcccaaggccatgccccaggaccaggtgacccagagccccaagcacagatttgtgttcctgagtgacatcaccaatgaaccacccaagatgctgcaggagatgcccaagcacgcccgctgccgggagggggacagcatcatcctggagtgcctgatctctggagagccccagcctgtggtgacctggttccagaatggagtgctgctgaagcagaaccagaagttccagtttgaggaggtgaactgcagccaccagctgtacatcaaggatgtgaacagccaggacagcggcaagtacaagtgtgtggccgagaacaacagcggggctgtggagagcgtgtctgacctgactgtggagcctgtgacctaccgggagaacagccagtttgagaacatcggggagatctacggcaagtacagccgggaccagcagctgcaggaccagggcgagagcgtgcgggcccacttctatgactacccagctggccccttcaccccctggaccaacgtgaaggagtacagcgtgcgggactacttccagagcctggagaccatcgagcagattgaccagaaggagcaggtgcgctgcatccccagccgggagaagatccccaggtttgtgcacggggccagcaggaccatcaagatcagcaagcccatccgggcagagttcatccagtgccaggccgagggcaaggagagacatgtgtctgagaagagcaagctgcaccaggccgagggcaccgtgtacccctttgtggatgacttcagtgatgtgaccatcaagaaggagatccggaacaactttgggaagctgggccgctctgagaaggaaaatgtgcaggagtgtgcccagagcgactacctgcccaacatccacagcgagcgcatcagtgacagctacaacaccaaggacagcagcgccatcgtgtatgaggagagcctgggggaggagatccactacccaggcaagaaggtgaagcaccgcatcattgaatttgagaagctgcacgtggagaagggcgtgctggagaagaggcccaccaggaccagcatcgtgaaccccccccagaagaagattgatgacaaggccttcagcctgaagcagcgggagagccgcagcagcaacctgaatgccaacatgtaccaggccgagaagatgagccccaacacagaaagtgacagcagcaacatcgccatcaacctgaagctgctgagcagccagacccacaaggagtttgatgcccaggagcgggagcagcaggagaagatcagcctgattgacaagccagccatcagcaagagagctgagcacgagagccccatcacctttgacctgaagcagttccacacccagatcaagcacacagatgtgaagttccaggagctggacagcggccagcctgaggaggcctacttcaagatccagcaccctgctgacacagagaacatcgtgtttgacctgaagcagatgtacagccacatcggggaccctgccctggagttccagggccaggagacccgggagcagcaggagatccactacaaggagaagatccccagccctgagaccctgcagcctgacacccacaacatcagcaagtctgtgcagaacaacgtgtttgccagccaggagatcagcagcagccaggagctgagcaacagaaccatggtggagaagagcagcattgatgaaaattccatcagcctggagaaggaggtgcgccacgtgcaggagcagaacctggacatcctgaagacagacctgagcctgaagagcttcagcgaggagatctacagcgagagctgtgccctgctgcccaccagcagcgctgacatcgaggagacagacctgtctgagaagagctgccccctggagaatggaggccgcagcagcatcagccacctgaagaaggccgccagcgaggagaagcccctgggcgtgggggagatggaggaggagtgcaccctggagcctgagctggccgccttccccaagcaggacggcggcacccaggagtacacagatgccaccctggaggaccacagaggagatgtgcaggaggccgacaccctgcaccggcagctgagcctgagccagtgcttccccctgctgatgacagaggagcagcagaaccctggagagcagatcagcaccaacatccacgccagcggggaggagaagtgctatgaggaggtgcaggtgcagaatgaggccagcttcagcaccctggagggggagatgattgagaccagcttcagccagaacatccccaagctggatgaggcccacaccacagaggccgctgagagcgagaccagcctgacccagtacctgctggccgccggcaagcgggaggtgcctgagaccaaggacacccgggaccaggccaagctggtgcagagcgagagcatcacctccatggaggtggaggaggtgaccttcaacacagtgtatgagtactacaaccagaagcaggagagcctgggccggcccctgagccctgagagtgacatcagcattggagtgggcagcaccaccagcgaggagatcagcgagctggaccagttctacaccccacccagctctgtggagtactttgagagccccaagagcccagacctgtacttcaaccccagcgacatcaccaagcagagcagcatccacagcggcggggagaccgtggagcgctacagcacccccctgggggaggtggccgagcgctacagcaccccatctgagggggaggtgggggagcgctacagcaccccacctggagagaccctggagcgctacagcaccccacctggagagaccctggagcgctacagcaccccacctggagagaccctggagcgctacagcaccccacctggagagaccctggagcgctacagcaccccacctggagagaccctggagcgctacagcaccccacctggagaggccctggagcgctacagcatccccactggaggccccaaccccaccggcaccttcaagacctaccccagcaagattgagcgggaggatggcaccccaaatgagcacttctacacccccacagaggagcggggcagcgcctatgagatctggaggagtgacagctttggcaccccaaatgaggccatcgagcccaaggacaatgagatgccacccagcttcatcgagcccctgaccaagaggaaggtgtatgagaacaccaccctgggcttcatcgtggaggtggagggcctgcctgtgcctggggtgaagtggtacagaaacaagagcctgctggagccagatgagcgcatcaagatggagcgggtgggcaatgtgtgcagcctggagatcagcaacatccagaagggggagggcggggagtacatgtgccacgctgtgaacatcattggagaggccaagagctttgccaacgtggacatcatgccccaggaggagcgggtggtggccctgcccccacctgtgacccaccagcacgtgatggagtttgacctggagcacaccaccagcagcaggacccccagcccccaggagatcgtgctggaggtggagctgtctgagaaggatgtgaaggagtttgagaagcaggtgaagatcgtgacagtgcctgagttcaccccagaccacaagtccatgattgtgtccctggatgtgctgcccttcaactttgtggaccccaacatggacagccgggagggggaggacaaggagctgaagattgacctggaggtgtttgagatgccaccccgcttcatcatgcccatctgtgacttcaagatcccagaaaattctgatgctgtgttcaagtgcagcgtcatcggcatccccaccccagaggtgaagtggtacaaggagtacatgtgcatcgagccagacaacatcaagtatgtgatcagcgaggagaagggcagccacaccctgaagatcagaaatgtgtgcctgagtgacagcgccacctaccgctgcagagctgtgaactgtgtgggggaggccatctgccggggcttcctgaccatgggagacagcgagatctttgctgtgattgccaagaagagcaaggtgaccctgagcagcctgatggaggagctggtgctgaagagcaactacacagacagcttctttgagttccaggtggtggagggccccccacgcttcatcaagggcatcagtgactgctacgcccccatcggcacagctgcctacttccagtgcctggtgcggggcagcccccggcccaccgtgtactggtacaaggatggcaagctggtgcagggccgccgcttcaccgtggaggagagcggcaccggcttccacaacctcttcatcaccagcctggtgaagagtgatgaaggagagtaccgctgtgtggccaccaacaagagcggcatggccgagagctttgctgccctgaccctgacctag

SEQ ID NO: 234970 - DNA, 2658 bp, Artificial Sequence
  derived and/or modified sequence
atggtggagaagagcagcatcgacgagaacagcatcagcctggagaaggaggtcaggcacgtgcaggaacagaatctggacatattgaagaccgacctttccctgaagtctttcagcgaagaaatttatagtgagtcctgcgcactgttaccaacatcttctgccgacattgaggaaaccgatctgtctgaaaagtcatgtccgcttgaaaacggtggtagatctagcatctcacacctgaaaaaagctgccagtgaggaaaaacctctgggggtcggggagatggaagaggagtgtacattggagccggaactggccgccttccctaaacaggacgggggtacccaagaatataccgatgctacactcgaggatcatcgtggagatgtgcaagaagccgacacgctccacaggcagttgagcctgtctcagtgctttccactactgatgactgaggaacagcagaatcctggggagcaaatctccactaatattcatgcaagtggtgaagagaagtgttatgaagaagtgcaagtccaaaacgaagcctctttcagcactctggaaggagaaatgatagaaacttcattctctcaaaacattcccaaactcgatgaggcacataccacagaagccgcggagtctgagacttcgctcacacaatatcttcttgccgcaggaaaaagagaggtgccagaaacaaaagatacgcgggatcaggccaagctggtccagtctgagagcattacctcaatggaggtagaggaggttacttttaacacagtgtatgaatactataatcagaaacaggaatctctgggccggcccctgtcgcccgagagtgatatcagcatcggggtgggaagcacgacaagcgaagaaatttccgaactagaccagttctacactcctccatcgtccgtggagtactttgagtcccctaagtctcctgatctgtactttaatccaagtgatattacaaaacagtcatcaatccacagcggcggagagacagttgaacgatactcaaccccactgggtgaggtagctgaaaggtattccacccccagtgaaggtgaagtgggagagcggtactccactccccccggagaaacgttggagcgatacagcacaccaccaggggaaactcttgagcggtacagtaccccccctggtgaggctctcgaacgctactctattccaactggcgggcctaatcctacaggaacattcaaaacttatccttctaaaattgaacgcgaggacggaacaccaaacgagcacttttacacgccaacagaggagaggggctcggcctacgagatctggaggagtgactctttcggcactcccaacgaggcaatcgagccaaaagataacgagatgccacctagtttcattgaaccactgacaaaacgaaaagtgtacgaaaatacaactcttggctttatagttgaagtggaagggctacctgtgcccggtgtgaagtggtaccggaataagtctctgcttgaacccgacgagcgtatcaaaatggaacgggtgggcaatgtttgcagcttagagataagtaatattcaaaaaggtgaggggggggagtacatgtgtcatgcagttaatattatcggcgaagctaaaagtttcgcgaatgttgacatcatgccacaggaggagagggtggtggcccttccgccgcctgtcacgcatcaacacgtcatggagtttgatctggagcacacaaccagttcccgcactccaagcccacaggagattgttctggaggttgagctgtccgaaaaggacgtaaaggagtttgaaaaacaggttaagatcgtcactgtcccagaattcactcccgaccacaagagcatgattgtgagtcttgatgttctgccatttaatttcgtggatcccaacatggattcccgggagggcgaagataaagagctgaagatcgatctggaggtctttgaaatgccaccccgctttataatgccaatttgcgatttcaagatccccgaaaactcagacgccgtgttcaagtgcagtgtgattgggatccccacccctgaagtgaaatggtacaaggaatatatgtgcatcgagccagacaacattaaatatgtgatttcagaggagaagggttcacataccctcaagattcgaaacgtttgcttgtccgattccgccacctatcgatgtcgcgccgttaactgtgttggcgaagctatttgcaggggctttcttactatgggagactcggagatcttcgctgtaattgccaagaagagtaaagtgaccctgtccagcctcatggaagagctggtgctgaaatcaaactataccgattctttttttgagtttcaggtggttgagggaccaccgagattcatcaaaggcataagtgactgttacgctcctattgggaccgcagcctacttccagtgcttagttagagggagtcccaggcctactgtgtactggtacaaagacgggaaactcgtgcagggccgacggttcaccgtcgaagagtctggaaccggcttccataacctcttcattacttccttggtgaagagcgacgaaggagagtacagatgtgtcgccacgaacaaatccggcatggcagaaagttttgccgcactgacgctgacatag

SEQ ID NO: 234971 - DNA, 16815 bp, Artificial Sequence
  derived and/or modified sequence
atgaccacccaggcccccaccttcacccagcccctgcagagcgtggtggtgctcgagggcagcacagcgacattcgaggcccacatcagcggcttccccgtccccgaagtctcatggtttcgggatgggcaagtgattagcacctctacattaccgggagttcaaatcagctttagcgacggccgcgcaaaactcaccattccagctgtgacaaaagccaatagcgggcgttattcgttgaaggccacaaacggcagcggtcaggcaaccagcacggccgaattgctggttaaagccgagactgccccaccaaactttgttcagcgtttacagtctatgaccgtgcgacagggaagccaggttagactccaggttcgagttactgggatccctactcctgtcgttaaattctatcgggatggagcagagattcagtcctcactggactttcagatctctcaggaaggagacctgtactcccttctgatcgcagaagcctaccctgaagactcgggcacatatagtgtgaacgctacaaacagcgtcggccgcgccacttctactgcggagcttttggtgcagggggaggaggaggtacctgctaagaagaccaagacaattgtgagcactgctcagatatccgagagccgccagacgcgtattgagaaaaaaatagaagcccatttcgacgccagatctattgcgacggtggagatggtgattgacggtgctgccggtcaacaactcccacataaaacaccaccacggatcccgccaaagcctaaatccaggtccccgacaccacctagcatcgctgccaaggcccagttggctcgccagcagtctccatcccctatccgccattcgccaagcccggtcagacatgtccgggcccccacccctagcccggttagatccgtgtcaccggctgctagaattagtacatctcccattagaagcgtgcgatcacctctgctcatgaggaagacccaggccagtaccgttgccaccggtcccgaggttcctcccccctggaaacaagaaggctacgttgccagctcttctgaagctgagatgcgagaaaccaccctcacaaccagcacacaaatcaggacagaagagcggtgggaggggcggtatggagtgcaagagcaggttactatttcaggggctgcaggggccgccgcttccgtcagtgcgtccgcttcctacgctgctgaggccgtagctaccggggccaaggaggtcaaacaggatgcggacaagagtgcagctgtggccaccgtggttgctgcagtggacatggctcgagtgcgagagcctgttatctccgccgtggagcagaccgctcagcgcacgactaccactgctgtgcacatacagcccgcccaggagcaggtgagaaaggaggccgaaaagactgcggttactaaggttgtggtcgcagctgacaaggctaaggagcaggagcttaagtctcgcactaaagaagtgattactacgaagcaggagcagatgcatgtgacgcacgaacagattagaaaggaaaccgaaaagacgtttgttcctaaggtcgtgattagcgccgccaaggcgaaagagcaggagacaaggatctccgaagagataactaagaaacagaaacaggtgacccaagaggctatacgtcaagaaaccgagatcaccgccgctagcatggtcgtcgtcgccaccgccaaaagcaccaagctggaaacagtgcccggggctcaggaggagactactacacagcaggatcagatgcatttatcatacgagaagattatgaaggagacacgaaaaactgtggtacccaaagtcatcgtggccacaccaaaagtgaaggaacaagacctggtttctcgaggccgtgaggggataacaacaaaacgtgagcaagttcagatcacacaggagaagatgcgaaaagaggcggaaaagaccgctctgtccaccatagcagtggcaactgctaaggccaaggagcaagaaaccattctgcgaacacgggaaaccatggccacacggcaggagcaaatccaagtgacccacggaaaggtggatgtcgggaagaaagcagaggctgtggccaccgttgttgctgccgtggatcaagcacgagttcgggagcctagagagccgggtcacctggaagaatcttacgcccagcagactaccctcgaatacggatacaaagaaagaatatctgctgctaaagtggctgagccgccacaaagaccagcttccgagccacacgtcgttcctaaggctgttaaacctcgcgtcatacaggcgccctcagagactcatatcaagactactgaccagaaaggtatgcacattagctcccagattaagaaaaccaccgatttaacaacagagcgtctggtgcatgtagacaagagacctcggactgccagcccccacttcactgtgagtaagatctccgttcctaagaccgaacacggctacgaggcctctattgctggctctgctattgccaccctgcaaaaggagctatcagctaccagcagtgcacagaaaataacaaaaagcgtaaaggccccgacagttaaaccgtccgagactagggtgagagcggaaccgaccccactgccgcagttccctttcgccgataccccagatacctacaaatccgaggctggagtagaagtcaagaaggaagttggagtgagtataaccggaacaactgtgagagaggaacgatttgaggttctacatggtcgggaggctaaggtgaccgaaacagccagggtgccagctccagtggaaataccagtgacacccccgacattagttagtggtctgaagaacgtcaccgtcatcgagggcgaatccgtaacactcgaatgtcatataagtgggtacccatctcctactgtgacatggtacagagaggactatcagattgaatcaagcatagacttccagataacttttcagtcgggaatcgcccgcctgatgatacgagaggcttttgccgaagactctgggaggtttacctgttctgcggtcaatgaagccggtacagtgtccacatcttgttacctcgcagtccaagtatccgaggaattcgagaaggaaaccaccgccgtcacggaaaagtttacgacagaagaaaaacgtttcgtggagtctagagatgttgtgatgaccgatacctccctgacggaagaacaggcaggcccgggtgaacctgcagccccatacttcatcactaaacccgtagtacagaaacttgtagagggtggcagcgtggtatttggctgtcaggttggaggaaatccgaaacctcacgtgtattggaaaaagagtggcgtgccccttacaactggctaccgctataaggtgtcctataataagcagacgggcgagtgcaagctggtgatctccatgacctttgcagacgatgctggagaatacacgattgtggttagaaacaagcacggcgagaccagcgcctccgcgtccctgctggaggaagctgactacgagctgctgatgaaaagccagcaggagatgctgtatcagactcaagtaaccgccttcgtgcaagagccaaaggtgggagagacagctcctggattcgtatacagtgaatatgaaaaggagtatgaaaaggagcaggcattgatacgtaaaaagatggccaaggacacggtggtcgtgaggacatacgttgaggatcaggaattccacatatcttcctttgaggagagactcataaaggagatcgagtaccgcataatcaaaacaacactcgaagagctgctagaggaagatggcgaggagaaaatggcagtagatatctctgagtccgaggccgtcgagagcgggtttgactctagaataaagaattacaggatactcgagggcatgggtgtcacttttcattgtaaaatgagtgggtaccccttgcctaagattgcttggtacaaggatgggaaaagaatcaaacacggcgaaagataccagatggattttttgcaggatggcagagcatccctgcgtatccctgtcgtcctgccggaagacgaggggatttacacagcctttgctagtaatatcaagggcaatgcaatctgctcaggtaagttgtatgtcgagccagcggctcctctgggtgctcccacatacattccaacactggagcccgtctcacgcatccgctctctcagccccagatccgtgtcaagaagcccgatcaggatgtccccagctaggatgtctccagccagaatgtccccagcaaggatgtccccagcccgaatgtctcccgggaggcgtcttgaagagaccgatgagtcccagctcgagaggttgtacaagcccgtattcgtactcaagccagtgtcattcaaatgccttgaagggcagaccgcaaggttcgacttgaaagtcgttggccgcccaatgccagagactttctggtttcatgatggccagcagatcgttaatgactacacccacaaagtcgtaattaaggaagacggtactcagagccttatcatcgtgccagcaacacctagtgacagcggcgaatggactgttgtggcccagaaccgcgcggggaggagttcgattagtgtcatccttacagtggaggcagttgaacatcaggtgaaacccatgtttgtggaaaaactgaagaatgtgaatattaaggaagggtcgcggctcgaaatgaaggttcgggctaccgggaatcccaatcctgacatcgtgtggttgaaaaattctgacatcatcgtcccacataaatatcccaagattcggatcgaagggacgaaaggcgaggctgccctgaagatagactcgactgtgagtcaggattcggcttggtataccgccaccgcaatcaacaaagcaggaagggacactactcgttgtaaggtcaatgttgaagtggaatttgccgagcccgaaccagagagaaaattgattatccctagaggtacttatcgcgccaaggagattgcggccccggagcttgagcctctccatcttcgctacggtcaggaacagtgggaggagggtgacctttatgataaggagaaacagcagaaacccttcttcaagaagaagctgacgagcctccgactcaagcgcttcggccctgcccatttcgagtgtaggcttacccctatcggagacccaactatggtggtcgaatggctccacgatgggaagcctttagaggctgctaaccggcttcgcatgattaacgagtttggctactgttccctcgactatggggtggcatacagccgagattccgggattataacatgtcgagcgacgaataagtacggaacggatcacacgtccgcgacactgatcgtgaaggacgagaaaagtctcgtagaggaaagtcagctaccagaaggcagaaagggtctccagcgaatcgaggaactcgagcgaatggcacacgagggagctctcaccggcgtcaccacagatcagaaggaaaagcagaaacctgatattgttctttaccctgaaccggtccgggttttagagggagaaacagctcggttccggtgccgcgtgaccggctatcctcagcctaaagtgaactggtatcttaatggacaactgattagaaagagcaagcgattccgcgtgaggtatgatggaattcactatctggatatcgttgattgcaaaagctacgacaccggggaggtgaaagtgaccgcagagaatcccgagggtgtcatagagcataaagttaaactcgagatccagcagcgcgaggacttccggtctgtgctgaggagggcaccggagccccgtcccgagttccatgtgcacgagccaggaaaacttcagtttgaggtgcagaaagtcgataggccggtcgacactacagagaccaaggaggtcgtgaagttgaaacgggctgagcggattacccacgagaaagttcctgaagagtccgaagaattacggtccaagttcaagaggaggactgaagagggatactacgaagctatcacggccgtggagctgaagtctcgtaaaaaggatgaatcttacgaggagctcctgcgaaagaccaaagacgagctgctacactggactaaagagctcaccgaggaagaaaagaaggccctggccgaggaaggcaagataactatcccgacctttaaacccgacaaaattgagctgtctccgtcaatggaggccccgaagatctttgagcgaatacaatctcagaccgtgggccagggatcagacgcccattttagagttagggtcgtgggtaaacccgacccagaatgcgaatggtacaagaacggagttaagattgaacggtccgaccgcatctactggtattggccagaagacaacgtctgcgagctggtgattagagacgtgaccgctgaagactctgcttcaatcatggtgaaggcaattaacatcgctggagagaccagcagtcatgcctttctcctcgtgcaagccaaacagctcatcacttttacgcaagagctccaggatgtagtcgcaaaggagaaggacacaatggccacctttgagtgcgaaaccagcgaaccattcgttaaggtgaaatggtacaaagatggaatggaggtgcacgaaggagacaagtatcgaatgcattctgatagaaaagttcacttcctcagtatcttgaccattgacacctctgacgctgaggactacagctgcgtgctcgtggaggacgagaacgtgaagacaaccgccaaattgattgtggagggagctgttgtggagttcgttaaagagctccaggacattgaggtgccagagtcgtactcaggggagctggagtgtatagtttctcccgagaacattgagggcaaatggtaccacaatgacgtggaactcaaaagcaatggtaagtacacaatcacatctcggcggggccgacaaaacctgacggtgaaggatgtaactaaggaagaccaaggcgaatactccttcgtcatagacggaaagaagacaacatgcaaattgaagatgaagcctcgcccaatcgcaatcctccaggggctgtccgaccagaaggtgtgcgaaggcgacatcgtccagctggaggtgaaggtgagcctggagtctgtcgaaggtgtatggatgaaggatgggcaagaggtccagccttccgaccgcgtccacatcgtgatcgataagcagtctcacatgctactcattgaggacatgaccaaagaagatgcggggaattattcctttacaattcccgcacttggactcagtactagcggtcgggtgagcgtgtacagtgtggacgtcattacccctctgaaggatgtcaatgtgattgaaggcacaaaagcagttttggagtgcaaagtgtccgtgcccgatgtcacatctgttaagtggtatctaaatgatgagcagatcaagcctgacgacagggtccaggccatagtcaaggggacaaagcagagattggtgatcaaccgtacgcacgcatcggacgagggaccctacaaactgatcgtaggtcgtgtcgagaccaattgcaatctgtctgtagaaaaaatcaagatcatcagaggcctccgagacctcacctgcacagagacccaaaatgtggtgttcgaggttgagctcagccatagcggcattgatgttctgtggaactttaaggacaaggagatcaagcctagcagcaagtacaagatcgaggcccatgggaaaatttataagttaacagtgttgaatatgatgaaggacgatgaggggaagtataccttctatgctggcgagaatatgacgtcaggaaagcttacagtggcgggtggggcgattagcaagcctttgacagaccagaccgtcgccgagtcacaggaggcagtattcgagtgcgaggtagccaatccggactccaaaggagaatggcttcgggatggcaagcatcttccactgaccaataacataaggagtgagtccgatggccataaacggcgccttatcatcgcagccacgaaactggatgacataggagagtatacctataaggtggccacctcaaagacctcagccaagctgaaagttgaagctgtgaaaatcaagaaaaccctgaagaacctgacggtcactgagacccaggacgccgtgtttactgtcgaactgacacatccaaacgttaaaggcgtgcagtggatcaagaacggagtcgtcctcgaaagcaacgagaaatacgctatctccgttaaagggaccatatacagcctgcgcataaagaactgtgccatagtggacgaatcagtgtatggattcaggctggggcggctgggggcctccgctcggcttcatgtcgagaccgttaagatcatcaaaaaacctaaggacgtcacggcccttgaaaatgctactgtcgcttttgaggtctccgtctctcacgacacggtaccagtgaaatggtttcacaagagtgtcgagatcaagcctagtgataagcaccggctggtgtccgagcggaaggtgcacaagctgatgttacagaatatctcacctagcgacgctggcgaatacacagcagtggtcgggcagctcgaatgcaaggcaaagctctttgtagagacgttgcacattacgaaaacgatgaaaaatatcgaagttccagagacaaaaaccgcatctttcgagtgtgaagtgtctcacttcaacgtcccaagcatgtggctgaagaacggcgttgagatcgaaatgtctgagaagtttaagattgtagtccagggcaaactccatcaactgatcattatgaatacttccactgaggactctgcggagtatacgtttgtgtgcggaaatgaccaggtgagtgctacacttactgtgacccccatcatgattacatcgatgctgaaagatatcaacgctgaagagaaagatacaattaccttcgaggtgaccgtaaattacgaaggcatctcatacaaatggctgaagaacggcgtggaaataaaaagtacagacaagtgtcagatgcgaacgaagaagcttactcactcactgaatatacggaacgtgcactttggggatgcggcagactataccttcgtggcaggaaaagcgacctctaccgccacgctttatgtagaggcgcgccacattgagttcaggaagcatatcaaagacataaaagtgctagagaagaagagggccatgttcgaatgtgaagtgtctgagccggacataaccgttcagtggatgaaagatgaccaggagctacagattacagatcgtataaagatccagaaggaaaaatatgtgcatcgactgttgattccctccacacggatgtccgatgctggcaagtacacagtcgtggccggcggaaatgtttctacagctaagctgtttgtcgagggaagagatgtgagaattcgatctatcaagaaggaggtccaggttattgaaaaacagcgtgcggtagtcgagtttgaggttaacgaagacgacgtagacgcacactggtacaaggatggcattgagataaacttccaagtgcaggagagacataaatatgttgtggagcggaggattcaccgcatgtttatttccgagactcggcagtctgatgcgggggagtatactttcgtggccgggaggaaccggtctagcgttactctgtacgtaaacgcccccgaacccccccaggtcttacaggagctccaacccgtgaccgttcagtctggcaagcctgcgcggttctgcgcagtgatctctggtcgcccgcagcctaaaatttcctggtacaaagaggaacagctcttaagcactggcttcaagtgcaagttcctgcacgacggtcaggagtatacactgctgctgattgaggctttccctgaggatgcagctgtgtatacgtgtgaagccaaaaacgattacggggttgctactacgagtgcatcattgtccgtggaagtgcccgaagtcgttagccccgatcaggaaatgcccgtgtaccctcctgcgatcataacccctctgcaggatacagttacctccgagggacagcccgctcgctttcagtgccgggtgagtggaacggatctgaaggtgagctggtactccaaggacaaaaaaattaaaccatcacgtttctttcggatgacccagtttgaggacacctatcaactggaaatcgccgaggcttaccccgaggacgagggcacgtatacattcgtggcttctaacgctgttggtcaggtctcgtccacagcaaatctgtctcttgaggctcccgaatccattctgcacgaaagaatcgagcaggaaatcgagatggaaatgaaagagctgttcagcgagggagagagcgagcattctgagcgggacacccgtgacgcattttctgatagtgaggacatcgatcataagagcatggccgccaagaggtacgcttcaagaatctcaagcacatcctcttggcccgagtattttaaaccctcattcactcaaaaattgacatttaagtatgtgctcgagggtgaacccgttgtgttcacttgtagattgattgcatgtccaacaccggagatgacctggttccataacaacagacctatcccgaccggactccgaaggatcattaaagctgagtccgatctgcatcatcactcgtcctcccttgaaattaagcgcgtccaggatagggattccggctcttatcggctactggccattaactcagagggaagtgcagaatccaccgctagtcttcttgtgatccagaagggacaagatgaaaagtacctggaattccttaaacgcgcagagcgcacacatgagaatgtggaagctctggttgagaggggtgaggaccgaatcaaagtggacctaagattcacgggtagtcccttcaataaaaaacaggatgtggaacagaagggcatgatgcgtacaatccacttcaaaaccatgagtagcgcgaagaaaacggattacatgtatgacgaagagtacctcgagtctaagtccgatataagaggctggctgaacgtgggagagtcctttctggacaaagagaccaaagtgaagctgcagcgtcttcgcgaagcacgcaagaccctcatggagaagaagaagctaagcctgctggatacatccagcgagatttccagcaggaccctaagaagcgaggcaagcgataaagatatcctcttcagccgcgaggatatgaagattcggtctatgtctgacctggctgagtcttataaggtggaccattcagcagagagcatcgttcaaaatcctcacgctctgtctaaccagatggaccagaatatcgagtccgaagagctccccactagctttcagaccattgtcgatgaggagatcttccagactgagattagaatgagccaggaagccctcgtgaaggagtcacttcccaaagatcacctctacggggagattttggttaatgagaatacccaggcacgcgggcagttggaagaaatcatggctaataccacaatcggcgaatccagcacctacataaccaacgtgtgtgagaaagaggaggtgtacgagaccccagaaaatgtctcacaggctatcacaccacatgcttcagagtccttcggcacccttgtcaatgtagaggaatcagaagagatcgcctctgaacggattaaaaaggatgaccttcgtgaacttcagctcagtgcatcgactcgtattgacgagttcaagacggagcagaaggaagagaatatgagatttttcgagaatagcttccggaagaggcctcagcgctgcccaccaagctttctgcaggagattgaatctcaggaggtgtacgaaggagattcatgtaatttcgtgtgtcattttcaggggtaccctcagcccattgtgacctggtataacaacgacatgcctataccacggaaccagaatttcataattcatagtctcgagaattacagcattctcaccctgtcttcagtccatcatcagaatgagggctctattacctgcgtcctatttaaccagtacgggacagtcaagacaaccagtatgctgaaggttaaggccaaacagaagcatgacgtgaaagcccataaagtgccggttttccatgactacttggacgaggaggaggagctggctctcgtgtttgaccaggcgaaaggagcccacccctctatgtcacaggagggacaaaccaacctgcatctgctaaagacgaacccgcccgtccctccaagcggagacaccgaactgctgtccttcccagttgaaatacaggtcacagccgccaccccaataccagaacaggacaaggagagtaaggaagtctttcagaccgaggagctggaaccaaaagctatgccgcaggatcaggtgacccaatctcctaagcatcgcttcgtattcctgagtgacattactaacgagcctccgaaaatgctgcaagagatgccaaaacacgccagatgccgtgaaggagatagcattatcctggagtgccttatctctggcgagcctcaacccgtcgtaacctggtttcaaaacggtgtgctgctgaagcaaaatcagaagtttcagtttgaagaggtcaattgcagccaccagctgtacatcaaggatgtcaattcacaggactccggcaagtacaagtgtgttgccgaaaacaattccggggccgtagaatcagtcagcgacctgaccgtcgaacccgtcacatacagagaaaacagccaattcgagaatatcggcgaaatctatggcaagtactcccgggatcagcagctgcaggaccagggcgagtctgtaagggcccacttttacgactaccccgcaggaccgtttacaccctggaccaacgtaaaggagtactccgtgagggattacttccagtcactggagacgattgagcaaattgaccagaaggagcaggtgcgatgtattccttcccgcgagaagataccgcgcttcgtgcacggggcatcaaggaccatcaaaatctccaagcctattcgggccgaattcatccaatgccaggctgaaggtaaggagcggcacgtctcagaaaagtccaagcttcatcaggctgagggaaccgtttacccatttgttgatgacttctccgacgtcacaatcaagaaagaaatcaggaataacttcggcaaactggggaggtctgaaaaagaaaatgtgcaggaatgcgcacagtcggattacctcccaaacatccactctgagcggatctctgacagctacaataccaaggacagctccgcaattgtgtatgaggagtctctgggagaggagatacactatccgggcaaaaaggtgaagcaccgaattatagaatttgagaaactgcacgtggaaaagggggttcttgagaaaaggcctaccaggacgagcattgtaaatcctccccagaagaaaattgatgataaagcattctcccttaagcagagagagtccagaagtagtaacctgaatgccaacatgtaccaggccgagaagatgtcacccaacacagaatctgactcctcaaacatcgcaattaacttaaagttactgtcgagccagacccacaaggagttcgatgcccaggagagagagcagcaggagaagatttctctgatcgataaacctgcgatcagcaagcgagccgagcacgaaagtcccattacctttgacttaaagcagttccatacccaaatcaaacatacagatgttaaattccaggagttagacagcggccagccagaggaagcttactttaaaatccaacacccggcagacaccgaaaacattgttttcgaccttaaacagatgtattcgcacataggtgaccccgccctcgaatttcaagggcaagaaaccagagagcaacaggagatacactataaggaaaagattcccagtccagagactcttcagccagatacccataacattagtaagagtgtgcagaacaatgtgtttgcttcccaagaaatctcgtcgagccaggagctgagtaatagaacaatggtggagaagtccagtattgacgaaaacagcatatctctggagaaggaggtccggcacgtgcaggagcagaatctcgatatacttaaaacagacctatcattgaagtcattcagtgaggagatctacagcgaaagctgtgctctgctgcctacgtcttcagcagacatagaggaaacagaccttagtgagaaatcttgccctctggaaaacgggggacgctcaagcatttctcacctcaaaaaggccgctagcgaagagaaaccactgggtgtcggtgagatggaggaggaatgcaccctcgaaccagaattagccgcttttccaaagcaggacggcgggacacaggaatacacagacgccacactcgaagatcaccgcggcgacgtccaggaagctgacacgcttcatagacaactgagtctatctcaatgcttcccactcttgatgaccgaggagcagcagaacccaggtgagcagatctcaaccaatatccatgctagtggcgaggagaaatgctacgaagaggtccaggtccagaacgaggcttcgtttagcacacttgaaggggagatgatcgaaacatcattctctcagaacattccaaaactggacgaagcccacactactgaagcggccgaatccgagacctccctgacacagtacctccttgctgcaggaaaacgcgaggtgccagaaacaaaggataccagagatcaggcaaaattggtccaatccgaatctatcaccagtatggaagtggaggaggtgacctttaacacagtgtacgagtactacaatcagaaacaagaatcgctgggcaggcctctcagcccagaaagtgatataagtataggtgtgggctccacgacctcggaggagatctcagaactggaccagttttacacaccaccctcttctgtggagtactttgagagtcctaagagccccgatctctactttaatccttcagatatcactaaacagtcttcaatccacagtggaggtgagaccgttgagcggtattctactcctcttggtgaagtcgcagaacgctactctactcccagtgagggtgaagtgggggaacgctattccacacccccaggtgagacattggaaaggtattccacgcccccaggcgaaactctcgagcggtatagcaccccccccggcgaaacgctggagcgctacagcacaccacctggcgagaccctagagcgctattcgactccccctggcgagacgctggaacgctactcaacgccccccggcgaggccctggagcgatactccattcccaccggtggcccaaaccccacgggaacattcaaaacctacccctctaaaattgagcgcgaggacggtacgccgaatgaacacttttacacccctaccgaggagagaggctcggcttacgagatctggaggagtgactcatttggcacgcccaacgaagccatcgagcccaaagataatgagatgccacctagcttcatcgagccactaaccaaacgcaaagtctacgaaaacaccaccctgggctttattgtggaagtcgagggcttgcctgtaccaggagtgaagtggtatagaaataaatccttactggagccagacgagcggataaaaatggagagggtgggaaatgtgtgttccttggagatttctaacatccagaaaggtgagggcggcgagtatatgtgtcacgccgtgaatattattggcgaggctaaatcctttgcgaatgtagatatcatgccacaagaggagcgcgtggtggcgctgccccctcctgtgacacaccaacacgtgatggagttcgatcttgagcacactacttcttcccgcactccatccccccaagagatcgtcttggaagtcgagctctccgagaaggacgtgaaggagttcgagaagcaagtgaagatcgtgacggtacctgaatttactccagaccataagtctatgatcgtgtccttggatgtgcttccgttcaactttgtagaccccaacatggactctcgtgagggtgaggacaaggagttgaaaattgacctggaggtatttgagatgccgcccagattcatcatgcccatttgtgacttcaagatccccgagaattctgacgctgtctttaagtgttcagtgattgggattcccactccggaggttaaatggtataaagagtatatgtgtattgagcctgacaacatcaaatatgttatttccgaagagaaaggcagccatactcttaagattagaaatgtgtgcctcagcgattccgccacgtaccggtgtcgtgctgttaactgtgttggtgaagcaatttgccgaggtttcctgacaatgggagacagtgagatctttgccgttattgccaagaagtcgaaggtgaccctgtcatccctgatggaggagctggtgttgaaatcaaattacacggactctttcttcgaatttcaggtagtcgaggggccgccccggttcatcaaggggatctccgactgctacgcccccatcggtaccgcagcctactttcagtgcctagttcggggctcacctcgtccaaccgtgtactggtacaaggatggcaaactggttcagggtcgtcggttcactgttgaagaatcgggaactggcttccataatctctttattacaagtctggtgaagtccgatgagggcgagtaccgttgtgtggccactaacaaaagcgggatggccgagagctttgccgcactgactctaacatag

SEQ ID NO: 234972 - DNA, 2658 bp, Artificial Sequence
  derived and/or modified sequence
atggtggaaaaaagttccattgatgaaaattctatttctctggagaaggaagtacgacacgtccaagaacagaatttggatattctaaagactgatctgagcttgaaaagcttttctgaggagatctactctgagtcctgtgccttgcttcctacttcgtctgccgacattgaggagactgatctttccgaaaagtcttgccctctcgagaacgggggacgcagctccatcagccacctaaaaaaggcagcctccgaagaaaagccactcggcgtcggtgaaatggaggaagaatgtactcttgaaccagagctggcagcgtttccaaaacaggatggtggaacccaggagtacacagatgcaacactggaggaccacagaggcgacgtgcaggaagctgataccctccatcggcagctgtcactgtctcaatgctttcctttactgatgacagaggagcaacaaaaccccggagagcagatcagtacaaatatccacgcctccggcgaagaaaaatgctacgaggaagttcaggtacagaacgaggcctcctttagcaccctcgagggagagatgattgagacctcttttagtcagaatatcccaaagctcgatgaggcgcacaccacagaggcagccgagagcgagacttctctaacccaatatctgctagcggcagggaagcgtgaggttcccgagaccaaagacacgcgagaccaggctaaattggtgcagtcagaatctattacctccatggaggtcgaggaggtaacctttaacacggtctatgagtactataatcagaagcaagagagcctcgggagacccctctctccggaatctgacatctccataggcgtcggctccactacatcggaggagattagcgagctggatcagttttatacgccaccctcctctgtagagtacttcgaatccccaaaaagccctgatctgtacttcaatccaagcgatataacgaaacagtccagcatccacagcggaggcgaaacagttgaacgttacagtacacccctcggggaagtggccgagagatattctacaccaagtgagggagaggtgggagaaagatacagcacccctcccggtgaaacacttgagaggtactcaacccctcctggtgagaccctggagaggtattctactcctccaggtgaagcgcttgaacgatattccattcctacggggggtcctaaccccaccggaacgtttaagacttacccctctaaaatcgagcgggaggacggcacccctaacgaacacttctatactcccactgaagagcggggtagcgcttacgaaatatggagatccgatagctttgggacacctaatgaagctattgaaccaaaggacaacgaaatgcccccatccttcattgaacccttgaccaagcggaaggtgtacgaaaacaccacactgggattcatcgtggaagtcgaagggctcccagtgcccggtgtcaagtggtacaggaataagagcctcttggaacctgacgaaaggattaagatggaacgtgtgggtaacgtctgcagtctggaaatttctaatatccaaaagggggaggggggagagtatatgtgtcatgctgttaatataatcggtgaggccaaaagtttcgcaaacgtcgatatcatgccgcaggaggaacgggtggtagcgctacctcccccagtcacccaccagcatgtaatggagttcgatctcgaacacactacttcctctaggactccaagccctcaggagatcgtgctcgaggtggagctgtcagagaaggacgtaaaggaattcgagaagcaggtcaagattgtgacagtgcctgaatttactcccgatcataaaagcatgatcgttagtctcgatgtgctaccctttaattttgtggaccctaatatggattctcgtgagggtgaagacaaagagcttaagattgacttggaagtgttcgagatgccccctcgcttcataatgcccatttgcgatttcaagatccctgagaactctgatgccgtttttaagtgcagcgtgatcgggattcccacgcctgaggttaaatggtacaaggagtatatgtgcatcgaaccagataatataaagtacgttattagcgaggagaaaggatcccatactctcaaaattagaaacgtctgtttgtcagacagtgctacttaccgctgcagagcagtgaactgtgttggcgaagcaatttgtagaggatttctaaccatgggggattctgaaatatttgcggtgattgccaaaaaatccaaagtgaccctctccagcctgatggaagagttagtcctaaaaagcaattacaccgattcttttttcgagttccaggttgtggagggccctcctaggttcattaaaggaatttcggactgctacgcaccaataggaaccgcagcctattttcagtgcctcgtcaggggtagccctaggccaaccgtgtattggtataaggatggaaaactagtgcagggcaggaggtttaccgttgaggaaagcggtacaggcttccataacctctttatcactagtcttgttaaatctgacgagggagagtatcgctgcgttgccacaaacaagagtggaatggcagaatcgtttgcagcgctcaccctcacatag

SEQ ID NO: 234973 - DNA, 16815 bp, Artificial Sequence
  derived and/or modified sequence
atgaccacacaggcacctactttcactcaacccttacaaagcgtagtagtgttggagggatctactgccacattcgaggctcatattagcgggtttcctgtgcctgaggtgagctggttccgggacggtcaggtgatctcaacttctaccctgcctggagtccagataagtttttctgacggacgcgctaagctcactatacccgcagtgaccaaagccaattccggtcgctactccctgaaggctaccaatggcagtggtcaggcaacttctactgctgagctcctggtgaaggccgagaccgcacctccgaatttcgttcaacgcctgcagagtatgaccgttaggcaagggagccaggttcggctacaggtgcgggtaaccgggattccaacgcccgtagtgaaattttatcgggacggagctgaaattcaatcaagcctggactttcagatcagccaagagggagacctctatagtttgctgatagcggaagcctaccccgaagattctggaacgtactcagtgaacgccaccaatagtgtgggccgagccaccagtactgccgaactcctggttcaaggcgaggaggaagtgcccgctaaaaagactaagaccattgtgtccactgcacagatttcggagagtcgccagacaaggatcgagaagaagatcgaggcacattttgacgctaggtccatcgccacggttgagatggtcatcgatggcgcagccggacagcaactcccgcacaaaacacccccacgcatccccccaaaaccaaagtcccgctcccctaccccgcctagcattgccgctaaagcgcagttagctcggcagcagtcaccatcaccaatccgccactctccaagccctgttaggcacgtacgggcacctaccccgtcaccagtacgttcagtgtcgccagcagcacgaatctccacttctcctatccggagcgtgcgtagccccctactcatgcggaaaactcaggcctccacagtggccaccggccctgaagtgcccccaccctggaagcaggaaggctacgtggcaagctcctccgaagccgaaatgagagagactaccttgacaacctccacccagatccgcactgaagagcggtgggaaggcaggtacggcgtgcaggaacaggtgacaatcagtggtgcagccggagccgctgcttccgtttcagccagtgcctcttatgctgccgaagctgtggctactggagcaaaggaagttaaacaggacgccgacaaatccgcggctgtggctactgtggttgccgctgtcgacatggccagggtgcgggaaccagtgattagtgctgttgagcaaacggctcaacgcaccacaaccacggctgtccacatccagccagcgcaggagcaggtaagaaaagaagccgagaaaactgcggtcacaaaggtcgtcgtggctgcagacaaggctaaggaacaggaactaaagagcagaaccaaggaggtgattacaaccaagcaagaacagatgcacgtgacccacgagcagatacgaaaggagaccgaaaagacattcgtgccaaaggtcgtgatcagtgcagcaaaggctaaggagcaggagacgagaatctccgaggagatcaccaagaagcagaagcaagtcacccaggaggccattcgacaggagacagagattactgctgctagcatggttgtggtggcaacagcaaagtctacaaagctggagaccgtgccgggtgctcaggaggagaccaccacccagcaagatcaaatgcatctaagttatgaaaagattatgaaagaaacaaggaagacagtggtgccgaaagtcatcgttgctacccctaaagtcaaagagcaggacttggtgagcagagggagagaagggatcaccacaaagcgagaacaggtacagattactcaggagaagatgaggaaggaggccgagaaaactgctctttccacaatcgccgtggcgacagccaaggccaaggaacaagaaacaatcctgaggacccgcgaaaccatggccaccagacaggaacagatccaagtgacccatggtaaagtagacgtaggtaaaaaagctgaggccgtagccaccgtggtcgccgcagtcgatcaggccagggtgagggagcccagagagccaggacacctggaggagtcatacgcacagcagacaacgctggaatacggctacaaagagaggatatctgccgctaaggtggctgaacccccacagcgccctgctagcgagcctcacgtggtccccaaggctgtaaaacctagggtgatccaggcgccatctgaaacccatatcaaaacgacagatcagaaaggaatgcacatcagctcccagattaaaaagaccacggacctcactacagaacgcttggtccacgtggataaaagacccaggaccgcgtctccccattttactgttagcaagattagcgtgcccaaaaccgagcacggatacgaggcgagcattgcgggatccgctatcgctaccctgcaaaaggagcttagtgcaacgtcttccgcccagaagattacaaagagtgtcaaggccccaaccgtcaagccctcagagacacgagtccgcgcagagcctacgcccctccctcagttcccattcgccgatacaccagacacgtacaaaagcgaggccggtgttgaagtgaaaaaggaggtgggagtgtccattactggtacaaccgttcgcgaggagcgttttgaggtgctgcatggccgagaagccaaagtaacggagacggctagagtgccagctccagttgaaattcccgtcactccgccaaccctggtgagcggacttaagaacgtgacggtgatcgagggcgagtcagtgacgctggaatgccacattagcggttacccctctccgaccgtcacgtggtatagggaagattaccaaatcgagagttcaatcgatttccagatcacatttcagtccggcatcgccagactcatgattagagaagctttcgccgaggacagcgggagattcacctgtagtgctgttaacgaagcaggtacagtttctacctcgtgctacctggcggtgcaggtaagcgaggagtttgagaaagaaaccactgctgtgaccgagaagttcacaaccgaggagaagcgcttcgtcgaatcccgagatgtagtgatgacagatacatctttgaccgaagagcaagccggaccaggcgagcctgccgcaccctatttcatcaccaagcctgttgtgcaaaagctcgtggaagggggaagtgtcgttttcggctgccaggttggcggaaatccaaagccccacgtctactggaaaaaatccggagtaccactgaccactgggtaccgatacaaagtgtcctacaataagcagacaggcgaatgcaagctggttattagcatgaccttcgccgacgacgccggagaatatacaattgtggtccgtaacaagcacggggagacttctgcaagcgccagcctgttagaagaggccgactacgaactcttgatgaagtctcagcaggagatgctctaccaaactcaggtcactgcattcgtccaggaaccgaaggtgggagagactgctcctggatttgtatatagcgagtacgagaaggaatatgaaaaggaacaggccttgattcggaaaaagatggctaaggacacggtggtggttagaacctacgtggaggatcaagagtttcacatctcctcattcgaagaacgtctaatcaaggagattgaatacagaattatcaagaccaccctcgaagaactcctggaagaggacggagaggaaaagatggccgtggacatttccgagtcggaagcagtagaatcagggttcgacagccgaattaagaactaccgaattctcgaaggaatgggggtaacttttcactgcaaaatgagcgggtacccactcccaaaaattgcttggtacaaggatggcaagcggattaagcacggcgagcgataccagatggattttctccaggacgggagagcaagtcttagaattccggtcgtgctgcctgaggacgaaggcatctacacagccttcgccagcaacatcaaaggtaacgccatctgctccggaaagctttatgtggagccagctgctccacttggtgccccaacgtacattccaacacttgaacccgtcagtcggatccgtagcttgagtcccaggtccgtttcgcggtcacctatacgcatgtcgccagctagaatgagtccagcacgcatgagtcctgccaggatgtcccctgccagaatgtcaccaggtcgacgtttagaagagactgatgaatcacagctagaaaggttgtataagcctgtcttcgtcctgaagccagtctcctttaagtgcctggaagggcagacagccaggtttgaccttaaagtagtcggaagacctatgcctgaaacattttggtttcatgatggacaacagatagtgaacgattatacacataaggtcgtgataaaggaggacggtactcagagtctgatcatcgtccccgcaacccctagcgacagtggcgaatggacagtggtggcgcagaaccgcgcaggacggtctagtatttctgtgatcctaacagttgaagccgtcgaacatcaagttaaacctatgttcgttgagaaactgaagaacgtgaacatcaaggagggttcgcgattagagatgaaggtacgcgctacagggaaccctaaccctgacattgtctggttgaaaaactccgacataatcgtgcctcacaaatacccaaagatcagaatcgaaggcacaaagggcgaagcagctctcaaaatcgactcaactgtgtcccaggactctgcctggtataccgctactgcaatcaacaaagcgggacgggacacaactaggtgtaaggtcaatgtggaagtggagttcgccgaaccagaacccgagcgcaaactcatcattcccagaggaacttaccgggcaaaggagatcgccgctccggagctcgagccgctgcatctaagatatgggcaagaacaatgggaagaaggggacttgtacgataaggagaaacagcaaaagcccttttttaaaaaaaagctgacctctcttaggctgaagcggtttggccctgctcactttgagtgtcgattaactcccatcggtgatcctacaatggtcgtcgagtggctacacgacggcaaacccctggaggccgcaaaccggctgagaatgatcaatgaattcggttattgctcgctcgattacggggtggcctattccagagattcaggaataatcacatgccgggcaaccaataaatacggcacggatcatacctcagccacactgatcgtgaaagacgagaagagcctggtggaggaaagccaactcccagaaggccgaaaaggtctgcagcgaatagaggagcttgaaaggatggcacatgaaggcgctcttaccggagttacgactgaccagaaggagaagcagaaaccggatatcgttctgtaccctgagccagtccgcgtactcgagggcgaaaccgcccgattccgatgtcgggttacaggttacccacagcctaaggtaaactggtacctcaatggtcagctaatcagaaaaagcaagcgcttccgagtccggtatgatggcatccactaccttgacatagtcgattgcaaatcgtacgatacaggtgaagtcaaggtcactgcggagaaccctgagggcgtgatcgaacataaagttaagcttgagatacagcagagagaagatttccggtctgtgctgaggagagctcctgagccacgccctgaatttcacgttcacgagccaggtaaactgcaatttgaggtgcagaaggtggatcgcccagtggacaccacagaaaccaaagaagtcgtgaagctgaagcgcgctgagaggatcactcacgaaaaagtgcccgaagaatctgaggaactaagaagcaagttcaagcgcagaacagaggagggctattatgaagctatcacggctgtggaactgaagtctcggaagaaagacgagagttacgaagaactccttcgtaaaaccaaagatgagttgctccactggactaaggagttaaccgaggaggagaagaaggcccttgctgaggaaggcaagattacaatcccaaccttcaaaccggataaaatcgaattgtccccctctatggaagccccaaagatcttcgaaagaatacagagccagactgtcgggcaggggagcgacgcgcacttccgcgttagagtggtaggaaaacctgatcccgagtgtgaatggtataagaacggagtgaagattgaaaggtctgaccgcatctattggtactggcctgaggataacgtttgcgagctggtgatacgcgacgttactgccgaggacagcgcgagtatcatggtcaaagccatcaacatagctggtgaaaccagctctcatgcttttttgctcgtccaggccaaacagcttattactttcacgcaagaactccaggacgttgtggctaaggagaaggacaccatggccaccttcgagtgtgagacatccgaaccttttgtcaaagtgaagtggtacaaggacggaatggaggtgcacgaaggtgataagtatcggatgcatagtgacaggaaagtgcacttcctgtccatccttactattgatactagcgacgccgaagattattcttgtgtactggttgaggacgaaaatgttaaaaccacagccaaactgatcgttgagggcgctgtggtggagttcgtgaaagagctgcaggacatcgaggttccggaaagctactctggtgagctggagtgcattgtgtcccccgagaacattgagggcaagtggtatcataacgatgttgagcttaagagtaatggaaagtacacgatcacgtcaaggagaggaagacagaacctgactgtgaaagatgtcaccaaagaagatcagggcgagtatagctttgtgattgacggaaaaaaaactacctgtaaattaaagatgaagcctagacctatagccatcttgcagggcctgagcgatcaaaaggtatgtgaaggcgatattgtccaacttgaggtgaaagtgagtttagaatcagtagaaggggtctggatgaaagacggacaggaggtgcagccatctgatcgggtgcatattgtcatcgacaaacagagccacatgcttctgattgaggacatgaccaaagaagacgctggcaattactcttttactattcccgcattgggtcttagtaccagcggcagagtttcagtttactccgtggacgtgattacccctcttaaggacgtgaatgttattgaaggaacaaaagcggtgctcgaatgtaaagtttcagtccccgatgtgaccagtgtgaaatggtacctaaacgacgaacaaatcaagcctgatgatcgggtccaagctattgtgaaagggacaaagcaacgtctggtgatcaacaggacccacgcttctgacgaaggtccatacaaactcatcgtcgggcgtgtggaaaccaattgcaatttaagtgtcgagaagattaaaattatacgcggtctgcgcgatttaacttgcaccgaaacccagaacgtcgtctttgaggtggagctctcccacagtggcatcgacgtgttgtggaactttaaggacaaggaaattaagccttccagcaagtacaagatcgaggctcatggcaaaatctataaactcacagttctgaatatgatgaaagacgatgagggaaaatacacattctacgccggtgaaaatatgacaagtggcaagttaactgtggccggtggggcaatatcgaagccgctgaccgaccagactgtggccgagagccaggaagccgtatttgaatgtgaagtggctaacccagattctaagggagaatggctgagggatggtaaacacctcccactaacgaacaacatacgctccgagtccgatggccataagcgcaggctgattatagccgctaccaaattggacgacatcggtgaatacacttacaaggttgccacctcaaaaacatctgcaaaattaaaagtggaggctgtcaaaatcaagaaaacactgaagaacctgacggtgacagagacccaagacgccgtctttaccgtggaactgacgcatcctaacgtaaaaggggtccaatggatcaagaacggagtggtgctcgaaagcaatgagaagtacgccatcagtgtgaagggaactatctacagtctccgtataaaaaattgtgcaatagtggatgaaagcgtttatggcttcagattgggcagattaggtgcatcagccaggctgcacgtggagactgtgaagattataaagaagcctaaagacgtcaccgctcttgaaaacgccactgtcgctttcgaggtgagcgtatctcacgacaccgtccccgtcaagtggttccataagagcgttgagatcaagcctagcgacaaacatcgactcgtgtcagagcgcaaagtccacaagctcatgctccagaacatttcaccatcagatgcaggggagtacacggctgtagttggtcagctcgagtgtaaagccaagctcttcgtggagactttacatatcaccaagactatgaaaaacatcgaggtacctgaaaccaaaactgcgtcctttgagtgcgaggtctcgcattttaatgtgccttccatgtggttgaaaaatggggtcgaaattgagatgagcgagaagtttaagatcgtggtgcagggaaaactccaccagctcattattatgaataccagcaccgaagactccgcggaatatacctttgtgtgtgggaatgaccaagtgtctgcaactcttacagttacgcctataatgataacaagcatgttgaaagatatcaacgcagaggagaaagatacaattactttcgaagtcaccgtgaattatgagggcattagctataagtggctcaagaatggcgtggagattaaatctactgataaatgccagatgagaacaaagaaactgacccatagtttaaacatcaggaatgtccacttcggagatgctgccgactacacattcgtggccggtaaagccacaagtaccgctacgttgtatgtcgaggccaggcacatcgaatttcggaaacatataaaggacataaaagtcctggagaagaaacgcgctatgtttgaatgcgaagtctcagaacccgatatcacggttcaatggatgaaggacgaccaggagctacaaatcaccgatcgcatcaagatacaaaaggagaaatacgtgcaccgactgctcatcccttctactaggatgtctgatgcaggaaagtacactgtagtcgccggtggcaacgtatccactgcgaaactgttcgttgagggcagggatgtgaggattagaagcattaagaaggaagtccaggttatcgaaaagcaaagagctgtagtggagtttgaagtcaatgaagacgacgttgatgcacactggtataaagatggcatcgagattaacttccaggtccaggagcgccacaaatatgtggtggaacgaagaattcacagaatgttcatctcagaaacacgccagtcagatgctggcgagtatacgtttgtggctgggagaaatcggagttccgttactctgtacgttaatgctcctgagcctcctcaggtgctgcaggagctgcagcccgtaacagtccagagcggcaaaccagctagattttgtgcggttatttccggtaggccgcaaccaaaaataagctggtacaaggaggagcagttgttgtctaccgggttcaaatgcaagtttttgcatgatggacaggaatacacattactgctgatcgaggcgttccctgaggacgccgctgtgtatacttgtgaagccaagaatgattacggagtcgcaaccacaagtgcctcgctgagcgtggaagtccccgaggtggtctcccctgaccaggaaatgccagtgtaccctccagcaattatcacacctctgcaagatacagtcacttctgaaggtcaaccagcacggtttcagtgtagagtaagcgggactgacctgaaggtttcttggtactcaaaagataaaaagatcaaaccttctcgattttttagaatgacccaatttgaggatacctatcagctagaaattgccgaggcctatcccgaagatgaaggaacgtacacattcgtggccagcaacgcggtaggtcaggtgagttcaaccgctaacctgagcctcgaggcccctgaatcaatcctccacgaaaggatcgaacaggaaatcgagatggaaatgaaggagttattcagcgagggcgaaagcgaacacagcgagagagatacgcgggacgcatttagcgatagtgaagacatcgaccacaagagcatggcagctaagcgctacgcctcacgaatcagcagcacctcctcgtggcctgaatactttaagccctcttttacgcagaaactcacattcaagtacgtcctggagggtgaacccgtcgtcttcacatgccgattaattgcctgtccaacaccagagatgacttggttccacaacaaccgtcccatcccgaccggcttgcgcaggataataaaagctgaaagtgatctgcaccaccatagcagctctctggaaatcaagcgggtccaggacagggattctgggagctacaggctcctggcaatcaactctgaaggcagcgcagaaagcacagccagtctgttggtcattcagaaaggtcaggacgagaaatacctggaatttctgaagagagccgagagaacccacgagaatgttgaagccctcgtggagcggggtgaggatcggatcaaagtagacttgagattcacaggctcccctttcaacaagaaacaagatgttgagcagaagggtatgatgcgcaccattcacttcaagacaatgagctctgccaaaaagactgactatatgtatgacgaagagtacctggagagcaagtccgacatccgcggatggttaaacgtgggggagagtttcttagacaaggaaaccaaggtgaagttgcagaggctcagggaggcacgcaagaccttgatggagaagaaaaaactgtcgcttctggatacttcttctgaaatcagtagtcggacacttagatccgaagcctcagacaaggatattctgttcagccgagaagacatgaagatccggtccatgagcgatctggcagaatcctataaggtagaccactcagcagaaagcatagtccagaaccctcatgccttgtcgaaccagatggatcaaaatatagaatccgaggagctgcccaccagcttccaaacaatcgtggatgaagaaatcttccagacagagatccgaatgtcacaggaggctctagttaaggagtccctacccaaagaccacctctatggagaaatactggtgaacgaaaatactcaggctcggggtcaactcgaagagatcatggcaaatactacaattggcgagtcatctacctacataacaaatgtttgcgaaaaagaggaggtttacgaaacacccgagaatgtgagccaagcaattactccacatgcaagcgagagcttcggaaccctggtcaacgtggaggagtccgaagaaattgcttcagaaagaattaagaaagatgatttgagggaacttcagctctcagcgagcacacgtatcgacgaatttaaaacagagcaaaaggaagagaatatgcggttctttgaaaactccttccgaaagaggcctcagagatgcccaccgagtttcttgcaggagattgagtcgcaagaagtttacgaaggggactcctgtaacttcgtctgtcactttcagggttacccgcaaccgatagttacatggtataacaacgatatgccaattcctcgaaatcagaacttcattatccactctctcgagaactactccattctgactctgtcctctgtgcatcaccagaatgaaggttcaataacatgtgtgcttttcaatcagtatggaacggtgaagacaacctcaatgcttaaggtcaaggccaagcaaaagcatgacgtgaaggcccataaagtgccagtcttccacgactacctggatgaggaagaggagctggccctggtcttcgaccaggcaaagggtgcccacccctccatgtcccaggaggggcagacaaaccttcaccttcttaaaacaaaccccccagtaccacccagcggggataccgaactcctgagcttccccgttgaaattcaggttactgctgctaccccgatccctgaacaggacaaagagtcgaaagaggtttttcagaccgaggagctggagcctaaagctatgccccaggaccaggtcacccaaagccctaagcataggttcgttttcctgtctgacatcacaaacgaaccacctaagatgctgcaggagatgccgaagcatgccaggtgccgcgagggcgactctatcatcctcgagtgtttaatttccggagagcctcaaccagtggtaacctggttccaaaacggcgtgctgctgaagcaaaatcagaagttccagtttgaggaagttaactgttcacatcagctgtatatcaaggacgtaaacagtcaggactcaggaaaatacaaatgcgtggctgagaataattccggggcagtggagagtgtgtccgacctcacagtggaaccagttacttaccgagaaaattctcagtttgaaaacatcggggagatctatggaaagtattctcgagaccagcaattgcaggaccaaggcgagtcagtgcgagctcacttttacgactatcccgcaggccctttcacgccctggacgaacgttaaggaatattccgttcgggattattttcagtcactcgagaccatagaacagatcgatcagaaagagcaggtacgatgtattcctagtcgtgagaagattccgaggttcgtacatggggcaagccggaccattaagatctcaaaacctattcgcgcagagttcattcagtgccaagctgagggcaaggagcggcatgtctccgagaagtcgaagcttcaccaagccgaggggacagtgtatcctttcgtcgacgatttttctgacgtcacgatcaagaaggagatcagaaataatttcggcaaactgggacggagcgaaaaggagaatgttcaggagtgtgctcagagtgattatctcccaaatattcactccgagcggatcagcgacagctataatacaaaagactcctctgcgatcgtgtacgaggagtctctcggggaagaaatccattaccccggtaaaaaagtgaagcatcgcattatcgagtttgaaaaacttcatgtggaaaaaggggtgctggaaaagcggccaacaagaactagcatcgtaaatccccctcagaagaagatcgacgacaaggcattttcccttaaacagagagagtctcgctcttccaatctgaacgcaaacatgtatcaagccgagaaaatgagccctaacacagaaagtgatagctccaatattgccattaacctgaaattgctgtcttctcaaacacacaaggaatttgacgcccaggagcgcgaacaacaggaaaaaatctctctcatcgataagcccgctatttctaagagggctgagcacgaaagccccatcaccttcgacctgaagcagtttcatactcagattaaacatacagatgtcaaattccaagagctagattctgggcaacccgaagaagcttatttcaaaatacagcaccccgctgacacagagaacatcgtgttcgatttgaagcaaatgtacagccacatcggggacccagcactggaatttcagggtcaggagaccagggagcaacaggaaatccattacaaagagaaaatccccagccctgaaactctgcagcctgatactcacaacatctctaaatcggtccagaataatgtgttcgcgtctcaggaaatctcttcttcccaagaactatccaatagaacaatggtggaaaagtcatctatcgatgaaaattccatctctcttgagaaggaggttcgccacgtccaggaacagaaccttgacattctgaagactgatctgtctttgaagagtttcagcgaggagatctacagcgagagctgtgcgttgctgcctacttcctcagccgatatagaagagaccgacttgtcggagaaaagctgtccactagaaaatgggggacgttctagcataagccatctcaaaaaggccgcaagcgaagagaagcctctgggagttggagaaatggaggaagaatgcaccttagaacccgaactagcagcttttccaaagcaggatgggggaacgcaggaatacaccgatgcaacattagaggaccataggggggacgtgcaggaggccgacacactgcaccggcagctgtccctttcccagtgcttcccactgctgatgaccgaagagcagcagaatcccggtgagcagattagcactaacatccatgctagtggcgaggaaaagtgttacgaggaggttcaagtccagaatgaggcctcattttctaccttagagggtgaaatgattgaaacctcctttagccagaacatccctaagttggatgaggctcatacgaccgaggctgccgaatccgagacctcactgacacaataccttctcgctgctgggaagagagaggtgccagaaaccaaagatacacgggaccaggcgaaactcgtccagagcgaatccatcactagcatggaagtggaggaggtcactttcaacacagtttatgagtactacaaccagaagcaggaatcgctggggagacctctgtccccagaaagcgacatttcgataggtgtgggctcaacaaccagtgaagagatttctgagctggatcaattttatacccctcccagcagtgtggaatattttgagtcgccaaagtcaccagatctctatttcaatccctcagacatcaccaagcagtctagcatccacagcggtggagaaacggtggagcgatattccacacctctgggtgaggtcgctgaacgatattctaccccgtcagagggagaggtgggtgagagatattctacgcctccgggagagactcttgaacgctattcaactccacccggtgaaacactggagaggtacagtactccacctggggagaccctggaaaggtattccactcccccaggcgaaaccctggaacgctactctacacctcctggcgaaacactggagcgatactctacaccacccggagaggccctcgaacggtactccatcccaactgggggtcctaatccaactggtaccttcaaaacgtatccttccaaaatcgagagagaagatggcactcctaatgagcatttctacacccccactgaggagaggggctccgcatacgaaatatggcgtagcgattcttttggaacacccaacgaagctattgagcctaaggacaatgaaatgccaccttcttttatcgagcccctcactaaaaggaaagtttacgaaaataccacgctggggttcattgtggaggtggaggggctccccgttccaggtgtgaagtggtataggaataaatccctgctggaacccgacgaaagaatcaaaatggaaagggtcggaaacgtgtgctcactggaaatcagtaatatccagaaaggcgagggcggagaatacatgtgtcacgctgtgaatattatcggggaagctaagtcatttgccaacgtggacattatgccacaggaagaacgggtcgtggctctgcctcccccagtgacgcaccagcatgtcatggagttcgacctggaacatacaacctcctcacggaccccctccccgcaggaaatcgtcctggaggtggagctttctgaaaaagatgtaaaagaatttgaaaaacaggtgaagattgttacagttcccgagttcacgcccgatcataaatccatgattgtgagcctagacgtcttaccttttaactttgtggacccaaacatggactctcgggaaggggaagacaaggaattaaagatcgacctcgaggtgttcgagatgcccccaagatttatcatgcccatttgcgatttcaagatacccgaaaactcagacgctgtgttcaagtgctcagttatcggcatccccaccccagaggtgaagtggtacaaagagtatatgtgtatcgagcctgacaatattaagtacgtgatctccgaagagaagggctcccatacattaaaaatccggaacgtctgtttgagcgacagcgccacctatcgctgtagggccgttaactgtgttggagaggcaatctgtagaggatttctgacaatgggcgactcggaaatattcgcagtgatcgctaagaagtccaaggttaccctgtcaagcctgatggaagagttagtgttgaagtctaactacaccgatagttttttcgagttccaagtcgtagaaggccctcctcgatttattaaaggtatcagcgactgctacgctcccattgggacagccgcatacttccagtgcctggtcagaggctcccccaggcccacagtgtactggtacaaagatggcaagcttgttcagggcagaagattcaccgttgaagagagtggcacagggtttcacaacttattcattaccagtctggtgaaatccgacgagggcgaatacagatgtgttgctacaaataagagtggaatggctgagtccttcgcggcactaaccctgacatat

SEQ ID NO: 234974 - DNA, 2944 bp, Artificial Sequence
  derived and/or modified sequence
caagagctttcaaatagaactatggtggagaaaagtagtattgatgaaaattccatttctttagaaaaagaagtccgacatgtacaggaacaaaacttagacattttaaaaactgatctttctcttaaatccttttctgaagaaatctatagtgaatcatgtgccctacttccaacctcatctgcagatatagaagaaactgatctttctgagaaaagttgtcctctagaaaatggaggcagaagttccatctcacatttgaaaaaagcagcaagtgaggaaaagcctttaggggttggtgaaatggaagaagaatgcactctagaaccagagttggcagcatttccaaagcaggatggtgggacacaggaatatacagatgccactttggaagaccacagaggtgatgttcaggaagctgacacactccatagacagctctccctgagtcagtgcttcccactcttgatgactgaagaacaacagaatccaggtgaacaaataagtacaaacattcatgcctctggagaagaaaaatgttatgaagaagttcaagttcagaatgaagcttctttctccactttagaaggagaaatgatagaaactagtttttctcaaaatattcctaaattagatgaggcacataccactgaggcagcagaatctgagacctccctaacacaatatttacttgctgctggaaagcgtgaggttcctgaaactaaagacaccagagaccaggcaaagcttgtccagagtgaatcaatcacttcaatggaggtggaagaagtaactttcaacactgtgtatgaatactacaaccagaaacaggaatcactaggtcgtccactttctcctgagtctgacatttccattggtgtgggaagtacaaccagtgaagaaatatctgagttagatcagttttataccccaccatcatctgttgaatattttgaatctccaaagtcccctgacttatattttaatccttcagatataactaaacaatcctcaatacattcaggaggtgagacagttgaaagatattccacacctttaggggaagttgctgaaagatattcaacaccttccgaaggtgaggtaggagaaagatactccacacccccaggggagacactagagagatactccacacctccaggagagactctagagagatactccacacccccaggggaggcactagagagatattctattcctactggaggaccaaaccccactggtacttttaaaacatatccatcaaaaatagaaagggaagacggtacaccaaatgagcatttctacacacctacagaagagaggggttcagcttatgaaatatggcgttccgattcatttggtacacccaatgaagccattgagccaaaagacaatgaaatgcctccatcttttattgaacctctgaccaaaaggaaggtatatgaaaacacaacactaggcttcattgttgaagttgaaggtcttccagttcctggtgtgaaatggtatcgaaataaatctttactagagccagatgaaagaatcaaaatggaaagagtgggtaatgtgtgttcactggaaatttctaacattcaaaaaggagaagggggagagtacatgtgtcatgctgtaaacatcataggggaagcaaagagctttgcaaatgtagacataatgccccaggaagaaagagtggtggcactaccacctccagtaacacatcagcatgtcatggagtttgatttggaacacaccacatcatcaagaacaccttctcctcaagaaattgtcctggaagttgaattaagtgaaaaagacgttaaagaatttgagaagcaggtgaaaatagtgacagttcccgaatttactcctgaccataaaagtatgattgtgagtctagatgttcttccatttaattttgtagatccaaatatggattcaagggagggagaagacaaagaactaaaaattgatttagaagtatttgaaatgcctcctcgctttataatgcctatttgtgattttaaaattccagaaaattcagatgctgtattcaaatgttcagtcatagggatcccgactcccgaagttaagtggtataaagaatatatgtgtattgagccagataatattaaatacgtgattagcgaggagaagggaagtcacactcttaaaattcgaaatgtctgtctttctgatagtgcaacatacaggtgcagagctgtgaattgtgtaggagaggctatctgtcggggattcctcaccatgggagattctgaaatatttgctgtgatagcaaagaaaagcaaagtgactttaagcagtttaatggaagaattggtcttaaagagcaactacacagacagtttttttgaatttcaggtggtggaagggcctcccaggtttatcaaaggtatttctgactgttatgcaccaataggtacagcagcatattttcagtgcttagttcgtggctctccaagacccacggtttactggtacaaagatggaaaattagtccaaggaagaaggttcactgttgaggaaagtggcacagggttccataacctgtttataacaagcttagtaaagagtgatgaaggagagtataggtgtgtagctacaaacaaatcaggaatggctgagagctttgcagcactcaccttaacttaaaatgtaatgttttagtgcctcagtaattattagcattgatctgagtgctttcatattttccaaattatgtggatctaataaacttccaaacaggtccaccatatttgaattcattaccttggagacccctaaagaaataatctctatgtagaaatctcatctttgtaatacatgtaaatattttgttatctgaactgtggaatcatcacttgtgtcaatcatgctgtgtaatatcaaacacaattaaatctctccttggctacct

SEQ ID NO: 234975 - DNA, 108 bp, Artificial Sequence
  derived and/or modified sequence
gcatagaatcgaatggaattatcattgaatggaatcgaatggaatcaacatcaaacggaaaaaaacggaattatcgaatggaatcgaagagaatcatcgaatggaccc

SEQ ID NO: 234976 - protein, 2804 aa, Artificial Sequence
  derived and/or modified sequence
MNGDMPHVPITTLAGIASLTDLLNQLPLPSPLPATTTKSLLFNARIAEEVNCLLACRDDNLVSQLVHSLNQVSTDHIELKDNLGSDDPEGDIPVLLQAVLARSPNVFREKSMQNRYVQSGMMMSQYKLSQNSMHSSPASSNYQQTTISHSPSSRFVPPQTSSGNRFMPQQNSPVPSPYAPQSPAGYMPYSHPSSYTTHPQMQQASVSSPIVAGGLRNIHDNKVSGPLSGNSANHHADNPRHGSSEDYLHMVHRLSSDDGDSSTMRNAASFPLRSPQPVCSPAGSEGTPKGSRPPLILQSQSLPCSSPRDVPPDILLDSPERKQKKQKKMKLGKDEKEQSEKAAMYDIISSPSKDSTKLTLRLSRVRSSDMDQQEDMISGVENSNVSENDIPFNVQYPGQTSKTPITPQDINRPLNAAQCLSQQEQTAFLPANQVPVLQQNTSVAAKQPQTSVVQNQQQISQQGPIYDEVELDALAEIERIERESAIERERFSKEVQDKDKPLKKRKQDSYPQEAGGATGGNRPASQETGSTGNGSRPALMVSIDLHQAGRVDSQASITQDSDSIKKPEEIKQCNDAPVSVLQEDIVGSLKSTPENHPETPKKKSDPELSKSEMKQSESRLAESKPNENRLVETKSSENKLETKVETQTEELKQNESRTTECKQNESTIVEPKQNENRLSDTKPNDNKQNNGRSETTKSRPETPKQKGESRPETPKQKSDGHPETPKQKGDGRPETPKQKGESRPETPKQKNEGRPETPKHRHDNRRDSGKPSTEKKPEVSKHKQDTKSDSPRLKSERAEALKQRPDGRSVSESLRRDHDNKQKSDDRGESERHRGDQSRVRRPETLRSSSRNEHGIKSDSSKTDKLERKHRHESGDSRERPSSGEQKSRPDSPRVKQGDSNKSRSDKLGFKSPTSKDDKRTEGNKSKVDTNKAHPDNKAEFPSYLLGGRSGALKNFVIPKIKRDKDGNVTQETKKMEMKGEPKDKVEKIGLVEDLNKGAKPVVVLQKLSLDDVQKLIKDREDKSRSSLKPIKNKPSKSNKGSIDQSVLKELPPELLAEIESTMPLCERVKMNKRKRSTVNEKPKYAEISSDEDNDSDEAFESSRKRHKKDDDKAWEYEERDRRSSGDHRRSGHSHEGRRSSGGGRYRNRSPSDSDMEDYSPPPSLSEVARKMKKKEKQKKRKAYEPKLTPEEMMDSSTFKRFTASIENILDNLEDMDFTAFGDDDEIPQELLLGKHQLNELGSESAKIKAMGIMDKLSTDKTVKVLNILEKNIQDGSKLSTLLNHNNDTEEEERLWRDLIMERVTKSADACLTTINIMTSPNMPKAVYIEDVIERVIQYTKFHLQNTLYPQYDPVYRLDPHGGGLLSSKAKRAKCSTHKQRVIVMLYNKVCDIVSSLSELLEIQLLTDTTILQVSSMGITPFFVENVSELQLCAIKLVTAVFSRYEKHRQLILEEIFTSLARLPTSKRSLRNFRLNSSDMDGEPMYIQMVTALVLQLIQCVVHLPSSEKDSNAEEDSNKKIDQDVVITNSYETAMRTAQNFLSIFLKKCGSKQGEEDYRPLFENFVQDLLSTVNKPEWPAAELLLSLLGRLLVHQFSNKSTEMALRVASLDYLGTVAARLRKDAVTSKMDQGSIERILKQVSGGEDEIQQLQKALLDYLDENTETDPSLVFSRKFYIAQWFRDTTLETEKAMKSQKDEESSEGTHHAKEIETTGQIMHRAENRKKFLRSIIKTTPSQFSTLKMNSDTVDYDDACLIVRYLASMRPFAQSFDIYLTQILRVLGENAIAVRTKAMKCLSEVVAVDPSILARLDMQRGVHGRLMDNSTSVREAAVELLGRFVLCRPQLAEQYYDMLIERILDTGISVRKRVIKILRDICIEQPTFPKITEMCVKMIRRVNDEEGIKKLVNETFQKLWFTPTPHNDKEAMTRKILNITDVVAACRDTGYDWFEQLLQNLLKSEEDSSYKPVKKACTQLVDNLVEHILKYEESLADSDNKGVNSGRLVACITTLFLFSKIRPQLMVKHAMTMQPYLTTKCSTQNDFMVICNVAKILELVVPLMEHPSETFLATIEEDLMKLIIKYGMTVVQHCVSCLGAVVNKVTQNFKFVWACFNRYYGAISKLKSQHQEDPNNTSLLTNKPALLRSLFTVGALCRHFDFDLEDFKGNSKVNIKDKVLELLMYFTKHSDEEVQTKAIIGLGFAFIQHPSLMFEQEVKNLYNNILSDKNSSVNLKIQVLKNLQTYLQEEDTRMQQADRDWKKVAKQEDLKEMGDVSSGMSSSIMQLYLKQVLEAFFHTQSSVRHFALNVIALTLNQGLIHPVQCVPYLIAMGTDPEPAMRNKADQQLVEIDKKYAGFIHMKAVAGMKMSYQVQQAINTCLKDPVRGFRQDESSSALCSHLYSMIRGNRQHRRAFLISLLNLFDDTAKTDVTMLLYIADNLACFPYQTQEEPLFIMHHIDITLSVSGSNLLQSFKESMVKDKRKERKSSPSKENESSDSEEEVSRPRKSRKRVDSDSDSDSEDDINSVMKCLPENSAPLIEFANVSQGILLLLMLKQHLKNLCGFSDSKIQKYSPSESAKVYDKAINRKTGVHFHPKQTLDFLRSDMANSKITEEVKRSIVKQYLDFKLLMEHLDPDEEEEEGEVSASTNARNKAITSLLGGGSPKNNTAAETEDDESDGEDRGGGTSGSLRRSKRNSDSTELAAQMNESVDVMDVIAICCPKYKDRPQIARVVQKTSSGFSVQWMAGSYSGSWTEAKRRDGRKLVPWVDTIKESDIIYKKIALTSANKLTNKVVQTLRSLYAAKDGTSS

SEQ ID NO: 234977 - DNA, 8415 bp, Artificial Sequence
  derived and/or modified sequence
atgaacggagatatgccccatgtgcctattaccactctcgctggaatcgcttccctgactgacctgctgaatcaactgcctttaccctctcctctgcctgctacgactacaaaaagtctgctcttcaacgcccgaattgcagaggaagtaaactgcctcctggcatgccgcgacgataacctagtctcgcaactagtgcactcgctgaatcaggtgtcaaccgatcatatcgagctcaaggacaaccttggtagcgatgatcctgagggagacataccagtgttactccaggctgtgctggctcggtctcctaatgtcttccgcgagaagtccatgcagaatcgctacgtccagagcgggatgatgatgtctcaatataagctgagtcagaactccatgcattcttcccctgcttcgagtaactaccagcagaccactatttcccatagccccagcagccggttcgtgcctccacagacttcctcaggtaacaggtttatgccacagcagaacagccccgtgccaagtccatacgcccctcagagccctgcaggatatatgccttacagccacccctcctcctataccacccatccacaaatgcagcaagcttcagtgtctagtcctattgtggccggtggcctgagaaacatccacgataataaagtctccggtcccttgagcggaaattcggcaaatcatcatgcagacaaccccagacacggctcctctgaggattatttgcatatggtgcatcgactcagtagcgatgacggcgactccagcacaatgcggaatgctgcatccttcccactgaggagccctcaacccgtgtgttccccggctggatctgagggcacacccaaagggagcaggcctccactcatacttcaatctcagtcattgccctgctcttctccacgggacgtgccccctgatattctgctggactcacccgagaggaaacaaaaaaagcagaagaaaatgaagctaggaaaggatgaaaaagagcagagtgaaaaagcagccatgtatgatattataagctcaccttccaaggacagcacaaaactgaccctgagactgagccgggtgagatctagtgacatggaccaacaggaggacatgattagtggtgttgagaacagtaatgtcagcgagaatgatatccccttcaacgttcagtaccccgggcagacgtctaaaacacctatcacgccgcaggatataaataggcctctgaatgctgctcagtgtctgagccagcaagagcagaccgccttcctgccagcaaatcaggtccctgtgctgcagcagaacacctccgtggctgctaagcagccacagaccagtgttgtacaaaatcagcagcaaatctcccagcagggtccaatctacgacgaagtagaactggatgcgctcgctgagattgaaagaattgagagggaatcagctattgaacgtgagcgcttctctaaagaggtccaggataaggataagccactcaaaaagagaaagcaagactcatatccgcaagaagccgggggcgctaccggtgggaacagacctgcttcccaggagaccggaagcaccggcaacggctcgcggccggcattgatggtatctatcgatctgcatcaggccggtagggtagattcccaggccagcattacgcaggattccgatagtattaagaaaccagaggaaatcaagcagtgcaacgacgcccccgtgtcagttctacaggaggatatagttgggtccctgaaaagcacccccgagaaccacccagagacccccaaaaagaaatcggaccctgaattatcaaaatcagagatgaaacagtcagagtctcgcctggccgaatcgaagcctaacgagaatagactggtcgagaccaaatcttcagagaacaagctagaaactaaggtggaaacccagaccgaggaactgaaacaaaatgagtccaggactaccgagtgtaagcaaaacgagagcaccatcgtggagcccaagcagaacgaaaatcgattgagcgatacaaaaccgaatgacaataaacaaaataacggtaggtcagagaccactaagtctaggccagagaccccgaaacaaaagggagagtcaagacccgagacacccaaacaaaagagtgatgggcatcccgagacccctaaacagaagggggatggccggcccgagacccctaagcagaagggtgagagccggccggaaactccaaaacagaaaaacgaaggacgcccagaaactccgaaacatcgtcatgacaataggagagactccgggaaaccatctactgaaaaaaagcctgaagtaagcaaacataaacaagacaccaaatctgacagtccacgtctaaagtctgaaagagcagaggccctgaaacagcgccctgacggtcgtagcgtgtctgaaagcctaaggagggatcatgataataagcagaaatccgatgatcggggagaatcagagcgacaccgtggtgatcagagtcgcgtgaggagacctgagacactgcgatcatcatcccgcaacgagcacggaattaagagcgactcgtctaaaaccgacaaactggaacgcaaacaccggcatgaatctggcgactcgcgtgaaagacccagctccggtgaacaaaaatcacggccagactcaccaagggtcaagcagggggactctaataagtcaagatcagataagctgggatttaagtctcctactagtaaggacgataagaggaccgagggaaacaaatccaaggtggatacaaataaagcccaccctgataataaggccgagttcccaagctacctcctaggcgggcgcagcggggctctgaagaactttgtcattcccaagatcaagagagacaaggatggcaatgtcacacaagaaaccaaaaagatggagatgaagggggagccgaaggataaagtggagaagataggcctggtggaggatctgaacaaaggagcaaaacccgtagtggtcctgcagaaactgtccttagatgacgtgcagaaacttataaaggatagggaggacaagtcgcggtcctctctgaagcccattaaaaataaacctagcaaaagtaataagggatcaatcgatcaatcagttctcaaggagctgccccctgaactactggcagagattgaatccacgatgccactctgcgagcgagtgaagatgaataagcgaaaacgttccaccgttaacgagaaaccaaagtacgctgaaatttccagcgacgaggataacgacagtgacgaggcgtttgagtcatccagaaagaggcacaagaaagacgacgacaaagcctgggagtacgaagagcgggataggcgaagctctggcgaccaccgtcgcagtggacattcccacgaggggaggcgatccagcgggggcggtcggtaccggaacaggagtcccagtgattctgacatggaagactattcccctcctccctccctttcagaggtggctcggaagatgaagaaaaaggaaaaacagaagaagcgaaaggcctatgagcccaagctgacgccagaggaaatgatggatagcagcacattcaaaagattcaccgccagtatcgagaatattctcgacaacctagaggacatggacttcacagcatttggcgacgatgatgagatccctcaggaacttttgctgggcaagcaccagttgaatgaactagggtcagaaagcgcaaagatcaaggccatgggcataatggacaagctcagcactgataagaccgtcaaagtgctgaatattctggagaaaaacatacaggatggcagtaaactcagcaccctgctcaatcacaacaatgataccgaagaagaggaacgcctgtggagggacttaattatggaaagagttaccaagtccgcggacgcttgcctgacgactatcaatatcatgacatcgccgaatatgccaaaggcggtgtatatcgaggatgtcatcgaacgcgtgattcaatacacgaaattccatctgcagaacacgctgtacccacagtatgatccagtatacagacttgacccacatgggggggggctgttatctagcaaagcaaagcgggcaaagtgctcgacccacaagcagcgggtcatcgtgatgctgtacaacaaagtctgcgacattgtgtcctcactatccgagctgttggagatacagctgttaactgacacaacaatactccaagtaagctccatgggtatcaccccttttttcgtggaaaacgtgtcggagcttcagctctgtgctatcaaactcgttacagcggtctttagtcgatacgaaaagcatcgccaactcatcctcgaagagatatttacgtccctggcacgattgccaacctccaaacgtagcctcaggaactttaggcttaactcgagcgacatggacggagaacctatgtacatccagatggtaaccgccctcgtcctacagctgattcagtgcgtggttcacttgccatcaagcgaaaaggactccaacgcagaggaggattctaacaaaaagatagaccaagacgtcgtgattacaaactcatatgaaactgctatgcgcaccgctcagaatttcttgtcaatattcctgaaaaaatgtgggagcaagcagggagaggaagactaccggcccctttttgaaaattttgtgcaggacttattgtccaccgttaataagccggagtggcctgcggctgagctcctgttatctctgttaggaagactgctcgttcatcagttttcaaacaagtcaaccgaaatggccctcagagtcgcgagcttggattacctggggacagtagccgcccgactgcggaaagatgcagtgacctccaaaatggatcaggggagcattgaacgaattctgaagcaggtgtccggcggagaagacgaaatccagcaactgcaaaaggcactcctggattacttagatgaaaacacagagaccgacccctccttagtgttttcgagaaagttctatattgcccagtggtttagggacacaacccttgagactgaaaaggcaatgaagtctcagaaggacgaagaaagttccgagggcacccatcatgctaaggagatcgaaaccacggggcagatcatgcacagagctgaaaaccgcaagaaattcctcaggagcattatcaagaccacaccttctcagttttccacactgaagatgaactccgacactgtcgactatgatgacgcctgtctgattgttcgctatcttgccagtatgaggccttttgcccagtcattcgacatttacctgacccaaatcctccgggtgttaggcgaaaacgccatagcagtcagaaccaaggccatgaagtgcctgagcgaggtggtcgccgttgatccctccattctcgcaagattagacatgcagagaggagttcatggccgactgatggacaactcgactagcgtaagggaggccgccgtggaactgctcggacgatttgttttgtgccgccctcaactcgccgagcagtactacgacatgcttatcgagcgaattctggacacagggataagcgtcagaaaacgggtcattaagatactgcgggacatatgtatcgagcaacctacttttcctaagattacggagatgtgcgtaaaaatgataagaagggtcaatgatgaagaaggtatcaaaaagcttgtcaatgagacattccagaagctctggtttactccaacaccacacaacgacaaagaggcgatgacccgaaagatccttaacatcaccgacgtggtcgccgcatgtcgggatacaggatatgattggtttgagcagctgttacagaacctgctgaagtccgaggaagactccagctacaagccagtgaaaaaggcttgtacccagctggtcgataatctggtggagcacatccttaaatatgaggagtcactcgccgattctgacaataagggagtcaattctgggcgtcttgttgcctgtataaccaccctgttcttattcagtaaaatccgcccacagctcatggtaaaacacgccatgacaatgcaaccttatctgaccacaaaatgtagtacccagaatgactttatggtaatttgcaatgtggcgaagatacttgagctggtcgttccactcatggaacacccaagtgagacatttcttgcaactatagaagaggatctgatgaagcttataattaaatatggaatgaccgtggtccaacattgcgtttcttgcttgggtgccgtggtgaacaaggtgacacaaaattttaaattcgtttgggcatgtttcaatagatattacggagccatatcaaaactgaagagccagcatcaagaggatcccaataacaccagcctgctcactaataagcctgcactcttacggtcactgtttaccgtcggggcactctgcagacacttcgatttcgacttggaagattttaagggtaattccaaggttaatataaaagacaaagtcctggagctgcttatgtattttaccaagcatagcgacgaggaggtgcagaccaaggccatcattggcctgggtttcgcattcatccagcatcctagcctgatgttcgagcaagaggtaaaaaatctctacaacaacatcctgtcagacaaaaattcatccgtgaacctcaagatccaggtactgaaaaacctacagacttacctacaggaagaagacaccagaatgcaacaggccgatagggattggaaaaaggtggccaagcaggaggacctcaaggagatgggcgatgtgtcctccggaatgtctagttccatcatgcagttgtatcttaagcaggtgctggaagccttctttcatactcagtcttccgtcagacacttcgccttgaacgttattgccttaacgttaaaccaggggctcattcatcccgttcaatgcgtgccatatctcattgccatgggtactgacccagaacccgctatgaggaacaaggcagatcagcagctagtggaaatcgataagaaatacgctggtttcattcacatgaaggccgttgccggcatgaaaatgtcataccaggtacaacaggctattaacacatgcttgaaggaccctgtgagaggtttccgacaggatgagtccagctccgccctttgctcccacctttacagtatgatacggggaaacaggcaacatcggcgcgccttccttatttctttacttaatctgtttgacgatacagcgaaaacggatgtcaccatgctgctctatattgcagacaacctggcatgcttcccctatcagacccaggaagagcccctcttcataatgcaccacatcgacataaccttgtctgtgagcggatccaatttgttacaaagctttaaagagagcatggtcaaggacaagcggaaagaaagaaaaagctcaccttccaaagaaaatgagtcttctgattctgaggaagaagtgtcacgtccccggaagagtcgaaagagggtcgacagtgatagtgactccgattccgaagatgacattaatagcgtgatgaagtgccttcccgaaaattccgccccactgatagaatttgcaaacgtgagccagggcatacttctcctcttgatgctcaagcagcacctcaagaatctttgcgggttcagtgattccaaaatccagaagtacagcccttccgagtccgccaaggtctatgacaaagccattaatagaaaaaccggagtacacttccacccaaagcaaacgttggattttctgcgaagtgatatggcaaatagtaaaatcacggaggaggtaaaaaggtccatagttaagcaatacctggatttcaaactccttatggagcacttggatcccgatgaagaagaggaggaaggcgaggtgagcgcctccactaatgctcgcaacaaagctataacctccctgttgggaggtggcagccctaagaataataccgcggcggaaactgaggacgacgaatcagatggggaggacaggggcggtggaaccagcggcagccttagacgctcaaagcggaactcggatagcaccgaattggccgctcagatgaacgagtctgtagatgtcatggacgtcatcgctatatgttgccccaagtataaggaccgcccacaaatagccagggttgtgcaaaagactagctctggattcagcgttcagtggatggcaggctcatattccggatcctggactgaagccaagagaagagacgggaggaagttagtcccttgggtcgatacaattaaggagagcgacataatctacaaaaaaatcgccctaacctcagcgaataaactcaccaataaggtcgtacagactctgcgctctctgtatgctgcaaaagatggaaccagctcatag

SEQ ID NO: 234978 - DNA, 8415 bp, Artificial Sequence
  derived and/or modified sequence
atgaatggagacatgcctcatgtgcccatcaccaccctggccggcatcgccagcctgacagacctgctgaaccagctgcccctgcccagccccctgcctgccaccaccaccaagagcctgctcttcaatgccagaattgctgaggaggtgaactgcctgctggcctgcagagatgacaacctggtgtcccagctggtgcacagcctgaaccaggtgtccacagaccacatcgagctgaaggacaacctgggcagtgatgatcctgagggggacatccctgtgctgctgcaggccgtgctggcccggagccccaacgtgttccgggagaagtccatgcagaaccgctacgtgcagagcggcatgatgatgagccagtacaagctgagccagaacagcatgcacagcagccctgccagcagcaactaccagcagaccaccatcagccacagccccagcagcagatttgtgcccccccagaccagcagcggcaaccgcttcatgccccagcagaacagccctgtgcccagcccctatgccccccagagccctgctggctacatgccctacagccaccccagcagctacaccacccacccccagatgcagcaggcctctgtgagcagccccatcgtggccggcggcctgaggaacatccatgacaacaaggtgtctggccccctgagcggcaacagcgccaaccaccacgccgacaaccccaggcatggcagcagcgaggactacctgcacatggtgcaccggctgagcagtgatgatggagacagcagcaccatgagaaatgctgccagcttccccctgcggagcccccagcctgtgtgcagccctgctggcagcgagggcacccccaagggcagcaggcctcctctcatcctgcagagccagagcctgccctgcagcagccccagagatgtgcccccagacatcctgctggacagccctgagaggaagcagaagaagcagaagaagatgaagctgggcaaggatgagaaggagcagagcgagaaggccgccatgtatgacatcatcagcagccccagcaaggacagcaccaagctgaccctgcggctgagccgggtgcgcagcagtgacatggaccagcaggaggacatgatcagcggcgtggagaacagcaatgtgtctgaaaatgacatccccttcaacgtgcagtacccaggccagaccagcaagacccccatcaccccccaggacatcaaccggcccctgaatgctgcccagtgcctgagccagcaggagcagacagccttcctgcctgccaaccaggtgcctgtgctgcagcagaacacctctgtggccgccaagcagccccagacctctgtggtgcagaaccagcagcagatcagccagcagggccccatctatgatgaggtggagctggatgccctggccgagattgagcgcatcgagcgggagagcgccatcgagcgggagcgcttcagcaaggaggtgcaggacaaggacaagcccctgaagaagaggaagcaggacagctacccccaggaggccggcggggccaccggcggcaacagacctgccagccaggagaccggcagcactggaaatggcagcaggcctgccctgatggtgtccattgacctgcaccaggccggccgggtggacagccaggccagcatcacccaggacagcgacagcatcaagaagccagaggagatcaagcagtgcaatgatgcccctgtgtctgtgctgcaggaggacatcgtgggcagcctgaagagcaccccagagaaccaccctgagacccccaagaagaagagtgaccctgagctgagcaagtctgagatgaagcagagcgagagccggctggccgagagcaagcccaatgaaaatcggctggtggagaccaagagcagcgagaacaagctggagaccaaggtggagacccagacagaggagctgaagcagaatgaaagcaggaccacagagtgcaagcagaatgaaagcaccatcgtggagcccaagcagaatgaaaatcggctgagtgacaccaagcccaatgacaacaagcagaacaacggccgctctgagaccaccaagagcaggcctgagacccccaagcagaagggggagagcaggcctgagacccccaagcagaagagtgatggccaccctgagacccccaagcagaagggagatggccggcctgagacccccaagcagaagggggagagcaggcctgagacccccaagcagaagaatgaaggccggcctgagacccccaagcacagacatgacaacagaagagacagcggcaagcccagcacagagaagaagccagaggtgtccaagcacaagcaggacaccaagagtgacagcccccggctgaagtctgagcgggcagaggccctgaagcagaggccagatggccgctctgtgtctgagagcctgcggcgggaccatgacaacaagcagaagagtgatgacagaggagagagcgagcggcacagaggagaccagagccgggtgagaagacctgagaccctgcggagcagcagcagaaatgagcacggcatcaagagtgacagcagcaagacagacaagctggagaggaagcacagacatgagagcggggacagccgggagcggcccagcagtggagagcagaagagcaggccagacagcccccgggtgaagcagggcgacagcaacaagagcagaagtgacaagctgggcttcaagagccccaccagcaaggatgacaagaggacagagggcaacaagagcaaggtggacaccaacaaggcccacccagacaacaaggccgagttccccagctacctgctgggcggccgcagcggggccctgaagaacttcgtcatccccaagatcaagagggacaaggatggaaatgtgacccaggagaccaagaagatggagatgaagggggagcccaaggacaaggtggagaagattggcctggtggaggacctgaacaagggggccaagcctgtggtggtgctgcagaagctgagcctggatgatgtgcagaagctgatcaaggaccgggaggacaagagccgcagcagcctgaagcccatcaagaacaagcccagcaagagcaacaagggcagcattgaccagagcgtgctgaaggagctgcccccagagctgctggccgagattgagagcaccatgcccctgtgtgagcgggtgaagatgaacaagaggaagaggagcacagtgaatgagaagcccaagtatgcagagatcagcagtgatgaggacaatgacagtgatgaggcctttgagagcagcaggaagaggcacaagaaggatgatgacaaggcctgggagtatgaggagcgggaccggcgcagcagcggggaccacagaagaagtggccacagccatgagggccgccgcagcagcggcggcggccgctacagaaacagaagccccagcgacagcgacatggaggactacagccccccacccagcctgtctgaggtggccaggaagatgaagaagaaggagaagcagaagaagaggaaggcctatgagcccaagctgaccccagaggagatgatggacagcagcaccttcaagcgcttcaccgccagcattgagaacatcctggacaacctggaggacatggacttcaccgcctttggagatgatgatgagatcccccaggagctgctgctgggcaagcaccagctgaatgagctgggcagcgagagcgccaagatcaaggccatgggcatcatggacaagctgagcacagacaagacagtgaaggtgctgaacatcctggagaagaacatccaggacggcagcaagctgagcaccctgctgaaccacaacaatgacacagaggaggaggagcggctgtggagggacctgatcatggagcgggtgaccaagtctgcagatgcctgcctgaccaccatcaacatcatgaccagccccaacatgcccaaggctgtgtacattgaagatgtgattgaaagagtcatccagtacaccaagttccacctgcagaacaccctgtacccccagtatgaccctgtgtaccgcctggacccccatggaggcggcctgctgagcagcaaggccaagagggccaagtgcagcacccacaagcagagggtgattgtgatgctgtacaacaaggtgtgtgacatcgtgagcagcctgtctgagctgctggagatccagctgctgacagacaccaccatcctgcaggtgtcctccatgggcatcacccccttctttgtggagaatgtgtctgagctgcagctgtgtgccatcaagctggtgacagctgtgttcagccgctatgagaagcaccggcagctgatcctggaggagatcttcaccagcctggcccggctgcccaccagcaagaggagcctgaggaacttccggctgaacagcagtgacatggatggagagcccatgtacatccagatggtgacagccctggtgctgcagctgatccagtgtgtggtgcacctgcccagcagcgagaaggacagcaatgctgaggaggacagcaacaagaagattgaccaggatgtggtgatcaccaacagctatgaaacagccatgaggacagcccagaacttcctgagcatcttcctgaagaagtgtggcagcaagcagggcgaggaggactaccggcccctgtttgaaaattttgtgcaggacctgctgagcacagtgaacaagccagagtggccagctgctgagctgctgctgagcctgctgggccgcctgctggtgcaccagttcagcaacaagagcacagagatggccctgcgggtggccagcctggactacctgggcaccgtggccgcccggctgaggaaggatgctgtgaccagcaagatggaccagggcagcattgaaagaatcctgaagcaggtgtctggaggagaagatgagatccagcagctgcagaaggccctgctggactacctggatgaaaatacagaaacagaccccagcctggtgttcagcaggaagttctacatcgcccagtggttccgggacaccaccctggagacagagaaggccatgaagagccagaaggatgaggagagcagcgagggcacccaccacgccaaggagattgagaccaccggccagatcatgcacagagcagaaaataggaagaagttcctgcggagcatcatcaagaccacccccagccagttcagcaccctgaagatgaacagcgacacagtggactatgatgatgcctgcctgattgtgcgctacctggcctccatgaggccctttgcccagagctttgacatctacctgacccagatcctgcgggtgctgggagaaaatgccatcgctgtgaggaccaaggccatgaagtgcctgtctgaggtggtggccgtggaccccagcatcctggcccggctggacatgcagaggggcgtgcacggccgcctgatggacaacagcacctctgtgcgggaggccgctgtggagctgctgggccgctttgtgctgtgccggccccagctggccgagcagtactatgacatgctgattgaaagaatcctggacaccggcatctctgtgaggaagagggtcatcaagatcctgcgggacatctgcatcgagcagcccaccttccccaagatcacagagatgtgtgtgaagatgatccggcgggtgaatgatgaggagggcatcaagaagctggtgaatgagaccttccagaagctgtggttcacccccaccccccacaatgacaaggaggccatgaccaggaagatcctgaacatcacagatgtggtggccgcctgccgggacaccggctatgactggtttgagcagctgctgcagaacctgctgaagtctgaggaggacagcagctacaagcctgtgaagaaggcctgcacccagctggtggacaacctggtggagcacatcctgaagtatgaggagagcctggccgacagcgacaacaagggcgtgaacagcggccgcctggtggcctgcatcaccaccctcttcctgttcagcaagatccggccccagctgatggtgaagcacgccatgaccatgcagccctacctgaccaccaagtgcagcacccagaatgacttcatggtgatctgcaatgtggccaagatcctggagctggtggtgcccctgatggagcaccccagcgagaccttcctggccaccatcgaggaggacctgatgaagctgatcatcaagtatggcatgacagtggtgcagcactgtgtgtcctgcctgggcgctgtggtgaacaaggtgacccagaacttcaagtttgtgtgggcctgcttcaaccgctactacggggccatcagcaagctgaagagccagcaccaggaggaccccaacaacaccagcctgctgaccaacaagccagccctgctgcggagcctcttcaccgtgggcgccctgtgccgccactttgattttgacctggaggacttcaagggcaacagcaaggtgaacatcaaggacaaggtgctggagctgctgatgtacttcaccaagcacagtgatgaggaggtgcagaccaaggccatcatcggcctgggctttgccttcatccagcaccccagcctgatgtttgagcaggaggtgaagaacctgtacaacaacatcctgagtgacaagaacagctctgtgaacctgaagatccaggtgctgaagaacctgcagacctacctgcaggaggaggacaccaggatgcagcaggccgaccgggactggaagaaggtggccaagcaggaggacctgaaggagatgggagatgtgagcagcggcatgagcagcagcatcatgcagctgtacctgaagcaggtgctggaggccttcttccacacccagagctctgtgcgccactttgccctgaatgtgattgccctgaccctgaaccagggcctcatccaccctgtgcagtgtgtgccctacctgattgccatgggcacagatcctgagcccgccatgaggaacaaggctgaccagcagctggtggagattgacaagaagtatgccggcttcatccacatgaaggctgtggccggcatgaagatgagctaccaggtgcagcaggccatcaacacctgcctgaaggaccctgtgcggggcttccggcaggatgagagcagcagcgccctgtgcagccacctgtacagcatgatccggggcaaccggcagcaccggcgggccttcctgatcagcctgctgaacctgtttgatgacacagccaagacagatgtgaccatgctgctgtacatcgctgacaacctggcctgcttcccctaccagacccaggaggagcccctcttcatcatgcaccacatcgacatcaccctgtctgtgtctggcagcaacctgctgcagagcttcaaggagagcatggtgaaggacaagaggaaggagaggaagagcagccccagcaaagaaaatgaaagcagtgacagcgaggaggaggtgtcccggcccaggaagagcaggaagagggtggacagcgacagcgacagcgacagtgaagatgacatcaacagcgtgatgaagtgcctgcctgagaacagcgcccccctcatcgagtttgccaacgtgtcccagggcatcctgctgctgctgatgctgaagcagcacctgaagaacctgtgtggcttcagtgacagcaagatccagaagtacagccccagcgagagcgccaaggtgtatgacaaggccatcaacaggaagacaggagtgcacttccaccccaagcagaccctggacttcctgcggagtgacatggccaacagcaagatcacagaggaggtgaagaggagcatcgtgaagcagtacctggacttcaagctgctgatggagcacctggaccctgatgaggaggaggaggagggggaggtgtctgccagcaccaatgccaggaacaaggccatcaccagcctgctgggcggcggcagccccaagaacaacacagctgctgagacagaagatgatgaaagtgatggagaagatcggggcggcggcaccagcggcagcctgcggcgcagcaagaggaacagcgacagcacagagctggccgcccagatgaatgaatctgtggatgtgatggatgtgattgccatctgctgccccaagtacaaggaccggccccagatcgcccgggtggtgcagaagaccagcagcggcttctctgtgcagtggatggccggcagctacagcggctcctggacagaggccaagagaagagatggcaggaagctggtgccctgggtggacaccatcaaggagagtgacatcatctacaagaagatcgccctgaccagcgccaacaagctgaccaacaaggtggtgcagaccctgcggagcctgtatgctgccaaggatggcaccagcagctag

SEQ ID NO: 234979 - DNA, 8415 bp, Artificial Sequence
  derived and/or modified sequence
atgaacggcgacatgccccacgtgcccatcaccaccctggccggcatagcatccttaactgatctgttaaatcagctgccactgcccagcccgcttcctgctacaaccacaaaaagtctgcttttcaatgcgcggatcgccgaagaggtcaactgtctgttggcatgtcgcgacgacaacctggtgtctcagttggtccactccttgaaccaagtgtctaccgatcatattgagctgaaggataacctcggtagcgacgatcccgaaggcgatatccctgtgttactgcaagcggtgctggctagaagcccaaacgtgttccgagagaagtccatgcagaacaggtacgtgcagtcaggtatgatgatgtcacagtataaactaagccaaaactctatgcattccagtccggcaagttcaaattaccagcagactacaatctctcatagtccttcatcacgttttgtgccccctcagaccagttccggcaacaggttcatgccacagcagaactctcctgttcccagtccttatgcccctcagtctccagctggctacatgccctatagtcatccttcttcctacactacccatccccaaatgcagcaggcctcggtctcctcacctatcgtggctggcgggctgaggaacattcacgacaacaaggtgagtggccctttgtcggggaactccgcaaatcatcacgcggacaacccaagacatgggtccagtgaagactacctccatatggtacaccgcctgtcctccgatgatggtgattcttctaccatgcggaatgctgcctcctttccgctgcgttcaccacaacccgtctgcagcccagcaggaagtgagggaactccaaaggggtctcgcccgcccttgatcctacagtcacagtctcttccttgctcctccccgagagatgttcctcccgacatactgctcgatagccctgaacgcaagcaaaagaagcaaaaaaagatgaaactgggcaaagacgagaaagagcagtcagaaaaggccgcaatgtatgacattatcagtagtccctctaaagatagtaccaagttaaccctcaggctgtcaagagtgcgctcgtccgatatggatcagcaggaggacatgatttccggagttgagaatagcaatgtatcggagaatgatattcctttcaacgtgcagtatccaggacagactagcaagaccccaatcacaccgcaggacatcaatagaccgctaaacgccgctcagtgtttatcccaacaagaacagaccgcttttctgcccgcgaaccaggtgccggtgctccagcagaacactagtgttgctgccaaacagcctcagacatccgtggtacagaatcagcaacagatttcccaacagggcccaatttacgatgaggtggagctggatgccctcgccgagatcgaacggatcgagcgggagagcgctattgagagagagaggttctctaaggaggtgcaggacaaggataagccacttaagaaaagaaagcaggattcttaccctcaggaagcaggaggggcaaccgggggcaatcgccccgcctcccaggagacgggcagcaccgggaatgggtcccgacccgctcttatggtgagcatagatctacatcaggctgggagagtcgatagtcaggctagcattacccaggatagtgacagcatcaagaagccagaggagataaagcagtgtaacgacgccccagtgtccgttctccaggaggacatagtaggcagcctcaaatctacgcctgaaaaccatcccgagactccaaaaaagaaaagtgaccctgagttatccaagtctgagatgaagcagtcagagtccaggctcgccgaaagcaaacctaatgaaaaccgactggtggaaaccaaatctagcgaaaataagctagaaacaaaggtcgagacacagaccgaagagctgaagcagaacgagagtcgcaccactgagtgcaaacagaatgagagcacgatcgtcgagccaaaacagaacgagaacagactttccgatacaaagccgaacgataacaaacagaacaacggtaggtcagagacaacaaagagcaggcccgagacaccgaaacaaaagggggaatcccgccctgagactcccaagcagaaaagcgacggccacccagaaactcctaagcaaaaaggagatgggcggccagaaacacctaagcagaagggcgagagtcgccctgaaacccccaaacagaagaacgagggtagacctgagacgcccaagcaccgccatgataaccggcgcgactccggcaagccatccactgaaaaaaaacccgaggtcagcaaacataagcaggacactaagtcagactccccccgccttaagtccgagcgcgctgaggcgctcaagcagcgacctgatggcagatcagtctccgagagcctgagacgggaccatgataataagcagaagagcgacgatcgaggggagtctgaacgtcacagaggcgaccagtcacgcgtgcgacgacctgaaacactgcgtagctcctctcgcaacgagcacggtatcaagtctgactcatctaaaacagataagctcgagaggaaacatagacatgagagcggtgactcaagagaaagacccagtagcggcgagcaaaagtcccgtccagacagtcctagggtcaagcaaggtgacagcaataagtctcgatccgacaagcttgggtttaagagcccaacaagtaaggatgataagcgcaccgaaggcaataaaagcaaggtggacacgaacaaggcacaccctgacaataaggccgagtttccgagctacttattggggggtcgatctggcgcccttaagaatttcgttatcccaaaaattaagagggacaaggacgggaatgtcacccaggagactaagaaaatggaaatgaaaggggagccgaaggataaggtggagaaaattggattagtggaagatttgaacaaaggtgcaaagcctgtggttgtgctgcagaagctgtctctggatgacgtccagaaactgattaaggatagagaggacaagagtaggtcttctctcaaaccaattaaaaacaaaccgtcaaaatccaacaagggatcaattgaccaaagtgttttgaaggagctcccgcccgagttactcgcagagattgagagtactatgcccctgtgtgaaagagtgaagatgaacaagcgcaaacgctctaccgtgaacgaaaagcctaaatacgcggaaatctcatctgatgaggacaacgatagcgatgaggcgtttgagagctctagaaaaagacacaaaaaagacgatgacaaagcgtgggagtatgaggagcgggataggaggagcagcggcgaccacaggcggtctgggcattcgcacgagggtcgcaggagtagtggtggagggaggtacaggaaccgctccccctccgactccgatatggaggactacagtcccccacctagcctgtcggaggtcgccaggaaaatgaagaaaaaggagaaacaaaagaagcgcaaggcctatgagccgaaactgactccagaggaaatgatggactcctcgaccttcaagcggtttactgcaagtattgagaatatcctggataatctggaagatatggatttcacggcctttggtgacgacgatgaaatccctcaggagctgctacttgggaagcaccaattaaacgaactcggcagtgaatccgcaaagatcaaggctatgggcatcatggacaaactcagtaccgataaaacagtcaaagtgctgaatatcttagagaagaacatccaagatggaagcaagcttagcaccctgctcaaccacaataacgataccgaggaggaagagcgcctgtggagagacttgattatggagagagtgaccaagtccgccgacgcttgtttaacaactatcaatataatgaccagccccaacatgccgaaggctgtgtacatcgaagatgtcatagagagagtgattcagtacacaaaattccacctccagaacaccctctatccacaatacgatccggtgtacaggctggatccccacggtggcggtttgctctcctccaaagcaaagagagctaaatgttcgacccacaagcagcgggttatcgtgatgctgtataacaaggtttgcgatattgtgtcttcgctcagcgaactgctggaaattcaacttctgaccgacacaacgatcctgcaggtctcctctatggggattacaccattcttcgtcgagaacgtgagcgagctgcaactctgcgcaatcaagctagtgaccgcagtgttctcgcgctacgaaaagcaccgacaactgattctcgaagagatcttcacatctcttgcccgcttgccaacaagcaaaagatctctgcgcaattttcgccttaactcgtccgacatggatggggagcccatgtacattcagatggtcactgcactggttctccagctgatccagtgcgttgtgcaccttccctcatctgagaaagactccaatgcggaggaggattccaataagaagatcgaccaagacgtggttattaccaactcgtacgagaccgccatgcgcactgcccagaacttccttagcattttcctgaaaaaatgcggctccaaacaaggggaggaggactatcggcctctatttgaaaatttcgtacaggacctcttaagcactgtcaacaaaccggaatggccggctgcggaattactactcagccttttaggacggctcctcgtgcaccagtttagcaacaaatccaccgaaatggccctgcgcgtggccagcctcgattatctgggcacggttgccgctcgcttaaggaaggatgccgttacgagtaagatggatcagggatctatcgagcgcatcctcaagcaggtaagtggaggcgaagacgagattcagcagcttcagaaggcacttctcgattatctcgatgagaacacagaaaccgacccttctctagtgttctcacggaaattctacatagctcaatggtttcgcgacactacattggagactgagaaagcgatgaaaagccaaaaggatgaggagagcagcgagggaacccatcacgccaaagaaatcgagacgacaggccagattatgcatagagcagaaaaccgcaagaagtttctgcgctccataatcaaaaccaccccatcccagttcagtaccctcaaaatgaactctgataccgtcgattatgacgatgcctgcctaatagttaggtacctggccagcatgcggcctttcgctcagtcttttgatatttatttgacgcagatcttgcgggtacttggcgagaatgctatcgcagtgagaacgaaggctatgaaatgtttatccgaagttgtggccgtggacccttctattctggcccgattggacatgcagcgaggagtgcatggccgtctcatggataacagtacatccgtcagggaggctgctgtggagctgctgggcagattcgtgctgtgccggccgcagcttgctgagcagtactatgacatgctgatcgaacgcattttggacacgggtatttcagtgaggaagcgcgtgattaagatcctaagggatatctgcattgagcagcctacatttcctaagattacagaaatgtgcgtgaagatgatccgaagagtgaacgacgaagagggaataaaaaagctcgtgaacgaaacctttcagaaactctggtttacccctactccccacaacgataaggaagccatgactcggaagattctgaacatcaccgatgtggtagccgcctgtagggatacgggctacgattggtttgaacagttactgcagaacctgctgaagtcagaggaggattcctcctacaagcccgtcaaaaaagcctgtacccagctggtggacaatcttgttgaacacattctgaaatatgaggaaagcctcgccgactctgacaacaaaggcgtaaactccggccgcctggtggcatgcattaccacacttttcctttttagcaagatacgcccccagttaatggtgaaacacgcaatgactatgcaaccttacctgactacaaaatgtagtacccagaatgattttatggtaatctgtaacgttgctaagattctggagcttgtagtacctctcatggaacaccccagtgagactttcctggcgaccattgaagaggacctgatgaaactcattatcaaatatggcatgactgtcgttcaacactgtgtgagctgcctgggagcggttgttaataaagtcacgcagaattttaagttcgtgtgggcctgcttcaaccgttactacggcgccatatccaagctgaagtctcaacatcaggaagaccccaacaacacttcactactcacaaataagccagccctgctcaggagcctctttacagttggcgcactctgccggcacttcgattttgatttggaagactttaaaggaaactctaaagtgaacatcaaggataaagtcttagaacttcttatgtatttcaccaaacacagcgacgaggaggtgcagaccaaggctatcatagggctggggtttgcttttatccaacacccgagcctgatgtttgagcaggaggtgaaaaatttatataacaatatccttagtgataaaaattcaagcgtaaacctgaagatccaggtgctcaaaaatctgcagacatacctgcaggaggaggacacccgcatgcaacaagccgaccgcgattggaagaaagtggccaagcaagaggacctgaaagaaatgggtgacgtgagctctggcatgtcctcatccataatgcagctgtacctcaaacaagttctggaggcattttttcacacacagagttccgtccgccatttcgcgctcaatgtgattgccctcacactcaaccagggcctaattcaccccgtgcagtgcgttccttatttgatcgccatggggaccgatcctgaaccagctatgcgcaacaaggctgatcaacaattggtggagatcgataagaagtatgccgggttcattcacatgaaggccgtggcaggaatgaaaatgagctatcaggtgcagcaggcgattaatacatgtttgaaggatccagtcaggggattcaggcaggacgagtcatctagcgctctctgctcacatctctattctatgattcgcggcaacagacagcatagacgagcgtttttgataagcttactgaatctgttcgacgacaccgcgaagacagacgttactatgctgctgtacatagcagataacctcgcctgttttccttaccagacccaggaggagcccctgtttataatgcatcacattgacatcacactatctgtttccggcagtaacctcttgcagtcttttaaagaatccatggtgaaggataaacggaaggagcgcaaaagtagcccctcgaaagagaacgaaagcagtgactccgaggaggaggtctcaagacccaggaagtcgaggaagcgggtagatagcgattccgacagtgactcagaggacgatattaactccgtgatgaaatgcttaccggaaaattctgctcccctgattgaattcgccaatgtgtcacagggcatcttgctccttttaatgctcaagcaacatctgaaaaatctatgcggattctcagattccaagatccagaaatactctccaagtgaatccgcaaaagtatatgacaaggccattaataggaagacaggcgttcattttcacccaaaacagaccttggacttcctgcgcagcgatatggccaacagcaaaataacagaggaagtcaagcgttctattgtgaaacaatatctggactttaaactgctgatggagcacctggatcccgacgaggaggaggaggagggggaagtcagcgcatccacaaacgcccgtaacaaagctatcactagtttattgggcggaggctccccaaaaaacaacaccgcagcagagacagaggacgacgagagcgacggcgaagacagaggaggcggcacctccggaagtctgcgccgcagcaagaggaatagcgattcaactgagctggcagctcagatgaatgagtccgtagatgtcatggatgtaatagccatctgttgtcctaagtacaaagatcgtcctcagatagcgcgagtggttcaaaagactagtagcggatttagcgtacagtggatggctgggtcatacagcgggagctggaccgaggccaaaagaagagatggcagaaaactggtgccctgggtggacacaatcaaagaaagcgacataatttataagaaaatcgccctgacctccgctaacaaactgaccaacaaagttgtgcagaccctgcgcagtttgtacgctgccaaagatggcacaagcagttag

SEQ ID NO: 234980 - DNA, 10435 bp, Artificial Sequence
  derived and/or modified sequence
tccggtcggcattttgttctgagagggagagacggaacgagagagagacacacacagggctccttccccccgccctcccccccctccctccgtcggtaccgactcacccgacaccaccaagccgcagggagggacgcccccgccgacaggagaattggttcccgggcccgcggcgatgcccccccggtagctcgggcccgtggtcgggtgtttgtgagtgtttctatgtgggagaaggaggaggaggaggaagaagaagcaacgatttgtcttctcggctggtctccccccggctctacatgttccccgcactgaggagacggaagaggagccgtagccaccccccctcccggcccggattatagtctctcgccacagcggcctcggcctccccttggattcagacgccgattcgcccagtgtttgggaaatgggaagtaatgacagctggcacctgaactaagtacttttataggcaacaccattccagaaattcaggatgaatggggatatgccccatgtccccattactactcttgcggggattgctagtctcacagacctcctgaaccagctgcctcttccatctcctttacctgctacaactacaaagagccttctctttaatgcacgaatagcagaagaggtgaactgccttttggcttgtagggatgacaatttggtttcacagcttgtccatagcctcaaccaggtatcaacagatcacatagagttgaaagataaccttggcagtgatgacccagaaggtgacataccagtcttgttgcaggccgtcctggcaaggagtcctaatgttttcagggagaaaagcatgcagaacagatatgtacaaagtggaatgatgatgtctcagtataaactttctcagaattccatgcacagtagtcctgcatcttccaattatcaacaaaccactatctcacatagcccctccagccggtttgtgccaccacagacaagctctgggaacagatttatgccacagcaaaatagcccagtgcctagtccatacgccccacaaagccctgcaggatacatgccatattcccatccttcaagttacacaacacatccacagatgcaacaagcatcggtatcaagtcccattgttgcaggtggtttgagaaacatacatgataataaagtttctggtccgttgtctggcaattcagctaatcatcatgctgataatcctagacatggttcaagtgaggactacctacacatggtgcacaggctaagtagtgacgatggagattcttcaacaatgaggaatgctgcatcttttcccttgagatctccacagccagtatgctcccctgctggaagtgaaggaactcctaaaggctcaagaccacctttaatcctacaatctcagtctctaccttgttcatcacctcgagatgttccaccagatatcttgctagattctccagaaagaaaacaaaagaagcagaagaaaatgaaattaggcaaggatgaaaaagagcagagtgagaaagcggcaatgtatgatataattagttctccatccaaggactctactaaacttacattaagactttctcgtgtaaggtcttcagacatggaccagcaagaggatatgatttctggtgtggaaaatagcaatgtttcagaaaatgatattccttttaatgtgcagtacccaggacagacttcaaaaacacccattactccacaagatataaaccgcccactaaatgctgctcaatgtttgtcgcagcaagaacaaacagcattccttccagcaaatcaagtgcctgttttacaacagaacacttcagttgctgcaaaacaaccccagacttctgtggtacagaatcaacaacagatatcacaacagggacctatatatgatgaagtggaattggatgcattggctgaaattgagcgaatagagagagaatcagctattgaaagggagcgcttctcaaaagaagttcaagataaagataagcctttgaaaaaaagaaaacaagattcttacccacaggaggctgggggtgctacaggaggtaatagaccagcttctcaggagacgggttctacgggaaatgggtcaaggccagcattaatggttagcattgatcttcatcaggcaggaagagtggactctcaggcttctataactcaggattcagactccataaaaaagcctgaagaaatcaaacaatgtaatgatgcacctgtttctgttcttcaggaagatattgttggaagtcttaaatctacaccagaaaaccatcctgagacacctaaaaaaaagtctgatcctgagctttcaaagagtgaaatgaaacaaagtgaaagtagattagcagaatctaaaccaaatgaaaaccgattggtggagacaaaatcaagtgaaaataagttagaaactaaagttgagacccaaacagaagaacttaaacagaatgagagcagaacaactgaatgcaaacaaaacgagagcaccatagttgagcctaaacaaaatgaaaatagactgtctgacacaaaaccaaatgacaacaaacaaaataatggcagatcagaaacaacaaaatcaaggcctgaaaccccaaagcaaaagggtgaaagccggcctgagactccaaaacaaaagagtgatgggcatcctgaaaccccaaaacagaagggtgatggaaggcctgaaactccaaagcaaaaaggtgagagccgccctgaaactccaaagcaaaaaaatgaagggcgacctgaaacaccaaaacacaggcatgacaataggagggattctggaaagccatctacagagaaaaaacctgaagtgtctaaacataaacaagatactaaatctgactcacctcggttaaaatcagaacgagctgaagccttaaagcagagacctgatgggcgatctgtttctgagtcactaagacgtgaccatgataataaacaaaaatcagatgacaggggtgaatcagagcgacatcgaggggatcagtctagggttcgaagaccagaaacattgagatcctctagtagaaatgaacatggcattaaatctgatagttcaaaaactgataaactagaacgaaaacacaggcatgaatcaggggactcaagggaaagaccatcttctggggaacaaaaatcaagacctgacagtcctcgtgttaaacaaggagattctaataaatcaagatctgataaacttggttttaaatcaccaactagtaaagatgacaaaaggacagagggtaacaagagtaaagtagacactaataaagcacaccctgacaataaggcagaatttccaagttatttgttggggggcaggtctggtgcgttgaaaaattttgtcattccgaaaatcaagagggataaagatggcaatgttactcaggagacaaagaaaatggaaatgaaaggagagccgaaagacaaagtagaaaaaataggattagttgaagatctaaataaaggagctaagcctgtagttgtgctacaaaaactgtctttggatgatgttcagaaacttattaaagatagagaggacaaatcaagaagttcccttaaacctatcaagaataaaccatcaaagtcaaataaaggtagtatagatcaatcagtgttaaaagaattaccccctgaactcctggcagaaattgagtccaccatgccactttgtgaacgtgtgaaaatgaacaaacgcaagcgtagcacagttaatgaaaagccaaaatatgctgaaatcagttcagatgaagataatgatagtgatgaagcttttgaatcctctaggaaacgacataaaaaagatgatgataaagcttgggaatatgaagagcgtgacagaagaagctctggggatcataggagaagtggccactctcatgaaggaagaaggagttcaggtggtggtcgttatcgaaaccgaagtccgtcagattctgacatggaagattattctcctcctcccagccttagtgaggttgctaggaaaatgaagaaaaaagaaaaacagaagaaaaggaaagcatatgaaccaaaactaacacctgaagaaatgatggactcttcaacttttaagagattcacagcctcaatagagaatattttggataatttggaagatatggattttactgcgtttggtgatgatgatgaaattcctcaggaactgctcttaggaaaacatcagcttaatgaacttggcagtgaatctgctaaaataaaagcaatgggtataatggataagctttcaactgacaaaactgtgaaagtcttaaatatcttggagaagaatattcaggatgggtcaaagctttccactttgttaaatcataataacgatactgaagaagaagaaaggttatggagagaccttattatggagagagttacaaaatcagcggatgcttgtcttacaactatcaacattatgacatcccctaacatgccaaaagctgtgtacattgaggatgtaattgaaagagttatacagtacactaaatttcatttgcagaatacactttatcctcagtatgatcctgtttacagattagatcctcatggaggaggcttattaagttcaaaagcaaaacgggctaaatgttctacccataagcagagagtaatagtaatgctttataacaaagtttgtgacattgttagcagcttatcagaattgctagagatacaacttcttacagacacaacaattcttcaggtttcatctatgggaataacaccattttttgtggaaaatgtcagtgaactacagttgtgtgccattaagttagtcactgcagtattctcaagatatgaaaaacataggcagttaattttggaagaaatttttacttcacttgcaagattaccaaccagcaagaggagtttaaggaacttcaggttaaacagtagtgatatggatggagaacctatgtatattcagatggttacagcactggttttacaacttattcagtgtgtggtacacttaccatcatcagagaaggactctaatgcagaagaagattcaaataaaaaaattgaccaggatgttgtcattactaactcttatgaaacagctatgcgaacagcccaaaacttcctctccatcttccttaaaaaatgtggtagtaagcaaggtgaagaagattacagaccactgtttgaaaattttgttcaagaccttctttcaacagtcaataagcctgaatggccagctgctgaactactccttagtttgttagggagactgttggttcatcagttcagtaacaagtcaacagagatggctttaagagtggcatctcttgattaccttggaactgttgctgcacggctaagaaaagatgctgttacaagcaaaatggatcaaggatctatagaacgcattttaaaacaggtttcaggaggggaagatgaaatccaacaattacaaaaagcattgcttgattacttggatgaaaacactgagactgatccttcactagtgttttctcgtaaattctatatagcccagtggtttcgagacacaactctggaaacagaaaaagcaatgaaatcacaaaaagatgaagaatcatctgaaggaacacatcatgcaaaggaaattgagacaactggccaaattatgcatcgagctgaaaaccgaaaaaagtttcttagaagcattatcaaaaccacaccttctcagtttagcacattaaagatgaactctgatactgtggactatgatgatgcttgcttgattgttcgatacttggcctccatgaggccgtttgcccagagctttgatatttatttgacacagatcctacgagttcttggtgaaaatgcaattgctgttcgaacaaaagccatgaagtgtttgtctgaggttgttgctgtagaccccagtattctagcaaggcttgatatgcaacgaggtgttcatggacgattgatggataattcgactagtgtccgagaagcagcagtagaattactaggtcgatttgtcctttgtcgacctcagcttgctgaacagtattatgatatgctgattgaaagaatattggatactggtatcagtgtcaggaaaagagtaataaagattctcagagacatttgtattgaacaaccaacatttccaaaaatcacagaaatgtgtgtaaaaatgattcgcagagtcaatgatgaagagggcattaagaaattagtaaatgaaacattccagaaactctggtttactccaactccacacaatgacaaagaagcaatgacaaggaaaattttaaacattaccgatgtggttgcagcatgcagagatactggatatgactggtttgagcaactgcttcaaaacttgttgaagtccgaagaggattcctcatataaacctgtgaagaaagcttgtactcaacttgttgataacctagttgagcacattcttaaatatgaggaatctctagctgactctgacaataaaggtgtgaattctggaagattggtagcttgcataaccactttgttcttattcagcaaaataagaccccagctcatggttaaacatgcaatgactatgcaaccataccttaccactaaatgtagtacgcaaaatgatttcatggttatctgcaatgttgcaaaaatcctagagctagttgtaccactgatggagcatccaagtgaaacttttcttgccactattgaggaagatctaatgaagctcatcatcaaatatggcatgactgtagtgcaacattgtgtgagctgtcttggagctgttgtaaataaagtgacacaaaattttaaatttgtgtgggcttgtttcaatagatactatggtgccatttcaaaattaaaaagtcaacaccaagaggacccaaataacacttcacttctaacaaacaaaccagcacttcttagatcccttttcaccgttggagcactatgtcggcattttgattttgatctggaagattttaaaggcaacagcaaggttaacataaaagataaagtacttgaactattgatgtattttacaaaacactcagatgaagaagtacaaacaaaagctatcattggtctaggatttgcctttattcagcatccaagtctaatgttcgagcaagaagtgaagaatctatataataatattttatctgataagaactcctcagtcaatttaaaaatacaagtgttaaaaaacctccagacctacctacaagaagaagatacacgtatgcagcaggcagatagagactggaagaaagttgcaaaacaggaagacttaaaagaaatgggtgatgtttcctcagggatgagtagttccatcatgcagctttatctcaaacaggtgcttgaggcattttttcacacccagtcaagtgtacgccactttgccctaaatgtcattgcattgactctaaatcaaggtcttattcatccagttcagtgtgtgccatatttaattgctatgggcacagacccagaacctgctatgcggaacaaggctgatcagcaacttgtggaaatagacaaaaaatatgctggattcattcatatgaaagcagtggctggtatgaagatgtcttaccaggtacaacaggcaatcaacacatgcctaaaagatcctgtaaggggtttcagacaagacgagtcctctagcgctttgtgttcacacctttactccatgatccgtggaaaccgccaacacagacgagcctttcttatttctttactcaacctctttgatgacacagcaaaaacagacgtgactatgctcttgtatatagcagacaatctagcctgttttccataccagacacaggaagagccgttgtttataatgcatcatatagacattacactctcagtttctggtagtaacctactgcagtcattcaaggagtctatggtaaaggacaaaaggaaagagagaaaatcatcacctagtaaggaaaatgagtcaagcgacagtgaagaagaagtttccaggcctcggaagtcacggaaacgtgtagattcagattcagattcagattcagaagacgatataaattcagtgatgaaatgtttgccagaaaattcagctcctttaatcgaatttgcaaatgtgtcccagggtattttattacttctcatgttaaaacaacatttgaagaatctttgtggattttctgatagtaaaattcagaagtactctccatctgaatctgcaaaagtatatgataaagcgataaaccgaaaaacaggagttcattttcatccaaaacaaacactggacttcctgcggagtgacatggctaattccaaaatcacagaagaggtgaaaaggagtatagtaaaacagtatctagatttcaaacttctcatggaacatctggaccctgatgaagaagaagaagaaggggaggtttcagctagcacaaatgctcggaacaaagcaattacctcactgcttggaggaggcagccctaaaaataatacagcagcagagacagaagatgatgaaagtgatggggaggatagaggaggaggcacttcagggtcattgagaaggtcaaaacgaaattcagactctacggagttggcagcacagatgaatgaaagtgttgacgtcatggatgtcatcgctatttgctgtccaaagtacaaagatcgaccacaaattgcaagagtagtgcagaaaaccagcagtggcttcagtgttcagtggatggcaggctcctacagtggctcctggactgaggctaagcgccgtgatggccgcaaactggtgccttgggtagacactattaaagagtcagacattatttacaaaaaaattgctctaacgagtgctaataagctgactaataaagttgttcagactttacgatccctgtatgccgccaaggatgggacttccagctaatgaatttgtacatgcagccaaatttacaggaatttttttaaaaggcagaaaaacttgaaataccaacattctggcaaaaaaaaatcagttttatgaagagtaagtggaacctgggatgcaggaacaaaagaaggaaatgttgggcaaacatttttgtgggagctcccttcgctgttgtgcagcagaaacagattctcagttcatttttactcccactgtattatagtttaacaaaaattgtttatatcttggaaaaaaaactttctgtttaaaaaaaataaacaagtgaatgttggaaattagtctgttaatgttcttaataaagtgttcttggagtttaacctagcagcggatggctttctttagcttagcccagtttccagggaagcattgttttttccaggctgtaaaatggcagaatctcctggatatataatttattctgttgaaaaaaaaaaaagcatgcagtatctatgacctatctgcagaaggagtttttgtaaatgtagattttgatgtattaggtcaccctgaaaacaatacaagaaaagggatccccaggtaatctggtggagcgaatactgcaataaatttttttacttctctttgttacttgtctgtttccatttgaatttcttattgtaaaaatctgtttaaatccatttatattattttacagtcttttatgtaaaatttattatatcactggttttcaaagcaaaacataaaatattgtttatacagtttgtataggctgacttctgaataattggtatctattattttcattcccataagagggtgtaaacaattaactccagggttttattgtatcctgcaatatttagtattaactatatatgatttagcactgtgccaaacacattttcaagagtacattttgatataaaaagaaactatagtttattccttgtatgcttcaatttctttctagtgatgtcatgatgctgatatttattctttaaacctcgggtaaaggtaacctgttatttggaaaaccagcatttctcttggttaaaatgatgtccggttattttagaactagagttgagatgaatatgacacttcataattacactcactacatttttcacaaattattttttaatgctgaaaagagtaattttacttgttgagatgtttattcattttctaatctatgctaaaagcttttatcataagtcttgggaacagttgtcatttacacattacttactgcagatatcttgactaaatcaggagggaggtgtttaatcatttgatatgtatagttgacactcaggaatagtaatgcctaaaatttacagtggatgaggtctgtttcaagtttaattctttttaaaaatgttttacttatttttaaatcactttgaaaaaattgacctccagaatgctgttttatgaaattggcaaataaatgaaggtattcaatttttgaggaagaatgacattgccacaaaatacctttttgtgacacctattaaaccactatgaaaataa

SEQ ID NO: 234981 - DNA, 8415 bp, Artificial Sequence
  derived and/or modified sequence
atgaatggggacatgcctcacgtcccaattacgacacttgccggtatcgccagtctgaccgatctgctgaaccagcttcccttgccctccccccttccagccacgaccacaaaaagcctccttttcaatgctaggatcgccgaggaggtgaactgtctgttggcttgtcgcgatgacaacctagtgagtcaactcgttcacagtctgaaccaggttagtaccgaccacatcgaactgaaggataatttaggttctgatgatccggaaggtgacatccccgtgctgctccaggcggtgctcgccaggtcacctaacgtctttcgggaaaaatccatgcagaaccgatatgtccagtcaggtatgatgatgagtcagtacaaattgagccagaattcaatgcattcctcgccagctagttccaactaccaacagacgacaatcagccattctccttcatctcgcttcgtccctccacagacttcctccggtaaccgtttcatgccacagcagaactctcccgtacctagcccatatgcccctcaaagcccagctggatatatgccgtattcgcaccctagctcctacaccactcatccacaaatgcagcaggcctcggtgtcatcccccattgtggcgggaggcttacggaatatccacgacaataaggtgtccggacccctctcaggtaactcggcaaaccaccacgcagataaccctcgtcacggaagttcggaggattatctccacatggtgcacagactgtccagcgatgatggggactcctccactatgcgcaatgctgcctcatttccacttcgaagccctcagccggtctgttctccagcaggaagcgagggcacacccaaaggcagtcgacctccactgattttgcagtcacagtccttgccctgttcctcacccagagacgttccccctgacatcctgttggattctcccgaacggaaacaaaagaaacaaaagaagatgaaattaggaaaggacgaaaaggagcagagtgagaaagcggcaatgtacgatattatttcaagtcctagtaaggatagtacgaaactcaccctcaggctgagcagggtgaggtcctcggacatggatcagcaggaggatatgatttccggggtggaaaatagtaacgtgagtgaaaacgacattccgttcaacgttcagtatcccggacagacatccaaaaccccgattacccctcaggatatcaatcggcctctgaacgccgcacaatgtctgtcgcagcaggagcagaccgccttcctccccgcaaaccaggttccggttttgcagcagaatacttccgtggcggcaaaacagccacagaccagcgtggtccagaatcagcagcagatctcacagcagggtccaatatatgatgaagtggagctcgatgcccttgcggagatagaacgaatcgaacgagagtcggctatcgagcgtgaaagatttagtaaagaagtacaggataaagataaacccctgaaaaagagaaagcaggattcctaccctcaagaggctggcggagctacaggcggaaataggccagcctcccaagaaaccgggtctacgggtaacggttcacggcctgccctgatggtgagcatagacctgcatcaggctggtcgcgtggattcacaagccagcattacacaagattcagactctatcaaaaaacctgaggaaatcaagcaatgtaatgacgccccagtcagcgtcctgcaagaagatattgtcgggagtcttaaatccacccctgaaaatcaccccgagaccccgaagaaaaagtcggatcccgagctgtcaaaatcagagatgaagcagtctgagagtcgccttgctgaatccaaacctaatgaaaaccggctcgttgagactaagtcctccgagaataagctcgagaccaaggtcgagacacaaacggaagagctgaagcagaatgaatccagaacgaccgagtgcaagcaaaacgaatccaccattgttgaacccaaacagaatgagaataggttatctgacacaaagccaaacgataacaagcagaacaatggccgatccgagactacaaagtcccgtccagaaactccaaaacaaaagggggaaagccgcccagaaactccaaagcagaaatctgacggtcaccctgaaacaccaaagcaaaaaggagacggaagacctgagacgcctaaacaaaagggagaaagccgcccagaaacaccaaaacagaagaacgagggccgtcctgaaacgcctaaacaccggcacgataacagacgcgactcaggaaaaccctcaactgagaagaaaccagaggtgtccaagcataagcaggacaccaaaagcgattcccctaggttaaagtccgagagggcggaggcgttaaagcaacgccctgacgggagatctgtgtctgagtccttgcgccgtgatcacgataataaacagaaaagcgacgaccgcggagaaagtgagcggcacagaggcgaccagtcccgagtgaggcgccctgaaaccctcagaagcagttcccgcaatgagcacggcatcaaaagcgattcatcaaagacagacaaactggaacggaagcaccggcacgagagcggagactcgagagaacggccttcatctggcgagcagaagagtagacctgattcgcccagggttaagcagggagatagcaacaagtctaggagcgacaagctggggttcaaatcgcccacttctaaggatgataagcgtacagagggcaataagagcaaggtggacactaacaaagcacatcctgacaacaaagcagagtttccttcataccttcttggcggtcgcagcggagccctaaagaactttgtgatccccaaaattaaaagggataaggacggcaatgtgacacaagaaactaaaaaaatggagatgaagggtgagccgaaggacaaagtggagaagattggacttgtggaagatctcaacaagggcgctaaaccggtggtggtgttgcaaaagctgtcactggacgatgtgcagaagcttattaaagatcgtgaggacaaaagtcggtcttcccttaagccaatcaagaataaaccatccaagtcgaacaagggcagtatcgatcagtcggttctaaaggaactgccgccagagctgctggctgaaatcgagtcaacgatgccactatgcgagcgagtgaaaatgaacaagcgcaagcggtcaacagttaacgagaaacctaaatatgctgaaatttcatctgatgaggacaatgattccgatgaggcctttgagtcaagcaggaagcgccataaaaaggatgacgataaggcctgggagtacgaggaacgagaccgaagatccagtggcgaccacagacgatccgggcattcacacgaaggcaggaggagcagtggcggtggacgatacagaaaccggagtccatctgatagcgacatggaggactacagtcctcctcccagcttatcagaggttgcaaggaaaatgaaaaaaaaggaaaaacagaaaaaaaggaaagcttatgaaccgaagctcacacccgaagaaatgatggattcaagtactttcaagagatttactgcctctattgagaacattttggacaatttggaggacatggattttacagctttcggcgatgatgatgagattccccaggagttacttctgggaaaacatcagctcaatgaactgggctcagagtccgctaagattaaagcgatgggaatcatggataaactgagcacagacaagactgtgaaggtactgaacatactggaaaaaaacattcaggatggaagtaaactgtccaccctcttgaatcacaataatgacaccgaggaagaggaacggctctggagagatctcattatggaaagggtgactaagtctgccgatgcttgtctgacaaccatcaacatcatgacctcccctaacatgcctaaggctgtgtatattgaggatgtaatcgaaagagtgattcagtacactaagttccacctacagaatacattatacccccagtatgaccccgtttacaggctagatccccacggagggggtctcctgagttctaaagccaagcgagcaaaatgcagtacccataaacagagagtgatagtcatgttgtataacaaagtatgcgatatcgtctcaagtctcagcgaactgctcgagattcaattactcaccgacacgaccatcctgcaggtgtcttctatgggcattactcccttttttgttgaaaacgtgagcgagctgcaactgtgcgccattaagctggtcacagccgtcttctcccggtatgaaaaacatcgccagctgattctcgaggagattttcacctcactcgctagactacccaccagcaaaagatcactgaggaattttagattgaacagttctgacatggacggcgagccaatgtatatacagatggttaccgccctcgtgctgcagctgattcaatgcgtcgtccacctcccatcttctgaaaaggattccaatgcagaagaggattccaataaaaaaatagaccaggatgttgtgatcaccaacagttacgagacagcgatgaggactgcgcagaactttctaagtatcttcctgaaaaaatgcggcagcaaacaaggggaagaagactacagaccgctgttcgaaaactttgtccaagatctcctctcaactgtgaacaagccagagtggcctgcagctgaattgctgctttcccttctgggacggctgcttgtacaccagtttagcaacaaaagtactgaaatggccctgcgtgtggcctccttggattacctcgggactgtggctgcccgtctgagaaaggacgcagtgacttccaaaatggaccaggggtccatagaacgaatcctgaagcaagtttcaggaggggaggatgagatccaacagctgcagaaagcattactggattatctagatgaaaacaccgagaccgatcctagcctcgtgttctcccggaagttttatatagcacagtggttcagggacacaaccctcgagacagagaaagctatgaaatcccagaaggacgaggagtcttcagagggaacccaccacgcaaaggaaatcgaaactacaggacagattatgcatagagcggagaacaggaagaagtttctcaggtccattataaagaccaccccaagccagtttagcacactcaaaatgaactccgacaccgtggattatgacgacgcttgcctcattgttagatacctggcctctatgcgcccttttgcccagtcctttgatatctatcttacccagattctgagggttctcggcgagaatgctattgctgtccggaccaaggccatgaaatgcttgtctgaagtggtggccgttgacccttcaatcctggctcgcctggacatgcagcggggagtgcatggacgactcatggacaacagcacttccgtgagggaagcagccgtggaattgctgggacgattcgtgttgtgtcgacctcagttagcagaacagtactacgatatgttaatagagcgcatactcgataccgggatttccgtgcggaagagagtgattaagattcttagagatatttgcattgaacagcccacattcccaaaaattactgaaatgtgtgtcaagatgatccggagggtcaatgatgaagagggaataaagaaacttgtgaacgagaccttccagaagctctggttcactcccaccccacataatgataaagaagccatgactcgcaaaatcttgaatatcaccgatgttgtggccgcttgcagggacaccgggtacgactggttcgagcagctcctccagaatctgctcaagtcagaagaggacagctcctataaacccgtaaagaaggcctgtacccagctggtagacaatctcgtggagcacatcttgaagtatgaagaaagcctcgctgactcggacaataaaggggtgaattcgggaagattggtggcctgtataaccactctctttttgttcagtaaaattagacctcagctgatggtcaaacacgccatgacaatgcagccttacctgacaactaaatgcagtactcagaatgacttcatggtaatctgtaacgtggcaaagatcttagagctcgttgtgcctctgatggaacatccaagcgagacattcctagcgaccattgaggaggaccttatgaaacttattataaaatacggcatgacagtggttcaacactgtgtgagctgtctcggagccgtcgtaaacaaagtgacacagaatttcaaattcgtctgggcatgcttcaatcgctactacggcgcaatttccaagctgaaatctcagcatcaggaggatccgaataatactagtctactgacaaacaagcctgccttactcaggtcactcttcactgtcggtgccttatgccggcatttcgactttgatctcgaggatttcaagggaaacagcaaggtgaacatcaaggataaagtgctggagttactcatgtactttactaaacactccgacgaggaagtgcaaactaaggccatcatagggctgggattcgcattcatacagcatccatccttaatgttcgagcaagaggtcaaaaacctgtacaacaacattctgagcgataagaattcatccgtaaatctgaagatccaggtgctgaaaaaccttcagacttatttacaggaggaagacaccagaatgcagcaggcagatcgggattggaagaaagtggcaaagcaggaggacctaaaggagatgggggacgtgtcttctggcatgtctagcagcatcatgcagctgtacttaaaacaagtactcgaggccttctttcatacgcagagtagtgttcgtcattttgccctcaatgtcatcgccctgacgctgaaccagggcctgatccacccagtgcagtgtgtgccttacctgattgccatggggactgatcccgagcccgcaatgagaaataaggcagaccaacaattggtagagattgataagaagtacgccggtttcatccatatgaaagctgttgccggaatgaaaatgagttatcaggtacaacaggcgatcaacacttgtctgaaggaccctgtccgcggattccggcaggacgaatcttcgtcagcactgtgttcccatttgtacagtatgatcagaggtaacaggcagcataggagagccttcctcataagcctcctgaacctctttgatgatactgctaaaaccgatgtgaccatgctgctgtatattgcagataacctcgcgtgttttccctatcagacgcaggaggagcctctgttcataatgcaccacatagatatcacattgtctgtctccggttccaatcttctgcaaagctttaaagaatctatggttaaggataaacgcaaagagcgcaagtcctcacccagcaaggaaaacgaaagttcagactctgaggaagaggttagtagaccacgcaaaagccggaagagggtagatagtgattcggattccgatagcgaggatgacatcaatagcgtaatgaaatgccttcccgaaaattctgcgcctctgatcgagtttgcgaacgtgtctcagggcatcttgcttcttctgatgctcaagcagcacttgaaaaatctttgcgggttttcggattctaagattcaaaaatactcaccatccgaaagtgctaaagtgtatgacaaggccattaaccggaagacaggagttcacttccaccctaagcaaactcttgactttcttcgctcagatatggccaattctaagatcaccgaggaagtgaaaaggtccattgttaagcagtacttggattttaaattacttatggagcatttggaccctgatgaggaggaagaagaaggagaggtatcagctagtactaatgctagaaacaaggccatcactagcctcctcggcggtggctcacccaagaacaatacagcagccgagacagaggacgacgagtcagacggagaggatagaggtggtggcacatccggatcactgcgcaggtccaagaggaacagcgatagtaccgaactagcagcccaaatgaacgagtctgtagacgtcatggatgtaatcgccatctgctgcccaaaatataaggaccggcctcagattgccagagtggtacaaaagacatcctctgggttttctgtccagtggatggcaggatcttatagtgggagctggacagaagccaagcgcagggatggtcggaagctggtgccttgggttgatacaatcaaggagagcgacataatctacaaaaaaatcgcgctcactagcgctaataaactgactaacaaggtggtgcagactctgcgatccttgtacgccgcaaaagacgggactagctcgtar

SEQ ID NO: 234982 - DNA, 8415 bp, Artificial Sequence
  derived and/or modified sequence
atgaacggcgacatgccccacgtgcccatcaccaccctggccggcatcgccagcctgaccgacctgctgaaccagctgcccctgcccagccccctgcccgccaccaccaccaagagcctgctgttcaacgccagaatcgccgaggaggtgaactgcctgctggcctgcagagacgacaacctggtgagccagctggtgcacagcctgaaccaggtgagcaccgaccacatcgagctgaaggacaacctgggcagcgacgaccccgagggcgacatccccgtgctgctgcaggccgtgctggccagaagccccaacgtgttcagagagaagagcatgcagaacagatacgtgcagagcggcatgatgatgagccagtacaagctgagccagaacagcatgcacagcagccccgccagcagcaactaccagcagaccaccatcagccacagccccagcagcagattcgtgcccccccagaccagcagcggcaacagattcatgccccagcagaacagccccgtgcccagcccctacgccccccagagccccgccggctacatgccctacagccaccccagcagctacaccacccacccccagatgcagcaggccagcgtgagcagccccatcgtggccggcggcctgagaaacatccacgacaacaaggtgagcggccccctgagcggcaacagcgccaaccaccacgccgacaaccccagacacggcagcagcgaggactacctgcacatggtgcacagactgagcagcgacgacggcgacagcagcaccatgagaaacgccgccagcttccccctgagaagcccccagcccgtgtgcagccccgccggcagcgagggcacccccaagggcagcagaccccccctgatcctgcagagccagagcctgccctgcagcagccccagagacgtgccccccgacatcctgctggacagccccgagagaaagcagaagaagcagaagaagatgaagctgggcaaggacgagaaggagcagagcgagaaggccgccatgtacgacatcatcagcagccccagcaaggacagcaccaagctgaccctgagactgagcagagtgagaagcagcgacatggaccagcaggaggacatgatcagcggcgtggagaacagcaacgtgagcgagaacgacatccccttcaacgtgcagtaccccggccagaccagcaagacccccatcaccccccaggacatcaacagacccctgaacgccgcccagtgcctgagccagcaggagcagaccgccttcctgcccgccaaccaggtgcccgtgctgcagcagaacaccagcgtggccgccaagcagccccagaccagcgtggtgcagaaccagcagcagatcagccagcagggccccatctacgacgaggtggagctggacgccctggccgagatcgagagaatcgagagagagagcgccatcgagagagagagattcagcaaggaggtgcaggacaaggacaagcccctgaagaagagaaagcaggacagctacccccaggaggccggcggcgccaccggcggcaacagacccgccagccaggagaccggcagcaccggcaacggcagcagacccgccctgatggtgagcatcgacctgcaccaggccggcagagtggacagccaggccagcatcacccaggacagcgacagcatcaagaagcccgaggagatcaagcagtgcaacgacgcccccgtgagcgtgctgcaggaggacatcgtgggcagcctgaagagcacccccgagaaccaccccgagacccccaagaagaagagcgaccccgagctgagcaagagcgagatgaagcagagcgagagcagactggccgagagcaagcccaacgagaacagactggtggagaccaagagcagcgagaacaagctggagaccaaggtggagacccagaccgaggagctgaagcagaacgagagcagaaccaccgagtgcaagcagaacgagagcaccatcgtggagcccaagcagaacgagaacagactgagcgacaccaagcccaacgacaacaagcagaacaacggcagaagcgagaccaccaagagcagacccgagacccccaagcagaagggcgagagcagacccgagacccccaagcagaagagcgacggccaccccgagacccccaagcagaagggcgacggcagacccgagacccccaagcagaagggcgagagcagacccgagacccccaagcagaagaacgagggcagacccgagacccccaagcacagacacgacaacagaagagacagcggcaagcccagcaccgagaagaagcccgaggtgagcaagcacaagcaggacaccaagagcgacagccccagactgaagagcgagagagccgaggccctgaagcagagacccgacggcagaagcgtgagcgagagcctgagaagagaccacgacaacaagcagaagagcgacgacagaggcgagagcgagagacacagaggcgaccagagcagagtgagaagacccgagaccctgagaagcagcagcagaaacgagcacggcatcaagagcgacagcagcaagaccgacaagctggagagaaagcacagacacgagagcggcgacagcagagagagacccagcagcggcgagcagaagagcagacccgacagccccagagtgaagcagggcgacagcaacaagagcagaagcgacaagctgggcttcaagagccccaccagcaaggacgacaagagaaccgagggcaacaagagcaaggtggacaccaacaaggcccaccccgacaacaaggccgagttccccagctacctgctgggcggcagaagcggcgccctgaagaacttcgtgatccccaagatcaagagagacaaggacggcaacgtgacccaggagaccaagaagatggagatgaagggcgagcccaaggacaaggtggagaagatcggcctggtggaggacctgaacaagggcgccaagcccgtggtggtgctgcagaagctgagcctggacgacgtgcagaagctgatcaaggacagagaggacaagagcagaagcagcctgaagcccatcaagaacaagcccagcaagagcaacaagggcagcatcgaccagagcgtgctgaaggagctgccccccgagctgctggccgagatcgagagcaccatgcccctgtgcgagagagtgaagatgaacaagagaaagagaagcaccgtgaacgagaagcccaagtacgccgagatcagcagcgacgaggacaacgacagcgacgaggccttcgagagcagcagaaagagacacaagaaggacgacgacaaggcctgggagtacgaggagagagacagaagaagcagcggcgaccacagaagaagcggccacagccacgagggcagaagaagcagcggcggcggcagatacagaaacagaagccccagcgacagcgacatggaggactacagccccccccccagcctgagcgaggtggccagaaagatgaagaagaaggagaagcagaagaagagaaaggcctacgagcccaagctgacccccgaggagatgatggacagcagcaccttcaagagattcaccgccagcatcgagaacatcctggacaacctggaggacatggacttcaccgccttcggcgacgacgacgagatcccccaggagctgctgctgggcaagcaccagctgaacgagctgggcagcgagagcgccaagatcaaggccatgggcatcatggacaagctgagcaccgacaagaccgtgaaggtgctgaacatcctggagaagaacatccaggacggcagcaagctgagcaccctgctgaaccacaacaacgacaccgaggaggaggagagactgtggagagacctgatcatggagagagtgaccaagagcgccgacgcctgcctgaccaccatcaacatcatgaccagccccaacatgcccaaggccgtgtacatcgaggacgtgatcgagagagtgatccagtacaccaagttccacctgcagaacaccctgtacccccagtacgaccccgtgtacagactggacccccacggcggcggcctgctgagcagcaaggccaagagagccaagtgcagcacccacaagcagagagtgatcgtgatgctgtacaacaaggtgtgcgacatcgtgagcagcctgagcgagctgctggagatccagctgctgaccgacaccaccatcctgcaggtgagcagcatgggcatcacccccttcttcgtggagaacgtgagcgagctgcagctgtgcgccatcaagctggtgaccgccgtgttcagcagatacgagaagcacagacagctgatcctggaggagatcttcaccagcctggccagactgcccaccagcaagagaagcctgagaaacttcagactgaacagcagcgacatggacggcgagcccatgtacatccagatggtgaccgccctggtgctgcagctgatccagtgcgtggtgcacctgcccagcagcgagaaggacagcaacgccgaggaggacagcaacaagaagatcgaccaggacgtggtgatcaccaacagctacgagaccgccatgagaaccgcccagaacttcctgagcatcttcctgaagaagtgcggcagcaagcagggcgaggaggactacagacccctgttcgagaacttcgtgcaggacctgctgagcaccgtgaacaagcccgagtggcccgccgccgagctgctgctgagcctgctgggcagactgctggtgcaccagttcagcaacaagagcaccgagatggccctgagagtggccagcctggactacctgggcaccgtggccgccagactgagaaaggacgccgtgaccagcaagatggaccagggcagcatcgagagaatcctgaagcaggtgagcggcggcgaggacgagatccagcagctgcagaaggccctgctggactacctggacgagaacaccgagaccgaccccagcctggtgttcagcagaaagttctacatcgcccagtggttcagagacaccaccctggagaccgagaaggccatgaagagccagaaggacgaggagagcagcgagggcacccaccacgccaaggagatcgagaccaccggccagatcatgcacagagccgagaacagaaagaagttcctgagaagcatcatcaagaccacccccagccagttcagcaccctgaagatgaacagcgacaccgtggactacgacgacgcctgcctgatcgtgagatacctggccagcatgagacccttcgcccagagcttcgacatctacctgacccagatcctgagagtgctgggcgagaacgccatcgccgtgagaaccaaggccatgaagtgcctgagcgaggtggtggccgtggaccccagcatcctggccagactggacatgcagagaggcgtgcacggcagactgatggacaacagcaccagcgtgagagaggccgccgtggagctgctgggcagattcgtgctgtgcagaccccagctggccgagcagtactacgacatgctgatcgagagaatcctggacaccggcatcagcgtgagaaagagagtgatcaagatcctgagagacatctgcatcgagcagcccaccttccccaagatcaccgagatgtgcgtgaagatgatcagaagagtgaacgacgaggagggcatcaagaagctggtgaacgagaccttccagaagctgtggttcacccccaccccccacaacgacaaggaggccatgaccagaaagatcctgaacatcaccgacgtggtggccgcctgcagagacaccggctacgactggttcgagcagctgctgcagaacctgctgaagagcgaggaggacagcagctacaagcccgtgaagaaggcctgcacccagctggtggacaacctggtggagcacatcctgaagtacgaggagagcctggccgacagcgacaacaagggcgtgaacagcggcagactggtggcctgcatcaccaccctgttcctgttcagcaagatcagaccccagctgatggtgaagcacgccatgaccatgcagccctacctgaccaccaagtgcagcacccagaacgacttcatggtgatctgcaacgtggccaagatcctggagctggtggtgcccctgatggagcaccccagcgagaccttcctggccaccatcgaggaggacctgatgaagctgatcatcaagtacggcatgaccgtggtgcagcactgcgtgagctgcctgggcgccgtggtgaacaaggtgacccagaacttcaagttcgtgtgggcctgcttcaacagatactacggcgccatcagcaagctgaagagccagcaccaggaggaccccaacaacaccagcctgctgaccaacaagcccgccctgctgagaagcctgttcaccgtgggcgccctgtgcagacacttcgacttcgacctggaggacttcaagggcaacagcaaggtgaacatcaaggacaaggtgctggagctgctgatgtacttcaccaagcacagcgacgaggaggtgcagaccaaggccatcatcggcctgggcttcgccttcatccagcaccccagcctgatgttcgagcaggaggtgaagaacctgtacaacaacatcctgagcgacaagaacagcagcgtgaacctgaagatccaggtgctgaagaacctgcagacctacctgcaggaggaggacaccagaatgcagcaggccgacagagactggaagaaggtggccaagcaggaggacctgaaggagatgggcgacgtgagcagcggcatgagcagcagcatcatgcagctgtacctgaagcaggtgctggaggccttcttccacacccagagcagcgtgagacacttcgccctgaacgtgatcgccctgaccctgaaccagggcctgatccaccccgtgcagtgcgtgccctacctgatcgccatgggcaccgaccccgagcccgccatgagaaacaaggccgaccagcagctggtggagatcgacaagaagtacgccggcttcatccacatgaaggccgtggccggcatgaagatgagctaccaggtgcagcaggccatcaacacctgcctgaaggaccccgtgagaggcttcagacaggacgagagcagcagcgccctgtgcagccacctgtacagcatgatcagaggcaacagacagcacagaagagccttcctgatcagcctgctgaacctgttcgacgacaccgccaagaccgacgtgaccatgctgctgtacatcgccgacaacctggcctgcttcccctaccagacccaggaggagcccctgttcatcatgcaccacatcgacatcaccctgagcgtgagcggcagcaacctgctgcagagcttcaaggagagcatggtgaaggacaagagaaaggagagaaagagcagccccagcaaggagaacgagagcagcgacagcgaggaggaggtgagcagacccagaaagagcagaaagagagtggacagcgacagcgacagcgacagcgaggacgacatcaacagcgtgatgaagtgcctgcccgagaacagcgcccccctgatcgagttcgccaacgtgagccagggcatcctgctgctgctgatgctgaagcagcacctgaagaacctgtgcggcttcagcgacagcaagatccagaagtacagccccagcgagagcgccaaggtgtacgacaaggccatcaacagaaagaccggcgtgcacttccaccccaagcagaccctggacttcctgagaagcgacatggccaacagcaagatcaccgaggaggtgaagagaagcatcgtgaagcagtacctggacttcaagctgctgatggagcacctggaccccgacgaggaggaggaggagggcgaggtgagcgccagcaccaacgccagaaacaaggccatcaccagcctgctgggcggcggcagccccaagaacaacaccgccgccgagaccgaggacgacgagagcgacggcgaggacagaggcggcggcaccagcggcagcctgagaagaagcaagagaaacagcgacagcaccgagctggccgcccagatgaacgagagcgtggacgtgatggacgtgatcgccatctgctgccccaagtacaaggacagaccccagatcgccagagtggtgcagaagaccagcagcggcttcagcgtgcagtggatggccggcagctacagcggcagctggaccgaggccaagagaagagacggcagaaagctggtgccctgggtggacaccatcaaggagagcgacatcatctacaagaagatcgccctgaccagcgccaacaagctgaccaacaaggtggtgcagaccctgagaagcctgtacgccgccaaggacggcaccagcagctag

SEQ ID NO: 234983 - protein, 561 aa, Artificial Sequence
  derived and/or modified sequence
MCGIWALFGSDDCLSVQCLSAMKIAHRGPDAFRFENVNGYTNCCFGFHRLAVVDPLFGMQPIRVKKYPYLWLCYNGEIYNHKKMQQHFEFEYQTKVDGEIILHLYDKGGIEQTICMLDGVFAFVLLDTANKKVFLGRDTYGVRPLFKAMTEDGFLAVCSEAKGLVTLKHSATPFLKVEPFLPGHYEVLDLKPNGKVASVEMVKYHHCRDVPLHALYDNVEKLFPGFEIETVKNNLRILFNNAVKKRLMTDRRIGCLLSGGLDSSLVAATLLKQLKEAQVQYPLQTFAIGMEDSPDLLAARKVADHIGSEHYEVLFNSEEGIQALDEVIFSLETYDITTVRASVGMYLISKYIRKNTDSVVIFSGEGSDELTQGYIYFHKAPSPEKAEEESERLLRELYLFDVLRADRTTAAHGLELRVPFLDHRFSSYYLSLPPEMRIPKNGIEKHLLRETFEDSNLIPKEILWRPKEAFSDGITSVKNSWFKILQEYVEHQVDDAMMANAAQKFPFNTPKTKEGYYYRQVFERHYPGRADWLSHYWMPKWINATDPSARTLTHYKSAVKA

SEQ ID NO: 234984 - protein, 28 aa, Artificial Sequence
  derived and/or modified sequence
MCGIWALFGSDDCLSVQCLSAMKIAHRG

SEQ ID NO: 234985 - protein, 162 aa, Artificial Sequence
  derived and/or modified sequence
MCGIWALFGSDDCLSVQCLSAMKIAHRGPDAFRFENVNGYTNCCFGFHRLAVVDPLFGMQPIRVKKYPYLWLCYNGEIYNHKKMQQHFEFEYQTKVDGEIILHLYDKGGIEQTICMLDGVFAFVLLDTANKKVFLGRDTYGVRPLFKAMTEDGFLAVCSEAK

SEQ ID NO: 234986 - protein, 215 aa, Artificial Sequence
  derived and/or modified sequence
MCGIWALFGSDDCLSVQCLSAMKIAHRGPDAFRFENVNGYTNCCFGFHRLAVVDPLFGMQPIRVKKYPYLWLCYNGEIYNHKKMQQHFEFEYQTKVDGEIILHLYDKGGIEQTICMLDGVFAFVLLDTANKKVFLGRDTYGVRPLFKAMTEDGFLAVCSEAKGLVTLKHSATPFLKVEPFLPGHYEVLDLKPNGKVASVEMVKYHHCRDVPLHAL

SEQ ID NO: 234987 - protein, 119 aa, Artificial Sequence
  derived and/or modified sequence
MCGIWALFGSDDCLSVQCLSAMKIAHRGPDAFRFENVNGYTNCCFGFHRLAVVDPLFGMQPIRVKKYPYLWLCYNGEIYNHKKMQQHFEFEYQTKVDGEIILHLYDKGGIEQTICMLDG

SEQ ID NO: 234988 - protein, 33 aa, Artificial Sequence
  derived and/or modified sequence
MCGIWALFGSDDCLSVQCLSAMKIAHRGPDAFR

SEQ ID NO: 234989 - protein, 63 aa, Artificial Sequence
  derived and/or modified sequence
MKIAHRGPDAFRFENVNGYTNCCFGFHRLAVVDPLFGMQPIRVKKYPYLWLCYNGEIYNHKKV

SEQ ID NO: 234990 - DNA, 1686 bp, Artificial Sequence
  derived and/or modified sequence
atgtgcggcatatgggcgcttttcggaagtgacgattgtctgagcgtacagtgtttaagcgccatgaaaatcgcccaccggggccctgacgcatttcggtttgagaatgtgaacgggtacaccaattgctgtttcggtttccatagacttgccgttgtggatcctcttttcggaatgcaaccaattcgggtcaaaaagtacccttatctgtggctctgctacaacggcgaaatctataaccataaaaaaatgcagcaacacttcgaattcgagtatcagaccaaagtggatggcgaaatcattcttcatctctatgataagggcgggatcgagcagactatctgcatgctcgatggcgttttcgcctttgtgctgctggacacagctaataagaaggtgttcctgggtagagatacctacggcgtacggcccctcttcaaggcaatgactgaggacggcttcctcgccgtgtgcagcgaggccaaagggcttgtaacacttaaacactctgcaaccccgtttctcaaggtggagccattcctgccggggcattacgaagtgttggatctgaagcccaacggtaaggtggcttccgtagaaatggtcaaatatcaccattgtcgcgatgttcccttacatgccctatacgacaatgtcgaaaagctgtttccaggatttgagatcgagaccgttaagaacaacctccgcatcctttttaataatgctgtgaagaaacggctaatgactgaccgtcggattggctgcctgcttagcggcgggttggactccagtctggtggcagctactctgctgaaacaactgaaggaagcccaggtgcagtacccgttacaaacattcgcgattggcatggaagattctcctgacctcctggctgcacgcaaagtggcggaccacatcggcagtgaacactatgaggtgctcttcaatagcgaggaaggtatccaggccctggacgaggtgatcttcagcctggagacgtatgatataactactgtacgcgcgtctgtgggaatgtatttaatctccaaatatatccggaaaaacacggattcagtcgtcatcttcagcggcgagggatcggatgagctgacccagggttatatttactttcacaaggcccctagcccagagaaggcagaagaggagagcgaaagactgctgcgcgagctctatctcttcgacgtactgagggccgacaggaccactgctgcccacggccttgagctgagagtccctttcttggaccaccggttcagctcctactacctgtcattgccgccagaaatgcgcatacctaaaaacgggatcgagaaacatctactgagggaaacctttgaggatagcaacttgatccccaaagagattctgtggagacctaaggaggcattttcagacggaattacgtcagtcaaaaattcttggtttaagatactacaggagtacgttgaacatcaggtggacgatgctatgatggccaatgcagcccaaaagtttcctttcaacaccccaaagacaaaggagggctattactataggcaggtgtttgagagacactatccgggaagagctgactggctttcccattactggatgcccaagtggatcaacgcaaccgatccatcagctcgtaccctgactcactacaagagcgccgtgaaggcttag

SEQ ID NO: 234991 - DNA, 1686 bp, Artificial Sequence
  derived and/or modified sequence
atgtgtgggatctgggccctgttcggcagtgacgactgtctgagcgttcaatgcctatctgccatgaagatcgcacacaggggtcccgacgctttccgatttgagaatgttaatggatataccaattgttgctttggcttccaccgtctcgctgtagtggaccccctttttgggatgcagcccattcgcgtcaagaaatacccttacctctggctctgctataatggagagatttataatcacaagaaaatgcaacagcatttcgagtttgaataccaaactaaggtggacggcgaaataatactgcatttgtatgataaggggggcatcgaacagactatttgtatgctcgacggcgtgtttgcattcgtactgctggatacggccaataaaaaagtattcctggggcgcgacacatatggagtgagacctctgtttaaggccatgactgaagatggctttttagctgtgtgctccgaggccaaaggtctggttacacttaagcattctgcaacccctttcctaaaagtggaaccatttctgccaggacattatgaagtgctagatttgaaaccaaacgggaaagttgcatctgtggaaatggtgaagtatcaccattgtcgcgatgtgcctctccacgccctttatgataacgtggagaagctgtttccagggttcgagatcgagacagtcaaaaacaatctaaggatattgttcaataacgccgtcaagaagcgtctgatgaccgatcggcgcatcggctgcctcctttctggagggctggatagtagtctggtcgccgcaactttgctgaagcaactgaaagaagcacaagtccagtatcccctacaaactttcgctattggtatggaggactcacctgacctgctggcagctcgaaaagtcgcagatcacataggaagcgagcactatgaagttcttttcaactctgaagaaggcatccaggcgctggacgaggtgattttttccctcgagacgtatgacatcacgactgtgagagcgtccgtgggtatgtacttgattagcaagtatatcagaaagaacaccgattctgtagtgatcttctcaggggaggggtcggacgagttgacccaggggtacatttattttcacaaggccccctctcctgaaaaggccgaggaggaatccgaacgcctgttgagggagctgtacctctttgacgttttgcgggcagaccgaacaaccgccgcgcacggattggagctaagggtgcccttcttagaccaccgcttctcctcttactacctgtctttaccaccagaaatgcggatcccaaagaacggtatcgaaaagcatttgctgcgggaaactttcgaggactcaaacctcattccaaaggagatcctgtggagacctaaggaagccttctcagatggaatcacaagcgtgaagaactcctggtttaaaattctgcaggagtacgtggaacaccaggtggacgacgcaatgatggccaatgccgcccaaaaattcccgttcaacacaccaaagaccaaagaaggttattattatcgtcaggtctttgaacgccactaccccgggcgcgccgactggctgtcgcactattggatgccaaaatggattaacgcgacggaccctagcgcaagaacattgacacattacaagtcagcagtaaaagcatag

SEQ ID NO: 234992 - DNA, 1686 bp, Artificial Sequence
  derived and/or modified sequence
atgtgtggtatttgggccctgttcgggtccgacgattgtctgtcagttcagtgcctgtcagctatgaagattgctcataggggccctgatgccttccggtttgagaacgtcaacgggtacaccaactgttgtttcgggtttcataggcttgcagtggtggatcccctgttcggaatgcagccgattcgagtgaaaaagtatccttatttgtggttgtgctataatggagagatttataaccacaagaaaatgcagcaacactttgaatttgaataccagaccaaagtggacggggaaatcatcctccatctgtacgataagggcggaatcgaacagacaatctgcatgctggatggcgtgttcgcctttgttcttttggatactgcaaataagaaagtgttcctgggccgcgacacttatggcgttcggcctctgttcaaagccatgacagaggatgggttcttagctgtgtgcagcgaagcaaaaggactggtcactctcaaacacagcgcgacaccatttctgaaggttgagcccttccttcccgggcactacgaagtacttgacctgaaacccaatggaaaagtggcctcggtggagatggttaagtatcaccactgccgcgacgtgcctctccacgccctatacgataatgtagaaaagctgttccctggttttgaaattgagacagttaagaacaatctcaggattctttttaataatgctgtgaaaaaaaggctgatgactgatagaagaataggatgccttctctccggtggtctggacagctcccttgtcgctgccaccctgttaaagcagctcaaagaggcccaagtccagtatcccctgcaaaccttcgctatagggatggaagattcacccgatcttctggccgcccgtaaggtggccgaccacatcggaagcgagcactacgaggtcctgtttaactccgaggaggggattcaggcgctcgatgaggtgattttcagcctcgaaacctacgacattacgacggtccgagcctccgtcgggatgtacttgatcagcaaatacatccgcaagaatacagattctgtggttatctttagcggagaagggagtgatgaactgacccaggggtacatatattttcacaaggctccgtctcccgagaaggctgaggaggaaagcgaacgtctgcttcgggagctctacctgttcgacgtcctgagggccgaccgcaccactgctgcccacggtcttgagctgcgtgtgccctttctcgaccatcgattctcttcgtactacctgtccctccctcctgaaatgcgcataccaaaaaatggcatcgagaaacacctgctgcgcgagacattcgaggactccaatctcattccgaaagagatcttatggcgtcccaaagaggcattctctgacggaattacctcagtaaaaaattcttggttcaagattctgcaggagtacgttgaacatcaagtggatgacgccatgatggcgaacgccgcacaaaagttcccattcaacacacccaaaacaaaagaaggttattattatcgacaggtcttcgagcgacactaccctggccgggcagactggctctcccactattggatgccgaaatggattaatgctacggatccatcagcccgtacgctgactcactacaaatcggctgtgaaggcatag

SEQ ID NO: 234993 - DNA, 87 bp, Artificial Sequence
  derived and/or modified sequence
atgtgcggtatttgggccctgtttggcagcgacgattgcctgagcgttcaatgcctgtctgcaatgaaaatcgcacaccgtggttag

SEQ ID NO: 234994 - DNA, 489 bp, Artificial Sequence
  derived and/or modified sequence
atgtgcggaatttgggcgctgttcgggtcggacgactgcctgtccgtccaatgcctgtcagcaatgaagatcgcgcacaggggacccgacgcatttaggttcgagaatgtcaatgggtacactaactgttgtttcggttttcacagactcgccgttgtggaccctctattcggcatgcagccaatccgtgttaagaagtatccctacctctggctctgctataacggggaaatttataatcacaagaaaatgcagcagcacttcgagtttgagtatcagaccaaagtggacggagagattatactgcacctttacgacaagggtggtattgaacagacaatatgcatgctggacggcgtcttcgctttcgtcctgctggataccgctaacaagaaagtctttcttggtcgggacacctacggggttcgtccgttgtttaaagccatgacagaagatgggtttcttgctgtctgcagcgaagcaaaatag

SEQ ID NO: 234995 - DNA, 648 bp, Artificial Sequence
  derived and/or modified sequence
atgtgcgggatctgggccctgtttggctcagatgactgtctgtcagttcaatgcctctctgcaatgaagatcgcgcacagaggacccgacgccttccgattcgaaaatgtaaacggatacaccaactgctgcttcgggttccatcggctggcagtggtagaccccttattcggcatgcagccaatccgcgtgaagaagtacccgtatttgtggctctgttacaacggagagatatacaatcataaaaagatgcagcagcattttgaatttgagtaccagaccaaagtggatggcgaaatcattcttcacctgtatgacaaaggaggaatagaacagactatctgtatgctcgatggtgtgtttgcgtttgttctgctggatactgcaaataagaaagtgttcctagggcgggatacatacggggttcggcctctttttaaagctatgaccgaagatggctttttggccgtgtgtagcgaggccaagggacttgtgacactgaaacatagcgccaccccattcctcaaggttgagccatttctcccaggccactatgaagtgttggacctgaaaccgaatggaaaggtggcgtccgtggaaatggtgaagtatcaccactgccgggatgtccccctacacgcactctag

SEQ ID NO: 234996 - DNA, 360 bp, Artificial Sequence
  derived and/or modified sequence
atgtgcggcatctgggctctgttcggaagcgatgactgtttatctgtgcagtgcctatccgccatgaaaatagctcacagaggcccggacgcattcagatttgagaacgtgaatggctacactaactgttgcttcgggttccaccgactggccgtggtggatcctttgtttggaatgcaaccgattcgcgtcaaaaagtacccatacctgtggctgtgttacaatggtgagatctataaccacaaaaaaatgcagcaacacttcgagttcgagtaccagaccaaagtggacggcgagattatccttcacctatatgacaaaggtggaatagaacaaacaatctgcatgctggacggttag

SEQ ID NO: 234997 - DNA, 102 bp, Artificial Sequence
  derived and/or modified sequence
atgtgtggcatctgggctctgtttgggtccgatgactgtttatcagtgcagtgcctttccgccatgaagatcgcacatcggggcccggatgccttccgatag

SEQ ID NO: 234998 - DNA, 1623 bp, Artificial Sequence
  derived and/or modified sequence
atgaaaattgctcaccgtggcccggacgcgtttcggttcgagaacgtcaatgggtatactaactgctgcttcggattccacaggctggcggttgtagaccctttgtttggcatgcagcctatacgggtcaaaaagtacccctatctctggctgtgctacaacggggagatttacaatcataagaagatgcagcaacatttcgagttcgaataccagacgaaagttgatggtgaaatcatcctacatctatacgataagggaggaattgagcaaactatatgtatgctggacggtgtgttcgcttttgtgctgcttgacaccgccaataaaaaggtgttcctggggcgcgacacctacggagtgcggccccttttcaaggcaatgacagaagacggttttctcgccgtgtgctctgaggccaagggtctagtcacactgaaacactcagccaccccatttcttaaagtagagcccttcctgccgggacactatgaggttctggaccttaagcctaacggcaaagtcgcctccgtcgaaatggtaaaataccatcattgtcgcgacgtgcctttacacgccctgtatgataacgtcgaaaaactctttccgggtttcgagatagaaaccgtcaaaaacaacctgcgcattctcttcaataatgctgtgaagaaaagactgatgaccgatcgccggataggatgcctattgagcgggggcctcgactcaagtctggtcgccgccactcttttaaaacaactgaaagaggcacaagttcagtaccctctgcaaacgttcgcaatcgggatggaagattctccagatctgctagcagccaggaaggtagcggatcatatcggctctgagcactacgaggttctcttcaatagcgaggaagggattcaggccttagatgaagttattttctctctagaaacatatgacatcactaccgtgcgggcttctgtcggcatgtatctgatttccaagtacatccgcaagaacactgattcggtcgtgatatttagcggagagggatccgacgaacttacccaaggatacatatattttcacaaggccccaagccctgagaaagccgaggaggagagcgaaagactgctgcgggagctttacctgtttgacgtacttagggcggaccggaccaccgccgctcacggtctcgagctccgcgtgccattcctcgaccacagattcagctcttattatctcagccttccacctgagatgcgtatccccaagaacggtatcgaaaaacacttgcttcgcgaaacttttgaggactctaacctgattcctaaagagatactctggcgccctaaagaggctttttctgacgggatcactagcgtaaagaattcctggttcaagatcctgcaagagtatgtggagcatcaggtggacgacgctatgatggccaacgccgcacagaagtttccttttaacacaccaaaaacgaaggagggctattattaccggcaggtattcgagaggcactatcccggacgagccgattggctcagtcattactggatgcccaaatggataaacgcaaccgatccctccgcccggactctaacccattataagtcggccgtcaaggcgtag

SEQ ID NO: 234999 - DNA, 1686 bp, Artificial Sequence
  derived and/or modified sequence
atgtgtggcatctgggccctgtttggaagtgatgactgcctgtctgtgcagtgcctgagcgccatgaagatcgcccaccggggcccagatgccttccgctttgaaaatgtgaatggctacaccaactgctgcttcggcttccaccggctggccgtggtggaccccctgtttggcatgcagcccatccgggtgaagaagtacccctacctgtggctgtgctacaatggagagatctacaaccacaagaagatgcagcagcactttgaatttgagtaccagaccaaggtggatggagagatcatcctgcacctgtatgacaagggcggcatcgagcagaccatctgcatgctggatggagtgtttgcctttgtgctgctggacacagccaacaagaaggtgttcctgggccgggacacctacggcgtgcggcccctcttcaaggccatgacagaagatggcttcctggccgtgtgcagcgaggccaagggcctggtgaccctgaagcacagcgccacccccttcctgaaggtggagcccttcctgcccggccactatgaggtgctggacctgaagcccaacgggaaggtggcctctgtggagatggtgaagtaccaccactgcagagatgtgcccctgcacgccctgtatgacaacgtggagaagctgtttcctggctttgaaattgagaccgtgaagaacaacctgcgcatcctcttcaacaatgctgtgaagaagaggctgatgacagacagaagaattggctgcctgctgagcggcggcctggacagcagcctggtggccgccaccctgctgaagcagctgaaggaggcccaggtgcagtaccccctgcagacctttgccatcggcatggaggacagcccagacctgctggccgccaggaaggtggccgaccacatcggcagcgagcactatgaggtgctcttcaacagcgaggagggcatccaggccctggatgaagtcatcttcagcctggagacctatgacatcaccaccgtgcgggcctctgtgggcatgtacctgatcagcaagtacatcaggaagaacacagacagcgtggtgatcttctctggagagggcagtgatgagctgacccagggctacatctacttccacaaggcccccagccctgagaaggccgaggaggagagcgagcggctgctgcgggagctgtacctgtttgatgtgctgcgggctgacaggaccacagctgcccacggcctggagctgcgggtgcccttcctggaccaccgcttcagcagctactacctgagcctgcccccagagatgaggatccccaagaatggaattgagaagcacctgctgcgggagacctttgaggacagcaacctgatccccaaggagatcctgtggaggcccaaggaggccttcagtgatggcatcacctctgtgaagaacagctggttcaagatcctgcaggagtatgtggagcaccaggtggatgatgccatgatggccaatgctgcccagaagttccccttcaacacccccaagaccaaggagggctactactaccggcaggtgtttgagcggcactacccaggccgggctgactggctgagccactactggatgcccaagtggatcaatgccacagaccccagcgcccggaccctgacccactacaagtctgctgtgaaggcctag

SEQ ID NO: 235000 - DNA, 87 bp, Artificial Sequence
  derived and/or modified sequence
atgtgtggcatctgggccctgtttggaagtgatgactgcctgtctgtgcagtgcctgagcgccatgaagatcgcccaccggggctag

SEQ ID NO: 235001 - DNA, 489 bp, Artificial Sequence
  derived and/or modified sequence
atgtgtggcatctgggccctgtttggaagtgatgactgcctgtctgtgcagtgcctgagcgccatgaagatcgcccaccggggcccagatgccttccgctttgaaaatgtgaatggctacaccaactgctgcttcggcttccaccggctggccgtggtggaccccctgtttggcatgcagcccatccgggtgaagaagtacccctacctgtggctgtgctacaatggagagatctacaaccacaagaagatgcagcagcactttgaatttgagtaccagaccaaggtggatggagagatcatcctgcacctgtatgacaagggcggcatcgagcagaccatctgcatgctggatggagtgtttgcctttgtgctgctggacacagccaacaagaaggtgttcctgggccgggacacctacggcgtgcggcccctcttcaaggccatgacagaagatggcttcctggccgtgtgcagcgaggccaagtag

SEQ ID NO: 235002 - DNA, 648 bp, Artificial Sequence
  derived and/or modified sequence
atgtgtggcatctgggccctgtttggaagtgatgactgcctgtctgtgcagtgcctgagcgccatgaagatcgcccaccggggcccagatgccttccgctttgaaaatgtgaatggctacaccaactgctgcttcggcttccaccggctggccgtggtggaccccctgtttggcatgcagcccatccgggtgaagaagtacccctacctgtggctgtgctacaatggagagatctacaaccacaagaagatgcagcagcactttgaatttgagtaccagaccaaggtggatggagagatcatcctgcacctgtatgacaagggcggcatcgagcagaccatctgcatgctggatggagtgtttgcctttgtgctgctggacacagccaacaagaaggtgttcctgggccgggacacctacggcgtgcggcccctcttcaaggccatgacagaagatggcttcctggccgtgtgcagcgaggccaagggcctggtgaccctgaagcacagcgccacccccttcctgaaggtggagcccttcctgcccggccactatgaggtgctggacctgaagcccaacgggaaggtggcctctgtggagatggtgaagtaccaccactgcagagatgtgcccctgcacgccctgtag

SEQ ID NO: 235003 - DNA, 360 bp, Artificial Sequence
  derived and/or modified sequence
atgtgtggcatctgggccctgtttggaagtgatgactgcctgtctgtgcagtgcctgagcgccatgaagatcgcccaccggggcccagatgccttccgctttgaaaatgtgaatggctacaccaactgctgcttcggcttccaccggctggccgtggtggaccccctgtttggcatgcagcccatccgggtgaagaagtacccctacctgtggctgtgctacaatggagagatctacaaccacaagaagatgcagcagcactttgaatttgagtaccagaccaaggtggatggagagatcatcctgcacctgtatgacaagggcggcatcgagcagaccatctgcatgctggatggatag

SEQ ID NO: 235004 - DNA, 102 bp, Artificial Sequence
  derived and/or modified sequence
atgtgtggcatctgggccctgtttggaagtgatgactgcctgtctgtgcagtgcctgagcgccatgaagatcgcccaccggggcccagatgccttcagatag

SEQ ID NO: 235005 - DNA, 1623 bp, Artificial Sequence
  derived and/or modified sequence
atgaagatcgcccaccggggcccagatgccttccgctttgaaaatgtgaatggctacaccaactgctgcttcggcttccaccggctggccgtggtggaccccctgtttggcatgcagcccatccgggtgaagaagtacccctacctgtggctgtgctacaacggggagatctacaaccacaagaagatgcagcagcactttgaatttgagtaccagaccaaggtggatggagagatcatcctgcacctgtatgacaagggcggcatcgagcagaccatctgcatgctggatggagtgtttgcctttgtgctgctggacacagccaacaagaaggtgttcctgggccgggacacctatggagtgcggcccctcttcaaggccatgacagaagatggcttcctggccgtgtgcagcgaggccaagggcctggtgaccctgaagcacagcgccacccccttcctgaaggtggagcccttcctgcccggccactatgaggtgctggacctgaagcccaacgggaaggtggcctctgtggagatggtgaagtaccaccactgcagagatgtgcccctgcacgccctgtatgacaacgtggagaagctgtttcctggctttgaaattgaaacagtgaagaacaacctgcgcatcctcttcaacaatgctgtgaagaagaggctgatgacagaccggcgcatcggctgcctgctgagcggcggcctggacagcagcctggtggccgccaccctgctgaagcagctgaaggaggcccaggtgcagtaccccctgcagacctttgccatcggcatggaggacagcccagacctgctggccgccaggaaggtggccgaccacatcggcagcgagcactatgaggtgctcttcaacagcgaggagggcatccaggccctggatgaggtgatcttcagcctggagacctatgacatcaccaccgtgcgggcctctgtgggcatgtacctgatcagcaagtacatcaggaagaacacagattctgtggtgatcttcagcggggagggcagtgatgagctgacccagggctacatctacttccacaaggcccccagccctgagaaggccgaggaggagagcgagcggctgctgcgggagctgtacctgtttgatgtgctgcgggctgacaggaccacagctgcccacggcctggagctgcgggtgcccttcctggaccaccgcttcagcagctactacctgagcctgcccccagagatgaggatccccaagaatggcatcgagaagcacctgctgcgggagacctttgaggacagcaacctgatccccaaggagatcctgtggaggcccaaggaggccttcagtgatggcatcacctctgtgaagaacagctggttcaagatcctgcaggagtatgtggagcaccaggtggatgatgccatgatggccaatgctgcccagaagttccccttcaacacccccaagaccaaggagggctactactaccggcaggtgtttgagcggcactacccaggccgggctgactggctgagccactactggatgcccaagtggatcaatgccacagaccccagcgcccggaccctgacccactacaagtctgctgtgaaggcctag

SEQ ID NO: 235006 - DNA, 1686 bp, Artificial Sequence
  derived and/or modified sequence
atgtgcggcatctgggccctgttcggcagcgacgactgcctgagcgtccaatgtttatccgccatgaagatcgcccatagggggcccgacgctttcagattcgagaacgtgaatggatacaccaactgttgctttgggttccacaggcttgcagtcgttgatcccttgtttggaatgcagcccatcagagtgaagaaatatccttatctatggctatgctataacggggagatttacaatcacaagaagatgcagcagcattttgagtttgagtatcagacgaaagttgatggggagatcattctgcatctgtacgacaaagggggcattgagcagacgatctgcatgctagatggagtcttcgccttcgtgctgctggacactgctaataaaaaggtgtttcttggccgagacacctacggcgttaggcctctattcaaggccatgactgaggatggtttcctcgcggtatgtagcgaggccaagggattggtgacactcaaacatagtgcaacaccttttctgaaagtagagccttttctgcccgggcactatgaggttctggatctgaaaccaaacggcaaagtggcatcagtcgaaatggtcaagtaccaccattgccgggacgtccctctgcacgcactttatgataatgttgaaaaactcttcccaggcttcgagatcgaaacggtaaagaacaacctgaggatattatttaacaatgctgtcaagaagagattgatgacagatagaagaattggatgcctgttgtctggtggactggacagctctctcgttgccgcgacactgttaaagcagttgaaggaggcccaggtccagtatcccctgcaaaccttcgccattggtatggaagattcccccgacttgttggccgctcggaaagttgccgatcacattgggagtgagcattacgaagttctgttcaactccgaggagggcattcaggccctcgatgaggtgatcttctcactggagacctatgacatcacaaccgtgcgagcttccgtcgggatgtaccttattagcaaatacataaggaaaaacacagacagtgtcgtaattttttccggggaaggctcagacgagcttacccagggatatatttattttcacaaagctccatcacccgagaaagctgaggaggagtcagagagacttctgcgcgagctgtacttgttcgacgtgctcagggccgatcgtacaaccgctgcccatgggctcgagctccgggtgccatttttggatcaccggttctcatcttattatctgtccctgccacctgaaatgcggattcccaagaacggcattgagaagcacctattacgcgagacatttgaagattccaatctgattcctaaagagatcctctggagacccaaagaggcattttctgatggtatcacaagtgtcaagaatagctggttcaagatcctgcaagaatacgtggaacaccaagttgacgacgctatgatggctaatgctgcccaaaagttcccctttaacactcctaaaacaaaagaggggtactactatagacaggtgtttgaacgacattatccagggcgcgctgattggcttagccactattggatgccaaaatggatcaatgctaccgatccttcagctcgcacccttacacactataaatcagctgtgaaagcctag

SEQ ID NO: 235007 - DNA, 1686 bp, Artificial Sequence
  derived and/or modified sequence
atgtgcggcatctgggccctgttcggcagcgacgactgcctgagcgtgcaatgtttgtccgctatgaagattgcacatcgggggcctgatgccttcagatttgaaaatgtgaacgggtataccaattgctgtttcggattccatagactggccgtggtagacccacttttcggaatgcagcctatccgtgtcaagaaatacccatatctgtggttgtgctacaatggagagatctacaaccacaagaaaatgcagcaacactttgaattcgagtaccaaacgaaggtcgatggcgagatcatactgcatctttacgacaagggaggtattgaacagaccatatgcatgctggatggcgtgttcgctttcgtgctcctcgatactgctaacaaaaaggtgttccttggacgggacacctatggcgtgagacctctgttcaaggctatgacagaagacggctttctggccgtctgctcggaagcaaaagggctggtgaccctcaagcacagtgccaccccatttctgaaagtggagccttttttacccggacactacgaagtgctggacttgaagcccaatggaaaagtggcctcagtcgaaatggtaaaataccatcactgccgtgacgtgccactccatgccttatatgataacgtggagaagttgttccctggattcgagatagaaaccgttaagaacaaccttaggattctgttcaacaacgctgtgaaaaaaagactaatgaccgaccgtcgaatcggatgtttgttaagcggcgggctggacagttccttagtcgcggctactctcctgaaacagttgaaagaagcgcaggtacaataccccctgcagaccttcgctattggcatggaagactcccccgatttgcttgctgctaggaaggtggcagaccacattggctccgaacactacgaggtactctttaactccgaagaaggaatacaggcacttgatgaggtaatcttttccctggaaacctacgacatcacgaccgttcgagcttccgtcgggatgtatctgattagcaagtacataagaaaaaatacagattcagtggtcattttttctggggagggtagtgacgaactcactcagggatatatttacttccataaggcaccttctcctgaaaaagccgaagaagagagcgaacgcctcttgagggagctttacttgttcgacgtgctccgggctgatcgcaccacagctgctcatggactggaacttcgggttccattcctcgaccatcggttctctagttactacctgagcttgcctcctgagatgcgcatccctaagaacggtatcgaaaaacacctgcttagagagaccttcgaagactctaatttaattccaaaggagatcttatggagacctaaagaggccttctctgatgggattacatctgttaaaaattcatggtttaagattcttcaggagtacgtcgagcaccaggtcgacgacgctatgatggcaaacgccgctcagaaattcccgttcaacacaccgaagactaaagagggatactattatcgtcaagtatttgaacggcattaccctggacgggctgattggcttagccactattggatgcccaaatggattaatgctaccgatccaagcgcccgaacgctgactcactacaagtccgccgtcaaggcctag

SEQ ID NO: 235008 - DNA, 1686 bp, Artificial Sequence
  derived and/or modified sequence
atgtgcggcatctgggccctgttcggcagcgacgactgcctgagcgtgcagtgtctgtctgcaatgaaaattgcccatcggggccccgatgccttccgcttcgagaacgtaaatggatacactaactgctgtttcggcttccacagattggccgtggtggatcctctttttggaatgcagcccattagagttaaaaaatacccctatctctggctgtgctacaatggcgagatctataatcacaagaaaatgcagcagcactttgagttcgagtatcagactaaggtcgacggtgaaattatcctgcatttatatgacaagggtgggatagagcagaccatttgtatgctggacggtgtgtttgccttcgtgttgttggacactgcgaataaaaaagtgttcttgggacgagacacgtacggcgtcagaccattgtttaaggctatgacagaagacggctttctggctgtctgctctgaagctaaagggctggttaccctcaagcattcagcgaccccgtttctaaaagttgaaccttttttgccaggccactatgaagttctagatttgaaaccaaacggaaaagtcgccagtgtggaaatggtgaagtaccatcattgtcgcgacgttcccctacatgccctatatgacaacgtcgagaaactctttcccgggttcgaaattgaaacggtgaaaaacaaccttcggatcttgttcaacaacgccgtaaagaaaagactgatgacagaccggcgaattgggtgtctgttaagcggaggactggactcttccctggtcgccgctaccctcctgaaacagcttaaggaagcccaggttcagtaccccctccaaacctttgccatcggcatggaggattctcctgacctgttagctgctagaaaggtggcggatcacatcggtagtgaacattatgaggtgctgttcaactcggaggagggcattcaggctttagatgaggtcattttctcacttgagacttacgacatcacaactgtccgagcctccgtgggcatgtatttgatctcaaagtacatcagaaaaaacaccgatagtgtggtcatcttcagcggcgaagggtctgatgagttgacccaggggtacatctatttccacaaggcccctagtccagagaaagcagaagaagaatctgagcgcctgttacgcgaattgtatctatttgatgttctgcgggccgacaggaccacagctgctcacggcctagaacttcgggtgccgtttctcgatcaccggtttagcagctactacctgagcctgcctcctgaaatgagaatccccaagaatggcattgaaaagcacctactgagagagaccttcgaggattccaacttgatccccaaagagatcttatggaggcctaaagaagccttttctgacggtattacatccgtcaaaaattcctggttcaagattctacaggaatacgtcgagcatcaagttgacgacgccatgatggccaacgcagcccagaagttccccttcaacacaccaaagaccaaagaggggtactactatcggcaggttttcgaaaggcactatccggggagagcagactggctgtcacactactggatgcccaagtggattaacgccacagatcccagcgctcgcactctcacccattataaatctgcagtaaaggcttag

SEQ ID NO: 235009 - DNA, 87 bp, Artificial Sequence
  derived and/or modified sequence
atgtgcggcatctgggccctgttcggcagcgacgactgcctgagcgtgcagtgtttaagtgctatgaagatcgcccacaggggatag

SEQ ID NO: 235010 - DNA, 489 bp, Artificial Sequence
  derived and/or modified sequence
atgtgcggcatctgggccctgttcggcagcgacgactgcctgagcgtccagtgcttgtcagcaatgaagatagcacaccggggccccgatgcttttcgcttcgaaaacgttaacggatataccaattgctgcttcggctttcataggctcgctgtcgtcgatcccctcttcgggatgcagcccatccgagttaagaaatacccctacttgtggctatgttataatggagaaatctataatcacaaaaagatgcaacagcatttcgaattcgagtaccaaaccaaggtcgacggggaaataatcctccatttatatgataagggcgggatcgaacagaccatttgtatgctggacggcgtttttgccttcgttctgctcgacaccgctaataagaaagtttttttgggcagagacacttatggggtgcgtcccctcttcaaggcgatgactgaggatggatttttggcagtgtgttctgaggctaagtag

SEQ ID NO: 235011 - DNA, 648 bp, Artificial Sequence
  derived and/or modified sequence
atgtgcggcatctgggccctgttcggcagcgacgactgcctgagcgtgcagtgcctctcggccatgaagatagctcaccgaggtccggatgcatttagatttgaaaacgtgaatgggtacactaattgctgttttggttttcatcggctggccgtcgtggatccactgtttggtatgcagccgatccgggtgaagaagtatccctacctttggctttgctacaacggagaaatttataaccacaaaaagatgcagcagcactttgaattcgagtaccagacaaaagtagacggtgagatcatcctacacctttatgacaaaggaggcatcgaacaaaccatctgcatgctggatggcgttttcgccttcgtgttgctagataccgcgaataagaaagtgtttctgggccgggatacatatggggtgagaccactgtttaaagcaatgacggaagacggcttcttagctgtctgcagtgaagccaagggcctcgtaacactgaagcattccgctactcccttcttaaaggtggagcctttcttacccggacactatgaggtactcgatcttaagcctaatgggaaggtcgccagcgttgaaatggtgaagtaccaccactgcagggatgtgccactgcatgccctgtag

SEQ ID NO: 235012 - DNA, 360 bp, Artificial Sequence
  derived and/or modified sequence
atgtgcggcatctgggccctgttcggcagcgacgactgcctgagcgtccagtgcctgagtgccatgaaaattgcccatcgagggccggatgccttccggtttgagaacgtgaacgggtacaccaactgctgctttggctttcatagactggccgtggtcgatcctctgtttggaatgcagcccatacgagtgaagaaatatccatacctctggctgtgctataacggtgaaatctataaccataaaaagatgcagcagcactttgaattcgagtatcaaaccaaagtggatggagaaatcatcctccacctttacgataagggtggcatcgagcagacaatctgcatgctggatggctag

SEQ ID NO: 235013 - DNA, 102 bp, Artificial Sequence
  derived and/or modified sequence
atgtgcggcatctgggccctgttcggcagcgacgactgcctgagcgtgcagtgtctgagcgcgatgaagattgctcacagggggcccgacgcttttagatag

SEQ ID NO: 235014 - DNA, 1623 bp, Artificial Sequence
  derived and/or modified sequence
atgaagatcgcccaccggggccccgacgccttccggttcgagaacgtcaacggctacaccaactgctgctttgggtttcacagactggccgttgttgatcctttgtttggcatgcagcctataagagtgaagaagtacccttatctttggctgtgctataatggtgagatttataaccacaagaagatgcaacagcactttgagtttgagtaccagaccaaagtggatggtgagattatcctgcatttgtacgacaaaggaggcatagagcaaaccatctgtatgctggacggtgtctttgccttcgttctcctggacaccgccaacaaaaaggtttttttaggccgcgatacttatggggtcagacctctcttcaaggccatgaccgaggacggcttcctggccgtttgttcagaagccaaggggctggtcaccctgaagcacagcgccaccccctttctcaaggtcgagcctttcctccccggccattacgaagtgttggacctgaagccgaatggaaaagtcgctagcgtagaaatggtgaaatatcatcactgccgtgatgtgccactccatgccctgtatgacaatgtggagaaactgttcccaggcttcgagattgagactgtgaagaataatcttcgaattctattcaataacgccgtgaagaagcgtctcatgacagaccgcaggattggctgcttgttgagtggcggccttgactcaagtctggtggccgctacactcctgaagcaacttaaggaagcacaggtccagtacccactccagacttttgccattggaatggaggacagtcccgatcttcttgccgcacgcaaggtggccgaccatattggctcagaacattacgaagttctgttcaatagcgaagagggcatccaagccctcgacgaagttatattttccctcgagacatatgatatcaccaccgttagggcaagcgtgggtatgtatttgataagtaagtacatcagaaagaatacggactccgtagtgatattttccggtgagggctctgatgagttaactcagggatatatctatttccacaaagctcccagccctgagaaagcggaagaagagtctgagcggttgttgcgggagctgtacctttttgacgtgctgagggctgacagaactaccgccgcccatggtttggaattgcgtgtgccctttttagatcaccggttttcttcttactatctaagcctgcccccagagatgaggatcccaaagaacggtatagaaaaacacctgctgcgggagactttcgaggacagtaatctaatacctaaggagatcctctggaggccgaaggaggcattctccgacggcatcaccagtgttaaaaattcgtggtttaagatattacaagaatacgttgaacaccaggtggatgacgcgatgatggcaaacgcagcgcaaaagtttcccttcaacactccaaaaaccaaggagggctactattataggcaagttttcgaacggcactatcccggccgcgcagactggctgtcccattattggatgcccaagtggataaacgctacagatccatcagcccgaacactaacccattacaaatcagctgtaaaagcatag

SEQ ID NO: 235015 - DNA, 1686 bp, Artificial Sequence
  derived and/or modified sequence
atgtgtgggatttgggcccttttcggaagcgacgactgtttgtcggtacagtgcctttcggccatgaaaatcgcccacagaggcccagatgccttccggttcgagaatgtgaatggatacaccaattgttgtttcggtttccaccgactggctgttgtggatccattgtttggaatgcagccaatccgcgtgaagaagtacccttacctctggctgtgttataacggcgaaatttataatcataagaaaatgcagcaacacttcgaatttgagtatcagacaaaagttgacggtgaaattattcttcatctttatgacaaggggggaattgaacagaccatttgcatgttagacggagtgtttgcgttcgtgctgttagacactgccaataagaaagtgtttctgggcagggacacctacggggtgaggcctctatttaaggctatgacagaagatgggttcttagccgtctgttctgaagccaagggtctggtaaccctgaagcacagcgcaacaccttttctgaaggtcgagccctttctaccaggccattacgaagtgttggacctaaagccgaatggaaaggtcgccagcgtcgagatggtgaaatatcaccattgtcgcgacgtgccacttcatgccctctacgacaatgtggaaaaactgttccccggatttgagattgaaaccgttaagaataatctgcggatactgtttaataatgcggtcaaaaagaggctaatgacagatcggagaattgggtgcctgctgtcagggggattggactccagcctcgtggccgcaactctcctaaagcagctgaaagaggcccaggtccagtacccactacagactttcgccatcgggatggaggatagtcctgatttattagcagcccgtaaagtcgccgaccatattggatcagagcattacgaggtactctttaactcggaggaagggattcaggctttggatgaggtgatttttagccttgaaacctacgacataaccacagttcgcgcttcagtcggaatgtacctcatttcgaagtacatccgcaagaatactgactccgtggtgattttcagtggtgaaggctccgacgagctcacccagggatacatttactttcataaggcgccttcccctgagaaagccgaggaagagtcggaacggctcttgcgcgagctttacctgtttgacgtgctgagagccgaccggactaccgccgctcatgggttggagctgagagtgccttttctcgaccatcgcttcagctcatactacttgtctctgccacctgaaatgcgtatccccaaaaatggcatcgaaaagcatctgctcagagagactttcgaggacagcaatctcatccccaaggaaatactatggaggccaaaagaggcttttagcgatgggattacaagcgtgaaaaatagctggttcaaaatcctgcaggaatatgtggagcatcaagttgacgacgccatgatggccaacgcagcgcagaaatttccgttcaacacccccaagaccaaggaaggttactactacaggcaagtttttgaacgccattaccctggcagggcagactggctttctcactactggatgcctaagtggatcaacgcgaccgacccctccgccagaaccctaacacattacaagtccgcagtgaaggcttag

SEQ ID NO: 235016 - DNA, 1686 bp, Artificial Sequence
  derived and/or modified sequence
atgtgcggaatctgggccctgttcgggtctgacgattgtctgtcagtacagtgcttatccgctatgaagatcgcgcatcgcggtcctgacgcctttcgttttgagaatgtcaacggttacacaaactgttgcttcggatttcatcggctggctgttgttgacccattgttcggaatgcagcctattcgggtaaagaaatacccctacctatggctgtgctacaacggtgagatttacaatcataagaagatgcagcaacacttcgagttcgagtaccagaccaaagtggacggggaaattatccttcacctgtacgataagggtggtattgaacagaccatctgcatgctggacggtgtcttcgccttcgtgttattagataccgcgaacaaaaaagtgttcctaggcagggacacatatggagtgcgccctctttttaaagccatgaccgaagatggatttctggccgtgtgtagtgaagccaaaggcttagtcactctgaagcacagcgcgaccccattcctcaaagtcgagccgtttctgcccggacactatgaggtgctggatcttaaacccaatgggaaagtcgcttcggtggaaatggtgaaataccaccattgtagagatgttcctcttcatgccctttatgataatgtagaaaagctgttcccgggttttgaaatcgagaccgtgaagaacaatctacggatcttgttcaataacgccgtcaaaaaaaggcttatgaccgaccgacggatagggtgtctcctgagcggcggtctggatagctccctggttgccgctaccttactcaagcaattgaaagaggctcaagtgcagtaccccctgcagacgtttgccatcggcatggaagattcccccgatttgctggcagcacggaaggttgctgatcacatcggttcagagcactatgaagtgctgtttaattctgaggaaggcatccaggctctcgatgaggtgattttcagcctggagacctacgatatcacaaccgttcgggcttctgtcgggatgtatctgatttctaagtatattcgcaaaaacacggactctgttgtgatcttctcaggagagggctccgacgaactgacacagggatacatctactttcacaaggccccttctcccgaaaaggcagaggaggaatcagagcgtctgctgcgagaattgtatctgtttgacgttctacgagctgacagaactacggcggctcacgggctcgagttgagggtgcctttcctcgaccatcgcttttcatcctactatctgagcctgccccctgaaatgcggatccctaaaaacgggattgaaaaacacctgctgagagagactttcgaggacagtaatctgatccctaaagagattctgtggcggcctaaagaggcgttcagcgatggcatcacgtcagtgaagaactcttggttcaaaatcctccaagagtacgtggagcaccaggtggacgatgcaatgatggcaaacgcagcccagaagttcccttttaacactccaaaaaccaaggagggctattattatcggcaagtttttgagcggcactatccaggcagagccgattggctgagccactattggatgccgaagtggatcaacgccacagatccgtctgccagaacactgactcattacaaaagcgcagtgaaggcttag

SEQ ID NO: 235017 - DNA, 1686 bp, Artificial Sequence
  derived and/or modified sequence
atgtgcggtatttgggcgctttttggatcagatgattgtttgtcagtgcaatgcctgagcgccatgaaaatcgcccatagaggaccggacgccttcaggtttgaaaatgtgaacggctatactaattgttgttttggttttcaccggctggccgtggtcgaccctctgttcggtatgcagccaattagagttaagaagtacccctatctgtggctctgctacaatggcgagatatataaccacaagaaaatgcagcagcacttcgagtttgagtatcagactaaggttgacggggagattatactgcatctttacgacaaaggcggtatagaacaaacaatttgcatgctggatggcgtattcgccttcgttctgctcgacactgctaacaagaaagtgtttcttggtcgagatacttacggagtcaggcctctgtttaaggccatgaccgaggatggcttcctggccgtctgttctgaagctaaaggccttgtgacattgaagcattcagccaccccttttctgaaagtggagccgttcctacccggacattacgaagtcttagatcttaagcccaatggcaaagttgcctcagtggagatggtaaagtaccatcattgtcgcgacgtgcctctgcatgccctgtacgacaatgtcgagaaactgttccctggcttcgaaattgagaccgttaagaacaacctccggatcctctttaacaacgctgttaagaagcgactgatgaccgatcggcgtatcgggtgcctactaagtggcggacttgacagcagcctggtggcggctactctactgaaacagctgaaggaagctcaggtgcagtaccctctgcagactttcgctatcgggatggaagattccccagacttattagctgcacggaaggtggcggatcacattggatctgagcactatgaagttttattcaatagtgaggagggcattcaggccctcgacgaggtaatattttcactggaaacttatgatattactacggtcagggcttccgttggcatgtacctgatttccaagtacatcagaaagaatacagactcggtggttatttttagtggtgaaggtagtgatgagctgacccagggctatatctactttcacaaggcgccaagcccggagaaagctgaagaggaatccgagaggcttctaagagagctttacttgttcgacgtgctgcgcgcagatcggacaactgccgctcatgggctcgaactgagagtacccttccttgaccaccggttttcttcttactacttgtctctccctcccgagatgcgtatacctaaaaacggcatcgagaagcacctattgcgcgaaacttttgaggacagcaacctaatacccaaagagatcttgtggaggccaaaggaagcattttctgacggcataacatccgtgaagaactcttggttcaaaatactacaggaatacgtagaacatcaggtggacgacgccatgatggcaaacgccgcacaaaaatttcccttcaacactcccaaaacaaaggagggctattactacagacaggtgttcgagcggcactacccaggcagggccgattggctgtctcattactggatgccgaagtggattaatgccaccgaccctagcgctagaaccctcacacactacaaaagcgcggtaaaggcctag

SEQ ID NO: 235018 - DNA, 87 bp, Artificial Sequence
  derived and/or modified sequence
atgtgtggaatttgggctcttttcggtagcgatgattgtctgtccgtgcaatgcctttccgccatgaaaattgcacacagggggtag

SEQ ID NO: 235019 - DNA, 489 bp, Artificial Sequence
  derived and/or modified sequence
atgtgtggcatctgggcactgttcgggagtgatgactgccttagtgtgcagtgcttgtctgccatgaaaattgcccaccggggtccagacgcattccggttcgagaatgtcaacgggtacacgaattgttgcttcgggttccacaggcttgctgtggttgatccactgtttgggatgcagccgatcagggtgaaaaagtatccctatctgtggctgtgctacaatggggaaatatacaatcataagaaaatgcagcagcatttcgaatttgaatatcaaacgaaggtggacggagagatcattctccatttgtacgataagggcggaattgagcagaccatctgcatgctggacggggtgttcgcctttgtcctgctcgataccgcaaataagaaggtattcctgggacgggatacatatggcgtgagacccctatttaaggcaatgaccgaggacggtttcctggctgtatgctcagaagccaaatag

SEQ ID NO: 235020 - DNA, 648 bp, Artificial Sequence
  derived and/or modified sequence
atgtgtgggatctgggcactgttcggtagcgatgattgtctgtccgtgcagtgcctgtccgcaatgaaaatcgcccacagaggcccagacgctttccggttcgagaatgtgaatggctacaccaactgctgttttgggttccaccgactggccgtggtggaccctctgttcggaatgcagccaatacgggtcaaaaagtacccctatctgtggctgtgttacaacggtgagatctacaaccacaagaaaatgcaacaacatttcgagtttgagtaccagaccaaagtggacggtgagatcatcttgcacctatatgacaagggcggaattgaacaaacaatttgtatgctggacggcgtttttgcgttcgttctattggacacggctaataagaaggtgtttctgggacgtgacacgtatggtgtccgtccactattcaaggcaatgacagaggacggtttcctggccgtgtgctccgaggctaaaggtctggttaccctgaagcactcagcaacacctttccttaaagtggaaccgttccttccaggacactacgaggtgctggacttgaagccaaacggtaaggtggcgagcgtggagatggtcaaatatcaccactgccgcgacgtgccactccacgctctgtag

SEQ ID NO: 235021 - DNA, 360 bp, Artificial Sequence
  derived and/or modified sequence
atgtgcggaatatgggccctgttcggtagtgatgactgtttatcggtccaatgcctttcagctatgaagatcgcccatcggggtcctgacgccttccggttcgagaacgttaatgggtatacaaactgctgcttcgggttccaccgtctcgccgtagtcgacccgctcttcggaatgcagccgatccgagtgaaaaaatacccgtacctgtggttatgttacaatggagaaatttataaccacaagaaaatgcagcaacatttcgagttcgaataccaaaccaaagtggatggagaaatcatacttcacctctacgataaagggggaattgagcagactatctgtatgctggacggctag

SEQ ID NO: 235022 - DNA, 102 bp, Artificial Sequence
  derived and/or modified sequence
atgtgtggaatatgggccttgttcggttcagatgattgcctcagcgttcagtgtctgtccgctatgaagatcgctcatcggggaccagacgcattccgctag

SEQ ID NO: 235023 - DNA, 1623 bp, Artificial Sequence
  derived and/or modified sequence
atgaagatcgcccatagaggcccagatgcttttcgctttgagaacgtgaacggctataccaactgttgcttcgggtttcacaggctggctgtggttgatccgctgttcggcatgcaacccattagggtgaaaaagtatccatatctgtggctgtgctataacggcgagatttataaccacaaaaagatgcagcagcatttcgaatttgaataccagacaaaggtcgatggagaaattatcctgcacctgtacgataagggtggaattgaacagaccatctgtatgctggacggggtgtttgccttcgtgctcctggacaccgctaataagaaagtctttctaggacgggacacatacggggttcggccattattcaaggctatgacagaagacggctttttggcggtgtgctccgaggctaaaggtctcgtgacccttaagcatagtgccaccccttttctgaaagttgagccttttctgcctggccattacgaggtgctcgacctgaagcccaacggaaaagtggcctctgtcgaaatggtgaaataccaccactgccgggatgtgccattgcacgctctgtatgacaatgttgaaaagcttttccctgggttcgagatcgagacagtgaagaataatctgagaattctgtttaacaatgctgtgaagaagaggttgatgacagaccggcgaatcgggtgtttgttatctggaggactggattcaagcctggtcgccgctaccttgttaaaacagctgaaggaggcccaagtacagtacccactgcagacgtttgccattgggatggaggactctcctgacttactcgctgcaaggaaagtagctgaccatatcggttccgaacactacgaagtgctcttcaacagtgaggagggaatccaggccctggacgaggtcattttcagcttggagacttatgacatcaccaccgtccgtgcgagtgtgggcatgtacctaatcagcaaatacatcaggaagaacacagactccgtcgtgatttttagcggcgagggttccgatgaattgactcaaggttacatttatttccataaggctccatcaccggaaaaggccgaggaagaatctgaacgcctactgagagagctgtacctgtttgatgtgctgagggctgacagaaccactgctgcccacggtctcgagttgcgcgttccattcctggatcatcggttcagtagttattacctgagcctgcctcctgagatgcgcatccctaaaaatggaattgaaaaacacctgttgagggagaccttcgaggatagtaacctgattcccaaggagatcttgtggaggccgaaggaggcctttagcgatggaatcacatcggttaagaattcctggtttaagattctgcaagagtatgtcgaacaccaggtagatgacgccatgatggccaacgccgctcagaagtttccctttaacacacccaagacaaaggagggctactactaccgccaggtattcgagagacattaccccggacgggcagattggctctctcactactggatgcccaagtggataaatgcaactgacccaagcgcccgaactcttacacactacaaatctgccgtgaaagcatag

SEQ ID NO: 235024 - DNA, 2356 bp, Artificial Sequence
  derived and/or modified sequence
agtcctgctccgccccggacaccccgcggccccgcccctgtgcgcgctggttggtcctcgcaggcatgatgaaacttcccgcacgcgttacaggagccaggtcggtataagcgccagcggcctcgccgcccgtcaagctgtccacatccctggcctcagcccgccacatcaccctgacctgcttacgcccagcctgtggacattttcgcggtccgggtccctgcggcggacgggtcggatcgtgctcgtggccagggcgcagtcaggtgtcgcgtggtcctgatctaggaagagactgcggccttatcaccgtctcggtgtctgctttcaccttcaactgcccccctcctcacctggaccgctcaccctcctcctcccctctcaccccgccatccccaccagtccccacctgtctctgtagactgcaagactcatcaagtgacttgctgagcaaaccctgccgagaagagattttcttcaatcacatctgaataaatcacttgaagaaagcttatagcttcattgcaccatgtgtggcatttgggcgctgtttggcagtgatgattgcctttctgttcagtgtctgagtgctatgaagattgcacacagaggtccagatgcattccgttttgagaatgtcaatggatacaccaactgctgctttggatttcaccggttggcggtagttgacccgctgtttggaatgcagccaattcgagtgaagaaatatccgtatttgtggctctgttacaatggtgaaatctacaaccataagaagatgcaacagcattttgaatttgaataccagaccaaagtggatggtgagataatccttcatctttatgacaaaggaggaattgagcaaacaatttgtatgttggatggtgtgtttgcatttgttttactggatactgccaataagaaagtgttcctgggtagagatacatatggagtcagacctttgtttaaagcaatgacagaagatggatttttggctgtatgttcagaagctaaaggtcttgttacattgaagcactccgcgactccctttttaaaagtggagccttttcttcctggacactatgaagttttggatttaaagccaaatggcaaagttgcatccgtggaaatggttaaatatcatcactgtcgggatgtacccctgcacgccctctatgacaatgtggagaaactctttccaggttttgagatagaaactgtgaagaacaacctcaggatcctttttaataatgctgtaaagaaacgtttgatgacagacagaaggattggctgccttttatcagggggcttggactccagcttggttgctgccactctgttgaagcagctgaaagaagcccaagtacagtatcctctccagacatttgcaattggcatggaagacagccccgatttactggctgctagaaaggtggcagatcatattggaagtgaacattatgaagtcctttttaactctgaggaaggcattcaggctctggatgaagtcatattttccttggaaacttatgacattacaacagttcgtgcttcagtaggtatgtatttaatttccaagtatattcggaagaacacagatagcgtggtgatcttctctggagaaggatcagatgaacttacgcagggttacatatattttcacaaggctccttctcctgaaaaagccgaggaggagagtgagaggcttctgagggaactctatttgtttgatgttctccgcgcagatcgaactactgctgcccatggtcttgaactgagagtcccatttctagatcatcgattttcttcctattacttgtctctgccaccagaaatgagaattccaaagaatgggatagaaaaacatctcctgagagagacgtttgaggattccaatctgatacccaaagagattctctggcgaccaaaagaagccttcagtgatggaataacttcagttaagaattcctggtttaagattttacaggaatacgttgaacatcaggttgatgatgcaatgatggcaaatgcagcccagaaatttcccttcaatactcctaaaaccaaagaaggatattactaccgtcaagtctttgaacgccattacccaggccgggctgactggctgagccattactggatgcccaagtggatcaatgccactgacccttctgcccgcacgctgacccactacaagtcagctgtcaaagcttaggtggtctttatgctgtaatgtgaaagcaaatatttcttcgtgttggatggggactgtgggtagataggggaacaatgagagtcaactcaggctaacttgggtgtgaaaaaaataaaagtcctaaatctaaaccattgctgt

SEQ ID NO: 235025 - DNA, 1994 bp, Artificial Sequence
  derived and/or modified sequence
aaacttcccgcacgcgttacaggagccaggtcggtataagcgccagcggcctcgccgcccgtcaagctgtccacatccctggcctcagcccgccacatcaccctgacctgcttacgcccagattttcttcaatcacatctgaataaatcacttgaagaaagcttatagcttcattgcaccatgtgtggcatttgggcgctgtttggcagtgatgattgcctttctgttcagtgtctgagtgctatgaagattgcacacagaggtccagatgcattccgttttgagaatgtcaatggatacaccaactgctgctttggatttcaccggttggcggtagttgacccgctgtttggaatgcagccaattcgagtgaagaaatatccgtatttgtggctctgttacaatggtgaaatctacaaccataagaagatgcaacagcattttgaatttgaataccagaccaaagtggatggtgagataatccttcatctttatgacaaaggaggaattgagcaaacaatttgtatgttggatggtgtgtttgcatttgttttactggatactgccaataagaaagtgttcctgggtagagatacatatggagtcagacctttgtttaaagcaatgacagaagatggatttttggctgtatgttcagaagctaaaggtcttgttacattgaagcactccgcgactccctttttaaaagtggagccttttcttcctggacactatgaagttttggatttaaagccaaatggcaaagttgcatccgtggaaatggttaaatatcatcactgtcgggatgtacccctgcacgccctctatgacaatgtggagaaactctttccaggttttgagatagaaactgtgaagaacaacctcaggatcctttttaataatgctgtaaagaaacgtttgatgacagacagaaggattggctgccttttatcagggggcttggactccagcttggttgctgccactctgttgaagcagctgaaagaagcccaagtacagtatcctctccagacatttgcaattggcatggaagacagccccgatttactggctgctagaaaggtggcagatcatattggaagtgaacattatgaagtcctttttaactctgaggaaggcattcaggctctggatgaagtcatattttccttggaaacttatgacattacaacagttcgtgcttcagtaggtatgtatttaatttccaagtatattcggaagaacacagatagcgtggtgatcttctctggagaaggatcagatgaacttacgcagggttacatatattttcacaaggctccttctcctgaaaaagccgaggaggagagtgagaggcttctgagggaactctatttgtttgatgttctccgcgcagatcgaactactgctgcccatggtcttgaactgagagtcccatttctagatcatcgattttcttcctattacttgtctctgccaccagaaatgagaattccaaagaatgggatagaaaaacatctcctgagagagacgtttgaggattccaatctgatacccaaagagattctctggcgaccaaaagaagccttcagtgatggaataacttcagttaagaattcctggtttaagattttacaggaatacgttgaacatcaggttgatgatgcaatgatggcaaatgcagcccagaaatttcccttcaatactcctaaaaccaaagaaggatattactaccgtcaagtctttgaacgccattacccaggccgggctgactggctgagccattactggatgcccaagtggatcaatgccactgacccttctgcccgcacgctgacccactacaagtcagctgtcaaagcttaggtggtctttatgctgtaatgtgaaagcaaatatttcttcgtgttggatggggactgtgggtagataggggaacaatgagagtcaactcaggctaacttgggtgtgaaaaaaataaaagtcctaaatct

SEQ ID NO: 235026 - DNA, 2289 bp, Artificial Sequence
  derived and/or modified sequence
tttctgtcctggttccctgaagcatcgagagggaaccgcggccggcaggccggaccgctccggagaggaggcagcggcagtttgagcccctgtaaatgttatatgtgtacttttttttactatgtggcgtcgaagcctgtggacattttcgcggtccgggtccctgcggcggacgggtcggatcgtgctcgtggccagggcgcagtcaggtgtcgcgtggtcctgatctaggaagagactgcggccttatcaccgtctcggtgtctgctttcaccttcaactgcccccctcctcacctggaccgctcaccctcctcctcccctctcaccccgccatccccaccagtccccacctgtctctgtagactgcaagactcatcaagtgacttgctgagcaaaccctgccgagaagagattttcttcaatcacatctgaataaatcacttgaagaaagcttatagcttcattgcaccatgtgtggcatttgggcgctgtttggcagtgatgattgcctttctgttcagtgtctgagtgctatgaagattgcacacagaggtccagatgcattccgttttgagaatgtcaatggatacaccaactgctgctttggatttcaccggttggcggtagttgacccgctgtttggaatgcagccaattcgagtgaagaaatatccgtatttgtggctctgttacaatggtgaaatctacaaccataagaagatgcaacagcattttgaatttgaataccagaccaaagtggatggtgagataatccttcatctttatgacaaaggaggaattgagcaaacaatttgtatgttggatggtgtgtttgcatttgttttactggatactgccaataagaaagtgttcctgggtagagatacatatggagtcagacctttgtttaaagcaatgacagaagatggatttttggctgtatgttcagaagctaaaggtcttgttacattgaagcactccgcgactccctttttaaaagtggagccttttcttcctggacactatgaagttttggatttaaagccaaatggcaaagttgcatccgtggaaatggttaaatatcatcactgtcgggatgtacccctgcacgccctctatgacaatgtggagaaactctttccaggttttgagatagaaactgtgaagaacaacctcaggatcctttttaataatgctgtaaagaaacgtttgatgacagacagaaggattggctgccttttatcagggggcttggactccagcttggttgctgccactctgttgaagcagctgaaagaagcccaagtacagtatcctctccagacatttgcaattggcatggaagacagccccgatttactggctgctagaaaggtggcagatcatattggaagtgaacattatgaagtcctttttaactctgaggaaggcattcaggctctggatgaagtcatattttccttggaaacttatgacattacaacagttcgtgcttcagtaggtatgtatttaatttccaagtatattcggaagaacacagatagcgtggtgatcttctctggagaaggatcagatgaacttacgcagggttacatatattttcacaaggctccttctcctgaaaaagccgaggaggagagtgagaggcttctgagggaactctatttgtttgatgttctccgcgcagatcgaactactgctgcccatggtcttgaactgagagtcccatttctagatcatcgattttcttcctattacttgtctctgccaccagaaatgagaattccaaagaatgggatagaaaaacatctcctgagagagacgtttgaggattccaatctgatacccaaagagattctctggcgaccaaaagaagccttcagtgatggaataacttcagttaagaattcctggtttaagattttacaggaatacgttgaacatcaggttgatgatgcaatgatggcaaatgcagcccagaaatttcccttcaatactcctaaaaccaaagaaggatattactaccgtcaagtctttgaacgccattacccaggccgggctgactggctgagccattactggatgcccaagtggatcaatgccactgacccttctgcccgcacgctgacccactacaagtcagctgtcaaagcttaggtggtctttatgctgtaatgtgaaagcaaatatttcttcgtgttggatggggactgtgggtagataggggaacaatgagagtcaactcaggctaacttgggtgtgaaaaaaataaaagtcctaaatctaaa

SEQ ID NO: 235027 - DNA, 584 bp, Artificial Sequence
  derived and/or modified sequence
acgcacctgacagctagcggaaggacctttctgtcctggttccctgaagcatcgagagggaaccgcggccggcaggccggaccgctccggagaggaggcagcggcagtttgagcccctgtaaatgttatatgtgtacttttttttactatgtggcgtcgaagcctgtggacattttcgcggtccgggtccctgcggcggacgggtcggatcgtgctcgtggccagggcgcagtcaggtgtcgcgtggtcctgatctaggaagagactgcggccttatcaccgtctcggtgtctgctttcaccttcaactgcccccctcctcacctggaccgctcaccctcctcctcccctctcaccccgccatccccaccagtccccacctgtctctgtagactgcaagactcatcaagtgacttgctgagcaaaccctgccgagaagagattttcttcaatcacatctgaataaatcacttgaagaaagcttatagcttcattgcaccatgtgtggcatttgggcgctgtttggcagtgatgattgcctttctgttcagtgtctgagtgctatgaagattgcacacagaggtc

SEQ ID NO: 235028 - DNA, 745 bp, Artificial Sequence
  derived and/or modified sequence
ccgtctcggtgtctgctttcaccttcaactgcccccctcctcacctggaccgctcaccctcctcctcccctctcaccccgccatccccaccagtccccacctgtctctgtagactgcaagactcatcaagtgacttgctgagcaaaccctgccgagaagaggtctgtttagggacacaggcgaccaagtacagaaaaagattttcttcaatcacatctgaataaatcacttgaagaaagcttatagcttcattgcaccatgtgtggcatttgggcgctgtttggcagtgatgattgcctttctgttcagtgtctgagtgctatgaagattgcacacagaggtccagatgcattccgttttgagaatgtcaatggatacaccaactgctgctttggatttcaccggttggcggtagttgacccgctgtttggaatgcagccaattcgagtgaagaaatatccgtatttgtggctctgttacaatggtgaaatctacaaccataagaagatgcaacagcattttgaatttgaataccagaccaaagtggatggtgagataatccttcatctttatgacaaaggaggaattgagcaaacaatttgtatgttggatggtgtgtttgcatttgttttactggatactgccaataagaaagtgttcctgggtagagatacatatggagtcagacctttgtttaaagcaatgacagaagatggatttttggctgtatgttcagaagctaaag

SEQ ID NO: 235029 - DNA, 828 bp, Artificial Sequence
  derived and/or modified sequence
gattgttacgcacctgacagctagcggaaggacctttctgtcctggttccctgaagcatcgagagggaaccgcggccggcaggccggaccgctccggagaggaggcagcggcagtttgagcccctattttcttcaatcacatctgaataaatcacttgaagaaagcttatagcttcattgcaccatgtgtggcatttgggcgctgtttggcagtgatgattgcctttctgttcagtgtctgagtgctatgaagattgcacacagaggtccagatgcattccgttttgagaatgtcaatggatacaccaactgctgctttggatttcaccggttggcggtagttgacccgctgtttggaatgcagccaattcgagtgaagaaatatccgtatttgtggctctgttacaatggtgaaatctacaaccataagaagatgcaacagcattttgaatttgaataccagaccaaagtggatggtgagataatccttcatctttatgacaaaggaggaattgagcaaacaatttgtatgttggatggtgtgtttgcatttgttttactggatactgccaataagaaagtgttcctgggtagagatacatatggagtcagacctttgtttaaagcaatgacagaagatggatttttggctgtatgttcagaagctaaaggtcttgttacattgaagcactccgcgactccctttttaaaagtggagccttttcttcctggacactatgaagttttggatttaaagccaaatggcaaagttgcatccgtggaaatggttaaatatcatcactgtcgggatgtacccctgcacgccct

SEQ ID NO: 235030 - DNA, 579 bp, Artificial Sequence
  derived and/or modified sequence
tactgaacaatgcaactttgagacagaaatatttgagaacatttttgtcagtgaggacattttgatagtgaatattttgtatcttctattaacttgaaatgttttatttgttataaagccaggatatctgatatcaaattaaattgttttttttttccctttagattttcttcaatcacatctgaataaatcacttgaagaaagcttatagcttcattgcaccatgtgtggcatttgggcgctgtttggcagtgatgattgcctttctgttcagtgtctgagtgctatgaagattgcacacagaggtccagatgcattccgttttgagaatgtcaatggatacaccaactgctgctttggatttcaccggttggcggtagttgacccgctgtttggaatgcagccaattcgagtgaagaaatatccgtatttgtggctctgttacaatggtgaaatctacaaccataagaagatgcaacagcattttgaatttgaataccagaccaaagtggatggtgagataatccttcatctttatgacaaaggaggaattgagcaaacaatttgtatgttggatgg

SEQ ID NO: 235031 - DNA, 562 bp, Artificial Sequence
  derived and/or modified sequence
atgatgaaacttcccgcacgcgttacaggagccaggtcggtataagcgccagcggcctcgccgcccgtcaagctgtccacatccctggcctcagcccgccacatcaccctgacctgcttacgcccagcctgtggacattttcgcggtccgggtccctgcggcggacgggtcggatcgtgctcgtggccagggcgcagtcaggtgtcgcgtggtcctgatctaggaagagactgcggccttatcaccgtctcggtgtctgctttcaccttcaactgcccccctcctcacctggaccgctcaccctcctcctcccctctcaccccgccatccccaccagtccccacctgtctctgtagactgcaagactcatcaagtgacttgctgagcaaaccctgccgagaagagattttcttcaatcacatctgaataaatcacttgaagaaagcttatagcttcattgcaccatgtgtggcatttgggcgctgtttggcagtgatgattgcctttctgttcagtgtctgagtgctatgaagattgcacacagaggtccagatgcattccg

SEQ ID NO: 235032 - DNA, 573 bp, Artificial Sequence
  derived and/or modified sequence
aagctgtccacatccctggcctcagcccgccacatcaccctgacctgcttacgcccagcctgtggacattttcgcggtccgggtccctgcggcggacgggtcggatcgtgctcgtggccagggcgcagtcaggtgtcgcgtggtcctgatctaggaagagactgcggccttatcaccgtctcggtgtctgctttcaccttcaactgcccccctcctcacctggaccgctcaccctcctcctcccctctcaccccgccatccccaccagtccccacctgtctctgtagactgcaagactcatcaagtgacttgctgagcaaaccctgccgagaagagattttcttcaatcacatctgaataaatcacttgaagtgtctgagtgctatgaagattgcacacagaggtccagatgcattccgttttgagaatgtcaatggatacaccaactgctgctttggatttcaccggttggcggtagttgacccgctgtttggaatgcagccaattcgagtgaagaaatatccgtatttgtggctctgttacaatggtgaaatctacaaccataagaaggtg

SEQ ID NO: 235033 - DNA, 1812 bp, Artificial Sequence
  derived and/or modified sequence
ataagcgccagcggcctcgccgcccgtcaagctgtccacatccctggcctcagcccgccacatcaccctgacctgcttacgcccagattttcttcaatcacatctgaataaatcacttgaagtgtctgagtgctatgaagattgcacacagaggtccagatgcattccgttttgagaatgtcaatggatacaccaactgctgctttggatttcaccggttggcggtagttgacccgctgtttggaatgcagccaattcgagtgaagaaatatccgtatttgtggctctgttacaatggtgaaatctacaaccataagaagatgcaacagcattttgaatttgaataccagaccaaagtggatggtgagataatccttcatctttatgacaaaggaggaattgagcaaacaatttgtatgttggatggtgtgtttgcatttgttttactggatactgccaataagaaagtgttcctgggtagagatacatatggagtcagacctttgtttaaagcaatgacagaagatggatttttggctgtatgttcagaagctaaaggtcttgttacattgaagcactccgcgactccctttttaaaagtggagccttttcttcctggacactatgaagttttggatttaaagccaaatggcaaagttgcatccgtggaaatggttaaatatcatcactgtcgggatgtacccctgcacgccctctatgacaatgtggagaaactctttccaggttttgagatagaaactgtgaagaacaacctcaggatcctttttaataatgctgtaaagaaacgtttgatgacagacagaaggattggctgccttttatcagggggcttggactccagcttggttgctgccactctgttgaagcagctgaaagaagcccaagtacagtatcctctccagacatttgcaattggcatggaagacagccccgatttactggctgctagaaaggtggcagatcatattggaagtgaacattatgaagtcctttttaactctgaggaaggcattcaggctctggatgaagtcatattttccttggaaacttatgacattacaacagttcgtgcttcagtaggtatgtatttaatttccaagtatattcggaagaacacagatagcgtggtgatcttctctggagaaggatcagatgaacttacgcagggttacatatattttcacaaggctccttctcctgaaaaagccgaggaggagagtgagaggcttctgagggaactctatttgtttgatgttctccgcgcagatcgaactactgctgcccatggtcttgaactgagagtcccatttctagatcatcgattttcttcctattacttgtctctgccaccagaaatgagaattccaaagaatgggatagaaaaacatctcctgagagagacgtttgaggattccaatctgatacccaaagagattctctggcgaccaaaagaagccttcagtgatggaataacttcagttaagaattcctggtttaagattttacaggaatacgttgaacatcaggttgatgatgcaatgatggcaaatgcagcccagaaatttcccttcaatactcctaaaaccaaagaaggatattactaccgtcaagtctttgaacgccattacccaggccgggctgactggctgagccattactggatgcccaagtggatcaatgccactgacccttctgcccgcacgctgacccactacaagtcagctgtcaaagcttaggtggtctttatgctgtaatgtgaaagcaaatatttcttcgtgttggatggggact

SEQ ID NO: 235034 - DNA, 1588 bp, Artificial Sequence
  derived and/or modified sequence
cctggcctcagcccgccacatcaccctgacctgcttacgcccagatgcaacagcattttgaatttgaataccagaccaaagtggatggtgagataatccttcatctttatgacaaaggaggaattgagcaaacaatttgtatgttggatggtgtgtttgcatttgttttactggatactgccaataagaaagtgttcctgggtagagatacatatggagtcagacctttgtttaaagcaatgacagaagatggatttttggctgtatgttcagaagctaaaggtcttgttacattgaagcactccgcgactccctttttaaaagtggagccttttcttcctggacactatgaagttttggatttaaagccaaatggcaaagttgcatccgtggaaatggttaaatatcatcactgtcgggatgtacccctgcacgccctctatgacaatgtggagaaactctttccaggttttgagatagaaactgtgaagaacaacctcaggatcctttttaataatgctgtaaagaaacgtttgatgacagacagaaggattggctgccttttatcagggggcttggactccagcttggttgctgccactctgttgaagcagctgaaagaagcccaagtacagtatcctctccagacatttgcaattggcatggaagacagccccgatttactggctgctagaaaggtggcagatcatattggaagtgaacattatgaagtcctttttaactctgaggaaggcattcaggctctggatgaagtcatattttccttggaaacttatgacattacaacagttcgtgcttcagtaggtatgtatttaatttccaagtatattcggaagaacacagatagcgtggtgatcttctctggagaaggatcagatgaacttacgcagggttacatatattttcacaaggctccttctcctgaaaaagccgaggaggagagtgagaggcttctgagggaactctatttgtttgatgttctccgcgcagatcgaactactgctgcccatggtcttgaactgagagtcccatttctagatcatcgattttcttcctattacttgtctctgccaccagaaatgagaattccaaagaatgggatagaaaaacatctcctgagagagacgtttgaggattccaatctgatacccaaagagattctctggcgaccaaaagaagccttcagtgatggaataacttcagttaagaattcctggtttaagattttacaggaatacgttgaacatcaggttgatgatgcaatgatggcaaatgcagcccagaaatttcccttcaatactcctaaaaccaaagaaggatattactaccgtcaagtctttgaacgccattacccaggccgggctgactggctgagccattactggatgcccaagtggatcaatgccactgacccttctgcccgcacgctgacccactacaagtcagctgtcaaagcttaggtggtctttatgctgtaatgtgaaagcaaatatttcttcgtgttggatggggactgtgggtagataggggaacaatgagagtcaactcaggctaacttgggtgtgaa

SEQ ID NO: 235035 - DNA, 1686 bp, Artificial Sequence
  derived and/or modified sequence
atgtgcggcatctgggccctgttcggcagcgacgactgcctgagcgtgcagtgcctgagcgccatgaagatcgcccacagaggccccgacgccttcagattcgagaacgtgaacggctacaccaactgctgcttcggcttccacagactggccgtggtggaccccctgttcggcatgcagcccatcagagtgaagaagtacccctacctgtggctgtgctacaacggcgagatctacaaccacaagaagatgcagcagcacttcgagttcgagtaccagaccaaggtggacggcgagatcatcctgcacctgtacgacaagggcggcatcgagcagaccatctgcatgctggacggcgtgttcgccttcgtgctgctggacaccgccaacaagaaggtgttcctgggcagagacacctacggcgtgagacccctgttcaaggccatgaccgaggacggcttcctggccgtgtgcagcgaggccaagggcctggtgaccctgaagcacagcgccacccccttcctgaaggtggagcccttcctgcccggccactacgaggtgctggacctgaagcccaacggcaaggtggccagcgtggagatggtgaagtaccaccactgcagagacgtgcccctgcacgccctgtacgacaacgtggagaagctgttccccggcttcgagatcgagaccgtgaagaacaacctgagaatcctgttcaacaacgccgtgaagaagagactgatgaccgacagaagaatcggctgcctgctgagcggcggcctggacagcagcctggtggccgccaccctgctgaagcagctgaaggaggcccaggtgcagtaccccctgcagaccttcgccatcggcatggaggacagccccgacctgctggccgccagaaaggtggccgaccacatcggcagcgagcactacgaggtgctgttcaacagcgaggagggcatccaggccctggacgaggtgatcttcagcctggagacctacgacatcaccaccgtgagagccagcgtgggcatgtacctgatcagcaagtacatcagaaagaacaccgacagcgtggtgatcttcagcggcgagggcagcgacgagctgacccagggctacatctacttccacaaggcccccagccccgagaaggccgaggaggagagcgagagactgctgagagagctgtacctgttcgacgtgctgagagccgacagaaccaccgccgcccacggcctggagctgagagtgcccttcctggaccacagattcagcagctactacctgagcctgccccccgagatgagaatccccaagaacggcatcgagaagcacctgctgagagagaccttcgaggacagcaacctgatccccaaggagatcctgtggagacccaaggaggccttcagcgacggcatcaccagcgtgaagaacagctggttcaagatcctgcaggagtacgtggagcaccaggtggacgacgccatgatggccaacgccgcccagaagttccccttcaacacccccaagaccaaggagggctactactacagacaggtgttcgagagacactaccccggcagagccgactggctgagccactactggatgcccaagtggatcaacgccaccgaccccagcgccagaaccctgacccactacaagagcgccgtgaaggcctag

SEQ ID NO: 235036 - DNA, 87 bp, Artificial Sequence
  derived and/or modified sequence
atgtgcggcatctgggccctgttcggcagcgacgactgcctgagcgtgcagtgcctgagcgccatgaagatcgcccacagaggctag

SEQ ID NO: 235037 - DNA, 489 bp, Artificial Sequence
  derived and/or modified sequence
atgtgcggcatctgggccctgttcggcagcgacgactgcctgagcgtgcagtgcctgagcgccatgaagatcgcccacagaggccccgacgccttcagattcgagaacgtgaacggctacaccaactgctgcttcggcttccacagactggccgtggtggaccccctgttcggcatgcagcccatcagagtgaagaagtacccctacctgtggctgtgctacaacggcgagatctacaaccacaagaagatgcagcagcacttcgagttcgagtaccagaccaaggtggacggcgagatcatcctgcacctgtacgacaagggcggcatcgagcagaccatctgcatgctggacggcgtgttcgccttcgtgctgctggacaccgccaacaagaaggtgttcctgggcagagacacctacggcgtgagacccctgttcaaggccatgaccgaggacggcttcctggccgtgtgcagcgaggccaagtag

SEQ ID NO: 235038 - DNA, 648 bp, Artificial Sequence
  derived and/or modified sequence
atgtgcggcatctgggccctgttcggcagcgacgactgcctgagcgtgcagtgcctgagcgccatgaagatcgcccacagaggccccgacgccttcagattcgagaacgtgaacggctacaccaactgctgcttcggcttccacagactggccgtggtggaccccctgttcggcatgcagcccatcagagtgaagaagtacccctacctgtggctgtgctacaacggcgagatctacaaccacaagaagatgcagcagcacttcgagttcgagtaccagaccaaggtggacggcgagatcatcctgcacctgtacgacaagggcggcatcgagcagaccatctgcatgctggacggcgtgttcgccttcgtgctgctggacaccgccaacaagaaggtgttcctgggcagagacacctacggcgtgagacccctgttcaaggccatgaccgaggacggcttcctggccgtgtgcagcgaggccaagggcctggtgaccctgaagcacagcgccacccccttcctgaaggtggagcccttcctgcccggccactacgaggtgctggacctgaagcccaacggcaaggtggccagcgtggagatggtgaagtaccaccactgcagagacgtgcccctgcacgccctgtag

SEQ ID NO: 235039 - DNA, 360 bp, Artificial Sequence
  derived and/or modified sequence
atgtgcggcatctgggccctgttcggcagcgacgactgcctgagcgtgcagtgcctgagcgccatgaagatcgcccacagaggccccgacgccttcagattcgagaacgtgaacggctacaccaactgctgcttcggcttccacagactggccgtggtggaccccctgttcggcatgcagcccatcagagtgaagaagtacccctacctgtggctgtgctacaacggcgagatctacaaccacaagaagatgcagcagcacttcgagttcgagtaccagaccaaggtggacggcgagatcatcctgcacctgtacgacaagggcggcatcgagcagaccatctgcatgctggacggctag

SEQ ID NO: 235040 - DNA, 102 bp, Artificial Sequence
  derived and/or modified sequence
atgtgcggcatctgggccctgttcggcagcgacgactgcctgagcgtgcagtgcctgagcgccatgaagatcgcccacagaggccccgacgccttcagatag

SEQ ID NO: 235041 - DNA, 1623 bp, Artificial Sequence
  derived and/or modified sequence
atgaagatcgcccacagaggccccgacgccttcagattcgagaacgtgaacggctacaccaactgctgcttcggcttccacagactggccgtggtggaccccctgttcggcatgcagcccatcagagtgaagaagtacccctacctgtggctgtgctacaacggcgagatctacaaccacaagaagatgcagcagcacttcgagttcgagtaccagaccaaggtggacggcgagatcatcctgcacctgtacgacaagggcggcatcgagcagaccatctgcatgctggacggcgtgttcgccttcgtgctgctggacaccgccaacaagaaggtgttcctgggcagagacacctacggcgtgagacccctgttcaaggccatgaccgaggacggcttcctggccgtgtgcagcgaggccaagggcctggtgaccctgaagcacagcgccacccccttcctgaaggtggagcccttcctgcccggccactacgaggtgctggacctgaagcccaacggcaaggtggccagcgtggagatggtgaagtaccaccactgcagagacgtgcccctgcacgccctgtacgacaacgtggagaagctgttccccggcttcgagatcgagaccgtgaagaacaacctgagaatcctgttcaacaacgccgtgaagaagagactgatgaccgacagaagaatcggctgcctgctgagcggcggcctggacagcagcctggtggccgccaccctgctgaagcagctgaaggaggcccaggtgcagtaccccctgcagaccttcgccatcggcatggaggacagccccgacctgctggccgccagaaaggtggccgaccacatcggcagcgagcactacgaggtgctgttcaacagcgaggagggcatccaggccctggacgaggtgatcttcagcctggagacctacgacatcaccaccgtgagagccagcgtgggcatgtacctgatcagcaagtacatcagaaagaacaccgacagcgtggtgatcttcagcggcgagggcagcgacgagctgacccagggctacatctacttccacaaggcccccagccccgagaaggccgaggaggagagcgagagactgctgagagagctgtacctgttcgacgtgctgagagccgacagaaccaccgccgcccacggcctggagctgagagtgcccttcctggaccacagattcagcagctactacctgagcctgccccccgagatgagaatccccaagaacggcatcgagaagcacctgctgagagagaccttcgaggacagcaacctgatccccaaggagatcctgtggagacccaaggaggccttcagcgacggcatcaccagcgtgaagaacagctggttcaagatcctgcaggagtacgtggagcaccaggtggacgacgccatgatggccaacgccgcccagaagttccccttcaacacccccaagaccaaggagggctactactacagacaggtgttcgagagacactaccccggcagagccgactggctgagccactactggatgcccaagtggatcaacgccaccgaccccagcgccagaaccctgacccactacaagagcgccgtgaaggcctag

SEQ ID NO: 235042 - protein, 523 aa, Artificial Sequence
  derived and/or modified sequence
MQRAAALVRRGCGPRTPSSWGRSQSSAAAEASAVLKVRPERSRRERILTLESMNPQVKAVEYAVRGPIVLKAGEIELELQRGIKKPFTEVIRANIGDAQAMGQQPITFLRQVMALCTYPNLLDSPSFPEDAKKRARRILQACGGNSLGSYSASQGVNCIREDVAAYITRRDGGVPADPDNIYLTTGASDGISTILKILVSGGGKSRTGVMIPIPQYPLYSAVISELDAIQVNYYLDEENCWALNVNELRRAVQEAKDHCDPKVLCIINPGNPTGQVQSRKCIEDVIHFAWEEKLFLLADEVYQDNVYSPDCRFHSFKKVLYEMGPEYSSNVELASFHSTSKGYMGECGYRGGYMEVINLHPEIKGQLVKLLSVRLCPPVSGQAAMDIVVNPPVAGEESFEQFSREKESVLGNLAKKAKLTEDLFNQVPGIHCNPLQGAMYAFPRIFIPAKAVEAAQAHQMAPDMFYCMKLLEETGICVVPGSGFGQREGTYHFRMTILPPVEKLKTVLQKVKDFHINFLEKYA

SEQ ID NO: 235043 - protein, 423 aa, Artificial Sequence
  derived and/or modified sequence
MGQQPITFLRQVMALCTYPNLLDSPSFPEDAKKRARRILQACGGNSLGSYSASQGVNCIREDVAAYITRRDGGVPADPDNIYLTTGASDGISTILKILVSGGGKSRTGVMIPIPQYPLYSAVISELDAIQVNYYLDEENCWALNVNELRRAVQEAKDHCDPKVLCIINPGNPTGQVQSRKCIEDVIHFAWEEKLFLLADEVYQDNVYSPDCRFHSFKKVLYEMGPEYSSNVELASFHSTSKGYMGECGYRGGYMEVINLHPEIKGQLVKLLSVRLCPPVSGQAAMDIVVNPPVAGEESFEQFSREKESVLGNLAKKAKLTEDLFNQVPGIHCNPLQGAMYAFPRIFIPAKAVEAAQAHQMAPDMFYCMKLLEETGICVVPGSGFGQREGTYHFRMTILPPVEKLKTVLQKVKDFHINFLEKYA

SEQ ID NO: 235044 - DNA, 1572 bp, Artificial Sequence
  derived and/or modified sequence
atgcagcgtgccgctgctttagtccggagaggctgcggcccccgaactccttccagctgggggagaagtcagtcctctgccgctgccgaggccagcgctgtgctcaaagtgagaccggagcggagccgcagagagcggatcttaactctggaatcgatgaatccccaggttaaagcggtcgaatatgccgtgcgcggtccaatcgtgttgaaggcaggagagatagaattagagctgcaaaggggtatcaagaaaccattcaccgaagtaattagggctaatattggagacgcacaagccatgggtcagcagccaatcaccttccttcgccaggtgatggccctgtgtacctatcccaatcttcttgatagtccctcatttcctgaggatgctaaaaaacgagcgagacgcatcttgcaggcatgcggcggaaactccctgggatcatactccgcatcccagggagttaactgtattagggaagatgtggccgcatacattacccggagggatggcggcgtgccggcagatcccgataacatctatctgactacaggcgcctctgacggaatttctacaatactgaaaatactggtgagcggcggagggaagtccagaacaggagttatgatacccatacctcaatacccgctgtattctgccgtaatcagtgaacttgacgccattcaggtgaattactatctcgacgaggaaaattgctgggctctcaatgtgaacgagctgcgacgcgctgtacaggaagctaaagatcactgtgaccctaaggtgctgtgtatcatcaatcccggtaatccaaccggacaggttcaaagccgcaaatgtatcgaagatgtcatccatttcgcctgggaggaaaaactgttcctcctcgcggacgaagtgtatcaagacaatgtgtattcccccgattgtagatttcacagttttaaaaaagtattatatgagatgggacctgagtactcctcaaacgtcgagctggcctcatttcatagcacctccaagggatacatgggcgagtgtgggtataggggaggttatatggaagtgattaatctccatccagagattaaaggccagctggtgaagctgctcagcgtgcgcctatgcccacctgtgtctggccaagcagccatggacatagttgtaaacccaccagtggcaggagaggaatcttttgagcagttctccagggagaaggaaagtgtactgggcaacctggctaaaaaagctaagctgaccgaggatttatttaatcaggtgcccggcattcattgtaacccactgcagggggccatgtacgcttttcctagaattttcatccctgccaaggcggtcgaggctgcccaagcacaccaaatggcacccgatatgttctactgtatgaagttgctggaggaaaccggcatctgcgtcgtgcccgggtctggatttgggcagcgagaagggacctatcatttcagaatgacgattttgccgcccgtcgaaaagttgaagaccgttttgcagaaggtgaaggatttccacatcaacttcctggaaaagtacgcatag

SEQ ID NO: 235045 - DNA, 3976 bp, Artificial Sequence
  derived and/or modified sequence
gcggggatgcggctgtgggcgccggggccgggtagctgctccaggcgcgcgagctaaccgagtgcggcgagggcctaccaggggcgacagggtttctctccgcaagcgcgcgatgcagcgggcggcggcgctggtccggcggggctgtggtccccggacccccagctcctggggccgcagccagagcagcgcggccgccgaggcctcggcggtgctcaaggtgcggcccgagcgcagccggcgcgagcgcatcctcacgctggagtccatgaacccgcaggtgaaggcggtggagtacgccgtgcggggacccatcgtgctcaaggccggcgagatcgagctcgagctgcagcggggtatcaaaaagccattcacagaggtcatccgagccaacatcggggacgcccaggctatggggcagcagccaatcaccttcctccggcaggtgatggcactatgcacctacccaaacctgctggacagccccagcttcccagaagatgctaagaaacgtgcccggcggatcctgcaggcttgtggcgggaacagcctggggtcctacagtgctagccagggtgtcaactgcatccgtgaagatgtggctgcctacatcaccaggagggatggcggtgtgcctgcggaccccgacaacatctacctgaccacgggagctagtgacggcatttctacgatcctgaagatcctcgtctccgggggcggcaagtcacggacaggtgtgatgatccccatcccacaatatcccctctattcagctgtcatctctgagctcgacgccatccaggtgaattactacctggacgaggagaactgctgggcgctgaatgtgaatgagctccggcgggcggtgcaggaggccaaagaccactgtgatcctaaggtgctctgcataatcaaccctgggaaccccacaggccaggtacaaagcagaaagtgcatagaagatgtgatccactttgcctgggaagagaagctctttctcctggctgatgaggtgtaccaggacaacgtgtactctccagattgcagattccactccttcaagaaggtgctgtacgagatggggcccgagtactccagcaacgtggagctcgcctccttccactccacctccaagggctacatgggcgagtgtggttacagaggaggctacatggaggtgatcaacctgcaccctgagatcaagggccagctggtgaagctgctgtcggtgcgcctgtgccccccagtgtctgggcaggccgccatggacattgtcgtgaaccccccggtggcaggagaggagtcctttgagcaattcagccgagagaaggagtcggtcctgggtaatctggccaaaaaagcaaagctgacggaagacctgtttaaccaagtcccaggaattcactgcaaccccttgcagggggccatgtacgccttccctcggatcttcattcctgccaaagctgtggaggctgctcaggcccatcaaatggctccagacatgttctactgcatgaagctcctggaggagactggcatctgtgtcgtgcccggcagtggctttgggcagagggaaggcacttaccacttcaggatgactatcctccctccagtggagaagctgaaaacggtgctgcagaaggtgaaagacttccacatcaacttcctggagaagtacgcgtgaggacgcctgagccccagcgggagacctgtccttggctcttcctcccaatgcccgtcaggctgaactcgcctcccccgtgactctgcctcgggcctcgcagaggccgctggtcacttcgtcatcattttgcccctggagacgtctttctttgtgccttgatgttgagagcgcctctcttttgagcaaacaagcattctatatgcaaccagagtagaggggacctgctcagcaggtgtgaccagggttctctgaatctgttattgtttttgcttctggaaagttcatttggggtttacaacaactaggatgtgttgggtgagatgtttcagatctggagaaatgagcaggtgtcgggaaatgtgtgacttaaccgtggtgagggctggaaatccaaactcaccaccatgatctgtgaaataaagcccttagcggtgtgaagcatccggtcctttgaacagaagggcctggaaggcccctggggctgagaaagggtccgcccggtggcctggaggcaggcgccgggagcgcagtagcacgtggactgggcaggatgttgcactagcttggggtagatgctgggggctgcggccacggtcagagggccccactgtgaggcgtgggtgtgagccaggctgcaggaggaactgggcctccgcttcccagcaacgcagccaggcctgagaattctgtgcgcccggcgggctttgggaatgaggggttcccttgaacatgcgtaggctggaaccccgtctgagaggtctccctgaatttcagtgacacatagtgcagcccggcagtgtcccacttccgtggagagagccgctggaatggtgtggacccatcccgcgggtgaccggtgcctgttctcccctgaccgagcctgtgagcacatcgccccctgctggcgacagcggggaaatgagggctgaaaatatcctccccacaagggcaatccccgggacctgccgagcagccaaggccctgtcctttcttgaatggtggcgagctgaatctggtcggtttcctagcttttaggtggtaaaagtgcctggcagcttggctgccgtggaggagtcagtcgtggttggaggttcattgccgtgctttcatgcagagtgttttgccttcatgttagcttccggctcccctcccaggctgcagactctgacctgtggcatcaggcttctcccagtacaggagggtgccatcccccagcatgcggcttctctgccattagcagccctgggcgggccgaccacactcgaggctgcggtgctacgggcttagccctcgcctccctcactgggagcttccccatcctccctgccttccccagtgggaagttagggaagctcaggagcctgggaccccgcatgtcccaaaatgggattggagaagctggagagaaagcagaagaggccgaggagtgaggcagcagcctctatgctgtgatttccacaccgggtccgtgcagaggaaacagaaactcccaactgtccttacccaccgacatcacagcccctatgaagaaagtagccacaatctcaaataacaaaagggaatgttctaaaactttttcttccttaaaaaatggagaaaattgcacttgtgcttgctgtgtggtatataaaccaggattagtcccagggtcgtgaggtttctggtgaaaaggttaaatcgtagaagctagtatattttttatatttttgtaacaattgcttttttcatgggggaggcggggttagtatttatagtcctaacaagtccagtaattttttataaatcttcagattataaacagcccctaaaaactttacaacgtttacacagttttttaaaaagagactgtatacacttgatttgctttcaaaataaataaggtcagctagtctaggaggttaacgtcgggtaggaatgctgatcatgataggtttggttttctacagattctgttccggtgcctttcctatccaggcaccacctgagaaagttgtcatttgaggtcgcacttggaagttacatctgtgaagtttctgtcattcgtccagatctgtgtgtgtagcatgtgctgaggaagcacgtgctgggctgtgcctcagacagtgcatcaccgggcacccagaggcttgcctggctattcctgttctggtgtgtgtggagtgttggggaggaacagatgcagatcaacctgtggctgttttcccgtctaggttctcacaggtatctcctgacagaggtacttaacaatggctctgctggaaatttctataaataaaatgtccaaaatggtga

SEQ ID NO: 235046 - DNA, 3873 bp, Artificial Sequence
  derived and/or modified sequence
aattgttgagcgggccgtgctgccaggcaccgcacgttgtgtgtctgccctactctcgtggaaccaaggtccagtggagagaggaacataagcgaatgaagaaagaagcaatagagtctcagtgataagttcttggaaaaaaggtctttgccaatcctgattcccggaagagagtcggcagaattccttcctttaggcccctctggagccttggccgaccagccacttctgtggtctggggacagtcaccgagggtatcaaaaagccattcacagaggtcatccgagccaacatcggggacgcccaggctatggggcagcagccaatcaccttcctccggcaggtgatggcactatgcacctacccaaacctgctggacagccccagcttcccagaagatgctaagaaacgtgcccggcggatcctgcaggcttgtggcgggaacagcctggggtcctacagtgctagccagggtgtcaactgcatccgtgaagatgtggctgcctacatcaccaggagggatggcggtgtgcctgcggaccccgacaacatctacctgaccacgggagctagtgacggcatttctacgatcctgaagatcctcgtctccgggggcggcaagtcacggacaggtgtgatgatccccatcccacaatatcccctctattcagctgtcatctctgagctcgacgccatccaggtgaattactacctggacgaggagaactgctgggcgctgaatgtgaatgagctccggcgggcggtgcaggaggccaaagaccactgtgatcctaaggtgctctgcataatcaaccctgggaaccccacaggccaggtacaaagcagaaagtgcatagaagatgtgatccactttgcctgggaagagaagctctttctcctggctgatgaggtgtaccaggacaacgtgtactctccagattgcagattccactccttcaagaaggtgctgtacgagatggggcccgagtactccagcaacgtggagctcgcctccttccactccacctccaagggctacatgggcgagtgtggttacagaggaggctacatggaggtgatcaacctgcaccctgagatcaagggccagctggtgaagctgctgtcggtgcgcctgtgccccccagtgtctgggcaggccgccatggacattgtcgtgaaccccccggtggcaggagaggagtcctttgagcaattcagccgagagaaggagtcggtcctgggtaatctggccaaaaaagcaaagctgacggaagacctgtttaaccaagtcccaggaattcactgcaaccccttgcagggggccatgtacgccttccctcggatcttcattcctgccaaagctgtggaggctgctcaggcccatcaaatggctccagacatgttctactgcatgaagctcctggaggagactggcatctgtgtcgtgcccggcagtggctttgggcagagggaaggcacttaccacttcaggatgactatcctccctccagtggagaagctgaaaacggtgctgcagaaggtgaaagacttccacatcaacttcctggagaagtacgcgtgaggacgcctgagccccagcgggagacctgtccttggctcttcctcccaatgcccgtcaggctgaactcgcctcccccgtgactctgcctcgggcctcgcagaggccgctggtcacttcgtcatcattttgcccctggagacgtctttctttgtgccttgatgttgagagcgcctctcttttgagcaaacaagcattctatatgcaaccagagtagaggggacctgctcagcaggtgtgaccagggttctctgaatctgttattgtttttgcttctggaaagttcatttggggtttacaacaactaggatgtgttgggtgagatgtttcagatctggagaaatgagcaggtgtcgggaaatgtgtgacttaaccgtggtgagggctggaaatccaaactcaccaccatgatctgtgaaataaagcccttagcggtgtgaagcatccggtcctttgaacagaagggcctggaaggcccctggggctgagaaagggtccgcccggtggcctggaggcaggcgccgggagcgcagtagcacgtggactgggcaggatgttgcactagcttggggtagatgctgggggctgcggccacggtcagagggccccactgtgaggcgtgggtgtgagccaggctgcaggaggaactgggcctccgcttcccagcaacgcagccaggcctgagaattctgtgcgcccggcgggctttgggaatgaggggttcccttgaacatgcgtaggctggaaccccgtctgagaggtctccctgaatttcagtgacacatagtgcagcccggcagtgtcccacttccgtggagagagccgctggaatggtgtggacccatcccgcgggtgaccggtgcctgttctcccctgaccgagcctgtgagcacatcgccccctgctggcgacagcggggaaatgagggctgaaaatatcctccccacaagggcaatccccgggacctgccgagcagccaaggccctgtcctttcttgaatggtggcgagctgaatctggtcggtttcctagcttttaggtggtaaaagtgcctggcagcttggctgccgtggaggagtcagtcgtggttggaggttcattgccgtgctttcatgcagagtgttttgccttcatgttagcttccggctcccctcccaggctgcagactctgacctgtggcatcaggcttctcccagtacaggagggtgccatcccccagcatgcggcttctctgccattagcagccctgggcgggccgaccacactcgaggctgcggtgctacgggcttagccctcgcctccctcactgggagcttccccatcctccctgccttccccagtgggaagttagggaagctcaggagcctgggaccccgcatgtcccaaaatgggattggagaagctggagagaaagcagaagaggccgaggagtgaggcagcagcctctatgctgtgatttccacaccgggtccgtgcagaggaaacagaaactcccaactgtccttacccaccgacatcacagcccctatgaagaaagtagccacaatctcaaataacaaaagggaatgttctaaaactttttcttccttaaaaaatggagaaaattgcacttgtgcttgctgtgtggtatataaaccaggattagtcccagggtcgtgaggtttctggtgaaaaggttaaatcgtagaagctagtatattttttatatttttgtaacaattgcttttttcatgggggaggcggggttagtatttatagtcctaacaagtccagtaattttttataaatcttcagattataaacagcccctaaaaactttacaacgtttacacagttttttaaaaagagactgtatacacttgatttgctttcaaaataaataaggtcagctagtctaggaggttaacgtcgggtaggaatgctgatcatgataggtttggttttctacagattctgttccggtgcctttcctatccaggcaccacctgagaaagttgtcatttgaggtcgcacttggaagttacatctgtgaagtttctgtcattcgtccagatctgtgtgtgtagcatgtgctgaggaagcacgtgctgggctgtgcctcagacagtgcatcaccgggcacccagaggcttgcctggctattcctgttctggtgtgtgtggagtgttggggaggaacagatgcagatcaacctgtggctgttttcccgtctaggttctcacaggtatctcctgacagaggtacttaacaatggctctgctggaaatttctataaataaaatgtccaaaatggtg

SEQ ID NO: 235047 - DNA, 1572 bp, Artificial Sequence
  derived and/or modified sequence
atgcagagagctgctgccctggtgagaagaggctgcggccccaggacccccagctcctggggccgcagccagagcagcgctgctgctgaggccagcgctgtgctgaaggtgcggcctgagaggagcagaagagagcgcatcctgaccctggagagcatgaacccccaggtgaaggctgtggagtatgctgtgcggggccccatcgtgctgaaggccggggagattgagctggagctgcagaggggcatcaagaagcccttcacagaggtgatccgggccaacattggagatgcccaggccatgggccagcagcccatcaccttcctgcggcaggtgatggccctgtgcacctaccccaacctgctggacagccccagcttcccagaagatgccaagaagagggcccggcgcatcctgcaggcctgtggcggcaacagcctgggcagctacagcgccagccagggcgtgaactgcatcagagaagatgtggccgcctacatcaccaggagagatggaggagtgcctgctgaccctgacaacatctacctgaccactggagccagtgatggcatcagcaccatcctgaagatcctggtgtctgggggcggcaagagcaggactggagtgatgatccccatcccccagtaccccctgtacagcgctgtgatcagcgagctggatgccatccaggtgaactactacctggatgaggagaactgctgggccctgaatgtgaatgagctgcggcgggctgtgcaggaggccaaggaccactgtgaccccaaggtgctgtgcatcatcaaccctggcaaccccaccggccaggtgcagagcaggaagtgcattgaagatgtgatccactttgcctgggaggagaagctgttcctgctggctgatgaggtgtaccaggacaacgtgtacagcccagactgccgcttccacagcttcaagaaggtgctgtatgagatgggccctgagtacagcagcaatgtggagctggccagcttccacagcaccagcaagggctacatgggagaatgtggctacagaggaggctacatggaggtgatcaacctgcaccctgagatcaagggccagctggtgaagctgctgtctgtgcggctgtgcccccctgtgtctggccaggccgccatggacatcgtggtgaacccccctgtggccggggaggagagctttgagcagttcagccgggagaaggagagcgtgctgggcaacctggccaagaaggccaagctgacagaagatctcttcaaccaggtgcccggcatccactgcaaccccctgcagggcgccatgtatgccttcccccgcatcttcatcccagccaaggctgtggaggccgcccaggcccaccagatggccccagacatgttctactgcatgaagctgctggaggagaccggcatctgtgtggtgcccggcagcggcttcggccagcgggagggcacctaccacttcaggatgaccatcctgccccctgtggagaagctgaagacagtgctgcagaaggtgaaggacttccacatcaacttcctggagaagtatgcctag

SEQ ID NO: 235048 - DNA, 1572 bp, Artificial Sequence
  derived and/or modified sequence
atgcagcgggccgccgccctggtgcggcggggctgcggcccccggaccccgtctagttgggggcggagccaatcatccgccgccgccgaggcaagtgccgtgctgaaagtgaggcctgagaggtccagaagggaacgcatcctgactctggagagcatgaacccccaggttaaggccgtggagtatgccgtcagagggcccatcgtgttgaaggccggcgagatcgagctggaactgcagaggggcattaagaagccgttcaccgaggtgatcagggctaatattggtgacgctcaggcaatgggacagcagccaatcacatttctgcgtcaggtgatggccctgtgcacatatccaaatctgctggattcaccttcgtttccggaagatgctaagaagcgcgcacgaaggatattgcaggcatgtggtgggaattctctcggatcctattctgcttcacagggggttaactgtatacgtgaagacgtggcagcatacattacacgcagagacggcggagtaccagctgaccctgacaatatttatctgacaaccggtgcaagcgacgggatttctactatcctgaagatactggtgtcaggcggcggcaagtccagaaccggagtgatgatccctattccccagtacccattgtactctgctgtgattagtgaactggatgccatacaggtaaattactatctagacgaggaaaattgttgggccctgaacgtgaatgaactgcgaagagcagtgcaggaggcgaaagatcattgcgaccccaaagttctttgtattattaatccaggaaaccctacaggacaagtgcagtcaagaaagtgcattgaggatgttatccacttcgcctgggaagagaaactgtttttgttggctgacgaggtgtatcaggataacgtatactcaccagattgtagatttcacagttttaaaaaagttctgtacgaaatgggaccagagtacagtagtaacgttgaactggccagctttcactccacttccaagggatatatgggcgaatgcgggtaccgtggggggtacatggaagtgattaatctgcaccccgagatcaaagggcaattggtgaagctactgtccgtcaggctgtgccctcccgtgtctggccaggccgccatggatattgtggtgaaccctcctgtagctggcgaagagtccttcgaacagttcagccgagaaaaggagtcagtgttgggcaatctggcgaaaaaggccaagctcaccgaggatctgttcaaccaggtaccaggaatacactgcaaccccctacagggagctatgtatgcgtttccccgaatttttatccccgcaaaggctgtggaggccgcccaggcacatcaaatggccccagatatgttctattgtatgaaacttctggaagagacgggcatatgtgtggtgcccggctcaggattcggccagagggagggcacataccatttccgaatgaccattttaccaccggtcgagaagctgaaaactgttctccagaaagtcaaagatttccacattaactttctcgagaaatacgcttag

SEQ ID NO: 235049 - DNA, 1572 bp, Artificial Sequence
  derived and/or modified sequence
atgcaaagagcagccgctctggtacgcagagggtgcgggcctagaacccccagctcatggggaaggtcccagtcaagtgcagccgctgaagcctccgccgtgttaaaagtccggccagaacgatcccgccgtgaacggattctcaccttggaaagtatgaacccccaggttaaggccgtagaatatgccgtcagaggaccaatcgtgcttaaagcaggggagatcgaacttgagctgcagcggggaatcaagaagcccttcacagaagtcatccgggcaaatatcggcgacgcccaggctatgggacagcagcctattacgttcctgcggcaggtcatggccctatgtacctatccaaatctgctggacagcccttcattccccgaggacgccaagaaaagagcacgaagaattctgcaagcctgcggtggcaattccctggggtcctactctgctagccagggagtaaactgcataagagaggacgtggctgcatacattacccggcgagatggcggagtcccggcagatccagataatatctaccttactaccggagcatcggacgggattagcacaattcttaaaatactggtttcaggcggaggaaagagtcggaccggggttatgatcccgattcctcagtaccctctctattccgcggtcataagcgaacttgacgcgattcaggttaattactatctggacgaagaaaattgctgggccttgaacgtcaacgaactcagaagagccgtacaggaggccaaggaccattgcgatcctaaggtgttgtgtatcataaatcctgggaacccgactggtcaggtgcagagcaggaagtgtatcgaagacgtcatccacttcgcatgggaggagaagttattcctgctggctgacgaggtttatcaagacaatgtatactctccagattgtagatttcatagcttcaaaaaggtgctgtatgaaatgggaccggaatacagctctaatgtggaacttgctagcttccattctacctccaaaggctacatgggagagtgtggctaccgcggtggctatatggaagtgataaacctccacccagagatcaaggggcagctcgttaaacttttgtccgttaggctctgccccccagtgtcaggccaggctgcaatggacatagttgtgaaccctccggtggcaggcgaggagagtttcgagcaattttcccgagaaaaagagtctgtgctcggtaatttggctaagaaagctaagctaactgaagacctgttcaatcaggttcccggaatccactgtaacccactacagggagcgatgtatgctttccctcgaatctttattcccgctaaggcggttgaggcggcacaggctcaccagatggcgcctgacatgttttattgcatgaaactacttgaagagaccggcatctgtgtggtaccgggtagtgggttcggacagcgagaagggacttatcatttcagaatgacgatcttgccaccagtcgagaaactgaaaacagtattacagaaagtgaaggacttccacattaattttctcgagaagtatgcctag

SEQ ID NO: 235050 - DNA, 1572 bp, Artificial Sequence
  derived and/or modified sequence
atgcagagagccgccgccctggtgagaagaggctgcggccccagaacccccagcagctggggcagaagccagagcagcgccgccgccgaggccagcgccgtgctgaaggtgagacccgagagaagcagaagagagagaatcctgaccctggagagcatgaacccccaggtgaaggccgtggagtacgccgtgagaggccccatcgtgctgaaggccggcgagatcgagctggagctgcagagaggcatcaagaagcccttcaccgaggtgatcagagccaacatcggcgacgcccaggccatgggccagcagcccatcaccttcctgagacaggtgatggccctgtgcacctaccccaacctgctggacagccccagcttccccgaggacgccaagaagagagccagaagaatcctgcaggcctgcggcggcaacagcctgggcagctacagcgccagccagggcgtgaactgcatcagagaggacgtggccgcctacatcaccagaagagacggcggcgtgcccgccgaccccgacaacatctacctgaccaccggcgccagcgacggcatcagcaccatcctgaagatcctggtgagcggcggcggcaagagcagaaccggcgtgatgatccccatcccccagtaccccctgtacagcgccgtgatcagcgagctggacgccatccaggtgaactactacctggacgaggagaactgctgggccctgaacgtgaacgagctgagaagagccgtgcaggaggccaaggaccactgcgaccccaaggtgctgtgcatcatcaaccccggcaaccccaccggccaggtgcagagcagaaagtgcatcgaggacgtgatccacttcgcctgggaggagaagctgttcctgctggccgacgaggtgtaccaggacaacgtgtacagccccgactgcagattccacagcttcaagaaggtgctgtacgagatgggccccgagtacagcagcaacgtggagctggccagcttccacagcaccagcaagggctacatgggcgagtgcggctacagaggcggctacatggaggtgatcaacctgcaccccgagatcaagggccagctggtgaagctgctgagcgtgagactgtgcccccccgtgagcggccaggccgccatggacatcgtggtgaacccccccgtggccggcgaggagagcttcgagcagttcagcagagagaaggagagcgtgctgggcaacctggccaagaaggccaagctgaccgaggacctgttcaaccaggtgcccggcatccactgcaaccccctgcagggcgccatgtacgccttccccagaatcttcatccccgccaaggccgtggaggccgcccaggcccaccagatggcccccgacatgttctactgcatgaagctgctggaggagaccggcatctgcgtggtgcccggcagcggcttcggccagagagagggcacctaccacttcagaatgaccatcctgccccccgtggagaagctgaagaccgtgctgcagaaggtgaaggacttccacatcaacttcctggagaagtacgcctag

SEQ ID NO: 235051 - protein, 1115 aa, Artificial Sequence
  derived and/or modified sequence
MRRLSLWWLLSRVCLLLPPPCALVLAGVPSSSSHPQPCQILKRIGHAVRVGAVHLQPWTTAPRAASRAPDDSRAGAQRDEPEPGTRRSPAPSPGARWLGSTLHGRGPPGSRKPGEGARAEALWPRDALLFAVDNLNRVEGLLPYNLSLEVVMAIEAGLGDLPLLPFSSPSSPWSSDPFSFLQSVCHTVVVQGVSALLAFPQSQGEMMELDLVSLVLHIPVISIVRHEFPRESQNPLHLQLSLENSLSSDADVTVSILTMNNWYNFSLLLCQEDWNITDFLLLTQNNSKFHLGSIINITANLPSTQDLLSFLQIQLESIKNSTPTVVMFGCDMESIRRIFEITTQFGVMPPELRWVLGDSQNVEELRTEGLPLGLIAHGKTTQSVFEHYVQDAMELVARAVATATMIQPELALIPSTMNCMEVETTNLTSGQYLSRFLANTTFRGLSGSIRVKGSTIVSSENNFFIWNLQHDPMGKPMWTRLGSWQGGKIVMDYGIWPEQAQRHKTHFQHPSKLHLRVVTLIEHPFVFTREVDDEGLCPAGQLCLDPMTNDSSTLDSLFSSLHSSNDTVPIKFKKCCYGYCIDLLEKIAEDMNFDFDLYIVGDGKYGAWKNGHWTGLVGDLLRGTAHMAVTSFSINTARSQVIDFTSPFFSTSLGILVRTRDTAAPIGAFMWPLHWTMWLGIFVALHITAVFLTLYEWKSPFGLTPKGRNRSKVFSFSSALNICYALLFGRTVAIKPPKCWTGRFLMNLWAIFCMFCLSTYTANLAAVMVGEKIYEELSGIHDPKLHHPSQGFRFGTVRESSAEDYVRQSFPEMHEYMRRYNVPATPDGVEYLKNDPEKLDAFIMDKALLDYEVSIDADCKLLTVGKPFAIEGYGIGLPPNSPLTANISELISQYKSHGFMDMLHDKWYRVVPCGKRSFAVTETLQMGIKHFSGLFVLLCIGFGLSILTTIGEHIVYRLLLPRIKNKSKLQYWLHTSQRLHRAINTSFIEEKQQHFKTKRVEKRSNVGPRQLTVWNTSNLSHDNRRKYIFSDEEGQNQLGIRIHQDIPLPPRRRELPALRTTNGKADSLNVSRNSVMQELSELEKQIQVIRQELQLAVSRKTELEEYQRTSRTCES

SEQ ID NO: 235052 - DNA, 3348 bp, Artificial Sequence
  derived and/or modified sequence
atgaggcgcctctcactctggtggctgctcagcagggtctgccttctcctgcctccgccatgtgccttagtactggctggtgtaccatcttcctccagccacccccagccctgccagattctgaagcggatcggtcacgcagtgagagttggcgccgttcacctccagccttggacaacagcgccccgagcagcgtcacgcgcccccgatgactctcgggctggggcacagagggatgaacctgagccaggcacacggcgaagcccagcgccctcgccaggggcaaggtggctgggatccactttacatggacgcggacctcctggcagccgtaaaccaggtgaaggcgcccgggcggaagctctctggccacgcgatgcactgctgtttgcagtcgataacctgaaccgagtcgaaggtctcctcccatataaccttagcctggaagtagtgatggctatcgaagccggccttggcgatctccccctgctgcctttttccagtccttcctcaccatggagcagcgacccattcagctttctgcaatcagtctgccatacagtagtagtgcagggggtttccgccctcctcgctttcccccagagccagggcgagatgatggaactggacctggtgtcacttgtgcttcatattcccgtaatctcaatcgtgaggcatgaattcccgagggagagccagaacccgcttcatctccagctaagcctcgaaaacagcctgtcctccgatgcagatgtcacggtaagtatcctcacaatgaataactggtataacttcagccttctgctgtgccaagaagattggaatattaccgacttcttgcttcttacacagaacaattctaaatttcacctgggaagcatcatcaacatcacggcaaacctgccttctacacaggacctcttgagcttcctgcagattcagttagaatcaattaagaatagcaccccaaccgtggtgatgttcggctgcgatatggaatcaatcaggagaatcttcgagatcacaactcaattcggggtgatgcctcccgaactaagatgggttctgggcgactcacagaacgtggaggagctgagaacagagggactgcccctagggctgatcgcccacggcaagacgactcagtccgttttcgagcactatgtccaggacgccatggaactggtcgctcgggccgtggccacagctacaatgatacagcctgagctcgccttgatacccagcacgatgaactgtatggaggtggagacaaccaatctcacatctggacagtatctgagccgcttccttgcaaatactacctttaggggtctcagcggcagcatcagagtcaagggaagtacaattgtgagctcagagaacaacttttttatctggaacctccagcatgatccaatgggcaagccaatgtggacacggctcggcagctggcagggtgggaagattgttatggattatggcatatggccagaacaggcacagcgccataagacacattttcaacatcccagtaagttgcacctgagggtggtgactctaatcgaacatccatttgtctttaccagggaggtggacgatgagggattgtgccctgccggtcagctgtgtctagaccccatgaccaatgattcatctacgctggattccctcttttcctcactgcacagctccaatgacaccgtccctatcaagtttaagaagtgttgttacggatactgcatcgacctcctcgagaagattgctgaggatatgaattttgattttgatctttacattgtgggtgatggcaaatatggagcgtggaagaacggacactggacgggtttagtgggcgacctccttcgtgggacagcccacatggcagtgactagcttttccattaacaccgcaaggtcacaggtgatagattttacaagtcctttcttcagtacttctctgggaattcttgtcagaactagagatacagctgcgccaatcggagccttcatgtggccgcttcactggacaatgtggctgggcatcttcgtggcgctccatattacagcagtatttctcaccttgtatgaatggaagagtccctttggccttactccaaagggacgaaaccgatctaaggtattttcattctcctccgcactcaatatctgttacgcgctgttattcggtcgtactgtagcaattaaaccacctaagtgttggaccggtaggttccttatgaatctttgggcgattttctgtatgttttgcctgagtacatacactgccaacctggccgccgtaatggtgggggagaaaatctatgaagaactgagtggaattcatgatccaaagctgcatcatccatcccagggtttcaggttcggaacagttcgggaaagcagtgccgaagactatgtccgtcagtcctttcccgagatgcatgagtacatgaggagatataacgtgcctgcaactcctgatggggttgaataccttaaaaatgaccctgagaaactggatgcgttcattatggataaggcattgctcgattatgaggtatcaatcgacgcagattgcaaactactcacagtggggaagccattcgcaattgagggttatgggattggccttccacccaattctcccctgacagcgaacatcagcgaactgatctctcagtacaagagccatggctttatggacatgctgcacgacaaatggtaccgtgttgtcccatgcggaaagaggtcattcgccgtcaccgagacactgcagatgggaattaagcatttttccggtcttttcgtgctcctatgtattgggtttgggctctcaattctcacaaccatcggagagcatatcgtctacagactgctcttacctcgcattaaaaacaagagcaagcttcaatattggctgcatactagccagcggttacatagagccataaatacttctttcattgaggaaaagcagcagcacttcaagaccaagcgggttgaaaagcggtcaaacgtgggacctcggcaactcacagtgtggaacaccagcaatttaagccacgataaccggcggaaatacatattctctgatgaggaggggcagaaccagttgggtatacggattcaccaggatattccccttccccctaggagacgggagctgcctgcccttagaactaccaatggaaaagccgacagcctgaacgtttcaagaaactctgttatgcaggaactaagcgaactcgagaagcaaatccaggtaatccggcaggagctccagctggctgtttcccgcaaaacagaattggaggagtaccaacgcaccagcagaacctgtgagtcttag

SEQ ID NO: 235053 - DNA, 7770 bp, Artificial Sequence
  derived and/or modified sequence
cagagaggaagtagcgagagaagagagaaaatgaagtcggcgctgggggagcctgcaggagggtggccaacagtggaggaaggtggatttggcttcttttccgcaccccgggcgtgaaagccctctccaacgcgaccccaggaaataagtgggtctcgcctgggcagaaaaggaaaagaatccaggcgagagcgcgtcgctcctctgtcactgctgcccccgaggaactccggctgcttctcatcccggccgcctcgcggggccggacgcagtgcccgaggcgccctgcagatggggcgggcagggaacgggcgctccagctgcgggtgacaggcgccggcccgcccgcctgcctgctcagcgcagtgaccgggcgggcagaggatgccaggcggagggacctgggagcgggatctgagactgccggaggcgcgctacgctccaacttgcatggcctagagaccgctccagctcctgggaccgcttcaccgagtggagtgaagctgcgcgcgggacctggaggcggagacctcaggcagcggctgcagaggggcgagccgggcgcaggagggggcgcgctttctccctgcgggtctcagtaatgaggagactgagtttgtggtggctgctgagcagggtctgtctgctgttgccgccgccctgcgcactggtgctggccggggtgcccagctcctcctcgcacccgcagccctgccagatcctcaagcgcatcgggcacgcggtgagggtgggcgcggtgcacttgcagccctggaccaccgccccccgcgcggccagccgcgctccggacgacagccgagcaggagcccagagggatgagccggagccagggactaggcggtccccggcgccctcgccgggcgcacgctggttggggagcaccctgcatggccgggggccgccgggctcccgtaagcccggggagggcgccagggcggaggccctgtggccacgggacgccctcctatttgccgtggacaacctgaaccgcgtggaagggctgctaccctacaacctgtctttggaagtagtgatggccatcgaggcaggcctgggcgatctgccacttttgcccttctcctcccctagttcgccatggagcagtgaccctttctccttcctgcaaagtgtgtgccataccgtggtggtgcaaggggtgtcggcgctgctcgccttcccccagagccagggcgaaatgatggagctcgacttggtcagcttagtcctgcacattccagtgatcagcatcgtgcgccacgagtttccacgggagagtcagaatccccttcacctacaactgagtttagaaaattcattaagttctgatgctgatgtcactgtctcaatcctgaccatgaacaactggtacaattttagcttgttgctgtgccaggaagactggaacatcaccgacttcctcctccttacccagaataattccaagttccaccttggttctatcatcaacatcaccgctaacctcccctccacccaggacctcttgagcttcctacagatccagcttgagagtattaagaacagcacacccacagtggtgatgtttggctgcgacatggaaagtatccggcggattttcgaaattacaacccagtttggggtcatgccccctgaacttcgttgggtgctgggagattcccagaatgtggaggaactgaggacagagggtctgcccttagggctcattgctcatggaaaaacaacacagtctgtctttgagcactacgtacaagatgctatggagctggtcgcaagagctgtagccacagccaccatgatccaaccagaacttgctctcattcccagcacgatgaactgcatggaggtggaaactacaaatctcacttcaggacaatatttatcaaggtttctagccaataccactttcagaggcctcagtggttccatcagagtaaaaggttccaccatcgtcagctcagaaaacaactttttcatctggaatcttcaacatgaccccatgggaaagccaatgtggacccgcttgggcagctggcaggggggaaagattgtcatggactatggaatatggccagagcaggcccagagacacaaaacccacttccaacatccaagtaagctacacttgagagtggttaccctgattgagcatccttttgtcttcacaagggaggtagatgatgaaggcttgtgccctgctggccaactctgtctagaccccatgactaatgactcttccacattggacagcctttttagcagcctccatagcagtaatgatacagtgcccattaaattcaagaagtgctgctatggatattgcattgatctgctggaaaagatagcagaagacatgaactttgacttcgacctctatattgtaggggatggaaagtatggagcatggaaaaatgggcactggactgggctagtgggtgatctcctgagagggactgcccacatggcagtcacttcctttagcatcaatactgcacggagccaggtgatagatttcaccagccctttcttctccaccagcttgggcatcttagtgaggacccgagatacagcagctcccattggagccttcatgtggccactccactggacaatgtggctggggatttttgtggctctgcacatcactgccgtcttcctcactctgtatgaatggaagagtccatttggtttgactcccaaggggcgaaatagaagtaaagtcttctccttttcttcagccttgaacatctgttatgccctcttgtttggcagaacagtggccatcaaacctccaaaatgttggactggaaggtttctaatgaacctttgggccattttctgtatgttttgcctttccacatacacggcaaacttggctgctgtcatggtaggtgagaagatctatgaagagctttctggaatacatgaccccaagttacatcatccttcccaaggattccgctttggaactgtccgagaaagcagtgctgaagattatgtgagacaaagtttcccagagatgcatgaatatatgagaaggtacaatgttccagccacccctgatggagtggagtatctgaagaatgatccagagaaactagacgccttcatcatggacaaagcccttctggattatgaagtgtcaatagatgctgactgcaaacttctcactgtggggaagccatttgccatagaaggatacggcattggcctcccacccaactctccattgaccgccaacatatccgagctaatcagtcaatacaagtcacatgggtttatggatatgctccatgacaagtggtacagggtggttccctgtggcaagagaagttttgctgtcacggagactttgcaaatgggcatcaaacacttctctgggctctttgtgctgctgtgcattggatttggtctgtccattttgaccaccattggtgagcacatagtatacaggctgctgctaccacgaatcaaaaacaaatccaagctgcaatactggctccacaccagccagagattacacagagcaataaatacatcatttatagaggaaaagcagcagcatttcaagaccaaacgtgtggaaaagaggtctaatgtgggaccccgtcagcttaccgtatggaatacttccaatctgagtcatgacaaccgacggaaatacatctttagtgatgaggaaggacaaaaccagctgggcatccggatccaccaggacatccccctccctccaaggagaagagagctccctgccttgcggaccaccaatgggaaagcagactccctaaatgtatctcggaactcagtgatgcaggaactctcagagctcgagaagcagattcaggtgatccgtcaggagctgcagctggctgtgagcaggaaaacggagctggaggagtatcaaaggacaagtcggacttgtgagtcctaggtgaccacactgcttccctttctcagttcctgaccttcctctgagcccttgagacactttgtaatgctcttttgtaactatcgacaaaggtgtggggaagctgaggtctaggtcttcttaaaggtcaagtctgctctccctcgcctaaagtgcagcagcagctcctctcaagctcactctctaggtctccagggtaggagtgtttttctagcaagaatcttagtcaggagtaagctctgtgcgagagatctgtgaataaccagataaccccagctgccgttaaccttttcaccaggtgccacagtaatatttctggtttttagccctttctctgcactaccaacaagagataaaattgttactcacacttatgtcttactgggttgctggttttcatcgtaacacagaacgaggttatctagggttgtagcttttgatacaactccccgatctagatttattcctacattctgaatggggagcaggtaagagcagagcacctcccactgggggtggggtatttaaaaattaactcattagtatcataaacgtcaaggattgattggaccaggcaagagccatgtttttgagaaggttctggatctctgactccatcctgactgtttagtaagagcatgcttacaccctactgtgaaaaggggaggggatgtggtaagcggaaacagaagacaggcagcagaggcattaaaaatgcataccatgctttcagaacaaaagctctgggccagaaaggcaatttggctaaaaaatgaataagactacttctaatgtaactaagcatctccactatggtgtgtgccttttataaaggaaaagagagaaaaaggcaaagcaaggttgtggccttaggttggacctggaatatcccttattgcctataatggaatatgtgacactgtgggtgaaatgttctacacaccacacactaggccattttcagatcagcagtcacccatcgcttagcatagaaatcccaaaacctccagcccgggaacactataagcttcgaccattcaggaatctgccctgcactttgcatatctgtatagaaaatcaagtcaatcccccatcctcacacccactcatctctgaggagctatgaactggttttggtccctctaatgatcctccagcctcatctaatgccccccaaagactgatacaagtaacctcccctctgcttaggtgtcactttctcagcatatcaagtttaggcagcaagggaaaggaatatgggtcagttctcaaatgtcaatgtagataagagtcatctagtagagaactcatcagagtgcggattgccaagacccttctccagagattatggggttgggggtggaggtctagaggtgagctcagaaacctactgttaaccaacacccccaagtgactgacacaggtggtctaaaaattacttttctagaaacaccattctggaagtttggctgcccacaggcaggaggagaagcatgaagagaaaacctgtttgagaagttttgttttgttttgttttgctttttaataattttagcacacatctgctgactctccttcaacatcctcacccccacccctgggcaccatttaggacaagacttccttatttatcaattacttgatttatcttctcaggactcattgttccacccccaaccaatttgaatgcctacaataagttcaggagctgtgccaagcactttcctcttttacagctggagatcactggaaaggtgtctcagtcacaaaacttctccctctactactggatgaaatgtctgcatttccaccaaaatctacccagtcacccagggaataacaacttaagctgtagttagataacacctagtgattaattggctgagaaaaccctggagtggagggaggctcagagatactgatatggatgtgggagggctctaaagttagaggtcaccaactccacagatgaaacagttcaataatgaggaaacaggtgagccctgaaaacacaaaaggacagttctgtgttgaaacaccccatcccctcacgttctcaccccaggcccagaagtaggttgcaactgcctttggaagattttgccccttagccatccccacccacttgtaccagctaagaatgctggagactctgccaccatgctctgcgtgcccctgaacctctgtgcagcccggaaggctgatgtacaggtgtacctcaatccacattacagccatgctcctaatgtacatggacatttttgtaactcagctcatattctgactgtatttgagaagctggctgtttaagggaacccagaagtgaattcttttgtaaagtaaagcacccttttgtaatgcaattaattatcccttaatgtatctgttttgtaagtctgcatttttgtatatcggatttaccttaagcttctctagtgaggcattctgagcagtggtgatcacatgccagatcgccctgcctatccacaaagtagatgaccaatgcacgctcctcaaacatctttggaggaactacctggccaaaacactggccaggatgcagcaagcagcagcaggggctgacagcaggcttactgccatcaacattgcttgaaatgcctctatgttctgaataaagaaaaaccataattgcttgtggtgaaacgaagcagtcttcatgttaagtagcaatggttatttttattggtagtaactgaacagtgttttgcaatttgtgaaacagtgtattgtgttttgtaaaatgatgtcatgaaatggtgggtccttggaaacctcctttccgttcagctctgcctctgttctttcaactcctttgaggctcaaaaaaaacacaaagatcagaagccttcagatagagggtggtattctggtaaagaagaaagagataagggacgctaccttgcttttctggcacaggaagcacatgataaagcatgctcagatgagctggaacagatatagctacctggttcgtgtaaataagaataatcaaggccccagagtgtgtatgcttccaggtggaggagaaaggggaatctcccaaaatttaaaaacaaattggaagaataaccaggacagccaagtgaagcagccacagggacccaagcagtcgaggtctttaatgtgcctggagatgactctctgctattcatgaatcttgctattgcacaaaccctatcaagagctgctgcttcccttccagccagaaaagtggtaagcggagcaagtgccaagcagaacagaccttatcatctgggtaacagacttctcagtgttggtgctgtgtctgttagagccttagagcaagttaagcacttccttggtgtgggtaaagaataaaggggaaagaaactactttagagcctctttttctcccaactcatatttttgataggaaaaacagaaaacccatccagttcttcagaaattgctttctaggcattaatactactttactatctatactgtttagttattcctttctttacccacctaaactatccatctaatccaggattccctcactctttttttttagttactaatcattttatgaaaataatgtatttataagtattttcttaaggtttgtgaagagtatttgcattgtgtcttcattttaatgtgtttgcaatcgctccgctccaggaagaacggaaatgctgtcttgtgagcatgaagtgaacgggctgttttgctccagccacttttcttgtacaaccacatggatggattagatgtcctcaggtcttttccatcttcagtttctatgactgtggaataaatgttcagatagaaacttc

SEQ ID NO: 235054 - DNA, 3348 bp, Artificial Sequence
  derived and/or modified sequence
atgaggcggctgagcctgtggtggctgctgagccgggtgtgcctgctgctgcccccaccctgtgccctggtgctggccggcgtgcccagcagcagcagccacccccagccctgccagatcctgaagagaattggacatgctgtgcgggtgggcgctgtgcacctgcagccctggaccacagccccccgggccgccagccgggccccagatgacagccgggccggggcccagagagatgagcctgagcccggcacccggcgcagccctgcccccagccctggggcccgctggctgggcagcaccctgcacggccggggccccccaggcagcaggaagccaggagagggcgcccgggcagaggccctgtggcccagagatgccctgctgtttgctgtggacaacctgaacagagtggagggcctgctgccctacaacctgagcctggaggtggtgatggccatcgaggccggcctgggggacctgcccctgctgcccttcagcagccccagcagcccctggagcagtgaccccttctccttcctgcagagcgtgtgccacacagtggtggtgcagggcgtgtctgccctgctggccttcccccagagccagggcgagatgatggagctggacctggtgtccctggtgctgcacatccctgtgatcagcatcgtgagacatgagttcccccgggagagccagaaccccctgcacctgcagctgagcctggagaacagcctgagcagtgatgctgatgtgacagtgtccatcctgaccatgaacaactggtacaacttcagcctgctgctgtgccaggaggactggaacatcacagacttcctgctgctgacccagaacaacagcaagttccacctgggcagcatcatcaacatcacagccaacctgcccagcacccaggacctgctgtccttcctgcagatccagctggagagcatcaagaacagcacccccaccgtggtgatgtttggctgtgacatggagagcatccgccgcatctttgagatcaccacccagtttggagtgatgcctcctgagctgcgctgggtgctgggggacagccagaatgtggaggagctgaggacagagggcctgcccctgggcctgattgcccacggcaagaccacccagagcgtgtttgagcactacgtgcaggatgccatggagctggtggcccgggctgtggccacagccaccatgatccagcctgagctggccctgatccccagcaccatgaactgcatggaggtggagaccaccaacctgaccagcggccagtacctgagccgcttcctggccaacaccaccttccggggcctgagcggcagcatccgggtgaagggcagcaccatcgtgtcctctgagaacaacttcttcatctggaacctgcagcacgaccccatgggcaagcccatgtggacccggctgggctcctggcagggcggcaagatcgtgatggactatggcatctggccagagcaggcccagaggcacaagacccacttccagcaccccagcaagctgcacctgcgggtggtgaccctgattgagcacccctttgtgttcacccgggaggtggatgatgagggcctgtgcccagctggccagctgtgcctggaccccatgaccaatgacagcagcaccctggacagcctcttcagcagcctgcacagcagcaatgacacagtgcccatcaagttcaagaagtgctgctacggctactgcatcgacctgctggagaagattgctgaggacatgaactttgattttgacctgtacatcgtgggagatggcaagtatggagcctggaagaatggccactggacaggcctggtgggggacctgctgcggggcacagcccacatggctgtgaccagcttcagcatcaacacagcccggagccaggtgattgacttcaccagccccttcttcagcaccagcctgggcatcctggtgaggacccgggacacagctgcccccatcggggccttcatgtggcccctgcactggaccatgtggctgggcatctttgtggccctgcacatcacagctgtgttcctgaccctgtatgagtggaagagccccttcggcctgacccccaagggcaggaacagaagcaaggtgttctccttcagcagcgccctgaacatctgctacgccctgctgtttggccgcacagtggccatcaagccacccaagtgctggacaggccgcttcctgatgaacctgtgggccatcttctgcatgttctgcctgagcacctacacagccaacctggccgctgtgatggtgggggagaagatctatgaggagctgagcggcatccatgaccccaagctgcaccaccccagccagggcttccgcttcggcaccgtgcgggagagcagcgcagaagattatgtgcggcagagcttccctgagatgcatgagtacatgaggcgctacaacgtgcctgccaccccagatggagtggagtacctgaagaatgaccctgagaagctggatgccttcatcatggacaaggccctgctggactatgaggtgtccattgatgctgactgcaagctgctgactgtgggcaagccctttgccatcgagggctatggaattggcctgccccccaacagccccctgacagccaacatcagcgagctgatcagccagtacaagagccacggcttcatggacatgctgcatgacaagtggtacagagtggtgccctgtgggaagaggagctttgctgtgacagagaccctgcagatgggcatcaagcacttcagcggcctgtttgtgctgctgtgcatcggcttcggcctgagcatcctgaccaccatcggggagcacatcgtgtaccgcctgctgctgccccgcatcaagaacaagagcaagctgcagtactggctgcacaccagccagaggctgcaccgggccatcaacaccagcttcatcgaggagaagcagcagcacttcaagaccaagagggtggagaagaggagcaatgtgggcccccggcagctgactgtgtggaacaccagcaacctgagccatgacaacagaaggaagtacatcttcagtgatgaggagggccagaaccagctgggcatccgcatccaccaggacatccccctgcccccaagaagaagagagctgcctgccctgcggaccaccaacgggaaggctgacagcctgaatgtgtccaggaacagcgtgatgcaggagctgtctgagctggagaagcagatccaggtgatccggcaggagctgcagctggccgtgtccaggaagacagagctggaggagtaccagaggaccagcaggacctgtgagagctag

SEQ ID NO: 235055 - DNA, 3348 bp, Artificial Sequence
  derived and/or modified sequence
atgcggcggctgagcctgtggtggctgctgagccgggtgtgcctgttgcttcctccaccgtgcgccctggtgctggctggggtccccagctcgtcctctcatccacagccttgccagattctgaaacggattggacacgcagtacgggtgggtgctgtacacctgcaaccttggactacggcgcccagagccgcgtcgcgtgcccccgatgatagtcgagctggcgcccagcgggatgagcctgagccggggaccagacgaagccccgctccctcacccggagcccgttggctgggatccacacttcatgggcgcggtcctcccggctctcgtaagcccggggaaggtgcacgcgccgaagccctgtggccaagagatgctttgttattcgcagttgataatctgaacagggtcgagggtttacttccatacaacttgagtcttgaagtcgtaatggcgatcgaagccggcctgggtgacctgccccttctcccattcagcagcccttcatcaccttggagctctgatccattttcattcctgcaaagcgtctgccacaccgttgtagtacagggagttagtgcactgctagcatttccgcaatcccaaggggagatgatggagctggacttggttagtctggttctccatatcccagtgataagcatagtacgccatgagtttcccagggagtcccagaaccccctccacctgcagctgtctctagagaatagcttgtcttcggacgcggacgtgacagtctctatactgacgatgaataattggtacaactttagtctgcttctgtgccaggaagattggaacataactgattttctcctattgactcaaaataatagcaagtttcatctgggatccattataaatatcactgcaaatttgccatccacacaggatttactcagtttccttcagattcaactggaaagcattaaaaactcaaccccgactgtcgtgatgtttgggtgtgacatggagtcgattaggaggatcttcgagattaccacacagttcggcgtgatgcctccagaattgcgctgggtgctgggcgactcacagaacgtggaagaactccggactgaggggctgccgctgggtctcatcgctcacgggaagactacacaatctgtgttcgagcattacgtccaagatgcaatggagctcgtcgccagggcagtcgcaaccgcaacaatgatccaacccgaacttgcactcattccttcgactatgaattgcatggaagtggagacaaccaacctaacaagcgggcagtacttaagccgattccttgccaataccacctttagagggctttctgggtcaattagagtaaaggggagtactattgtgagtagcgagaataacttctttatttggaatctacagcacgacccaatgggaaaaccgatgtggactagattggggtcgtggcagggcgggaagatcgtcatggactacggaatctggccggagcaggcccagcgtcataagacgcactttcagcacccttcaaagctgcatctcagagtggtcaccctgattgagcatcccttcgtgttcacccgggaagtggacgacgaggggctctgtccagccgggcagctctgccttgacccaatgacaaacgactcttccaccctcgacagcttgttttccagtttacacagctccaacgatactgttccgattaagtttaagaaatgctgctatggctattgtattgatctgctcgaaaagatcgcagaggacatgaactttgatttcgacctttacattgtgggggacgggaagtacggagcctggaaaaacgggcactggactggcctggtgggggatctgctcagagggactgcccatatggccgtgacttcattttcaattaatactgctcgcagccaggttatcgacttcaccagtcccttcttctcgacatctctcggtatcctggtacgcactagagatacagcagcacctatcggtgcattcatgtggccccttcactggaccatgtggctaggtatctttgtggcgctccatattaccgctgtgttcctgacgctttacgagtggaaatctccatttggactgacccccaaagggcggaataggtccaaagtcttctctttcagtagcgctctcaatatttgttacgccctcctcttcggtcgcacagttgccatcaaaccccctaagtgctggaccggtaggttcctgatgaacctttgggccattttctgcatgttttgcctctcaacctacaccgccaacttggccgctgtgatggtcggagagaagatatatgaagaactgagtggaattcacgaccccaagctgcaccacccctcacaggggttccgtttcggtactgtgcgggaatcaagtgccgaagactatgtgagacagtccttcccggagatgcatgagtacatgcgacgctacaatgttcctgctaccccggacggcgtggagtatcttaagaatgatccagagaagcttgacgcttttatcatggataaagccctgttggattatgaggtctccatcgacgccgactgtaagctcctgacagtgggaaaaccatttgctattgagggctatggaatcggcctgcccccgaactcccccctgaccgcaaacatttctgaattaattagtcaatacaaatctcatggcttcatggatatgctacacgataaatggtatcgggtggtcccttgtggtaagaggtcgttcgctgtcacggagacactgcaaatgggcatcaaacacttctcaggcctgttcgtgttgctgtgcataggcttcggactctctattctcacaacgatcggagagcatatcgtctaccgcctgctgctccctcgcattaagaataaatcaaagctccagtattggctgcacaccagtcagcgtctgcaccgtgccataaacaccagtttcatagaggaaaaacagcaacactttaaaacgaaacgggttgagaagcggagcaatgtggggccaaggcagctgaccgtgtggaacacctccaatctgtcacacgacaacaggaggaagtatatcttcagcgatgaggagggacaaaatcaactcggaatccggatccatcaggacatacctctgcctccccgcagacgggaactcccagctctcagaactaccaatggcaaagctgattcactgaacgtgtctcgcaacagcgtaatgcaggaactgagtgaactggagaaacagatccaagtgatcaggcaggaactgcagcttgctgtttcccgtaaaacagaactggaggagtatcagagaacctcacgtacatgcgaatcatag

SEQ ID NO: 235056 - DNA, 3348 bp, Artificial Sequence
  derived and/or modified sequence
atgagacgcctctcactctggtggctactctcgcgagtatgcctcctcctgccccctccttgtgcgctcgtgctggctggggttccttcctcctcttcccatccacaaccctgccaaatactgaaacggatcggacacgcagttcgcgtgggagcagtccacctccagccatggaccaccgcccctcgcgcagcctcccgtgcacccgatgattcccgggctggtgcacagagggacgaacctgaacccggtacccggagaagtcctgctccctccccaggggcaagatggcttgggtctacactacatggcagaggtcccccaggcagtaggaaacctggagaaggcgctcgggctgaagccctgtggccaagggacgccctgctgtttgccgtggataaccttaatcgagtggaggggctactgccttataacctgtctctggaggtcgtcatggccatcgaggctggactcggtgatctgcccctgctgcccttcagttccccttcgtcaccgtggtcgagtgatccatttagttttctgcagtcagtttgccacaccgtggtggtgcaaggcgtctctgcactccttgcgttcccacagagccagggagagatgatggaattggatcttgtaagtctcgtgctacatatccccgtgatttcaattgtcagacacgaattcccgagagagagccaaaatccattgcacctgcaattatctcttgaaaattccctaagctcagatgcagatgtgacagtgagtatactgacaatgaataattggtataacttcagcctgcttctttgtcaagaggactggaatattacagattttctgctactaactcagaacaattctaaattccacctggggtcgattattaatatcaccgccaacctgcccagtactcaagatctgttatcgttcctgcagatccagctggaaagcattaagaattccacgccgacggtcgttatgtttggatgtgacatggagagcataaggagaatttttgagatcactactcagtttggggtcatgccacccgagctgaggtgggtccttggagactcacaaaatgtcgaggagctgcggaccgagggcctgcccctggggctgattgctcatgggaagacgactcagagtgtatttgaacattacgtacaggatgccatggagttggtggctcgcgcagtcgccacggcgaccatgattcagcctgaattggcccttattccatcgacaatgaattgtatggaggtggaaactacaaacctgacctccggacagtatctgagccgcttcctcgccaacacaacctttagaggattgagcggctccatcagggtcaaaggcagcaccatcgtgtcttcggaaaataatttctttatctggaaccttcaacacgatcccatggggaaacccatgtggactagactgggctcctggcagggcggaaagatcgtgatggattacggaatctggcctgaacaggcgcaacggcacaaaacccacttccagcatccttccaaattacatttgcgcgtggtaactctcattgagcaccccttcgttttcactagagaggtagacgacgaggggttgtgtcctgctggccagttgtgcctggatccaatgaccaacgactccagcacactcgattcactcttcagctccctgcattcgagcaatgacaccgtaccaattaagttcaaaaagtgttgctacgggtactgcattgaccttctggagaagatagccgaggacatgaacttcgattttgatctgtacatcgtcggggacggcaaatatggcgcatggaaaaatgggcactggacaggcctggtgggggatctgcttaggggaactgcccacatggcagttacgagtttctctatcaacaccgcccgatctcaagttattgattttaccagtccctttttttccacttcactcggaattcttgtgcgcacacgcgacaccgccgcacctattggagcattcatgtggcctctgcattggaccatgtggttagggatcttcgtggccctccatattaccgccgtgttcctgacgttgtatgaatggaaatcaccattcggtctgacacctaaagggaggaaccgcagcaaggtgtttagcttcagcagtgccctgaacatttgttacgctctgctattcggcagaacagttgcaatcaagcctccaaaatgctggaccggtcggttccttatgaacttatgggctattttttgtatgttttgtctgagcacatataccgcaaatttagctgctgtgatggtgggagagaagatctacgaagagctgtccggcattcatgatcctaagctgcatcacccctcgcagggatttaggttcgggacagtgagggagtcgtcagctgaagactatgtgcgtcagtcttttccggagatgcacgagtacatgagaaggtacaatgtgcccgctacccctgacggcgtcgagtatctaaagaacgacccagagaaactagatgcatttatcatggataaggcacttctggattacgaagtttctatcgacgcagattgtaagctacttacagtgggcaagcccttcgcaatcgagggatatgggatcgggctccctcccaactccccactcaccgccaatatctctgagcttataagccagtacaaaagccatggattcatggacatgctccacgataagtggtatcgggtcgtaccttgcggtaaacgcagcttcgctgtgaccgaaaccctgcagatgggtatcaaacacttctccggcctattcgttctgttatgtatcggttttggactgtccatcctgactactatcggcgagcacatcgtgtacaggctgctactacccaggattaagaacaagagcaagctgcagtattggctccacacctcccagcggctgcacagagccattaacaccagctttattgaagagaagcagcaacactttaagaccaaacgagtggaaaagcgaagcaatgttggccctcgacagcttactgtatggaacacaagcaacctgtcccatgacaacagaagaaagtacattttcagcgacgaggagggacaaaaccaactgggcattagaattcatcaggacatcccacttccccctaggcgtcgagaactgcctgcccttcgcaccacaaacggtaaggcagactccctgaatgtatctcgcaacagtgtgatgcaggaactctccgaattggagaaacagattcaggtaattcggcaggagttgcagctggcagtgagcaggaagacagagcttgaagaataccagcgcacttcccgaacatgcgagtcttag

SEQ ID NO: 235057 - DNA, 3348 bp, Artificial Sequence
  derived and/or modified sequence
atgagaagactgagcctgtggtggctgctgagcagagtgtgcctgctgctgccccccccctgcgccctggtgctggccggcgtgcccagcagcagcagccacccccagccctgccagatcctgaagagaatcggccacgccgtgagagtgggcgccgtgcacctgcagccctggaccaccgcccccagagccgccagcagagcccccgacgacagcagagccggcgcccagagagacgagcccgagcccggcaccagaagaagccccgcccccagccccggcgccagatggctgggcagcaccctgcacggcagaggcccccccggcagcagaaagcccggcgagggcgccagagccgaggccctgtggcccagagacgccctgctgttcgccgtggacaacctgaacagagtggagggcctgctgccctacaacctgagcctggaggtggtgatggccatcgaggccggcctgggcgacctgcccctgctgcccttcagcagccccagcagcccctggagcagcgaccccttcagcttcctgcagagcgtgtgccacaccgtggtggtgcagggcgtgagcgccctgctggccttcccccagagccagggcgagatgatggagctggacctggtgagcctggtgctgcacatccccgtgatcagcatcgtgagacacgagttccccagagagagccagaaccccctgcacctgcagctgagcctggagaacagcctgagcagcgacgccgacgtgaccgtgagcatcctgaccatgaacaactggtacaacttcagcctgctgctgtgccaggaggactggaacatcaccgacttcctgctgctgacccagaacaacagcaagttccacctgggcagcatcatcaacatcaccgccaacctgcccagcacccaggacctgctgagcttcctgcagatccagctggagagcatcaagaacagcacccccaccgtggtgatgttcggctgcgacatggagagcatcagaagaatcttcgagatcaccacccagttcggcgtgatgccccccgagctgagatgggtgctgggcgacagccagaacgtggaggagctgagaaccgagggcctgcccctgggcctgatcgcccacggcaagaccacccagagcgtgttcgagcactacgtgcaggacgccatggagctggtggccagagccgtggccaccgccaccatgatccagcccgagctggccctgatccccagcaccatgaactgcatggaggtggagaccaccaacctgaccagcggccagtacctgagcagattcctggccaacaccaccttcagaggcctgagcggcagcatcagagtgaagggcagcaccatcgtgagcagcgagaacaacttcttcatctggaacctgcagcacgaccccatgggcaagcccatgtggaccagactgggcagctggcagggcggcaagatcgtgatggactacggcatctggcccgagcaggcccagagacacaagacccacttccagcaccccagcaagctgcacctgagagtggtgaccctgatcgagcaccccttcgtgttcaccagagaggtggacgacgagggcctgtgccccgccggccagctgtgcctggaccccatgaccaacgacagcagcaccctggacagcctgttcagcagcctgcacagcagcaacgacaccgtgcccatcaagttcaagaagtgctgctacggctactgcatcgacctgctggagaagatcgccgaggacatgaacttcgacttcgacctgtacatcgtgggcgacggcaagtacggcgcctggaagaacggccactggaccggcctggtgggcgacctgctgagaggcaccgcccacatggccgtgaccagcttcagcatcaacaccgccagaagccaggtgatcgacttcaccagccccttcttcagcaccagcctgggcatcctggtgagaaccagagacaccgccgcccccatcggcgccttcatgtggcccctgcactggaccatgtggctgggcatcttcgtggccctgcacatcaccgccgtgttcctgaccctgtacgagtggaagagccccttcggcctgacccccaagggcagaaacagaagcaaggtgttcagcttcagcagcgccctgaacatctgctacgccctgctgttcggcagaaccgtggccatcaagccccccaagtgctggaccggcagattcctgatgaacctgtgggccatcttctgcatgttctgcctgagcacctacaccgccaacctggccgccgtgatggtgggcgagaagatctacgaggagctgagcggcatccacgaccccaagctgcaccaccccagccagggcttcagattcggcaccgtgagagagagcagcgccgaggactacgtgagacagagcttccccgagatgcacgagtacatgagaagatacaacgtgcccgccacccccgacggcgtggagtacctgaagaacgaccccgagaagctggacgccttcatcatggacaaggccctgctggactacgaggtgagcatcgacgccgactgcaagctgctgaccgtgggcaagcccttcgccatcgagggctacggcatcggcctgccccccaacagccccctgaccgccaacatcagcgagctgatcagccagtacaagagccacggcttcatggacatgctgcacgacaagtggtacagagtggtgccctgcggcaagagaagcttcgccgtgaccgagaccctgcagatgggcatcaagcacttcagcggcctgttcgtgctgctgtgcatcggcttcggcctgagcatcctgaccaccatcggcgagcacatcgtgtacagactgctgctgcccagaatcaagaacaagagcaagctgcagtactggctgcacaccagccagagactgcacagagccatcaacaccagcttcatcgaggagaagcagcagcacttcaagaccaagagagtggagaagagaagcaacgtgggccccagacagctgaccgtgtggaacaccagcaacctgagccacgacaacagaagaaagtacatcttcagcgacgaggagggccagaaccagctgggcatcagaatccaccaggacatccccctgccccccagaagaagagagctgcccgccctgagaaccaccaacggcaaggccgacagcctgaacgtgagcagaaacagcgtgatgcaggagctgagcgagctggagaagcagatccaggtgatcagacaggagctgcagctggccgtgagcagaaagaccgagctggaggagtaccagagaaccagcagaacctgcgagagctag

SEQ ID NO: 235058 - protein, 663 aa, Artificial Sequence
  derived and/or modified sequence
MGNILTCRVHPSVSLEFDQQQGSVCPSESEIYEAGAGDRMAGAPMAAAVQPAEVTVEVGEDLHMHHVRDREMPEALEFNPSANPEASTIFQRNSQTDVVEIRRSNCTNHVSTVRFSQQYSLCSTIFLDDSTAIQHYLTMTIISVTLEIPHHITQRDADRSLSIPDEQLHSFAVSTVHIMKKRNGGGSLNNYSSSIPSTPSTSQEDPQFSVPPTANTPTPVCKRSMRWSNLFTSEKGSDPDKERKAPENHADTIGSGRAIPIKQGMLLKRSGKWLKTWKKKYVTLCSNGVLTYYSSLGDYMKNIHKKEIDLQTSTIKVPGKWPSLATSACTPISTSKSNGLSKDMDTGLGDSICFSPSISSTTSPKLNPPPSPHANKKKHLKKKSTNNFMIVSATGQTWHFEATTYEERDAWVQAIQSQILASLQSCESSKSKSQLTSQSKAMALQSIQNMRGNAHCVDCETQNPKWASLNLGVLMCIECSGIHRSLGTRLSRVRSLELDDWPVELRKVMSSIGNDLANSIWEGSSQGQTKPSEKSTREEKERWIRSKYEEKLFLAPLPCTELSLGQQLLRATADEDLQTAILLLAHGSREEVNETCGEGDGCTALHLACRKGNVVLAQLLIWYGVDVMARDAHGNTALTYARQASSQECINVLLQYGCPDKCV

SEQ ID NO: 235059 - protein, 663 aa, Artificial Sequence
  derived and/or modified sequence
MGNILTCRVHPSVSLEFDQQQGSVCPSESEIYEAGAEDRMAGAPMAAAVQPAEVTVEVGEDLHMHHVRDREMPEALEFNPSANPEASTIFQRNSQTDVVEIRRSNCTNHVSTVHFSQQYSLCSTIFLDDSTAIQHYLTMTIISVTLEIPHHITQRDADRSLSIPDEQLHSFAVSTVHITKNRNGGGSLNNYSSSIPSTPSTSQEDPQFSVPPTANTPTPVCKRSMRWSNLFTSEKGSDPDKERKAPENHADTIGSGRAIPIKQGMLLKRSGKWLKTWKKKYVTLCSNGVLTYYSSLGDYMKYIHKKEIDLQTSTIKVPGKWPSLATLACTPISSSKSDGLSKDMDTGLGDSICFSPSISSTTIPKLNPPPSPHANKKKHLKKKSTNNFMIVSATGQTWHFEATTYEERDAWVQAIQSQILASLQSCESSKSKSQLTSQSEAMALQSIQNMRGNAHCVDCETQNPKWASLNLGVLMCIECSGIHRSLGTRLSRVRSLELDDWPVELRKVMSSIGNDLANSIWEGSSQGRTKPTEKSTREEKERWIRSKYEEKLFLAPLPCTELSLGQQLLRATADEDLQTAILLLAHGSREEVNETCGEGDGCTALHLACRKGNVVLAQLLIWYGVDVMARDAHGNTALTYARQASSQECINVLLQYGCPDECV

SEQ ID NO: 235060 - protein, 663 aa, Artificial Sequence
  derived and/or modified sequence
MGNILTCRVHPSVSLEFDQQQGSVCPSESEIYEAGAGDRMAGAPMAAAVQPAEVTVEVGEDLHMHHVRDREMPEALEFNPSANPEASTIFQRNSQTDVVEIRRSNCTNHVSTVRFSQQYSLCSTIFLDDSTAIQHYLTMTIISVTLEIPHHITQRDADRSLSIPDEQLHSFAVSTVHIMKKRNGGGSLNNYSSSIPSTPSTSQEDPQFSVPPTANTPTPVCKRSMRWSNLFTSEKGSDPDKERKAPENHADTIGSGRAIPIKQGMLLKRSGKWLKTWKKKYVTLCSNGVLTYYSSLGDYMKNIHKKEIDLQTSTIKVPGKWPSLATSACTPISSSKSNGLSKDMDTGLGDSICFSPSISSTTSPKLNPPPSPHANKKKHLKKKSTNNFMIVSATGQTWHFEATTYEERDAWVQAIQSQILASLQSCESSKSKSQLTSQSEAMALQSIQNMRGNAHCVDCETQNPKWASLNLGVLMCIECSGIHHSLGTRLSRVRSLELDDWPVELRKVMSSIGNDLANSIWEGSSQGQTKPSEKSTREEKERWIRSKYEEKLFLAPLPCTELSLGQQLLWATADEDLQTAILLLAHGSREEVNETCGEGDGCTALHLACRKGNVVLAQLLIWYGVDVMARDAHGNTALTYARQASSQECINVLLQYGCPDECV

SEQ ID NO: 235061 - DNA, 1992 bp, Artificial Sequence
  derived and/or modified sequence
atgggcaacatcctgacctgcagagtgcaccccagcgtgagcctggagttcgaccagcagcagggcagcgtgtgccccagcgagagcgagatctacgaggccggcgccggcgacagaatggccggcgcccccatggccgccgccgtgcagcccgccgaggtgaccgtggaggtgggcgaggacctgcacatgcaccacgtgagagacagagagatgcccgaggccctggagttcaaccccagcgccaaccccgaggccagcaccatcttccagagaaacagccagaccgacgtggtggagatcagaagaagcaactgcaccaaccacgtgagcaccgtgagattcagccagcagtacagcctgtgcagcaccatcttcctggacgacagcaccgccatccagcactacctgaccatgaccatcatcagcgtgaccctggagatcccccaccacatcacccagagagacgccgacagaagcctgagcatccccgacgagcagctgcacagcttcgccgtgagcaccgtgcacatcatgaagaagagaaacggcggcggcagcctgaacaactacagcagcagcatccccagcacccccagcaccagccaggaggacccccagttcagcgtgccccccaccgccaacacccccacccccgtgtgcaagagaagcatgagatggagcaacctgttcaccagcgagaagggcagcgaccccgacaaggagagaaaggcccccgagaaccacgccgacaccatcggcagcggcagagccatccccatcaagcagggcatgctgctgaagagaagcggcaagtggctgaagacctggaagaagaagtacgtgaccctgtgcagcaacggcgtgctgacctactacagcagcctgggcgactacatgaagaacatccacaagaaggagatcgacctgcagaccagcaccatcaaggtgcccggcaagtggcccagcctggccaccagcgcctgcacccccatcagcaccagcaagagcaacggcctgagcaaggacatggacaccggcctgggcgacagcatctgcttcagccccagcatcagcagcaccaccagccccaagctgaaccccccccccagcccccacgccaacaagaagaagcacctgaagaagaagagcaccaacaacttcatgatcgtgagcgccaccggccagacctggcacttcgaggccaccacctacgaggagagagacgcctgggtgcaggccatccagagccagatcctggccagcctgcagagctgcgagagcagcaagagcaagagccagctgaccagccagagcaaggccatggccctgcagagcatccagaacatgagaggcaacgcccactgcgtggactgcgagacccagaaccccaagtgggccagcctgaacctgggcgtgctgatgtgcatcgagtgcagcggcatccacagaagcctgggcaccagactgagcagagtgagaagcctggagctggacgactggcccgtggagctgagaaaggtgatgagcagcatcggcaacgacctggccaacagcatctgggagggcagcagccagggccagaccaagcccagcgagaagagcaccagagaggagaaggagagatggatcagaagcaagtacgaggagaagctgttcctggcccccctgccctgcaccgagctgagcctgggccagcagctgctgagagccaccgccgacgaggacctgcagaccgccatcctgctgctggcccacggcagcagagaggaggtgaacgagacctgcggcgagggcgacggctgcaccgccctgcacctggcctgcagaaagggcaacgtggtgctggcccagctgctgatctggtacggcgtggacgtgatggccagagacgcccacggcaacaccgccctgacctacgccagacaggccagcagccaggagtgcatcaacgtgctgctgcagtacggctgccccgacaagtgcgtgtag

SEQ ID NO: 235062 - DNA, 1992 bp, Artificial Sequence
  derived and/or modified sequence
atgggcaacatcctgacctgcagagtgcaccccagcgtgagcctggagttcgaccagcagcagggcagcgtgtgccccagcgagagcgagatctacgaggccggcgccgaggacagaatggccggcgcccccatggccgccgccgtgcagcccgccgaggtgaccgtggaggtgggcgaggacctgcacatgcaccacgtgagagacagagagatgcccgaggccctggagttcaaccccagcgccaaccccgaggccagcaccatcttccagagaaacagccagaccgacgtggtggagatcagaagaagcaactgcaccaaccacgtgagcaccgtgcacttcagccagcagtacagcctgtgcagcaccatcttcctggacgacagcaccgccatccagcactacctgaccatgaccatcatcagcgtgaccctggagatcccccaccacatcacccagagagacgccgacagaagcctgagcatccccgacgagcagctgcacagcttcgccgtgagcaccgtgcacatcaccaagaacagaaacggcggcggcagcctgaacaactacagcagcagcatccccagcacccccagcaccagccaggaggacccccagttcagcgtgccccccaccgccaacacccccacccccgtgtgcaagagaagcatgagatggagcaacctgttcaccagcgagaagggcagcgaccccgacaaggagagaaaggcccccgagaaccacgccgacaccatcggcagcggcagagccatccccatcaagcagggcatgctgctgaagagaagcggcaagtggctgaagacctggaagaagaagtacgtgaccctgtgcagcaacggcgtgctgacctactacagcagcctgggcgactacatgaagtacatccacaagaaggagatcgacctgcagaccagcaccatcaaggtgcccggcaagtggcccagcctggccaccctggcctgcacccccatcagcagcagcaagagcgacggcctgagcaaggacatggacaccggcctgggcgacagcatctgcttcagccccagcatcagcagcaccaccatccccaagctgaaccccccccccagcccccacgccaacaagaagaagcacctgaagaagaagagcaccaacaacttcatgatcgtgagcgccaccggccagacctggcacttcgaggccaccacctacgaggagagagacgcctgggtgcaggccatccagagccagatcctggccagcctgcagagctgcgagagcagcaagagcaagagccagctgaccagccagagcgaggccatggccctgcagagcatccagaacatgagaggcaacgcccactgcgtggactgcgagacccagaaccccaagtgggccagcctgaacctgggcgtgctgatgtgcatcgagtgcagcggcatccacagaagcctgggcaccagactgagcagagtgagaagcctggagctggacgactggcccgtggagctgagaaaggtgatgagcagcatcggcaacgacctggccaacagcatctgggagggcagcagccagggcagaaccaagcccaccgagaagagcaccagagaggagaaggagagatggatcagaagcaagtacgaggagaagctgttcctggcccccctgccctgcaccgagctgagcctgggccagcagctgctgagagccaccgccgacgaggacctgcagaccgccatcctgctgctggcccacggcagcagagaggaggtgaacgagacctgcggcgagggcgacggctgcaccgccctgcacctggcctgcagaaagggcaacgtggtgctggcccagctgctgatctggtacggcgtggacgtgatggccagagacgcccacggcaacaccgccctgacctacgccagacaggccagcagccaggagtgcatcaacgtgctgctgcagtacggctgccccgacgagtgcgtgtag

SEQ ID NO: 235063 - DNA, 1992 bp, Artificial Sequence
  derived and/or modified sequence
atgggcaacatcctgacctgcagagtgcaccccagcgtgagcctggagttcgaccagcagcagggcagcgtgtgccccagcgagagcgagatctacgaggccggcgccggcgacagaatggccggcgcccccatggccgccgccgtgcagcccgccgaggtgaccgtggaggtgggcgaggacctgcacatgcaccacgtgagagacagagagatgcccgaggccctggagttcaaccccagcgccaaccccgaggccagcaccatcttccagagaaacagccagaccgacgtggtggagatcagaagaagcaactgcaccaaccacgtgagcaccgtgagattcagccagcagtacagcctgtgcagcaccatcttcctggacgacagcaccgccatccagcactacctgaccatgaccatcatcagcgtgaccctggagatcccccaccacatcacccagagagacgccgacagaagcctgagcatccccgacgagcagctgcacagcttcgccgtgagcaccgtgcacatcatgaagaagagaaacggcggcggcagcctgaacaactacagcagcagcatccccagcacccccagcaccagccaggaggacccccagttcagcgtgccccccaccgccaacacccccacccccgtgtgcaagagaagcatgagatggagcaacctgttcaccagcgagaagggcagcgaccccgacaaggagagaaaggcccccgagaaccacgccgacaccatcggcagcggcagagccatccccatcaagcagggcatgctgctgaagagaagcggcaagtggctgaagacctggaagaagaagtacgtgaccctgtgcagcaacggcgtgctgacctactacagcagcctgggcgactacatgaagaacatccacaagaaggagatcgacctgcagaccagcaccatcaaggtgcccggcaagtggcccagcctggccaccagcgcctgcacccccatcagcagcagcaagagcaacggcctgagcaaggacatggacaccggcctgggcgacagcatctgcttcagccccagcatcagcagcaccaccagccccaagctgaaccccccccccagcccccacgccaacaagaagaagcacctgaagaagaagagcaccaacaacttcatgatcgtgagcgccaccggccagacctggcacttcgaggccaccacctacgaggagagagacgcctgggtgcaggccatccagagccagatcctggccagcctgcagagctgcgagagcagcaagagcaagagccagctgaccagccagagcgaggccatggccctgcagagcatccagaacatgagaggcaacgcccactgcgtggactgcgagacccagaaccccaagtgggccagcctgaacctgggcgtgctgatgtgcatcgagtgcagcggcatccaccacagcctgggcaccagactgagcagagtgagaagcctggagctggacgactggcccgtggagctgagaaaggtgatgagcagcatcggcaacgacctggccaacagcatctgggagggcagcagccagggccagaccaagcccagcgagaagagcaccagagaggagaaggagagatggatcagaagcaagtacgaggagaagctgttcctggcccccctgccctgcaccgagctgagcctgggccagcagctgctgtgggccaccgccgacgaggacctgcagaccgccatcctgctgctggcccacggcagcagagaggaggtgaacgagacctgcggcgagggcgacggctgcaccgccctgcacctggcctgcagaaagggcaacgtggtgctggcccagctgctgatctggtacggcgtggacgtgatggccagagacgcccacggcaacaccgccctgacctacgccagacaggccagcagccaggagtgcatcaacgtgctgctgcagtacggctgccccgacgagtgcgtgtag

SEQ ID NO: 235064 - DNA, 1992 bp, Artificial Sequence
  derived and/or modified sequence
atgggcaatatactgacttgcagagtccacccaagcgttagcctggagttcgaccagcaacaggggagcgtttgtccatccgagagtgaaatctacgaggccggagccggggaccggatggcaggggcacctatggccgctgccgtgcagccagccgaggttaccgtggaggtgggtgaggatctccatatgcatcacgtacgcgatagagagatgcccgaggctctggaatttaaccctagcgccaaccctgaagccagtacaatttttcagcggaatagccaaaccgacgtcgtggaaatccggagatctaactgtactaatcacgtgagcacagtgcgattctctcagcagtactcattatgttcgaccattttcctggatgacagcacagccattcagcactatcttacgatgacaattattagcgtcacactggagatccctcatcacatcacgcaacgggacgccgacaggtccctcagcatcccggatgagcagcttcacagctttgcagttagtacagtgcacatcatgaaaaaacgcaatggcggagggtcgctgaacaactattcttcctccattccgtcgactcccagcacttctcaagaagatccacaattctccgtcccgcccacggccaataccccgactccagtttgtaagcgatctatgcgatggtctaatctgtttacttctgagaaaggcagcgacccagataaggaacgcaaggcacccgaaaatcacgctgacacgattggtagcggtagagctatccctatcaagcaggggatgctgttgaaaaggtccgggaagtggctgaagacatggaagaaaaagtacgtaactctttgctcaaacggagtgctgacatactatagctccctgggggattacatgaagaatattcataagaaagagatcgacctgcagacttcaacaatcaaggtgcccggaaaatggccatcattggccacaagtgcttgtactcccatatcaacatccaagtccaacggattgtctaaagatatggatactggcctgggggattccatttgttttagcccttccatctcatctacaacatcacccaagctaaacccgccacctagcccacacgcaaacaagaaaaagcaccttaaaaagaaaagcaccaataacttcatgatcgtatctgcaacgggtcaaacttggcacttcgaggccactacgtacgaggagagggacgcatgggtgcaagccatccaatcacagattctcgctagtctgcagtcatgtgagtcctccaagagcaagtcccagctgacttctcagtctaaagccatggcccttcagagtattcagaatatgcggggaaacgcgcattgtgtcgattgcgaaacccagaatccaaagtgggcaagtttgaacctcggcgtgctgatgtgtatcgagtgttctggcattcaccggagtctcggcaccagactgtctcgggtgagatctctcgagctcgacgactggccagtcgagctgagaaaagttatgtcctcgattggtaacgacctggcgaatagcatttgggaggggtcaagtcagggtcagactaagccgtcagagaagtccacccgcgaagagaaagagcggtggattcgtagtaagtatgaagaaaaactcttcctggctccactgccttgcacagagctgtcactgggtcagcagttgctgagagcaaccgccgatgaagaccttcagacagccatactgcttttggctcacgggagtcgcgaggaagtgaatgagacctgtggcgaaggagatggatgcactgccctacatctcgcctgtagaaaaggtaacgtggttttggcacagctccttatttggtatggagttgacgtgatggcccgagacgctcatggaaataccgcgctcacatacgccagacaggcttcttcacaagagtgtattaatgttctcctgcaatatggctgcccagataaatgtgtttag

SEQ ID NO: 235065 - DNA, 1992 bp, Artificial Sequence
  derived and/or modified sequence
atgggaaacattctgacctgcagggtgcatccatcggtaagtctcgagtttgatcagcaacagggctccgtgtgcccttccgagtcagaaatttacgaggccggagccgaagatcggatggcaggcgccccaatggccgcggccgtgcaacccgccgaggttaccgtggaagttggtgaggacctgcatatgcaccacgtgcgggacagagagatgcccgaggccctggagttcaacccctctgcaaaccctgaggcttccacaatttttcagcggaacagtcagaccgatgtggtggagattcgccgctccaattgcacaaaccatgtgtccactgtgcacttcagtcagcagtactctctctgtagcacaatatttctggacgactccacggccattcagcactatcttacaatgaccatcatttctgtcaccctggagatcccccaccacataacccagcgagacgccgaccggagcttaagcatacctgatgagcaacttcacagtttcgccgtgtctacagtgcatattactaagaatcgcaacggtgggggctccctgaataactacagctcctctatcccaagcacccctagtacctcacaagaggacccccagttctctgttcctccgactgctaatacacccactccggtatgtaaacgatccatgcggtggagcaacctgtttacttcggaaaaggggtctgatcccgataaagagcgcaaggcccctgagaaccacgccgatactatcggctctgggcgggccatcccgatcaagcagggcatgctgcttaagaggagcggcaagtggctgaagacctggaaaaagaaatatgtgaccttgtgcagcaacggcgtcctcacttattattcaagcctcggggactatatgaagtacatacacaagaaagagattgacctacaaacatcaacaattaaggtgccaggcaagtggccaagcctggcgactctagcatgcacacccatctcaagtagcaagtcagacgggcttagcaaggatatggatacgggtctgggcgatagtatttgtttctcgcccagcatttcgagcaccactatccccaaactaaatccacctccctcaccacatgcaaataaaaagaaacatctgaagaaaaagtctacaaacaatttcatgattgtgagcgctaccggccagacgtggcacttcgaggcgacgacctatgaggaacgcgacgcttgggtacaagctattcaatcccagatccttgcttccctccagtcttgcgagtcctcgaaatctaagagccaacttacatcacagtctgaggctatggcccttcagtccatccagaatatgagaggaaatgcccactgcgtagattgtgagactcagaacccgaagtgggcgtcgttaaaccttggcgtgctcatgtgtattgagtgtagcgggatccaccgctcactcgggactcgcctgagcagagtgcggagcctcgaacttgatgattggcctgtggaactcaggaaggtgatgtcaagcataggaaatgatctggctaattctatctgggaaggctcctctcagggaagaaccaagccaacagagaagtctacacgtgaggagaaggaacgttggataagatctaaatacgaggaaaaattgtttctggcaccattgccatgcactgaactgagtcttggacagcaattactgcgagcaactgcggacgaagacctgcagacagccattcttctgctcgctcacggatccagggaggaagtgaacgaaacatgtggcgagggggacggctgtacagccctccacttggcctgtaggaagggcaatgtggttctcgcacagcttttgatctggtatggcgtggatgtgatggcgcgcgatgcacatgggaataccgccctcacctacgcccggcaggcctcttctcaggaatgcatcaacgttctcttacaatacgggtgccctgacgaatgcgtttag

SEQ ID NO: 235066 - DNA, 1992 bp, Artificial Sequence
  derived and/or modified sequence
atgggcaacattctcacatgtcgcgtccatccttccgtgtccctggaattcgaccagcagcaaggatctgtttgccctagcgaatctgagatttacgaagcaggggctggagaccggatggcgggtgccccaatggcagcagccgttcagccggcggaagtgactgttgaagtgggcgaggatttgcatatgcaccatgtcagggacagagagatgccagaagccttggagtttaatccttccgcaaacccagaggcgtcaaccattttccagagaaatagtcagacagatgtggttgagattagaaggtccaattgcaccaaccacgtctcgactgtaaggttctcccagcaatactctctttgctctacgatcttcctcgatgactccacggctattcagcactatctgacaatgaccattatttcggtcacattggagattccccaccatattacacagagagatgccgatcggagcctgagtattcccgacgaacagctccattcctttgctgtatccacagtccatattatgaagaaacggaacggagggggctctcttaataactactcgagcagtataccaagcacgcctagcacttcccaagaagacccacaattctccgtaccaccaacagctaatacaccaactcctgtttgtaagaggagcatgagatggagtaatctgttcacctccgaaaaagggtctgatcccgataaagagcgcaaagcgcctgagaaccacgccgatacaattggctcgggcagggccattccgatcaagcagggcatgttactcaagcgatcaggcaaatggctgaagacctggaaaaagaagtacgttacgctgtgtagcaatggtgtgctaacatattattctagccttggggattacatgaagaatattcataaaaaagagatcgacctccagacatcgacaattaaggtgcccggtaagtggccatcgttggcgacgtctgcctgtacacccatcagctcaagtaaaagcaacggtctctcaaaagatatggacaccgggctgggcgattcgatctgttttagtccctccattagctccacgacgtctcctaagctgaatcccccgccaagccctcacgctaataagaaaaaacatctgaagaaaaagtctacaaataacttcatgatagtctctgcaaccgggcagacatggcatttcgaggccaccacgtacgaagaacgcgatgcctgggtacaggccatacagtcccagattctggcctcattgcagtcttgcgagtctagcaagtccaaatcacagcttacttctcagagcgaagctatggctctgcagagtattcagaatatgaggggcaacgcacattgtgtggactgtgaaacccagaaccccaagtgggcaagtctaaacttgggagtgctaatgtgcattgaatgcagcgggatccaccattccttggggaccagactctcccgggtgcgcagcttagagctggatgattggccagtcgaactgcgaaaagtaatgtcatctattggcaatgacctcgccaactccatctgggaggggtcaagtcagggccaaacgaagccctccgagaaatccacgcgtgaagagaaagagaggtggattcgatcgaaatatgaggagaaattatttttggcccccctgccgtgtactgagctgtcgttagggcagcagctactgtgggctaccgccgatgaagatctgcaaactgccattttgctgctcgcacacgggagtagggaagaggtgaacgagacatgtggggaaggtgatggttgcactgctctgcacctcgcctgtcgtaaggggaacgtggtccttgcacagcttctgatttggtatggtgtggatgtgatggcccgggatgcccacggaaacaccgcattaacgtacgcacgccaagccagttctcaggaatgcatcaatgttctcctgcaatatggatgccccgatgaatgcgtttag

SEQ ID NO: 235067 - DNA, 1992 bp, Artificial Sequence
  derived and/or modified sequence
atgggcaacatcctgacctgccgggtgcaccccagcgtgtccctggagtttgaccagcagcagggctctgtgtgccccagcgagagcgagatctatgaggccggggccggggacaggatggccggggcccccatggctgctgctgtgcagcctgctgaggtgacagtggaggtgggggaggacctgcacatgcaccacgtgcgggaccgggagatgcctgaggccctggagttcaaccccagcgccaaccctgaggccagcaccatcttccagaggaacagccagacagatgtggtggagatccgccgcagcaactgcaccaaccacgtgtccacagtgcgcttcagccagcagtacagcctgtgcagcaccatcttcctggatgacagcacagccatccagcactacctgaccatgaccatcatctctgtgaccctggagatcccccaccacatcacccagagagatgctgacaggagcctgagcatcccagatgagcagctgcacagctttgctgtgtccacagtgcacatcatgaagaagagaaatggaggcggcagcctgaacaactacagcagcagcatccccagcacccccagcaccagccaggaggacccccagttctctgtgcccccaacagccaacacccccacccctgtgtgcaagaggtccatgcgctggagcaacctcttcaccagcgagaagggcagtgaccctgacaaggagaggaaggccccagaaaatcatgctgacaccatcggcagcggccgggccatccccatcaagcagggcatgctgctgaagaggtctgggaagtggctgaagacctggaagaagaagtatgtgaccctgtgcagcaatggagtgctgacctactacagcagcctgggggactacatgaagaacatccacaagaaggagattgacctgcagaccagcaccatcaaggtgcctgggaagtggcccagcctggccaccagcgcctgcacccccatcagcaccagcaagagcaatggcctgagcaaggacatggacaccggcctgggggacagcatctgcttcagccccagcatcagcagcaccaccagccccaagctgaaccccccacccagcccccacgccaacaagaagaagcacctgaagaagaagagcaccaacaacttcatgattgtgtctgccaccggccagacctggcactttgaggccaccacctatgaggagagagatgcctgggtgcaggccatccagagccagatcctggccagcctgcagagctgtgagagcagcaagagcaagagccagctgaccagccagagcaaggccatggccctgcagagcatccagaacatgagaggaaatgcccactgtgtggactgtgagacccagaaccccaagtgggccagcctgaacctgggcgtgctgatgtgcatcgagtgcagcggcatccacaggagcctgggcacccggctgagccgggtgcgcagcctggagctggatgactggcctgtggagctgaggaaggtgatgagcagcattggaaatgacctggccaacagcatctgggagggcagcagccagggccagaccaagcccagcgagaagagcacccgggaggagaaggagcgctggatccgcagcaaatatgaggagaagctgttcctggcccccctgccctgcacagagctgagcctgggccagcagctgctgcgggccacagcagatgaggacctgcagacagccatcctgctgctggcccacggcagccgggaggaggtgaatgagacctgtggggagggagatggctgcacagccctgcacctggcctgcaggaaaggaaatgtggtgctggcccagctgctgatctggtatggagtggatgtgatggccagagatgcccacggcaacacagccctgacctacgcccggcaggccagcagccaggagtgcatcaacgtgctgctgcagtatggctgcccagacaagtgtgtgtag

SEQ ID NO: 235068 - DNA, 1992 bp, Artificial Sequence
  derived and/or modified sequence
atgggcaacatcctgacctgccgggtgcaccccagcgtgtccctggagtttgaccagcagcagggctctgtgtgccccagcgagagcgagatctatgaggccggggctgaggacaggatggccggggcccccatggctgctgctgtgcagcctgctgaggtgacagtggaggtgggggaggacctgcacatgcaccacgtgcgggaccgggagatgcctgaggccctggagttcaaccccagcgccaaccctgaggccagcaccatcttccagaggaacagccagacagatgtggtggagatccgccgcagcaactgcaccaaccacgtgtccacagtgcacttcagccagcagtacagcctgtgcagcaccatcttcctggatgacagcacagccatccagcactacctgaccatgaccatcatctctgtgaccctggagatcccccaccacatcacccagagagatgctgacaggagcctgagcatcccagatgagcagctgcacagctttgctgtgtccacagtgcacatcaccaagaacagaaatggaggcggcagcctgaacaactacagcagcagcatccccagcacccccagcaccagccaggaggacccccagttctctgtgcccccaacagccaacacccccacccctgtgtgcaagaggtccatgcgctggagcaacctcttcaccagcgagaagggcagtgaccctgacaaggagaggaaggccccagaaaatcatgctgacaccatcggcagcggccgggccatccccatcaagcagggcatgctgctgaagaggtctgggaagtggctgaagacctggaagaagaagtatgtgaccctgtgcagcaatggagtgctgacctactacagcagcctgggggactacatgaagtacatccacaagaaggagattgacctgcagaccagcaccatcaaggtgcctgggaagtggcccagcctggccaccctggcctgcacccccatcagcagcagcaagagtgatggcctgagcaaggacatggacaccggcctgggggacagcatctgcttcagccccagcatcagcagcaccaccatccccaagctgaaccccccacccagcccccacgccaacaagaagaagcacctgaagaagaagagcaccaacaacttcatgattgtgtctgccaccggccagacctggcactttgaggccaccacctatgaggagagagatgcctgggtgcaggccatccagagccagatcctggccagcctgcagagctgtgagagcagcaagagcaagagccagctgaccagccagagcgaggccatggccctgcagagcatccagaacatgagaggaaatgcccactgtgtggactgtgagacccagaaccccaagtgggccagcctgaacctgggcgtgctgatgtgcatcgagtgcagcggcatccacaggagcctgggcacccggctgagccgggtgcgcagcctggagctggatgactggcctgtggagctgaggaaggtgatgagcagcattggaaatgacctggccaacagcatctgggagggcagcagccagggccgcaccaagcccacagagaagagcacccgggaggagaaggagcgctggatccgcagcaaatatgaggagaagctgttcctggcccccctgccctgcacagagctgagcctgggccagcagctgctgcgggccacagcagatgaggacctgcagacagccatcctgctgctggcccacggcagccgggaggaggtgaatgagacctgtggggagggagatggctgcacagccctgcacctggcctgcaggaaaggaaatgtggtgctggcccagctgctgatctggtatggagtggatgtgatggccagagatgcccacggcaacacagccctgacctacgcccggcaggccagcagccaggagtgcatcaacgtgctgctgcagtatggctgcccagatgaatgtgtgtag

SEQ ID NO: 235069 - DNA, 1992 bp, Artificial Sequence
  derived and/or modified sequence
atgggcaacatcctgacctgccgggtgcaccccagcgtgtccctggagtttgaccagcagcagggctctgtgtgccccagcgagagcgagatctatgaggccggggccggggacaggatggccggggcccccatggctgctgctgtgcagcctgctgaggtgacagtggaggtgggggaggacctgcacatgcaccacgtgcgggaccgggagatgcctgaggccctggagttcaaccccagcgccaaccctgaggccagcaccatcttccagaggaacagccagacagatgtggtggagatccgccgcagcaactgcaccaaccacgtgtccacagtgcgcttcagccagcagtacagcctgtgcagcaccatcttcctggatgacagcacagccatccagcactacctgaccatgaccatcatctctgtgaccctggagatcccccaccacatcacccagagagatgctgacaggagcctgagcatcccagatgagcagctgcacagctttgctgtgtccacagtgcacatcatgaagaagagaaatggaggcggcagcctgaacaactacagcagcagcatccccagcacccccagcaccagccaggaggacccccagttctctgtgcccccaacagccaacacccccacccctgtgtgcaagaggtccatgcgctggagcaacctcttcaccagcgagaagggcagtgaccctgacaaggagaggaaggccccagaaaatcatgctgacaccatcggcagcggccgggccatccccatcaagcagggcatgctgctgaagaggtctgggaagtggctgaagacctggaagaagaagtatgtgaccctgtgcagcaatggagtgctgacctactacagcagcctgggggactacatgaagaacatccacaagaaggagattgacctgcagaccagcaccatcaaggtgcctgggaagtggcccagcctggccaccagcgcctgcacccccatcagcagcagcaagagcaatggcctgagcaaggacatggacaccggcctgggggacagcatctgcttcagccccagcatcagcagcaccaccagccccaagctgaaccccccacccagcccccacgccaacaagaagaagcacctgaagaagaagagcaccaacaacttcatgattgtgtctgccaccggccagacctggcactttgaggccaccacctatgaggagagagatgcctgggtgcaggccatccagagccagatcctggccagcctgcagagctgtgagagcagcaagagcaagagccagctgaccagccagagcgaggccatggccctgcagagcatccagaacatgagaggaaatgcccactgtgtggactgtgagacccagaaccccaagtgggccagcctgaacctgggcgtgctgatgtgcatcgagtgcagcggcatccaccacagcctgggcacccggctgagccgggtgcgcagcctggagctggatgactggcctgtggagctgaggaaggtgatgagcagcattggaaatgacctggccaacagcatctgggagggcagcagccagggccagaccaagcccagcgagaagagcacccgggaggagaaggagcgctggatccgcagcaaatatgaggagaagctgttcctggcccccctgccctgcacagagctgagcctgggccagcagctgctgtgggccacagcagatgaggacctgcagacagccatcctgctgctggcccacggcagccgggaggaggtgaatgagacctgtggggagggagatggctgcacagccctgcacctggcctgcaggaaaggaaatgtggtgctggcccagctgctgatctggtatggagtggatgtgatggccagagatgcccacggcaacacagccctgacctacgcccggcaggccagcagccaggagtgcatcaacgtgctgctgcagtatggctgcccagatgaatgtgtgtag

SEQ ID NO: 235070 - DNA, 1992 bp, Artificial Sequence
  derived and/or modified sequence
atgggcaacatcctgacctgccgggtgcaccccagcgtgagcctggagttcgatcaacaacaagggtctgtttgtcctagcgagtcggaaatctatgaagctggggcaggcgatcgaatggctggggcccccatggcagccgcagttcagcccgctgaggtgacagtggaagtaggcgaggacctgcacatgcaccacgtgcgagacagagagatgcctgaagcactcgagttcaatccatccgcaaaccccgaggcttcaacaatctttcagcggaacagccagaccgacgtagtcgagatccggcgatcaaactgtactaaccatgtgtcaaccgtcaggttttctcagcagtatagtctgtgctccacaatttttctcgacgattccaccgccatacagcactacctcaccatgactattattagcgtgacccttgagattcctcatcacatcacccagagggacgccgatagaagcttgtctataccagatgagcagcttcactcttttgccgtgtccaccgtccatatcatgaagaaaaggaacggtggtgggagcctgaataattacagcagcagtataccgtccactccgagcacaagccaggaggatccccaatttagcgtacccccaacagctaacaccccgacccctgtgtgtaagcgctccatgcgttggtccaatctgttcaccagtgagaaagggagcgatcccgataaagaaaggaaagcacccgaaaaccatgccgacactatcggttccgggagggctattccaattaaacagggtatgctcctgaaacggtccggcaaatggctgaagacatggaagaagaaatacgtgacgctctgttctaacggggttcttacttactacagcagccttggtgattacatgaagaacatccacaagaaggaaattgacctgcagacttccaccatcaaggtacccggcaaatggccctcccttgctacaagcgcctgtactcctatctccacctcgaagagtaatggactcagtaaagacatggacaccggccttggtgatagtatatgtttttcaccatcaatttcttcgactacttctcccaagctgaaccccccgcctagtccgcacgcaaataagaagaaacacctcaaaaaaaagagcaccaacaactttatgatcgtatctgctaccggacagacttggcattttgaggctacaacctatgaagaaagggatgcgtgggtgcaggccattcagtcacaaatcctggctagcctccagtcctgcgaatcatccaagtctaagtctcagctgacttcccaaagtaaagctatggctctgcagtcaatccaaaatatgagaggaaacgctcactgtgtggactgcgagacccagaatcccaaatgggctagcctgaatctcggcgtcttgatgtgtatcgagtgcagcggcatacacaggtctttggggacccgactctccagagtgcgctcacttgagttagacgattggccagtagagttgcggaaagtgatgagctcaattgggaatgacttggctaatagcatttgggaaggcagcagccagggccagacaaagccatctgagaagagcacccgggaagagaaggaacggtggatccgctccaagtacgaagagaagctattcctggcacccctcccatgcacggagctgtctctcgggcaacagctattaagagctacagctgacgaggacctccagacagcgatcttgttactggctcatgggtcgagggaggaggtaaatgaaacatgcggggagggtgatggttgtactgccctgcatctcgcgtgccgcaagggcaatgtggttctggcacagcttttaatctggtatggcgtagacgtcatggcacgcgacgcgcatggaaacaccgctcttacttacgctcgccaggcttcttctcaagagtgcatcaatgtccttctacagtatggctgtcccgacaaatgcgtttag

SEQ ID NO: 235071 - DNA, 1992 bp, Artificial Sequence
  derived and/or modified sequence
atgggcaacatcctgacctgccgggtgcaccccagcgtgagcctggagttcgatcaacagcagggctccgtgtgccccagcgaatctgagatttacgaagcaggggctgaagatcgcatggctggggctcctatggcagccgcagttcagcccgccgaggtgactgtagaggtgggagaagatttgcatatgcaccatgtcagagatcgagagatgccggaagccctggaatttaacccaagcgccaacccggaggcatcgacgatttttcagcgaaattcgcagacagatgtcgtggaaatacgcaggagcaactgcaccaaccacgtgagcaccgtgcacttcagccagcagtatagtctgtgtagtactattttcctggatgactctactgccattcaacactatctgacgatgactattatctcggtgactcttgaaatccctcatcacatcacacagagagacgctgataggagcctctccattcccgacgagcagctgcacagctttgcagtttccacagttcacatcactaagaaccggaatggcggaggctcactgaacaactatagttctagtattcctagcacccccagtacctctcaagaagatccccagttcagtgttccgccgacagccaacactccgactccagtatgcaagaggagtatgcgatggagcaatctgttcaccagcgagaaggggagtgaccctgacaaagaacgtaaggcaccagagaaccacgccgacaccatagggagcggaagggcaattccaataaagcaaggcatgctcctgaagcgctccgggaaatggctcaaaacctggaagaagaaatatgtcaccctgtgctctaatggtgtactgacgtattactcatctctcggagactacatgaaatatattcataaaaaagagatcgacctgcagaccagtaccatcaaagtcccgggcaagtggccatccttagccacactagcatgtacccccatctcaagctcaaaatctgatggactctccaaggatatggacacagggctcggggatagcatctgtttctcaccatctatttcttcaacgacaatccccaagttgaacccccccccatcacctcatgctaacaaaaaaaagcatctaaaaaagaaaagtacaaacaacttcatgatcgtgagtgccactggccaaacctggcacttcgaagcaaccacatacgaagaacgcgatgcctgggtgcaagctattcagtctcagatattagcatccttacagagttgtgagtctagcaagtcgaagtcacagttaacatctcagagcgaggcaatggcattacagagcatccagaatatgaggggcaatgcccactgtgtggactgcgaaacacagaaccctaagtgggcttccctgaatctgggagtgctcatgtgtattgagtgcagcgggatacaccgctcactgggcacaaggctcagccgagtgcggtccctggagcttgatgactggcccgtggagttgcggaaggtaatgtctagcatcgggaatgacttagccaatagcatctgggaggggtccagccagggccgtacaaagcccaccgagaagtctacgcgtgaagagaaggagcgttggattcggtcgaagtatgaggaaaagctgttccttgctcccctgccctgcaccgagttgagcctcgggcaacaactcttgagggctaccgctgatgaagacctgcagaccgccattctgttgctagcgcacgggtctcgcgaagaagtaaatgagacatgtggagaaggcgacggttgtaccgcattgcacctggcttgccgcaaaggaaacgtagtgctggcacagctgctaatctggtacggcgtggacgtgatggctagagatgcccacggcaatactgccctgacgtatgcacgtcaggcaagcagtcaggaatgtatcaatgtgctcttgcagtacggctgcccagatgagtgcgtgtag

SEQ ID NO: 235072 - DNA, 1992 bp, Artificial Sequence
  derived and/or modified sequence
atgggcaacatcctgacctgccgggtgcaccccagcgtgagcctggagtttgatcagcagcagggtagcgtgtgcccttcggagtctgaaatatacgaggcgggcgcaggagatagaatggccggagccccaatggctgccgctgtgcagccggcggaagtcactgttgaagtaggagaggatttgcacatgcaccacgttcgcgatcgagagatgcccgaggccctggagttcaacccctccgccaaccctgaagcatctacaatctttcagagaaatagtcaaacagacgtagtggaaattcgcaggagcaactgcacaaatcacgtttccaccgttcgattttcccagcagtactccctgtgcagcactatcttcttggatgattccaccgccatacagcactatttgaccatgacaatcatctcagtcactctggagatcccgcaccatattactcaacgggatgccgacagatcactctctataccggatgagcagctgcactccttcgcggtcagcactgttcacattatgaaaaagcgcaatggaggcggcagtttgaataactactcgtctagcattcccagtactcctagtacgtcgcaagaagacccacaattctcggtgcctcctaccgcaaatacacccactcccgtttgtaagcgctcaatgcgctggtccaacttgtttacttccgaaaagggatctgaccccgataaggaaaggaaggctccagagaaccacgcagacacgattggtagtggcagggctatcccgatcaagcaagggatgctgctcaagcggagcggcaaatggttgaagacctggaaaaagaagtatgttacactctgcagcaacggagtgctgacttattacagtagcctgggagactacatgaaaaatatccataagaaggaaattgacttacagaccagcaccattaaggtaccaggtaaatggccgtcattagccacgagtgcgtgtactcctatctcctccagcaagtccaacggtctttccaaggacatggatacagggttaggcgatagcatttgcttctccccctcaatctccagtacgacatctcctaaattaaacccccccccaagccctcacgccaacaagaagaagcacctaaaaaagaagtccaccaataattttatgatcgtcagcgccaccggacagacctggcacttcgaggccaccacctatgaggagcgagatgcctgggtgcaggcaattcagagccagatccttgcttctctccagtcctgcgagtcctcgaaatccaaatcccagctgacttcccagagcgaagcgatggctctccagtccatccagaacatgcgcgggaatgcacactgtgtcgactgcgaaactcagaatcccaagtgggctagtctgaacttaggcgtgctgatgtgcattgaatgctctgggatacaccacagtcttgggaccaggttaagccgtgtgaggtcccttgagcttgacgattggccagtggaattacggaaggttatgtcctcaatcggcaatgacctggctaatagtatatgggaaggtagctctcagggacagacaaaacctagcgagaagtcgactagggaggagaaagagcggtggattagaagtaagtacgaagagaagctctttctcgcccctctgccatgcaccgagctcagcctgggccagcagctcctgtgggcgacagctgacgaagacctgcagacggcgatccttttgctagctcacggttcccgcgaagaggtcaacgagacctgcggcgagggcgacggatgtacagccctccacttagcatgtcgcaaaggcaatgtagtcctcgcccaactgctcatatggtatggcgtggatgtcatggcccgcgatgcacatggtaacactgcactcacctacgctcggcaagcttcttctcaagaatgcatcaacgtgctgctccagtacggctgtcctgatgaatgcgtgtag

SEQ ID NO: 235073 - DNA, 2439 bp, Artificial Sequence
  derived and/or modified sequence
gtgggcaggcgaggagcgggaagaccatctctgcaagtgcagcatagcctcggcctaggacagcgggagtgcgtggccaaagctgtgagcagaggcacaggtggtggcagacagtagaggcgccccatggggaacatactgacctgtcgtgtgcaccctagcgtcagcctcgagtttgaccagcagcaggggtcggtgtgtccctctgaatctgagatctatgaggcaggagctggggacaggatggcaggagcgcccatggctgctgctgtacagcctgctgaggtgactgttgaagttggtgaggacctccacatgcaccacgttcgtgaccgggagatgcctgaagctttggagtttaacccttctgccaatccagaggcaagcacaatattccagaggaactctcaaacagatgttgtagaaataagaagaagcaactgtacaaaccatgtatctactgtgcgtttcagtcaacaatacagcttgtgttcgacaatattccttgatgacagcacagccatccagcattatcttacaatgacaataatatctgtgaccttggagatacctcatcatatcacacaaagagatgcagatagatctttgagcatacctgatgaacagttacactcatttgcggtttccaccgtgcacattatgaagaaaagaaatggaggtgggagtttaaataactattcctcctccattccatcgactcccagcaccagccaggaggaccctcagttcagtgttcctcccactgccaacacacccacccccgtttgcaagcggtccatgcgctggtccaacctgtttacatctgagaaagggagtgacccagacaaagagaggaaagccccggagaatcatgctgacaccatcgggagcggcagagccatccccattaaacagggcatgctcttaaagcgaagtgggaaatggctgaagacatggaaaaagaaatacgtcaccctgtgttccaatggcgtgctcacctattattcaagcttaggtgattatatgaagaatattcataaaaaagagattgaccttcagacatctaccatcaaagtcccaggaaagtggccatccctagccacatcggcctgcacacccatctccacctctaaaagcaatggcctatccaaggacatggacaccgggctgggtgactccatatgcttcagccccagtatctccagcaccaccagccccaagctcaacccgcccccctctcctcatgccaataaaaagaaacacctaaagaagaaaagcaccaacaactttatgattgtgtctgccactggccaaacgtggcactttgaagccacgacgtatgaggagcgggatgcctgggtccaagccatccagagccagatcctggccagcctgcagtcatgcgagagcagtaaaagcaagtcccagctgaccagccagagcaaggccatggccctgcagtcgatccaaaacatgcgtgggaacgcccactgtgtggactgtgagacccagaatcctaagtgggccagtttgaacttgggagtcctcatgtgtattgaatgctcaggaatccaccgcagtcttggcacccgcctttcccgtgtgcgatctctggagctggatgactggccagttgagctcaggaaggttatgtcatctattggcaatgacctagccaacagcatctgggaagggagcagccaggggcagacaaaaccctcagaaaagtccacgagggaagagaaggaacggtggatccgttccaaatatgaggagaagctctttctggccccactaccctgcactgagctgtccctgggccagcagctgctgcgggccaccgctgatgaggacctgcagacagccatcctgctgctggcacatggctcccgtgaggaggtgaacgagacctgtggggagggagacggctgcacggcgctccatctggcctgccgcaaggggaatgtggtcctggcgcagctcctgatctggtacggggtggacgtcatggcccgagatgcccacgggaacacagcgctgacctacgcccggcaggcctccagccaggagtgcatcaacgtgcttctgcagtacggctgccccgacaagtgtgtgtagtatctgttttatttgactgcagtctccttggtgcaaaaacaaaatgggaaaaataaggataactcagaatttcaaaaggaaatcacaaattcagctaataatagcattttcagtacttttcgtaaactaagtaaatacacaaaatgttgatttttctgaccataagacgtattttatgtccttttgccaaggtggatttgttagtctcaggccctcctggccacattgcccaagtcacacaggcttctgtattatgtatttagataaaatgtgtgaaaatatatttgaaataaagttcataaatatgcattgatttttgta

SEQ ID NO: 235074 - DNA, 2420 bp, Artificial Sequence
  derived and/or modified sequence
gtaggcaggcgaggagcgggaagaccatctctgcaagtgcagcatagcctcggcctaggacagcgggagtgcgtggccaaagctgtgagcagaggcacaggtggtggcagacagtagaggcgccccatggggaacatactgacctgtcgtgtgcaccctagcgtcagcctcgagtttgaccagcagcaggggtcggtgtgtccctctgaatctgagatctatgaggcaggagctgaggacaggatggcaggagcgcccatggctgctgctgtacagcctgctgaggtgactgttgaagttggtgaggacctccacatgcaccacgttcgtgaccgggagatgcctgaagctttggagtttaacccttctgccaatccagaggcaagcacaatattccagaggaactctcaaacagatgttgtagaaataagaagaagcaactgtacaaaccatgtatctactgtgcatttcagtcaacaatacagcttgtgttcgacaatattccttgatgacagcacagccatccagcattatcttacaatgacaataatatctgtgaccttggagatacctcatcatatcacacaaagagatgcagatagatctttgagcatacctgatgaacagttacactcatttgcggtttccaccgtgcacattacgaagaacagaaatggaggtgggagtttaaataactattcctcctccattccatcgactcccagcaccagccaggaggaccctcagttcagtgttcctcccactgccaacacacccacccccgtttgcaagcggtccatgcgctggtccaacctgtttacatctgagaaagggagtgacccagacaaagagaggaaagccccggagaatcatgctgacaccatcgggagcggcagagccatccccattaaacagggcatgctcttaaagcgaagtgggaaatggctgaagacatggaaaaagaaatacgtcaccctgtgttccaatggtgtgctcacctattattcaagcttaggtgattatatgaagtatattcataaaaaagagattgaccttcagacatctaccatcaaagtcccaggaaagtggccatccctagccacattggcctgcacacccatctccagctctaaaagcgatggcctatccaaggacatggacaccgggctgggtgactccatatgcttcagccccagtatctccagcaccaccatccccaagctcaacccgcccccctctcctcatgccaataaaaagaaacacctaaagaagaaaagcaccaacaactttatgattgtgtctgccactggccaaacgtggcactttgaagccacgacatatgaggagcgggatgcatgggtccaagccatccagagccagatcctggccagcctgcagtcatgcgagagcagtaaaagcaagtcccagctgaccagccagagcgaggccatggccctgcagtcgatccaaaacatgcgtgggaacgcccactgtgtggactgtgagacccagaatcctaagtgggccagtttgaacttgggagtcctcatgtgtattgaatgctcaggtatccaccgcagtcttggcacccgcctttcccgtgtgcgatctctggagctggatgactggccagttgagctcaggaaggttatgtcatctattggcaatgacctagccaacagcatctgggaagggagcagccaggggcggacaaaacccacagaaaagtccacgagggaagagaaggaacggtggatccgttccaaatatgaggagaagctctttctggccccactaccctgcactgagctgtccctgggccagcagctgctgcgggccaccgctgatgaggacctgcagacagccatcctgctgctggcacatggctcccgtgaggaggtgaacgagacctgtggggagggagacggctgcacggcgctccatctggcctgccgcaaggggaatgtggtcctggcgcagctcctgatctggtacggggtggacgtcatggcccgagatgcccacgggaacacagcgctgacctacgcccggcaggcctccagccaggagtgcatcaacgtgcttctgcagtacggctgccccgacgagtgtgtgtagtatctgttttatttgactgcagtctccttggtgcaaaaacaaaatgggaaaaataaggataactcagaatttcaaaaggaaatcacaaattcagctaataatagcattttcagtacttttcgtaaactaagtaaatacacaaaatgttgatttttctgaccataagacgtattttatgtccttttgccaaggtggatttgttagtctcaggccctcctggccacattgcccaagtcacacaggcttctgtattatgtatttagataaaatgtgtgaaaatatatttgaaataaagttcataa

SEQ ID NO: 235075 - DNA, 2420 bp, Artificial Sequence
  derived and/or modified sequence
gtgggcaggcgaggagcgggaagaccatctctgcaagtgcagcatagcctcggcctaggacagcgggagtgcgtggccaaagctgtgagcagaggcacaggtggtggcagacagtagaggcgccccatggggaacatactgacctgtcgtgtgcaccctagcgtcagcctcgagtttgaccagcagcaggggtcggtgtgtccctctgaatctgagatctatgaggcaggagctggggacaggatggcaggagcgcccatggctgctgctgtacagcctgctgaggtgactgttgaagttggtgaggacctccacatgcaccacgttcgtgaccgggagatgcctgaagctttggagtttaacccttctgccaatccagaggcaagcacaatattccagaggaactctcaaacagatgttgtagaaataagaagaagcaactgtacaaaccatgtatctactgtgcgtttcagtcaacaatacagcttgtgttcgacaatattccttgatgacagcacagccatccagcattatcttacaatgacaataatatctgtgaccttggagatacctcatcatatcacacaaagagatgcagatagatctttgagcatacctgatgaacagttacactcatttgcggtttccaccgtgcacattatgaagaaaagaaatggaggtgggagtttaaataactattcctcctccattccatcgactcccagcaccagccaggaggaccctcagttcagtgttcctcccactgccaacacacccacccccgtttgcaagcggtccatgcgctggtccaacctgtttacatctgagaaagggagtgacccagacaaagagaggaaagccccggagaatcatgctgacaccatcgggagcggcagagccatccccattaaacagggcatgctcttaaagcgaagtgggaaatggctgaagacatggaaaaagaaatacgtcaccctgtgttccaatggcgtgctcacctattattcaagcttaggtgattatatgaagaatattcataaaaaagagattgaccttcagacatctaccatcaaagtcccaggaaagtggccatccctagccacatcggcctgcacacccatctccagctctaaaagcaatggcctatccaaggacatggacaccgggctgggtgactccatatgcttcagccccagtatctccagcaccaccagccccaagctcaacccgcccccctctcctcatgccaataaaaagaaacacctaaagaagaaaagcaccaacaactttatgattgtgtctgccactggccaaacgtggcactttgaagccacgacatatgaggagcgggatgcctgggtccaagccatccagagccagatcctggccagcctgcagtcatgcgagagcagtaaaagcaagtcccagctgaccagccagagcgaggccatggccctgcagtcgatccaaaacatgcgtgggaatgcccactgtgtggactgtgagacccagaatcctaagtgggccagtttgaacttgggagtcctcatgtgtattgaatgctcaggaatccaccacagtcttggcacccgcctttcccgtgtgcgatctctggagctggatgactggccagttgagctcaggaaggttatgtcatctattggcaatgacctagccaacagcatctgggaagggagcagccaggggcagacaaaaccctcagaaaagtccacgagggaagagaaggaacggtggatccgttccaaatatgaggagaagctctttctggccccactaccctgcactgagctgtccctgggccagcagctgctgtgggccaccgctgatgaggacctgcagacagccatcctgctgctggcacatggctcccgtgaggaggtgaacgagacctgtggggagggagacggctgcacggcgctccatctggcctgccgcaaggggaatgtggtcctggcgcagctcctgatctggtacggggtggacgtcatggcccgagatgcccacgggaacacagcgctgacctacgcccggcaggcctccagccaggagtgcatcaacgtgcttctgcagtacggctgccccgacgagtgtgtatagtatctgttttatttgactgcagtctccttggtgcaaaaacaaaatgggaaaaataaggataactcagaatttcaaaaggaaatcacaaattcagctaataatagcattttcagtacttttcgtaaactaagtaaatacacaaaatgttgatttttctgaccataagacgtattttatgtccttttgccaaggtggatttgttagtctcaggccctcctggccacattgcccaagtcacacaggcttctgtattatgtatttagataaaatgtgtgaaaatatatttgaaataaagttcataa

SEQ ID NO: 235076 - DNA, 1992 bp, Artificial Sequence
  derived and/or modified sequence
atgggaaacattctcacatgccgtgtgcacccctccgtctccctggagttcgatcagcagcaggggtcagtctgtcctagcgaatcagagatctacgaagccggagctggggatcgcatggcgggagcgccaatggcggcagctgtacagcctgcggaggttactgtggaggtaggggaagaccttcatatgcatcacgtgagagatcgcgagatgcccgaagccctggagttcaatccaagcgccaatcctgaggcatccacaattttccagaggaactcacaaactgacgttgttgaaattaggcggagtaactgtaccaatcacgtgagtaccgttcgcttcagtcagcaatactctctgtgcagcaccatattcttggatgacagcacagctatccagcattacctgaccatgacaatcattagcgtgacactggagattcctcaccacattacacagagagacgccgatagatctctcagcatcccagacgaacagctgcactcctttgctgtgtctaccgtccacatcatgaaaaaacgtaacgggggagggtccttgaacaattacagttcatccatacctagcaccccctcaacttcccaggaggatccacagttcagcgttcctccaactgccaacactcccaccccagtgtgtaagagatccatgcggtggtccaacttgtttaccagtgagaagggctccgatcccgacaaagagcgcaaagcccctgagaatcacgcggatacgatcggttctggaagggcaattccgatcaagcagggcatgctcctgaagaggtcaggaaagtggttaaagacctggaaaaaaaagtatgtcactctctgttctaacggtgtgctgacctattacagttcgctgggggattatatgaagaatatccacaagaaggaaatcgatctgcaaacatctaccattaaagtgcccggtaagtggccctcactggctacctcggcctgcacacctatttctacaagtaagtcaaatggcttgagcaaggatatggacacaggcttaggagattctatctgctttagccccagcatcagctctacaactagccccaagctgaacccacctccctccccccacgctaataagaaaaagcacctaaagaaaaaaagtacaaataactttatgatagtgagcgctacagggcagacctggcacttcgaggccacaacttatgaggagagggacgcatgggtgcaagcaatacaatcacagatccttgcaagccttcaatcgtgcgagtcaagtaagagtaagagccagctgacaagccagtccaaggctatggcacttcagagcatccaaaacatgaggggaaatgctcactgcgttgactgcgaaacacaaaatcccaagtgggcaagtctgaacctaggcgtcctgatgtgcatagaatgtagcggaattcaccgctccctgggaacgaggctcagcagagtccgttcactggagctggatgattggcctgtggagctgaggaaggtgatgagctccatagggaatgacctggcaaacagcatttgggagggatcatctcagggacaaactaagccttcggaaaagtcgacccgcgaagagaaagagcggtggatccgttccaagtacgaggaaaagttgttccttgctcccctgccctgtaccgaactgtccctaggtcaacagctactcagagctacagctgatgaggatctgcagactgctatcctacttcttgcccacggaagcagggaagaagtaaatgaaacctgcggagaaggggacgggtgtaccgcacttcacttagcttgcaggaaaggcaacgtggtgttggctcagctgctgatttggtatggcgtggacgtaatggcacgagacgcccatggtaacaccgctcttacttatgctaggcaagcgtctagccaagaatgcattaatgtgcttttgcaatacggctgcccggacaagtgcgtttag

SEQ ID NO: 235077 - DNA, 1992 bp, Artificial Sequence
  derived and/or modified sequence
atgggcaacatcctcacgtgcagggttcacccctcagtgtctctagaatttgaccagcaacagggatccgtttgcccctccgagagtgagatctacgaggctggcgctgaggacaggatggcaggtgcccctatggccgctgcagtgcaacccgctgaggtaaccgtggaagtgggagaagatctccatatgcatcacgtccgggaccgtgagatgccagaagctttggagttcaacccgtccgccaatccagaggcaagtaccatatttcagcgtaactctcagactgatgtggtggagattcggaggtccaactgcacaaaccacgtttccaccgtacatttttctcagcaatattccctgtgctccactatttttctggacgattctaccgccatccaacactatctcacaatgacaatcattagcgtgacactagagatcccacaccatattacgcagcgggatgcagatcgatcactgtctatcccagatgagcagctgcacagctttgcggtcagtactgtgcacattacaaaaaatcgcaatggtggcggtagtctgaacaactactcgtcaagtatcccatccacccccagcaccagccaggaggatccccagttctctgtgccacctactgctaacacaccaactcccgtttgtaaacgcagcatgcgatggtctaacctctttaccagcgagaaaggttccgaccccgataaagagaggaaggcgccagagaaccatgcggacactatcgggtctggacgagctatccctataaaacaggggatgctcctgaaacgatccggtaaatggcttaagacctggaagaaaaaatatgtaacgttgtgttcaaacggcgtgctaacgtactattcatctctgggcgactatatgaagtatatccataaaaaggagatagacttgcagacgtcaaccatcaaagtgccgggaaagtggcccagtctggccactctggcatgcacacccatcagctcctccaagagcgacggtctgtctaaggacatggatactgggctcggcgattctatctgttttagtccatcaatctcttctacaaccatccccaagctcaatcccccaccaagtcctcatgctaacaaaaaaaaacatctgaagaagaaatccacaaataatttcatgattgtctccgctaccggtcaaacatggcatttcgaggctactacttacgaagagcgggacgcatgggttcaggctatccagtcacagattttagcaagccttcagtcctgtgagtcttctaagtctaagtcccagctaacgtctcagtcggaggcgatggctctgcagtcaattcagaacatgcgcggaaatgcacactgcgtcgactgcgaaacacaaaatccaaagtgggcttcactgaatctaggagttctcatgtgtattgagtgctccggcatacacaggagtctcggcacacggttatctagggttagaagtctggagctggacgactggcccgtggaactcaggaaggtgatgtcgtctatcggaaatgacctggccaatagcatctgggaaggctcttctcagggtagaactaagccaactgagaagtctacacgggaggagaaggaacgctggattagaagcaaatatgaggaaaaattgttcttagctccactgccatgcactgaactgtccttgggtcagcagcttctgagagccaccgcagacgaagacctacaaaccgccatcttactgctggcccacggaagcagggaagaagtcaacgagacttgcggagaaggagacgggtgtacagccctgcatcttgcctgtcgcaagggcaacgtagttcttgcgcaacttctcatctggtatggagtggacgtgatggcacgagatgcacacgggaataccgcactgacatatgctcgacaggcaagttctcaagaatgcatcaacgtgctactccagtatggatgtcctgatgaatgtgtttag

SEQ ID NO: 235078 - DNA, 1992 bp, Artificial Sequence
  derived and/or modified sequence
atggggaacatcctcacttgccgcgttcacccgtccgtcagccttgaatttgatcagcagcagggcagtgtgtgccccagtgaatccgaaatttatgaagccggagctggcgacaggatggcaggcgcacccatggccgctgccgtgcagcccgctgaggtcactgtagaggtcggagaggatctacatatgcaccacgtgagagacagagagatgcccgaggctcttgagtttaatccctcagctaatccagaagccagcaccattttccagaggaactctcagaccgacgttgtggagatccggagatcgaattgcaccaatcacgtctccaccgtgcgcttttctcagcaatacagtttgtgttcaaccatattcctggacgatagtaccgctattcagcactatctgactatgacaattatttccgtgaccctggaaatcccccaccacattacacagcgcgatgctgaccggtctctgtctatacctgatgagcagttgcactctttcgcagtatccactgtccacatcatgaagaagcgcaacgggggtggctctctgaacaactattcctcctcaataccaagtactccttcaactagtcaagaggacccacagttctctgtgccgccaaccgctaacaccccaaccccagtgtgtaaacggagcatgcggtggagcaatctctttacctcagaaaaaggcagtgatcctgacaaggagcgtaaggctccagagaatcatgccgataccattggctccggtagagctatccctattaagcagggaatgctgctgaagaggtcagggaaatggttgaagacttggaaaaaaaagtatgtgaccctctgctctaatggagttctgacttattatagcagcttgggagactatatgaagaatatccacaagaaggaaattgatctgcaaacctctaccattaaagtgccagggaagtggccttcactagccacatccgcatgtactcctatctcaagcagtaagtccaatgggctctcaaaggacatggacacaggccttggagattccatctgcttctcgccctcaatttcatcaaccaccagccctaagctgaatccaccacctagcccacatgctaacaagaaaaagcacctcaagaaaaaaagcaccaacaactttatgattgtatcagcaaccggacaaacttggcattttgaggcaaccacatatgaggagcgcgacgcctgggtgcaggcaatccagtcccaaattctggccagcttacagtcctgtgaaagtagcaaatcaaagtctcagctgacctctcagtcagaggcaatggccctgcagagcatccagaatatgcgcggtaatgcccactgtgtggactgcgagactcagaaccccaagtgggcttctctcaacctcggggttctgatgtgtatagagtgcagcggtatccaccattccctaggcaccagattgagcagggttcgttctctggaacttgatgactggcccgtggaactgaggaaggtgatgtcatccatcggaaacgacctggcaaattctatatgggagggatcatctcaagggcagactaaaccaagtgaaaagagcaccagagaggagaaagaaaggtggatccgcagcaaatacgaggagaaactgttcctcgcccctctaccttgcacagagctgtcgctcggacaacagctcctgtgggctactgctgacgaagacctccaaaccgccattcttttgctggcccatggatcgagagaggaggtgaatgaaacctgtggcgaaggagacggttgtaccgcactccacctggcttgccgcaagggcaacgtggttctcgcccagctgctcatatggtatggcgtcgacgtcatggcaagggatgcgcatggaaataccgccctgacttatgcaaggcaagctagctcccaggagtgcatcaatgtgctcttgcaatacggctgccctgatgagtgcgtgtag

SEQ ID NO: 235079 - protein, 637 aa, Artificial Sequence
  derived and/or modified sequence
MQRDESSPFPPLFSLTSSQVSDRCDYVFVNGKEMKGKVNVVVNFTYQHLSSPLEMTVWVPRLPLQIEVSDTELNQIKGWRVPIVSSRRPAGDSEEEEDDERRGRGCTLQYQHAMVRVLTQFVAEAAGPGGHLAHLLGSDWQVDITELINDFMQVEEPRIAKLQGGQILMGQELGMTTIQILSPLSDTILAEKTITVLDEKVTITDLGVQLVTGLSLSLQLSPGSNRAIFATAVAQELLQRPKQEAAISCWVQFSDGSVTPLDIYDGKDFSLMATSLDEKVVSIHQDPKFKWPIIAAETEGQGTLVKVEMVISESCQKSKRKSVLAVGTANIKVKFGQNDANPNTSDSRHTGAGVHMENNVSDRRPKKPSQEWGSQEGQYYGSSSMGLMEGRGTTTDRSILQKKKGQESLLDDNSHLQTIPSDLTSFPAQVDLPRSNGEMDGNDLMQASKGLSDLEIGMYALLGVFCLAILVFLINCVTFALKYRHKQVPFEEQEGMSHSHDWVGLSNRTELLENHINFASSQDEQITAIDRGMDFEESKYLLSTNSQKSINGQLFKPLGPIIIDGKDQKSEPPTSPTSKRKRVKFTTFTAVSSDDEYPTRNSIVMSSEDDIKWVCQDLDPGDCKELHNYMERLHENV

SEQ ID NO: 235080 - protein, 1099 aa, Artificial Sequence
  derived and/or modified sequence
MCPSEMGTLWHHWSPVLISLAALFSKVTEGRGILESIQRFSLLPTYLPVTYHINNADVSFFLKEANQDIMRNSSLQSRVESFLIYKSRRLPVLNASYGPFSIEQVVPQDLMLPSNPFGFTNKFSLNWKLKAHILRDKVYLSRPKVQVLFHIMGRDWDDRSAGEKLPCLRVFAFRETREVRGSCRLQGDLGLCVAELELLSSWFSPPTVVAGRRKSVDQPEGTPVELYYTVHPGGERGDCVREDARRSNGIRTGHSDIDESGPPLQRIGSIFLYQTHRKPSLRELRLDNSVAIHYIPKTVRKGDVLTFPVSISRNSTEDRFTLRAKVKKGVNIIGVRASSPSIWDVKERTDYTGKYAPAVIVCQKKAAGSENSADGASYEVMQIDVEVEEPGDLPATQLVTWQVEYPGEITSDLGVSKIYVSPKDLIGVVPLAMEAEILNTAILTGKTVAVPVKVVSVEDDGTVTELLESVECRSSDEDVIKVSDRCDYVFVNGKEMKGKVNVVVNFTYQHLSSPLEMTVWVPRLPLQIEVSDTELNQIKGWRVPIVSSRRPAGDSEEEEDDERRGRGCTLQYQHAMVRVLTQFVAEAAGPGGHLAHLLGSDWQVDITELINDFMQVEEPRIAKLQGGQILMGQELGMTTIQILSPLSDTILAEKTITVLDEKVTITDLGVQLVTGLSLSLQLSPGSNRAIFATAVAQELLQRPKQEAAISCWVQFSDGSVTPLDIYDGKDFSLMATSLDEKVVSIHQDPKFKWPIIAAETEGQGTLVKVEMVISESCQKSKRKSVLAVGTANIKVKFGQNDANPNTSDSRHTGAGVHMENNVSDRRPKKPSQEWGSQEGQYYGSSSMGLMEGRGTTTDRSILQKKKGQESLLDDNSHLQTIPSDLTSFPAQVDLPRSNGEMDGNDLMQASKGLSDLEIGMYALLGVFCLAILVFLINCVTFALKYRHKQVPFEEQEGMSHSHDWVGLSNRTELLENHINFASSQDEQITAIDRGMDFEESKYLLSTNSQKSINGQLFKPLGPIIIDGKDQKSEPPTSPTSKRKRVKFTTFTAVSSDDEYPTRNSIVMSSEDDIKWVCQDLDPGDCKELHNYMERLHENV

SEQ ID NO: 235081 - DNA, 3300 bp, Artificial Sequence
  derived and/or modified sequence
atgtgccccagcgagatgggcaccctgtggcaccactggagccccgtgctgatcagcctggccgccctgttcagcaaggtgaccgagggcagaggcatcctggagagcatccagagattcagcctgctgcccacctacctgcccgtgacctaccacatcaacaacgccgacgtgagcttcttcctgaaggaggccaaccaggacatcatgagaaacagcagcctgcagagcagagtggagagcttcctgatctacaagagcagaagactgcccgtgctgaacgccagctacggccccttcagcatcgagcaggtggtgccccaggacctgatgctgcccagcaaccccttcggcttcaccaacaagttcagcctgaactggaagctgaaggcccacatcctgagagacaaggtgtacctgagcagacccaaggtgcaggtgctgttccacatcatgggcagagactgggacgacagaagcgccggcgagaagctgccctgcctgagagtgttcgccttcagagagaccagagaggtgagaggcagctgcagactgcagggcgacctgggcctgtgcgtggccgagctggagctgctgagcagctggttcagcccccccaccgtggtggccggcagaagaaagagcgtggaccagcccgagggcacccccgtggagctgtactacaccgtgcaccccggcggcgagagaggcgactgcgtgagagaggacgccagaagaagcaacggcatcagaaccggccacagcgacatcgacgagagcggcccccccctgcagagaatcggcagcatcttcctgtaccagacccacagaaagcccagcctgagagagctgagactggacaacagcgtggccatccactacatccccaagaccgtgagaaagggcgacgtgctgaccttccccgtgagcatcagcagaaacagcaccgaggacagattcaccctgagagccaaggtgaagaagggcgtgaacatcatcggcgtgagagccagcagccccagcatctgggacgtgaaggagagaaccgactacaccggcaagtacgcccccgccgtgatcgtgtgccagaagaaggccgccggcagcgagaacagcgccgacggcgccagctacgaggtgatgcagatcgacgtggaggtggaggagcccggcgacctgcccgccacccagctggtgacctggcaggtggagtaccccggcgagatcaccagcgacctgggcgtgagcaagatctacgtgagccccaaggacctgatcggcgtggtgcccctggccatggaggccgagatcctgaacaccgccatcctgaccggcaagaccgtggccgtgcccgtgaaggtggtgagcgtggaggacgacggcaccgtgaccgagctgctggagagcgtggagtgcagaagcagcgacgaggacgtgatcaaggtgagcgacagatgcgactacgtgttcgtgaacggcaaggagatgaagggcaaggtgaacgtggtggtgaacttcacctaccagcacctgagcagccccctggagatgaccgtgtgggtgcccagactgcccctgcagatcgaggtgagcgacaccgagctgaaccagatcaagggctggagagtgcccatcgtgagcagcagaagacccgccggcgacagcgaggaggaggaggacgacgagagaagaggcagaggctgcaccctgcagtaccagcacgccatggtgagagtgctgacccagttcgtggccgaggccgccggccccggcggccacctggcccacctgctgggcagcgactggcaggtggacatcaccgagctgatcaacgacttcatgcaggtggaggagcccagaatcgccaagctgcagggcggccagatcctgatgggccaggagctgggcatgaccaccatccagatcctgagccccctgagcgacaccatcctggccgagaagaccatcaccgtgctggacgagaaggtgaccatcaccgacctgggcgtgcagctggtgaccggcctgagcctgagcctgcagctgagccccggcagcaacagagccatcttcgccaccgccgtggcccaggagctgctgcagagacccaagcaggaggccgccatcagctgctgggtgcagttcagcgacggcagcgtgacccccctggacatctacgacggcaaggacttcagcctgatggccaccagcctggacgagaaggtggtgagcatccaccaggaccccaagttcaagtggcccatcatcgccgccgagaccgagggccagggcaccctggtgaaggtggagatggtgatcagcgagagctgccagaagagcaagagaaagagcgtgctggccgtgggcaccgccaacatcaaggtgaagttcggccagaacgacgccaaccccaacaccagcgacagcagacacaccggcgccggcgtgcacatggagaacaacgtgagcgacagaagacccaagaagcccagccaggagtggggcagccaggagggccagtactacggcagcagcagcatgggcctgatggagggcagaggcaccaccaccgacagaagcatcctgcagaagaagaagggccaggagagcctgctggacgacaacagccacctgcagaccatccccagcgacctgaccagcttccccgcccaggtggacctgcccagaagcaacggcgagatggacggcaacgacctgatgcaggccagcaagggcctgagcgacctggagatcggcatgtacgccctgctgggcgtgttctgcctggccatcctggtgttcctgatcaactgcgtgaccttcgccctgaagtacagacacaagcaggtgcccttcgaggagcaggagggcatgagccacagccacgactgggtgggcctgagcaacagaaccgagctgctggagaaccacatcaacttcgccagcagccaggacgagcagatcaccgccatcgacagaggcatggacttcgaggagagcaagtacctgctgagcaccaacagccagaagagcatcaacggccagctgttcaagcccctgggccccatcatcatcgacggcaaggaccagaagagcgagccccccaccagccccaccagcaagagaaagagagtgaagttcaccaccttcaccgccgtgagcagcgacgacgagtaccccaccagaaacagcatcgtgatgagcagcgaggacgacatcaagtgggtgtgccaggacctggaccccggcgactgcaaggagctgcacaactacatggagagactgcacgagaacgtgtag

SEQ ID NO: 235082 - DNA, 3300 bp, Artificial Sequence
  derived and/or modified sequence
atgtgcccatcagaaatgggaacactgtggcatcattggagtcctgtcttaatcagtctggcagctctgtttagtaaggttaccgagggcagggggattttggagtctattcagaggttctcactattgccaacctatctaccggtcacctaccatattaacaatgcagatgtgtccttttttctcaaggaagccaatcaagacatcatgcgtaactccagtctgcagtcgagggttgagtcttttcttatctataaatctagacggctgccagtgctcaatgcctcttacggacccttttctatcgagcaggttgtaccacaggatctgatgcttccaagcaatccatttggattcaccaacaaatttagcctcaattggaagttgaaagctcacattctcagggacaaagtctacctctcccgcccaaaggtgcaggtgctttttcatataatgggccgcgattgggatgaccggtctgctggtgaaaagctgccatgcctgcgggtcttcgcttttcgagaaactagggaagtcagaggttcctgtcggcttcagggcgatctgggactttgcgtcgccgaacttgagctgctgtctagctggttctccccccctacagtggttgccgggcggcgcaagtctgtggaccagccggaggggacacccgtggaactgtactatacagtgcaccctggcggcgagcgcggcgactgcgtgagggaagacgcgcgccgctccaatggtatccgcacgggccattctgacatcgacgaatcaggccctccgctccagaggatcggttccatcttcctgtatcaaacccaccgcaagccatctctgagagaactgcgactggataattctgtcgcgatccactatattcctaagactgtcagaaagggcgacgtactgacattccccgtctcgataagccggaattctacagaagaccgctttacactgcgcgctaaagtaaagaagggcgtgaacattataggtgtgagggcctcctcaccctccatctgggacgtcaaggaacggactgactataccggtaaatacgccccagccgtcatcgtgtgtcaaaagaaagcggcagggtccgagaattctgctgacggagcgagttatgaagttatgcagattgatgtcgaggtggaagaacccggagatctccctgcaactcagcttgtgacctggcaggtggagtatcccggcgaaataacttctgatctgggcgtgtcaaaaatttatgtgagccctaaagatctaatcggcgtggtgcccctggccatggaggcagagattctcaacaccgcgatactgaccggaaagactgtcgccgtgcccgtgaaagtggttagtgtggaggatgatggaactgtcacagagttgctggaatcagtagagtgtagaagttcagatgaggatgttattaaggtgagtgacagatgcgactatgttttcgtgaatgggaaagagatgaaaggcaaggtgaacgtggtcgtgaattttacttatcagcacctgtcaagccctctcgaaatgaccgtctgggtgccacgcctgcccctgcagatcgaagttagcgataccgagctgaatcaaattaagggttggagagtgccaatcgtctctagcagaagacctgccggtgactctgaagaagaggaggatgacgagaggcgcggccgcggatgtactcttcagtaccagcatgctatggtccgggtgcttacccagttcgtggctgaggccgccggcccgggtgggcatctggctcaccttctgggctccgactggcaggtggacatcaccgagctcataaacgacttcatgcaggttgaggaacccaggatcgctaagttgcagggcgggcagattttaatggggcaagagttgggaatgaccacaatacagattcttagcccgctatctgatactatcctggcagaaaagacaattacagtactggatgagaaagtgaccattaccgacctcggggtccagttggtgaccggcctaagcctctctctgcagttgtcccctgggagcaaccgggccatcttcgccacagcagtcgcccaggaactgcttcagagaccgaaacaggaggcagccatctcttgctgggtgcagttttccgatggctcggtcacacccttggatatttatgatggtaaggacttctccctcatggccacctccttggacgaaaaagtcgtatctattcaccaggatccaaagttcaagtggcctatcatcgccgcagaaactgaaggtcaaggtaccctggtcaaggtggaaatggtaatcagtgagtcttgtcagaaatctaagaggaaatcggtgttggccgtcgggacagctaacatcaaagtgaagttcggacagaatgatgcaaatccaaacacgtccgactccaggcatacgggcgcaggcgtccacatggagaataatgtgagcgacagacggcccaagaagccttcacaggaatgggggtcccaagagggccagtattacggttccagttccatgggcctgatggagggaaggggaacaacgaccgatagatctatcttgcaaaagaagaagggtcaggagagcctactggacgacaactcgcatctccaaactataccctccgacctgacttcttttcccgcccaagtcgacctgcctagaagcaacggtgagatggatgggaatgacttaatgcaggccagtaaaggtctgtctgatctggaaatcggcatgtacgcgctgctgggcgtgttttgtctggctatacttgtgtttctcattaattgcgtgaccttcgctctcaaataccggcacaagcaggtgccctttgaagagcaagagggcatgtcgcatagccacgattgggtgggcctctccaaccgaacagaactcctggagaatcacataaacttcgcctcttcccaggacgagcaaataacagccatcgatcggggcatggatttcgaagagtcaaagtaccttctgtctacaaacagccaaaagagtataaatgggcagttgtttaagcccctggggccgataataatcgacggtaaggaccaaaagtctgagccacctacgagcccaacctcaaaacgcaagcgggttaaatttactaccttcaccgcagtcagttctgacgatgaataccctacccggaattccatagttatgagctctgaggacgacataaaatgggtatgtcaggatctcgaccccggcgactgcaaggagctccataattatatggagcgcctgcatgagaatgtgtag

SEQ ID NO: 235083 - DNA, 3300 bp, Artificial Sequence
  derived and/or modified sequence
atgtgccccagcgagatgggcaccctgtggcaccactggagccctgtgctgatcagcctggccgccctcttcagcaaggtgacagagggccggggcatcctggagagcatccagcgcttcagcctgctgcccacctacctgcctgtgacctaccacatcaacaatgctgatgtgtccttcttcctgaaggaggccaaccaggacatcatgaggaacagcagcctgcagagccgggtggagagcttcctgatctacaagagccggcggctgcctgtgctgaatgccagctatggccccttcagcattgagcaggtggtgccccaggacctgatgctgcccagcaaccccttcggcttcaccaacaagttcagcctgaactggaagctgaaggcccacatcctgcgggacaaggtgtacctgagccggcccaaggtgcaggtgctcttccacatcatgggccgggactgggatgacagatctgctggggagaagctgccctgcctgcgggtgtttgccttccgggagacccgggaggtgcggggcagctgccgcctgcagggcgacctgggcctgtgtgtggccgagctggagctgctgagctcctggttcagccccccaacagtggtggccggccgcaggaagtctgtggaccagcctgagggcacccctgtggagctgtactacacagtgcaccctggaggagagcggggggactgtgtgcgggaggatgcccggcgcagcaatggcatcagaacaggccacagcgacattgatgagagcggcccccccctgcagagaattggcagcatcttcctgtaccagacccacaggaagcccagcctgcgggagctgcggctggacaacagcgtggccatccactacatccccaagacagtgaggaaaggagatgtgctgaccttccctgtgtccatcagcaggaacagcacagaagatcgcttcaccctgcgggccaaggtgaagaagggcgtgaacatcattggagtgcgggccagcagccccagcatctgggatgtgaaggagaggacagactacaccgggaagtatgccccagctgtgattgtgtgccagaagaaggctgctggcagcgagaacagcgcagatggagccagctatgaggtgatgcagattgatgtggaggtggaggagcccggggacctgcctgccacccagctggtgacctggcaggtggagtacccaggagagatcaccagtgacctgggcgtgtccaagatctacgtgagccccaaggacctgattggagtggtgcccctggccatggaggccgagatcctgaacacagccatcctgaccgggaagacagtggccgtgcctgtgaaggtggtgtctgtggaggatgatggcaccgtgacagagctgctggagagcgtggagtgccgcagcagtgatgaagatgtgatcaaggtgtctgacagatgtgactatgtgtttgtgaatggcaaggagatgaagggcaaggtgaatgtggtggtgaacttcacctaccagcacctgagcagccccctggagatgacagtgtgggtgccccggctgcccctgcagatcgaggtgtctgacacagagctgaaccagatcaagggctggagggtgcccatcgtgagcagcagaagacctgctggggacagcgaggaggaggaggatgatgaaagaagaggccggggctgcaccctgcagtaccagcacgccatggtgcgggtgctgacccagtttgtggccgaggccgccggccctgggggccacctggcccacctgctgggcagtgactggcaggtggacatcacagagctgatcaatgacttcatgcaggtggaggagcccagaattgccaagctgcagggcggccagatcctgatgggccaggagctgggcatgaccaccatccagatcctgagccccctgagtgacaccatcctggccgagaagaccatcaccgtgctggatgagaaggtgaccatcacagacctgggcgtgcagctggtgacaggcctgagcctgagcctgcagctgagccctggcagcaacagagccatctttgccacagctgtggcccaggagctgctgcagaggcccaagcaggaggccgccatcagctgctgggtgcagttcagtgatggctctgtgacccccctggacatctatgatggcaaggacttcagcctgatggccaccagcctggatgagaaggtggtgtccatccaccaggaccccaagttcaagtggcccatcatcgctgctgagacagagggccagggcaccctggtgaaggtggagatggtgatcagcgagagctgccagaagagcaagaggaagtctgtgctggccgtgggcacagccaacatcaaggtgaagtttggccagaatgatgccaaccccaacaccagtgacagccgccacactggagctggggtgcacatggagaacaacgtgtctgacagaagacccaagaagcccagccaggagtggggcagccaggagggccagtactacggcagcagctccatgggcctgatggagggccggggcaccaccacagacaggagcatcctgcagaagaagaagggccaggagagcctgctggatgacaacagccacctgcagaccatccccagcgacctgaccagcttccctgcccaggtggacctgcccaggagcaatggagagatggatggaaatgacctgatgcaggccagcaagggcctgagtgacctggagatcggcatgtatgccctgctgggcgtcttctgcctggccatcctggtgttcctgatcaactgtgtgacctttgccctgaagtaccgccacaagcaggtgccctttgaggagcaggagggcatgagccacagccatgactgggtgggcctgagcaacagaacagagctgctggagaaccacatcaactttgccagcagccaggatgagcagatcacagccatcgaccggggcatggactttgaggagagcaagtacctgctgagcaccaacagccagaagagcatcaatggccagctgttcaagcccctgggccccatcatcattgatggcaaggaccagaagtctgagccccccaccagccccaccagcaagaggaagagggtgaagttcaccaccttcaccgctgtgtccagtgatgatgagtaccccaccaggaacagcatcgtgatgagcagtgaagatgacatcaagtgggtgtgccaggacctggaccccggggactgcaaggagctgcacaactacatggagcggctgcatgaaaatgtgtag

SEQ ID NO: 235084 - DNA, 3300 bp, Artificial Sequence
  derived and/or modified sequence
atgtgccccagcgagatgggcaccctgtggcaccactggagccccgtgctcatctccctggcagccctgttttctaaagttacggaaggccgcggtattttggaatcaattcagagattctcccttctgccaacctatctgcccgtgacgtaccacatcaacaacgctgacgtttctttctttctgaaagaagcaaaccaggatatcatgcggaacagttctttacagtcacgcgtggaatcgttcttgatttataaaagcagaaggttgcccgttctgaatgcatcatacgggcctttttctattgagcaagtggttccgcaagacctgatgctcccgagtaatccctttgggtttacaaacaagttctctctgaactggaagctcaaggcgcacattctgagggacaaagtttacctgagcagaccgaaggtgcaagtgcttttccacattatgggacgcgactgggacgaccgcagcgcaggcgagaagctcccctgcctgcgcgtgtttgcttttcgagagacccgcgaggtgcgcggaagctgccgacttcagggagacctgggcttatgtgtggcagagctagagctgctgagcagttggttttccccgcctaccgtagtggcaggccgccgaaaatctgtcgaccagcccgaggggacccccgtagagctgtactacacagtccacccaggaggagagagaggggactgcgtgcgtgaagatgctaggaggtctaacggaattcgaaccgggcacagtgacattgacgagtccggtccaccacttcagagaattgggtcaatcttcctgtaccagacccatcggaagccgtcactgagggaacttcgcttggataactcagttgcaatacactatatcccgaaaaccgtgcggaaaggagacgttcttacttttcctgtttcaattagcaggaactcaactgaggatcgatttactttgcgggcgaaggtcaaaaaaggtgttaacattataggtgttagggccagctctccttccatctgggatgtgaaagagagaacagattacacaggaaaatatgctcccgccgttattgtctgccaaaagaaagccgcaggtagcgaaaactcggccgatggagccagctatgaggtgatgcaaattgatgttgaagtggaggagcccggagacctgccagctactcagctggtgacctggcaggtagaatatcccggcgaaattacgagcgatctaggggtctcaaaaatctacgtgtcgccaaaggatctcattggcgtcgtaccactggcaatggaggccgagatcctgaatactgctatcctcaccgggaagacggtggcagtccctgtgaaagtcgtgtcagtggaagatgatggcacagttacagagctcctggaatcagtcgagtgtcgatccagcgacgaagacgtcattaaggtgagcgatcgttgcgactacgtgtttgttaacggcaaggagatgaagggaaaggttaacgtggtcgtcaatttcacataccagcatctgtcatctcctcttgagatgaccgtgtgggtacctagacttccgttacagatcgaagtcagtgacaccgaactcaatcagattaaagggtggcgggttccaattgtctcatctaggcggccggcaggcgactccgaggaggaagaagatgatgagcggcggggacgtggttgtaccctccaatatcagcacgccatggtgcgcgtgctgacacagttcgtagccgaggcagcaggtcccggcggacacctggctcacctgctaggaagcgactggcaggtagacatcaccgagctaattaatgacttcatgcaagttgaggagccaaggatcgctaaactgcagggcggccagattttaatgggacaggagctgggcatgacaaccattcagatcctttccccattgagtgacaccattctagccgaaaaaacaataacagtcttggatgaaaaggtgaccatcactgaccttggtgtgcagttagtgaccgggctgagcttgtccctgcagctgtcgccggggagcaatcgggctattttcgctacagcagtggcacaggaactcctccagcgtcccaaacaggaagcagctatctcttgttgggtgcagttcagcgatggttcagtgacacctcttgatatctacgacggtaaggactttagcttgatggctacttcactcgacgagaaagttgtgagtattcaccaggatcccaaattcaagtggcctataattgccgctgagacagaggggcagggaaccttggttaaggtcgagatggtgatttctgagagctgtcaaaaaagcaagcgaaaatctgtgttggcagtggggacagcaaatattaaggtgaaattcgggcaaaacgacgccaacccgaacacctcggacagtaggcataccggcgccggggtgcacatggaaaacaacgtgtccgaccgccgacccaagaaaccctctcaggagtggggtagccaggaggggcagtattacggctcttctagcatgggcctcatggaaggtcgcggcacaactactgaccgatctatcctccagaaaaagaagggacaagagtcactactcgacgataacagccacttacagaccatcccctccgatctgaccagctttccagcccaggtggatctgcccagatctaacggcgagatggacggaaacgaccttatgcaggcctccaaagggctgagtgatttagaaattggcatgtacgcactgcttggggtgttttgcctggccattctcgtcttcctcattaactgcgtcaccttcgctcttaagtatcgccacaagcaggtgccctttgaagagcaggagggcatgagccacagccacgattgggttgggctttcgaacaggactgagctgcttgagaatcatatcaatttcgccagtagtcaggatgaacagattacagcaattgatcggggtatggatttcgaagaatccaaatacctactctccaccaattctcagaagagcatcaatggacaactgtttaaaccattaggacccattataatcgatggtaaagatcagaagtcggagccccctacgagtcctacgtcaaagaggaaacgggtcaagttcactactttcaccgctgttagctcggatgacgaatatcccacccggaactctattgttatgtctagcgaggatgatattaagtgggtttgtcaagatctcgatcccggagactgcaaagaattgcacaactatatggaaaggttacacgagaacgtgtag

SEQ ID NO: 235085 - DNA, 3300 bp, Artificial Sequence
  derived and/or modified sequence
atgtgcccttccgagatgggcacactgtggcaccattggtccccagttctgatcagcttggcagcactctttagcaaagtcacagaaggtagagggatcctggagagcatccagcggttttccctgcttcctacttatttgccggtgacgtaccacattaacaacgctgacgtgtccttcttccttaaggaggcaaatcaagacatcatgagaaactccagtctccaaagtagagttgagtcttttttgatctataaaagcagaagattacccgtgctgaacgctagctatggacccttcagcatcgaacaggtggttccacaggatctcatgttgccgagcaacccattcggattcactaacaagttctcactcaactggaagctgaaagcgcatatattgagggataaggtttaccttagccggcctaaggttcaagttctcttccacattatggggcgtgattgggacgacagatctgccggagagaaactgccctgtctgcgagttttcgcattcagggaaaccagggaggtccgaggctcatgccggttacagggggacctggggctctgtgtggcagagcttgaactgctgtccagttggttttctccacccaccgtggttgccggtcggagaaaaagtgttgatcaaccggaaggcacccccgtggaactatactataccgttcacccaggaggcgaaagaggggattgtgtaagagaagatgctcgacgaagcaatgggattcggacgggccatagcgatatagacgagagtggaccgccactgcaaagaatcggatccatcttcttatatcagacacaccgtaagccctctctgcgggagcttcgactggataattctgtagcaatccactatattcccaaaactgttcggaaaggcgatgtgctgacatttcccgtgtcaatttccagaaattccaccgaggatcgcttcaccttgagggccaaggttaagaaaggtgtgaatattatcggagtgagagcctcaagcccctcaatatgggatgtcaaagagcggactgactataccggaaagtacgcgcctgccgtgatcgtgtgtcaaaaaaaggcagcgggtagtgagaattcggccgacggcgcaagctatgaagttatgcaaattgacgtggaggtggaagagccaggagacctccccgctactcagcttgtgacatggcaggtagagtatcccggtgagattactagcgatctaggtgtgagtaagatttacgtgagcccaaaggacctcatcggggtcgtgccactcgcaatggaagcggagattctcaataccgccattctgaccgggaagacagtggccgtgccagtaaaggtcgtttcggttgaagacgacggcactgtgaccgaattgctcgagtctgtagagtgcagaagtagcgacgaggacgtaatcaaggtctcagaccggtgtgactatgtgtttgtgaacgggaaagagatgaaaggaaaggtaaatgtggtggtcaacttcacataccaacatctgagtagccctttagagatgactgtttgggtgcctaggctcccactccagatcgaagtctccgatacagaactcaatcaaattaagggctggagggtgcccatcgtctcctctcggcgtcctgccggagactccgaagaagaggaagatgatgaaaggagaggacggggatgtacattgcagtatcagcatgcgatggtgcgagtgttaactcagtttgtggccgaggcagccggtcccggtggccatttggcgcaccttcttggcagcgactggcaggtcgacatcaccgaactgattaatgacttcatgcaagtagaagaaccgcgaattgccaagctccaagggggtcagattcttatggggcaggaactgggaatgactaccatccagattctgtcgccactgagcgatactattttagctgagaagaccatcactgtgctcgacgaaaaagtcacaataacggatctgggggtgcaactggtgaccgggttgagcctatccctccagctgtcacctgggtccaaccgagcgatcttcgcaacagccgtggcacaagaactcctccaaaggccaaaacaggaggccgctatatcctgttgggtgcaattcagcgatggttctgtgacgcccctggacatctacgatggaaaggatttctcactgatggcaacgtccttggatgagaaggtggtctctatccaccaggacccgaaattcaagtggccaatcattgccgctgaaactgagggccaagggaccctggtgaaggtggaaatggtgatctccgaaagctgtcaaaaaagtaagagaaagtccgtgttggcggtcgggactgctaatatcaaggtgaagttcggacagaacgatgccaatcctaatacatccgatagtaggcatactggtgcaggggtgcacatggagaacaatgtgtctgaccggaggccaaagaaacccagccaggaatggggatcccaggagggacaatactatgggagtagctcaatgggcttgatggagggacgagggacgacaaccgatcgcagcatactccagaaaaaaaaaggacaggagagtctgcttgatgataattcacatctgcagacaatcccatctgacctgactagttttcccgctcaggtagacttacctcgctccaatggcgagatggacgggaacgatctcatgcaggcatctaagggcctctctgatctagaaataggaatgtacgccctgcttggcgtcttttgtctcgccatactggttttcttgatcaattgtgtgacatttgctctcaagtacagacataagcaggtgcctttcgaggagcaggagggcatgtcacactctcatgactgggtgggactgtccaatagaacagagcttctggaaaaccatattaattttgcgtcaagccaggacgaacagataacagctattgatagaggcatggactttgaggaaagcaaatacctattatccaccaacagtcagaaaagcattaacgggcaactgtttaaaccactggggcctattatcatcgacggcaaagatcagaagtctgagccgcctacttctccgacatccaagaggaagagagtcaaatttacaacatttacggccgtctcttctgacgacgagtacccaacaagaaacagtatagtgatgtcttcagaggacgacatcaagtgggtttgtcaagatttggatcctggggattgcaaggaacttcacaattatatggaaagactgcatgagaatgtgtag

SEQ ID NO: 235086 - DNA, 5776 bp, Artificial Sequence
  derived and/or modified sequence
ccactcttcgctcgggtaaacaggaaaggaaataccccctgtggattaaaatttaaaaaaaattctgttggggtcgaaggagggaggtggggtttgcctgcgcgcgtgttggactccggagagcaactcaggagcccgcgcggtcgtcgcctcccggcctggccatggactggcgggaagagggagcagggcgcccgggctgctcgggcccctagccgggcgctccctcgccaccggccccgctgcgggcctctaggggactgagacggtctcttgttcgcctggacggcgccggggagcggaggatctgcgctccgggtctccaggatgtgcccgtctgagatggggacgctgtggcaccactggtcgccggtactcatcagcctggccgccctgttttccaaagtgacggaaggtcgagggatccttgagagcatccagaggttttccttgctgcccacctacctccccgtgacctaccacatcaacaacgcggacgtctccttcttcctgaaggaggccaaccaggatatcatgaggaactccagcctgcagtcccgggtggagtcatttctgatttacaaatccaggaggctgcctgtcctcaatgccagctacgggcctttctccatcgagcaagtggtgccccaggatttaatgctaccttccaacccatttggattcaccaacaaattttctcttaactggaaactaaaagcccacatcctgcgggacaaagtctacctgagccggcccaaagtgcaggttctgttccacatcatgggcagagactgggacgaccgcagcgccggggagaagctgccgtgcctgagggtctttgctttccgagagacccgagaggtgcggggcagctgccggctgcagggggacctggggctgtgcgtggccgagctggagctcctgtccagctggttcagcccccccacggtggttgccgggaggaggaagtccgtggaccagccggaggggacccccgtggagctctactacaccgtgcacccagggggtgagagaggggactgcgtcagggaagacgcgaggagaagcaatgggatccggacaggccacagtgacatcgatgagtccgggccccccttgcagaggatcgggagcatcttcctttatcagacacacaggaaaccctccctgagagaactgcgtctggacaacagcgtggccatccactatataccaaagaccgtgaggaaaggagacgtgctgacttttcctgtttccatctccagaaattccactgaagatcgcttcacgttgagggcaaaggtgaagaaaggcgtgaacatcatcggcgtgcgagccagcagcccttccatttgggatgtcaaggagcgcacggattatactggaaagtatgcaccagctgtcatcgtttgtcagaagaaagcagctggctcagaaaacagtgcggatggcgcctcctacgaggtcatgcagatcgatgtggaggtggaagagcctggtgacctgccagccacacagctggtcacgtggcaggtcgagtaccccggagagatcacgtctgacttgggagtgtccaagatctatgtgagcccaaaggacttgattggagttgtgccgctggctatggaggcagaaatcctgaacacagccatcctcacggggaagacggtggccgtcccggtgaaagtggtctccgtggaggacgacggcacagtgacagagctgctggagtctgtggagtgtagatcgtctgatgaagacgtgattaaggtttctgacagatgtgactacgtctttgtcaatgggaaagaaatgaaaggcaaggtcaacgtggtggtgaacttcacctaccagcacctgagcagccccctggagatgacggtgtgggtgccccggcttccgctgcagatcgaggtctccgacaccgagctcaatcagatcaagggttggagagtgcccatcgtctccagcaggaggcctgccggggacagtgaagaggaggaggatgatgagcggaggggccgcggctgcaccctgcagtaccagcacgccatggtgcgggtcctgacgcagtttgtggctgaggcggccggccctgggggacacctggcccacctgctgggctcagactggcaagtggacatcacggagctgataaatgacttcatgcaggtggaggagcccaggatcgccaagctgcaaggcggacagatcctgatggggcaggagcttgggatgaccaccattcagatcctgtctcctctgtcagacaccatcctcgctgaaaagaccatcactgtgctggacgagaaggtgaccatcacagacctcggggtgcagctggtgacagggctgtcactctccttgcagctcagcccaggaagcaacagggccatctttgccactgcagtggctcaggaacttctgcagaggccaaaacaggaagcagccatcagttgctgggtccagttcagtgatggctcagtcacgcccttggatatttacgatgggaaagacttctccttgatggccacatctttggatgagaaggtagtctccatccaccaagaccccaaattcaagtggcctatcattgctgcggaaacagaaggacaaggcaccctggtcaaggtggaaatggttattagtgaatcctgccagaaatccaagcggaagagtgtgttagctgttggaacggcaaacatcaaagttaaatttggccaaaacgatgctaaccccaacaccagtgacagcagacacacaggggcaggggttcacatggaaaacaatgtcagtgacagaaggcccaaaaaaccctcgcaggaatgggggagtcaggaaggacagtactatggcagttcttctatgggactcatggagggacggggcaccacgacagacaggtccatcctgcagaagaagaaaggccaggaaagccttttagatgacaacagccacttgcagaccatccccagcgacctcaccagcttcccagcccaggtggacctccccagaagcaatggggaaatggatgggaatgaccttatgcaggcatccaaagggctgagcgacttagaaattgggatgtatgctttgttgggagtcttctgtttggccattttggtcttcttgataaactgtgtgacctttgcattaaaatacagacacaaacaggttcccttcgaggagcaggaagggatgagtcactctcatgactgggttgggttaagcaaccggacagagctgttggagaatcacatcaactttgcctcctcgcaagatgagcaaatcactgccattgacaggggcatggatttcgaggaaagtaaatatctcctcagcacaaactcccaaaaaagcatcaatgggcagctgttcaaacctttgggacccatcatcattgatgggaaagatcagaaaagtgagcccccaacatcccctacctcaaaaaggaaaagggtaaaatttaccaccttcaccgccgtctcctcagacgacgagtaccccaccaggaactccatcgtgatgagtagcgaggatgacattaagtgggtctgccaggatctggaccctggggactgcaaagagctgcacaactacatggagaggttacatgaaaatgtgtaagccagacacacacagacattggttctcactcacctttcagcctttaattccaggatgtgtagcaacggtgcccccggaagagaaacaaagcagcaggacaaaataaggatgacactatccatacagcctcagccaatgaccccggctcggcggcgaggcctggagtccgcatcgacgcacacattccagagtacagtgtcttgcttaagaggtttatcatgcatggcaagatttttaagacttgaaacaaaaacgagttctgaatcactgagcgtctgagagcgtccaggaaagaacagcctctctctctcgaatcaaagcaatttggatattgtaaaatccacatggctccaatattcaatattgcagactatggaagaaaagtacaactcaggtggagcatccatggatcgcatccatggatcaatgggaggaagcgtgtcatcgaaactggagcagcacatcttgctgtgagcgcgatcacaggcagtccagtgccgccgtcagctgtgggaggcatgattgtgagtcattgtctctcaaaggctgggccagagctgtctcagatcatggacaggccaaggaagtggctgacaaggactgaaagggaacatgtgggctaacaggccacaaatacctttgtaactacatgccaaggacaaacacatggacgcaaatcctctgagcccttcagggtacttctttatttgtaaactaaggatactgggcatagaatttgaatcaggttcaaagaaccacgctcttttgattcatatcaagttcacaatgtatccatttctattcctccactgcattgccatcctccccaaagccgttggtcacctgtgggtgggggagggagagggcagtttgtagtatttgctgggtcttttttctccccctgggttttgtgtcaactcccaagtgacattctgtagagaagctccccccgcaacctgggcatatgtcccacgccgtccgtctttgaagaggctggtctctaggcatgggcggtagtcacggtgaattccataccaggggatatacattcccttgctttactagaaagaaaacagggccacttgggatgggtctttcactgttcatggcagatctcctgtccaaagatgtggcctcgaggctgttgagacaaatcggggtgcctgtgtggaacgtgcagggcgtgtggagttgggggggttctgggtgtgaaagtggtggatccagcaggaagcccagcctcacacacaccggacagcacagaaaccttcttcatcttggaggtgcgaagggataaggggcatcagtgcatgtggtgaagatgcaggtttgcaagcacttggtcctgcagtcagccccgaaaggttcagcattgcttaagaccagccatgactctggatatccctgaatcccttcacttatgaagcctatgaagatgggggcaaggatacatcagagaattcctgcctcatctcacgctcactccaaggtagagaatggtgtgttgggtgattgccagccagataggatcctgcaaaagatggtcgggggcagcgggtggtgggcagaagaggccgtgctgttgaattgatcttctatttttccctctggtcattttctctctctctctgctcttcagttgtctgttttccagtctctctgtgtgtctgtctctgtatctctctcctcctttgaacctatcttctccctgcttcctctccatctcatctctgtaattttgagtgtgtgtctttactccttcttcctctccatagaattgaattctctttagatcatgtgtgtgtaaatttcaccagtttaccctcccaaccttagccctctcccctgcaactgtggtgctcttgagactgaggtttctgcagccagtaagtcacctgctcctgtccgcaagcttacctaccttgtttggttgggtgattaagctgtcaccccttttcaatgagaatcctttgctttcagtaacgtcctcatatttctttccattcttacctgtgtcatgttctgttgaatactgcagccgctgcccgcttccaaatccatctgcgtgtagaatgtactgtagattgtaagaatgtaatatatatttataaacttactgactgtaaatataaagtttgcattcagtggc

SEQ ID NO: 235087 - DNA, 504 bp, Artificial Sequence
  derived and/or modified sequence
atgcccttcaccggcgagcggcggctgagcctgcggcggcaggacgagggaggactgctcgcaggcgccgaggacgaacttgccggtgtagacgctactaccgtacatcagcaccagttgcggcccagcgaagttcctggcgccttgcggcaacctggttcctcagtgcttgtctgtcttcctggcttgctgggggaagtaacaactgcgggtcgtacttcaggagctctgtggacctgggtgtggggatctcacccccctagcgaatctcgcacgaatcccgtacggatgtcactcacacttaatcaggcacgaactactgtgagtgatcagagggcagaagaggaacggggaatctggggtcggcgagccggagtacaagcgggccctctccagagccagggacacgcagctcacctgccccaccaggccttccctgttccgaggggatggctgcctggagagggccctcactccgatccggcgggcagtggcgcaggttag

SEQ ID NO: 235088 - DNA, 378 bp, Artificial Sequence
  derived and/or modified sequence
atgcagcctgtgatcagcgccctgaacatccagacccagacagtgcagacccacccagcccccaggaacaccagcgagcactgcaccctgcctgcctgtgatgcccaggaggagcaccgggacacagtggatggcagcatcgccaggacagagagcgccagcggggagatctggaggcagacccacatggatggagagcaccacgtgaacaccaaggccgagatctctgtgatgtctgccaaccagggcgccccccgcatcaccagcaagcccccagaggcccggcgggaggcccgggacaggagcctgcccagcgccttcagcctgcggggcctgacagacaccctcatcctgggcttctgccccccagagctgtag

SEQ ID NO: 235089 - protein, 135 aa, Artificial Sequence
  derived and/or modified sequence
MQLTWASISLVTRCWPQTPTFQDLLACLGARALPGPPGAPGRDGSKGERGAPGPRGSPGPPGSFDFLLLMLADIRNDITELQEKVFGHRTHSSAEEFPLPQEFPSYPEAMDLGSGDDHPRRTETRDLRAPRDFYP

SEQ ID NO: 235090 - protein, 406 aa, Artificial Sequence
  derived and/or modified sequence
MVPPPPSRGGAARGQLGRSLGPLLLLLALGHTWTYREEPEDGDREICSESKIATTKYPCLKSSGELTTCYRKKCCKGYKFVLGQCIPEDYDVCAEAPCEQQCTDNFGRVLCTCYPGYRYDRERHRKREKPYCLDIDECASSNGTLCAHICINTLGSYRCECREGYIREDDGKTCTRGDKYPNDTGHEKSENMVKAGTCCATCKEFYQMKQTVLQLKQKIALLPNNAADLGKYITGDKVLASNTYLPGPPGLPGGQGPPGSPGPKGSPGFPGMPGPPGQPGPRGSMGPMGPSPDLSHIKQGRRGPVGPPGAPGRDGSKGERGAPGPRGSPGPPGSFDFLLLMLADIRNDITELQEKVFGHRTHSSAEEFPLPQEFPSYPEAMDLGSGDDHPRRTETRDLRAPRDFYP

SEQ ID NO: 235091 - DNA, 408 bp, Artificial Sequence
  derived and/or modified sequence
atgcaactgacttgggcttcaatcagcttggtcacacgctgctggcctcagacaccgaccttccaagacctgctcgcgtgtcttggtgcgcgcgctcttcccgggccccccggtgccccagggagggatgggtctaaaggggagcggggcgcccccggccctcgcggatccccggggcccccggggtccttcgactttttgctactgatgttagcggatatcagaaacgatatcacagagctccaggagaaggtgtttgggcaccgcacccattcctcagccgaggaattcccactccctcaggaatttcccagttaccctgaggctatggatctgggttctggcgacgatcacccccgacggaccgaaacacgcgacttgcgcgccccacgtgatttctacccctag

SEQ ID NO: 235092 - DNA, 1221 bp, Artificial Sequence
  derived and/or modified sequence
atggtcccacctcccccttcacgcggaggagccgcccgggggcagctgggacggtccctggggccccttctcttactgctcgcactgggccacacatggacctaccgcgaagaaccagaagacggagatagagaaatatgcagtgagtcaaaaatcgccacaacaaagtacccttgcctcaagagttcaggagaattgaccacctgctatcggaaaaagtgttgtaaaggctataaattcgtactgggacagtgcatacccgaagactacgacgtctgtgcagaagccccatgtgagcagcaatgcactgataatttcggccgtgttctttgcacatgttatccaggatatcgttatgaccgagaacgccatcggaagagagagaaaccttactgcctcgatattgacgaatgcgccagttctaatgggactctttgtgctcatatatgtatcaacacacttgggtcttatcggtgtgagtgtcgagaggggtacattcgagaggatgacgggaaaacgtgcacgcggggagataagtatcccaatgataccgggcatgagaagtccgaaaatatggttaaagctgggacctgctgcgctacttgtaaggaattttatcagatgaagcaaacagtcctccagctgaagcagaagattgcactcttgccaaacaacgcagcggacctcggaaagtatatcaccggggataaggtcctggcgtcaaacacatatttgcccggcccaccaggactccccggcggacagggtccccccggcagtcccggacccaaaggctctccaggttttccaggcatgccaggccctccagggcaaccagggcccaggggaagcatgggtcccatgggcccgtcccccgatctgagccacattaagcaaggtcgcagggggcccgttggcccccctggagcccctgggcgtgacgggtctaagggcgaacgcggggccccaggtccacgcgggtcccctggaccgcccggatcatttgactttttgcttctcatgctcgctgacatccggaatgacattacagaattgcaggaaaaggtgttcggacaccggactcacagctccgcggaagagtttcctttaccacaggaattcccaagctacccagaagccatggacttgggttcaggcgatgaccacccacggcgaactgagactcgggatttaagagctccacgggatttttacccctag

SEQ ID NO: 235093 - DNA, 408 bp, Artificial Sequence
  derived and/or modified sequence
atgcagctgacctgggccagcatcagcctggtgacccgctgctggccccagacccccaccttccaggacctgctggcctgcctgggcgcccgggccctgcccggccccccaggggcccctggaagagatggcagcaagggggagcggggggcccctggcccccggggcagccctggccccccaggcagctttgacttcctgctgctgatgctggccgacatcagaaatgacatcacagagctgcaggagaaggtgtttggccacaggacccacagcagcgctgaggagttccccctgccccaggagttccccagctacccagaggccatggacctgggcagcggagatgaccaccccaggagaacagagacccgggacctgcgggccccccgggacttctacccctag

SEQ ID NO: 235094 - DNA, 1221 bp, Artificial Sequence
  derived and/or modified sequence
atggtgcccccaccacccagcagaggaggagctgcccggggccagctgggccgcagcctgggccccctgctgctgctgctggccctgggccacacctggacctaccgggaggagccagaagatggagaccgggagatctgcagcgagagcaagatcgccaccaccaagtacccctgcctgaagagcagtggagagctgaccacctgctacaggaagaagtgctgcaagggctacaagtttgtgctgggccagtgcatccctgaggactatgatgtgtgtgccgaggccccctgtgagcagcagtgcacagacaactttggccgggtgctgtgcacctgctacccaggctaccgctatgaccgggagcggcacaggaagcgggagaagccctactgcctggacattgatgaatgtgccagcagcaatggcaccctgtgtgcccacatctgcatcaacaccctgggcagctaccgctgtgagtgccgggagggctacatccgggaggatgatggcaagacctgcaccaggggggacaagtacccaaatgacaccggccacgagaagtctgagaacatggtgaaggccggcacctgctgtgccacctgcaaggagttctaccagatgaagcagacagtgctgcagctgaagcagaagatcgccctgctgcccaacaatgctgctgacctgggcaagtacatcaccggggacaaggtgctggccagcaacacctacctgcccggccccccaggcctgcccggcggccagggccccccaggcagccctggccccaagggcagccctggcttccctggcatgcctggccccccaggccagcccggcccccggggctccatgggccccatgggccccagcccagacctgagccacatcaagcagggcagaagaggccctgtgggccccccaggggcccctggaagagatggcagcaaaggagagcggggggcccctggcccccggggcagccctggccccccaggcagctttgacttcctgctgctgatgctggccgacatcagaaatgacatcacagagctgcaggagaaggtgtttggccacaggacccacagcagcgctgaggagttccccctgccccaggagttccccagctacccagaggccatggacctgggcagcggagatgaccaccccaggagaacagagacccgggacctgcgggccccccgggacttctacccctag

SEQ ID NO: 235095 - DNA, 408 bp, Artificial Sequence
  derived and/or modified sequence
atgcagctgacctgggccagcatcagcctggtgacccggtgctggccccaaacaccaacctttcaggacctgctagcctgtctaggtgcacgggcgctgccaggacctccaggtgcacctgggcgcgatgggagcaagggcgaaaggggagcccctggacctagaggaagtccaggaccgccagggtcattcgattttcttcttcttatgctggccgatatacgcaacgatatcactgagctccaggaaaaggtgttcggccaccgaactcacagtagcgccgaagaatttccacttccccaggagttcccatcctaccctgaggcaatggatctgggaagcggcgatgaccaccctaggcgcacagaaaccagagacctgagggctccacgagacttctacccctag

SEQ ID NO: 235096 - DNA, 1221 bp, Artificial Sequence
  derived and/or modified sequence
atggtgccccccccccccagccggggcggcgccgcccggggccagctcgggcgctctctcggaccgctgctcctgctcttggccttaggacacacgtggacttacagggaggaacccgaggatggggatcgcgagatctgcagcgagtctaagattgccaccactaaatatccatgcttaaaatctagcggggagctcactacatgttaccggaaaaagtgctgcaagggatacaaattcgtactcggtcagtgcatccccgaggactacgatgtttgcgccgaagccccttgcgaacagcagtgcaccgacaactttggtagagtactttgcacgtgctatccaggctataggtatgatcgagagcgccatagaaagagagaaaagccctactgccttgacattgacgagtgcgctagcagtaatggaaccctatgcgcccacatctgcataaacacactcggtagctacagatgcgagtgtcgtgagggctatattcgggaagatgacggaaaaacttgtaccagaggtgacaaatatcccaacgatacagggcatgaaaagagcgaaaacatggtaaaagcgggtacctgttgtgccacctgcaaggaattttatcagatgaagcaaactgtgcttcaactcaagcagaaaatcgcccttctgcccaataacgctgccgatctgggtaagtacatcactggcgacaaggttctcgcatccaacacatatctcccagggcctcccggtcttcctgggggacagggaccccctgggagcccggggccaaaggggtcacccggatttccaggcatgcccggccccccaggccagccaggccctcgcggtagcatgggacccatgggcccttcacctgacctgtctcacataaaacaggggcggagaggtcccgtgggcccacccggagcacccggcagggatggaagtaagggggaaaggggggctccaggcccaagggggagcccaggcccccctggtagctttgactttctgttgctcatgttggccgacattagaaatgacataacggagcttcaggaaaaagtgttcggccataggactcactctagcgctgaggaatttccactgccgcaggagtttcctagttatccagaggccatggatctgggatccggcgatgaccaccctcgcaggactgagacccgagacttgcgcgccccccgggacttctacccgtag

SEQ ID NO: 235097 - DNA, 408 bp, Artificial Sequence
  derived and/or modified sequence
atgcagttaacatgggcttcgattagcctcgtaacccggtgttggccccagactccaacgtttcaggatttgctggcttgtctgggcgctagggcattgccgggaccacctggggctccaggcagagacggcagcaaaggggagaggggggcacccggtccacgtggcagtcctggccctcccggatctttcgattttctcctgctcatgctcgctgacatccgaaatgacattacagaactgcaggagaaggtgtttggacatcggactcactcttcggccgaggagttcccactgccccaggagttccctagttaccctgaggcaatggatttgggctccggcgatgaccatccgagacggactgagacacgggacctgagggcacctcgagatttttacccttag

SEQ ID NO: 235098 - DNA, 1221 bp, Artificial Sequence
  derived and/or modified sequence
atggttcccccaccaccctcccgaggtggtgctgcaaggggccagctggggcgatctttaggcccattgcttctgctcttggcccttgggcatacctggacctacagagaggagccggaagacggagacagggagatttgctctgaatccaaaatcgccactacgaaatacccatgcctgaaaagcagtggagagctcacaacctgttaccgaaaaaagtgttgtaagggttataagttcgtgcttggccagtgtatcccagaggattacgacgtgtgcgccgaagcgccatgcgaacagcagtgcaccgataattttggcagagtgctgtgcacatgctatcctggatatcggtacgatcgagagaggcacagaaagcgggaaaagccatactgtctggacatcgatgagtgcgcatcatcaaacggtaccctttgtgcgcacatctgcataaacaccctaggctcttacagatgtgagtgtcgtgagggctacattcgggaggatgatggaaaaacttgtacacgtggtgacaagtatcccaatgatactgggcacgagaagtcagagaatatggtaaaggcaggcacatgttgtgcgacctgcaaggaattctatcagatgaaacagaccgttctccagttgaagcagaagattgccctgctcccgaataacgcagccgacctggggaagtatatcactggcgacaaggtgttggctagcaacacatatctcccaggccctcctggtctgccagggggacaggggcctccgggatcccccggacccaagggctctccgggtttccccggaatgccgggtccccctggccaaccaggaccccgaggatccatggggccaatgggcccaagccccgacttaagccacatcaaacaggggagaaggggccctgtaggccctcccggagctcctggacgtgatgggagcaagggtgaacgtggagccccaggccctcgtggctcccccggacccccaggcagtttcgactttctgctgctcatgctcgctgacatccgcaatgacatcacagagttgcaggagaaagtatttgggcacaggacacatagttcggccgaggaattccccctcccccaggaattcccctcatatcccgaggccatggatctggggtccggcgatgaccacccacgacgcactgaaacccgcgatctcagagccccacgagacttttacccctag

SEQ ID NO: 235099 - DNA, 1569 bp, Artificial Sequence
  derived and/or modified sequence
aggaaaaagtgctgcaaaggatataaatttgttcttggacaatgcatcccagaagattacgacgtttgtgccgaggctccctgtgaacagcagtgcacggacaactttggccgagtgctgtgtacttgttatccgggataccgatatgaccgggagagacaccggaagcgggagaagccatactgtctggatattgatgagtgtgccagcagcaatgggacgctgtgtgcccacatctgcatcaataccttgggcagctaccgctgcgagtgccgggaaggctacatccgggaagatgatgggaagacatgtaccaggggagacaaatatcccaatgacactggccatgagaagtctgagaacatggtgaaagccggaacttgctgtgccacatgcaaggagttctaccagatgaagcagaccgtgctgcagctgaagcaaaagattgctctgctccccaacaatgcagctgacctgggcaagtatatcactggtgacaaggtgctggcctcaaacacctaccttccaggacctcctggcctgcctgggggccagggccctcccgggtccaccaggggcaccaggaagagatggttctaagggggagagaggagcgcctgggcccagagggtctccaggaccccctggttctttcgacttcctgctacttatgctggctgacatccgcaatgacatcactgagctgcaggaaaaggtgttcgggcaccggactcactcttcagcagaggagttccctttacctcaggaatttcccagctacccagaagccatggacctgggctctggagatgaccatccaagaagaactgagacaagagacttgagagcccccagagacttctacccatagcacatcccaacaccgtcacgccaaaggaagagaaagatcaactcacctgcagttaaaccatctaaagagaagaaagaccactggagacctagaaaacatacatttttctcttctcttctcctgacgtctctccactcctcttcttccaaatacgatgctattttcagagtcccctcctaggcctgcagacatgagggagtgaatgattgatttacctgcttctcactaagagtccattggggtggtttgcattgtaacttttcttttacatcctatttttccaggaactttggatttaagtactctcacagtgtcttaaatcataaattcttgaagttaaatttggcagagtatcaaaagggggaaaatgacaaagtgagctctaagaaaatgtgaggctacttctaagatgtgtgttcacaatagaccataactcctctagtatcaaaattggggctcttcagttaaaaaggggtggggaggacaaacgtgtcgatgtgctttggtggagaattttttccttgtgcttctagtagactttaaatattgtatccctttgtcaaaccttgtttcccaaattcaattaaagagaggagagaattgaatggcgtttagagaagatagaaaagaatcacagtcatatatttactgttatatagattgccacattctaaaattcaaatacggtgcttaaggtt

SEQ ID NO: 235100 - DNA, 1919 bp, Artificial Sequence
  derived and/or modified sequence
atggtgccgccgcctccgagccggggaggagctgccaggggccagctgggcaggagcctgggtccgctgctgctgctcctggcgttgggacacacgtggacctacagagaggagccggaggacggcgacagagaaatctgctcagagagcaaaatcgcgacgactaaatacccgtgtctgaagtcttcaggcgagctcaccacatgctacaggaaaaagtgctgcaaaggatataaatttgttcttggacaatgcatcccagaagattacgacgtttgtgccgaggctccctgtgaacagcagtgcacggacaactttggccgagtgctgtgtacttgttatccgggataccgatatgaccgggagagacaccggaagcgggagaagccatactgtctggatattgatgagtgtgccagcagcaatgggacgctgtgtgcccacatctgcatcaataccttgggcagctaccgctgcgagtgccgggaaggctacatccgggaagatgatgggaagacatgtaccaggggagacaaatatcccaatgacactggccatgagaagtctgagaacatggtgaaagccggaacttgctgtgccacatgcaaggagttctaccagatgaagcagaccgtgctgcagctgaagcaaaagattgctctgctccccaacaatgcagctgacctgggcaagtatatcactggtgacaaggtgctggcctcaaacacctaccttccaggacctcctggcctgcctgggggccagggccctcccggctcaccaggaccaaagggaagcccaggcttccccggtatgccaggccctcctgggcagcccggcccacggggctcaatgggacccatgggaccatctcctgatctgtcccacattaagcaaggccggaggggccctgtgggtccaccaggggcaccaggaagagatggttctaagggggagagaggagcgcctgggcccagagggtctccaggaccccctggttctttcgacttcctgctacttatgctggctgacatccgcaatgacatcactgagctgcaggaaaaggtgttcgggcaccggactcactcttcagcagaggagttccctttacctcaggaatttcccagctacccagaagccatggacctgggctctggagatgaccatccaagaagaactgagacaagagacttgagagcccccagagacttctacccatagcacatcccaacaccgtcacgccaaaggaagagaaagatcaactcacctgcagttaaaccatctaaagagaagaaagaccactggagacctagaaaacatacatttttctcttctcttctcctgacgtctctccactcctcttcttccaaatacgatgctattttcagagtcccctcctaggcctgcagacatgagggagtgaatgattgatttacctgcttctcactaagagtccattggggtggtttgcattgtaacttttcttttacatcctatttttccaggaactttggatttaagtactctcacagtgtcttaaatcataaattcttgaagttaaatttggcagagtatcaaaagggggaaaatgacaaagtgagctctaagaaaatgtgaggctacttctaagatgtgtgttcacaatagaccataactcctctagtatcaaaattggggctcttcagttaaaaaggggtggggaggacaaacgtgtcgatgtgctttggtggagaattttttccttgtgcttctagtagactttaaatattgtatccctttgtcaaaccttgtttcccaaattcaattaaagagaggagagaattgaatggcgtttagagaagatagaaaagaatcacagtcatatatttactgttatatagattgccacattctaaaattcaaatacggtgcttaaggtt

SEQ ID NO: 235101 - DNA, 408 bp, Artificial Sequence
  derived and/or modified sequence
atgcagctgacctgggccagcatcagcctggtgaccagatgctggccccagacccccaccttccaggacctgctggcctgcctgggcgccagagccctgcccggcccccccggcgcccccggcagagacggcagcaagggcgagagaggcgcccccggccccagaggcagccccggcccccccggcagcttcgacttcctgctgctgatgctggccgacatcagaaacgacatcaccgagctgcaggagaaggtgttcggccacagaacccacagcagcgccgaggagttccccctgccccaggagttccccagctaccccgaggccatggacctgggcagcggcgacgaccaccccagaagaaccgagaccagagacctgagagcccccagagacttctacccctag

SEQ ID NO: 235102 - DNA, 1221 bp, Artificial Sequence
  derived and/or modified sequence
atggtgccccccccccccagcagaggcggcgccgccagaggccagctgggcagaagcctgggccccctgctgctgctgctggccctgggccacacctggacctacagagaggagcccgaggacggcgacagagagatctgcagcgagagcaagatcgccaccaccaagtacccctgcctgaagagcagcggcgagctgaccacctgctacagaaagaagtgctgcaagggctacaagttcgtgctgggccagtgcatccccgaggactacgacgtgtgcgccgaggccccctgcgagcagcagtgcaccgacaacttcggcagagtgctgtgcacctgctaccccggctacagatacgacagagagagacacagaaagagagagaagccctactgcctggacatcgacgagtgcgccagcagcaacggcaccctgtgcgcccacatctgcatcaacaccctgggcagctacagatgcgagtgcagagagggctacatcagagaggacgacggcaagacctgcaccagaggcgacaagtaccccaacgacaccggccacgagaagagcgagaacatggtgaaggccggcacctgctgcgccacctgcaaggagttctaccagatgaagcagaccgtgctgcagctgaagcagaagatcgccctgctgcccaacaacgccgccgacctgggcaagtacatcaccggcgacaaggtgctggccagcaacacctacctgcccggcccccccggcctgcccggcggccagggcccccccggcagccccggccccaagggcagccccggcttccccggcatgcccggcccccccggccagcccggccccagaggcagcatgggccccatgggccccagccccgacctgagccacatcaagcagggcagaagaggccccgtgggcccccccggcgcccccggcagagacggcagcaagggcgagagaggcgcccccggccccagaggcagccccggcccccccggcagcttcgacttcctgctgctgatgctggccgacatcagaaacgacatcaccgagctgcaggagaaggtgttcggccacagaacccacagcagcgccgaggagttccccctgccccaggagttccccagctaccccgaggccatggacctgggcagcggcgacgaccaccccagaagaaccgagaccagagacctgagagcccccagagacttctacccctag

SEQ ID NO: 235103 - protein, 744 aa, Artificial Sequence
  derived and/or modified sequence
MQAVVPLNKMTAISPEPQTLASTEQNEVPRVVTSGEQEAILRGNAADAESFRQRFRWFCYSEVAGPRKALSQLWELCNQWLRPDIHTKEQILELLVFEQFLTILPGEIRIWVKSQHPESSEEVVTLIEDLTQMLEEKDPVSQDSTVSQEENSKEDKMVTVCPNTESCESITLKDVAVNFSRGEWKKLEPFQKELYKEVLLENLRNLEFLDFPVSKLELISQLKWVELPWLLEEVSKSSRLDESALDKIIERCLRDDDHGLMEESQQYCGSSEEDHGNQGNSKGRVAQNKTLGSGSRGKKFDPDKSPFGHNFKETSDLIKHLRVYLRKKSRRYNESKKPFSFHSDLVLNRKEKTAGEKSRKSNDGGKVLSHSSALTEHQKRQKIHLGDRSQKCSKCGIIFIRRSTLSRRKTPMCEKCRKDSCQEAALNKDEGNESGEKTHKCSKCGKAFGYSASLTKHRRIHTGEKPYMCNECGKAFSDSSSLTPHHRTHSGEKPFKCDDCGKGFTLSAHLIKHQRIHTGEKPYKCKDCGRPFSDSSSLIQHQRIHTGEKPYTCSNCGKSFSHSSSLSKHQRIHTGEKPYKCGECGKAFRQNSCLTRHQRIHTGEKPYLCNDCGMTFSHFTSVIYHQRLHSGEKPYKCNQCEKAFPTHSLLSRHQRIHTGVKPYKCKECGKSFSQSSSLNEHHRIHTGEKPYECNYCGATFSRSSILVEHLKIHTGRREYECNECEKTFKSNSGLIRHRGFHSAE

SEQ ID NO: 235104 - protein, 244 aa, Artificial Sequence
  derived and/or modified sequence
MQAVVPLNKMTAISPEPQTLASTEQNEVPRVVTSGEQEAILRGNAADAESFRQRFRWFCYSEVAGPRKALSQLWELCNQWLRPDIHTKEQILELLVFEQFLTILPGEIRIWVKSQHPESSEEVVTLIEDLTQMLEEKDPVSQDSTVSQEENSKEDKMVTVCPNTESCESITLKDVAVNFSRGEWKKLEPFQKELYKEVLLENLRNLEFLDFPVSKLELISQLKWVELPWLLEEVSKSSRLGSVI

SEQ ID NO: 235105 - protein, 178 aa, Artificial Sequence
  derived and/or modified sequence
MQAVVPLNKMTAISPEPQTLASTEQNEVPRVVTSGEQEAILRGNAADAESFRQRFRWFCYSEVAGPRKALSQLWELCNQWLRPDIHTKEQILELLVFEQFLTILPGEIRIWVKSQHPESSEEVVTLIEDLTQMLEEKGEIYRWREEAGDIASKSESKFLKRRQFTAKEESEVRSWDWV

SEQ ID NO: 235106 - DNA, 2235 bp, Artificial Sequence
  derived and/or modified sequence
atgcaggccgtggtgcccctgaacaagatgaccgccatcagccccgagccccagaccctggccagcaccgagcagaacgaggtgcccagagtggtgaccagcggcgagcaggaggccatcctgagaggcaacgccgccgacgccgagagcttcagacagagattcagatggttctgctacagcgaggtggccggccccagaaaggccctgagccagctgtgggagctgtgcaaccagtggctgagacccgacatccacaccaaggagcagatcctggagctgctggtgttcgagcagttcctgaccatcctgcccggcgagatcagaatctgggtgaagagccagcaccccgagagcagcgaggaggtggtgaccctgatcgaggacctgacccagatgctggaggagaaggaccccgtgagccaggacagcaccgtgagccaggaggagaacagcaaggaggacaagatggtgaccgtgtgccccaacaccgagagctgcgagagcatcaccctgaaggacgtggccgtgaacttcagcagaggcgagtggaagaagctggagcccttccagaaggagctgtacaaggaggtgctgctggagaacctgagaaacctggagttcctggacttccccgtgagcaagctggagctgatcagccagctgaagtgggtggagctgccctggctgctggaggaggtgagcaagagcagcagactggacgagagcgccctggacaagatcatcgagagatgcctgagagacgacgaccacggcctgatggaggagagccagcagtactgcggcagcagcgaggaggaccacggcaaccagggcaacagcaagggcagagtggcccagaacaagaccctgggcagcggcagcagaggcaagaagttcgaccccgacaagagccccttcggccacaacttcaaggagaccagcgacctgatcaagcacctgagagtgtacctgagaaagaagagcagaagatacaacgagagcaagaagcccttcagcttccacagcgacctggtgctgaacagaaaggagaagaccgccggcgagaagagcagaaagagcaacgacggcggcaaggtgctgagccacagcagcgccctgaccgagcaccagaagagacagaagatccacctgggcgacagaagccagaagtgcagcaagtgcggcatcatcttcatcagaagaagcaccctgagcagaagaaagacccccatgtgcgagaagtgcagaaaggacagctgccaggaggccgccctgaacaaggacgagggcaacgagagcggcgagaagacccacaagtgcagcaagtgcggcaaggccttcggctacagcgccagcctgaccaagcacagaagaatccacaccggcgagaagccctacatgtgcaacgagtgcggcaaggccttcagcgacagcagcagcctgaccccccaccacagaacccacagcggcgagaagcccttcaagtgcgacgactgcggcaagggcttcaccctgagcgcccacctgatcaagcaccagagaatccacaccggcgagaagccctacaagtgcaaggactgcggcagacccttcagcgacagcagcagcctgatccagcaccagagaatccacaccggcgagaagccctacacctgcagcaactgcggcaagagcttcagccacagcagcagcctgagcaagcaccagagaatccacaccggcgagaagccctacaagtgcggcgagtgcggcaaggccttcagacagaacagctgcctgaccagacaccagagaatccacaccggcgagaagccctacctgtgcaacgactgcggcatgaccttcagccacttcaccagcgtgatctaccaccagagactgcacagcggcgagaagccctacaagtgcaaccagtgcgagaaggccttccccacccacagcctgctgagcagacaccagagaatccacaccggcgtgaagccctacaagtgcaaggagtgcggcaagagcttcagccagagcagcagcctgaacgagcaccacagaatccacaccggcgagaagccctacgagtgcaactactgcggcgccaccttcagcagaagcagcatcctggtggagcacctgaagatccacaccggcagaagagagtacgagtgcaacgagtgcgagaagaccttcaagagcaacagcggcctgatcagacacagaggcttccacagcgccgagtag

SEQ ID NO: 235107 - DNA, 2235 bp, Artificial Sequence
  derived and/or modified sequence
atgcaagctgtggtcccactcaataaaatgacagccatcagccccgagccgcaaactttggcttcgaccgagcagaatgaggtcccacgggtggtgaccagtggagagcaggaagccattctacgaggaaatgccgctgacgctgaatcattcaggcagcgattccggtggttttgttattcagaggtggctggaccgcgcaaagcattaagtcagctgtgggaactttgcaatcagtggctgaggccagacattcacactaaggagcagattcttgaattattggtttttgagcaatttctgacgattctgccaggggagattcgaatttgggtgaaatctcaacatccggaatcatcggaagaggtggtgacactgatcgaagacctgacacagatgctggaggagaaagaccctgtgtcccaagattccaccgtatctcaagaggaaaatagtaaggaggacaagatggtgactgtttgtcccaataccgagtcctgcgaatccattactctcaaggatgttgcagtgaacttttcaaggggggagtggaaaaagctggaacctttccagaaagaactgtacaaagaagtcttgctggaaaatctccgaaacctcgagttcctggattttccagtgagcaaactggaacttattagccagctgaagtgggtggaactgccctggctccttgaggaggtgagcaaaagcagcaggttggatgaatccgccctggataaaatcattgagcgctgcctgcgagacgatgaccacgggcttatggaagaatctcagcaatattgcggcagctctgaagaggaccatgggaatcagggcaacagcaaggggagagttgcccagaataagacattaggctcaggttctagagggaagaaatttgatcctgataagtcaccatttggacacaactttaaggaaacctctgacctgattaagcatctgcgcgtgtaccttagaaaaaaatccagaaggtataatgaatcaaagaagccctttagcttccacagtgacctcgtgcttaatcgtaaggaaaaaactgcaggagagaaatctcggaaatctaacgacggtggcaaagtcctcagtcattcctcagccctgacagagcaccagaagcggcagaaaattcacctgggagataggagtcaaaagtgttcaaaatgtggaattatcttcatcagacggagtaccctgtcccgtcgtaagactcctatgtgcgaaaagtgccgtaaagactcctgccaggaagctgcactaaacaaagatgaagggaatgaaagcggggaaaagacccacaagtgcagcaaatgcggaaaagcctttggttatagcgcaagcctgaccaagcatcgacggatccacacaggcgagaaaccatacatgtgcaacgaatgtggtaaggccttcagcgattcatcttccctgactccccatcacagaacccatagtggagagaagcctttcaaatgcgacgactgtggaaagggcttcactctgtcagctcatctgatcaaacatcagcgcattcatacgggagagaaaccttataaatgcaaggactgcggaaggcccttttctgattctagttctctcattcagcatcagcgtattcacaccggcgagaaaccttatacatgctctaattgcggtaagagttttagccattcatcttccctttcaaagcaccagcgaattcatacaggagaaaagccttataagtgtggggagtgcggaaaggcttttaggcagaacagttgtctgactcggcatcagcggatccatacaggagaaaagccttacctgtgcaacgattgcggtatgacctttagccattttacgagtgttatttatcaccaacggttacacagcggagagaaaccatacaaatgtaatcagtgcgagaaagccttccccacacactctttgttgagccggcatcagcggatccacacgggcgtcaaaccttataagtgcaaggaatgcgggaagtccttcagccaaagctcctccttaaacgagcaccatcgcatacacaccggtgaaaaaccctacgagtgcaactattgtggcgccaccttttctcgttctagtattcttgtcgagcacctgaaaatccatacggggagaagggaatatgaatgcaatgaatgcgagaagacctttaaatcaaattctggcctgataaggcatcggggatttcattctgctgagtag

SEQ ID NO: 235108 - DNA, 2235 bp, Artificial Sequence
  derived and/or modified sequence
atgcaggccgtggtgcccctgaacaagatgacagccatcagccctgagccccagaccctggccagcacagagcagaatgaggtgccccgggtggtgaccagcggggagcaggaggccatcctgcggggaaatgctgctgatgctgagagcttccggcagcgcttccgctggttctgctacagcgaggtggccggccccaggaaggccctgagccagctgtgggagctgtgcaaccagtggctgcggccagacatccacaccaaggagcagatcctggagctgctggtgtttgagcagttcctgaccatcctgcctggagagatccgcatctgggtgaagagccagcaccctgagagcagcgaggaggtggtgaccctgattgaggacctgacccagatgctggaggagaaggaccctgtgtcccaggacagcacagtgtcccaggaggagaacagcaaggaggacaagatggtgacagtgtgccccaacacagagagctgtgagagcatcaccctgaaggatgtggccgtgaacttcagcagaggagagtggaagaagctggagcccttccagaaggagctgtacaaggaggtgctgctggagaacctgaggaacctggagttcctggacttccctgtgtccaagctggagctgatcagccagctgaagtgggtggagctgccctggctgctggaggaggtgtccaagagcagccggctggatgaaagtgccctggacaagatcatcgagcgctgcctgagagatgatgaccacggcctgatggaggagagccagcagtactgcggcagcagtgaagaagatcatggcaaccagggcaacagcaagggccgggtggcccagaacaagaccctgggcagcggcagccggggcaagaagtttgatcctgacaagagccccttcggccacaacttcaaggagaccagtgacctgatcaagcacctgcgggtgtacctgaggaagaagagccgccgctacaatgaaagcaagaagcccttctccttccacagcgacctggtgctgaacaggaaggagaagacagctggggagaagagcaggaagagcaatgatggcggcaaggtgctgagccacagcagcgccctgacagagcaccagaagaggcagaagatccacctgggggacaggagccagaagtgcagcaaatgtggcatcatcttcatcagaagaagcaccctgagcaggaggaagacccccatgtgtgagaagtgcaggaaggacagctgccaggaggccgccctgaacaaggatgagggcaatgaaagtggagagaagacccacaagtgcagcaaatgtgggaaggccttcggctacagcgccagcctgaccaagcaccggcgcatccacactggagagaagccctacatgtgcaatgaatgtgggaaggccttcagtgacagcagcagcctgaccccccaccacaggacccacagcggggagaagcccttcaagtgtgatgactgtgggaagggcttcaccctgagcgcccacctgatcaagcaccagaggatccacactggagagaagccctacaagtgcaaggactgtggccggcccttcagtgacagcagcagcctcatccagcaccagaggatccacactggagagaagccctacacctgcagcaactgtgggaagagcttcagccacagcagcagcctgagcaagcaccagaggatccacactggagagaagccctacaagtgtggagaatgtgggaaggccttccggcagaacagctgcctgaccaggcaccagaggatccacactggagagaagccctacctgtgcaatgactgtggcatgaccttcagccacttcaccagcgtcatctaccaccagaggctgcacagcggggagaagccctacaagtgcaaccagtgtgagaaggccttccccacccacagcctgctgagccgccaccagaggatccacactggagtgaagccctacaagtgcaaggaatgtgggaagagcttcagccagagcagcagcctgaatgagcaccaccgcatccacactggagagaagccctatgagtgcaactactgtggggccaccttcagccgcagcagcatcctggtggagcacctgaagatccacacaggccggcgggagtatgagtgcaatgaatgtgagaagaccttcaagagcaacagcggcctcatccgccaccggggcttccacagcgctgagtag

SEQ ID NO: 235109 - DNA, 2235 bp, Artificial Sequence
  derived and/or modified sequence
atgcaggccgtggtgcccctgaacaagatgaccgccatcagccccgaacctcaaaccctggcatctacagagcagaatgaagtgccacgggtggtcacttccggtgaacaggaagccatcttacggggtaatgctgccgacgctgagagcttccgccagcgattccgctggttttgttacagtgaagttgcaggtccgaggaaagccctatcacagctgtgggaattatgcaaccaatggctacgtccagacattcacactaaggaacaaatcctggagctcctagtgttcgagcagttcctgacaattctgccgggggagattaggatctgggtcaagtctcagcaccccgaaagttcggaagaggtggtgacacttatagaagaccttacccaaatgcttgaggaaaaggatcccgtaagccaggattccacggtctcacaggaagaaaacagcaaagaagacaagatggtgaccgtttgtcctaacacagagtcctgtgaatctatcacactgaaagacgtggccgttaactttagcaggggcgagtggaagaaattggaacccttccaaaaagagctatataaggaagtccttttggagaatctgcgcaacctcgaattcttagactttcccgtttcgaaattggagctgatctctcagctcaaatgggtggagctcccttggcttctcgaggaagtgagtaagtcatctcgactcgacgaatcagctctcgacaaaatcattgagcgttgtctgagggacgacgaccacggactgatggaggaaagtcagcagtattgtggtagtagcgaggaggatcatgggaaccagggcaattcaaaaggccgcgtagctcagaacaaaaccctgggtagcggttcacggggaaagaagtttgaccctgataaatctccctttggtcacaactttaaagaaacatctgatttgatcaaacaccttcgggtgtatctgcggaagaagtcccgtcgttacaacgagtcaaagaagccgtttagcttccacagcgacctagtccttaatcgcaaggaaaagaccgccggcgaaaagtcacgcaagagcaacgatgggggcaaagtcttgtcacactccagcgccctgactgagcaccagaagcgccagaaaattcacttgggcgacagatcacaaaaatgttccaagtgcggtatcattttcataaggagatcaaccctcagtaggcgaaagactcccatgtgtgaaaagtgtcgtaaagattcatgtcaagaggcagcactgaataaagatgaaggcaacgaaagcggcgaaaaaactcacaaatgttcaaagtgcggcaaagccttcggttatagcgcttctttgaccaagcatcggagaatccatacgggtgaaaagccttatatgtgcaacgaatgcgggaaagccttctcagactcttcctccttgaccccccaccaccggacgcattcgggcgaaaaacccttcaagtgtgacgactgtggcaaagggttcaccttgagcgcccatctcatcaagcatcagcggattcacacgggtgaaaagccctacaagtgcaaggattgcggccggcccttctccgactcgtcctctctcattcaacaccagaggattcatacgggcgagaagccctatacgtgttcaaattgtggaaagagcttttcacatagcagctcattgtccaaacatcagcgcatccatactggcgagaagccgtacaagtgtggtgagtgcgggaaggcctttcggcagaatagctgtctgacaaggcaccagcgcattcatacaggcgagaagccctacttgtgtaacgattgtggcatgacttttagtcacttcactagcgtgatatatcatcagcggctgcacagtggcgagaagccatataagtgcaaccagtgtgagaaggctttcccaactcacagtctgctcagccggcatcagcgcatccacacaggcgtgaagccgtacaagtgcaaagagtgcggaaaatctttttctcagagttccagtcttaacgagcaccatcgaatccatacaggtgaaaagccgtatgagtgcaactactgtggggccacatttagccggtcatccattctggtagaacaccttaagattcataccggtcgtagagagtacgagtgcaatgagtgtgaaaaaacgtttaagagcaactctggtcttattaggcaccgcggcttccacagcgcagaatag

SEQ ID NO: 235110 - DNA, 2235 bp, Artificial Sequence
  derived and/or modified sequence
atgcaagcggtggtgccactgaataagatgaccgctatctcccctgaacctcagactctggcttccacggaacagaacgaggttccaagagtggttacatctggtgagcaggaggccatcctgagggggaacgcagcggatgccgagtcattccggcagaggtttcgctggttttgctattctgaggtcgccggaccgagaaaagctctttcacagctgtgggaactctgcaaccaatggcttcgaccggacatccacaccaaagagcagattctggaactgttagtcttcgagcagttcctgacaattctgcccggagagatcagaatctgggttaaaagccagcatcccgagtcatctgaggaagttgtgaccctgattgaagatctgacacagatgctcgaagagaaagatcctgtgagtcaggacagcacggttagtcaggaagagaactcgaaagaggataaaatggtaacagtgtgccctaacacagagtcctgcgaatctatcactctcaaggatgtggcagtgaatttctctcgtggagaatggaaaaagctcgagccgttccagaaagaactgtacaaagaggtactcctggagaacctgaggaacctagagttcttagattttccggtctccaagctggagcttatttcgcagctgaagtgggtggagttgccatggcttctcgaggaagtttctaaaagtagcaggctcgacgagagcgcacttgacaaaatcatcgaaagatgcctgcgcgatgatgatcatgggcttatggaagaatctcaacagtactgcggctcttcagaggaagatcacggcaatcaagggaatagcaaaggcagagtggcgcaaaataagacgctgggaagcggttctcgtggcaaaaaattcgaccccgacaagagtccctttgggcataatttcaaagaaaccagcgatctgatcaagcatctgcgcgtatacctgcgcaagaaaagcagaaggtacaacgagagcaaaaagcccttttcttttcactcagatctcgtattaaaccgcaaggaaaaaaccgccggagagaaatcacggaagtctaatgacggcggtaaggtcctcagccacagctccgcgctaaccgagcaccagaagcgccagaaaattcacctgggcgatcgcagtcagaagtgcagcaaatgcggtattatcttcattcgcaggagcacactaagtcggagaaagactccgatgtgcgagaaatgccgcaaagatagttgtcaggaagctgccctgaacaaagatgagggaaatgaatcaggcgaaaagacccataaatgctctaaatgcggcaaggccttcggatactccgcctccctgacaaagcacagacgcattcacacaggagagaagccatatatgtgtaatgaatgcggaaaggccttctccgactccagtagcctaaccccgcaccaccgaacacacagcggcgagaaaccgtttaaatgcgacgattgtgggaagggcttcaccctctcagctcaccttataaagcatcaacggattcacactggtgaaaagccatacaaatgtaaggattgtgggcgtccattttctgacagcagttcactgatccaacaccaacgcattcacacaggcgaaaagccatacacatgcagcaactgtggaaagtcattttcacatagcagctccctgagtaagcaccagaggattcacacaggcgagaagccctacaaatgtggagagtgcggcaaagcgtttcggcagaacagctgcctgacacggcaccagcggatacacaccggagaaaagccttacctctgcaatgattgtgggatgactttttcacatttcaccagtgtgatttatcaccaacgtctgcactctggtgaaaagccttataagtgtaaccaatgcgagaaggccttcccgacccactctctgctttctcgacaccaaaggatccatactggggtgaaaccctacaaatgcaaggagtgcggaaaatcgttttctcagtcatcctcccttaacgagcaccaccgcattcacaccggcgagaaaccctatgagtgtaattactgcggtgctacattcagtcggagtagcattctggtggagcatctgaaaattcacaccggtagacgagagtatgaatgcaacgagtgtgagaaaacttttaaaagtaactccggcttgataaggcatcgagggttccactcggcagaatag

SEQ ID NO: 235111 - DNA, 3655 bp, Artificial Sequence
  derived and/or modified sequence
cgttggtgctgtttgcggatgctgatgcagtttctgcaggactgtaaactggattcctggaacctttgatattcctggctgtgtatagtgcctgttggtggactgtactgatactcaactagagtgtgaagggactggattcctgcccctgagacacaatgcaagctgtagtgcccttgaacaagatgacagccatctcaccagaacctcaaactctggcctcgactgaacaaaatgaggtcccaagagtggttacttctggggaacaagaagctattttaagaggaaatgctgctgatgcagagtctttcagacagaggtttaggtggttttgttactcagaagtagctggacccaggaaagctctgagtcaactctgggagctctgcaatcagtggctgagaccagacattcacacgaaagaacagattttagagcttctggtgtttgagcagttcctgaccattttgcctggggagatcaggatttgggtaaagtcacaacatcctgagagtagtgaggaagtggtgaccctaatagaagatttgacccagatgcttgaagaaaaagatccagtctctcaagattctactgtttcccaagaggagaactcaaaagaggataaaatggtcactgtttgtcccaatactgagtcctgtgaatctataacattgaaggatgtagctgtgaacttttcaagaggagagtggaagaagctggagccttttcaaaaggagctatataaggaagtgctactggaaaacctcaggaacctagaatttctggactttccagtttcaaaattagagttgatttcccagctaaagtgggttgaattgccatggctgctggaagaagtctcaaaaagctcccgactagatgaatcagctttagataaaataatagaaaggtgcctcagggatgatgatcatggcttgatggaagaatcccagcaatattgtggcagctcagaggaggatcacggtaatcagggaaattcaaaaggaagagtcgcacaaaacaaaactcttgggagtggcagtaggggtaagaaatttgacccagataaaagcccctttggacataatttcaaagaaacttcagacttaattaaacatctgagagtctacttgaggaagaaatctcggaggtataatgaaagcaagaaacccttcagttttcattcagaccttgttctgaaccgcaaggagaaaaccgccggagaaaagtcacggaaatctaatgatggtgggaaagtcctgagtcactcttcagctcttactgaacatcagaaacgtcagaagattcatttgggggataggtcccaaaaatgcagtaagtgtgggataatctttattagaagatcaactctttctaggagaaaaacccctatgtgtgagaaatgtcggaaagattcatgtcaagaagcagccttaaataaagatgagggaaatgagagtggagaaaaaactcataaatgtagtaagtgtggaaaagcctttggctatagcgcctcactcaccaaacatcggagaattcacactggagaaaaaccctatatgtgtaatgaatgtggaaaagcttttagtgatagttcatcgctcacaccacatcatagaactcatagtggagagaaacccttcaaatgtgatgactgtgggaaaggtttcaccctaagtgctcacctcattaaacatcagagaattcatactggagaaaaaccttataaatgtaaagactgtgggagaccctttagtgacagttcatctcttattcaacatcagcgaattcatactggagaaaaaccctatacatgtagcaattgtggaaaatccttcagtcatagctcatccctttccaaacatcagagaattcatactggagagaaaccctataaatgtggcgaatgtggaaaagcctttaggcagaattcatgccttacccggcatcagagaattcacactggagaaaaaccatatttgtgtaatgattgcggaatgacttttagccattttacgtctgtgatttatcatcaaagacttcattcaggagaaaaaccctacaaatgtaaccagtgtgagaaagccttcccaacccattcactgctaagtcgtcatcagagaattcatactggtgtaaaaccttataaatgtaaagaatgtgggaagtccttcagtcagagttcatctcttaatgagcaccaccgaattcatacaggagagaaaccctatgagtgtaactattgtggtgcaacctttagtcgaagctcaatccttgtagaacacctaaaaattcataccggaaggagagaatatgaatgtaacgaatgtgagaagacatttaaaagtaattcaggcctcattagacatcggggatttcactctgcagagtaatcctggaactacattaaagtggggggaatttaattcaaattgtcagttactgaaaccctgggatgtaaacttacagtattgatcagtagctgcagctttcgtaaattggcagttaggaaaaatatccttttgcccattcatccctcttcttttcaaggatggcaacgactggtaaacagtaattagttggtaaagtcactggaaagggaagaatgcaaaatgattctgaggccagacgaattggaaaagctcttttcttcaggggatttctctctgatttcttctactaccatgtagtgtgatggagagaacttgactgcagtcacataacttggattctgtcccagtttgccaaccaacttgctgtatacaccttggacaagtcatttgacctttcagaattttattttcgtcaccagcagaatgaagggatgggattaatgatttttgccttttttggttttttagttttttattggtatcctgataatctctgaagctgtggacataagttatttttttttatttgtcattactttcaagtttctctagtaaaaaatacaataccactattcaggatgctggacttcttttcttttttttttcttttttttttttcaatttttcttttttgggatggagtctcactatgttgcccagactggtcttgaactcctgggctcaagtgatccttccatctcactttcctgagtagctgacattacgggtacactccatcaagcctggttcctaggatgctggacttctagcttagtgagaatgcagtatactttttgaaaacttcgtgcaggaatccctcaaatgctgtaactaggaatgggtcagtgaagttcaaacgacttttccttgagggagtattttaatcggacaagggaactctttttcttttgggcattggccaacaggactgagaagccagagagcttgcacctgagccatctcagccgtgagagtaacagtcctaggaaaatagatgggggctgggggtaaggaaatgtgctgaagacagagctattctggatggattttggtttgcaaaaattctactttaaaacaattttgcctgtagcaagtacatttttttgcaattggagtgtaaacattctgtgtggcaacagttaaaagctgttataacaatttgcttgggtgtgtgtgcatgtgtgtgtgtgtgtgtgtgtgtgtatacattgttgccactatctaaaattagggcatttcatactaaaaacaaagcttgtctt

SEQ ID NO: 235112 - protein, 532 aa, Artificial Sequence
  derived and/or modified sequence
MALRSVMFSDVSIDFSPEEWEYLDLEQKDLYRDVMLENYSNLVSLGCFISKPDVISSLEQGKEPWKVVRKGRRQYPDLETKYETKKLSLENDIYEINLSQWKIMERIENHGLKGLILKNDWESTGKIEGQERPQEGYFSSVKMPSEKVSSYQKRTSVTPHQRLHFVDKPYECKECGKAFRVRQQLTFHHRIHTGEKPYECKECGMAFRQTAHLTRHQRLHSGEKLYECKECGEAFICGADLRVHQKMHIGEKPYECKECGKAFRVRGQLTLHQRIHTGEKPYVCKECGKAFRQYAHLTRHQKLNSADRLYECKECGKAFLCGSGLRVHHKLHTGEKPYECKECGKAFRVRQQLTLHQRIHTGEKPYECKECGKTFSRGYHLILHHRIHTGEKPYECKECWKAFSRYSQLISHQSIHIGVKPYDCKECGKAFRLLSQLTQHQSIHIGEKPYKCKECGKAFRLRQKLTLHQSIHTGEKPFECKECRKAFRLNSSLIQHLRIHSGEKPYECKECKKAFRQHSHLTHHLKIHNVKI

SEQ ID NO: 235113 - protein, 532 aa, Artificial Sequence
  derived and/or modified sequence
MALRSVMFSDVSIDFSPEEWEYLDLEQKDLYRDVMLENYSNLVSLGLLLLSFISTLEMLLLLVKENSMCLLSCFILDLETKYETKKLSLENDIYEINLSQWKIMERIENHGLKGLILKNDWESTGKIEGQERPQEGYFSSVKMPSEKVSSYQKRTSVTPHQRLHFVDKPYECKECGKAFRVRQQLTFHHRIHTGEKPYECKECGMAFRQTAHLTRHQRLHSGEKLYECKECGEAFICGADLRVHQKMHIGEKPYECKECGKAFRVRGQLTLHQRIHTGEKPYVCKECGKAFRQYAHLTRHQKLNSADRLYECKECGKAFLCGSGLRVHHKLHTGEKPYECKECGKAFRVRQQLTLHQRIHTGEKPYECKECGKTFSRGYHLILHHRIHTGEKPYECKECWKAFSRYSQLISHQSIHIGVKPYDCKECGKAFRLLSQLTQHQSIHIGEKPYKCKECGKAFRLRQKLTLHQSIHTGEKPFECKECRKAFRLNSSLIQHLRIHSGEKPYECKECKKAFRQHSHLTHHLKIHNVKI

SEQ ID NO: 235114 - DNA, 1599 bp, Artificial Sequence
  derived and/or modified sequence
atggccctgagaagcgtgatgttcagcgacgtgagcatcgacttcagccccgaggagtgggagtacctggacctggagcagaaggacctgtacagagacgtgatgctggagaactacagcaacctggtgagcctgggctgcttcatcagcaagcccgacgtgatcagcagcctggagcagggcaaggagccctggaaggtggtgagaaagggcagaagacagtaccccgacctggagaccaagtacgagaccaagaagctgagcctggagaacgacatctacgagatcaacctgagccagtggaagatcatggagagaatcgagaaccacggcctgaagggcctgatcctgaagaacgactgggagagcaccggcaagatcgagggccaggagagaccccaggagggctacttcagcagcgtgaagatgcccagcgagaaggtgagcagctaccagaagagaaccagcgtgaccccccaccagagactgcacttcgtggacaagccctacgagtgcaaggagtgcggcaaggccttcagagtgagacagcagctgaccttccaccacagaatccacaccggcgagaagccctacgagtgcaaggagtgcggcatggccttcagacagaccgcccacctgaccagacaccagagactgcacagcggcgagaagctgtacgagtgcaaggagtgcggcgaggccttcatctgcggcgccgacctgagagtgcaccagaagatgcacatcggcgagaagccctacgagtgcaaggagtgcggcaaggccttcagagtgagaggccagctgaccctgcaccagagaatccacaccggcgagaagccctacgtgtgcaaggagtgcggcaaggccttcagacagtacgcccacctgaccagacaccagaagctgaacagcgccgacagactgtacgagtgcaaggagtgcggcaaggccttcctgtgcggcagcggcctgagagtgcaccacaagctgcacaccggcgagaagccctacgagtgcaaggagtgcggcaaggccttcagagtgagacagcagctgaccctgcaccagagaatccacaccggcgagaagccctacgagtgcaaggagtgcggcaagaccttcagcagaggctaccacctgatcctgcaccacagaatccacaccggcgagaagccctacgagtgcaaggagtgctggaaggccttcagcagatacagccagctgatcagccaccagagcatccacatcggcgtgaagccctacgactgcaaggagtgcggcaaggccttcagactgctgagccagctgacccagcaccagagcatccacatcggcgagaagccctacaagtgcaaggagtgcggcaaggccttcagactgagacagaagctgaccctgcaccagagcatccacaccggcgagaagcccttcgagtgcaaggagtgcagaaaggccttcagactgaacagcagcctgatccagcacctgagaatccacagcggcgagaagccctacgagtgcaaggagtgcaagaaggccttcagacagcacagccacctgacccaccacctgaagatccacaacgtgaagatctag

SEQ ID NO: 235115 - DNA, 1599 bp, Artificial Sequence
  derived and/or modified sequence
atggccctccgcagtgtaatgttctcggacgtgtctatcgacttcagccccgaggagtgggaatacctggacctcgagcagaaggacctataccgggacgtgatgctggagaattattctaatctggttagcctaggatgcttcatcagcaagcccgacgttatatccagtctggagcagggtaaagaaccatggaaggttgtgagaaaaggacggcgacagtaccccgatcttgagaccaaatacgagactaagaagctgtccctagaaaacgatatctacgaaatcaacctatcacaatggaaaatcatggaacggattgaaaatcacggactgaaggggctcattctcaaaaacgattgggaatcaacaggaaagattgaaggccaggagcggccccaggagggctacttttccagcgtaaagatgccaagtgaaaaggttagctcctatcagaagcggacaagcgtgaccccacatcagcggctgcacttcgtggataagccctacgagtgcaaagagtgcggcaaggcctttcgtgttagacaacagttgaccttccatcaccgtattcacacaggagagaagccttacgagtgcaaggaatgcggtatggcctttcgccagactgcccacctaaccagacaccagcggctgcacagtggagagaagctttatgagtgcaaggagtgcggggaagcgttcatctgcggagcagatttgcgcgttcaccagaaaatgcacatcggcgagaaaccctacgagtgcaaggagtgcgggaaagccttccgggtgcgaggccagctcaccctccatcagagaattcatactggcgagaaaccatacgtgtgcaaggagtgcggaaaggctttccggcagtatgcccatctcacaaggcaccagaaacttaattcggcagacagattgtacgagtgcaaagagtgcggcaaggccttcctgtgcggatctgggctccgcgtacaccataagctgcatacgggcgagaagccctatgagtgtaaagagtgtggaaaagctttccgggtaagacagcaactgacactgcatcagcgcatccacacaggggagaagccttacgaatgcaaagaatgtggaaagactttctcgcgtggttatcacctgatcttgcatcaccggatccacactggggaaaaaccatacgagtgtaaagaatgttggaaggcatttagccgttactctcagctcatctcacaccagagcattcacatcggggttaagccctacgattgcaaggaatgtggaaaggcctttcgactactctctcagctgacccagcaccagtctatccatattggtgaaaagccatataaatgtaaggaatgtggcaaggcttttaggctgcgccagaagcttaccctccaccagagtatccacacaggagagaaaccttttgagtgtaaggagtgtagaaaggccttcaggttaaattcatccctgattcagcatctgagaatacattccggagagaaaccatatgagtgtaaggagtgcaagaaagccttccggcaacactcacacctcacccaccatcttaaaatccataatgtcaaaatctag

SEQ ID NO: 235116 - DNA, 1599 bp, Artificial Sequence
  derived and/or modified sequence
atggccctgcggtctgtgatgttcagtgatgtgtccattgacttcagccctgaggagtgggagtacctggacctggagcagaaggacctgtacagagatgtgatgctggagaactacagcaacctggtgtccctgggctgcttcatcagcaagccagatgtgatcagcagcctggagcagggcaaggagccctggaaggtggtgaggaagggccggcggcagtacccagacctggagaccaagtatgagaccaagaagctgagcctggagaatgacatctatgagatcaacctgagccagtggaagatcatggagagaattgagaaccacggcctgaagggcctcatcctgaagaatgactgggagagcacaggcaagattgagggccaggagcggccccaggagggctacttcagctctgtgaagatgcccagcgagaaggtgagcagctaccagaagaggacctctgtgaccccccaccagaggctgcactttgtggacaagccctatgagtgcaaggaatgtgggaaggccttccgggtgcggcagcagctgaccttccaccaccgcatccacactggagagaagccctatgagtgcaaggaatgtggcatggccttccggcagacagcccacctgaccaggcaccagaggctgcacagcggggagaagctgtatgagtgcaaggaatgtggggaggccttcatctgtggggctgacctgcgggtgcaccagaagatgcacatcggggagaagccctatgagtgcaaggaatgtgggaaggccttccgggtgcggggccagctgaccctgcaccagaggatccacactggagagaagccctacgtgtgcaaggaatgtgggaaggccttccggcagtatgcccacctgaccaggcaccagaagctgaacagcgctgaccggctgtatgagtgcaaggaatgtgggaaggccttcctgtgtggcagcggcctgcgggtgcaccacaagctgcacactggagagaagccctatgagtgcaaggaatgtgggaaggccttccgggtgcggcagcagctgaccctgcaccagaggatccacactggagagaagccctatgagtgcaaggaatgtgggaagaccttcagccggggctaccacctgatcctgcaccaccgcatccacactggagagaagccctatgagtgcaaggagtgctggaaggccttcagccgctacagccagctgatcagccaccagagcatccacatcggcgtgaagccctatgactgcaaggaatgtgggaaggccttccggctgctgagccagctgacccagcaccagagcatccacatcggggagaagccctacaagtgcaaggaatgtgggaaggccttccggctgcggcagaagctgaccctgcaccagagcatccacactggagagaagccctttgagtgcaaggagtgcaggaaggccttccggctgaacagcagcctcatccagcacctgcgcatccacagcggggagaagccctatgagtgcaaggagtgcaagaaggccttccggcagcacagccacctgacccaccacctgaagatccacaacgtgaagatctag

SEQ ID NO: 235117 - DNA, 1599 bp, Artificial Sequence
  derived and/or modified sequence
atggccctgcggagcgtgatgttcagcgacgtgagcatcgacttcagccccgaagaatgggaatatctcgacctggaacaaaaggacctctatcgtgatgtgatgttggaaaactacagtaatctggtgtcgttgggatgcttcatctccaagccagacgtcatctcgtccctggaacagggtaaagaaccgtggaaggttgtcagaaaaggtcgcaggcagtaccccgatctcgagacaaaatacgaaacgaagaaactcagtctcgagaacgatatttatgagattaacctttcccagtggaagatcatggagcggattgagaatcatggtctcaaaggcctgatcctcaaaaatgactgggaaagcacaggcaagatcgaaggacaagagagaccccaggaggggtactttagttcagtgaagatgccctctgaaaaagtctctagttaccagaagagaacttcagtgaccccacatcagcggcttcacttcgtggataaaccttacgaatgtaaggaatgtggaaaagcatttcgcgtgaggcagcagttgacattccaccaccgcatccatacaggagaaaaaccatacgagtgcaaagagtgtggcatggcctttcgccaaactgcccacctcacgcggcaccagcgtttgcactccggcgaaaagctgtatgagtgcaaagagtgtggcgaagcattcatttgtggggcagacctccgggtgcaccagaagatgcacataggagagaaaccttatgaatgtaaggagtgtggtaaagctttccgtgtgaggggacagttgaccctgcaccaaaggattcacacaggtgaaaaaccttacgtctgtaaagaatgtggcaaggcgttccggcagtacgcgcacctgacccgccaccagaaactgaattccgcggatagactgtacgaatgcaaggagtgtgggaaagccttcctctgcggcagtggacttagggttcaccacaagttgcatacgggagaaaaaccttatgagtgtaaggaatgtgggaaagcctttagggtgaggcaacaactgaccctgcaccagaggatccataccggcgagaagccctacgagtgcaaagagtgcggcaaaaccttctccaggggttatcaccttatcctgcaccaccgcattcatactggggagaagccctatgagtgtaaagaatgttggaaagccttttctagatatagtcagttgatctctcatcagtccatccacatcggcgtgaaaccttacgattgtaaagagtgtggcaaagcattccgtcttttatcacagctcacccaacaccagtcgatccatatcggtgaaaaaccatacaagtgtaaggagtgtggcaaggccttccgcttacgccagaaactcacactgcaccagagtatccataccggggagaaacctttcgagtgcaaagagtgcaggaaggcatttcggttaaacagcagccttatacaacatctacggattcacagtggggagaagccttacgagtgtaaagaatgtaagaaggcctttcgccagcattcacatctgacacaccacctgaaaatccacaatgtgaaaatctag

SEQ ID NO: 235118 - DNA, 1599 bp, Artificial Sequence
  derived and/or modified sequence
atggcccttagaagcgtgatgttcagcgacgtgtctattgacttcagccctgaggaatgggaatacttggatctggagcagaaggacctttatcgcgacgtcatgctggaaaactacagcaacctggtgtcactcggatgtttcatctctaaaccggacgtaatttcaagcttagaacagggtaaggaaccctggaaggtcgttcggaagggaaggcgacagtacccggatctggaaaccaagtatgagacaaaaaagctgagtctggagaatgacatctacgagatcaacctgtcccaatggaagatcatggagaggattgaaaaccacgggttaaaaggcctaattttaaaaaatgattgggaaagcacaggtaaaatcgaagggcaggaaagaccccaggagggctacttctcttcagtgaagatgccatcagaaaaagtatcgagctatcaaaagcgtacatctgttacccctcaccagcgacttcatttcgtagataaaccctacgaatgcaaagagtgcggcaaagccttccgggtcaggcagcagctcacattccaccaccggattcatactggggaaaagccatacgaatgtaaggaatgtggcatggcctttcggcagaccgcgcatctcacacgccaccagaggctgcatagcggcgagaaattgtatgaatgtaaagagtgtggggaggcattcatctgcggcgcagatctccgagtgcaccagaagatgcatattggtgaaaagccttacgagtgtaaagaatgcggtaaggcatttcgcgtaagaggccagctgacgctgcatcagcggattcacaccggcgaaaagccctacgtgtgtaaagagtgcggcaaggcatttagacagtatgcccatctcaccaggcaccaaaaactgaattctgccgatagactgtatgagtgtaaggaatgtggaaaggcctttctgtgtgggagtgggttaagagtgcaccacaagctccacactggtgagaagccttacgagtgcaaagagtgcgggaaggcttttcgtgtccgccagcagttgaccctgcatcagcggatccatacaggcgaaaagccgtatgagtgtaaggagtgtggcaaaacgttcagcaggggctaccatctgatcctgcaccatcgaatacacacaggtgaaaaaccgtacgagtgtaaggagtgctggaaggcttttagccggtatagccagctgatatcccaccagtcgattcatatcggggtcaagccctacgattgtaaagagtgtggtaaggccttccgcctcctttcccagctgacccagcaccagagcatccacatcggagaaaaaccttataagtgcaaagagtgtggtaaggccttccggcttagacagaagctcactctacatcagagtatacacacaggagaaaagcccttcgagtgtaaggaatgcagaaaggcctttagactgaactcctcccttatccagcacctcaggatccactccggagagaagccatacgaatgtaaagaatgtaagaaagccttccggcagcattcccacctaacacatcatcttaagatccacaatgtgaagatttag

SEQ ID NO: 235119 - DNA, 2623 bp, Artificial Sequence
  derived and/or modified sequence
gcgcagcccgttaggccccggggattgtggcgtgacccggcagcggcttcctccgttcgggcatcgctgtgcctcgggttcgcgccccgagtgagcagtcctggcccggagcgtcggtcctggtaatctgtaggaaaagcgctgcggcccagggggtaaagagagatcagcctctgtggactcggtgcttctcctggcaagtaaaccccaaggaggactgaccagttcttgaatttctataccatggcccttcgatcagtgatgttcagtgatgtatccatagacttctctccagaagagtgggaatacctggacttggaacaaaaggacttgtacagagatgtcatgttggagaactacagcaacttggtctcactgggatgcttcatttctaaaccagatgtgatttcctcattggagcaaggaaaagagccttggaaagttgtgaggaaaggaagaagacaatatccagatttggagaccaagtatgagaccaagaagttatctttagaaaatgacatttatgaaataaatttatcccagtggaagataatggaaagaattgaaaaccatggccttaagggtctcattttaaaaaatgattgggaatccacaggaaaaattgaaggacaggagagacctcaagaaggatacttcagtagtgtgaaaatgccatctgaaaaggtgtcctcttaccagaaacgcacatctgttactccacatcagagacttcattttgttgataaaccctatgaatgtaaggaatgtgggaaggcgttcagagtgcgccaacagcttacttttcatcacagaattcatactggtgaaaaaccgtatgaatgtaaggaatgtgggatggccttcagacagactgcacaccttactcgacatcagagacttcattctggtgaaaaactctatgaatgtaaggaatgtggggaagctttcatatgtggtgcagatcttagagtacatcagaaaatgcatattggtgagaagccctatgaatgtaaagaatgtgggaaggcttttagggtacgaggacaacttactctgcatcagaggattcatactggtgagaaaccctatgtgtgtaaagagtgtggaaaagcctttagacagtacgcacacctgactcggcatcagaagcttaatagtgctgacaggctctatgaatgcaaagaatgtgggaaggcctttttgtgtggctctggtcttagagtacatcacaaacttcatactggtgagaaaccctatgaatgtaaggaatgcgggaaggcctttagagtgcgacaacaactaacactccatcagagaattcatactggtgagaaaccctatgaatgtaaggaatgtggaaagacctttagccgtggttatcatcttattctccatcacagaattcatactggtgaaaaaccttacgaatgtaaggaatgctggaaagcctttagtcgctactcacaacttatttcacatcagagtattcatattggtgttaagccctatgactgtaaggaatgcgggaaggccttcagactactttcacaactcacacagcatcagagtattcatattggtgagaaaccttataaatgtaaggaatgtggcaaggcctttagattgcgccaaaaacttactctacatcagagcattcatactggcgaaaaaccctttgagtgtaaggaatgtaggaaggcctttagacttaattcatcccttattcaacatctgagaattcattctggtgagaaaccctatgaatgtaaggaatgtaagaaggcctttaggcaacattcacaccttactcatcatctgaaaattcataatgtaaaaatctaagaaagtcttttcaacttctgtgttatagaacattctatgaatgtagtaattaatctattttgctccatacatgcaactgcgttggcattagaggttttataccattaaaagagtgtgacaatgtattgtagtccatcatcactcaaacctgaaacttcagcatatttgttctaaaaactaatcctgttataagaatgaaaaagacatttaccgtcatccctatcccatcactttgtgtcatactggacaagacgcttaactgctctgtgctataattttttaatttatgacatggtcatataagagtgcagcagtttgacacactttcaatcaagaggtggaatctacatccctctgttgtatacaggaatctacatccctctgtgactgcttcgcccagtagaatatggtagacgtactgctgtgctggtttcttgactcagactttactggtagggttacttcatctcatgaaatgacagaactgtcttgttacaaagtctggctactttgctgaagagaccacatgaagaggccctgaaactacgtagagagggagaggcacctgctgaaccctgtcttcttgacatccaccaagataccagacatttgagtgaaattttggatccaccagaccagccaccagctaaatgccagtgagcgacttggtaacctgaactgatgccatgtagaatggaagaattgaccagctgagcccctggcccaaatttctgacccacaaaaacatgagatataataaaatggttgttgttttaagcca

SEQ ID NO: 235120 - protein, 685 aa, Artificial Sequence
  derived and/or modified sequence
MLWFSGVGALAERYCRRSPGITCCVLLLLNCSGVPMSLASSFLTGSVAKCENEGEVLQIPFITDNPCIMCVCLNKEVTCKREKCPVLSRDCALAIKQRGACCEQCKGCTYEGNTYNSSFKWQSPAEPCVLRQCQEGVVTESGVRCVVHCKNPLEHLGMCCPTCPGCVFEGVQYQEGEEFQPEGSKCTKCSCTGGRTQCVREVCPILSCPQHLSHIPPGQCCPKCLGQRKVFDLPFGSCLFRSDVYDNGSSFLYDNCTACTCRDSTVVCKRKCSHPGGCDQGQEGCCEECLLRVPPEDIKVCKFGNKIFQDGEMWSSINCTICACVKGRTECRNKQCIPISSCPQGKILNRKGCCPICTEKPGVCTVFGDPHYNTFDGRTFNFQGTCQYVLTKDCSSPASPFQVLVKNDARRTRSFSWTKSVELVLGESRVSLQQHLTVRWNGSRIALPCRAPHFHIDLDGYLLKVTTKAGLEISWDGDSFVEVMAAPHLKGKLCGLCGNYNGHKRDDLIGGDGNFKFDVDDFAESWRVESNEFCNRPQRKPVPELCQGTVKVKLRAHRECQKLKSWEFQTCHSTVDYATFYRSCVTDMCECPVHKNCYCESFLAYTRACQREGIKVHWEPQQNCAATQCKHGAVYDTCGPGCIKTCDNWNEIGPCNKPCVAGCHCPANLVLHKGRCIKPVLCPQR

SEQ ID NO: 235121 - DNA, 2058 bp, Artificial Sequence
  derived and/or modified sequence
atgctgtggttctctggagtcggcgctctggccgaaaggtactgccgtagatcccctggtattacctgctgcgttctgctactgctcaattgcagcggcgtccctatgagcctggcctcttcttttctgaccggctcggtggctaaatgtgagaacgagggcgaagtcctgcagatccctttcattacagacaacccttgcatcatgtgcgtgtgcctcaataaggaggttacatgcaaaagggaaaaatgtcctgtgctgtccagagattgcgctctcgcgatcaagcagaggggggcctgctgcgagcagtgcaagggttgtacttatgaggggaatacctataattctagctttaagtggcagtctcctgcggaaccctgcgtattgcggcagtgccaggaaggcgtggtgaccgaaagcggcgttcgctgcgtcgtgcactgcaaaaacccattagagcacctggggatgtgctgcccaacatgccccggatgtgtctttgagggggtgcagtaccaggaaggcgaggaattccagcctgagggctccaagtgcacaaagtgttcttgtacgggaggtaggacccagtgcgtacgcgaggtctgtcccatcctgtcatgcccccagcacctctcacatattcctcccggccagtgctgtcctaagtgcctgggccagagaaaggtgttcgatctgccatttggttcttgtctattccgcagtgacgtgtacgacaatggaagctcgttcttgtacgacaattgcactgcctgcacttgccgtgactctaccgtggtttgtaagcgcaaatgctctcatcccggggggtgcgatcaaggacaggaggggtgttgcgaggaatgcttgctacgagtgccccctgaagacatcaaggtgtgcaagttcggaaataaaatatttcaggacggcgaaatgtggagtagcatcaattgcacaatttgtgcctgcgtaaaggggcgtacagaatgtcgaaataagcaatgtattcccatcagcagctgcccacaaggaaaaattctaaatagaaaaggctgctgtcctatctgcacggagaaaccgggcgtttgcactgtgtttggagacccacactataacactttcgacgggcggacatttaattttcaggggacctgccagtatgttctcaccaaggattgctcatcgcctgcgtccccttttcaggttctggtgaaaaacgatgcaagaaggactcgatctttttcttggactaaatctgtggagctggtgcttggtgaatctcgagtctcgttgcagcagcacttgacagtgcgctggaatggcagccggattgccttaccatgccgggcccctcatttccatatagatctcgacgggtatctgcttaaggtcaccaccaaggccggcctggagatatcttgggatggtgatagctttgtggaagttatggcagcgccacacctcaagggaaagttgtgcggtctctgcgggaactacaacggccacaaaagagacgacttgattggcggagacggaaattttaaattcgacgtagatgattttgccgaatcctggagagttgaaagcaacgagttctgtaaccggccacagcgaaagccagtacctgagttatgccagggaactgttaaagttaagctcagggcccatcgcgagtgccagaagcttaagtcctgggaattccaaacgtgtcattcaaccgttgattacgccaccttctacagatcttgtgtaacagacatgtgcgaatgtccggtccacaagaattgttactgcgaatccttcctagcctatacccgcgcgtgccaacgggagggcatcaaggtccactgggagcctcagcagaactgcgccgctacgcagtgtaagcacggggccgtgtacgatacctgcggaccaggctgtatcaaaacctgtgataattggaacgagataggtccctgtaataagccgtgcgtagccggctgccactgtccagcaaatttggtcttgcacaaggggagatgcattaagcctgtgctctgtccacagaggtag

SEQ ID NO: 235122 - DNA, 2058 bp, Artificial Sequence
  derived and/or modified sequence
atgctctggttctcaggcgtcggggccctggcggaacgttactgtcggagatcccccggcatcacctgttgcgtccttctgctgttaaattgcagtggcgtgcctatgtccctagcttcctcctttcttacaggcagcgttgctaagtgcgaaaatgagggggaggtgctgcaaatacccttcatcacagacaacccgtgtatcatgtgcgtctgcctaaacaaagaagtgacatgtaagcgggagaagtgtccggttctcagtcgggactgtgccttagcaataaaacagcggggagcttgctgtgagcagtgcaagggatgcacctatgagggaaacacttacaacagctcttttaaatggcagagccccgcggagccatgcgtgctgaggcagtgtcaggaaggagtagtaacagagtctggcgtgcgctgcgtggtgcactgtaagaatcctctggagcacctggggatgtgttgtcctacatgccctgggtgcgtattcgagggggtacagtaccaggagggggaagaattccagcccgagggcagcaaatgtactaagtgttcctgcacaggcggaagaacacagtgcgtccgggaggtgtgcccgattctgagctgcccccagcatttgtcacatatcccccctggccaatgttgcccaaaatgcctggggcagcgcaaagtgttcgaccttcctttcgggtcatgccttttcagatcagatgtatacgacaatggttcctcgtttctctacgacaattgtacagcctgtacatgtcgcgactccacagtcgtgtgtaaacgtaagtgctcccacccagggggctgtgaccaaggtcaggaagggtgttgtgaagagtgtttgctgcgagtcccgcctgaagacattaaagtgtgtaagtttggcaataaaatattccaggacggtgaaatgtggtccagcattaactgcacaatttgcgcatgcgttaaaggcaggacagaatgtcgtaataagcagtgcataccaatcagctcctgtcctcagggcaaaattcttaaccgaaaggggtgttgcccaatttgtaccgagaaacctggcgtgtgtaccgtgtttggcgatccccattacaatacttttgacgggcgcaccttcaactttcagggcacctgtcaatacgtgctgacaaaggactgttcctctcctgctagtcctttccaggtgctggtcaagaacgatgcgagacgtacccgaagctttagctggaccaaaagcgtcgagctggtgctcggcgaatctagggtgtccttgcagcagcatttaaccgtgaggtggaacggatctcgcattgctctgccctgtagagctccgcatttccacatcgatctcgatggctatttgttaaaggtgacaacgaaagccggtctggagatttcttgggacggagattcttttgtagaggttatggcagctccccacctcaaagggaaattgtgcggactgtgtggtaactataacgggcacaaacgagacgacctaatcggcggcgatggcaatttcaaatttgatgtcgacgacttcgctgaatcctggcgcgttgagtctaatgagttctgtaatagaccgcagcgaaagcctgttcctgagctctgtcagggaacagtgaaagtcaaattgagagcgcatcgggagtgccaaaagctgaaatcctgggagttccagacctgtcacagcaccgtagactacgccacgttctacagaagctgtgtgaccgatatgtgcgaatgtcctgttcataagaattgctattgtgaatcgttcctcgcatacactagagcctgtcagagggaaggcatcaaggttcactgggagcctcaacagaattgcgcagctactcagtgtaagcatggtgcggtctacgacacatgcggaccgggctgcatcaagacctgtgataattggaacgagatcggtccttgcaataagccctgtgttgccggttgccactgtccagcgaatcttgtcctacataaagggagatgcataaaaccagtactgtgcccacagcgctag

SEQ ID NO: 235123 - DNA, 2058 bp, Artificial Sequence
  derived and/or modified sequence
atgctgtggttctctggagtgggcgccctggccgagcgctactgccgccgcagccctggcatcacctgctgcgtgctgctgctgctgaactgcagcggcgtgcccatgagcctggccagcagcttcctgaccggctctgtggccaagtgtgaaaatgaaggagaggtgctgcagatccccttcatcacagacaacccctgcatcatgtgtgtgtgcctgaacaaggaggtgacctgcaagcgggagaagtgccctgtgctgagccgggactgtgccctggccatcaagcagagaggagcctgctgtgagcagtgcaagggctgcacctatgagggcaacacctacaacagcagcttcaagtggcagagccctgctgagccctgtgtgctgcggcagtgccaggagggcgtggtgacagaaagtggagtgcgctgtgtggtgcactgcaagaaccccctggagcacctgggcatgtgctgccccacctgccccggctgtgtgtttgagggcgtgcagtaccaggagggggaggagttccagcctgagggcagcaagtgcaccaagtgcagctgcaccggcggccgcacccagtgtgtgcgggaggtgtgccccatcctgagctgcccccagcacctgagccacatccccccaggccagtgctgccccaagtgcctgggccagaggaaggtgtttgacctgcccttcggcagctgcctcttcagaagtgatgtgtatgacaatggcagcagcttcctgtatgacaactgcacagcctgcacctgccgggacagcacagtggtgtgcaagaggaagtgcagccaccctgggggctgtgaccagggccaggagggctgctgtgaggagtgcctgctgcgggtgcccccagaggacatcaaggtgtgcaagtttggaaacaagatcttccaggatggagagatgtggagcagcatcaactgcaccatctgtgcctgtgtgaagggccgcacagagtgcaggaacaagcagtgcatccccatcagcagctgcccccagggcaagatcctgaacaggaagggctgctgccccatctgcacagagaagccaggagtgtgcaccgtgtttggagacccccactacaacacctttgatggccgcaccttcaacttccagggcacctgccagtatgtgctgaccaaggactgcagcagccctgccagccccttccaggtgctggtgaagaatgatgcccggaggaccaggagcttctcctggaccaagtctgtggagctggtgctgggggagagccgggtgtccctgcagcagcacctgactgtgcgctggaatggcagcagaattgccctgccctgccgggccccccacttccacatcgacctggatggctacctgctgaaggtgaccaccaaggccggcctggagatctcctgggatggagacagctttgtggaggtgatggccgccccccacctgaagggcaagctgtgtggcctgtgtggcaactacaacggccacaagagagatgacctgattggaggagatggcaacttcaagtttgatgtggatgactttgctgagagctggagggtggagagcaatgagttctgcaaccggccccagaggaagcctgtgcctgagctgtgccagggcaccgtgaaggtgaagctgcgggcccaccgggagtgccagaagctgaagtcctgggagttccagacctgccacagcacagtggactatgccaccttctaccgcagctgtgtgacagacatgtgtgagtgccctgtgcacaagaactgctactgtgagagcttcctggcctacacccgggcctgccagcgggagggcatcaaggtgcactgggagccccagcagaactgtgccgccacccagtgcaagcatggagctgtgtatgacacctgtggccctggctgcatcaagacctgtgacaactggaatgagatcggcccctgcaacaagccctgtgtggccggctgccactgcccagccaacctggtgctgcacaagggccgctgcatcaagcctgtgctgtgcccccagaggtag

SEQ ID NO: 235124 - DNA, 2058 bp, Artificial Sequence
  derived and/or modified sequence
atgctgtggttcagcggcgtgggcgccctggccgagcggtactgcaggagaagtcctgggatcacctgctgcgtgctcttgctcctaaattgctcaggcgtccctatgagcctcgcatcttcattcctaaccggaagcgtagccaagtgtgaaaatgagggtgaggtgctccaaataccatttattactgacaatccttgcataatgtgcgtgtgccttaacaaggaagtaacttgtaagcgggaaaagtgccccgtgttgtcacgcgattgtgcgcttgcaatcaagcagcgtggggcctgttgcgaacagtgcaaggggtgcacatacgaaggcaacacctacaattctagtttcaagtggcagagccctgcagagccttgtgtccttaggcagtgtcaggagggtgtggtgacagagtcaggcgtccgatgtgtggttcactgtaaaaatccgctcgagcacctgggcatgtgttgtcctacctgtccaggctgtgtgtttgagggagtgcagtatcaggagggcgaagaatttcaaccagaaggcagcaagtgtacgaaatgtagctgcaccggtgggcgcacccaatgcgtgcgggaggtatgccctattctgtcctgcccccagcatctgtcacatatccctccggggcagtgctgtcctaagtgtctgggtcagaggaaggtgttcgatttgccttttggaagttgcctctttaggtctgatgtctatgacaatgggtcttcctttttatacgataattgtactgcgtgtacatgccgagacagtacggtagtgtgcaagcgaaagtgcagtcacccaggtgggtgtgaccaggggcaggaggggtgttgtgaagagtgtctgttacgggtaccccccgaggatattaaggtctgtaagttcgggaacaagatcttccaggacggagaaatgtggtccagcataaactgcacaatatgcgcctgtgtgaagggccgtacggagtgcaggaataagcagtgcataccgatctcctcctgcccgcaaggcaagatcctgaacaggaaaggctgctgtcccatctgtacagagaaaccaggcgtctgtaccgtctttggggaccctcattataatacattcgacggccgcacctttaacttccagggtacctgtcagtatgtgctgaccaaagattgttccagtcctgcgagcccctttcaggtactcgtaaagaacgacgctagacgcaccagatcattctcttggaccaagagtgttgagctggtgttgggggaatccagagtgtctctgcaacaacatctgacagttcggtggaacggaagccggatcgcccttccatgccgggctccgcactttcacattgatcttgacgggtatttgcttaaagtgacgaccaaagccgggctggagataagttgggacggcgactcttttgtcgaggtgatggcagctccccatctgaaaggtaagctgtgcggactgtgcggtaactataacggccataagcgagacgatttaataggaggagatgggaattttaagttcgacgtcgacgactttgccgagtcatggcgcgtagagtcaaacgagttctgcaatcgcccccagcgaaaacccgtgccagagctttgtcaaggcaccgtcaaggtgaagttgagagcacatcgggaatgccagaagctgaaatcatgggaatttcagacgtgccacagcacagttgattatgctacgttttaccggagctgcgtcactgacatgtgcgagtgtcccgtgcacaagaactgctactgtgaatcgttcttggcgtacacaagagcgtgtcagcgcgagggaataaaggttcactgggaacctcaacaaaactgcgcagcaacgcagtgtaagcatggagcagtttacgacacatgcggccccgggtgtattaagacctgtgacaattggaacgagataggtccttgtaataaaccgtgcgtggcaggttgtcattgtccagcaaacctggttcttcataagggcagatgtattaaaccagtgttgtgtccccagcggtag

SEQ ID NO: 235125 - DNA, 2058 bp, Artificial Sequence
  derived and/or modified sequence
atgctgtggttcagcggcgtgggcgccctggccgagcggtactgccgccggtctccaggcattacatgttgcgtgctgctgcttctgaattgttccggcgtgccaatgagcctggcctcatcattcctgacagggagtgtggctaaatgtgaaaacgagggggaggtactgcaaataccctttattacagataatccctgtatcatgtgtgtgtgtctgaacaaggaagtcacatgcaagcgcgaaaaatgtcccgttctgagccgcgactgtgccttggccattaaacagcgaggggcctgctgtgagcagtgcaagggctgcacctacgagggaaatacttacaacagttcattcaagtggcagagccctgccgagccatgtgttctgcgccagtgtcaggagggggtggttaccgagagcggggtgcgctgtgttgtacactgtaagaatccactcgagcacttgggtatgtgctgccctacttgccctggatgtgtcttcgagggagtgcagtaccaggaaggcgaagagtttcaacccgagggatccaagtgcacaaaatgctcgtgtactggggggcggacgcagtgtgtgcgcgaagtctgcccgattctgtcctgcccccagcacttaagtcacatcccccccggccaatgttgtccaaaatgtctcggacaaagaaaagttttcgatctcccattcggctcctgcctttttcgttcagacgtctatgacaatggctcttccttcctgtacgacaactgtacagcttgtacttgtcgagatagcacagtcgtgtgtaagagaaagtgcagccatccaggagggtgcgaccaaggacaggagggatgctgtgaagaatgtctgctgcgagttcctcctgaagacattaaggtttgcaagttcggtaacaaaattttccaagacggcgagatgtggagtagtattaactgcaccatctgtgcctgcgtaaaggggcggacagaatgccgaaacaagcagtgtattcccatcagttcatgcccacagggaaagattcttaatcggaaaggatgctgtccaatctgtacggaaaagcccggggtctgtacggtatttggtgatccccactataataccttcgacgggcgcactttcaattttcagggaacgtgccaatacgtccttaccaaggattgttctagccccgcttcaccattccaagtccttgtcaaaaacgatgctagacgcacccgcagtttctcttggaccaagtctgtcgaactagtgctgggggagagcagagtgtctctacagcagcacctgacggtgcgatggaacggctcccggatagctctcccctgtagggcgccccacttccatatcgacctcgatggatatctcctcaaagtaacaaccaaggccggccttgagatcagctgggacggcgatagctttgtcgaagtaatggccgctccacatcttaaggggaaactttgcgggctttgcggcaattataatggacataagcgggacgacctcatagggggcgatggcaattttaaatttgacgtcgatgactttgctgagagctggcgtgtggaaagcaacgaattttgcaatagaccacagcgcaagcccgttcctgagctctgccaaggcaccgtgaaagtcaaactgagagcccatcgcgagtgccagaaattgaagtcatgggaattccagacctgtcattcaactgtggactatgcgaccttctaccgatcttgtgtgaccgacatgtgtgagtgcccggtacacaagaattgttactgcgagagctttctggcctatacgagggcgtgccagagggaaggcataaaagtacattgggagccacagcagaattgtgccgcgacacaatgcaaacacggcgccgtgtacgatacgtgcggacccggatgcatcaaaacctgcgataactggaatgaaattggcccatgcaacaagccctgtgtcgccgggtgccactgccctgcaaatctcgtgctgcataaagggcgttgcataaagcctgtcctgtgcccacagcggtag

SEQ ID NO: 235126 - DNA, 2058 bp, Artificial Sequence
  derived and/or modified sequence
atgctgtggttctcgggcgttggcgctctggctgaaaggtactgcaggcgttcaccgggaattacatgctgcgtgctgctgctgctgaattgcagtggggttcccatgagtctggcttcctcattcctgactggtagcgtcgctaaatgtgaaaatgagggcgaggtgctccaaatcccgtttatcaccgataacccatgtattatgtgtgtgtgcctaaacaaagaagtgacttgcaagcgggaaaaatgtcctgtgctgtcccgcgactgtgccctggcgatcaaacagcgcggagcctgctgtgaacagtgcaagggctgcacctatgaaggaaacacctacaactccagcttcaagtggcagtcaccagccgaaccttgcgttctgcgccaatgtcaggagggagtggtgaccgagtccggcgtgaggtgtgtggtccactgcaaaaaccccctcgaacaccttggcatgtgttgtcccacctgccctggctgtgtgttcgagggtgtccagtaccaggaaggcgaagaatttcaacctgaggggtcaaagtgcactaaatgcagctgtacaggaggcagaacacagtgcgtgcgggaggtctgccctatcctgagttgtccccagcatttatctcacataccaccaggccagtgctgcccaaagtgccttggtcaacgaaaggtgttcgacctgccatttgggtcgtgtctgtttagatctgatgtgtatgataatgggagctcctttctgtacgacaactgtaccgcctgcacatgtagagatagcaccgtggtgtgcaaacgaaagtgttcccatcccggtggctgcgaccagggacaggaggggtgttgtgaagagtgcctgcttcgagttccccctgaggatataaaagtttgcaaattcgggaacaagatctttcaggacggtgagatgtggagcagcatcaactgcactatctgtgcatgtgtgaaaggacggacagagtgtcggaacaaacagtgcattcctatcagctcatgtccgcaggggaagatcctcaacaggaagggatgttgtcctatctgcaccgagaaacccggtgtgtgcaccgtctttggcgacccccactacaataccttcgacggccgaacctttaactttcagggcacttgccagtacgtgctgaccaaggactgttcatctcctgcttctccattccaagttctggtgaagaacgacgcccgacgcacgcgtagcttctcatggactaaatcagtggagctcgttttgggggaatccagagtttcactgcagcagcacctcaccgttcgttggaacggatcccgaattgctttaccctgcagagcccctcatttccacatcgatctcgacggatacttgctgaaagtgaccactaaagctggtctggagatcagttgggatggcgacagctttgtggaggtcatggccgcaccccatttaaaaggcaagctctgtgggctgtgtggtaattataatgggcataaaagggacgatctcatcgggggagacggcaactttaaattcgacgtcgacgattttgccgagtcctggagagtcgaaagtaatgaattttgcaacagaccgcaacggaagcccgtgcctgagctgtgtcagggaacggtgaaggtgaaattgcgcgcacatcgtgagtgccaaaagctaaagagctgggagttccagacctgccacagcacggtggattatgccaccttctaccgatcatgtgtcactgacatgtgcgagtgcccagtgcacaaaaattgctactgtgagagtttcctcgcgtatacccgcgcttgtcagagggagggtataaaggtgcattgggagccgcagcagaactgcgccgctacccagtgcaagcacggcgctgtctatgacacctgcggacccggatgcattaagacctgcgacaattggaacgagattggaccatgtaacaagccctgtgtcgcgggatgtcactgccccgcaaacctggttctgcataagggcaggtgtatcaaacctgtgctctgccctcagaggtag

SEQ ID NO: 235127 - DNA, 2058 bp, Artificial Sequence
  derived and/or modified sequence
atgctgtggttctctggagtgggggctctagccgaaagatactgcaggcgatcacccggaatcacctgctgtgtcctgttactgctgaactgctctggcgtgccgatgagcctggctagctcatttctcacggggagcgtcgctaagtgtgagaacgaaggggaggttctgcagatcccctttattaccgataacccctgcattatgtgcgtctgcctaaacaaagaagtcacctgcaaaagagagaaatgccccgtgctgagccgagattgcgcactggctatcaagcagagaggcgcatgttgcgaacagtgtaaaggatgtacttacgaagggaatacctataactctagttttaagtggcagtcgcccgctgaaccctgtgtgctgcggcagtgtcaggagggtgttgttactgagagtggagtgagatgcgtggtgcattgtaaaaacccgctcgaacatctgggtatgtgctgccctacctgtcccggatgtgtgtttgaaggtgtgcagtatcaggaaggggaggagtttcagccagagggctctaaatgcactaaatgcagttgtacaggaggcagaacacagtgtgtccgggaggtctgtcccatcctgagctgcccccagcatctcagccacatcccccctgggcagtgctgccctaaatgcctcggccagcgtaaagtcttcgacttaccttttggttcttgtctcttcaggagtgatgtgtatgacaacggatccagctttctgtatgacaactgcaccgcttgtacttgccgagactccacagtggtatgtaagaggaaatgttcccacccaggcggatgcgaccagggccaggaaggatgttgtgaggagtgtttgctacgcgttccacctgaagacattaaggtgtgcaagtttggaaataaaatctttcaggatggggagatgtggagctccattaattgcaccatatgcgcgtgtgttaaaggaaggaccgagtgccggaataagcagtgtattcctatttcatcatgcccccagggcaagatcctgaacagaaaagggtgctgtccaatatgcaccgagaagcctggggtgtgcacagtgtttggcgacccccattataatacttttgatggacgcactttcaactttcaaggtacttgtcagtacgtcctgactaaagattgttctagtcccgcttcgcccttccaggtactggtcaaaaacgatgcccgtcggaccagaagcttttcgtggaccaaaagtgttgagctcgtgctgggcgagagcagggtgtcccttcagcagcatctgactgtgaggtggaatggctccagaatagccctgccatgccgggcacctcactttcacatcgacttggacggatacctgttaaaggtgacaacaaaggcgggtcttgaaattagttgggatggtgactccttcgtcgaagtcatggctgcaccacacctaaagggcaaactctgtggtttgtgcgggaactataatggtcataaacgagacgatcttattgggggagatggtaattttaagttcgacgtcgacgacttcgctgagtcctggcgtgtggagtccaatgaattctgcaacaggcctcagcgcaagccagtccccgagctttgccagggaacagtgaaggttaaactgagagctcatagggaatgtcagaagttgaaatcatgggagttccaaacttgccactctaccgtggattacgcgacattttatcggtcatgcgtcacagacatgtgtgagtgtcccgtgcataagaactgttactgcgagtcattcttggcatacacccgggcttgccagcgcgaaggcatcaaggtgcactgggagccccagcagaactgtgccgctacgcagtgcaaacacggggctgtttatgacacatgcggtccaggatgtattaaaacctgtgacaattggaacgaaatcgggccatgtaataagccgtgcgtcgctggatgtcattgccctgccaatttggttctccataaggggaggtgtatcaagcccgtgctgtgcccacagagatag

SEQ ID NO: 235128 - DNA, 5031 bp, Artificial Sequence
  derived and/or modified sequence
ggacagtggagacgcgccttctcggctctggtccgcgccctggggccctggcctccctggaggggctggggaactggaagctgggccgagagagttcccgctgcagctatcgcgcagtccctcctgcgcccgggcgcccccagcgggttccgggaggcgcccggtgagcccacgtctgttgcggcggagcgagcgcgctccgggagggccgagagccggcggggctggcaggagctctcgggcgcccgcctccctccttcgcggacggtctcccgacacgccggctgagagcccttttcgactgtgagctgcggcagctgagcagaggcggcggcgcgggacctgcagtcgccagggattccctccaggtgacgatgctctggttctccggcgtcggggctctggctgagcgttactgccgccgctcgcctgggattacgtgctgcgtcttgctgctactcaattgctcgggggtccccatgtctctggcttcctccttcttgacaggttctgttgcaaaatgtgaaaatgaaggtgaagtcctccagattccatttatcacagacaacccttgcataatgtgtgtctgcttgaacaaggaagtgacatgtaagagagagaagtgccccgtgctgtcccgagactgtgccctggccatcaagcagaggggagcctgttgtgaacagtgcaaaggttgcacctatgaaggaaatacctataacagctccttcaaatggcagagcccggctgagccttgtgttctacgccagtgccaggagggcgttgtcacagagtctggggtgcgctgtgttgttcattgtaaaaaccctttggagcatctgggaatgtgctgccccacatgtccaggctgtgtgtttgagggtgtgcagtatcaagaaggggaggaatttcagccagaaggaagcaaatgtaccaagtgttcctgcactggaggcaggacacaatgtgtgagagaagtctgtcccattctctcctgtccccagcaccttagtcacatacccccaggacagtgctgccccaaatgtttgggtcagaggaaagtgtttgacctcccttttgggagctgcctctttcgaagtgatgtttatgacaatggatcctcatttctgtacgataactgcacagcttgtacctgcagggactctactgtggtttgcaagaggaagtgctcccaccctggtggctgtgaccaaggccaggagggctgttgtgaagagtgcctcctacgagtgcccccagaagacatcaaagtatgcaaatttggcaacaagattttccaggatggagagatgtggtcctctatcaattgtaccatctgtgcttgtgtgaaaggcaggacggagtgtcgcaataagcagtgcattcccatcagtagctgcccacagggcaaaattctcaacagaaaaggatgctgtcctatttgcactgaaaagcccggcgtttgcacggtgtttggagatccccactacaacacttttgacggtcggacatttaactttcaggggacgtgtcagtacgttttgacaaaagactgctcctcccctgcctcgcccttccaggtgctggtgaagaacgacgcccgccggacacgctccttctcgtggaccaagtcggtggagctggtgctgggcgagagcagggtcagcctgcagcagcacctcaccgtgcgctggaacggctcgcgcatcgcgctcccctgccgcgcgccacacttccacatcgacctggatggctacctcttgaaagtgaccaccaaagcaggtttggaaatatcttgggatggagacagttttgtagaagtcatggctgcgccgcatctcaagggcaagctctgtggtctttgtggcaactacaatggacataaacgtgatgacttaattggtggagatggaaacttcaagtttgatgtggatgactttgctgaatcttggagggtggagtccaatgagttctgcaacagacctcagagaaagccagtgcctgaactgtgtcaagggacagtcaaggtaaagctccgggcccatcgagaatgccaaaagctcaaatcctgggagtttcagacctgccactcgactgtggactacgccactttctaccggtcctgtgtgacagacatgtgtgaatgtccagtccataaaaactgttattgcgagtcatttttggcatatacccgggcctgccagagagagggcatcaaagtccactgggagcctcagcagaattgtgcagccacccagtgtaagcatggtgctgtgtacgatacctgtggtccgggatgtatcaagacgtgtgacaactggaatgaaattggtccatgcaacaagccgtgcgttgctgggtgccactgtccagcaaacttggtccttcacaagggaaggtgcatcaagccagtcctttgtccccagcggtgacctttgtttcgatccttaagactctgaaatctggtgactttgacactgaagcggaagagccaatgaaggactgcagtatttgtgtgcccgattctgtaaacacacacacacagagtatatatgtgtatatatatatagatatattcaaaaacattgcatcatttatatgaactatagggggattattatatgtatattttttgctataagacatgtattgtttctaggatcctaacctgtaagccattgaacatgttgtataaatacaccaggtgtttttaatttaataaggtggcatgcagatacattggatagtgttaacatcacatacatttgtcatttttaaggaagttttctaagagccctcaattgcctgcctgtattaattttagttttgagtcaggatttgtaatggagtgggaaatgtgtttctctggagaagggcacatttatctaggggcatttcaggtttccaaagaaaggaatgtatgcctgggaaagacagcaggagattggtgaccggccctaatggtgcatgaaaagcgagtgataggctgttagaatgtattaggtcatgggctaacattatttccaaaattgattggctggttgccaagaaatatatatttgtcactagggcataaccgaagaatcaagtgatttcttgccatccttgcgtagtcctcaagtcttctaatcatctatgtgtgtatgatggatgtgaccatttatatgtcatgtgttgaaattaaagggtgtctggatgccatgttaattttattgagcatgagaaagtatttgaagaaactgttgcacaacatatgatgaaattttgatttctctgaatctcagagtaatttaagatgggcaaatccaatgagttgatgtaacccatctacattttgtggctatttcatgtataaaatgaaaggctttagttatttctagaggagtcccatccaacactatttggcgactgttaatatgttataattattagacagtggaaaagcctttattgactaattgatttaacctcagtccaaagaacagtctctatacttgccctcatttactgataggctgctactagttaccatttgattgtcttgactttcgtcttcagttgaattggtgaaaacatcaacaaaaacaaaacccactgtgtcttaaaataaaatgttctgcattgtagtcaataaagggcttaagatgtaaaacaatgcattttctctctcaagatgtcctgtgttatactttacaattagttgtatcaacttcagattcattaaattttaacagctgtatttagttataatttttgtatcttacaacagtatatataaagactattattaatagacaaaagcaaacccacgtttttgacaagccagcatattgccaatgctcgtcaaagacatttatgtttcttttacattcatgacagctaaagtattaacttggaatttttttttttttttttgactggaaaatccctagttgtttgaattaactgaataaagtgcagggcgtaatagtgactggctgggggcactgggcctttgtgttttttttcattcctgtgtttggatactaatcaccctcgtatctgcagcctgaggtagtcaggtcattgtttcaatgctgcccttggaaagaagactttgacttaggtgctttgggatctaagtgtggtttgtgactatccccattatttaagcatttgggggtctcacttttgcttatctgtaacacaaagaggccatgtagtatagtgagcagggttgagaatcgggaaaactagacccctgccactaacaggctaggagactttgggcagtaatgggaggcactgagggtttgcaaatactttcctacttgtaatctcattgattccctgctctgccctgacaggaggggtagggaaaatcagttgacgttgcctggtggttcctaccttctgtaaaacgaacagattccttaagattagctttaaatcccttttcagttcactgttggttctcatctttgaaagagggcagcataagggaaatgatggagaagggagaattgtggatggttatttatagctcatgattcatccaaggactgagttattctccccatgaggctaaccggcctctttcccaacacttaatcatggcagccaggatgggtgaatgatgaaagctcttctgcatgagccggtttcatcatcttgggtgggttgattacaagtttgtgtggcattcctttagctggggattagcttaatctctgtacatttttctcatttctaattgaagaagaaagggagggcagagaggacagaaaattacttgggtttactaattcaaagagccatctctgatgggagagggtgaggaaatcagctgaatggttggcctgcatattcttttttaggccacaggctacagctgagcaatggcttagtctaatgattgggcacaatgaggatttaccaagtgcttcaatgagagcagtcctgtttcattcacatgggatgttttcaattggttcttcaactaagctcttgcagagtgagatgacttgaaataaaaatgttctatgaatattg

SEQ ID NO: 235129 - DNA, 3399 bp, Artificial Sequence
  derived and/or modified sequence
gcggacggtctcccgacacgccggctgagagcccttttcgactgtgagctgcggcagctgagcagaggcggcggcgcgggacctgcagtcgccagggattccctccaggtgacgatgctctggttctccggcgtcggggctctggctgagcgttactgccgccgctcgcctgggattacgtgctgcgtcttgctgctactcaattgctcgggggtccccatgtctctggcttcctccttcttgacaggttctgttgcaaaatgtgaaaatgaaggtgaagtcctccagattccatttatcacagacaacccttgcataatgtgtgtctgcttgaacaaggaagtgacatgtaagagagagaagtgccccgtgctgtcccgagactgtgccctggccatcaagcagaggggagcctgttgtgaacagtgcaaaggttgcacctatgaaggaaatacctataacagctccttcaaatggcagagcccggctgagccttgtgttctacgccagtgccaggagggcgttgtcacagagtctggggtgcgctgtgttgttcattgtaaaaaccctttggagcatctgggaatgtgctgccccacatgtccaggctgtgtgtttgagggtgtgcagtatcaagaaggggaggaatttcagccagaaggaagcaaatgtaccaagtgttcctgcactggaggcaggacacaatgtgtgagagaagtctgtcccattctctcctgtccccagcaccttagtcacatacccccaggacagtgctgccccaaatgtttgggtcagaggaaagtgtttgacctcccttttgggagctgcctctttcgaagtgatgtttatgacaatggatcctcatttctgtacgataactgcacagcttgtacctgcagggactctactgtggtttgcaagaggaagtgctcccaccctggtggctgtgaccaaggccaggagggctgttgtgaagagtgcctcctacgagtgcccccagaagacatcaaagtatgcaaatttggcaacaagattttccaggatggagagatgtggtcctctatcaattgtaccatctgtgcttgtgtgaaaggcaggacggagtgtcgcaataagcagtgcattcccatcagtagctgcccacagggcaaaattctcaacagaaaaggatgctgtcctatttgcactgaaaagcccggcgtttgcacggtgtttggagatccccactacaacacttttgacggtcggacatttaactttcaggggacgtgtcagtacgttttgacaaaagactgctcctcccctgcctcgcccttccaggtgctggtgaagaacgacgcccgccggacacgctccttctcgtggaccaagtcggtggagctggtgctgggcgagagcagggtcagcctgcagcagcacctcaccgtgcgctggaacggctcgcgcatcgcgctcccctgccgcgcgccacacttccacatcgacctggatggctacctcttgaaagtgaccaccaaagcaggtttggaaatatcttgggatggagacagttttgtagaagtcatggctgcgccgcatctcaagggcaagctctgtggtctttgtggcaactacaatggacataaacgtgatgacttaattggtggagatggaaacttcaagtttgatgtggatgactttgctgaatcttggagggtggagtccaatgagttctgcaacagacctcagagaaagccagtgcctgaactgtgtcaagggacagtcaaggtaaagctccgggcccatcgagaatgccaaaagctcaaatcctgggagtttcagacctgccactcgactgtggactacgccactttctaccggtcctgtgtgacagacatgtgtgaatgtccagtccataaaaactgttattgcgagtcatttttggcatatacccgggcctgccagagagagggcatcaaagtccactgggagcctcagcagaattgtgcagccacccagtgtaagcatggtgctgtgtacgatacctgtggtccgggatgtatcaagacgtgtgacaactggaatgaaattggtccatgcaacaagccgtgcgttgctgggtgccactgtccagcaaacttggtccttcacaagggaaggtgcatcaagccagtcctttgtccccagcggtgacctttgtttcgatccttaagactctgaaatctggtgactttgacactgaagcggaagagccaatgaaggactgcagtatttgtgtgcccgattctgtaaacacacacacacagagtatatatgtgtatatatatatagatatattcaaaaacattgcatcatttatatgaactatagggggattattatatgtatattttttgctataagacatgtattgtttctaggatcctaacctgtaagccattgaacatgttgtataaatacaccaggtgtttttaatttaataaggtggcatgcagatacattggatagtgttaacatcacatacatttgtcatttttaaggaagttttctaagagccctcaattgcctgcctgtattaattttagttttgagtcaggatttgtaatggagtgggaaatgtgtttctctggagaagggcacatttatctaggggcatttcaggtttccaaagaaaggaatgtatgcctgggaaagacagcaggagattggtgaccggccctaatggtgcatgaaaagcgagtgataggctgttagaatgtattaggtcatgggctaacattatttccaaaattgattggctggttgccaagaaatatatatttgtcactagggcataaccgaagaatcaagtgatttcttgccatccttgcgtagtcctcaagtcttctaatcatctatgtgtgtatgatggatgtgaccatttatatgtcatgtgttgaaattaaagggtgtctggatgccatgttaattttattgagcatgagaaagtatttgaagaaactgttgcacaacatatgatgaaattttgatttctctgaatctcagagtaatttaagatgggcaaatccaatgagttgatgtaacccatctacattttgtggctatttcatgtataaaatgaaaggctttagttatttctagaggagtcccatccaacactatttggcgactgttaatatgttataattattagacagtggaaaagcctttattgactaattgatttaacctcagtccaaagaacagtctctatacttgccctcatttactgataggctgctactagttaccatttgattgtcttgactttcgtcttcagttgaattggtgaaaacatcaacaaaaacaaaacccactgtgtcttaaaataaaatgttctgcattgtagtcaataaagggcttaagatgtaaaacaatgca

SEQ ID NO: 235130 - DNA, 2058 bp, Artificial Sequence
  derived and/or modified sequence
atgctgtggttcagcggcgtgggcgccctggccgagagatactgcagaagaagccccggcatcacctgctgcgtgctgctgctgctgaactgcagcggcgtgcccatgagcctggccagcagcttcctgaccggcagcgtggccaagtgcgagaacgagggcgaggtgctgcagatccccttcatcaccgacaacccctgcatcatgtgcgtgtgcctgaacaaggaggtgacctgcaagagagagaagtgccccgtgctgagcagagactgcgccctggccatcaagcagagaggcgcctgctgcgagcagtgcaagggctgcacctacgagggcaacacctacaacagcagcttcaagtggcagagccccgccgagccctgcgtgctgagacagtgccaggagggcgtggtgaccgagagcggcgtgagatgcgtggtgcactgcaagaaccccctggagcacctgggcatgtgctgccccacctgccccggctgcgtgttcgagggcgtgcagtaccaggagggcgaggagttccagcccgagggcagcaagtgcaccaagtgcagctgcaccggcggcagaacccagtgcgtgagagaggtgtgccccatcctgagctgcccccagcacctgagccacatcccccccggccagtgctgccccaagtgcctgggccagagaaaggtgttcgacctgcccttcggcagctgcctgttcagaagcgacgtgtacgacaacggcagcagcttcctgtacgacaactgcaccgcctgcacctgcagagacagcaccgtggtgtgcaagagaaagtgcagccaccccggcggctgcgaccagggccaggagggctgctgcgaggagtgcctgctgagagtgccccccgaggacatcaaggtgtgcaagttcggcaacaagatcttccaggacggcgagatgtggagcagcatcaactgcaccatctgcgcctgcgtgaagggcagaaccgagtgcagaaacaagcagtgcatccccatcagcagctgcccccagggcaagatcctgaacagaaagggctgctgccccatctgcaccgagaagcccggcgtgtgcaccgtgttcggcgacccccactacaacaccttcgacggcagaaccttcaacttccagggcacctgccagtacgtgctgaccaaggactgcagcagccccgccagccccttccaggtgctggtgaagaacgacgccagaagaaccagaagcttcagctggaccaagagcgtggagctggtgctgggcgagagcagagtgagcctgcagcagcacctgaccgtgagatggaacggcagcagaatcgccctgccctgcagagccccccacttccacatcgacctggacggctacctgctgaaggtgaccaccaaggccggcctggagatcagctgggacggcgacagcttcgtggaggtgatggccgccccccacctgaagggcaagctgtgcggcctgtgcggcaactacaacggccacaagagagacgacctgatcggcggcgacggcaacttcaagttcgacgtggacgacttcgccgagagctggagagtggagagcaacgagttctgcaacagaccccagagaaagcccgtgcccgagctgtgccagggcaccgtgaaggtgaagctgagagcccacagagagtgccagaagctgaagagctgggagttccagacctgccacagcaccgtggactacgccaccttctacagaagctgcgtgaccgacatgtgcgagtgccccgtgcacaagaactgctactgcgagagcttcctggcctacaccagagcctgccagagagagggcatcaaggtgcactgggagccccagcagaactgcgccgccacccagtgcaagcacggcgccgtgtacgacacctgcggccccggctgcatcaagacctgcgacaactggaacgagatcggcccctgcaacaagccctgcgtggccggctgccactgccccgccaacctggtgctgcacaagggcagatgcatcaagcccgtgctgtgcccccagagatag

SEQ ID NO: 235131 - protein, 500 aa, Artificial Sequence
  derived and/or modified sequence
MEESHFNSNPYFWPSIPTVSGQIENTMFINKMKDQLLPEKGCGLAPPHYPTLLTVPASVSLPSGISMDTESKSDQLTPHSQASVTQNITVVPVPSTGLMTAGPGLVITSPSGSLVTTASSAQTFPISAPMIVSALPPGSQALQVVPDLSKKVASTLTEEGGGGGGGGGSVAPKPPRGRKKKRMLESGLPEMNDPYVLSPEDDDDHQKDGKTYRCRMCSLTFYSKSEMQIHSKSHTETKPHKCPHCSKTFANSSYLAQHIRIHSGAKPYSCNFCEKSFRQLSHLQQHTRIHTGDRPYKCAHPGCEKAFTQLSNLQSHRRQHNKDKPFKCHNCHRAYTDAASLEVHLSTHTVKHAKVYTCTICSRAYTSETYLMKHMRKHNPPDLQQQVQAAAAAAAVAQAQAQAQAQAQAQAQAQAQAQASQASQQQQQQQQQQQQQQQQPPPHFQSPGAAPQGGGGGDSNPNPPPQCSFDLTPYKTAEHHKDICLTVTTSTIQVEHLASS

SEQ ID NO: 235132 - protein, 516 aa, Artificial Sequence
  derived and/or modified sequence
MEESHFNSNPYFWPSIPTVSGQIENTMFINKMKDQLLPEKGCGLAPPHYPTLLTVPASVSLPSGISMDTESKSDQLTPHSQASVTQNITVVPVPSTGLMTAGVSCSQRWRREGSQSRGPGLVITSPSGSLVTTASSAQTFPISAPMIVSALPPGSQALQVVPDLSKKVASTLTEEGGGGGGGGGSVAPKPPRGRKKKRMLESGLPEMNDPYVLSPEDDDDHQKDGKTYRCRMCSLTFYSKSEMQIHSKSHTETKPHKCPHCSKTFANSSYLAQHIRIHSGAKPYSCNFCEKSFRQLSHLQQHTRIHTGDRPYKCAHPGCEKAFTQLSNLQSHRRQHNKDKPFKCHNCHRAYTDAASLEVHLSTHTVKHAKVYTCTICSRAYTSETYLMKHMRKHNPPDLQQQVQAAAAAAAVAQAQAQAQAQAQAQAQAQAQAQASQASQQQQQQQQQQQQQQQQPPPHFQSPGAAPQGGGGGDSNPNPPPQCSFDLTPYKTAEHHKDICLTVTTSTIQVEHLASS

SEQ ID NO: 235133 - DNA, 3117 bp, Artificial Sequence
  derived and/or modified sequence
gcaaggggagggcagcaaggagggggggccacccactacctcgcgcccccgccctgcgggtgtctcgcgcgcgttccgtgcgtgtgagtgtgtgggtctgtctcgctccagaagtgcgtgcccgcgcgctgcgccttgcgctttttcccctccctcgccccttcctggtcctcccaccctcctcggctccctcctttcccagcaaacgccgcccctcccgcgccctggctcaggctctggcgccgccgcagccgtcgccgcccgaaagttcaggagccctggaaaggagaaggaataagacggcaggaggaagagagagagagggtagaatggaagaatctcacttcaattctaacccgtacttctggccttctatccccacagtctcaggtcagatcgagaacacaatgttcatcaacaagatgaaggatcagctgttgccagagaagggctgtggtctggccccacctcactaccccaccttgctgacagtgcctgcctcagtgtccctgccctcaggcatcagtatggacacagagtccaagtcagaccagctgaccccacacagccaagcgtccgttacccagaatatcacggtggtccctgtgccgtctacaggactgatgactgctggagtctcctgttctcagaggtggagaagagaagggagtcaatcaaggggtccgggtttggtaatcacgtccccctcaggctctcttgtgaccacagcatcatcagctcagaccttccccatttcggctcccatgattgtctcagctcttccccctggctcacaagccctgcaggttgtccctgacctctccaagaaggtagcatcgaccctaaccgaggaaggaggcggaggtggtggtggaggtggcagtgtggctcctaagccaccccggggccggaagaagaagcggatgctggaatcagggctgcccgagatgaatgacccttatgtcctctcccctgaggatgatgatgaccatcagaaagacggcaagacctacaggtgccggatgtgctcactgacattctactccaagtcggagatgcagatccactccaagtcacacaccgagaccaagccccacaagtgcccacattgctccaagaccttcgccaacagctcctacctggcccagcacatccgtatacactcaggggctaagccctacagttgtaacttctgtgagaaatccttccgccagctctcccaccttcagcagcacacccgaatccacactggtgatagaccatacaaatgtgcacacccaggctgtgagaaagccttcacacaactctccaatctgcagtcccacagacggcaacacaacaaagataaacccttcaagtgccacaactgtcatcgggcgtacacggatgcagcctcactagaggtgcacctgtctacgcacacagtgaagcatgccaaggtgtacacctgcactatctgcagtcgggcatacacatcagaaacataccttatgaaacatatgcgcaaacacaacccgcctgatcttcagcaacaggtgcaggcagcagcagcagcggcagcagtggcccaggcccaggctcaagctcaagcccaggctcaggctcaggctcaagcccaggcccaggcccaggcctcccaggcatcacagcagcagcagcagcagcagcagcagcagcagcagcagcagcaacagccaccaccacacttccagtctcctggggcagccccccagggtgggggtggtggggacagcaatcccaaccctccaccccagtgttcctttgacctgaccccgtataagacggcggagcatcataaggacatctgcctcactgtcaccaccagcaccatccaggtggagcacctggccagctcttagagatccgtgctgccacccactgggaagaggaagaagtagtcctggtgtcttctttctccaactcttggtgggaaaagtccttttcttccttgacaggccttggctccatctccttgggcctctgtcacggctttccttcacaggataccatcctttttctgaactcttcttcaaaaggaacatcagccctcctgattgcaaaggaatactgagctgatggtgtcatccagcagcctcccctcccaagcaaagcttctaaaactgggggtcggtgctcaagggaaggatttgctatgacctcatagaaccttgtccagtgtggccacttaccctatccttaccctccttatcctcaaagtttgggctgatgtaagactagaggctggccctcccagataacagagaaaagggagccccaaatgcaaccagcctcttgttctattcttgcctgcaaaagaacagaggtttctcaaatgcctcagtccctgagagccatttcttcccctacatcgtctcactttgcttcctattgactgctggtagaaggagatttggggtaggggctagacctccttttatttgaagggggcaagggctgagatgtggtccccaaggggccagaaattcccaagttggtcacaggtggcttagaagtgtgtgttatggttttacggatttccttgaagcctctctccttctctgcctacaaagaccctatactctcagtctccccaacccacccccaaggagctgtgggaggctttgtgttatctgtgaaactccaaaacaggggtgttgcggagaagggagagttcaaggcaaacgcaaggactggacttagctccctaggtgccacagtcagatgccggacacggatttatatataaatatatatatataaatatattatactcactcatcacggccatctttgttgtaaccatttctgtgtttataaatgcattatctctgagaattttcatatttgatgttttgtttatttttgtcctttttttccctctctccacccctgtcctctagccacagcatttttctttttgtcttttttttttttttttaaatcatggcagatttcagaggaaaggaaattaaaaaaaaaatcaggaaaccagttgttataaagtaatttaaaaatgaagaaaaaaagaaaaaaacttatgtacaaaccaaggggtgtttttagaacattgtatagaaataaattcatgtaaaagga

SEQ ID NO: 235134 - DNA, 1503 bp, Artificial Sequence
  derived and/or modified sequence
atggaggagagccacttcaacagcaacccctacttctggcccagcatccccaccgtgagcggccagatcgagaacaccatgttcatcaacaagatgaaggaccagctgctgcccgagaagggctgcggcctggcccccccccactaccccaccctgctgaccgtgcccgccagcgtgagcctgcccagcggcatcagcatggacaccgagagcaagagcgaccagctgaccccccacagccaggccagcgtgacccagaacatcaccgtggtgcccgtgcccagcaccggcctgatgaccgccggccccggcctggtgatcaccagccccagcggcagcctggtgaccaccgccagcagcgcccagaccttccccatcagcgcccccatgatcgtgagcgccctgccccccggcagccaggccctgcaggtggtgcccgacctgagcaagaaggtggccagcaccctgaccgaggagggcggcggcggcggcggcggcggcggcagcgtggcccccaagccccccagaggcagaaagaagaagagaatgctggagagcggcctgcccgagatgaacgacccctacgtgctgagccccgaggacgacgacgaccaccagaaggacggcaagacctacagatgcagaatgtgcagcctgaccttctacagcaagagcgagatgcagatccacagcaagagccacaccgagaccaagccccacaagtgcccccactgcagcaagaccttcgccaacagcagctacctggcccagcacatcagaatccacagcggcgccaagccctacagctgcaacttctgcgagaagagcttcagacagctgagccacctgcagcagcacaccagaatccacaccggcgacagaccctacaagtgcgcccaccccggctgcgagaaggccttcacccagctgagcaacctgcagagccacagaagacagcacaacaaggacaagcccttcaagtgccacaactgccacagagcctacaccgacgccgccagcctggaggtgcacctgagcacccacaccgtgaagcacgccaaggtgtacacctgcaccatctgcagcagagcctacaccagcgagacctacctgatgaagcacatgagaaagcacaacccccccgacctgcagcagcaggtgcaggccgccgccgccgccgccgccgtggcccaggcccaggcccaggcccaggcccaggcccaggcccaggcccaggcccaggcccaggcccaggccagccaggccagccagcagcagcagcagcagcagcagcagcagcagcagcagcagcagcagccccccccccacttccagagccccggcgccgccccccagggcggcggcggcggcgacagcaaccccaacccccccccccagtgcagcttcgacctgaccccctacaagaccgccgagcaccacaaggacatctgcctgaccgtgaccaccagcaccatccaggtggagcacctggccagcagctag

SEQ ID NO: 235135 - DNA, 1551 bp, Artificial Sequence
  derived and/or modified sequence
atggaggagagccacttcaacagcaacccctacttctggcccagcatccccaccgtgagcggccagatcgagaacaccatgttcatcaacaagatgaaggaccagctgctgcccgagaagggctgcggcctggcccccccccactaccccaccctgctgaccgtgcccgccagcgtgagcctgcccagcggcatcagcatggacaccgagagcaagagcgaccagctgaccccccacagccaggccagcgtgacccagaacatcaccgtggtgcccgtgcccagcaccggcctgatgaccgccggcgtgagctgcagccagagatggagaagagagggcagccagagcagaggccccggcctggtgatcaccagccccagcggcagcctggtgaccaccgccagcagcgcccagaccttccccatcagcgcccccatgatcgtgagcgccctgccccccggcagccaggccctgcaggtggtgcccgacctgagcaagaaggtggccagcaccctgaccgaggagggcggcggcggcggcggcggcggcggcagcgtggcccccaagccccccagaggcagaaagaagaagagaatgctggagagcggcctgcccgagatgaacgacccctacgtgctgagccccgaggacgacgacgaccaccagaaggacggcaagacctacagatgcagaatgtgcagcctgaccttctacagcaagagcgagatgcagatccacagcaagagccacaccgagaccaagccccacaagtgcccccactgcagcaagaccttcgccaacagcagctacctggcccagcacatcagaatccacagcggcgccaagccctacagctgcaacttctgcgagaagagcttcagacagctgagccacctgcagcagcacaccagaatccacaccggcgacagaccctacaagtgcgcccaccccggctgcgagaaggccttcacccagctgagcaacctgcagagccacagaagacagcacaacaaggacaagcccttcaagtgccacaactgccacagagcctacaccgacgccgccagcctggaggtgcacctgagcacccacaccgtgaagcacgccaaggtgtacacctgcaccatctgcagcagagcctacaccagcgagacctacctgatgaagcacatgagaaagcacaacccccccgacctgcagcagcaggtgcaggccgccgccgccgccgccgccgtggcccaggcccaggcccaggcccaggcccaggcccaggcccaggcccaggcccaggcccaggcccaggccagccaggccagccagcagcagcagcagcagcagcagcagcagcagcagcagcagcagcagccccccccccacttccagagccccggcgccgccccccagggcggcggcggcggcgacagcaaccccaacccccccccccagtgcagcttcgacctgaccccctacaagaccgccgagcaccacaaggacatctgcctgaccgtgaccaccagcaccatccaggtggagcacctggccagcagctag

SEQ ID NO: 235136 - DNA, 834 bp, Artificial Sequence
  derived and/or modified sequence
atggaggagagccacttcaacagcaacccctacttctggcccagcatccccaccgtgagcggccagatcgagaacaccatgttcatcaacaagatgaaggaccagctgctgcccgagaagggctgcggcctggcccccccccactaccccaccctgctgaccgtgcccgccagcgtgagcctgcccagcggcatcagcatggacaccgagagcaagagcgaccagctgaccccccacagccaggccagcgtgacccagaacatcaccgtggtgcccgtgcccagcaccggcctgatgaccgccggccccggcctggtgatcaccagccccagcggcagcctggtgaccaccgccagcagcgcccagaccttccccatcagcgcccccatgatcgtgagcgccctgccccccggcagccaggccctgcaggtggtgcccgacctgagcaagaaggtggccagcaccctgaccgaggagggcggcggcggcggcggcggcggcggcagcgtggcccccaagccccccagaggcagaaagaagaagagaatgctggagagcggcctgcccgagatgaacgacccctacgtgctgagccccgaggacgacgacgaccaccagaaggacggcaagacctacagatgcagaatgtgcagcctgaccttctacagcaagagcgagatgcagatccacagcaagagccacaccgagaccaagccccacaagtgcccccactgcagcaagaccttcgccaacagcagctacctggcccagcacatcagaatccacagcggcgccaagccctacagctgcaacttctgcgagaagagcttctag

SEQ ID NO: 235137 - DNA, 1503 bp, Artificial Sequence
  derived and/or modified sequence
atggaggaaagccattttaatagcaacccatatttttggccctcaatcccgactgtgagcggccagattgaaaacaccatgtttattaataagatgaaagaccagctgctgccagagaagggctgtggcctcgccccaccccattaccccaccctgttaacagtgcccgccagcgtgtcacttccaagcgggatttctatggacacagagtctaaaagcgaccagttaactccccactcccaggcctctgtaacccagaacatcaccgtggtccccgtccccagtaccgggttaatgaccgccggccccgggttagtgatcacaagtccctccggatccctggtgactactgctagctctgctcaaacttttcctatttcagcgcctatgatagtgagcgctctaccaccaggttcccaagccttacaggtcgtgcctgatcttagtaaaaaagtggcaagcactctcaccgaagaggggggcggaggtggaggcggaggaggaagcgttgctcccaaaccaccaaggggcagaaaaaaaaaaaggatgctggaaagcggtttgcccgaaatgaacgacccatacgtcctctcgcccgaagatgacgacgatcaccagaaagatggaaaaacatatagatgtcgcatgtgttctcttacgttttactccaaatcagagatgcaaatacacagcaagtctcatactgagactaagcctcacaagtgtccgcactgctcgaaaactttcgctaatagctcatacttggcacagcatattagaattcatagtggcgcaaaaccttattcttgcaatttctgtgagaaatcatttcggcagctgagccatctgcagcagcatactcgcatacacacaggcgatcgtccttacaagtgcgcccaccccgggtgcgagaaggccttcactcagcttagtaacctacaatcccatagaaggcagcacaataaagataagccgttcaaatgccataactgccaccgggcttataccgatgccgcatctctggaagtgcacttatctacccatactgttaagcacgcgaaagtttatacctgtacaatttgcagtcgagcctatacttccgaaacttatttaatgaagcatatgaggaagcacaaccctcccgacctgcaacagcaggtccaggcagccgccgccgccgccgccgtggcgcaggcccaggcccaagcccaggcacaggctcaggcgcaggcccaggcacaggcccaggctcaagccagccaagcctcacaacagcagcagcagcagcagcaacagcagcagcagcagcagcagcagcctccaccgcactttcagagtcctggagccgccccgcagggaggaggggggggcgacagcaaccctaaccccccaccccagtgcagtttcgatcttaccccttacaagacagcagagcaccacaaggatatctgtctgaccgtcaccacctctaccatacaggttgagcacttggcctcttcttag

SEQ ID NO: 235138 - DNA, 1551 bp, Artificial Sequence
  derived and/or modified sequence
atggaggaatctcacttcaatagcaatccatacttctggccctccatccctacagtgtcaggacagattgagaacaccatgtttataaacaagatgaaggaccagctgctgcctgaaaaagggtgcggcctggctcctccccattatcccacactgttgaccgttccggcctcagtttccctgccctcaggcatttcgatggacaccgaaagtaagtccgatcagctgacaccacattctcaggcatctgttacacaaaatattaccgtagtcccggtgccaagtacagggttgatgaccgcaggagtgtcatgttcgcaacggtggcgccgtgaaggttcccagagcagggggcccggcctggtgattacgtccccttctggctcgttagttacaactgcgtccagcgctcagacgttcccaatctctgccccaatgatagtgagtgcccttccaccagggagtcaggccttacaggtggttccagacctttccaaaaaggtagccagcaccttgaccgaagagggaggtgggggcggcggtggcggaggatcagtcgctcccaaaccgcccagaggcaggaagaagaaaaggatgctggaatccggactcccagagatgaatgacccatacgtgttgtcacccgaggacgatgacgaccaccagaaggacggcaagacttataggtgtcgtatgtgctcactaaccttctactccaaaagtgaaatgcagattcattctaaaagtcatactgagaccaaaccccacaaatgtccccattgctccaagactttcgcgaattcctcatacctggcccaacatatacggattcattctggtgccaaaccgtattcctgtaacttttgtgagaagagctttcgtcaactcagccacttgcagcagcacactaggatacacacaggagacaggccttacaaatgcgctcaccccggttgtgagaaggccttcacgcagctgtctaatctccaatctcacagacggcaacacaacaaagacaagccttttaaatgccacaactgtcaccgcgcttatacagacgctgcaagcttagaagtgcatctgtcaactcacaccgttaaacatgccaaagtgtacacctgcacgatctgcagccgcgcctacacaagtgagacatatttgatgaaacacatgcgtaaacacaaccccccggatcttcaacaacaggttcaggcagccgcggctgccgctgccgtggcacaggcccaagcccaggcccaggcccaggcccaggcccaggctcaggcccaagctcaggcccaggcctcccaggccagccaacagcagcagcaacagcagcagcagcaacaacagcaacagcagcagccacctccgcacttccaatcccccggcgcagcaccccagggcggcggggggggtgatagcaaccccaatccccccccacagtgctcatttgacctgacaccctataaaaccgccgaacatcacaaagatatctgcctgacggtgaccacgagtaccatccaagtcgagcatcttgccagttcctag

SEQ ID NO: 235139 - DNA, 1551 bp, Artificial Sequence
  derived and/or modified sequence
atggaagagtcgcactttaactcaaacccctatttctggcccagcatcccgaccgtgtcagggcaaatcgagaacacgatgtttataaataagatgaaggaccagttgcttccagagaagggatgtggtcttgccccaccacattaccctaccctcttgacagtgccggcaagtgtatctctcccatccggcatctcaatggatacggagagcaaatctgaccaactaacaccacatagccaggcctctgtcacccagaatattaccgtcgtgccagtcccatctactgggctaatgaccgctggcgtgagctgcagccagagatggagacgtgaaggctcccagagcaggggccctggcctagtgatcacgtctccatcaggatcgctggtgactacagcctcaagcgctcagacctttcctattagtgcccccatgatagtctctgccttgccgccaggatcacaggcgctacaggtagtgccggacttgagcaaaaaggttgctagtactctaaccgaagagggaggcggaggtggaggcgggggagggtctgtggcccctaagccccctaggggaaggaagaagaaaaggatgctggaatccggccttcctgaaatgaatgatccgtacgtgctgtcaccggaagatgacgatgaccatcagaaggacgggaagacgtatcgttgtcgaatgtgtagcctcacattctactctaagagcgaaatgcagatacactcaaagagccacactgaaactaaaccccacaagtgtcctcactgcagtaaaacgttcgctaattcttcctacctggcccagcatattaggatccatagcggcgcgaagccctattcttgcaatttttgcgagaagagctttcggcaactctcccatcttcagcagcataccaggatccacacgggggatagaccatacaagtgcgcacatcccggttgtgagaaggcctttacacagttaagtaacctgcagtctcatcgccgtcagcataataaggacaagccctttaagtgtcataattgtcaccgggcttacacagacgccgccagccttgaggtccacctgagtactcacacagtgaaacatgctaaggtctatacttgcactatctgttcgagagcatatacgagcgaaacttacctgatgaaacatatgagaaaacacaatccccccgatctgcagcaacaggtgcaggctgccgctgctgctgcagccgtggcgcaggcccaggcccaggcccaggctcaagcacaagcgcaggctcaggcacaggcacaagcccaagcttcgcaggccagccagcagcagcagcagcagcagcaacaacaacagcagcagcaacagcaaccgcctccccattttcagtcccctggcgcggctcctcagggtggaggcgggggcgacagtaatcctaaccctcctccccagtgcagcttcgacttgacaccctacaagaccgccgagcaccacaaggacatttgcctgaccgttaccacctctacaatccaggtagaacatttggcatctagctag

SEQ ID NO: 235140 - DNA, 834 bp, Artificial Sequence
  derived and/or modified sequence
atggaggaatcccacttcaattccaacccttacttttggccctcgatccctaccgtgtcgggccagatagagaatacaatgttcatcaataaaatgaaagaccagctgttacccgagaaaggctgcggattagcaccgccacactaccccacattgcttaccgttcctgcgtctgtgtcgctgcctagcggcatcagtatggacacggagagtaagtctgatcagcttaccccacactcacaggcttcagtaactcagaatataaccgtagtccctgtgccgagtacgggtctcatgactgccgggcccgggttggtcataacctccccctctgggtcactggtaaccaccgcctcttccgcccaaacatttccaattagtgccccaatgatcgtttctgccctgcccccagggtcgcaggcccttcaggtggttcccgacctctcaaagaaggtagcgtcgaccctgacagaagaaggagggggcggcggaggtgggggtggctcagtggctccaaaacccccacggggccggaaaaagaaacgtatgttggagtcggggctccccgaaatgaatgacccctatgtgttgtccccagaagacgacgacgaccatcagaaggacggcaagacataccgatgtaggatgtgtagcctgaccttctactcaaagtcagaaatgcaaatccacagtaagtctcacacagagacaaaaccgcataagtgtccacattgcagcaagactttcgctaactcatcttatctcgctcagcacattcgaatccattccggcgcaaagccttacagttgtaatttttgtgaaaaaagcttctag

SEQ ID NO: 235141 - DNA, 1503 bp, Artificial Sequence
  derived and/or modified sequence
atggaggagagccacttcaacagcaacccctacttctggcccagcatccccaccgtgtctggccagatcgagaacaccatgttcatcaacaagatgaaggaccagctgctgcctgagaagggctgcggcctggccccaccccactaccccaccctgctgactgtgcctgcctctgtgtccctgcccagcggcatctccatggacacagagagcaagagtgaccagctgaccccccacagccaggcctctgtgacccagaacatcaccgtggtgcctgtgcccagcacaggcctgatgacagctggccctggcctggtgatcaccagccccagcggcagcctggtgaccacagccagcagcgcccagaccttccccatcagcgcccccatgattgtgtctgccctgcccccaggcagccaggccctgcaggtggtgcctgacctgagcaagaaggtggccagcaccctgacagaggagggcggcggcggcggcggcggcggcggctctgtggcccccaagccaccccggggcaggaagaagaagaggatgctggagagcggcctgcctgagatgaatgacccctacgtgctgagcccagaagatgatgatgaccaccagaaggatggcaagacctaccgctgcaggatgtgcagcctgaccttctacagcaagtctgagatgcagatccacagcaagagccacacagagaccaagccccacaagtgcccccactgcagcaagacctttgccaacagcagctacctggcccagcacatccgcatccacagcggggccaagccctacagctgcaacttctgtgagaagagcttccggcagctgagccacctgcagcagcacacccgcatccacactggagaccggccctacaagtgtgcccaccctggctgtgagaaggccttcacccagctgagcaacctgcagagccaccggcggcagcacaacaaggacaagcccttcaagtgccacaactgccaccgggcctacacagatgctgccagcctggaggtgcacctgagcacccacacagtgaagcacgccaaggtgtacacctgcaccatctgcagccgggcctacaccagcgagacctacctgatgaagcacatgaggaagcacaaccccccagacctgcagcagcaggtgcaggccgctgctgctgctgctgctgtggcccaggcccaggcccaggcccaggcccaggcccaggcccaggcccaggcccaggcccaggcccaggccagccaggccagccagcagcagcagcagcagcagcagcagcagcagcagcagcagcagcagcccccaccccacttccagagccctggagctgccccccagggcggcggcggcggggacagcaaccccaaccccccaccccagtgcagctttgacctgaccccctacaagacagctgagcaccacaaggacatctgcctgactgtgaccaccagcaccatccaggtggagcacctggccagcagctag

SEQ ID NO: 235142 - DNA, 1551 bp, Artificial Sequence
  derived and/or modified sequence
atggaggagagccacttcaacagcaacccctacttctggcccagcatccccaccgtgtctggccagatcgagaacaccatgttcatcaacaagatgaaggaccagctgctgcctgagaagggctgcggcctggccccaccccactaccccaccctgctgactgtgcctgcctctgtgtccctgcccagcggcatctccatggacacagagagcaagagtgaccagctgaccccccacagccaggcctctgtgacccagaacatcaccgtggtgcctgtgcccagcacaggcctgatgacagctggggtgtcctgcagccagcgctggaggcgggagggcagccagagccggggccctggcctggtgatcaccagccccagcggcagcctggtgaccacagccagcagcgcccagaccttccccatcagcgcccccatgattgtgtctgccctgcccccaggcagccaggccctgcaggtggtgcctgacctgagcaagaaggtggccagcaccctgacagaggagggcggcggcggcggcggcggcggcggctctgtggcccccaagccaccccggggcaggaagaagaagaggatgctggagagcggcctgcctgagatgaatgacccctacgtgctgagcccagaagatgatgatgaccaccagaaggatggcaagacctaccgctgcaggatgtgcagcctgaccttctacagcaagtctgagatgcagatccacagcaagagccacacagagaccaagccccacaagtgcccccactgcagcaagacctttgccaacagcagctacctggcccagcacatccgcatccacagcggggccaagccctacagctgcaacttctgtgagaagagcttccggcagctgagccacctgcagcagcacacccgcatccacactggagaccggccctacaagtgtgcccaccctggctgtgagaaggccttcacccagctgagcaacctgcagagccaccggcggcagcacaacaaggacaagcccttcaagtgccacaactgccaccgggcctacacagatgctgccagcctggaggtgcacctgagcacccacacagtgaagcacgccaaggtgtacacctgcaccatctgcagccgggcctacaccagcgagacctacctgatgaagcacatgaggaagcacaaccccccagacctgcagcagcaggtgcaggccgctgctgctgctgctgctgtggcccaggcccaggcccaggcccaggcccaggcccaggcccaggcccaggcccaggcccaggcccaggccagccaggccagccagcagcagcagcagcagcagcagcagcagcagcagcagcagcagcagcccccaccccacttccagagccctggagctgccccccagggcggcggcggcggggacagcaaccccaaccccccaccccagtgcagctttgacctgaccccctacaagacagctgagcaccacaaggacatctgcctgactgtgaccaccagcaccatccaggtggagcacctggccagcagctag

SEQ ID NO: 235143 - DNA, 834 bp, Artificial Sequence
  derived and/or modified sequence
atggaggagagccacttcaacagcaacccctacttctggcccagcatccccaccgtgtctggccagatcgagaacaccatgttcatcaacaagatgaaggaccagctgctgcctgagaagggctgcggcctggccccaccccactaccccaccctgctgactgtgcctgcctctgtgtccctgcccagcggcatctccatggacacagagagcaagagtgaccagctgaccccccacagccaggcctctgtgacccagaacatcaccgtggtgcctgtgcccagcacaggcctgatgacagctggccctggcctggtgatcaccagccccagcggcagcctggtgaccacagccagcagcgcccagaccttccccatcagcgcccccatgattgtgtctgccctgcccccaggcagccaggccctgcaggtggtgcctgacctgagcaagaaggtggccagcaccctgacagaggagggcggcggcggcggcggcggcggcggctctgtggcccccaagccaccccggggcaggaagaagaagaggatgctggagagcggcctgcctgagatgaatgacccctacgtgctgagcccagaagatgatgatgaccaccagaaggatggcaagacctaccgctgcaggatgtgcagcctgaccttctacagcaagtctgagatgcagatccacagcaagagccacacagagaccaagccccacaagtgcccccactgcagcaagacctttgccaacagcagctacctggcccagcacatccgcatccacagcggggccaagccctacagctgcaacttctgtgagaagagcttctag

SEQ ID NO: 235144 - DNA, 1503 bp, Artificial Sequence
  derived and/or modified sequence
atggaggagagccacttcaacagcaacccctacttctggcccagcatccccacagtgagcggccagatcgaaaatacaatgttcataaacaagatgaaggaccaactcttgcctgagaaaggttgtggcttggcacctccgcactatcctaccttgctcaccgtgcctgcatccgttagcctgccatccgggattagtatggacacagagagcaagtcagaccagctaaccccccactcacaggcgtccgtgacacaaaatatcactgtcgtccctgtgccatctacaggcctcatgacagccggtccaggcctggtcatcacttccccgtccggatctctggtaacaacagcaagctcagcccagacattcccgatctctgccccaatgatcgtaagcgctctgccacccgggtcccaggctctacaggtggtgcctgacttgtctaagaaggttgcgtccactttaactgaggagggaggcggaggcggtggaggcggtggtagcgtggcaccaaaacccccacggggtaggaagaaaaaacggatgctggagtcaggcctccctgagatgaacgatccctatgtgctgtctcccgaggacgacgatgatcaccagaaggacggtaagacataccgctgtcggatgtgttctctcacattctattccaaaagcgaaatgcaaatccactcgaagtcacacaccgaaacaaagccgcacaagtgtcctcactgcagtaaaactttcgccaattcctcctatcttgcccagcacatccgcattcattccggcgctaagccttactcctgtaatttctgcgagaaatcatttagacagctttcgcatctccagcaacatactcgtattcatacaggagacaggccatataagtgcgcccaccctgggtgtgagaaagcatttacccaattatctaacctgcaaagtcacaggcggcaacataataaagacaagccctttaaatgccacaattgtcatagagcttacactgatgcagcaagtctggaggtccacctatccacccacaccgtgaaacacgccaaggtatatacatgcaccatctgcagtcgggcatacacttctgagacttacctgatgaagcatatgcggaagcataacccccctgacctgcagcagcaggtacaggccgcagccgctgctgccgcggttgcacaggctcaggctcaggcccaagctcaggcccaggcccaggcacaggcccaggcgcaagctcaggcatcgcaagcctcacaacaacagcagcagcagcaacagcagcagcagcagcagcagcaacagccaccaccccacttccaatccccaggcgcagccccccagggaggcggcggcggcgacagcaacccgaatccaccccctcagtgttcctttgatttaactccatataaaacagcagagcaccataaagacatttgtctaacagttactacgtcaacaatccaggtggaacaccttgcctcctcctag

SEQ ID NO: 235145 - DNA, 1551 bp, Artificial Sequence
  derived and/or modified sequence
atggaggagagccacttcaacagcaacccctacttctggcccagcattcctaccgtgtctggccagattgagaacaccatgttcattaacaagatgaaagatcagcttctgccggagaaaggctgcggcttggcccccccccattatcccactctcctcacagttccagccagtgtgtctctgcctagcggtatttcaatggatactgagtcgaaatctgatcagctgactccccacagtcaggcctccgtgacgcaaaacatcactgtcgtgccggtgcctagcaccggcctgatgactgccggagtcagctgtagccagcgttggcgcagagaaggctcccagtctagaggccctggcctcgttattacttcccccagtggctccttagtaactaccgcttcttctgcccagacatttcctatctctgctccaatgattgtgtcagcactgcccccaggtagccaggcactccaggtggttcctgacctcagcaagaaggtggcatccaccctgacagaagaagggggtggggggggcggaggagggggctccgtcgcaccaaaaccacctagaggacgcaagaaaaagcgtatgttggaatccgggttgcctgagatgaacgatccttacgttttatctccggaagacgacgacgatcaccagaaagatggcaagacgtaccgctgccgcatgtgttctctgactttctactctaagtcggagatgcagattcacagtaaatctcatacagaaacaaagccccataagtgcccgcattgttctaagacattcgccaactctagctatttggctcagcatatcaggatacattctggagcaaaaccgtacagttgcaatttctgcgagaaatcatttaggcagctgtcccacctacagcaacacaccagaattcacacgggcgacaggccctacaagtgtgctcaccccggctgtgagaaagcatttactcagttaagcaacctacaatcacaccgccggcagcacaataaggacaaacccttcaaatgccataattgccatcgggcttacactgatgcagccagcctggaggtacacttgagcacccatacggtcaagcacgccaaagtgtatacttgtaccatttgctcccgcgcatatactagcgagacttacctaatgaaacacatgcggaaacataatcctcctgacctccagcagcaagtgcaagcagccgctgcggctgctgccgtggcccaggcccaagcccaggcccaggcacaggcgcaagcacaggctcaggcccaggctcaggctcaggccagccaggcatcccagcagcagcaacaacagcagcagcagcagcagcagcaacaacagcagccgccaccccactttcagagtccgggggcagcacctcaaggcggtggcggaggggacagtaacccaaacccacctccccagtgtagttttgatctcaccccgtacaagaccgcagaacatcataaggatatatgtcttacagtcacaacaagcactatccaagtggagcacctggcctcctcctag

SEQ ID NO: 235146 - DNA, 1551 bp, Artificial Sequence
  derived and/or modified sequence
atggaggagagccacttcaacagcaacccctacttctggcccagcattcccacggtttccgggcagattgaaaacaccatgtttattaataagatgaaagatcagctgctgcccgagaaaggttgtggcctcgcgcccccccactatccaacactcttaacagtgcctgcgtcggtgtccttgccctcaggtatctctatggatacagagtccaagtcagatcagttaacacctcactctcaggcctctgttacacagaatatcactgttgtgccagtaccgagcacagggctgatgaccgctggtgtgtcttgctcacagaggtggcggcgggagggttcacagtcacgtggccccgggttggtgattacgtctccttcaggctcactcgtgactactgcctcatcagctcaaaccttccccatctccgcacccatgatagttagtgctctgcccccagggtcacaggccctgcaagtcgttcccgatctgagcaaaaaggtggcttctactctcaccgaggagggcggaggtggcggaggaggaggcggctcagttgctcctaaacccccacgggggaggaaaaaaaaacggatgctggagtctggcctgccagagatgaacgatccttacgtcctgagccctgaagacgacgatgaccaccagaaggacggtaagacatatagatgtcggatgtgttccctgacattctactcaaagagtgaaatgcagatccactcaaagagccatactgagaccaaaccgcacaagtgtcctcactgctctaagacttttgcgaattcatcctatcttgcacagcacattcggatacactccggcgccaaaccgtacagttgcaacttttgcgaaaaaagcttcagacagctttcccatctgcagcagcacacaaggattcacactggcgacagaccgtataagtgtgcccatcctggctgtgaaaaagcatttactcagcttagcaatctccagtctcatagaagacagcacaataaggataagccctttaagtgtcataactgtcatagggcatataccgatgcagccagcctcgaggtgcacttgagcacacataccgtcaaacatgccaaagtttacacttgcaccatatgttccagggcatatacgtctgagacttacttgatgaagcatatgaggaagcataatcctccggatctgcagcaacaggttcaggctgccgcggcagcagccgctgtagcgcaggctcaggcccaggcccaagcacaggcccaagcccaggcccaagctcaggctcaggcacaggccagccaggccagtcagcaacagcaacaacaacaacagcaacagcaacagcagcagcagcaacctccgcctcacttccagtcccccggtgctgctccgcaaggaggcggtggaggtgatagcaaccccaaccctcctccccaatgcagttttgacctcaccccctataagacagccgaacaccataaggatatctgcctcactgtaaccacttccacaattcaggttgagcatctggcctcaagttag

SEQ ID NO: 235147 - DNA, 834 bp, Artificial Sequence
  derived and/or modified sequence
atggaggagagccacttcaacagcaacccctacttctggcccagcattcctactgtatcaggccaaatagaaaatactatgtttatcaacaagatgaaagaccagctactacccgagaaaggctgtggattggctccaccgcactaccccacactgctgactgtgcccgccagtgtatccctgcccagcggtatctcaatggataccgagtcaaaatccgaccagctgaccccacacagtcaggcgtctgtgacacagaacatcaccgtagttcctgttccctcaactggacttatgacagcaggcccaggcctcgtgataacctctccatctggttctttggtaacgactgccagctcagcacagacctttccgatcagcgctcctatgattgtcagtgccctccccccagggtctcaggcgttacaggtggtcccagatctgtcaaaaaaggtggcatcaacactgactgaagaagggggtggaggtgggggcggaggcggatccgtggcgccaaagccgccccggggccggaaaaagaagagaatgctggagtccgggcttccggagatgaacgacccgtatgttctgagccctgaggacgacgacgatcaccagaaggacggtaagacctaccggtgtaggatgtgcagcctgacattctatagcaagagcgaaatgcagatacattccaagtctcacaccgaaacaaaaccacacaagtgtccgcactgctccaagacctttgcaaattcctcatatctagcccagcatatccgcattcacagtggcgccaaaccctattcatgtaatttctgtgaaaaaagcttctag

SEQ ID NO: 235148 - DNA, 1503 bp, Artificial Sequence
  derived and/or modified sequence
atggaagagagtcactttaacagcaacccctacttttggccttcaatccccactgtgagtggccagatcgagaatacaatgttcattaataaaatgaaggatcagctgctcccagaaaaggggtgtggccttgccccaccacattatccaactctgctgaccgtgcccgctagcgtttccctccctagtggcatatccatggataccgagtcaaagtcagaccaactgacaccacactctcaagcatctgttacacagaatatcaccgtggtgccggtcccttctaccggtctgatgacagccggtccgggtttggtgataacctctccttccgggagtctcgtgacaaccgcttcttctgcgcagacctttcctatctccgcaccaatgatcgtatccgcacttcctcctggcagccaggccttgcaagtggtgcctgatttatccaaaaaggttgcctccacactgaccgaggaaggagggggaggaggcggaggtggtggctcagtggcccctaagccccctagagggagaaaaaaaaagaggatgctggagtcgggcctgccagaaatgaacgacccatacgtcctcagccctgaggatgatgacgatcatcaaaaagatgggaagacctaccggtgccgtatgtgctccctgactttttattccaagtccgaaatgcagattcattctaaatcacacaccgagacaaaacctcacaagtgcccccactgcagtaaaacgttcgctaacagtagttacctagcgcagcacattcgcatacactcgggcgcaaaaccatactcatgtaacttctgcgagaagagcttccgccagctgtcacatctgcagcagcatactcggatccacactggagacagaccctataagtgcgcccacccaggatgtgaaaaagcgtttacacaactgagcaacttgcagagccacaggcgccagcataataaagataagccttttaagtgccataattgtcatagggcatataccgatgccgcaagtctcgaggtgcacctgtcaacacacacagtaaaacacgccaaagtgtatacctgtacgatttgttccagagcctacacctctgagacgtaccttatgaaacatatgcgcaagcataatccacccgaccttcagcagcaggtgcaggcggctgccgcagctgccgcagtcgctcaggcccaggctcaagcccaagctcaggcccaggcccaagcacaggctcaagctcaggcccaggccagtcaggcctcccaacagcagcagcaacaacaacaacagcagcaacagcaacagcagcaaccaccgccacacttccagtcgcctggggctgcccctcagggtggagggggaggtgactctaacccaaatccccctccacagtgttcattcgacttgactccatataaaactgctgagcatcataaagacatttgcttaaccgttaccaccagcaccattcaggtggaacatctcgcaagcagctag

SEQ ID NO: 235149 - DNA, 1551 bp, Artificial Sequence
  derived and/or modified sequence
atggaggagagtcacttcaactctaatccctacttctggccctcgattccaacggtctcaggccagatcgagaacaccatgtttataaacaaaatgaaggatcagttgctgcccgaaaagggctgcggcttggcacctccccattaccctactttgttgaccgtgcctgcctcggtctctctgccatctggcatcagtatggatacagagtctaagagtgaccagctgaccccacacagccaagccagcgtgacgcaaaacatcactgtagtgccggtcccgtccacaggcctgatgactgctggcgtgtcatgttcccaacgttggaggagggagggaagccagtctcgtgggccagggctggttattacctccccgtccggatcactcgtgaccactgccagtagcgctcagacatttccgatatctgcgccaatgatagtgagtgctctaccacccggtagccaggctttgcaggtcgtgcctgatctcagcaaaaaggtcgcaagcacattgaccgaagaaggcggaggtggcggagggggaggaggctccgtggcgcctaagccgcctcggggtagaaagaaaaaaagaatgctagagtctggtctcccagaaatgaacgacccttatgtactgtcacctgaagacgacgacgatcaccagaaagacgggaagacctacaggtgcaggatgtgtagcttgaccttctattcaaagtcagagatgcagatccatagcaaatctcacaccgaaacgaaacctcacaagtgccctcattgcagcaaaacctttgcaaatagctcttacctggcacaacatatcaggatccacagcggtgccaagccatactcttgtaatttctgtgaaaaaagtttcaggcagctctcccacctgcagcagcatactcgtatccacacaggagatagaccctacaagtgcgcgcacccagggtgcgagaaggctttcacccagttgtcaaacttacaatctcataggcgacagcacaacaaggataagccttttaaatgtcataattgccacagggcttacactgacgctgcgagcctggaggtacacttaagcacacatacagtaaaacacgccaaagtttacacctgtacaatctgttcgcgggcttacacatccgaaacttacctgatgaaacacatgcgcaagcacaatccccctgacctgcagcagcaagtgcaagccgcagcagctgcagcggcagttgcgcaggcacaagcgcaggctcaggctcaggctcaggctcaggcacaagcacaggcgcaggcgcaggcctctcaggcatctcagcagcagcaacagcagcagcaacagcaacagcaacaacagcaacagccgcctccacacttccaaagtccaggcgcagcaccgcagggcggtggtggaggcgactctaacccaaacccaccgcctcagtgttcttttgatctgaccccttacaaaactgccgaacaccataaggacatatgcctcaccgttacaacaagcacaatccaggtagaacatctggccagttcttag

SEQ ID NO: 235150 - DNA, 1551 bp, Artificial Sequence
  derived and/or modified sequence
atggaggagtcccactttaattccaatccctacttctggcccagcattccaaccgtgtccgggcagattgaaaacactatgtttattaacaagatgaaagatcaactgctccctgaaaaggggtgcggcctggcgccaccccattaccccactctgctcaccgttcccgcttccgtgagccttcccagcggtatttccatggatacagagtccaagtcggaccagcttaccccccactcacaagcatccgtgacccagaacatcacagtggtgccagttcccagcactggcctcatgactgctggagtctcatgcagtcagcgatggcgaagagagggaagccagagccgcggtccaggactggtcattacctctcccagtgggtctctggtgacaactgccagcagcgcacagacttttccaatttccgcgcctatgatcgtctctgcattgccacctggctcccaggctttgcaggtggttcccgacctctccaagaaggtcgctagcactttgactgaagagggaggaggtgggggaggaggaggcggttcagtggcaccaaagcctccgcgaggcaggaaaaagaaacggatgctggaaagcggattaccggaaatgaatgatccctatgtattaagcccagaggacgacgacgaccatcagaaggatgggaagacgtatcgctgtcgaatgtgctctctcaccttctactccaaatcagagatgcagatacactctaagtctcacacagagaccaagccacacaaatgtcctcattgttctaaaacctttgccaattcgagctaccttgcccagcacatcagaattcactccggcgctaagccttactcgtgcaacttctgtgaaaagtcattccgccagctgagccacttgcaacagcacactcgcattcacacaggcgacaggccttataaatgtgcacaccctgggtgcgagaaagccttcactcaattgtccaacctgcagtctcataggagacagcacaacaaggacaaaccttttaagtgtcacaactgtcacagggcatatacagatgccgcttccctcgaggtgcaccttagcacccataccgtcaagcatgcgaaagtctatacgtgcaccatctgcagtcgcgcatacaccagcgagacctacctcatgaaacatatgaggaaacacaacccaccagacttgcaacagcaggttcaggctgccgcagcggcagcagccgtcgcacaagcacaggcccaggcccaggcacaggcccaagcccaagcccaagcccaggcgcaggcccaggcctctcaggcaagccaacagcagcagcaacagcagcagcagcagcaacaacagcagcaacagccacctcctcatttccagtcacctggggctgcaccacaagggggaggcggaggggacagcaatcccaacccacccccacaatgctcattcgaccttacaccctataaaactgcagagcaccacaaagacatatgcctgacagtaacaacgagcaccattcaagttgaacatttggcctccagttag

SEQ ID NO: 235151 - DNA, 834 bp, Artificial Sequence
  derived and/or modified sequence
atggaagaatctcattttaatagtaatccatacttctggcccagtatccccacagtgtcaggccagatagaaaataccatgttcataaacaaaatgaaagaccagttactgcccgagaagggctgtggattggcaccccctcattaccctactctgcttaccgtccctgcatcagtgagcttaccaagtggcatatcaatggataccgagtccaagtctgatcagctgacccctcattcacaggccagtgtcacccaaaatatcaccgttgttccagtgccttccacaggtttgatgactgccggacctggattagttataacgagcccgtccggctctctggtgacgactgctagtagcgctcagaccttccccatctccgctccaatgatagttagcgcactgcccccaggaagccaggcgttgcaagtcgtgccagatctgtctaaaaaggtcgcgtctacactgacagaggaggggggaggcggagggggaggcggaggcagtgtagcccctaagcccccacgcggaagaaagaagaaaagaatgctcgaatctgggttgcccgagatgaacgatccgtatgtgctttcacccgaggatgacgacgaccatcagaaagacggcaagacataccggtgccgaatgtgctctctgactttctattcaaagtctgagatgcagatccacagtaaatctcacacagagactaaaccgcataagtgtcctcattgcagcaaaacatttgcaaattcctcatatctggcacaacatataagaattcactcaggcgctaagccatactcgtgcaatttttgtgaaaaatccttttag

SEQ ID NO: 235152 - DNA, 3069 bp, Artificial Sequence
  derived and/or modified sequence
gcaaggggagggcagcaaggagggggggccacccactacctcgcgcccccgccctgcgggtgtctcgcgcgcgttccgtgcgtgtgagtgtgtgggtctgtctcgctccagaagtgcgtgcccgcgcgctgcgccttgcgctttttcccctccctcgccccttcctggtcctcccaccctcctcggctccctcctttcccagcaaacgccgcccctcccgcgccctggctcaggctctggcgccgccgcagccgtcgccgcccgaaagttcaggagccctggaaaggagaaggaataagacggcaggaggaagagagagagagggtagaatggaagaatctcacttcaattctaacccgtacttctggccttctatccccacagtctcaggtcagatcgagaacacaatgttcatcaacaagatgaaggatcagctgttgccagagaagggctgtggtctggccccacctcactaccccaccttgctgacagtgcctgcctcagtgtccctgccctcaggcatcagtatggacacagagtccaagtcagaccagctgaccccacacagccaagcgtccgttacccagaatatcacggtggtccctgtgccgtctacaggactgatgactgctggtccgggtttggtaatcacgtccccctcaggctctcttgtgaccacagcatcatcagctcagaccttccccatttcggctcccatgattgtctcagctcttccccctggctcacaagccctgcaggttgtccctgacctctccaagaaggtagcatcgaccctaaccgaggaaggaggcggaggtggtggtggaggtggcagtgtggctcctaagccaccccggggccggaagaagaagcggatgctggaatcagggctgcccgagatgaatgacccttatgtcctctcccctgaggatgatgatgaccatcagaaagacggcaagacctacaggtgccggatgtgctcactgacattctactccaagtcggagatgcagatccactccaagtcacacaccgagaccaagccccacaagtgcccacattgctccaagaccttcgccaacagctcctacctggcccagcacatccgtatacactcaggggctaagccctacagttgtaacttctgtgagaaatccttccgccagctctcccaccttcagcagcacacccgaatccacactggtgatagaccatacaaatgtgcacacccaggctgtgagaaagccttcacacaactctccaatctgcagtcccacagacggcaacacaacaaagataaacccttcaagtgccacaactgtcatcgggcgtacacggatgcagcctcactagaggtgcacctgtctacgcacacagtgaagcatgccaaggtgtacacctgcactatctgcagtcgggcatacacatcagaaacataccttatgaaacatatgcgcaaacacaacccgcctgatcttcagcaacaggtgcaggcagcagcagcagcggcagcagtggcccaggcccaggctcaagctcaagcccaggctcaggctcaggctcaagcccaggcccaggcccaggcctcccaggcatcacagcagcagcagcagcagcagcagcagcagcagcagcagcagcaacagccaccaccacacttccagtctcctggggcagccccccagggtgggggtggtggggacagcaatcccaaccctccaccccagtgttcctttgacctgaccccgtataagacggcggagcatcataaggacatctgcctcactgtcaccaccagcaccatccaggtggagcacctggccagctcttagagatccgtgctgccacccactgggaagaggaagaagtagtcctggtgtcttctttctccaactcttggtgggaaaagtccttttcttccttgacaggccttggctccatctccttgggcctctgtcacggctttccttcacaggataccatcctttttctgaactcttcttcaaaaggaacatcagccctcctgattgcaaaggaatactgagctgatggtgtcatccagcagcctcccctcccaagcaaagcttctaaaactgggggtcggtgctcaagggaaggatttgctatgacctcatagaaccttgtccagtgtggccacttaccctatccttaccctccttatcctcaaagtttgggctgatgtaagactagaggctggccctcccagataacagagaaaagggagccccaaatgcaaccagcctcttgttctattcttgcctgcaaaagaacagaggtttctcaaatgcctcagtccctgagagccatttcttcccctacatcgtctcactttgcttcctattgactgctggtagaaggagatttggggtaggggctagacctccttttatttgaagggggcaagggctgagatgtggtccccaaggggccagaaattcccaagttggtcacaggtggcttagaagtgtgtgttatggttttacggatttccttgaagcctctctccttctctgcctacaaagaccctatactctcagtctccccaacccacccccaaggagctgtgggaggctttgtgttatctgtgaaactccaaaacaggggtgttgcggagaagggagagttcaaggcaaacgcaaggactggacttagctccctaggtgccacagtcagatgccggacacggatttatatataaatatatatatataaatatattatactcactcatcacggccatctttgttgtaaccatttctgtgtttataaatgcattatctctgagaattttcatatttgatgttttgtttatttttgtcctttttttccctctctccacccctgtcctctagccacagcatttttctttttgtcttttttttttttttttaaatcatggcagatttcagaggaaaggaaattaaaaaaaaaatcaggaaaccagttgttataaagtaatttaaaaatgaagaaaaaaagaaaaaaacttatgtacaaaccaaggggtgtttttagaacattgtatagaaataaattcatgtaaaagga

SEQ ID NO: 235153 - DNA, 3286 bp, Artificial Sequence
  derived and/or modified sequence
gaggaagtggctgggcctgaactggcactgtgcctgccacaaggtcttgtgcatcccccagccctcagctttgccttctgaagccactcctcaggggcacagaccctcctcctcctccatctctaatgttctctgacccctggttacctgtggcctgggaacgaacaaggaccagtctctgagcctaggagtgaaacccaaacgctggtgatagaattcgtcttagtttctgggaattggatttatttctcttgtatccacgtagagggtagcactagactgctgttattatatccacccgtctttggattgctggctggggggtctgcctgccttccagactgactgctgacaaataattcctgaggttctccacagttctctggtggctgcaccctgcctggcccctgtaacctagacaatttgtttacagaaagttcaggagccctggaaaggagaaggaataagacggcaggaggaagagagagagagggtagaatggaagaatctcacttcaattctaacccgtacttctggccttctatccccacagtctcaggtcagatcgagaacacaatgttcatcaacaagatgaaggatcagctgttgccagagaagggctgtggtctggccccacctcactaccccaccttgctgacagtgcctgcctcagtgtccctgccctcaggcatcagtatggacacagagtccaagtcagaccagctgaccccacacagccaagcgtccgttacccagaatatcacggtggtccctgtgccgtctacaggactgatgactgctggagtctcctgttctcagaggtggagaagagaagggagtcaatcaaggggtccgggtttggtaatcacgtccccctcaggctctcttgtgaccacagcatcatcagctcagaccttccccatttcggctcccatgattgtctcagctcttccccctggctcacaagccctgcaggttgtccctgacctctccaagaaggtagcatcgaccctaaccgaggaaggaggcggaggtggtggtggaggtggcagtgtggctcctaagccaccccggggccggaagaagaagcggatgctggaatcagggctgcccgagatgaatgacccttatgtcctctcccctgaggatgatgatgaccatcagaaagacggcaagacctacaggtgccggatgtgctcactgacattctactccaagtcggagatgcagatccactccaagtcacacaccgagaccaagccccacaagtgcccacattgctccaagaccttcgccaacagctcctacctggcccagcacatccgtatacactcaggggctaagccctacagttgtaacttctgtgagaaatccttccgccagctctcccaccttcagcagcacacccgaatccacactggtgatagaccatacaaatgtgcacacccaggctgtgagaaagccttcacacaactctccaatctgcagtcccacagacggcaacacaacaaagataaacccttcaagtgccacaactgtcatcgggcgtacacggatgcagcctcactagaggtgcacctgtctacgcacacagtgaagcatgccaaggtgtacacctgcactatctgcagtcgggcatacacatcagaaacataccttatgaaacatatgcgcaaacacaacccgcctgatcttcagcaacaggtgcaggcagcagcagcagcggcagcagtggcccaggcccaggctcaagctcaagcccaggctcaggctcaggctcaagcccaggcccaggcccaggcctcccaggcatcacagcagcagcagcagcagcagcagcagcagcagcagcagcagcaacagccaccaccacacttccagtctcctggggcagccccccagggtgggggtggtggggacagcaatcccaaccctccaccccagtgttcctttgacctgaccccgtataagacggcggagcatcataaggacatctgcctcactgtcaccaccagcaccatccaggtggagcacctggccagctcttagagatccgtgctgccacccactgggaagaggaagaagtagtcctggtgtcttctttctccaactcttggtgggaaaagtccttttcttccttgacaggccttggctccatctccttgggcctctgtcacggctttccttcacaggataccatcctttttctgaactcttcttcaaaaggaacatcagccctcctgattgcaaaggaatactgagctgatggtgtcatccagcagcctcccctcccaagcaaagcttctaaaactgggggtcggtgctcaagggaaggatttgctatgacctcatagaaccttgtccagtgtggccacttaccctatccttaccctccttatcctcaaagtttgggctgatgtaagactagaggctggccctcccagataacagagaaaagggagccccaaatgcaaccagcctcttgttctattcttgcctgcaaaagaacagaggtttctcaaatgcctcagtccctgagagccatttcttcccctacatcgtctcactttgcttcctattgactgctggtagaaggagatttggggtaggggctagacctccttttatttgaagggggcaagggctgagatgtggtccccaaggggccagaaattcccaagttggtcacaggtggcttagaagtgtgtgttatggttttacggatttccttgaagcctctctccttctctgcctacaaagaccctatactctcagtctccccaacccacccccaaggagctgtgggaggctttgtgttatctgtgaaactccaaaacaggggtgttgcggagaagggagagttcaaggcaaacgcaaggactggacttagctccctaggtgccacagtcagatgccggacacggatttatatataaatatatatatataaatatattatactcactcatcacggccatctttgttgtaaccatttctgtgtttataaatgcattatctctgagaattttcatatttgatgttttgtttatttttgtcctttttttccctctctccacccctgtcctctagccacagcatttttctttttgtcttttttttttttttttaaatcatggcagatttcagaggaaaggaaattaaaaaaaaaatcaggaaaccagttgttataaagtaatttaaaaatgaagaaaaaaagaaaaaaacttatgtacaaaccaaggggtgtttttagaacattgtatagaaataaattcatgtaaaagga

SEQ ID NO: 235154 - DNA, 2509 bp, Artificial Sequence
  derived and/or modified sequence
gctatttccctccctccccccttttcgtttccggcgctcccgccttctctccgcagagctcttctctgagcctgttggggggagggaggggggcgtggaggaactggggttcgcgggagcacgagctgcagcaccacttccgggtgagtgcaaggggagggcagcaaggagggggggccacccactacctcgcgcccccgccctgcgggtgtctcgcgcgcgttccgtgcgtgtgagtgtgtgggtctgtctcgctccagaagtgcgtgcccgcgcgctgcgccttgcgctttttcccctccctcgccccttcctggtcctcccaccctcctcggctccctcctttcccagcaaacgccgcccctcccgcgccctggctcaggctctggcgccgccgcagccgtcgccgcccgaaagttcaggagccctggaaaggagaaggaataagacggcaggaggaagagagagagagggtagaatggaagaatctcacttcaattctaacccgtacttctggccttctatccccacagtctcaggtcagatcgagaacacaatgttcatcaacaagatgaaggatcagctgttgccagagaagggctgtggtctggccccacctcactaccccaccttgctgacagtgcctgcctcagtgtccctgccctcaggcatcagtatggacacagagtccaagtcagaccagctgaccccacacagccaagcgtccgttacccagaatatcacggtggtccctgtgccgtctacaggactgatgactgctggagtctcctgttctcagaggtggagaagagaagggagtcaatcaaggggtccgggtttggtaatcacgtccccctcaggctctcttgtgaccacagcatcatcagctcagaccttccccatttcggctcccatgattgtctcagctcttccccctggctcacaagccctgcaggttgtccctgacctctccaagaaggtagcatcgaccctaaccgaggaaggaggcggaggtggtggtggaggtggcagtgtggctcctaagccaccccggggccggaagaagaagcggatgctggaatcagggctgcccgagatgaatgacccttatgtcctctcccctgaggatgatgatgaccatcagaaagacggcaagacctacaggtgccggatgtgctcactgacattctactccaagtcggagatgcagatccactccaagtcacacaccgagaccaagccccacaagtgcccacattgctccaagaccttcgccaacagctcctacctggcccagcacatccgtatacactcaggggctaagccctacagttgtaacttctgtgagaaatccttccgccagctctcccaccttcagcagcacacccgaatccacactggtgatagaccatacaaatgtgcacacccaggctgtgagaaagccttcacacaactctccaatctgcagtcccacagacggcaacacaacaaagataaacccttcaagtgccacaactgtcatcgggcgtacacggatgcagcctcactagaggtgcacctgtctacgcacacagtgaagcatgccaaggtgtacacctgcactatctgcagtcgggcatacacatcagaaacataccttatgaaacatatgcgcaaacacaacccgcctgatcttcagcaacaggtgcaggcagcagcagcagcggcagcagtggcccaggcccaggctcaagctcaagcccaggctcaggctcaggctcaagcccaggcccaggcccaggcctcccaggcatcacagcagcagcagcagcagcagcagcagcagcagcagcagcagcaacagccaccaccacacttccagtctcctggggcagccccccagggtgggggtggtggggacagcaatcccaaccctccaccccagtgttcctttgacctgaccccgtataagacggcggagcatcataaggacatctgcctcactgtcaccaccagcaccatccaggtggagcacctggccagctcttagagatccgtgctgccacccactgggaagaggaagaagtagtcctggtgtcttctttctccaactcttggtgggaaaagtccttttcttccttgacaggccttggctccatctccttgggcctctgtcacggctttccttcacaggataccatcctttttctgaactcttcttcaaaaggaacatcagccctcctgattgcaaaggaatactgagctgatggtgtcatccagcagcctcccctcccaagcaaagcttctaaaactgggggtcggtgctcaagggaaggatttgctatgacctcatagaaccttgtccagtgtggccacttaccctatccttaccctccttatcctcaaagtttgggctgatgtaagactagaggctggccctcccagataacagagaaaagggagccccaaatgcaaccagcctcttgttctattcttgcctgcaaaagaacagaggtttctcaaatgcctc

SEQ ID NO: 235155 - DNA, 1096 bp, Artificial Sequence
  derived and/or modified sequence
tcgcgcgcgttccgtgcgtgtgagtgtgtgggtctgtctcgctccagaagtgcgtgcccgcgcgctgcgccttgcgctttttcccctccctcgccccttcctggtcctcccaccctcctcggctccctcctttcccagcaaacgccgcccctcccgcgccctggctcaggctctggcgccgccgcagccgtcgccgcccgaaagttcaggagccctggaaaggagaaggaataagacggcaggaggaagagagagagagggtagaatggaagaatctcacttcaattctaacccgtacttctggccttctatccccacagtctcaggtcagatcgagaacacaatgttcatcaacaagatgaaggatcagctgttgccagagaagggctgtggtctggccccacctcactaccccaccttgctgacagtgcctgcctcagtgtccctgccctcaggcatcagtatggacacagagtccaagtcagaccagctgaccccacacagccaagcgtccgttacccagaatatcacggtggtccctgtgccgtctacaggactgatgactgctggtccgggtttggtaatcacgtccccctcaggctctcttgtgaccacagcatcatcagctcagaccttccccatttcggctcccatgattgtctcagctcttccccctggctcacaagccctgcaggttgtccctgacctctccaagaaggtagcatcgaccctaaccgaggaaggaggcggaggtggtggtggaggtggcagtgtggctcctaagccaccccggggccggaagaagaagcggatgctggaatcagggctgcccgagatgaatgacccttatgtcctctcccctgaggatgatgatgaccatcagaaagacggcaagacctacaggtgccggatgtgctcactgacattctactccaagtcggagatgcagatccactccaagtcacacaccgagaccaagccccacaagtgcccacattgctccaagaccttcgccaacagctcctacctggcccagcacatccgtatacactcaggggctaagccctacagttgtaacttctgtgagaaatccttc

SEQ ID NO: 235156 - protein, 1261 aa, Artificial Sequence
  derived and/or modified sequence
MGTGDFICISMTGGAPWGFRLQGGKEQKQPLQVAKIRNQSKASGSGLCEGDEVVSINGNPCADLTYPEVIKLMESITDSLQMLIKRPSSGISEALISENENKNLEHLTHGGYVESTTLQIRPATKTQCTEFFLAPVKTEVPLAENQRSGPDCAGSLKEETGPSYQRAPQMPDSQRGRVAEELILREKVEAVQPGPVVELQLSLSQERHKGASGPLVALPGAEKSKSPDPDPNLSHDRIVHINSIPTNEKADPFLRSSKIIQISSGRELRVIQESEAGDAGLPRVEVILDCSDRQKTEGCRLQAGKECVDSPVEGGQSEAPPSLVSFAVSSEGTEQGEDPRSEKDHSRPHKHRARHARLRRSESLSEKQVKEAKSKCKSIALLLTDAPNPNSKGVLMFKKRRRRARKYTLVSYGTGELEREADEEEEGDKEDTCEVAFLGASESEVDEELLSDVDDNTQVVNFDWDSGLVDIEKKLNRGDKMEMLPDTTGKGALMFAKRRERMDQITAQKEEDKVGGTPSREQDAAQTDGLRTTTSYQRKEEESVRTQSSVSKSYIEVSHGLGHVPQQNGFSGTSETANIQRMVPMNRTAKPFPGSVNQPATPFSPTRNMTSPIADFPAPPPYSAVTPPPDAFSRGVSSPIAGPAQPPPWPQPAPWSQPAFYDSSERIASRDERISVPAKRTGILQEAKRRSTTKPMFTFKEPKVSPNPELLSLLQNSEGKRGTGAGGDSGPEEDYLSLGAEACNFMQSSSAKQKTPPPVAPKPAVKSSSSQPVTPVSPVWSPGVAPTQPPAFPTSNPSKGTVVSSIKIAQPSYPPARPASTLNVAGPFKGPQAAVASQNYTPKPTVSTPTVNAVQPGAVGPSNELPGMSGRGAQLFAKRQSRMEKYVVDSDTVQAHAARAQSPTPSLPASWKYSSNVRAPPPVAYNPIHSPSYPLAALKSQPSAAQPSKMGKKKGKKPLNALDVMKHQPYQLNASLFTFQPPDAKDGLPQKSSVKVNSALAMKQALPPRPVNAASPTNVQASSVYSVPAYTSPPSFFAEASSPVSASPVPVGIPTSPKQESASSSYFVAPRPKFSAKKSGVTIQESGRSLSLPGRSVPPPISTSPWVYQPTYSYSSKPTDGLEKANKRPTPWEAAAKSPLGLVDDAFQPRNIQESIVANVVSAARRKVLPGPPEDWNERLSYIPQTQKAYMGSCGRQEYNVTANNNMSTTSQYGSQLPYAYYRQASRNDSAIMSMETRSDYCLPVADYNYNPHPRGWRRQT

SEQ ID NO: 235157 - DNA, 3786 bp, Artificial Sequence
  derived and/or modified sequence
atggggacgggagactttatatgcatttctatgacaggcggcgctccctgggggttccgcctgcaaggagggaaggaacagaaacagccactgcaagttgccaaaatcaggaaccagagtaaggcctctggcagtggcctttgtgaaggtgacgaggtcgtcagtatcaacggaaacccctgcgccgacctgacctatccagaggtcattaagctaatggaaagcataacggactcactccaaatgctcataaaacgacctagtagtggaatatctgaggccttgatttcagagaatgaaaataaaaacctggaacatctgacccatgggggatacgttgagagcacgacactacagatacgaccagccacaaagacccagtgtacagaattcttcctggcacctgtgaagacagaggtaccattagcagaaaatcagcgtagcggacctgattgtgctgggagccttaaggaggagaccggcccgagctatcagcgggccccgcagatgccagacagccagcgcggtagggttgccgaggaattgatactgcgcgaaaaggtggaagccgtgcaaccgggtccagtcgttgagctgcaactgagcctgtcacaggaacgacataaaggtgcaagtggccctctggtcgccctccctggcgctgaaaaatcaaagagccctgaccctgaccccaaccttagtcatgacaggatcgtccacataaatagcataccgacaaacgaaaaggcagatcctttcctgcgttcttccaaaatcatccagatctcctctggtcgggagcttcgggtgattcaagaaagtgaggcaggggatgctggtctccctcgggttgaggttatcctggattgttccgatcggcaaaagaccgagggctgcagactccaggccggcaaggagtgcgttgattctcctgtggaaggcgggcagtccgaagcccctccgtcgctggtgagcttcgctgtaagtagtgaaggaactgaacagggtgaagatcctcggagcgagaaggaccacagtaggccgcataagcatagggcccgacacgctaggcttaggagatcggagagtttatccgagaagcaggtgaaggaggctaaaagcaaatgtaagagcatcgcgctattgctgacagatgcacccaatcctaatagcaaaggggtgctcatgttcaaaaagcggagaaggagggcccggaaatacactctggtcagctacggcaccggagaattagaaagggaggccgacgaagaggaagagggcgataaagaagacacctgcgaggtggcattcctgggcgcgtctgaaagtgaagtagatgaagagctcttgtctgacgttgacgataatactcaggtcgtgaactttgattgggacagcggcctggtggacattgagaagaagctgaatagaggagacaagatggagatgctcccagataccacgggaaagggagctctgatgtttgcgaagagacgcgaacgaatggaccagataaccgcgcagaaagaggaggataaggtgggaggaacaccatcaagagagcaggatgctgctcagacagacggcctgagaacaaccacatcctaccaaaggaaggaggaggagtcggttaggacacagtcctccgtgtctaagtcttacatcgaagtgtcacatggccttggacatgtcccccaacaaaacggcttctccggaacctccgaaaccgcgaatatacagagaatggtccccatgaatcggacggctaagccgttcccgggctccgtcaatcagcctgcaaccccattttccccaacccgcaatatgacttctcctatcgccgattttccagccccaccgccctactctgccgttactcctcctccagatgccttcagtcggggtgtgtcttctccaatcgctggccccgcccaaccgcccccctggccccagcccgcaccatggagccagccagccttctatgactccagtgagcggatagcaagtagagacgagagaatctcggtcccggcgaagaggacaggaattctgcaagaggccaaacgacgctcaaccaccaagcccatgttcacctttaaggagcctaaggtctctccgaatcctgagttgttaagtttacttcaaaatagcgaggggaaaaggggcacaggcgctggtggtgattccggacctgaagaagattacctttctttgggcgcagaagcgtgtaacttcatgcaaagttcatccgcgaagcagaagactccgcctccagtggctcctaaacccgcagtcaagtcctcctccagtcagcctgtgacccccgtgtctccagtttggtcgccaggagttgcccccactcaacccccagccttcccaacctctaacccctcaaagggaaccgttgtgtcttccatcaaaatcgcgcaaccaagttatccaccagccaggccagcaagtacgctaaatgttgccggcccttttaaaggccctcaggccgccgtcgccagtcaaaactataccccaaaacccacagtgagcacacctaccgttaatgcagtgcagcccggtgctgtcgggccctctaatgagcttcccgggatgtctggcagaggcgcccaactattcgcaaagcgccagtcacgaatggagaagtacgtcgtggactcggacaccgtgcaggcccatgcagccagagctcagtcaccaaccccctctctcccagcaagttggaagtatagctccaacgtgcgagctccccccccggtggcatacaatcccatacactcaccgtcatatcccctagcagctctcaaatcccagccttctgctgcacagcccagcaaaatgggcaagaagaagggaaaaaaaccattaaatgctctggatgtcatgaaacatcagccttaccaacttaatgcctcccttttcacatttcaaccacccgatgcaaaggacggcctccctcagaagtcctctgttaaagtgaacagcgcactggcgatgaaacaagcgctcccaccgcggccagtgaacgcagcaagccccacaaatgttcaagcctcctccgtctatagcgttccagcgtacacctcccctccctccttctttgcagaggcttcttctcccgtgagtgccagccccgtccccgtaggcatcccgacaagtcctaagcaggagtctgcaagttcaagctacttcgtcgccccacggcccaagttttccgctaaaaaaagtggagtgactatacaggaatcaggacggtctctgtcattacctggtcgcagtgtgccgcctcccattagtacaagcccatgggtgtaccaacccacatatagttactcaagcaaaccgaccgacgggcttgagaaggctaataaaaggccgactccctgggaggcggctgccaaatcccctttgggtctggtggacgatgcattccagcccagaaatatccaggagtcaatagtcgccaacgtggtttccgccgctcgtaggaaagtactgccaggtccccctgaagattggaacgagaggctttcttatatccctcaaacacagaaggcctacatggggtcttgtgggagacaagaatacaacgtaactgcaaataataatatgtccaccacgtcacagtatggcagtcagctcccctacgcgtattaccgacaggccagcagaaacgattccgccattatgagcatggagactcgaagtgactattgcctcccagtggcagactataactacaatccccacccaagaggctggcgaagacagacctag

SEQ ID NO: 235158 - DNA, 3786 bp, Artificial Sequence
  derived and/or modified sequence
atgggcactggagacttcatctgcatctccatgactggaggagccccctggggcttccggctgcagggcggcaaggagcagaagcagcccctgcaggtggccaagatccggaaccagagcaaggccagcggcagcggcctgtgtgaaggagatgaggtggtgtccatcaatggaaacccctgtgccgacctgacctacccagaggtgatcaagctgatggagagcatcacagacagcctgcagatgctgatcaagaggcccagcagcggcatcagcgaggccctgatcagtgaaaatgaaaacaagaacctggagcacctgacccatggaggctacgtggagagcaccaccctgcagatccggcctgccaccaagacccagtgcacagagttcttcctggcccctgtgaagacagaggtgcccctggccgagaaccagaggagcggccctgactgtgccggcagcctgaaggaggagaccggccccagctaccagagggccccccagatgccagacagccagaggggccgggtggccgaggagctgatcctgcgggagaaggtggaggccgtgcagcccggccctgtggtggagctgcagctgagcctgagccaggagcggcacaagggggccagcggccccctggtggccctgcctggagctgagaagagcaagagcccagaccctgaccccaacctgagccatgaccgcatcgtgcacatcaacagcatccccaccaatgagaaggctgaccccttcctgcggagcagcaagatcatccagatcagcagcggccgggagctgcgggtcatccaggagagcgaggccggagatgctggcctgccccgggtggaggtgatcctggactgcagcgaccggcagaagacagagggctgccgcctgcaggccggcaaggaatgtgtggacagccctgtggagggcggccagagcgaggccccacccagcctggtgtcctttgctgtgagcagcgagggcacagagcagggcgaggaccccaggtctgagaaggaccacagccggccccacaagcaccgggcccggcatgcccggctgcggcgctctgagagcctgtctgagaagcaggtgaaggaggccaagagcaagtgcaagagcatcgccctgctgctgacagatgcccccaaccccaacagcaagggcgtgctgatgttcaagaagagaagaagaagagccaggaagtacaccctggtgtcctatggcaccggggagctggagcgggaggctgatgaggaggaggagggggacaaggaggacacctgtgaggtggccttcctgggcgccagcgagagcgaggtggatgaggagctgctgagtgatgtggatgacaacacccaggtggtgaactttgactgggacagcggcctggtggacatcgagaagaagctgaacagaggagacaagatggagatgctgcctgacaccaccgggaagggggccctgatgtttgccaagaggcgggagaggatggaccagatcacagcccagaaggaggaggacaaggtgggcggcacccccagccgggagcaggatgctgcccagacagatggcctgcggaccaccaccagctaccagaggaaggaggaggagagcgtgaggacccagagctctgtgtccaagagctacatcgaggtgagccacggcctgggccacgtgccccagcagaatggcttcagcggcaccagcgagacagccaacatccagaggatggtgcccatgaacagaacagccaagcccttccctggctctgtgaaccagcctgccacccccttcagccccaccaggaacatgaccagccccatcgctgacttccctgcccccccaccctacagcgctgtgaccccacctccagatgccttcagcagaggagtgagcagccccatcgccggccctgcccagcccccaccctggccccagcctgccccctggagccagcctgccttctatgacagcagcgagagaattgccagcagagatgagcgcatctctgtgcctgccaagaggacaggcatcctgcaggaggccaagagaagaagcaccaccaagcccatgttcaccttcaaggagcccaaggtgagccccaaccctgagctgctgagcctgctgcagaacagcgagggcaagaggggcactggagctggaggagacagcggccctgaggaggactacctgagcctgggcgctgaggcctgcaacttcatgcagagcagcagcgccaagcagaagaccccacctcctgtggcccccaagccagctgtgaagagcagcagcagccagcctgtgacccctgtgtcccctgtgtggagccctggggtggcccccacccagcccccagccttccccaccagcaaccccagcaaaggaacagtggtgagcagcatcaagatcgcccagcccagctaccccccagcccggcctgccagcaccctgaatgtggccggccccttcaagggcccccaggccgctgtggccagccagaactacacccccaagcccaccgtgtccacccccaccgtgaatgctgtgcagcccggggctgtgggccccagcaatgagctgcccggcatgagcggccgcggggcccagctgtttgccaagaggcagagcaggatggagaagtatgtggtggacagcgacacagtgcaggcccatgctgcccgggcccagagccccacccccagcctgcctgcctcctggaagtacagcagcaatgtgcgggcccctcctcctgtggcctacaaccccatccacagccccagctaccccctggccgccctgaagagccagcccagcgctgcccagcccagcaagatgggcaagaagaagggcaagaagcccctgaatgccctggatgtgatgaagcaccagccctaccagctgaatgccagcctcttcaccttccagcccccagatgccaaggatggcctgccccagaagagctctgtgaaggtgaacagcgccctggccatgaagcaggccctgccccccaggcctgtgaatgctgccagccccaccaacgtgcaggccagctctgtgtacagcgtgcctgcctacaccagccccccatccttctttgctgaggccagcagccctgtgtctgccagccctgtgcctgtgggcatccccaccagccccaagcaggagagcgccagcagcagctactttgtggccccccggcccaagttcagcgccaagaagtctggagtgaccatccaggagagcggccgcagcctgagcctgcccggccgctctgtgcccccacccatcagcaccagcccctgggtgtaccagcccacctacagctacagcagcaagcccacagatggcctggagaaggccaacaagaggcccaccccctgggaggccgccgccaagagccccctgggcctggtggatgatgccttccagcccaggaacatccaggagagcatcgtggccaacgtggtgtctgctgcccggaggaaggtgctgcccggccccccagaggactggaatgaaaggctgagctacatcccccagacccagaaggcctacatgggcagctgtggccggcaggagtacaacgtgacagccaacaacaacatgagcaccaccagccagtatggcagccagctgccctatgcctactaccggcaggccagcagaaatgacagcgccatcatgtccatggagaccaggagtgactactgcctgcctgtggccgactacaactacaacccccacccccggggctggaggcggcagacctag

SEQ ID NO: 235159 - DNA, 3786 bp, Artificial Sequence
  derived and/or modified sequence
atgggcaccggcgacttcatctgcatcagcatgaccggcggcgccccttggggatttcgactgcagggcgggaaggagcaaaaacagcccctgcaggtggcaaaaatcagaaatcaaagcaaagcctctggaagcggtctctgtgagggtgacgaagtagtctccattaacggaaatccatgtgctgatctcacttaccccgaggtcatcaaactcatggaatcgattacggacagtctgcaaatgcttattaaaagacccagtagcggcattagcgaagctctgatctctgagaatgagaataaaaacctggagcacctgacccacggcgggtatgtcgaatccacgacgctgcagattagaccagcaactaaaactcagtgcacagaattctttctcgcgcctgtcaagacggaagtgccacttgctgaaaatcagcgaagtggaccagactgcgccggctctctgaaggaggagacgggcccctcataccagcgagctccccagatgccagattcacaacgcggtagggtggctgaggagcttatcctccgggaaaaagtcgaggcggtgcagcccgggccggtggtggagctgcagctaagcctgtcacaggaacgccataaaggtgcttcaggtccactggtagccctccctggtgccgaaaagagtaaaagcccggacccagatccgaacctgtcccacgacaggattgtacatatcaactctatccccaccaatgaaaaggcggacccctttctgcgcagttccaagatcatccagatctcttccggcagagaacttagagtaatccaagagtccgaagccggcgacgccggtctgccacgggtagaagtgatcctcgattgcagcgaccgacaaaaaactgaaggctgtagactgcaggccgggaaggagtgtgtggatagtccggtggagggcgggcagagcgaggcacctcctagtctggtgtcttttgccgtttcatccgagggaacagaacagggagaggaccctcggagcgagaaggaccacagcaggccccacaaacaccgtgctcggcatgctcgcctgcggaggagcgaatccttgagtgagaaacaggtcaaggaggctaaatcaaaatgcaagtctatcgctcttctgctgacagacgccccaaaccctaatagcaaaggggtccttatgttcaaaaaacgacggcggcgagcacgtaagtatactctcgtcagttacggtacaggagagctcgaacgcgaagcagacgaggaagaagagggtgacaaggaagatacgtgcgaagtagcctttcttggggcctcagagtctgaggtcgacgaagagctcctgtccgacgtcgatgataacacacaggttgtcaatttcgactgggatagcggattggtggatattgaaaaaaagttgaaccggggagataagatggagatgcttcctgacacaacaggcaaaggcgcccttatgtttgccaaaaggcgggaacggatggatcaaatcacagctcaaaaagaagaggacaaggtgggtggcactccatctagggagcaggacgcagcacagacggatggactgcgcaccactactagttatcagagaaaagaggaggagagcgtccgtacccaatctagtgtctccaagtcctacatagaggtaagtcacggactcggacacgtgccacagcagaatggattttccggcacttcagagactgcgaatattcagcggatggtacctatgaatcgcacagcgaagcctttccccggatcagtgaatcagcccgccacacctttttctccaacaagaaatatgacatccccgattgctgactttccggccccccctccctacagtgccgtgacacccccccccgatgctttctctcgcggtgtgtccagccccatcgcagggcccgcccagccaccaccatggccacagcctgccccctggtctcagcccgcgttctacgactcatcagagagaattgccagtcgggatgagaggatttctgtcccagccaaacgtacagggattctccaggaggccaagaggcgcagtacaacaaagcctatgttcacttttaaagaacctaaggtcagccctaatccagagctgctgagcttgttgcaaaatagcgaaggcaagcggggtaccggcgctggaggcgacagtggacccgaggaagactatctttctttgggcgccgaggcttgcaacttcatgcaatcctcttccgcaaagcagaaaactccccccccggtggctcccaaaccagccgtaaagtcttcaagttctcagcctgtcacacctgtaagtcccgtatggagccccggagtggcccctacacagccccctgctttcccaacgtcaaacccctcaaaggggacagtggtgtcttccatcaagattgctcagccatcttatcccccagcccgcccggcgagcacacttaatgttgctggaccttttaaaggaccacaggctgctgttgccagtcagaattatactcctaaaccaactgtgtccactccaaccgttaacgcagtgcaaccaggtgccgtgggccctagcaacgagctccccggcatgtccgggaggggtgcccagcttttcgcaaagcgccagagtcgcatggaaaaatacgtagttgactccgacaccgtgcaggcccacgccgcaagggcccaatctcctacaccctctctgcccgcatcctggaaatactcaagcaacgttcgcgcacctccccccgttgcctacaacccaatccactccccctcttatcctctggccgctctgaaaagtcagcctagtgctgctcaacctagtaagatgggaaaaaaaaaaggcaagaagcctctaaacgcactggacgtaatgaaacaccaaccttatcaacttaacgcttcactcttcacctttcagccccccgacgcaaaagatggtcttccccagaagagcagcgtcaaggtaaactccgctctggcaatgaagcaagcgttacctccccggcccgtgaatgccgctagccctactaatgtccaggctagcagcgtttactccgtcccagcctacacctctcccccatcctttttcgctgaggctagctcacctgtgtcagctagccccgtgcccgtagggatcccgacttctccgaagcaagaaagcgcaagctcatcctacttcgtggcacccagaccgaagttctcggccaagaagagtggggtgacaatccaggaatcaggccgctccctctcccttccaggtcgctcggtaccaccaccgatttcgaccagtccctgggtgtaccagccaacgtacagctattctagcaaaccgacagatgggctcgagaaggctaacaaaagaccaacaccctgggaggccgccgctaagtcccctctaggtctggtcgacgacgccttccagccaaggaatatccaggagtcaatcgtcgcaaacgtcgtaagcgctgccagacgtaaggtcctgcctggcccccctgaagactggaatgagagactctcatatattcctcagactcagaaagcctatatggggtcatgtgggcggcaggagtacaacgtaaccgctaacaataacatgagtaccacctcccagtacggcagccagctgccgtacgcctactatagacaggcaagccgtaatgactctgcaataatgtccatggagaccagaagcgattattgtttgcctgtcgctgattataactacaatccacatccccgcgggtggagacgtcagacctag

SEQ ID NO: 235160 - DNA, 3786 bp, Artificial Sequence
  derived and/or modified sequence
atggggactggtgatttcatctgcatttccatgaccggcggagccccttgggggtttaggctgcaggggggaaaggaacagaagcagccactgcaggtggctaagattaggaaccagtccaaggccagtggctccggcctgtgtgagggagacgaggtagtatctattaatggaaacccgtgcgccgacctgacctatccagaggtcattaaattaatggagtctataacagattcccttcaaatgctaataaaacgcccatcttcaggaatcagcgaggccttaatttcagagaatgagaataagaaccttgaacacctgacacatgggggttatgtcgagtctaccaccttgcagattcgccctgcaacaaagacccagtgcactgagttttttctcgccccagttaaaaccgaggtgccccttgcagaaaaccagcgatcaggccctgattgcgcaggctccttaaaggaagagacaggccctagctatcaaagagcaccacagatgccagactctcagcggggaagggtggctgaagaactgattctgcgcgagaaagtcgaagccgtgcagcctggtcccgtcgtggaactgcagctgagtctttcccaggagagacacaaaggagcctctggcccattggtggctctccccggtgccgagaaatccaaaagcccagatcctgacccaaatttatctcatgacagaatagtgcatattaatagcataccaaccaacgagaaggccgatccatttttgcgaagcagtaagattattcagattagttcgggccgagagctacgggtgatccaggagagcgaggcgggtgatgcgggactgcctagagtggaagttattctcgactgcagcgatcgacagaagacagaagggtgtagattacaggccggaaaagagtgtgttgactctccagtggagggcggtcaatccgaggccccaccatccctggtgtctttcgccgtctcgtctgagggcaccgagcagggcgaggatccgaggtccgagaaggatcacagccgcccacacaagcatcgggcaaggcacgcgagacttagacgctctgagtcccttagcgaaaagcaggtgaaggaagctaagagtaaatgcaaatccatagctttgctgctcacggatgcaccgaatccaaacagcaagggtgtcctgatgtttaagaagcgaagaagaagggcgcgtaagtacactctggtcagttatggaacaggcgagctagagcgtgaggccgatgaagaagaagaaggggataaggaagatacatgtgaagttgccttcctgggggcatcggagtctgaggtagatgaagagctgttatccgatgtcgacgataatactcaagtggtgaacttcgattgggactcgggtctggtggacatcgagaagaaactcaaccgcggtgacaaaatggagatgcttcctgacaccactgggaaaggcgcactgatgtttgccaaaagacgagaaagaatggaccagataaccgcgcagaaagaggaggacaaagtcggaggcacgcctagccgagaacaggacgctgcacaaactgatggactcaggaccactacgagctaccaaaggaaggaggaggagtcagtgcgtacacagtctagtgtgagtaagtcctatattgaggtctcgcacggcctcggccacgtcccccagcagaatgggttttccggtacgtctgagacagccaacattcagagaatggtacccatgaacaggacagcaaaacccttccccggtagtgtcaaccaaccagccacaccgttctcacctacccgaaacatgacgagtcccatcgccgacttccccgctccaccaccttatagcgccgtgactcctccacccgacgccttcagccgaggcgtgtcttctcctattgctggaccagctcagcctcccccttggccccagccagccccatggtcgcagcccgctttttacgattccagcgagcggattgccagccgagatgaacgcatctccgtgcctgcgaaacggaccggaattctccaagaagctaagcgacgcagtactaccaagcccatgtttacttttaaggaacctaaggtgtcacccaaccctgaactgctgtctctactgcaaaactcagagggcaaaagaggcactggggctgggggtgattctggccctgaggaggactacctgtcgctgggagccgaggcgtgcaatttcatgcaatcatcctcagcaaaacaaaaaacgccaccccctgtagcccctaagcctgcggtgaagagttcctcttcccaaccagtaactccggtgtctccagtgtggtctccgggtgtggcccctacccagcctcccgctttcccaacatccaaccctagcaagggaacagtggtctccagtattaaaattgcccaaccttcttatccacccgcacgtcccgcatcaaccctcaatgtcgccggaccattcaaaggcccacaagctgctgtggcttcacagaactacacgccaaagccaacggtgtccacaccgaccgttaacgctgttcaaccaggcgcagtgggtcctagtaatgaactgcccggaatgtcggggagaggggcacaactattcgccaaacgacagtcccggatggaaaaatacgtggtggactctgataccgtgcaagcacacgcagccagagcacaaagcccaaccccttcactgccggcttcatggaagtatagctcaaatgtcagagcccctcctcctgtggcttacaaccctattcacagcccctcttaccctcttgctgcccttaaatctcagccgagcgctgcccagccgtcaaagatgggaaaaaagaagggaaaaaagcctcttaatgccctggatgtcatgaaacaccaaccgtaccagctgaatgcaagcctgtttacatttcaacctcctgacgcgaaagacggcttaccccagaaaagctctgtgaaagtgaacagtgccctcgccatgaagcaggctctgcctcctagacccgtgaatgcagccagcccaaccaatgtgcaagccagttctgtttatagcgtgccggcatacacgtcccctccctcattctttgctgaggcctcgagtcctgtctctgcctcacccgtccccgtcggtatcccaacctctcctaaacaggaatcagccagctcctcttatttcgtagcacccaggcctaaattctctgccaagaaatccggcgtgacaattcaggagtccggcagatctctgtctcttccgggtcgctcagtgcctccacctatcagcactagcccctgggtctatcagcctacttattcgtactcatctaaacctactgatggtctggaaaaggcaaacaagcgccctaccccctgggaagctgctgccaaaagccctttgggacttgttgatgacgcgtttcagcctcggaatattcaagagtcgatagttgcgaatgtggtgtcggctgctcggagaaaggtgctgcccggtcctcccgaggattggaacgaaaggctcagctacatcccacagacccagaaggcctacatgggaagttgcggcaggcaggagtacaacgtcaccgccaacaataacatgagcacgacatctcagtacggctctcagttaccatatgcctactatcgccaggcttccagaaatgattccgctatcatgtctatggagactagaagcgactactgcctccctgtggctgactacaactataacccacatcctagagggtggcgacggcagacgtag

SEQ ID NO: 235161 - DNA, 7295 bp, Artificial Sequence
  derived and/or modified sequence
gagcccattagccgcacaaattcgcagcaggcggctggggcggcggctggggcagcggctgcagcagcggcggacgctctgcattacccagtcttgcgtcctcggcaggcgcccgaagctgagtgcgcatcctctaccgcacccaagcttcgtctgtctcgtcaagctcttcatgctgcccaactaaaaggaaaacatgggcacaggggattttatctgcatttccatgactggaggggcgccctgggggttcagattgcaaggtggcaaggagcagaagcagcccttacaagttgcaaagattcgaaatcagagcaaagcctctgggtctgggctctgtgagggagatgaagtggtttccatcaatggcaacccttgtgcagatctcacctaccctgaagtcatcaagctcatggaaagcataacagactctctccaaatgctcatcaaaagaccatccagtggaataagtgaggctttgatatctgaaaatgaaaacaaaaacctcgagcatctcacacatgggggttatgtggaaagtaccaccctgcagattcgaccggccacaaagacccagtgcacagaattcttcctcgcccctgtcaagactgaagttcccctagctgagaaccaaagaagtggtcccgactgtgcaggcagcttgaaagaagaaacaggcccgagctaccaaagggctccccaaatgcctgactcccaaagaggacgcgtggcagaagagctgatcttaagggagaaggtagaagcggtacagcctgggcctgtggttgagctgcaactgtccctttcacaggagagacataagggcgctagtggccctttagtggctctcccgggagctgaaaaatctaagtctcctgacccagaccctaacttgtcacatgacaggattgtccacataaattcgatccctactaatgagaaagcagaccctttcctgaggtccagcaagataatccagatctccagtggcagagagttgagagtgatccaggaaagtgaagcaggagatgcgggactgccccgggtggaagtgatcctcgactgctctgacaggcagaagacagaagggtgcaggcttcaggcaggaaaggagtgtgtggattctccagtggaaggagggcagtcagaagcacctccttctctggtatcctttgccgtctcatcagaaggcacagagcagggagaagatccacgctcggaaaaagatcacagcagacctcacaagcaccgagcgcggcatgcacggctcaggaggagtgaaagcctgtcagaaaaacaagtgaaggaagcaaaatctaaatgcaaaagcattgcccttcttctaacggatgctcccaaccccaactccaagggggtgttgatgtttaagaagcgacgtcggagggccaggaaatacaccctagttagctacggtactggcgagcttgagcgagaggcggacgaggaggaagaaggtgacaaggaggatacatgtgaagtagcatttcttggtgcaagcgaatcagaggtggatgaagagttattgtctgacgttgacgacaacacacaagttgtgaactttgactgggattctggactggtggacattgaaaagaaactgaacagaggggacaagatggagatgttaccagacaccacaggcaagggagccctcatgtttgccaagaggagggagagaatggatcagatcacagcccaaaaagaagaggacaaggtaggtggaacgccaagcagagaacaagatgctgcccagaccgatggcctgagaaccacgacttcttaccaaagaaaggaggaagagtcggtaagaacgcagagctctgtgagcaaaagctacatcgaggtgagtcatggtcttggccatgttccccaacagaatggcttcagtgggacatctgagacagcaaacatccagaggatggtccccatgaatagaacggccaaacccttcccagggtctgtgaatcagccagctacccccttctcgccaacccgaaacatgacgagtcccattgctgactttcctgcacctccaccttactctgcagtcactcctccccctgacgccttctccagaggggtttcaagtccgattgctggcccagcacagccccctccatggccccagcctgccccgtggtcccagccagccttttacgattcgtctgagcgaatagcttcccgagatgagaggatctcagtgccagcaaaaagaacaggaatattgcaggaggccaaaaggagaagcacgacaaaacccatgtttacttttaaagagcccaaagtaagcccaaatcctgaactcttgtcactccttcaaaattcagaaggcaaacggggcactggagctggaggtgattccggaccggaagaagactacctcagcttgggggcagaggcttgtaatttcatgcaaagctcctctgccaaacaaaagacccctcctcctgttgctccaaaacctgcagtcaagtcctcatcctcccaaccagtaactccagtttccccagtctggtctccaggagtggctcccacccaacctcctgccttccccacatccaacccatcaaagggcaccgttgtctcctccatcaaaatagcccagccttcttaccctcctgcccggcctgcaagtactttgaacgtggctggtcccttcaaaggaccacaagcagcagtagccagtcagaattacacacccaaaccaacagtttccacaccaacagtcaatgctgttcagcctggtgcagtgggaccatccaatgagcttccaggaatgagtgggagaggagctcagctctttgctaaaaggcagtcgagaatggagaagtatgtggtcgattcagacacggtgcaggcccacgctgctcgagctcagtctcccactccatctctcccggccagttggaagtactcctccaatgtccgagcacctcctcctgtggcctataatcctatccactcgccgtcttacccactggctgctctcaagtctcagccatcagctgcacagccctccaaaatgggcaagaaaaagggaaagaaacccctcaatgcattagatgtcatgaagcaccaaccgtatcagctcaatgcatccttgtttactttccaacctccagatgcaaaggatggcctcccccagaagtcatcagtcaaggtcaattcagccctggccatgaagcaagctcttcctccccggccagtgaatgctgcctcacctacgaatgtgcaggcttcgtcagtgtactcggtaccagcctatacctctcctccttccttctttgcagaggcctcctcaccagtcagtgcatccccagtgcctgtgggcattcccacctcgccaaagcaagaatcagcctcatcatcttattttgtggcaccaaggccaaagttctcagccaagaaaagtggtgtcacaattcaggagagtgggcgctccctttctcttcctggaagatcagtcccaccccccatttctacatctccttgggtataccagcctacttatagttactctagtaaaccaaccgatggactagagaaagcaaacaagagaccaactccttgggaagcagcagcaaagtctcctctcggtctagtggatgatgctttccaacccagaaacatccaggaatccattgtggcaaatgtggtttcagcagctcggaggaaggtgcttccagggcctccagaggattggaatgaaagactgtcctatattcctcaaacccagaaggcctatatgggctcatgtggaaggcaagagtataatgtcacagccaataataatatgtccaccacctcccaatatggttcacagttgccatatgcatattataggcaggcttcaagaaatgattctgcaatcatgtccatggaaaccaggtctgattactgtcttccagtagctgattacaactacaacccacacccaaggggatggagacgccaaacatgaaagttagaagaacggatcatgtgccaactgtagttttttaaaaaaaacgctcctttgtagggttttaaacttttctaatagatttagattcacttttggtcttggcttgttctcataagtcatttatctaagtttgtgtttctgtgtgtgtgtgtgtgtgtgtatgtatgtgaatatacacacacacacacacacaggtgagtgtgaatacttccttgttggctgatccatagagcattacttggaagaaaatttcactatttgcattgatgtgctggcatttatatgtaattcataattttgattccattaataggtagtctatgcaacaaactctactcaattaaagtaaaactaagtatttcttcattgtaccttagtccaggaagaaattaatggaatatggtgtgctaattatcactacctataacatgaggaatataacattgcagaaatttctcataggggcatgccagtgagcaattactttataaaaatattttccttggtgttaagtatttctctgcaacttttttttttttttttttttttttttgagatggagtcttgctctgtcccacccagtctggagtgcaatggtgcgatcttggctcactgcaacctgcgcctcctgggttcaagcaattctcctgcctcagcctcctgagtagctgggattacaggcatgaaccaccacacctggataatttttgtatttttagtagacacaaagtttcaccatgttggtcagactggtcttgaactcctgacctcgtgatctgcccgcctcagcctcccaaagtgctgggattacaggcgtgagccaccacacctggcctttctgcaacatttttttaaaaaaatctaataaatcttagatttttaaaaaagaattaaaatgtgggagttctcagaaagaaataaacacatgagaataagattattacacattttggaaggacttttgaggaatgatgtgatgtgtagagaatagaaagatttagatatatgcctgtgacaggaatagattctgggttcaggggtccccatctgtcaaatgagaagattggattatctaatcttttagatccttaacaactctgatattctgagattctctcatttgtagaatgcccgctgatgcattgtttattttttttgctcataatataaatatcagattatgtttaggagtggattaggtaattagtgtcactacatgtatcattaaaggtcctaaaaggaattgttaggcggcaggctttgtgttacgtgttacatggagtgagggtagatgtgaagatttaaaacgattgatggatttaaggaagtggtacataaatatgtctgttattatgcaatcgtaggtcatgataatttattcagttatagaaaacatgccacagaagcctatgtaacaagtggtgcttctttagaaagttgtcattagaatgttctgaggaagttaagcagctgcttcatcaatcccatgacacatgccttgttagcatgcccatcaaataatcagatcaaacacctgctccttattgccatacccacgaactgttaaatataaaaaaattcaaagtatttgacatcttaagcaaatatccagaatatttttaagtaaaaaaccatcttaagtattcaaaatttccttggttttttaaaggtgataattttgctttgtgttacttttttgctcttgaatgtatcgttatgatggtctcttataatcatggtatctttcacagaataaaaattaaaaataatgccagggtgcaagtgaccaaggccttatcttgaaagttaaaaaaaaaaagtaaagaaatcacagtaagttctattagtgatgatagaaccagatataaaattgttcagtgatggagaaaagaaacgataaatactttccaaggttatattgttaaattatcttaaattatcaaggtgtaagatgtaatgatcccaagagtttttatagaatcctaaaaaataacgcctgatgtatagattagttagcaaattctcagaaatcccccacataaaagccttactttgttcaaaatttattatagtggtttaatcattttagatttgaatgttttaagataggagagacttagcagaaaatacttggcttgccagggccacgttctacttcattgctttcttttataagtgcaaggagttatttccatcagttgacatagatattattcactaaaattttcagcagactcaaaatagagaggagactttaaacttacatgttagcataaaacagacttctctctcattgcatgcactagatcaatattatcatctgtattaagctatctgaatttattcgagacattaagaaaaagacagtacatggtgggaaagctgcacatttctcacaaggaaaaaaacattctatatttgtagcagaaatcagtggtttgaaaagtcatactttgcagatatgaacctgaaaatcaaagtgccattgttaaatcatcctaaagtgtactgtgggtattctccagcatacttgaaaatgaataaagttagattgctcacattgaagctaatggttgagacaagacacctgccagagtgaagtttgattcctatgggtgagaagatgtagatgactattgttctcactaaagttctaaaataatagcaagtgtagagaagagccgttgctttgaaaatacataccacatttgttataaagcatttgtttgttagtatcaatcacataggtagaaagagtttgagttttactgtggattaaaaagccttccctaaaaagagagcatgccagtcatagagacactaatttggcacttttcctccttcttaggtttaaatgttataccaatgcatgtgtttgaaatatccattaagatgatttaaaatttgtcttgtattttgagtttcttaaatgcgtggattcttgttcatttatctctgaatatgtctcttttatattttggcacaattatacacattggaaagggccaacctattagggctcaagtatgtatatgcaaaaaaaaaaagttatatcaaacaggcacagttattacaactagagagaaattccagaaatatttgtttttttaagagaaagtaaattttcacattagatttctattcaaagtactaatatctacatggtccacacttttctattttaaaaaattgtgttctcttgttaaatagattaacatttccacttctgtttatcacaaaagactgtatttgaaatatgcatacggaaaattgaaattatattagtaataaatgtaacttgaaaaatcaa

SEQ ID NO: 235162 - DNA, 3786 bp, Artificial Sequence
  derived and/or modified sequence
atgggcaccggcgacttcatctgcatcagcatgaccggcggcgccccctggggcttcagactgcagggcggcaaggagcagaagcagcccctgcaggtggccaagatcagaaaccagagcaaggccagcggcagcggcctgtgcgagggcgacgaggtggtgagcatcaacggcaacccctgcgccgacctgacctaccccgaggtgatcaagctgatggagagcatcaccgacagcctgcagatgctgatcaagagacccagcagcggcatcagcgaggccctgatcagcgagaacgagaacaagaacctggagcacctgacccacggcggctacgtggagagcaccaccctgcagatcagacccgccaccaagacccagtgcaccgagttcttcctggcccccgtgaagaccgaggtgcccctggccgagaaccagagaagcggccccgactgcgccggcagcctgaaggaggagaccggccccagctaccagagagccccccagatgcccgacagccagagaggcagagtggccgaggagctgatcctgagagagaaggtggaggccgtgcagcccggccccgtggtggagctgcagctgagcctgagccaggagagacacaagggcgccagcggccccctggtggccctgcccggcgccgagaagagcaagagccccgaccccgaccccaacctgagccacgacagaatcgtgcacatcaacagcatccccaccaacgagaaggccgaccccttcctgagaagcagcaagatcatccagatcagcagcggcagagagctgagagtgatccaggagagcgaggccggcgacgccggcctgcccagagtggaggtgatcctggactgcagcgacagacagaagaccgagggctgcagactgcaggccggcaaggagtgcgtggacagccccgtggagggcggccagagcgaggccccccccagcctggtgagcttcgccgtgagcagcgagggcaccgagcagggcgaggaccccagaagcgagaaggaccacagcagaccccacaagcacagagccagacacgccagactgagaagaagcgagagcctgagcgagaagcaggtgaaggaggccaagagcaagtgcaagagcatcgccctgctgctgaccgacgcccccaaccccaacagcaagggcgtgctgatgttcaagaagagaagaagaagagccagaaagtacaccctggtgagctacggcaccggcgagctggagagagaggccgacgaggaggaggagggcgacaaggaggacacctgcgaggtggccttcctgggcgccagcgagagcgaggtggacgaggagctgctgagcgacgtggacgacaacacccaggtggtgaacttcgactgggacagcggcctggtggacatcgagaagaagctgaacagaggcgacaagatggagatgctgcccgacaccaccggcaagggcgccctgatgttcgccaagagaagagagagaatggaccagatcaccgcccagaaggaggaggacaaggtgggcggcacccccagcagagagcaggacgccgcccagaccgacggcctgagaaccaccaccagctaccagagaaaggaggaggagagcgtgagaacccagagcagcgtgagcaagagctacatcgaggtgagccacggcctgggccacgtgccccagcagaacggcttcagcggcaccagcgagaccgccaacatccagagaatggtgcccatgaacagaaccgccaagcccttccccggcagcgtgaaccagcccgccacccccttcagccccaccagaaacatgaccagccccatcgccgacttccccgccccccccccctacagcgccgtgacccccccccccgacgccttcagcagaggcgtgagcagccccatcgccggccccgcccagccccccccctggccccagcccgccccctggagccagcccgccttctacgacagcagcgagagaatcgccagcagagacgagagaatcagcgtgcccgccaagagaaccggcatcctgcaggaggccaagagaagaagcaccaccaagcccatgttcaccttcaaggagcccaaggtgagccccaaccccgagctgctgagcctgctgcagaacagcgagggcaagagaggcaccggcgccggcggcgacagcggccccgaggaggactacctgagcctgggcgccgaggcctgcaacttcatgcagagcagcagcgccaagcagaagacccccccccccgtggcccccaagcccgccgtgaagagcagcagcagccagcccgtgacccccgtgagccccgtgtggagccccggcgtggcccccacccagccccccgccttccccaccagcaaccccagcaagggcaccgtggtgagcagcatcaagatcgcccagcccagctacccccccgccagacccgccagcaccctgaacgtggccggccccttcaagggcccccaggccgccgtggccagccagaactacacccccaagcccaccgtgagcacccccaccgtgaacgccgtgcagcccggcgccgtgggccccagcaacgagctgcccggcatgagcggcagaggcgcccagctgttcgccaagagacagagcagaatggagaagtacgtggtggacagcgacaccgtgcaggcccacgccgccagagcccagagccccacccccagcctgcccgccagctggaagtacagcagcaacgtgagagcccccccccccgtggcctacaaccccatccacagccccagctaccccctggccgccctgaagagccagcccagcgccgcccagcccagcaagatgggcaagaagaagggcaagaagcccctgaacgccctggacgtgatgaagcaccagccctaccagctgaacgccagcctgttcaccttccagccccccgacgccaaggacggcctgccccagaagagcagcgtgaaggtgaacagcgccctggccatgaagcaggccctgccccccagacccgtgaacgccgccagccccaccaacgtgcaggccagcagcgtgtacagcgtgcccgcctacaccagcccccccagcttcttcgccgaggccagcagccccgtgagcgccagccccgtgcccgtgggcatccccaccagccccaagcaggagagcgccagcagcagctacttcgtggcccccagacccaagttcagcgccaagaagagcggcgtgaccatccaggagagcggcagaagcctgagcctgcccggcagaagcgtgcccccccccatcagcaccagcccctgggtgtaccagcccacctacagctacagcagcaagcccaccgacggcctggagaaggccaacaagagacccaccccctgggaggccgccgccaagagccccctgggcctggtggacgacgccttccagcccagaaacatccaggagagcatcgtggccaacgtggtgagcgccgccagaagaaaggtgctgcccggcccccccgaggactggaacgagagactgagctacatcccccagacccagaaggcctacatgggcagctgcggcagacaggagtacaacgtgaccgccaacaacaacatgagcaccaccagccagtacggcagccagctgccctacgcctactacagacaggccagcagaaacgacagcgccatcatgagcatggagaccagaagcgactactgcctgcccgtggccgactacaactacaacccccaccccagaggctggagaagacagacctag

SEQ ID NO: 235163 - protein, 1040 aa, Artificial Sequence
  derived and/or modified sequence
MKVKEEKAGVGKLDHTNHRRRFPDQKECPPIHIGLPVPTYPQRKTDQKGHLSGLQKVHWGLRPDQPQQELTGPGSGASSQDSSMDLISRTRSPAAEQLQDILGEEDEAPNPTLFTEMDTLQHDGDQMEWKESARWIKFEEKVEEGGERWSKPHVSTLSLHSLFELRTCLQTGTVLLDLDSGSLPQIIDDVIEKQIEDGLLRPELRERVSYVLLRRHRHQTKKPIHRSLADIGKSVSTTNRSPARSPGAGPSLHHSTEDLRMRQSANYGRLCHAQSRSMNDISLTPNTDQRKNKFMKKIPKDSEASNVLVGEVDFLDQPFIAFVRLIQSAMLGGVTEVPVPTRFLFILLGPSGRAKSYNEIGRAIATLMVDDLFSDVAYKARNREDLIAGIDEFLDEVIVLPPGEWDPNIRIEPPKKVPSADKRKSVFSLAELGQMNGSVGGGGGAPGGGNGGGGGGGSGGGAGSGGAGGTSSGDDGEMPAMHEIGEELIWTGRFFGGLCLDIKRKLPWFPSDFYDGFHIQSISAILFIYLGCITNAITFGGLLGDATDNYQGVMESFLGTAMAGSLFCLFSGQPLIILSSTGPILIFEKLLFDFSKGNGLDYMEFRLWIGLHSAVQCLILVATDASFIIKYITRFTEEGFSTLISFIFIYDAIKKMIGAFKYYPINMDFKPNFITTYKCECVAPDTVNTTVFNASAPLAPDTNASLYNLLNLTALDWSLLSKKECLSYGGRLLGNSCKFIPDLALMSFILFFGTYSMTLTLKKFKFSRYFPTKVRALVADFSIVFSILMFCGIDACFGLETPKLHVPSVIKPTRPDRGWFVAPFGKNPWWVYPASILPALLVTILIFMDQQITAVIVNRKENKLKKAAGYHLDLFWVGILMALCSFMGLPWYVAATVISIAHIDSLKMETETSAPGEQPQFLGVREQRVTGIIVFILTGISVFLAPILKILGLIIVRRLLDFIFSQHDLAWIDNILPEKEKKETDKKRKRKKGAHEDCDEEPQFPPPSVIKIPMESVQSDPQNGIHCIARKRSSSWSYSL

SEQ ID NO: 235164 - protein, 1019 aa, Artificial Sequence
  derived and/or modified sequence
MKVKEEKAGVGKLDHTNHRRRFPDQKGSPAAEQLQDILGEEDEAPNPTLFTEMDTLQHDGDQMEWKESARWIKFEEKVEEGGERWSKPHVSTLSLHSLFELRTCLQTGTVLLDLDSGSLPQIIDDVIEKQIEDGLLRPELRERVSYVLLRRHRHQTKKPIHRSLADIGKSVSTTNRSPARSPGAGPSLHHSTEDLRMRQSANYGRLCHAQSRSMNDISLTPNTDQRKNKFMKKIPKDSEASNVLVGEVDFLDQPFIAFVRLIQSAMLGGVTEVPVPTRFLFILLGPSGRAKSYNEIGRAIATLMVDDLFSDVAYKARNREDLIAGIDEFLDEVIVLPPGEWDPNIRIEPPKKVPSADKRKSVFSLAELGQMNGSVGGGGGAPGGGNGGGGGGGSGGGAGSGGAGGTSSGDDGEMPAMHEIGEELIWTGRFFGGLCLDIKRKLPWFPSDFYDGFHIQSISAILFIYLGCITNAITFGGLLGDATDNYQGVMESFLGTAMAGSLFCLFSGQPLIILSSTGPILIFEKLLFDFSKGNGLDYMEFRLWIGLHSAVQCLILVATDASFIIKYITRFTEEGFSTLISFIFIYDAIKKMIGAFKYYPINMDFKPNFITTYKCECVAPDTVNTTVFNASAPLAPDTNASLYNLLNLTALDWSLLSKKECLSYGGRLLGNSCKFIPDLALMSFILFFGTYSMTLTLKKFKFSRYFPTKPTRPDRGWFVAPFGKNPWWVYPASILPALLVTILIFMDQQITAVIVNRKENKLKKAAGYHLDLFWVGILMALCSFMGLPWYVAATVISIAHIDSLKMETETSAPGEQPQFLGVREQRVTGIIVFILTGISVFLAPILKCIPLPVLYGVFLYMGVASLNGIQFWERCKLFLMPAKHQPDHAFLRHVPLRRIHLFTLVQILCLAVLWILKSTVAAIIFPVMILGLIIVRRLLDFIFSQHDLAWIDNILPEKEKKETDKKRKRKKGAHEDCDEEPQFPPPSVIKIPMESVQSDPQNGIHCIARKRSSSWSYSL

SEQ ID NO: 235165 - protein, 1121 aa, Artificial Sequence
  derived and/or modified sequence
MKVKEEKAGVGKLDHTNHRRRFPDQKECPPIHIGLPVPTYPQRKTDQKGHLSGLQKVHWGLRPDQPQQELTGPGSGASSQDSSMDLISRTRSPAAEQLQDILGEEDEAPNPTLFTEMDTLQHDGDQMEWKESARWIKFEEKVEEGGERWSKPHVSTLSLHSLFELRTCLQTGTVLLDLDSGSLPQIIDDVIEKQIEDGLLRPELRERVSYVLLRRHRHQTKKPIHRSLADIGKSVSTTNRSPARSPGAGPSLHHSTEDLRMRQSANYGRLCHAQSRSMNDISLTPNTDQRKNKFMKKIPKDSEASNVLVGEVDFLDQPFIAFVRLIQSAMLGGVTEVPVPTRFLFILLGPSGRAKSYNEIGRAIATLMVDDLFSDVAYKARNREDLIAGIDEFLDEVIVLPPGEWDPNIRIEPPKKVPSADKRKSVFSLAELGQMNGSVGGGGGAPGGGNGGGGGGGSGGGAGSGGAGGTSSGDDGEMPAMHEIGEELIWTGRFFGGLCLDIKRKLPWFPSDFYDGFHIQSISAILFIYLGCITNAITFGGLLGDATDNYQGVMESFLGTAMAGSLFCLFSGQPLIILSSTGPILIFEKLLFDFSKGNGLDYMEFRLWIGLHSAVQCLILVATDASFIIKYITRFTEEGFSTLISFIFIYDAIKKMIGAFKYYPINMDFKPNFITTYKCECVAPDTVNTTVFNASAPLAPDTNASLYNLLNLTALDWSLLSKKECLSYGGRLLGNSCKFIPDLALMSFILFFGTYSMTLTLKKFKFSRYFPTKVRALVADFSIVFSILMFCGIDACFGLETPKLHVPSVIKPTRPDRGWFVAPFGKNPWWVYPASILPALLVTILIFMDQQITAVIVNRKENKLKKAAGYHLDLFWVGILMALCSFMGLPWYVAATVISIAHIDSLKMETETSAPGEQPQFLGVREQRVTGIIVFILTGISVFLAPILKCIPLPVLYGVFLYMGVASLNGIQFWERCKLFLMPAKHQPDHAFLRHVPLRRIHLFTLVQILCLAVLWILKSTVAAIIFPVMILGLIIVRRLLDFIFSQHDLAWIDNILPEKEKKETDKKRKRKKGAHEDCDEEPQFPPPSVIKIPMESVQSDPQNGIHCIARKRSSSWSYSL

SEQ ID NO: 235166 - protein, 993 aa, Artificial Sequence
  derived and/or modified sequence
MKVKEEKAGVGKLDHTNHRRRFPDQKECPPIHIGLPVPTYPQRKTDQKGHLSGLQKVHWGLRPDQPQQELTGPGSGASSQDSSMDLISRTRSPAAEQLQDILGEEDEAPNPTLFTEMDTLQHDGDQMEWKESARWIKFEEKVEEGGERWSKPHVSTLSLHSLFELRTCLQTGTVLLDLDSGSLPQIIDDVIEKQIEDGLLRPELRERVSYVLLRRHRHQTKKPIHRSLADIGKSVSTTNRSPARSPGAGPSLHHSTEDLRMRQSANYGRLCHAQSRSMNDISLTPNTDQRKNKFMKKIPKDSEASNVLVGEVDFLDQPFIAFVRLIQSAMLGGVTEVPVPTRFLFILLGPSGRAKSYNEIGRAIATLMVDDLFSDVAYKARNREDLIAGIDEFLDEVIVLPPGEWDPNIRIEPPKKVPSADKRKSVFSLAELGQMNGSVGGGGGAPGGGNGGGGGGGSGGGAGSGGAGGTSSGDDGEMPAMHEIGEELIWTGRFFGGLCLDIKRKLPWFPSDFYDGFHIQSISAILFIYLGCITNAITFGGLLGDATDNYQGVMESFLGTAMAGSLFCLFSGQPLIILSSTGPILIFEKLLFDFSKGNGLDYMEFRLWIGLHSAVQCLILVATDASFIIKYITRFTEEGFSTLISFIFIYDAIKKMIGAFKYYPINMDFKPNFITTYKCECVAPDTVNTTVFNASAPLAPDTNASLYNLLNLTALDWSLLSKKECLSYGGRLLGNSCKFIPDLALMSFILFFGTYSMTLTLKKFKFSRYFPTKVRALVADFSIVFSILMFCGIDACFGLETPKLHVPSVIKPTRPDRGWFVAPFGKNPWWVYPASILPALLVTILIFMDQQITAVIVNRKENKLKGTESNRHHRLHPDGNLCLPGSHPKVYPPAGAVRSLPLHGRGLPEWHPVLGTLQALPDASQAPAGPCLPAARAAAPDPPLHPGADPLPGGALDPQIHGGCHHLPGHDPGPHHRSKASGFHLFPARPGLD

SEQ ID NO: 235167 - protein, 964 aa, Artificial Sequence
  derived and/or modified sequence
MKVKEEKAGVGKLDHTNHRRRFPDQKECPPIHIGLPVPTYPQRKTDQKGHLSGLQKVHWGLRPDQPQQELTGPGSGASSQDSSMDLISRTRSPAAEQLQDILGEEDEAPNPTLFTEMDTLQHDGDQMEWKESARWIKFEEKVEEGGERWSKPHVSTLSLHSLFELRTCLQTGTVLLDLDSGSLPQIIDDVIEKQIEDGLLRPELRERVSYVLLRRHRHQTKKPIHRSLADIGKSVSTTNRSPARSPGAGPSLHHSTEDLRMRQSANYGRLCHAQSRSMNDISLTPNTDQRKNKFMKKIPKDSEASNVLVGEVDFLDQPFIAFVRLIQSAMLGGVTEVPVPTRFLFILLGPSGRAKSYNEIGRAIATLMVDDLFSDVAYKARNREDLIAGIDEFLDEVIVLPPGEWDPNIRIEPPKKVPSADKRKSVFSLAELGQMNGSVGGGGGAPGGGNGGGGGGGSGGGAGSGGAGGTSSGDDGEMPAMHEIGEELIWTGRFFGGLCLDIKRKLPWFPSDFYDGFHIQSISAILFIYLGCITNAITFGGLLGDATDNYQGVMESFLGTAMAGSLFCLFSGQPLIILSSTGPILIFEKLLFDFSKGNGLDYMEFRLWIGLHSAVQCLILVATDASFIIKYITRFTEEGFSTLISFIFIYDAIKKMIGAFKYYPINMDFKPNFITTYKCECVAPDTVNTTVFNASAPLAPDTNASLYNLLNLTALDWSLLSKKECLSYGGRLLGNSCKFIPDLALMSFILFFGTYSMTLTLKKFKFSRYFPTKPTRPDRGWFVAPFGKNPWWVYPASILPALLVTILIFMDQQITAVIVNRKENKLKGTESNRHHRLHPDGNLCLPGSHPKVYPPAGAVRSLPLHGRGLPEWHPVLGTLQALPDASQAPAGPCLPAARAAAPDPPLHPGADPLPGGALDPQIHGGCHHLPGHVSLHHRSWASSSFEGFWISSFPSTTWPGLTTS

SEQ ID NO: 235168 - protein, 145 aa, Artificial Sequence
  derived and/or modified sequence
MKVKEEKAGVGKLDHTNHRRRFPDQKECPPIHIGLPVPTYPQRKTDQKGHLSGLQKVHWGLRPDQPQQELTGPGSGASSQDSSMDLISRTRSPAAEQLQDILGEEDEAPNPTLFTEMDTLQHDGDQMEWKESARWIKFEEKVEEG

SEQ ID NO: 235169 - DNA, 3060 bp, Artificial Sequence
  derived and/or modified sequence
atgaaggtgaaggaggagaaggccggcgtgggcaagctggaccacaccaaccacagaagaagattccccgaccagaagggcagccccgccgccgagcagctgcaggacatcctgggcgaggaggacgaggcccccaaccccaccctgttcaccgagatggacaccctgcagcacgacggcgaccagatggagtggaaggagagcgccagatggatcaagttcgaggagaaggtggaggagggcggcgagagatggagcaagccccacgtgagcaccctgagcctgcacagcctgttcgagctgagaacctgcctgcagaccggcaccgtgctgctggacctggacagcggcagcctgccccagatcatcgacgacgtgatcgagaagcagatcgaggacggcctgctgagacccgagctgagagagagagtgagctacgtgctgctgagaagacacagacaccagaccaagaagcccatccacagaagcctggccgacatcggcaagagcgtgagcaccaccaacagaagccccgccagaagccccggcgccggccccagcctgcaccacagcaccgaggacctgagaatgagacagagcgccaactacggcagactgtgccacgcccagagcagaagcatgaacgacatcagcctgacccccaacaccgaccagagaaagaacaagttcatgaagaagatccccaaggacagcgaggccagcaacgtgctggtgggcgaggtggacttcctggaccagcccttcatcgccttcgtgagactgatccagagcgccatgctgggcggcgtgaccgaggtgcccgtgcccaccagattcctgttcatcctgctgggccccagcggcagagccaagagctacaacgagatcggcagagccatcgccaccctgatggtggacgacctgttcagcgacgtggcctacaaggccagaaacagagaggacctgatcgccggcatcgacgagttcctggacgaggtgatcgtgctgccccccggcgagtgggaccccaacatcagaatcgagccccccaagaaggtgcccagcgccgacaagagaaagagcgtgttcagcctggccgagctgggccagatgaacggcagcgtgggcggcggcggcggcgcccccggcggcggcaacggcggcggcggcggcggcggcagcggcggcggcgccggcagcggcggcgccggcggcaccagcagcggcgacgacggcgagatgcccgccatgcacgagatcggcgaggagctgatctggaccggcagattcttcggcggcctgtgcctggacatcaagagaaagctgccctggttccccagcgacttctacgacggcttccacatccagagcatcagcgccatcctgttcatctacctgggctgcatcaccaacgccatcaccttcggcggcctgctgggcgacgccaccgacaactaccagggcgtgatggagagcttcctgggcaccgccatggccggcagcctgttctgcctgttcagcggccagcccctgatcatcctgagcagcaccggccccatcctgatcttcgagaagctgctgttcgacttcagcaagggcaacggcctggactacatggagttcagactgtggatcggcctgcacagcgccgtgcagtgcctgatcctggtggccaccgacgccagcttcatcatcaagtacatcaccagattcaccgaggagggcttcagcaccctgatcagcttcatcttcatctacgacgccatcaagaagatgatcggcgccttcaagtactaccccatcaacatggacttcaagcccaacttcatcaccacctacaagtgcgagtgcgtggcccccgacaccgtgaacaccaccgtgttcaacgccagcgcccccctggcccccgacaccaacgccagcctgtacaacctgctgaacctgaccgccctggactggagcctgctgagcaagaaggagtgcctgagctacggcggcagactgctgggcaacagctgcaagttcatccccgacctggccctgatgagcttcatcctgttcttcggcacctacagcatgaccctgaccctgaagaagttcaagttcagcagatacttccccaccaagcccaccagacccgacagaggctggttcgtggcccccttcggcaagaacccctggtgggtgtaccccgccagcatcctgcccgccctgctggtgaccatcctgatcttcatggaccagcagatcaccgccgtgatcgtgaacagaaaggagaacaagctgaagaaggccgccggctaccacctggacctgttctgggtgggcatcctgatggccctgtgcagcttcatgggcctgccctggtacgtggccgccaccgtgatcagcatcgcccacatcgacagcctgaagatggagaccgagaccagcgcccccggcgagcagccccagttcctgggcgtgagagagcagagagtgaccggcatcatcgtgttcatcctgaccggcatcagcgtgttcctggcccccatcctgaagtgcatccccctgcccgtgctgtacggcgtgttcctgtacatgggcgtggccagcctgaacggcatccagttctgggagagatgcaagctgttcctgatgcccgccaagcaccagcccgaccacgccttcctgagacacgtgcccctgagaagaatccacctgttcaccctggtgcagatcctgtgcctggccgtgctgtggatcctgaagagcaccgtggccgccatcatcttccccgtgatgatcctgggcctgatcatcgtgagaagactgctggacttcatcttcagccagcacgacctggcctggatcgacaacatcctgcccgagaaggagaagaaggagaccgacaagaagagaaagagaaagaagggcgcccacgaggactgcgacgaggagccccagttccccccccccagcgtgatcaagatccccatggagagcgtgcagagcgacccccagaacggcatccactgcatcgccagaaagagaagcagcagctggagctacagcctgtag

SEQ ID NO: 235170 - DNA, 3366 bp, Artificial Sequence
  derived and/or modified sequence
atgaaggtgaaggaggagaaggccggcgtgggcaagctggaccacaccaaccacagaagaagattccccgaccagaaggagtgcccccccatccacatcggcctgcccgtgcccacctacccccagagaaagaccgaccagaagggccacctgagcggcctgcagaaggtgcactggggcctgagacccgaccagccccagcaggagctgaccggccccggcagcggcgccagcagccaggacagcagcatggacctgatcagcagaaccagaagccccgccgccgagcagctgcaggacatcctgggcgaggaggacgaggcccccaaccccaccctgttcaccgagatggacaccctgcagcacgacggcgaccagatggagtggaaggagagcgccagatggatcaagttcgaggagaaggtggaggagggcggcgagagatggagcaagccccacgtgagcaccctgagcctgcacagcctgttcgagctgagaacctgcctgcagaccggcaccgtgctgctggacctggacagcggcagcctgccccagatcatcgacgacgtgatcgagaagcagatcgaggacggcctgctgagacccgagctgagagagagagtgagctacgtgctgctgagaagacacagacaccagaccaagaagcccatccacagaagcctggccgacatcggcaagagcgtgagcaccaccaacagaagccccgccagaagccccggcgccggccccagcctgcaccacagcaccgaggacctgagaatgagacagagcgccaactacggcagactgtgccacgcccagagcagaagcatgaacgacatcagcctgacccccaacaccgaccagagaaagaacaagttcatgaagaagatccccaaggacagcgaggccagcaacgtgctggtgggcgaggtggacttcctggaccagcccttcatcgccttcgtgagactgatccagagcgccatgctgggcggcgtgaccgaggtgcccgtgcccaccagattcctgttcatcctgctgggccccagcggcagagccaagagctacaacgagatcggcagagccatcgccaccctgatggtggacgacctgttcagcgacgtggcctacaaggccagaaacagagaggacctgatcgccggcatcgacgagttcctggacgaggtgatcgtgctgccccccggcgagtgggaccccaacatcagaatcgagccccccaagaaggtgcccagcgccgacaagagaaagagcgtgttcagcctggccgagctgggccagatgaacggcagcgtgggcggcggcggcggcgcccccggcggcggcaacggcggcggcggcggcggcggcagcggcggcggcgccggcagcggcggcgccggcggcaccagcagcggcgacgacggcgagatgcccgccatgcacgagatcggcgaggagctgatctggaccggcagattcttcggcggcctgtgcctggacatcaagagaaagctgccctggttccccagcgacttctacgacggcttccacatccagagcatcagcgccatcctgttcatctacctgggctgcatcaccaacgccatcaccttcggcggcctgctgggcgacgccaccgacaactaccagggcgtgatggagagcttcctgggcaccgccatggccggcagcctgttctgcctgttcagcggccagcccctgatcatcctgagcagcaccggccccatcctgatcttcgagaagctgctgttcgacttcagcaagggcaacggcctggactacatggagttcagactgtggatcggcctgcacagcgccgtgcagtgcctgatcctggtggccaccgacgccagcttcatcatcaagtacatcaccagattcaccgaggagggcttcagcaccctgatcagcttcatcttcatctacgacgccatcaagaagatgatcggcgccttcaagtactaccccatcaacatggacttcaagcccaacttcatcaccacctacaagtgcgagtgcgtggcccccgacaccgtgaacaccaccgtgttcaacgccagcgcccccctggcccccgacaccaacgccagcctgtacaacctgctgaacctgaccgccctggactggagcctgctgagcaagaaggagtgcctgagctacggcggcagactgctgggcaacagctgcaagttcatccccgacctggccctgatgagcttcatcctgttcttcggcacctacagcatgaccctgaccctgaagaagttcaagttcagcagatacttccccaccaaggtgagagccctggtggccgacttcagcatcgtgttcagcatcctgatgttctgcggcatcgacgcctgcttcggcctggagacccccaagctgcacgtgcccagcgtgatcaagcccaccagacccgacagaggctggttcgtggcccccttcggcaagaacccctggtgggtgtaccccgccagcatcctgcccgccctgctggtgaccatcctgatcttcatggaccagcagatcaccgccgtgatcgtgaacagaaaggagaacaagctgaagaaggccgccggctaccacctggacctgttctgggtgggcatcctgatggccctgtgcagcttcatgggcctgccctggtacgtggccgccaccgtgatcagcatcgcccacatcgacagcctgaagatggagaccgagaccagcgcccccggcgagcagccccagttcctgggcgtgagagagcagagagtgaccggcatcatcgtgttcatcctgaccggcatcagcgtgttcctggcccccatcctgaagtgcatccccctgcccgtgctgtacggcgtgttcctgtacatgggcgtggccagcctgaacggcatccagttctgggagagatgcaagctgttcctgatgcccgccaagcaccagcccgaccacgccttcctgagacacgtgcccctgagaagaatccacctgttcaccctggtgcagatcctgtgcctggccgtgctgtggatcctgaagagcaccgtggccgccatcatcttccccgtgatgatcctgggcctgatcatcgtgagaagactgctggacttcatcttcagccagcacgacctggcctggatcgacaacatcctgcccgagaaggagaagaaggagaccgacaagaagagaaagagaaagaagggcgcccacgaggactgcgacgaggagccccagttccccccccccagcgtgatcaagatccccatggagagcgtgcagagcgacccccagaacggcatccactgcatcgccagaaagagaagcagcagctggagctacagcctgtag

SEQ ID NO: 235171 - DNA, 390 bp, Artificial Sequence
  derived and/or modified sequence
atgaaggtgaaggaggagaaggccggcgtgggcaagctggaccacaccaaccacagaagaagattccccgaccagaaggagtgcccccccatccacatcggcctgcccgtgcccacctacccccagagaaagaccgaccagaagggccacctgagcggcctgcagaaggtgcactggggcctgagacccgaccagccccagcaggagctgaccggccccggcagcggcgccagcagccaggacagcagcatggacctgatcagcagaaccagaagccccgccgccgagcagctgcaggacatcctgggcgaggaggacgaggcccccaaccccaccctgttcaccgagatggacaccctgcagcacgacggcgaccagatggagtggtag

SEQ ID NO: 235172 - DNA, 438 bp, Artificial Sequence
  derived and/or modified sequence
atgaaggtgaaggaggagaaggccggcgtgggcaagctggaccacaccaaccacagaagaagattccccgaccagaaggagtgcccccccatccacatcggcctgcccgtgcccacctacccccagagaaagaccgaccagaagggccacctgagcggcctgcagaaggtgcactggggcctgagacccgaccagccccagcaggagctgaccggccccggcagcggcgccagcagccaggacagcagcatggacctgatcagcagaaccagaagccccgccgccgagcagctgcaggacatcctgggcgaggaggacgaggcccccaaccccaccctgttcaccgagatggacaccctgcagcacgacggcgaccagatggagtggaaggagagcgccagatggatcaagttcgaggagaaggtggaggagggctag

SEQ ID NO: 235173 - DNA, 3060 bp, Artificial Sequence
  derived and/or modified sequence
atgaaggtcaaggaagaaaaagctggggtcggcaagctggatcatactaaccacaggaggagattccctgaccaaaaggggtctcctgcggccgaacagcttcaagatatcctgggcgaagaagatgaagctcctaaccccacactctttacagaaatggacaccctacagcacgatggagatcagatggagtggaaggagagtgctcgctggattaagtttgaggagaaagtggaggaaggtggggaacggtggtccaaaccacacgtctctactttgtccctgcattctctgtttgagttgaggacctgccttcagaccggcacggtactcttggaccttgacagcgggagtcttccccagatcatcgacgatgtgatagaaaaacagatcgaggatgggctgctgcgacccgagctccgggagagggtcagctacgttttgctccgccgacaccggcatcaaactaagaaacccatccatcgctccctggctgacattgggaaatctgttagcactaccaataggagtccggcacgtagtcccggggcaggtccatccttacaccattctactgaagatttaagaatgcggcagagcgccaattatggtcgactctgtcatgctcaatcccgatcaatgaacgacattagtctaacccctaacactgatcagaggaaaaacaagttcatgaagaagatcccaaaggattctgaggcctccaatgtgttggtcggcgaagtcgattttctagaccagccttttatagcgtttgttaggctgattcagtcagccatgttgggtggcgttacggaggtaccagtgccaacacggttcctgttcatcctcctgggcccctccggccgcgccaaatcatacaacgagatagggagagctatcgcaactctgatggtggacgacctttttagcgacgttgcctataaggctcgtaacagagaggatttaatcgctggcattgacgagttcctggatgaggtcattgttctgccaccaggcgagtgggacccaaatatccgtatcgagcctcccaaaaaggtgccctccgcagataaaaggaaatccgtctttagcctcgccgagttaggccagatgaacggtagcgtgggcggaggcggcggcgcacccggggggggtaacggagggggcggaggcggaggcagtggaggaggcgccgggagcggcggagcggggggaacctctagtggcgacgacggcgagatgcccgcaatgcacgagattggggaggaacttatttggacaggcagatttttcggcggactgtgcctcgacatcaaaagaaagttgccgtggtttcctagtgacttctatgacggctttcacattcagagcattagcgctatactttttatttaccttgggtgcataaccaatgctatcacgttcggcggcctgctaggcgatgctacagataactaccagggggtaatggaaagctttcttggaactgcaatggctggaagccttttctgcttgtttagtggacagccattaatcatactcagtagtacgggacctattcttatcttcgaaaagctgttattcgacttctctaagggcaacgggttggattatatggagtttcggctgtggattgggctgcacagtgccgttcagtgtctgatcctggttgctacagacgctagtttcattattaaatatattactagatttactgaagaggggttcagtaccttgatttcgttcatttttatctatgatgccatcaaaaaaatgattggtgccttcaagtactacccaattaacatggatttcaaaccaaacttcatcacaacatacaagtgtgagtgcgtcgctcccgacacagtcaataccaccgtttttaatgcatcagctccactggcacctgacacgaacgcctccctgtacaatctgttaaatctgaccgcacttgattggtccctgctgtccaagaaagagtgcctatcctatggtggaaggcttttaggcaattcctgcaaattcattcccgaccttgctctgatgagctttattctgttctttggcacctactcaatgaccctgactctcaagaaatttaagttctcacggtacttccctaccaaaccaactagacccgaccgcggttggtttgtggccccttttggcaaaaacccctggtgggtttaccccgcttcaatcctaccagcacttttggtgacaatccttatctttatggaccagcagattaccgccgtgatagttaaccgcaaagagaacaaactgaagaaagccgccggctatcacctggatttattctgggtaggaatactgatggctctgtgctcattcatgggcctgccttggtatgtcgctgccactgttatctcaatagcccacattgactccttaaagatggagaccgagacgtctgctccgggcgagcaacctcagttcctcggcgttcgagaacaacgcgtgaccgggataatcgtgttcattcttaccggcattagtgtctttctcgcgccgatccttaagtgcattcccctgcctgtgttatatggggtattcctgtacatgggggtcgcatctctcaatgggattcagttctgggaaagatgtaagttgtttctcatgcctgcgaagcaccagcccgatcatgcgttcctccgccatgtccccttgaggcgcatccaccttttcactctagtgcagattctttgtttggcagtgctctggatcttaaagagtacagttgcagcaattatctttccagtaatgattctagggctgatcattgtgagacgcctactggatttcatattctctcagcatgacctggcctggatcgacaatatcttgccggaaaaagagaagaaggagacggacaagaaaaggaagcggaagaagggagcccatgaagactgcgacgaggagccccagtttccgcctccttcagtgattaaaatccctatggagtcggtccagagtgacccacagaatggaatacattgcatcgcccggaaacgctcatccagctggagctacagcttgtag

SEQ ID NO: 235174 - DNA, 3060 bp, Artificial Sequence
  derived and/or modified sequence
atgaaggtcaaggaagaaaaggccggagttggcaagcttgaccatacaaatcatcggagaagattccccgaccagaagggtagccccgctgcagagcagttgcaggacattctgggggaagaggacgaggcccctaatcccactctgttcaccgaaatggatacactgcaacacgacggcgatcaaatggagtggaaagaaagcgcgcggtggatcaaattcgaggagaaggtcgaagagggtggcgagcgatggtcaaaaccacacgtcagtacgctctcgctccattctctgtttgagctgcgtacctgcttacagaccggcaccgtccttctggatctggattccgggagtctcccacagatcatcgacgatgtaattgaaaagcagatcgaggacgggctgctgagaccagaactgcgggaaagggtgtcctacgttctgctgcgcagacataggcatcaaacaaaaaagcctatccacagatcattagcagacataggaaaaagtgtcagtacaaccaataggtcacctgcccgttccccaggagctgggccttccctgcatcacagcaccgaagacctccgcatgagacagagcgctaattatggccgcttatgccacgctcagtcccgctcaatgaatgacatctcactcactccaaacaccgatcaacgtaaaaataagtttatgaagaaaatccccaaggactccgaagctagtaatgtgctggtcggagaagtggacttccttgaccaaccctttatcgcttttgtgcggcttattcaatcagccatgctgggtggagtgaccgaagtgccagtgcctacccgtttcctattcatactgctcggccctagcggccgtgctaagtcctacaacgagattggccgggcaatcgcaaccttgatggtcgatgatttattctccgatgtcgcgtataaggctaggaatagggaggatctgatcgctggtatcgacgagtttcttgacgaggtgattgtccttccacccggcgagtgggatcctaatattaggatcgagcctccgaaaaaggttccatccgcagacaaacgcaaaagtgtgtttagcctagcagagttaggccagatgaatggctccgtgggcggcggcggcggtgcccccggcggcggcaacggcggcggcggcggcggggggagcggtggcggggcgggttccggcggcgctgggggtactagctcaggcgacgacggagaaatgccagctatgcacgagatcggggaggagctgatctggaccggccgcttcttcggtggactttgcctggacatcaaacgcaagctgccctggttcccatcagacttttacgatggctttcatattcagtccattagcgctattttgtttatttatctgggatgtattaccaacgccatcaccttcggcggactcctcggggacgccactgacaattaccaaggagttatggaaagttttctagggaccgcaatggcaggatccctcttttgtctcttcagcgggcagccacttattatcctttcctccaccggccccatcttaattttcgagaagctgctgttcgatttttcaaagggcaatggactggactacatggagtttcgactctggatagggctgcattccgcggtgcagtgcctcatcctggtcgctactgatgcatcctttattattaagtacatcacacgatttaccgaggaaggattctctaccctcatttccttcatctttatctacgacgctattaagaagatgattggcgcgttcaaatattatccaattaacatggacttcaaaccgaattttatcaccacctataagtgtgaatgcgtggccccagatactgtcaacacaactgtgtttaatgcttctgcgccactggcgccagacacgaacgcctccctttataacctcctgaacctgacggcccttgattggagtttgctctccaagaaggagtgcttgtcctatgggggccggcttctcgggaatagttgcaagttcatcccagatctggctttgatgagctttattctgtttttcggcacatacagtatgacactgaccctgaaaaaatttaagtttagcaggtactttcctactaagcctaccaggcctgacagagggtggtttgtcgccccctttggaaaaaatccgtggtgggtttatcctgcatcaatcttgccagcactgttggtaacaattctcattttcatggatcaacaaatcaccgccgtaattgtgaatcgcaaagaaaacaagctgaaaaaggccgccggctaccatctggatctgttctgggtcggcatactcatggctttgtgctcttttatggggctcccatggtacgtggcggctaccgttataagtatcgcacacatcgatagcttaaaaatggagaccgagacttcagcacccggcgaacagccccagttcctgggcgtgagagaacagcgggtgacaggcattatcgtctttatcctcactggcatctctgtgttcctggccccaatcctgaaatgcattcctctgcctgttctttacggagtttttctgtacatgggggtggcgtccctgaatggaattcagttctgggaaaggtgtaagctttttctgatgccagctaaacaccaacctgaccatgcctttctacgccacgtccccctgagaaggatacacctcttcacactcgtgcagatcctctgtctcgccgtgctctggatcctcaagtcgactgtggcagctattatcttccccgtcatgatcctgggactgataatcgttagacgcctgcttgattttatattcagccagcatgatttggcctggatcgataacattttgcccgagaaggagaagaaggagactgacaaaaagcggaagaggaaaaaaggagctcatgaggactgcgacgaagaaccacaattccccccgccatcagttatcaagatcccaatggagagtgtgcaatctgacccgcaaaatggcatacactgtattgctcgaaaaaggagctcttcctggtcctattctttatag

SEQ ID NO: 235175 - DNA, 3366 bp, Artificial Sequence
  derived and/or modified sequence
atgaaggtgaaagaggagaaagctggagtggggaaactggaccacaccaatcatagacggaggttcccagaccaaaaagaatgcccgcctattcatatcggtctccccgtgcccacctatccacagaggaaaactgatcagaagggacatctgtccggcctgcagaaagtgcattggggcctccggcctgatcagcctcaacaggaactgacggggcccggtagtggggctagtagtcaagacagctccatggacctcatcagtaggaccagatctcctgcggccgagcagttgcaggatatcctgggcgaagaagacgaagcccctaatccaactctgttcactgaaatggacaccctacagcatgacggcgaccagatggaatggaaggagagcgcccggtggattaagttcgaggaaaaggtggaagaggggggcgaaagatggtccaagccccacgtgagcacactgagtctgcattcactgttcgagttgagaacttgtctccagacaggaaccgtcctgctggatctcgatagtggcagcctgccacagattatcgatgacgttatcgagaagcagatcgaggatggtttattacgcccagaactgagggaacgtgtatcttacgtgctgcttaggagacataggcatcagaccaagaaacctatccaccggagcctggccgacattgggaaatctgtttcaaccacgaaccgcagcccagccagaagcccaggtgcgggccccagcctccaccacagtaccgaggatcttagaatgcgccagtcagcaaactatggtcgtctttgtcacgcccagtcacgaagcatgaatgacatctctctgactcccaacacagatcaacggaagaacaagttcatgaagaaaatccctaaggactctgaggcatccaatgttctggtcggggaggtggactttctggatcaaccgtttatcgcatttgttcgactaattcagtccgccatgttggggggcgtcaccgaagtgcctgtgccaacccgattcttgttcatcctcctgggaccgagtggtcgggcaaagagctacaacgagataggaagggccattgctacacttatggtcgatgacctcttctctgacgtggcatataaggctaggaatcgggaggatctcattgcaggaatcgatgagtttctggatgaggtgatcgtgctgccaccaggagaatgggatccaaacatcaggattgagccacccaaaaaggtcccctctgcagacaagcggaagtcagtgttcagcctggctgaactcggacaaatgaacggatccgttggcggtgggggtggcgctccgggcggaggcaatggtggaggtgggggtgggggctccggtgggggggctggatcgggaggggccggcggaactagtagtggggatgacggagagatgcctgccatgcacgagatcggagaggaactcatctggactggacgcttttttggtggtctgtgtttggacataaagcggaagctcccttggttcccaagtgacttttatgacggattccacatccagtcgatttctgccatccttttcatttacctgggatgcataaccaacgcaatcacctttggaggtcttctgggggatgccactgataactatcaaggagtaatggagtcctttctggggacagcaatggccggaagcctcttttgtctgttcagtggtcagcctcttatcattctatcctcgactggtccgatcctcatatttgaaaagctgttgtttgattttagtaaggggaatggccttgattacatggagttcagactctggattggactgcattctgcagtgcagtgcctgattctggtggctactgacgcatcctttattatcaagtacatcaccagattcacggaagagggtttcagtactctgataagcttcatcttcatttacgatgctataaagaagatgattggagcctttaagtactacccaattaacatggattttaaacccaacttcataacaacttataagtgcgaatgcgtggccccggatactgtaaacaccacagtgttcaacgcaagcgcaccactggcaccagacactaatgctagcctctacaacctcctgaacttgacggcattggactggtcactgctcagtaagaaggaatgtctctcgtatggtggtagactgctgggcaactcttgtaaatttattcctgatctagccttgatgagttttatcctcttcttcggcacgtacagcatgaccctcaccctcaaaaagttcaaatttagccgctacttcccgaccaaggtgcgcgctctcgtcgccgatttctccattgtcttttccattcttatgttttgcggtatagatgcttgcttcggattggagacaccgaaactgcacgtcccgagcgtaattaagcctactagacctgaccgagggtggttcgtagctccctttggcaagaatccttggtgggtctacccagccagcatcctgcctgcgttgctggtaaccatcctcatttttatggatcagcagatcacggccgtaatcgtaaatcgaaaggaaaacaagctgaagaaagccgcagggtaccatttggacttattctgggtggggattttgatggccctgtgttctttcatgggcctgccttggtacgtggctgccacagtcatatctatcgctcacatagattccctgaagatggagaccgaaacatcagcccctggcgaacagccccaatttctgggtgtgagggagcagcgagtcaccggcatcatcgtcttcattctgaccggcatttctgtgtttctggcccccattctcaagtgtatacccctaccagttctatatggagtcttcctgtacatgggtgtcgcatctcttaacggtattcagttttgggagcgctgtaagttgtttctaatgcccgctaaacaccaacccgatcatgcttttctgcgtcacgtgccactgagacggatccatctgtttacactcgttcagattctgtgcctcgccgtgctgtggatccttaaatctaccgtcgccgctattatcttcccagtgatgatcttaggtttaatcatcgttaggaggctattggattttattttctcgcagcatgatctggcctggattgacaatatcctcccggagaaggagaagaaggagaccgataaaaaacgtaaacggaagaaaggggcacacgaagactgtgacgaggagccccagttccctccaccctcagtgattaagatccctatggagtccgtacagagcgatcctcaaaacggaattcattgcatagccaggaagaggtcatcgtcttggagctattctctgtag

SEQ ID NO: 235176 - DNA, 390 bp, Artificial Sequence
  derived and/or modified sequence
atgaaggtcaaagaggaaaaagcaggtgttggtaagctggatcataccaaccaccgaagaagattcccagatcagaaagaatgtccccctatccacattgggctgcccgtgcccacatatccacagcggaagaccgaccagaaggggcacttatccggccttcagaaagtgcattggggcctccggcccgaccaaccccagcaggaactaaccggcccaggaagcggtgcttcatctcaggactcaagtatggatctgatcagcagaacacggagtccagccgccgaacagcttcaagatatcttgggcgaagaggacgaggctcccaacccaaccttgttcaccgaaatggacactcttcagcacgacggcgatcagatggaatggtag

SEQ ID NO: 235177 - DNA, 438 bp, Artificial Sequence
  derived and/or modified sequence
atgaaggtcaaagaggaaaaggctggagtcggaaaactggatcatactaatcaccggcgcaggtttccagaccaaaaagagtgccccccgatacacatcggcttacctgttcccacgtacccccaacggaaaaccgatcaaaaaggacacctgtctgggctgcaaaaggtacactgggggctgcgcccagatcagccacagcaggaactgactgggcccggctcaggagcctcctcacaggactcttccatggacctaattagcaggacaaggtctcccgctgcagagcagctgcaagacatcttgggcgaagaagatgaggctccaaaccctactctatttactgagatggacactctgcagcatgatggcgatcagatggaatggaaagaaagtgctcgctggattaagttcgaagagaaggtagaggagggctag

SEQ ID NO: 235178 - DNA, 3060 bp, Artificial Sequence
  derived and/or modified sequence
atgaaggtgaaggaggagaaggccggcgtgggcaagctggaccacaccaaccacagaagacgcttcccagaccagaagggcagccctgctgctgagcagctgcaggacatcctgggggaggaggatgaggcccccaaccccaccctcttcacagagatggacaccctgcagcatgatggagaccagatggagtggaaggagagcgcccgctggatcaagtttgaggagaaggtggaggagggcggggagcgctggagcaagccccacgtgtccaccctgagcctgcacagcctgtttgagctgcggacctgcctgcagacaggaacagtgctgctggacctggacagcggcagcctgccccagatcattgatgatgtgattgagaagcagattgaagatggcctgctgcggcctgagctgcgggagcgggtgtcctatgtgctgctgcggcggcaccgccaccagaccaagaagcccatccacaggagcctggccgacatcggcaagtctgtgtccaccaccaacagaagccctgcccggagccctggggccggccccagcctgcaccacagcacagaggacctgaggatgaggcagagcgccaactacggccgcctgtgccacgcccagagccgctccatgaatgacatcagcctgacccccaacacagaccagaggaagaacaagttcatgaagaagatccccaaggacagcgaggccagcaatgtgctggtgggggaggtggacttcctggaccagcccttcatcgcctttgtgcggctcatccagagcgccatgctgggcggcgtgacagaggtgcctgtgcccacccgcttcctgttcatcctgctgggccccagcggccgggccaagagctacaatgagatcggccgggccatcgccaccctgatggtggatgacctcttcagtgatgtggcctacaaggccaggaaccgggaggacctgattgctggcattgatgagttcctggatgaagtcatcgtgctgcccccaggagagtgggaccccaacatcagaattgagccccccaagaaggtgcccagcgctgacaagaggaagtctgtgttcagcctggccgagctgggccagatgaatggatctgtgggcggcggcggcggggcccctgggggcggcaatggaggcggcggcggcggcggcagcggcggcggggccggcagcggcggggccggcggcaccagcagtggagatgatggagagatgcctgccatgcatgagatcggggaggagctgatctggacaggccgcttctttggaggcctgtgcctggacatcaagaggaagctgccctggttccccagcgacttctatgatggcttccacatccagagcatcagcgccatcctcttcatctacctgggctgcatcaccaatgccatcacctttggaggcctgctgggagatgccacagacaactaccagggcgtgatggagagcttcctgggcacagccatggccggcagcctcttctgcctcttcagcggccagcccctcatcatcctgagcagcacaggccccatcctgatctttgagaagctgctgtttgacttcagcaaaggaaatggcctggactacatggagttccggctgtggattggcctgcacagcgctgtgcagtgcctgatcctggtggccacagatgccagcttcatcatcaagtacatcacccgcttcacagaggagggcttcagcaccctcatctccttcatcttcatctatgatgccatcaagaagatgattggagccttcaagtactaccccatcaacatggacttcaagcccaacttcatcaccacctacaagtgtgaatgtgtggccccagacacagtgaacaccaccgtcttcaatgccagcgcccccctggccccagacaccaatgccagcctgtacaacctgctgaacctgacagccctggactggagcctgctgagcaagaaggagtgcctgtcctatggaggccgcctgctgggcaacagctgcaagttcatcccagacctggccctgatgtccttcatcctcttcttcggcacctacagcatgaccctgaccctgaagaagttcaagttcagccgctacttccccaccaagcccaccaggccagaccggggctggtttgtggccccctttgggaagaacccctggtgggtgtacccagccagcatcctgcctgccctgctggtgaccatcctgatcttcatggaccagcagatcacagctgtgattgtgaacagaaaagaaaacaagctgaagaaggccgccggctaccacctggacctcttctgggtgggcatcctgatggccctgtgcagcttcatgggcctgccctggtacgtggccgccaccgtcatcagcatcgcccacatcgacagcctgaagatggagacagagaccagcgcccctggagagcagccccagttcctgggcgtgcgggagcagagggtgacaggcatcatcgtgttcatcctgaccggcatctctgtgttcctggcccccatcctgaagtgcatccccctgcctgtgctgtatggagtcttcctgtacatgggcgtggccagcctgaatggcatccagttctgggagcgctgcaagctgttcctgatgcctgccaagcaccagcctgaccacgccttcctgcggcacgtgcccctgcggcgcatccacctgttcaccctggtgcagatcctgtgcctggccgtgctgtggatcctgaagagcacagtggccgccatcatcttccctgtgatgatcctgggcctcatcatcgtgcggcggctgctggacttcatcttcagccagcacgacctggcctggattgacaacatcctgcctgagaaggagaagaaggagacagacaagaagaggaagaggaagaagggggcccacgaggactgtgatgaggagccccagttccccccaccttctgtcatcaagatccccatggagagcgtgcagagcgacccccagaatggcatccactgcatcgccaggaagaggagcagctcctggagctacagcctgtag

SEQ ID NO: 235179 - DNA, 3366 bp, Artificial Sequence
  derived and/or modified sequence
atgaaggtgaaggaggagaaggccggcgtgggcaagctggaccacaccaaccacagaagacgcttcccagaccagaaggaatgtcctcccatccacatcggcctgcctgtgcccacctacccccagaggaagacagaccagaagggccacctgagcggcctgcagaaggtgcactggggcctgcggccagaccagccccagcaggagctgactggacctggcagcggggccagcagccaggacagctccatggacctgatcagcaggaccaggagccctgctgctgagcagctgcaggacatcctgggggaggaggatgaggcccccaaccccaccctcttcacagagatggacaccctgcagcatgatggagaccagatggagtggaaggagagcgcccgctggatcaagtttgaggagaaggtggaggagggcggggagcgctggagcaagccccacgtgtccaccctgagcctgcacagcctgtttgagctgcggacctgcctgcagacaggaacagtgctgctggacctggacagcggcagcctgccccagatcattgatgatgtgattgagaagcagattgaagatggcctgctgcggcctgagctgcgggagcgggtgtcctatgtgctgctgcggcggcaccgccaccagaccaagaagcccatccacaggagcctggccgacatcggcaagtctgtgtccaccaccaacagaagccctgcccggagccctggggccggccccagcctgcaccacagcacagaggacctgaggatgaggcagagcgccaactacggccgcctgtgccacgcccagagccgctccatgaatgacatcagcctgacccccaacacagaccagaggaagaacaagttcatgaagaagatccccaaggacagcgaggccagcaatgtgctggtgggggaggtggacttcctggaccagcccttcatcgcctttgtgcggctcatccagagcgccatgctgggcggcgtgacagaggtgcctgtgcccacccgcttcctgttcatcctgctgggccccagcggccgggccaagagctacaatgagatcggccgggccatcgccaccctgatggtggatgacctcttcagtgatgtggcctacaaggccaggaaccgggaggacctgattgctggcattgatgagttcctggatgaagtcatcgtgctgcccccaggagagtgggaccccaacatcagaattgagccccccaagaaggtgcccagcgctgacaagaggaagtctgtgttcagcctggccgagctgggccagatgaatggatctgtgggcggcggcggcggggcccctgggggcggcaatggaggcggcggcggcggcggcagcggcggcggggccggcagcggcggggccggcggcaccagcagtggagatgatggagagatgcctgccatgcatgagatcggggaggagctgatctggacaggccgcttctttggaggcctgtgcctggacatcaagaggaagctgccctggttccccagcgacttctatgatggcttccacatccagagcatcagcgccatcctcttcatctacctgggctgcatcaccaatgccatcacctttggaggcctgctgggagatgccacagacaactaccagggcgtgatggagagcttcctgggcacagccatggccggcagcctcttctgcctcttcagcggccagcccctcatcatcctgagcagcacaggccccatcctgatctttgagaagctgctgtttgacttcagcaaaggaaatggcctggactacatggagttccggctgtggattggcctgcacagcgctgtgcagtgcctgatcctggtggccacagatgccagcttcatcatcaagtacatcacccgcttcacagaggagggcttcagcaccctcatctccttcatcttcatctatgatgccatcaagaagatgattggagccttcaagtactaccccatcaacatggacttcaagcccaacttcatcaccacctacaagtgtgaatgtgtggccccagacacagtgaacaccaccgtcttcaatgccagcgcccccctggccccagacaccaatgccagcctgtacaacctgctgaacctgacagccctggactggagcctgctgagcaagaaggagtgcctgtcctatggaggccgcctgctgggcaacagctgcaagttcatcccagacctggccctgatgtccttcatcctcttcttcggcacctacagcatgaccctgaccctgaagaagttcaagttcagccgctacttccccaccaaggtgcgggccctggtggccgacttcagcatcgtgttcagcatcctgatgttctgtggcattgatgcctgcttcggcctggagacccccaagctgcacgtgcccagcgtcatcaagcccaccaggccagaccggggctggtttgtggccccctttgggaagaacccctggtgggtgtacccagccagcatcctgcctgccctgctggtgaccatcctgatcttcatggaccagcagatcacagctgtgattgtgaacagaaaagaaaacaagctgaagaaggccgccggctaccacctggacctcttctgggtgggcatcctgatggccctgtgcagcttcatgggcctgccctggtacgtggccgccaccgtcatcagcatcgcccacatcgacagcctgaagatggagacagagaccagcgcccctggagagcagccccagttcctgggcgtgcgggagcagagggtgacaggcatcatcgtgttcatcctgaccggcatctctgtgttcctggcccccatcctgaagtgcatccccctgcctgtgctgtatggagtcttcctgtacatgggcgtggccagcctgaatggcatccagttctgggagcgctgcaagctgttcctgatgcctgccaagcaccagcctgaccacgccttcctgcggcacgtgcccctgcggcgcatccacctgttcaccctggtgcagatcctgtgcctggccgtgctgtggatcctgaagagcacagtggccgccatcatcttccctgtgatgatcctgggcctcatcatcgtgcggcggctgctggacttcatcttcagccagcacgacctggcctggattgacaacatcctgcctgagaaggagaagaaggagacagacaagaagaggaagaggaagaagggggcccacgaggactgtgatgaggagccccagttccccccaccttctgtcatcaagatccccatggagagcgtgcagagcgacccccagaatggcatccactgcatcgccaggaagaggagcagctcctggagctacagcctgtag

SEQ ID NO: 235180 - DNA, 390 bp, Artificial Sequence
  derived and/or modified sequence
atgaaggtgaaggaggagaaggccggcgtgggcaagctggaccacaccaaccacagaagacgcttcccagaccagaaggaatgtcctcccatccacatcggcctgcctgtgcccacctacccccagaggaagacagaccagaagggccacctgagcggcctgcagaaggtgcactggggcctgcggccagaccagccccagcaggagctgactggacctggcagcggggccagcagccaggacagctccatggacctgatcagcaggaccaggagccctgctgctgagcagctgcaggacatcctgggggaggaggatgaggcccccaaccccaccctcttcacagagatggacaccctgcagcatgatggagaccagatggagtggtag

SEQ ID NO: 235181 - DNA, 438 bp, Artificial Sequence
  derived and/or modified sequence
atgaaggtgaaggaggagaaggccggcgtgggcaagctggaccacaccaaccacagaagacgcttcccagaccagaaggaatgtcctcccatccacatcggcctgcctgtgcccacctacccccagaggaagacagaccagaagggccacctgagcggcctgcagaaggtgcactggggcctgcggccagaccagccccagcaggagctgactggacctggcagcggggccagcagccaggacagctccatggacctgatcagcaggaccaggagccctgctgctgagcagctgcaggacatcctgggggaggaggatgaggcccccaaccccaccctcttcacagagatggacaccctgcagcatgatggagaccagatggagtggaaggagagcgcccgctggatcaagtttgaggagaaggtggaggagggctag

SEQ ID NO: 235182 - DNA, 3060 bp, Artificial Sequence
  derived and/or modified sequence
atgaaggtgaaggaggagaaggccggcgtgggcaagctggaccacacaaatcatcgcaggaggtttcccgaccagaagggaagccccgctgccgagcagctccaagatatcctaggcgaggaagatgaagcccccaatcctaccctattcacggagatggacaccctccagcatgacggcgaccagatggagtggaaggaaagtgcccggtggatcaagtttgaggaaaaggttgaagagggcggggagcgctggtccaagccgcatgtgtctacactgtcactccactcacttttcgagctgagaacctgtctccagactggcacagtccttctggatttggatagcggcagtctgccccagatcatcgacgacgtgatcgagaaacagatcgaggacggcttgctacgacccgagctgcgggagagggttagctacgtactgctcagacgtcatcgtcatcagaccaagaagccgatccacagatcccttgccgatattgggaagagcgtttccacaaccaacagaagcccagcgagatcgccgggcgcggggccatccctccaccactcaacagaggacctgaggatgaggcagtcagccaattatggcagactgtgccatgcccagtcgaggagcatgaatgacatttctctgacacccaacaccgatcagaggaagaacaagtttatgaaaaagatacctaaagactccgaagctagtaatgtcttggtaggcgaggtggatttcttggaccagcctttcatcgctttcgtgcgtcttatacagtcagccatgctaggaggggtcacagaggtgccagttccgactagattcctctttatcctgctcgggccaagcggcagagccaagagctataacgaaattggaagagcaatagctactctcatggtggacgatttgttcagcgacgtggcctataaggccagaaacagagaggacttgattgcaggaatagatgagtttctggacgaggtgattgtgctgcccccaggcgagtgggaccccaacatccgcatcgagcctccaaagaaggtgccatccgcagacaaacggaaatctgtattttccctcgccgaactgggtcagatgaatgggagcgtgggcggcggcgggggggccccggggggtggcaacgggggcggaggtggagggggatccgggggcggcgcagggagcggcggcgctggggggacatcatcaggcgacgacggtgagatgccagcgatgcatgagattggagaagaattgatctggactggcaggtttttcggaggactctgcctggacattaagcggaaactgccctggttccctagcgatttttacgatggatttcatattcaatccatcagcgcaatcttgttcatttatcttggatgtattaccaacgccatcacatttgggggactcctgggagatgcaacagacaactaccagggcgtcatggagagctttctcgggaccgcgatggcgggatccctattctgtctgtttagcggacagccccttataatcctgagttcgacgggccccatactgatatttgaaaagctgctgtttgatttttccaagggaaacggattggactatatggagttccggttgtggataggcctgcactcagccgttcaatgtctaatcctggtcgcgacagacgcctcattcatcatcaaatacattacacgctttaccgaagagggattttcaacgctgatcagctttatcttcatctacgacgctatcaagaagatgatcggcgcgttcaagtactacccgataaacatggattttaaacctaatttcattactacgtacaagtgcgagtgtgttgctcccgacaccgtaaacaccacagtgttcaacgcaagtgcgcctttagccccggacacgaacgctagcctttacaatcttcttaacctgacggccctggactggtccctactcagcaagaaggaatgcctttcctatggcggtcggctcctggggaattcatgcaaattcataccagatctcgcgctcatgagtttcatcctgttctttggaacgtactccatgacgctgactcttaaaaaattcaagttctctcgatacttccccacgaagccaacacggcctgataggggttggttcgttgctcccttcggcaagaatccatggtgggtatatccagcaagtattctgcccgcactgttggttaccatcctcatatttatggaccagcagattacggctgtgatagtgaacagaaaggaaaacaagctaaaaaaagcagcgggatatcatctggatttgttttgggttggcattctcatggctttatgttcattcatgggtctcccatggtatgttgcagctaccgtcatcagcatcgctcacattgactctttgaagatggagacggagacttctgctccaggcgaacagcctcagtttctgggcgtccgtgagcagagggttacaggcatcatcgtattcatcttgacaggtatttctgtgtttctggccccgatactgaaatgcatccccttgcccgtgctctacggcgtgtttctgtatatgggagtagcttccctgaacgggatccagttctgggagaggtgcaaactttttctcatgcccgctaagcaccaaccggatcatgccttcttacgacatgttccactgagaagaatccacctgttcaccttggttcagattctgtgtctcgctgtcttgtggatactgaaatccaccgtagcagctataatcttcccggtgatgatcctcgggttgattatcgtccggcgcctactagattttattttcagccagcacgacttggcatggatcgacaatattttgcccgaaaaagaaaaaaaggagactgacaaaaagcgcaagcgcaagaagggggcacacgaagattgtgatgaagagccacaattcccccccccatcagtgattaaaatacccatggaatccgtgcagtcagatccccagaacggaatccactgcattgcgagaaaacgcagtagctcttggtcctatagcctatag

SEQ ID NO: 235183 - DNA, 3060 bp, Artificial Sequence
  derived and/or modified sequence
atgaaggtgaaggaggagaaggccggcgtgggcaagctggaccacactaaccatcgacgccgctttccagatcagaagggcagtcctgccgcagaacaattgcaagacatattgggagaagaggacgaagcccctaaccctacgttgttcacagagatggatacgctgcagcatgacggagatcagatggagtggaaagaatcggccaggtggattaaattcgaagaaaaggtggaggaaggcggggagcggtggagcaagccccacgtgagcactctgtcattacactctctattcgagctgagaacatgcttgcagactggcacagtgcttctagacctcgacagcgggagcctgccccaaattatcgacgacgtcatcgaaaaacagattgaggatgggctgctgcggcctgagctgagggagcgagtgtcttacgtgctgctcaggagacaccgtcatcagaccaaaaagcctatacatagatccctggccgatatagggaaatccgtgtctacaactaacagatctcccgcaagatctccaggtgccggaccctccttgcaccattccaccgaggaccttagaatgagacaatccgcaaattacggcagactgtgtcatgcccagtccagaagcatgaacgatatcagtcttacccccaataccgatcaacggaagaataaatttatgaagaagatcccgaaagatagcgaagctagcaacgttttggtgggagaggtggatttcctggaccaacccttcatcgcgtttgtgaggttgattcagtccgccatgctaggcggggtcacggaggtccctgtgcctacacggtttctgttcattctcctgggtccgtcaggaagagccaagagctacaacgagattggcagagctattgccactctgatggtcgacgacttgttttctgatgttgcttataaagctcgcaatcgagaagacttgatcgctgggattgacgaattcctggatgaagttatcgtgctgcctccgggagagtgggatcccaatatcagaatcgagccacctaaaaaggtcccctctgctgataaaaggaaatccgtgttttctttggcagagttaggtcagatgaacggcagcgtgggtggcggcgggggcgctcctggtgggggcaacggcggaggcggcgggggaggatccggagggggcgcaggctcgggcggagcgggaggtacttcaagcggggatgacggggagatgcccgcaatgcatgaaatcggagaggagcttatatggacggggaggtttttcgggggattatgcctggatataaagaggaaactgccctggtttccgtcggatttctatgacggattccatatacaaagcatttctgcaatcctcttcatctacctcggttgcataaccaatgctattacatttggaggcctgctgggagatgccacagataactatcagggggtcatggaaagttttttggggacggcaatggccgggagcctcttctgcctgttcagcgggcagcctcttatcattctgtcctctacgggtccgatcttaatttttgagaaattattgtttgatttcagtaagggaaatggcttggactatatggagttccgtctctggatcgggcttcattcagccgtgcagtgccttatactggtggctaccgatgcaagtttcattattaagtacattacacggtttactgaagagggattctcaacactcattagttttatcttcatctacgatgcgatcaagaaaatgattggggcctttaaatattaccctatcaacatggactttaaaccgaatttcattaccacatataagtgtgaatgtgtggcccccgacactgtgaacaccaccgtctttaatgcatctgcccccctggcacctgacactaacgcctctctgtacaacctcctcaacctgacagcgcttgactggagcctgctgagcaagaaagagtgtctgtcttacggcgggcggctgctgggcaactcttgcaagttcatcccagatcttgcacttatgagctttattctcttcttcgggacctatagtatgactctgactctcaaaaagttcaagttctctcggtacttcccaaccaagcccacccggccagaccgaggatggttcgtagctccgttcggtaagaacccttggtgggtgtaccccgcgagtatcctcccagcactcttagtaaccatcttgatcttcatggatcagcaaattacagcggtgatcgtcaatcgcaaggaaaacaagctgaaaaaagcggccgggtatcatctggatctgttctgggtgggaatcctgatggccctgtgcagctttatggggttgccctggtatgtggcggcgacggtcatctccatcgcccacattgacagcctcaaaatggaaaccgagacatctgcacctggggagcaaccccaattcctgggcgtgagggaacaaagggttacaggcattattgtatttatcctcactgggatatcggtgttcttggccccaatcctcaaatgtattccacttccggtcttgtatggagtttttctgtacatgggagtggcctcattaaatggcatacaattctgggaacggtgcaagctctttttgatgcctgctaagcatcagcccgatcacgcctttctaaggcatgtgcctttacggaggattcacctgttcaccctcgtccaaattctgtgcctggccgtgctctggatattaaagtcaaccgtggcagcgattatctttcctgtcatgatcttaggattgataatcgtccgcagactactggacttcattttttctcagcacgacctggcctggatcgataatattttgccagaaaaagaaaagaaggaaactgataaaaagcggaaacgcaaaaagggggcgcacgaggactgcgacgaggagccccagtttcccccgccgtccgtgataaagattcctatggagagcgttcagtcggacccccagaatggcatccactgcattgctagaaaacgctctagctcgtggtcttactccctgtag

SEQ ID NO: 235184 - DNA, 3366 bp, Artificial Sequence
  derived and/or modified sequence
atgaaggtgaaggaggagaaggccggcgtgggcaagctggaccacacaaatcatagaaggcgcttccctgaccagaaggaatgtcccccgattcacatcggacttcctgtgcccacttacccacagcggaaaacagatcagaaggggcatctgagtggactgcagaaagtgcactgggggttgcgtccagatcaaccccagcaggaattgaccggtcctggcagcggtgcgtctagtcaggacagcagcatggacctgatctcaaggacgcggagcccagctgcagagcagcttcaggacatcctcggagaagaagatgaagctcctaatcccactctgtttacagagatggacacgcttcagcacgatggagatcaaatggagtggaaagaatctgctcgctggatcaagttcgaagagaaagtcgaggaaggtggcgagcgttggagcaaaccacacgtatcaacgctaagcctgcacagtctgtttgaacttcgcacttgcctgcaaaccggtaccgtcctgctggatctagattctggttcgctacctcagatcattgatgatgtgatcgaaaaacaaatagaggatgggctgcttcgtcctgagttgagggagcgggtgtcatatgtccttctcagacgccatcgccatcagaccaagaagcctattcaccgttcactggcggacatcggcaaaagcgtgtccaccaccaaccggtcgcccgccaggtcccctggggctggtccctcacttcatcactcaaccgaggacttgcggatgcggcagtcggccaattatggcaggctgtgtcatgctcaatccaggagcatgaatgatattagtcttacccccaatactgatcagcggaagaataagtttatgaagaaaatcccaaaagactcggaagcatctaacgtccttgtgggagaagttgactttcttgatcagccatttatcgcctttgtgagactcatccaaagtgctatgctgggtggcgtgacggaggtgccggtccccaccagattcttgttcatcctgctgggcccctcaggaagggctaagtcatacaacgagatcggccgggcaattgcaactctcatggtcgatgatttgttctctgatgttgcttacaaagctcgcaaccgtgaggacctcattgccggaatcgatgaatttctggacgaggtcatcgtgctccctcctggggaatgggatcccaatatcaggattgagccccctaagaaagtcccttcagctgacaaacgcaagtcggttttctcgttagccgaactgggccagatgaatggaagtgtcggaggtggcggaggagcaccaggtggggggaatggagggggcggcgggggcggcagcggaggaggcgcgggtagcggtggggctggtggtacgtcttcaggggacgatggtgagatgcctgctatgcatgagatcggcgaagagctcatttggactggacgctttttcgggggattgtgcctggacatcaaacgtaagctgccctggtttcctagcgatttctacgacggttttcatatccagagcatctccgcgatccttttcatttatctgggctgcattaccaatgcaatcaccttcgggggcctgctgggagatgctacagacaactatcagggagttatggaaagtttcctgggtacagcgatggcaggatcactgttttgcctgttttccggccagcccctgattattctcagttctaccggtcccatacttatcttcgaaaagttactgtttgatttctcaaaaggcaacggactggattacatggagttccgcctctggatcggcctccattcggctgtgcagtgccttattttggtcgctacagacgcaagcttcatcatcaagtacatcacaagatttactgaagaagggtttagtaccctgatttcctttatattcatctacgacgctatcaagaaaatgattggcgcatttaaatactacccgattaatatggattttaagcctaatttcatcacaacgtacaagtgtgaatgcgttgcgccagatactgttaataccactgtattcaacgcctccgcaccactcgctcctgacaccaatgcaagcctgtataacttactgaatcttactgccctcgactggtccctgctatccaaaaaggagtgtctgtcatacgggggccgtctactggggaactcgtgcaagttcattcctgatcttgccctcatgtcctttattttgttcttcggcacctactcaatgacgctcacactaaagaaattcaagttctcacgctattttccgacgaaagtaagggctctcgttgccgatttcagcatcgtgttctcgatcctgatgttctgcggtatagacgcctgttttggcctcgagacaccgaaattgcacgtacccagtgtgataaagcctacacgtcctgacagaggctggttcgtggcccccttcggcaaaaacccctggtgggtgtatcctgcctcaattctgccagccctcctggttaccatcctgatattcatggaccaacagattaccgccgtcatcgttaatcggaaagaaaacaaactgaagaaggcagccgggtaccacctggacctgttctgggtgggcatactgatggcactgtgctctttcatgggcctcccatggtacgtcgcggccacagtgatcagcatcgctcatattgacagcctcaaaatggaaaccgaaacgtctgcacccggagaacagcctcagtttttgggtgtgagggagcaaagggttaccggaatcatcgtgtttatcctaactggtataagcgttttcctcgccccgatcctgaaatgtattccactgcccgtgctgtacggcgtctttctgtacatgggcgtagccagcttgaacgggatccaattctgggaaagatgcaagctctttctcatgcccgccaagcaccagcccgaccatgccttcctccgacacgtgcccttaaggcgaatccacttgtttaccctcgtacagattctatgcctggctgtactttggatcttgaaatccacagttgctgcgattatattcccggttatgatcctggggcttatcatcgtgcgccgcctgctggactttattttcagtcagcatgatctggcttggatagataacatcctccccgagaaggaaaaaaaggagacagacaagaaaaggaagcgtaagaagggcgcccatgaagattgcgacgaggagccccaattcccgcctcccagcgtcatcaaaattccaatggaaagcgttcagagcgatccgcagaatggcattcattgtatagctagaaagcgaagtagctcctggtcctattcactgtag

SEQ ID NO: 235185 - DNA, 390 bp, Artificial Sequence
  derived and/or modified sequence
atgaaggtgaaggaggagaaggccggcgtgggcaagctggaccacaccaatcaccggcggcgatttcctgaccagaaggaatgccctcccatccatatcgggctgcccgtccccacctatcctcagagaaaaactgatcagaaaggccacttgagcggcttgcagaaagttcattgggggctccgcccagatcagccacaacaagaactaaccgggcccggctctggtgctagcagtcaagattcgtctatggatctaattagtagaactcgctcccccgccgcggaacaattgcaggacatcctcggagaagaggacgaggcgcctaatccgacactctttactgagatggacacccttcaacatgatggcgaccaaatggagtggtag

SEQ ID NO: 235186 - DNA, 438 bp, Artificial Sequence
  derived and/or modified sequence
atgaaggtgaaggaggagaaggccggcgtgggcaagctggaccacaccaaccataggagacgctttcccgatcagaaggagtgtcctcctattcatattggtctgcccgtacccacttaccctcagcggaaaactgatcagaagggacatctgagtgggctgcaaaaagtgcattggggactgcgtccagatcagccacagcaggagctcactggacctggatccggagcatcatctcaagacagttccatggatctgatctctcggacccggagccccgccgctgagcaattacaagacattctgggggaggaagatgaggctcctaaccccacgctcttcactgagatggacacgctgcaacacgacggcgaccagatggaatggaaggagtcagccaggtggattaaattcgaggagaaagtggaagagggatag

SEQ ID NO: 235187 - DNA, 3060 bp, Artificial Sequence
  derived and/or modified sequence
atgaaggtaaaagaggagaaagccggagtcggaaagctcgaccacactaaccatcgcaggcgatttccagatcagaaaggctcccccgctgctgaacaactgcaggatattctgggagaggaagacgaagcccctaatcccaccttgttcaccgagatggacactctgcagcatgatggagatcaaatggaatggaaagagtccgcacggtggattaaattcgaagaaaaagtggaagaaggaggtgagcggtggagcaagccacatgtgagcaccctgtcgctccattcactcttcgagcttagaacttgtctgcagacaggaaccgtcttactggacctggacagtggcagtctgccccagatcatcgatgatgttattgagaaacagatcgaggatggacttctgcgacctgagctccgagagagagtgtcctatgtgctcctgagacgccacaggcatcagactaagaaacctattcataggtctctcgccgatatcgggaagtccgtaagcaccaccaacaggtccccagcacggagccctggcgcaggcccttctctacaccactctaccgaggatttgaggatgcgacagtcagcaaattatggacgcctctgccacgcgcagtcgcggtctatgaacgacatcagccttacccctaacacggaccagaggaaaaacaaattcatgaaaaagatccctaaagacagcgaagctagcaacgtgctggtgggagaagtggattttttggatcagccttttatcgcgttcgtgaggcttattcaatcggccatgctgggtggggtcactgaagtccctgtgcctacgcgtttcctcttcatactgttagggccatccggtagggccaaaagttacaatgaaatcggacgggctatcgccacattgatggttgacgacctgttctccgatgtggcttataaggctaggaacagagaagatttaatcgccggtattgatgaatttctcgatgaggtgatagtgctgccgccaggcgaatgggaccccaatattcgtattgaacctcctaagaaagtaccaagtgctgacaagagaaaatcggttttctctctggcagagctcggccagatgaatggatccgttggcggtggagggggagcgccaggtggtggcaacggtggaggaggcggtggtggtagcggtggaggagccggatcaggcggagccggtggcacaagcagcggcgacgacggcgagatgccagcgatgcacgagatcggggaagagctgatatggaccggcaggtttttcggaggcctatgtctggatataaaacgcaaactcccatggtttccctccgatttctatgatggattccatattcagtctatttccgctatcctgttcatttatttgggctgcatcaccaacgccattacttttggcggtctgctgggcgacgcaacagacaactaccagggagttatggaatctttcttgggaaccgccatggccggaagcctgttttgccttttttctggtcagcctctcattattctctcctctaccggacccatccttatttttgaaaagctgctgttcgacttctctaaaggaaacggactagactatatggaattccgcttgtggattggactccattcagcagttcaatgcctcattctcgtggcgaccgacgccagttttattataaagtacatcactcgatttacagaagaaggtttttccaccctcatctcattcatcttcatctatgacgccatcaagaagatgatcggagcgttcaaatactaccccattaacatggactttaagccaaatttcatcactacctacaagtgtgagtgtgtggctcccgataccgtcaataccactgtatttaatgcgtctgctccgcttgccccagatactaatgcttcactctataatttactgaatcttactgccctcgattggtcacttttgagcaagaaagaatgtcttagctacgggggaaggctccttgggaactcttgtaaatttattcccgacctcgccctgatgagtttcattctttttttcggaacctacagcatgactcttacccttaaaaaattcaagtttagcagatatttccccaccaagcccacccggccagatcgaggctggtttgtcgcacccttcggaaagaatccttggtgggtgtacccagcctctatcctccctgcactgctagtaaccattctgatttttatggatcagcagataaccgctgtcattgtgaatcgcaaagaaaacaagctcaaaaaagccgctggctatcacctggacctgttctgggttggcattctcatggcactgtgttccttcatgggactgccttggtacgtggccgcaactgtaatctcaatcgcgcacatagacagcttgaaaatggagactgaaacctccgcacctggggagcagccacagttcctcggggtccgtgagcaaagggtcacagggatcatcgtatttattctaaccggcatttccgtgttcctagcgccaatccttaaatgtatccccctgccggtgctgtacggagtgttcctgtacatgggggttgcctctctaaacggaatccagttttgggagcgctgtaaattgttcctgatgcctgccaagcaccagccggaccacgcatttctgagacatgtgcctctaaggaggatccacctatttacgcttgtccagatattatgcctcgcggtactttggatcctcaagtcgaccgtggccgctatcatctttcctgtcatgatcctcgggttgattatcgtgagaagactactcgatttcattttcagtcagcatgacttggcatggatagacaacatcctacccgaaaaggagaaaaaagagacggataaaaagaggaaacgtaaaaagggagctcatgaagattgtgatgaggaaccccagtttccacccccaagcgtgattaaaatccctatggaatcggtgcaatcagacccccagaacgggattcattgtatagcaagaaaaagaagcagctcatggagctattcactctag

SEQ ID NO: 235188 - DNA, 3060 bp, Artificial Sequence
  derived and/or modified sequence
atgaaggtgaaagaggagaaggccggtgtcggcaaactggaccacactaaccaccggagaagattccccgaccagaaaggctctcctgctgctgaacagttacaggacatccttggagaggaagatgaggctcctaaccccactctcttcactgaaatggacacgctccagcatgatggagatcaaatggaatggaaagaatctgcgcgatggattaaattcgaagagaaagttgaagaggggggagaaaggtggtctaagccgcacgtgagtactctcagcctacacagcctattcgagctgcgtacctgtctgcagaccgggactgtcttgctggatttggatagcggctcactgccacagatcatagatgatgtcattgagaagcagattgaagacggcttgttgcgcccagaattgcgcgagcgggttagttatgttctgcttcgacgccatcggcaccaaacaaagaagcccatacatagatctttagctgatatcggaaaaagcgtgagcaccaccaataggtcacccgcaaggtcaccgggtgccggtccatccctgcaccactctacagaagacctccggatgagacagagcgccaattacggcaggttgtgccatgcacagagccggagcatgaacgacatttccctaacacctaacacagatcagcgaaaaaataagttcatgaaaaagatccctaaggactccgaagcttcaaatgtgctggtgggtgaggtagacttcctcgatcaacctttcatcgcattcgtgcggctgatccagagcgcaatgctgggtggcgtgaccgaggtcccagtgcctacccggttcctgtttatattattgggaccaagtgggagagccaaatcttataacgagattgggcgagctatcgccactcttatggtggatgatctgttttcggacgtagcctataaagctcgtaatagagaagatctcatcgctggcatcgatgaattcctcgacgaagttatagtgctacctcccggtgagtgggaccctaacatccgcatcgagccacctaagaaagtgcctagtgccgataagcgaaagagcgtgttcagtctggcagaactggggcagatgaacggctctgtaggcggtggtgggggagcacctggtggaggtaacggcggagggggtggtgggggatcagggggaggcgcaggatcgggcggagctggcggaaccagctctggtgatgacggcgagatgccagcgatgcacgagatcggggaagaactgatctggactgggagattctttgggggactatgcctggatattaaaagaaagttaccctggtttccatcagatttttacgatggcttccacatccagagcatcagcgccattcttttcatctatctaggatgtatcacaaatgctattacctttggaggcctgctcggagatgccacggataactaccagggggttatggagagttttttaggcacggcaatggccggttcattattttgcctcttcagtgggcagcctctaattatcctgtctagtaccggacccattctcattttcgagaagctattgttcgatttttctaaaggcaatgggctggactacatggaattccgcctgtggatcgggctacattcggccgtgcagtgcctgattttggttgcaaccgatgcctcttttattattaagtatattacgaggttcactgaagagggctttagcacccttatctccttcattttcatctacgacgccattaaaaagatgatcggcgcatttaagtattaccccatcaacatggactttaaacctaactttatcactacttacaagtgcgagtgcgtggccccagacacagtgaacaccaccgttttcaacgcttccgcacctcttgcgcctgataccaatgcctctctctataacttgctgaatttaaccgccctggattggtctctactgtccaagaaagagtgtctgagttatgggggacgcctcctaggaaacagttgtaaatttatcccggatctggccttaatgtcctttattctgtttttcggaacttattcgatgaccctcactttgaagaagttcaagttttccagatattttccgacaaagcctactagacctgataggggatggtttgtcgcccctttcgggaagaacccctggtgggtgtaccccgcatccatcctgccagctttgttggtgaccatcctgatttttatggatcagcaaatcaccgctgtgatcgtaaatcggaaggaaaataagctgaagaaagcggcagggtatcatctcgacctgttttgggtcgggatcctaatggccctgtgtagctttatgggactaccgtggtatgtggcagctaccgtcatttccattgctcacattgattctctgaagatggaaaccgaaacctccgcccctggagaacagccccaatttctgggggtcagagaacagcgagtgactgggatcatagttttcattctaactggaatctctgtgttcttagctcccattctgaaatgtattcccttaccagttttgtatggggtttttttatatatgggcgtggcttcgctgaacggcattcagttctgggagcgttgcaaactctttcttatgcccgctaagcaccagcccgaccacgctttcctgaggcacgttccacttaggcgtatacatctctttactctggtgcaaatactgtgcttagccgtgttatggattctgaagtctacagtggccgcaatcattttccctgtgatgatactcgggttgatcattgttcggcgtctccttgatttcatcttcagtcaacacgacctagcatggatcgataacatattgccagaaaaagaaaagaaggaaaccgataaaaaaaggaagaggaagaaaggggcacacgaagactgtgacgaggagccgcagtttcctcctccctcagttattaaaatcccgatggaaagtgttcaaagcgatccacaaaacggaatacattgcatcgcaaggaagagaagtagcagctggagttattctttgtag

SEQ ID NO: 235189 - DNA, 3366 bp, Artificial Sequence
  derived and/or modified sequence
atgaaggtaaaagaagagaaggctggggtgggtaagctggaccacactaaccatcgaagacgctttcccgatcagaaggagtgcccgccaatacatattgggctccccgtgcccacttatcctcaacgcaaaaccgaccagaaaggacacctctctgggctgcagaaagtgcactggggattgagacctgatcagcctcagcaggagcttacgggtcccggatctggggcttcttcccaagactcatcaatggacctcatctcaagaactcggtcgcccgcagccgaacagttgcaggatattctgggggaagaggacgaagcacctaatcccactctgttcactgagatggacaccttgcagcatgacggcgaccagatggaatggaaagagtccgcacggtggatcaaattcgaggagaaagtggaagagggcggagaaagatggagtaaaccgcacgtcagtaccctgagtctgcactctctctttgaactcagaacttgcctgcagacaggaacagtgctgctggacctggactccggttcattgcctcagattatcgatgatgtgatcgagaagcagatcgaggacggacttctgcgcccagagctgagggaacgcgttagctacgtgctccttcgtcggcaccggcatcagacaaagaaaccaattcatcgcagcctggccgatatcggcaagagtgtgtcaacgaccaaccgatcacccgctcggtcgcctggcgctgggccatcacttcaccattccactgaggacctgagaatgagacagagcgctaactacggtaggctctgccacgcacaaagccggagcatgaatgatatcagtctcacaccaaataccgatcagaggaagaacaaatttatgaagaagatcccaaaagacagcgaggcctcaaatgtcttggtgggcgaagttgattttttggatcaaccctttatagcctttgtaaggcttatccagtctgccatgcttgggggagtgaccgaagtcccggtgccaacaagattcctgttcattctactggggccaagtggaagagccaaatcctacaacgaaatcggtcgggcaatcgcaacgctgatggtggatgaccttttctcagacgtcgcttataaagccaggaaccgggaagatttaatcgccggtatcgacgagtttttagacgaggttattgttttgccaccgggagaatgggaccccaacatacgaattgaaccgcctaagaaggtgccgtcagctgacaagagaaagtccgtgtttagtctggccgaattaggccagatgaatgggagcgtggggggtgggggaggggcacccggaggtggcaacggcggtgggggtggcggaggctccggtggtggggctgggagcggcggagccggaggtacctcatctggtgacgacggtgaaatgcctgccatgcacgagatcggggaggagctcatctggacagggcgattcttcgggggtctgtgcctagatatcaaacgaaaattgccatggtttccctcagatttctatgatggctttcatattcagagcatctccgctatcctattcatatatctgggctgcatcacaaacgccattacctttgggggactcctgggcgatgctacggataactatcaaggggttatggagtcgttcctcggtaccgccatggccggaagtctgttttgccttttcagtggccagccacttataatcttgtcgtccacagggcctatcctgattttcgagaaactgctgttcgactttagtaaaggaaacggcctggattatatggagtttcgcttatggattggattgcacagcgcagtgcagtgccttatcctcgtggcaaccgacgcaagctttatcattaagtacattacacggtttaccgaggaagggttcagcacattgatctcctttattttcatctacgatgcaatcaagaaaatgatcggagcgtttaaatattaccctattaacatggactttaagccaaacttcatcaccacttataagtgcgaatgcgtggcgccagataccgtcaataccacggtatttaacgcgagtgctcccctggcacctgacacaaatgcatccctgtataaccttctaaacctcacggccctagactggtccttactcagtaagaaggaatgcctgtcttatggaggccgactcctagggaattcttgcaagtttattcccgatctagcgctgatgtctttcatcctgttctttggtacctactcgatgaccctgacactgaagaagttcaagttttcgcgctacttcccaactaaggtgcgagcattagtagctgattttagcatagtgttctctatcttgatgttttgtggcatcgacgcctgcttcggcctagagacacctaagctgcatgtgccatctgtaataaaacctacaaggccagataggggatggttcgtcgcacctttcggaaagaacccttggtgggtataccctgcctctatcctgcctgcccttctggtgaccatcctcatctttatggaccagcagataacagccgtcatcgtgaacagaaaggagaataaactgaagaaagctgccggttaccatctggacctcttttgggtcggtatcttaatggctctctgttccttcatgggcctcccatggtacgtggctgccactgtgatatctatagcccacatcgattcgctcaaaatggagacagagacctcggcacccggagaacaaccgcagttcctcggggtccgggagcagcgggtgactggcattatagtgttcatcctgaccggcatcagtgtgttcttagccccaatattgaagtgtatcccgctgcccgtgctgtacggtgtcttcctgtatatgggcgtggcttcactgaacggaatccagttttgggaacgctgtaaattgtttctaatgccagccaagcatcagcccgaccacgcattcctccggcacgttcccctccgaagaatccatttgttcaccctggtccagattctgtgtttggccgtcctgtggatccttaagagcactgtcgcagcgatcatatttcctgtcatgatactgggactgattatcgtccgacggctgcttgacttcatcttctcacagcatgatttggcctggattgacaacatcttgcccgaaaaggagaagaaagaaaccgataagaagcggaagcgcaagaagggcgcacatgaagactgtgacgaggagccccagtttccacccccaagcgtaatcaagatccccatggaatccgtccagtccgacccccagaacggaattcattgtattgccaggaagcgatcctcaagctggtcatactctctttag

SEQ ID NO: 235190 - DNA, 390 bp, Artificial Sequence
  derived and/or modified sequence
atgaaagtgaaggaagaaaaggccggagtaggaaagcttgaccataccaatcatcggagaagattccccgaccaaaaggaatgccccccaattcacatagggctcccggttccaacatatccccagcgtaagacagatcagaaggggcacttgagcggactccagaaggtccactggggcttaagaccggatcagcctcaacaagaactgactggacccggtagcggtgcaagttctcaagatagttctatggacctgatttcgaggacacgctcacccgcagcagagcagctgcaggatatcctgggtgaggaggacgaagcccctaatcctacactctttaccgagatggacacgctacaacacgacggagaccagatggaatggtag

SEQ ID NO: 235191 - DNA, 438 bp, Artificial Sequence
  derived and/or modified sequence
atgaaagtcaaagaagaaaaggccggtgttggcaaattggatcataccaaccaccgtcggaggtttcctgaccagaaagagtgcccccctattcatataggcttacccgtacccacatatcctcagcggaaaactgaccaaaagggccatctgagcggtctgcagaaggtgcattgggggctgagacctgatcagccgcaacaggagctcaccgggccagggtctggcgcatcttcacaggattcttctatggacctgatttcaaggacacggagtcccgctgccgagcaactgcaagatattcttggggaggaagacgaggcacccaaccccactctgtttacagagatggataccctgcagcacgatggcgaccaaatggaatggaaagagtctgcaagatggatcaaatttgaggagaaagtcgaggaaggttag

SEQ ID NO: 235192 - DNA, 3142 bp, Artificial Sequence
  derived and/or modified sequence
gcctccctgggatttggatcctggtttccagagctaagaacacaaagtcatgaaggtgaaggaggagaaggctggggtaggaaagctggaccacactaaccacaggaggagatttccggatcagaaagggtccccagctgctgagcagctccaggacatcctgggggaggaagatgaggctcccaaccccaccctctttacagagatggatactctgcagcatgacggagaccagatggagtggaaggagtcagccaggtggataaagtttgaagaaaaggtagaggaaggcggcgaacgctggagcaagccccacgtgtccacactatccctgcacagcctcttcgagctccgtacctgcctgcagacggggacggtgctgctggatttggacagtggctccttaccacagatcatagatgatgtcattgagaagcagattgaggatggtctcctgcggccagagctccgggagagggtcagttacgtcctcctgaggaggcaccgccaccaaaccaagaagcccatccaccgctccttagctgacattgggaagtcagtctccaccacaaatcgcagtcctgcccggagccctggtgctggcccgagtctacaccactccacggaagacctgcggatgcggcagagtgcaaattacggacgtctgtgtcatgcccagagcagaagcatgaatgacatttctctcaccccaaacacagaccagcggaaaaacaaattcatgaagaagatccccaaggactcagaagcgtccaacgtgctcgtgggcgaggtggacttcctagaccagccattcatcgcgttcgtgcgcctcatccagtcggccatgctgggaggagtgaccgaggtgcctgtccccaccagatttctgtttatactactgggaccttctgggagagcaaaatcctacaatgaaattggccgtgccattgcaaccctcatggtagatgatctcttcagtgacgtggcctacaaagcccgcaatcgggaagatctgatcgcaggaattgatgaatttctggatgaggtcatcgtccttcctcctggagaatgggacccaaatatccggattgagccccccaagaaggtgccctctgctgacaagaggaaatctgtgttctccctagcagagctgggccagatgaatggctctgtgggaggaggcggcggagctcctggaggaggcaatggaggtggtggtggtggtggcagtggcggcggggctggcagtggcggggccggcggaacaagcagcggggatgatggagagatgccagccatgcatgaaatcggggaggaacttatctggacaggaaggttcttcggtggcctgtgtctggatatcaagaggaagttgccctggttcccaagtgacttctatgatggcttccacattcagtccatctctgccatcctattcatctacctcggctgtatcaccaacgcgatcacctttggtgggcttctgggggatgccaccgacaattatcagggagtgatggagagcttcctgggcactgccatggctggctccttgttctgcctcttctcgggacagcctctcatcattctcagcagcacggggcccatcctcatctttgagaagctcctcttcgacttcagcaaaggcaatggcctggactacatggagttccgcctctggattggcctacactcagctgtccagtgccttatcctagtggccacagatgccagctttatcatcaaatatatcacccgcttcaccgaggagggcttctccacccttatcagcttcatcttcatctacgatgccatcaagaagatgatcggtgccttcaagtactaccctatcaatatggacttcaagccaaacttcatcactacctacaagtgcgagtgtgtcgcccctgacacagtgaatacaaccgtgttcaatgcttcagccccattggcaccagacaccaacgcttctctgtacaacctccttaacctcacagcgttggactggtccctgctgagcaagaaggagtgtctgagctacggcgggcgcctgcttgggaattcctgcaagtttatcccagacctggcgctcatgtccttcatccttttctttgggacatactccatgaccctgaccctgaagaagttcaaattcagccgctattttcctaccaagccaacgcggcctgaccgaggctggttcgtggccccctttgggaagaacccgtggtgggtatacccagcaagcatcctgcccgccctgctggtgaccatcctgatcttcatggaccagcagatcactgccgtcattgtcaaccggaaggagaacaaactgaagaaggctgccggctaccatctggacctgttctgggtgggcatcctcatggctttgtgctcctttatggggctcccctggtacgtggctgccacggtcatctccatcgcccacatcgacagcctcaagatggagacagagaccagtgcccctggggagcagccccagtttctgggagtcagggaacagagagtaaccggcatcatcgtcttcatcctgacgggaatctctgtcttcctggctcccatcctaaagtgtatccccctgccggtgctgtacggagtcttcctctacatgggcgtggcctccctgaatggcatccagttctgggaacgctgcaagctcttcctgatgccagccaagcaccagccggaccatgccttcctgcggcacgtgccgctgcgccggatccacctcttcaccctggtgcagatcctctgcctggcggtgctctggatcctcaaatccacggtggctgccatcatcttcccggtcatgatcctgggcctcatcatcgttcgaaggcttctggatttcatcttttcccagcacgacctggcctggattgacaacatcctcccagagaaggaaaaaaaggagacagacaagaagaggaagagaaaaaaaggggcccacgaggactgtgatgaggagccccagttccctcctccctcggttataaagattcccatggaaagtgtccaatcagatccccaaaacggtatccactgcattgccagaaaaagatcttccagttggagttactcactctgattcttccttcagtgacacagaacttgaccgaag

SEQ ID NO: 235193 - DNA, 6041 bp, Artificial Sequence
  derived and/or modified sequence
accctaaaggaattggagtcagggcccaggagccacaggccactgcactggggcatcccaggatttggaattcagctgtgagctcatgagctgatggatgtttccaggagtaccctgaagaccacccaggtgggagtgtaagataaccttccagataaagagttgctgctaccaaaagagtgctgacaccatcacagtatgttcccttctcaaccctggacatggttcagaaacagctaaagcagacaagaatctggggcagccaatattgtaccacctgccaaagcttggcacaaacaatctggaagccaaaaattgcacatactgtggaacagagcaagtggttctggcctccctgggatttggatcctggtttccagagctaagaacacaaagtcatgaaggtgaaggaggagaaggctggggtaggaaagctggaccacactaaccacaggaggagatttccggatcagaaagggtccccagctgctgagcagctccaggacatcctgggggaggaagatgaggctcccaaccccaccctctttacagagatggatactctgcagcatgacggagaccagatggagtggaaggagtcagccaggtggataaagtttgaagaaaaggtagaggaaggcggcgaacgctggagcaagccccacgtgtccacactatccctgcacagcctcttcgagctccgtacctgcctgcagacggggacggtgctgctggatttggacagtggctccttaccacagatcatagatgatgtcattgagaagcagattgaggatggtctcctgcggccagagctccgggagagggtcagttacgtcctcctgaggaggcaccgccaccaaaccaagaagcccatccaccgctccttagctgacattgggaagtcagtctccaccacaaatcgcagtcctgcccggagccctggtgctggcccgagtctacaccactccacggaagacctgcggatgcggcagagtgcaaattacggacgtctgtgtcatgcccagagcagaagcatgaatgacatttctctcaccccaaacacagaccagcggaaaaacaaattcatgaagaagatccccaaggactcagaagcgtccaacgtgctcgtgggcgaggtggacttcctagaccagccattcatcgcgttcgtgcgcctcatccagtcggccatgctgggaggagtgaccgaggtgcctgtccccaccagatttctgtttatactactgggaccttctgggagagcaaaatcctacaatgaaattggccgtgccattgcaaccctcatggtagatgatctcttcagtgacgtggcctacaaagcccgcaatcgggaagatctgatcgcaggaattgatgaatttctggatgaggtcatcgtccttcctcctggagaatgggacccaaatatccggattgagccccccaagaaggtgccctctgctgacaagaggaaatctgtgttctccctagcagagctgggccagatgaatggctctgtgggaggaggcggcggagctcctggaggaggcaatggaggtggtggtggtggtggcagtggcggcggggctggcagtggcggggccggcggaacaagcagcggggatgatggagagatgccagccatgcatgaaatcggggaggaacttatctggacaggaaggttcttcggtggcctgtgtctggatatcaagaggaagttgccctggttcccaagtgacttctatgatggcttccacattcagtccatctctgccatcctattcatctacctcggctgtatcaccaacgcgatcacctttggtgggcttctgggggatgccaccgacaattatcagggagtgatggagagcttcctgggcactgccatggctggctccttgttctgcctcttctcgggacagcctctcatcattctcagcagcacggggcccatcctcatctttgagaagctcctcttcgacttcagcaaaggcaatggcctggactacatggagttccgcctctggattggcctacactcagctgtccagtgccttatcctagtggccacagatgccagctttatcatcaaatatatcacccgcttcaccgaggagggcttctccacccttatcagcttcatcttcatctacgatgccatcaagaagatgatcggtgccttcaagtactaccctatcaatatggacttcaagccaaacttcatcactacctacaagtgcgagtgtgtcgcccctgacacagtgaatacaaccgtgttcaatgcttcagccccattggcaccagacaccaacgcttctctgtacaacctccttaacctcacagcgttggactggtccctgctgagcaagaaggagtgtctgagctacggcgggcgcctgcttgggaattcctgcaagtttatcccagacctggcgctcatgtccttcatccttttctttgggacatactccatgaccctgaccctgaagaagttcaaattcagccgctattttcctaccaagccaacgcggcctgaccgaggctggttcgtggccccctttgggaagaacccgtggtgggtatacccagcaagcatcctgcccgccctgctggtgaccatcctgatcttcatggaccagcagatcactgccgtcattgtcaaccggaaggagaacaaactgaagaaggctgccggctaccatctggacctgttctgggtgggcatcctcatggctttgtgctcctttatggggctcccctggtacgtggctgccacggtcatctccatcgcccacatcgacagcctcaagatggagacagagaccagtgcccctggggagcagccccagtttctgggagtcagggaacagagagtaaccggcatcatcgtcttcatcctgacgggaatctctgtcttcctggctcccatcctaaagtgtatccccctgccggtgctgtacggagtcttcctctacatgggcgtggcctccctgaatggcatccagttctgggaacgctgcaagctcttcctgatgccagccaagcaccagccggaccatgccttcctgcggcacgtgccgctgcgccggatccacctcttcaccctggtgcagatcctctgcctggcggtgctctggatcctcaaatccacggtggctgccatcatcttcccggtcatgatcctgggcctcatcatcgttcgaaggcttctggatttcatcttttcccagcacgacctggcctggattgacaacatcctcccagagaaggaaaaaaaggagacagacaagaagaggaagagaaaaaaaggggcccacgaggactgtgatgaggagccccagttccctcctccctcggttataaagattcccatggaaagtgtccaatcagatccccaaaacggtatccactgcattgccagaaaaagatcttccagttggagttactcactctgattcttccttcagtgacacagaacttgaccgaagcatcaccttgcacttcaaaatatcctgtccagcttcacctgctttcagctactcacggaacccagtgttcatggtgccacaggtgaagatagagatggagtcagactatgacttcacagacatggataaataccgaagagaaactgacagtgagaccaccctctaggatgaagcagcttctcccagatgggagatggagagcctggcttagtcttcactgggagggtcttaacttctctgtgcctgtttccttctttatcaaacagagggagtccgtctgcctatagaaaactggagatctattgatgaaaagtattgcttagatgcaaagctctcccctttgtagtaattaaaatacctaaagctaaatattatattttattttaaaatgcagttcagcatagaaattctaacatttctttggaaataaaaaaatgcttgtttccccaaaccatagctaagataaaggggcaatagtcaattcatatttaaaacaaatatcaatttaaaattgtttaaaggttagatttaaatatagatgttctcaaacaaacttgtaatatacttttatgtcactagaccatctttggaatatttggcaattctgcatattaagaaatgctgaaaaggtcctatcttttctccctgtcacatccaatttcctaagggttatatgaaaagtttgaaccagccgggcacagtggcacacgcctgtaatcctagcactttgggaggccgaggcaggtgaattgcctgagctcaggagttcgagaccagcctaggcaacacggtgaaaccccgtctctactaaactacaaaaaattagccgggtgtggtggcatgcacctgtagtcccagctattcgggaggctgaggcaggagaatcgcttgaacccaggaggcagaagttgcagtgagctgagatggcaccactgcactccagcctaggcaacagagtgagactccgtatccaaacaaaaaaaaagtttgaaccatctgcattatgggccttgctccagaagtgtgactggggctttcccagattgaaaagccagttccaaaactctgttaatgaaagaaccaatgcatctgagtggataaatgtttctaaaataaaatagttcttgttaaagtgaaatttgaaaccacatgttaaatcaaaatgatcctttaaattagtatcactggtttttcatacctggaatcacatttcatgatacatttgggtgggtcctccctgcaaattttcaatgtttattcccaaagtcaaactcccattcatgtgaacaatacaggttagacagaggtaaggtcacattttacattacaactttgcaatattaatcaacctagtactttaaaggaatgattgaaaactatttgggaagataaaaaccagtttcaatgaagcaaacctattcctcatgaaacttaagatcagtcattttatcttcaatccacatttaatgaacaccaaccatgttgatttaatgcctactatgaccctgacagccacagtgcatctgacacttactttctccaaaacaactatgatttaaaccttgagtaaatcacttgaaccttgaggttagagttactatatttgctcaagatgacaaatgcaggtgctttcttttttaaagaaaaatgacactagatcattaacaccttgagtataggacaggtaattgcctctgtaattcccagcgtctagtgtagtgcctggtccatagaaagctctcaataagtgtttgattacatttaatctcagagctcccttccaagggatactgccaagaggtaaagctccaaacctctactcttactgagagcagaatttcttagaatttccagaaccatctcctatgcttaagtataaattcttgtcagacacagtggctcacacctgtaatcccgctacttgggaggcagaggtggggggaatcagcagaggtcaggaggtcaagaccagcctgggcaacatagtgagacccatctctaaacaaatgtttaaaaattagctaggcatgctggcacacacctgtagtcccagccatttcagaggctgatgcaggaggatcgtttaagtccaggagttcaaggctgcagtgagctataatcatgccactgcactccagccagggagacagctggaatccatgtcttataaacaataataattaatttttaaaaaaagtatttatcatccacaccaatcctggggaagctaacaatccacccttaacacatttcagttttaaaacctggctgatctggaatagaactttgtccaaattaaattgtagaaatgctatggattcaagagtaaacctgcttgattaatcaaacaagctggaaaactactgttaatttctttgttgtaaattgatcactgtaattttaccttacatgtcatttatattttgtatatacatgaacattttaatttccatagcttttaacaggttgacataatacttctccatgcagtaagtcagtcattttttccacttgtaactgtaattcaataaaatttaatcctgtctggtc

SEQ ID NO: 235194 - DNA, 6348 bp, Artificial Sequence
  derived and/or modified sequence
accctaaaggaattggagtcagggcccaggagccacaggccactgcactggggcatcccaggatttggaattcagctgtgagctcatgagctgatggatgtttccaggagtaccctgaagaccacccaggtgggagtgtaagataaccttccagataaagagttgctgctaccaaaagagtgctgacaccatcacagtatgttcccttctcaaccctggacatggttcagaaacagctaaagcagacaagaatctggggcagccaatattgtaccacctgccaaagcttggcacaaacaatctggaagccaaaaattgcacatactgtggaacagagcaagtggttctggcctccctgggatttggatcctggtttccagagctaagaacacaaagtcatgaaggtgaaggaggagaaggctggggtaggaaagctggaccacactaaccacaggaggagatttccggatcagaaagaatgccctcctatccacattgggcttccagtacccacttaccctcaaagaaaaactgaccagaagggacatctttcaggcctgcaaaaagtccactggggcctgcggccagaccagccacagcaggaactgactggcccagggagtggggcaagcagccaggacagcagcatggatcttatcagcaggactcggtccccagctgctgagcagctccaggacatcctgggggaggaagatgaggctcccaaccccaccctctttacagagatggatactctgcagcatgacggagaccagatggagtggaaggagtcagccaggtggataaagtttgaagaaaaggtagaggaaggcggcgaacgctggagcaagccccacgtgtccacactatccctgcacagcctcttcgagctccgtacctgcctgcagacggggacggtgctgctggatttggacagtggctccttaccacagatcatagatgatgtcattgagaagcagattgaggatggtctcctgcggccagagctccgggagagggtcagttacgtcctcctgaggaggcaccgccaccaaaccaagaagcccatccaccgctccttagctgacattgggaagtcagtctccaccacaaatcgcagtcctgcccggagccctggtgctggcccgagtctacaccactccacggaagacctgcggatgcggcagagtgcaaattacggacgtctgtgtcatgcccagagcagaagcatgaatgacatttctctcaccccaaacacagaccagcggaaaaacaaattcatgaagaagatccccaaggactcagaagcgtccaacgtgctcgtgggcgaggtggacttcctagaccagccattcatcgcgttcgtgcgcctcatccagtcggccatgctgggaggagtgaccgaggtgcctgtccccaccagatttctgtttatactactgggaccttctgggagagcaaaatcctacaatgaaattggccgtgccattgcaaccctcatggtagatgatctcttcagtgacgtggcctacaaagcccgcaatcgggaagatctgatcgcaggaattgatgaatttctggatgaggtcatcgtccttcctcctggagaatgggacccaaatatccggattgagccccccaagaaggtgccctctgctgacaagaggaaatctgtgttctccctagcagagctgggccagatgaatggctctgtgggaggaggcggcggagctcctggaggaggcaatggaggtggtggtggtggtggcagtggcggcggggctggcagtggcggggccggcggaacaagcagcggggatgatggagagatgccagccatgcatgaaatcggggaggaacttatctggacaggaaggttcttcggtggcctgtgtctggatatcaagaggaagttgccctggttcccaagtgacttctatgatggcttccacattcagtccatctctgccatcctattcatctacctcggctgtatcaccaacgcgatcacctttggtgggcttctgggggatgccaccgacaattatcagggagtgatggagagcttcctgggcactgccatggctggctccttgttctgcctcttctcgggacagcctctcatcattctcagcagcacggggcccatcctcatctttgagaagctcctcttcgacttcagcaaaggcaatggcctggactacatggagttccgcctctggattggcctacactcagctgtccagtgccttatcctagtggccacagatgccagctttatcatcaaatatatcacccgcttcaccgaggagggcttctccacccttatcagcttcatcttcatctacgatgccatcaagaagatgatcggtgccttcaagtactaccctatcaatatggacttcaagccaaacttcatcactacctacaagtgcgagtgtgtcgcccctgacacagtgaatacaaccgtgttcaatgcttcagccccattggcaccagacaccaacgcttctctgtacaacctccttaacctcacagcgttggactggtccctgctgagcaagaaggagtgtctgagctacggcgggcgcctgcttgggaattcctgcaagtttatcccagacctggcgctcatgtccttcatccttttctttgggacatactccatgaccctgaccctgaagaagttcaaattcagccgctattttcctaccaaggtccgggccctggtggctgacttttccattgttttctccatcctgatgttctgtggaatcgatgcctgttttggcctagaaactcccaagctgcatgtgcccagtgtcatcaagccaacgcggcctgaccgaggctggttcgtggccccctttgggaagaacccgtggtgggtatacccagcaagcatcctgcccgccctgctggtgaccatcctgatcttcatggaccagcagatcactgccgtcattgtcaaccggaaggagaacaaactgaagaaggctgccggctaccatctggacctgttctgggtgggcatcctcatggctttgtgctcctttatggggctcccctggtacgtggctgccacggtcatctccatcgcccacatcgacagcctcaagatggagacagagaccagtgcccctggggagcagccccagtttctgggagtcagggaacagagagtaaccggcatcatcgtcttcatcctgacgggaatctctgtcttcctggctcccatcctaaagtgtatccccctgccggtgctgtacggagtcttcctctacatgggcgtggcctccctgaatggcatccagttctgggaacgctgcaagctcttcctgatgccagccaagcaccagccggaccatgccttcctgcggcacgtgccgctgcgccggatccacctcttcaccctggtgcagatcctctgcctggcggtgctctggatcctcaaatccacggtggctgccatcatcttcccggtcatgatcctgggcctcatcatcgttcgaaggcttctggatttcatcttttcccagcacgacctggcctggattgacaacatcctcccagagaaggaaaaaaaggagacagacaagaagaggaagagaaaaaaaggggcccacgaggactgtgatgaggagccccagttccctcctccctcggttataaagattcccatggaaagtgtccaatcagatccccaaaacggtatccactgcattgccagaaaaagatcttccagttggagttactcactctgattcttccttcagtgacacagaacttgaccgaagcatcaccttgcacttcaaaatatcctgtccagcttcacctgctttcagctactcacggaacccagtgttcatggtgccacaggtgaagatagagatggagtcagactatgacttcacagacatggataaataccgaagagaaactgacagtgagaccaccctctaggatgaagcagcttctcccagatgggagatggagagcctggcttagtcttcactgggagggtcttaacttctctgtgcctgtttccttctttatcaaacagagggagtccgtctgcctatagaaaactggagatctattgatgaaaagtattgcttagatgcaaagctctcccctttgtagtaattaaaatacctaaagctaaatattatattttattttaaaatgcagttcagcatagaaattctaacatttctttggaaataaaaaaatgcttgtttccccaaaccatagctaagataaaggggcaatagtcaattcatatttaaaacaaatatcaatttaaaattgtttaaaggttagatttaaatatagatgttctcaaacaaacttgtaatatacttttatgtcactagaccatctttggaatatttggcaattctgcatattaagaaatgctgaaaaggtcctatcttttctccctgtcacatccaatttcctaagggttatatgaaaagtttgaaccagccgggcacagtggcacacgcctgtaatcctagcactttgggaggccgaggcaggtgaattgcctgagctcaggagttcgagaccagcctaggcaacacggtgaaaccccgtctctactaaactacaaaaaattagccgggtgtggtggcatgcacctgtagtcccagctattcgggaggctgaggcaggagaatcgcttgaacccaggaggcagaagttgcagtgagctgagatggcaccactgcactccagcctaggcaacagagtgagactccgtatccaaacaaaaaaaaagtttgaaccatctgcattatgggccttgctccagaagtgtgactggggctttcccagattgaaaagccagttccaaaactctgttaatgaaagaaccaatgcatctgagtggataaatgtttctaaaataaaatagttcttgttaaagtgaaatttgaaaccacatgttaaatcaaaatgatcctttaaattagtatcactggtttttcatacctggaatcacatttcatgatacatttgggtgggtcctccctgcaaattttcaatgtttattcccaaagtcaaactcccattcatgtgaacaatacaggttagacagaggtaaggtcacattttacattacaactttgcaatattaatcaacctagtactttaaaggaatgattgaaaactatttgggaagataaaaaccagtttcaatgaagcaaacctattcctcatgaaacttaagatcagtcattttatcttcaatccacatttaatgaacaccaaccatgttgatttaatgcctactatgaccctgacagccacagtgcatctgacacttactttctccaaaacaactatgatttaaaccttgagtaaatcacttgaaccttgaggttagagttactatatttgctcaagatgacaaatgcaggtgctttcttttttaaagaaaaatgacactagatcattaacaccttgagtataggacaggtaattgcctctgtaattcccagcgtctagtgtagtgcctggtccatagaaagctctcaataagtgtttgattacatttaatctcagagctcccttccaagggatactgccaagaggtaaagctccaaacctctactcttactgagagcagaatttcttagaatttccagaaccatctcctatgcttaagtataaattcttgtcagacacagtggctcacacctgtaatcccgctacttgggaggcagaggtggggggaatcagcagaggtcaggaggtcaagaccagcctgggcaacatagtgagacccatctctaaacaaatgtttaaaaattagctaggcatgctggcacacacctgtagtcccagccatttcagaggctgatgcaggaggatcgtttaagtccaggagttcaaggctgcagtgagctataatcatgccactgcactccagccagggagacagctggaatccatgtcttataaacaataataattaatttttaaaaaaagtatttatcatccacaccaatcctggggaagctaacaatccacccttaacacatttcagttttaaaacctggctgatctggaatagaactttgtccaaattaaattgtagaaatgctatggattcaagagtaaacctgcttgattaatcaaacaagctggaaaactactgttaatttctttgttgtaaattgatcactgtaattttaccttacatgtcatttatattttgtatatacatgaacattttaatttccatagcttttaacaggttgacataatacttctccatgcagtaagtcagtcattttttccacttgtaactgtaattcaataaaatttaatcctgtctggtca

SEQ ID NO: 235195 - DNA, 727 bp, Artificial Sequence
  derived and/or modified sequence
aaggtccaccctaaaggaattggagtcagggcccaggagccacaggccactgcactggggcatcccaggatttggaattcagctgtgagctcatgagctgatggatgtttccaggagtaccctgaagaccacccaggtgggagtgtaagataaccttccagataaagagttgctgctaccaaaagagtgctgacaccatcacagtatgttcccttctcaaccctggacatggttcagaaacagctaaagcagacaagaatctggggcagccaatattgtaccacctgccaaagcttggcacaaacaatctggaagccaaaaattgcacatactgtgtcatgaaggtgaaggaggagaaggctggggtaggaaagctggaccacactaaccacaggaggagatttccggatcagaaagaatgccctcctatccacattgggcttccagtacccacttaccctcaaagaaaaactgaccagaagggacatctttcaggcctgcaaaaagtccactggggcctgcggccagaccagccacagcaggaactgactggcccagggagtggggcaagcagccaggacagcagcatggatcttatcagcaggactcggtccccagctgctgagcagctccaggacatcctgggggaggaagatgaggctcccaaccccaccctctttacagagatggatactctgcagcatgacggagaccagatggagtggaa

SEQ ID NO: 235196 - DNA, 552 bp, Artificial Sequence
  derived and/or modified sequence
atactgttcagcctggaaaccacagagagcccttcttgccacccaacaggaacagagcaagtggttctggcctccctgggatttggatcctggtttccagagctaagaacacaaagtcatgaaggtgaaggaggagaaggctggggtaggaaagctggaccacactaaccacaggaggagatttccggatcagaaagaatgccctcctatccacattgggcttccagtacccacttaccctcaaagaaaaactgaccagaagggacatctttcaggcctgcaaaaagtccactggggcctgcggccagaccagccacagcaggaactgactggcccagggagtggggcaagcagccaggacagcagcatggatcttatcagcaggactcggtccccagctgctgagcagctccaggacatcctgggggaggaagatgaggctcccaaccccaccctctttacagagatggatactctgcagcatgacggagaccagatggagtggaaggagtcagccaggtggataaagtttgaagaaaaggtagaggaagg

SEQ ID NO: 235197 - DNA, 1110 bp, Artificial Sequence
  derived and/or modified sequence
atgagcgagctgaaggactgccccctgcagttccacgacttcaagagcgtggaccacctgaaggtgtgccccagatacaccgccgtgctggccagaagcgaggacgacggcatcggcatcgaggagctggacaccctgcagctggagctggagaccctgctgagcagcgccagcagaagactgagagtgctggaggccgagacccagatcctgaccgactggcaggacaagaagggcgacagaagattcctgaagctgggcagagaccacgagctgggcgccccccccaagcacggcaagcccaagaagcagaagctggagggcaaggccggccacggccccggccccggccccggcagacccaagagcaagaacctgcagcccaagatccaggagtacgagttcaccgacgaccccatcgacgtgcccagaatccccaagaacgacgcccccaacagattctgggccagcgtggagccctactgcgccgacatcaccagcgaggaggtgagaaccctggaggagctgctgaagccccccgaggacgaggccgagcactacaagatcccccccctgggcaagcactacagccagagatgggcccaggaggacctgctggaggagcagaaggacggcgccagagccgccgccgtggccgacaagaagaagggcctgatgggccccctgaccgagctggacaccaaggacgtggacgccctgctgaagaagagcgaggcccagcacgagcagcccgaggacggctgccccttcggcgccctgacccagagactgctgcaggccctggtggaggagaacatcatcagccccatggaggacagccccatccccgacatgagcggcaaggagagcggcgccgacggcgccagcaccagccccagaaaccagaacaagcccttcagcgtgccccacaccaagagcctggagagcagaatcaaggaggagctgatcgcccagggcctgctggagagcgaggacagacccgccgaggacagcgaggacgaggtgctggccgagctgagaaagagacaggccgagctgaaggccctgagcgcccacaacagaaccaagaagcacgacctgctgagatag

SEQ ID NO: 235198 - DNA, 288 bp, Artificial Sequence
  derived and/or modified sequence
atgagcgagctgaaggactgccccctgcagttccacgacttcaagagcgtggaccacctgaaggtgtgccccagatacaccgccgtgctggccagaagcgaggacgacggcatcggcatcgaggagctggacaccctgcagctggagctggagaccctgctgagcagcgccagcagaagactgagagtgctggaggccgagacccagatcctgaccgactggcaggacaagaagggcgacagaagattcctgaagctgggcagagaccacgagctgggcgccccctag

SEQ ID NO: 235199 - DNA, 1110 bp, Artificial Sequence
  derived and/or modified sequence
atgtcagagctcaaggattgcccattgcagtttcacgattttaaaagcgtggaccatctcaaagtatgccccaggtacacagctgtgctggcaagatccgaggatgacggtattggaatcgaagagctagacactcttcagctggaactggaaacccttctttcgagtgcctcgaggcggctgcgcgttttggaagccgaaacccaaatcctgactgactggcaggacaagaaaggcgataggcgcttcctgaagttaggccgggatcatgaactaggggcccctccaaaacatggaaaacccaaaaaacagaaactggaagggaaggctggtcatgggcccggaccaggccctggtcgtccaaagtcaaaaaacctgcagcccaagatccaggaatacgagtttactgatgatcccatcgacgtgccacgcatccctaaaaacgacgcccccaaccggttttgggcctcagtggaaccctattgtgccgatatcacatcagaagaagtccgtacgctggaggagttgcttaaacctccagaggacgaggctgagcattacaagatcccaccattaggaaaacactattctcagcgctgggcgcaggaggacctgttagaggaacaaaaggatggcgccagggcagccgcagtggccgacaaaaagaaggggctgatgggacccctgaccgagctggacactaaagacgtggacgcacttttgaaaaagagcgaagcgcaacacgaacagcccgaggatgggtgccccttcggggcccttacccaacggcttttgcaagcactagtggaggaaaacatcatttctcctatggaagactccccgatacctgatatgtccggtaaggagtcaggcgccgatggggcctccactagcccaagaaaccaaaataaaccatttagcgtgccccacacaaaaagcttagaaagccgcatcaaagaggaacttatagcacaggggcttctagagtctgaggatcggccagccgaggattcagaagacgaagtgctagctgaactgcggaaaagacaagccgaactaaaagcactgtcagctcataatcgcacgaaaaaacacgacctgcttcgatag

SEQ ID NO: 235200 - DNA, 288 bp, Artificial Sequence
  derived and/or modified sequence
atgagcgaactgaaagactgtccacttcagtttcatgatttcaaatcggtggaccacctcaaggtatgccctcggtatacggccgtattagcacggagcgaagacgacggcattggtattgaagagctggacaccctacagctggaactggagacactgttgtccagtgcttccaggcgtcttcgcgtgctggaggccgagacacagatcctcacagattggcaggataagaagggcgatcgcagattcctaaaactgggaagagaccacgaactcggcgctccttag

SEQ ID NO: 235201 - DNA, 1110 bp, Artificial Sequence
  derived and/or modified sequence
atgtctgagctgaaggactgccccctgcagttccatgacttcaagtctgtggaccacctgaaggtgtgcccccgctacacagctgtgctggcccggagtgaagatgatggcatcggcatcgaggagctggacaccctgcagctggagctggagaccctgctgagcagcgccagccggcggctgcgggtgctggaggccgagacccagatcctgacagactggcaggacaagaagggggaccggcgcttcctgaagctgggccgggaccacgagctgggcgccccacccaagcacggcaagcccaagaagcagaagctggagggcaaggccggccacggccctggccctggccctggccggcccaagagcaagaacctgcagcccaagatccaggagtatgagttcacagatgaccccattgatgtgccccgcatccccaagaatgatgcccccaaccgcttctgggcctctgtggagccctactgtgccgacatcaccagcgaggaggtgaggaccctggaggagctgctgaagcccccagaagatgaggccgagcactacaagatcccccccctgggcaagcactacagccagcgctgggcccaggaggacctgctggaggagcagaaggatggagcccgggctgctgctgtggccgacaagaagaagggcctgatgggccccctgacagagctggacaccaaggatgtggatgccctgctgaagaagtctgaggcccagcacgagcagccagaagatggctgcccctttggagccctgacccagaggctgctgcaggccctggtggaggagaacatcatcagccccatggaggacagccccatcccagacatgtctgggaaggagagcggggctgatggagccagcaccagccccaggaaccagaacaagcccttctctgtgccccacaccaagagcctggagagccgcatcaaggaggagctgattgcccagggcctgctggagagtgaagatagacctgctgaggacagtgaagatgaggtgctggccgagctgaggaagaggcaggccgagctgaaggccctgagcgcccacaacagaaccaagaagcatgacctgctgaggtag

SEQ ID NO: 235202 - DNA, 288 bp, Artificial Sequence
  derived and/or modified sequence
atgtctgagctgaaggactgccccctgcagttccatgacttcaagtctgtggaccacctgaaggtgtgcccccgctacacagctgtgctggcccggagtgaagatgatggcatcggcatcgaggagctggacaccctgcagctggagctggagaccctgctgagcagcgccagccggcggctgcgggtgctggaggccgagacccagatcctgacagactggcaggacaagaagggggaccggcgcttcctgaagctgggccgggaccacgagctgggcgccccctag

SEQ ID NO: 235203 - DNA, 1110 bp, Artificial Sequence
  derived and/or modified sequence
atgagcgagctgaaggactgccccctgcagttccacgacttcaagtctgtggaccacttaaaagtctgcccccgttacacagccgtcctcgcacggtccgaagacgacggcatcgggattgaggagctcgacactttgcagcttgaacttgagacgttgctgtcctcagcctctcgacgcctgcgggttcttgaggcggagactcagatcctaaccgattggcaggacaaaaaaggggatcgccgatttctgaagctcggtcgtgatcacgaactaggggctcccccaaagcatggtaaaccgaagaagcagaagctagagggaaaagccggtcacggccccgggcctggccctggaagacctaaatccaaaaatctccagcccaagatacaggagtacgagttcactgacgatcctattgatgtgcctcggattcccaagaatgatgctcccaacagattttgggcctccgtcgagccctactgcgcggatattacatctgaagaggtgcgcacactggaggagctgctcaagccgcctgaagatgaggcagaacactacaagatcccgcccctcggaaaacactactctcagcggtgggcccaagaagatttactggaggaacagaaggatggggcgagggcagctgctgtcgccgataagaagaaaggtctgatggggccgctgacagagctagacaccaaggacgtggacgcactgctcaaaaaatccgaggcgcaacatgagcaaccagaggacggatgtccgtttggcgctctgactcaacgtttgctacaagcattggtagaggagaatattatctcacccatggaggattcccctatccctgacatgtctggtaaagaatctggtgccgatggtgcaagtaccagtccccggaaccagaacaagccgttctctgtcccccatactaagtcactcgagtcaaggattaaggaggagctcatagcccagggcctactggaatcggaggacagaccagcggaggattcagaggacgaggttctggcagagctacgaaagcgccaggccgaactcaaggctctgtctgcacacaaccgcacaaagaagcacgacctgttaagatag

SEQ ID NO: 235204 - DNA, 288 bp, Artificial Sequence
  derived and/or modified sequence
atgagcgagctgaaggactgccccctgcagttccacgacttcaagagcgtggatcacctgaaagtctgcccacgctacacagcagtcctggccagaagtgaggacgacggcattggaatcgaggaacttgataccttacaactagagctcgagacacttctgagctcagcaagccgccgcctccgagttctggaggctgagacacagatcttaacggattggcaggataagaaaggcgatcggaggtttttaaaacttggacgagatcacgaactcggtgccccgtag

SEQ ID NO: 235205 - DNA, 1110 bp, Artificial Sequence
  derived and/or modified sequence
atgtctgagctcaaggactgcccactgcagttccacgacttcaagtctgtggatcacctaaaagtgtgccctcgctatacggccgtcctggcccgttccgaggatgatggaattgggatagaagagctagacactctccagcttgagttagagactttgctctccagtgcttcacgtcgcctgcgtgttcttgaggccgagactcagatcctgaccgattggcaggataaaaagggagacaggcgattcctgaagctcggccgtgaccacgaactaggggcaccaccaaagcatggcaagccaaagaagcagaaactggagggcaaagcgggacatggacctggaccagggccaggacgccctaagtcgaaaaatctccagccgaagattcaagagtacgaatttacagacgaccctatcgacgtccccaggatccctaaaaatgacgcacccaatcgcttctgggcctctgtggaaccttattgcgcggatattacgtcagaggaagtccggactctggaggaactgctgaaaccccctgaggacgaagccgagcactacaaaatacctcctcttgggaagcactactcccagcgctgggcccaagaggacctactagaggaacagaaggacggggctcgcgctgcagcagtggcagacaagaagaaaggcttgatgggccctctgaccgaactcgacactaaggacgttgatgctttattgaaaaagagtgaggcccagcacgagcagccagaagacggatgtccctttggagcgctgacacagcgactgcttcaagctctagtggaggaaaatatcatttctcctatggaagatagccctatccccgacatgtccggcaaagagagcggagcagacggcgcatccacatcccctagaaatcagaataaaccattttcagtgccgcataccaaaagcctggagtctcgtatcaaggaggaactgattgctcagggtctgctagagagcgaagatcggcctgccgaagattccgaggacgaagtgcttgccgagctgaggaagcgccaggcagaactcaaagctctgagcgcacataaccgtacaaaaaagcacgatctcctaagatag

SEQ ID NO: 235206 - DNA, 288 bp, Artificial Sequence
  derived and/or modified sequence
atgtctgaactgaaagattgtcctctgcagttccacgacttcaagagcgttgatcacttgaaagtgtgtcctcgatacacagccgtgctggctagatctgaggacgatggtatcggtatcgaggagcttgacacgctccagctggagctggagacactcttgtcatctgcaagccggcgtttgagagtcctcgaggctgagacccaaatcctcaccgattggcaggataaaaagggcgacaggcggtttctgaaattggggagggaccatgagttgggggcaccttag

SEQ ID NO: 235207 - DNA, 2554 bp, Artificial Sequence
  derived and/or modified sequence
gtacccccatcctttctctcgcccctcctacccgcagctcctggcgctcggcggggctaactgcagcgcggagatctcggccgccaagctccgcctcccgccccgggctgtgccccggggctcgcctgaggccgaccacccgcaccccacctctagcggctttgctcgaggcccaccttcttcccacccccggcaaactccagtaggctcgccctcgctgactccccgcccccgcgtcaactgcaaggggcccgcccatagccagttccggggcggttgctcacatcgaccggaactccccgccccctcccgcggcccctggggccgtaggaggccgcagcgaggaggtagagggggcgggggtcgcactagggtgtccctagagaacgaggactctgaaggcgggacatttgggcgacccccgggcggggccagccattaaacagtcccacttctgtgccagacactgaactgggctcttgacgggcatcatctcttaatcctcagaacatcccagggagctccacaggatccccatatcctgggccatgagtgagttgaaagactgccccttgcagttccacgacttcaagtctgtggatcacctgaaggtctgtccccgctacacggcagtgctggcacgctctgaggatgatggcatcggcatcgaggagctggacaccctgcagctggagctggagaccctgctgtcttctgccagccggcgcctgcgtgtgcttgaggccgaaacccagatcctcaccgactggcaggataagaaaggtgacagacgattcctgaagctgggtcgagaccatgaacttggagctccccccaaacatgggaagcccaagaagcagaaactggaagggaaggcaggacatgggccgggccctggcccaggacggcccaaatccaaaaaccttcagcccaagatccaggaatatgaattcactgatgaccctatcgacgtgccacggatccccaaaaatgatgcccccaacaggttctgggcttcagtggagccctactgtgctgacatcaccagcgaggaggtccgcacacttgaggagttactgaagcccccagaagatgaggctgagcattacaagatcccacccctggggaagcactactcccagcgctgggcccaggaggacctgctggaggagcagaaggatggggcccgggcagcggctgtggctgacaagaagaaaggcctcatggggccactgaccgaactggacactaaagatgtggatgccctgctgaagaagtctgaggcccagcatgaacagccggaagatggatgcccctttggtgccctgacgcagcgcctcctgcaggccctggtggaggaaaatattatttcccctatggaggattctcctattcctgacatgtctgggaaagaatcaggggctgacggggcaagcacctcccctcgcaatcagaacaagcccttcagtgtgccgcatactaagtccctggagagccgcatcaaggaggagctaattgcccagggccttttggagtctgaggaccgccccgcagaggactccgaggatgaggtccttgctgagcttcgcaaacggcaggctgagctgaaggcacttagtgcccacaaccgcaccaagaagcacgacctgctgaggtgagcgttagcaggatgcacagtcccgggggtggccttggaggctgtggccacggctagtcacctttcaggggttttacaacaggctttccaatcctggctggcctctaaatcacctggagagcctcgaaaaaaacagcagtggccagtccaccgggtatgtcccaaacaaattctgattccacagagtggggctcaggcatctgtgactgaccgattgatttgatttgtttttgttttgtttttttttgagagggagtctcgcactgtcacccaggctggagtgcagtggcatgatctcggctcactgcaagctccgcctcccaggttcatgccattctcctgcctcagcctcctgagtagctgatactacaggcacccaccaccacgcccagctaatttttttgtatttttagtagagacggggtttcaccgtgttagccaggatggtctcgatctcctgacctcgtgatccacccgcctcggcctcccaaagtgccgggattacaggcgtgagccactgcgcctggcctagtttggttttttaattatggtaaaggcataatataaaatgtatctccatgggaggctgaggcaggagaatcagttgaacctgggaggcggaggttgcagtgagctgagactgcaccattgcattccagcctgggcaacaagagtgaaactgcatctcaaaaaaaaaaagaaaaaaaatttacgcttcttaaccatttttaagtgtacagtttagtagtgttacccatattcacattgttgtgtgatttattttttgtcttttcatgcttcttttctttttatccccaaagttttgttattaaaaatttgatacacacagaaaatctgaaagaatcatacaataaacatcagtatattctccaccta

SEQ ID NO: 235208 - DNA, 873 bp, Artificial Sequence
  derived and/or modified sequence
aattaggacaagccgaagcggacgagcccttcgtttcttccggttctgtacccccatcctttctctcgcccctcctacccgcagctcctggcgctcggcggggctaactgcagcgcggagatctcggccgccaagctccgcctcccgccccgggctgtgccccggggctcgcctgaggccgaccacccgcaccccacctctagcggctttgctcgaggcccaccttcttcccacccccggcaaactccagtaggctcgccctcgctgactccccgcccccgcgtcaactgcaaggggcccgcccatagccagttccggggcggttgctcacatcgaccggaactccccgccccctcccgcggcccctggggccgtaggaggccgcagcgaggaggtagagggggcgggggtcgcactagggtgtccctagagaacgaggactctgaaggcgggacatttgggcgacccccgggcggggccagccattaaacagtcccacttctgtgccagacactgaactgggctcttgacgggcatcatctcttaatcctcagaacatcccagggaggatccccatatcctgggccatgagtgagttgaaagactgccccttgcagttccacgacttcaagtctgtggatcacctgaaggtctgtccccgctacacggcagtgctggcacgctctgaggatgatggcatcggcatcgaggagctggacaccctgcagctggagctggagaccctgctgtcttctgccagccggcgcctgcgtgtgcttgaggccgaaacccagatcctcaccgactggcaggataagaaaggtgacagacgattcctgaagctgggtcgagaccatgaacttggagctcccc

SEQ ID NO: 235209 - protein, 119 aa, Artificial Sequence
  derived and/or modified sequence
MDKNIGEQLNKAYEAFRQACMDRDSAVKELQQKTENYEQRIREQQEQLSLQQTIIDKLKSQLLLVNSTQDNNYGCVPLLEDSETRKNNLTLDQPQDKVISGIAREKLPKVDIASAESSI

SEQ ID NO: 235210 - DNA, 360 bp, Artificial Sequence
  derived and/or modified sequence
atggacaagaacatcggcgagcagctgaacaaggcctacgaggccttcagacaggcctgcatggacagagacagcgccgtgaaggagctgcagcagaagaccgagaactacgagcagagaatcagagagcagcaggagcagctgagcctgcagcagaccatcatcgacaagctgaagagccagctgctgctggtgaacagcacccaggacaacaactacggctgcgtgcccctgctggaggacagcgagaccagaaagaacaacctgaccctggaccagccccaggacaaggtgatcagcggcatcgccagagagaagctgcccaaggtggacatcgccagcgccgagagcagcatctag

SEQ ID NO: 235211 - DNA, 318 bp, Artificial Sequence
  derived and/or modified sequence
atggacaagaacatcggcgagcagctgaacaaggcctacgaggccttcagacaggcctgcatggacagagacagcgccgtgaaggagctgcagcagaagaccgagaactacgagcagagaatcagagagcagcaggagcagctgagcctgcagcagaccatcatcgacaagctgaagagccagctgctgctggtgaacagcacccaggacaacaactacggctgcgtgcccctgctggaggacagcgagaccagaaagaacaacctgaccctggaccagccccaggacaaggtgatcagcggcatcgccagagagtag

SEQ ID NO: 235212 - DNA, 360 bp, Artificial Sequence
  derived and/or modified sequence
atggacaagaacataggggagcagcttaataaggcttatgaggctttcaggcaagcctgtatggatcgtgattcagccgttaaagaattacaacagaaaactgagaattacgagcagcggatacgagaacagcaggagcagctttctctccagcagaccattatagacaagctgaaatcccagctcctcctggtgaactctacgcaggacaataactatgggtgtgtgccactgcttgaagactccgagacccgcaaaaacaacttgacccttgaccagccccaagacaaagttatctccggtatcgccagagaaaaactgcccaaggtagacatcgcatccgccgagagctccatttag

SEQ ID NO: 235213 - DNA, 318 bp, Artificial Sequence
  derived and/or modified sequence
atggacaagaatattggtgaacagttgaataaggcctatgaggcctttcgccaggcctgtatggaccgggattccgctgtgaaagagttgcagcagaaaacagaaaactatgaacaaaggataagggaacagcaggagcagctcagccttcaacagactattatagacaagctgaagagtcaactgctgctggtgaattccacgcaggacaataattacggctgtgttccccttttggaagattccgagacaaggaaaaacaacctgacacttgatcagccgcaggacaaagttatttccggtatcgctcgtgagtag

SEQ ID NO: 235214 - DNA, 360 bp, Artificial Sequence
  derived and/or modified sequence
atggacaagaatataggcgagcaactgaataaagcctacgaggcgttcagacaggcttgtatggatcgtgacagcgctgtgaaagagctgcagcagaaaactgaaaactatgagcagagaataagggagcagcaagaacaactctctctgcagcagaccattattgataagctgaagtcccagctcctcctcgtgaacagtactcaggacaacaattacggttgcgtgcctctgcttgaggattcagagactcgcaaaaacaacttgacactggatcagccacaagataaagtgatctccggcatcgctagggaaaagttgccaaaagttgacatcgcaagtgccgaatcctctatttag

SEQ ID NO: 235215 - DNA, 360 bp, Artificial Sequence
  derived and/or modified sequence
atggacaagaacattggagagcagctgaacaaggcctatgaggccttccggcaggcctgcatggaccgggacagcgctgtgaaggagctgcagcagaagacagaaaattatgagcagaggatccgggagcagcaggagcagctgagcctgcagcagaccatcatcgacaagctgaagagccagctgctgctggtgaacagcacccaggacaacaactacggctgtgtgcccctgctggaggacagcgagaccaggaagaacaacctgaccctggaccagccccaggacaaggtgatcagcggcatcgcccgggagaagctgcccaaggtggacatcgccagcgctgagagcagcatctag

SEQ ID NO: 235216 - DNA, 318 bp, Artificial Sequence
  derived and/or modified sequence
atggacaagaacattggagagcagctgaacaaggcctatgaggccttccggcaggcctgcatggaccgggacagcgctgtgaaggagctgcagcagaagacagaaaattatgagcagaggatccgggagcagcaggagcagctgagcctgcagcagaccatcatcgacaagctgaagagccagctgctgctggtgaacagcacccaggacaacaactacggctgtgtgcccctgctggaggacagcgagaccaggaagaacaacctgaccctggaccagccccaggacaaggtgatcagcggcatcgcccgggagtag

SEQ ID NO: 235217 - DNA, 360 bp, Artificial Sequence
  derived and/or modified sequence
atggacaagaacatcggcgagcagctgaacaaggcctacgaggccttcagacaggcctgcatggatcgagacagcgctgtgaaagagctacaacagaagacggagaactacgagcaacggattcgcgagcagcaggagcagctctccttgcagcagactatcatagacaaattaaaaagtcagctcctgctcgtcaactcaacgcaggataataactacggctgtgtgcctctgctggaagacagtgagacaaggaagaataacttgacactggatcaaccacaagacaaagttatctccggcattgcaagggaaaagctgccaaaagtagacattgcttccgctgagagctccatctag

SEQ ID NO: 235218 - DNA, 318 bp, Artificial Sequence
  derived and/or modified sequence
atggacaagaacatcggcgagcagctgaacaaggcctacgaggcctttcgtcaagcctgtatggacagggattcagcagtcaaggaactgcagcagaagacagaaaactacgaacagagaatccgcgaacagcaggaacagctgtccctgcagcagaccattatcgacaaactgaagtcccagctcctcctcgttaattctacccaggataataactacggttgcgttcctctgttggaggactcagagacccgcaagaataacctgacattggaccagccacaagacaaggttatctcaggcattgccagggaatag

SEQ ID NO: 235219 - DNA, 360 bp, Artificial Sequence
  derived and/or modified sequence
atggacaagaacatcggcgagcagctgaacaaggcctacgaggccttccggcaggcctgcatggaccgtgactctgctgtcaaggaactgcagcaaaagaccgagaactacgagcagaggatccgagagcagcaggaacaactcagtcttcagcagacaataattgacaagctcaaaagccagctgctgctggtaaattccacccaagacaacaactatggttgtgtgccacttttggaggactctgagactcggaagaataacctgaccctggaccaaccgcaggataaggtgatttcaggtatcgctcgggagaaactgcctaaggtcgacatagcttccgccgagtccagcatttag

SEQ ID NO: 235220 - DNA, 360 bp, Artificial Sequence
  derived and/or modified sequence
atggacaaaaatattggcgagcagttgaacaaggcctatgaggcatttaggcaggcctgtatggaccgggattcggcagtgaaagaactccagcagaagacagaaaactatgagcagcggatcagagaacagcaggaacagctgtctcttcagcagaccataattgataagctgaagagccagctgctgctggttaatagtacccaggataataactatgggtgtgtcccgctgctcgaagactccgagaccaggaaaaacaacctaaccctggaccagccccaggacaaggttatttcaggcattgcaagagagaagctcccaaaagttgatatcgcaagtgccgaaagttccatctag

SEQ ID NO: 235221 - DNA, 318 bp, Artificial Sequence
  derived and/or modified sequence
atggataaaaacatcggtgaacagttaaacaaagcttacgaagccttccgtcaagcttgcatggatcgcgacagtgccgtgaaggaactacaacagaagactgaaaactatgagcagaggataagggagcagcaagaacagctctcactgcagcaaaccatcatagataaactgaaaagtcaactcctcctggtgaacagtacccaggataataattatggttgcgtgccccttctcgaggattctgagacacgcaaaaataatctgacactggaccaaccacaggacaaggtgatttccggcattgcccgagagtag

SEQ ID NO: 235222 - DNA, 360 bp, Artificial Sequence
  derived and/or modified sequence
atggacaagaatataggggagcagttgaacaaggcctacgaggctttcaggcaggcatgcatggaccgagattctgcggtcaaggagctccagcagaagaccgaaaattacgagcaaagaattcgcgaacagcaagaacagctgtccttacagcagactattattgacaagcttaagtcacagctattactggtcaattcaacccaggataataattatggttgtgtccctttgttagaggattccgaaacaagaaaaaataatctcacattagatcagccccaggacaaagtgataagtggcatagccagggaaaagttgccaaaagtggacatcgcatccgccgagagctcaatttag

SEQ ID NO: 235223 - protein, 340 aa, Artificial Sequence
  derived and/or modified sequence
MAMQMQLEANADTSVEEESFGPQPISRLEQCGINANDVKKLEEAGFHTVEAVAYAPKKELINIKGISEAKADKILTESRSVARLECNSVILVYCTLRLSGSSDSPASASRVVGTTGGIETGSITEMFGEFRTGKTQICHTLAVTCQLPIDRGGGEGKAMYIDTEGTFRPERLLAVAERYGLSGSDVLDNVAYARAFNTDHQTQLLYQASAMMVESRYALLIVDSATALYRTDYSGRGELSARQMHLARFLRMLLRLADEFGVAVVITNQVVAQVDGAAMFAADPKKPIGGNIIAHASTTRLYLRKGRGETRICKIYDSPCLPEAEAMFAINADGVGDAKD

SEQ ID NO: 235224 - protein, 100 aa, Artificial Sequence
  derived and/or modified sequence
MAMQMQLEANADTSVEEESFGPQPISRLEQCGINANDVKKLEEAGFHTVEAVAYAPKKELINIKGISEAKADKILVELRLDLSQKCLENSELGRPRSVIR

SEQ ID NO: 235225 - protein, 242 aa, Artificial Sequence
  derived and/or modified sequence
MAMQMQLEANADTSVEEESFGPQPISRLEQCGINANDVKKLEEAGFHTVEAVAYAPKKELINIKGISEAKADKILAVAERYGLSGSDVLDNVAYARAFNTDHQTQLLYQASAMMVESRYALLIVDSATALYRTDYSGRGELSARQMHLARFLRMLLRLADEFGVAVVITNQVVAQVDGAAMFAADPKKPIGGNIIAHASTTRLYLRKGRGETRICKIYDSPCLPEAEAMFAINADGVGDAKD

SEQ ID NO: 235226 - DNA, 1023 bp, Artificial Sequence
  derived and/or modified sequence
atggccatgcagatgcagctggaggccaacgccgacaccagcgtggaggaggagagcttcggcccccagcccatcagcagactggagcagtgcggcatcaacgccaacgacgtgaagaagctggaggaggccggcttccacaccgtggaggccgtggcctacgcccccaagaaggagctgatcaacatcaagggcatcagcgaggccaaggccgacaagatcctgaccgagagcagaagcgtggccagactggagtgcaacagcgtgatcctggtgtactgcaccctgagactgagcggcagcagcgacagccccgccagcgccagcagagtggtgggcaccaccggcggcatcgagaccggcagcatcaccgagatgttcggcgagttcagaaccggcaagacccagatctgccacaccctggccgtgacctgccagctgcccatcgacagaggcggcggcgagggcaaggccatgtacatcgacaccgagggcaccttcagacccgagagactgctggccgtggccgagagatacggcctgagcggcagcgacgtgctggacaacgtggcctacgccagagccttcaacaccgaccaccagacccagctgctgtaccaggccagcgccatgatggtggagagcagatacgccctgctgatcgtggacagcgccaccgccctgtacagaaccgactacagcggcagaggcgagctgagcgccagacagatgcacctggccagattcctgagaatgctgctgagactggccgacgagttcggcgtggccgtggtgatcaccaaccaggtggtggcccaggtggacggcgccgccatgttcgccgccgaccccaagaagcccatcggcggcaacatcatcgcccacgccagcaccaccagactgtacctgagaaagggcagaggcgagaccagaatctgcaagatctacgacagcccctgcctgcccgaggccgaggccatgttcgccatcaacgccgacggcgtgggcgacgccaaggactag

SEQ ID NO: 235227 - DNA, 1023 bp, Artificial Sequence
  derived and/or modified sequence
atggccatgcagatgcagctggaggcaaatgccgatacgagtgtcgaagaagaaagtttcggaccccagcccatcagccgccttgaacagtgcggaattaacgcgaacgacgttaaaaagctggaggaggcagggttccacactgttgaagccgtggcctacgctcccaagaaggagttgataaatatcaagggaataagcgaggccaaggcggataaaattctcacagagagccggtctgtggcacgtttggaatgtaacagcgtgatccttgtgtattgtaccctgcggctctccggttcatctgatagccctgcctccgccagtagagtggtcgggactactggtggtatcgaaaccggctctatcaccgaaatgttcggggaattccggacaggtaagacccagatttgtcatactttggccgtgacatgccaacttcccattgacagaggaggaggggagggcaaggcgatgtatatagataccgagggaacgtttaggccagaacgtttgttggccgtagccgaaagatatggactttccggaagcgacgtcctggataacgtagcctacgcgagagccttcaacacggaccaccaaactcagctgctgtaccaggcttcagctatgatggtggaaagccggtacgcactgttaatcgtggattccgccactgccctttatcgtaccgactattccggccggggagagcttagcgccaggcagatgcacctggcgaggttcctccggatgctacttcgcctggccgatgagtttggggttgctgtggtgatcacaaaccaggtcgtagctcaggtggatggtgccgccatgttcgctgccgatcccaaaaagccaatcggcggtaatattattgctcacgctagcaccactcgcctgtatctgagaaaagggaggggtgaaacccggatttgtaagatctatgatagtccgtgcttacccgaggccgaagctatgttcgccattaatgcagatggagtgggagatgccaaagactag

SEQ ID NO: 235228 - DNA, 1023 bp, Artificial Sequence
  derived and/or modified sequence
atggccatgcagatgcagttggaggccaatgccgatacttccgtggaggaagaaagctttggcccgcagccaatctctcggctcgagcagtgtggtatcaatgctaacgacgtgaaaaagctcgaagaggccggcttccataccgtggaggccgtagcatacgcccccaaaaaggagttgatcaatattaaggggatctcagaagccaaggcagacaaaatcctcaccgagagccgtagtgtcgccaggctggagtgcaattcagtgatccttgtttattgcacactgaggctgtcagggtcctcagactcccccgccagtgccagccgcgtcgtgggaactaccggtggaatcgaaacaggttccataaccgaaatgtttggagagtttagaacaggcaagacgcagatttgccacaccttggcagtcacatgtcaactgcccatcgaccgggggggcggcgagggcaaggccatgtatattgacacagagggaaccttccgtccggagagactgctggctgttgctgaaagatatggcctgtcagggtctgacgtgctggacaatgttgcatacgctcgcgcgttcaacacagaccaccaaacgcagctcctttaccaagcctccgccatgatggtggagagccgctacgcattactgattgtggattctgcaaccgccctttatagaacagactatagcggtcgcggtgagctgtccgctcgacaaatgcatctagcgaggtttctacgaatgcttctgaggttggcagatgaatttggagtcgccgtggtgattactaaccaggtggtcgcacaggtggacggagcagccatgttcgccgccgacccaaagaagccaatcggtggcaacataatcgcccacgcgagtacaactagactgtacttgagaaaggggagaggcgagacacgaatctgcaagatttacgacagcccctgcctacctgaggccgaggccatgttcgctatcaacgccgatggcgtgggcgacgccaaagattag

SEQ ID NO: 235229 - DNA, 1023 bp, Artificial Sequence
  derived and/or modified sequence
atggccatgcagatgcagctggaggccaatgctgacacctctgtggaggaggagagctttggcccccagcccatcagccggctggagcagtgtggcatcaatgccaatgatgtgaagaagctggaggaggccggcttccacacagtggaggccgtggcctatgcccccaagaaggagctgatcaacatcaagggcatcagcgaggccaaggctgacaagatcctgacagagagccgctctgtggcccggctggagtgcaacagcgtcatcctggtgtactgcaccctgcggctgagcggcagcagtgacagccctgccagcgccagccgggtggtgggcaccactggaggcatcgagaccggcagcatcacagagatgtttggagagttcagaacaggcaagacccagatctgccacaccctggccgtgacctgccagctgcccatcgaccggggcggcggggagggcaaggccatgtacatcgacacagagggcaccttccggcctgagcggctgctggccgtggccgagagatatggcctgagcggcagtgatgtgctggacaacgtggcctatgcccgggccttcaacacagaccaccagacccagctgctgtaccaggccagcgccatgatggtggagagccgctatgccctgctgattgtggacagcgccacagccctgtacagaacagactacagcggccgcggggagctgagcgcccggcagatgcacctggcccgcttcctgaggatgctgctgcggctggctgatgaatttggagtggccgtggtgatcaccaaccaggtggtggcccaggtggatggagctgccatgtttgctgctgaccccaagaagcccatcggcggcaacatcatcgcccacgccagcaccacccggctgtacctgaggaagggccgcggggagacccgcatctgcaagatctatgacagcccctgcctgcctgaggccgaggccatgtttgccatcaatgctgatggagtgggagatgccaaggactag

SEQ ID NO: 235230 - DNA, 1023 bp, Artificial Sequence
  derived and/or modified sequence
atggccatgcagatgcagctggaggccaacgccgacaccagcgtggaggaagagtcgtttgggcctcagccaatctccaggctcgaacagtgcggcattaatgctaatgacgtcaaaaagcttgaagaagcaggctttcataccgttgaggccgtcgcctatgcgccaaaaaaagaactgataaacatcaaaggaatttccgaggccaaggcagacaaaattctcacagagtccaggtcggttgcccggctcgagtgtaactctgtcatcctggtgtattgcacactgcgactgtccggaagctccgatagccccgcctccgcttctcgggtcgtgggcaccacaggtgggattgagacaggatcaatcaccgagatgttcggcgagtttagaaccggcaagacgcagatctgtcatacactcgctgtgacatgccaacttcccatagaccgcggggggggtgaggggaaggccatgtacattgacacagaaggaaccttccgtccagaacgcttgctggcagtcgcagagagatacggcctgtccgggagcgatgtgttggataacgtcgcttacgctagggccttcaatacagaccatcagactcagctcctgtaccaggcttccgccatgatggttgagtcaaggtacgccctccttatcgtcgactctgctactgccctttaccgcaccgattacagtggaagaggagagctctccgcccggcagatgcatttggctagattcctgagaatgctgctgagactcgcagacgagtttggagttgcagtcgtcattactaatcaggtcgtggctcaagtggatggggcggccatgttcgccgcggaccctaagaaacctataggcggcaacatcatcgctcatgcttctacgacacggctatatttacgaaagggccggggagagactagaatctgcaaaatttatgactctccatgtctccccgaggctgaagctatgtttgcaattaatgccgatggagttggggacgctaaggattag

SEQ ID NO: 235231 - DNA, 1023 bp, Artificial Sequence
  derived and/or modified sequence
atggccatgcagatgcagctggaggccaacgccgacaccagcgtggaagaggagtcttttgggccacagcccatttcccgactggagcagtgcggcatcaatgccaacgacgttaagaaactcgaggaagcgggattccacacggtggaggcggtagcttatgcccctaaaaaagagcttattaacatcaaagggatcagcgaggctaaagccgataaaatcctgaccgaatcccgctcagtcgctaggctggagtgtaacagcgttatattagtctactgcacgctaaggctgagcggctcctccgactcccccgcctccgcctcacgggtagtcggaaccacgggcggcatagaaactggatccatcacggaaatgtttggagagtttcgtacaggaaagacccagatctgtcacacactggcagttacctgtcagttaccaattgatcgcggtgggggagaggggaaggccatgtatatcgatacggaagggacatttagaccagaacgcttactggcggtcgcagagcggtacgggctgtcagggtccgacgtcctggacaatgtggcttacgcgcgcgcgttcaacacagaccaccagacccagctcctgtatcaggcttctgcaatgatggtggagtctagatacgccctcttaatcgtagattctgctacggctctgtatcggaccgattactcaggccggggagagcttagtgctcgacaaatgcacttggctaggtttctcaggatgctgctcaggctggccgacgagtttggagttgctgtggtgataacaaaccaggttgttgcgcaggtagacggcgccgctatgttcgcagcagatccaaagaagccgattggcggaaacataatcgcccatgcttccacaactagactgtatctgagaaagggcaggggcgaaactcggatttgtaaaatatatgatagcccttgcctgcccgaagctgaggcaatgttcgctatcaatgccgacggtgtcggcgacgccaaggactag

SEQ ID NO: 235232 - DNA, 1023 bp, Artificial Sequence
  derived and/or modified sequence
atggcaatgcagatgcagctggaagccaatgccgacacctctgtggaggaagaatctttcggccctcagcctatctctaggcttgaacaatgcgggatcaacgcaaacgacgtgaagaaactcgaggaagcagggttccataccgtggaggccgtcgcatacgcaccgaaaaaggaattgatcaacataaaaggtatcagcgaggcaaaggccgacaagatcctaacggaatcacggtccgttgcacgattggaatgcaacagcgtgatcctggtctactgcacactgcggctcagcggcagtagtgactcgcccgctagtgccagcagggtggttggaactactggaggcatcgagactgggtctatcactgagatgttcggagagttccgaactggcaagacacagatttgccacacacttgcagtgacatgccagttgcccatagatcggggtgggggagaaggcaaagccatgtacattgacacggagggaactttccgccctgagcgactcctcgctgtagcagagcgatacgggctcagtggctccgacgtcctggataacgttgcctatgcccgagccttcaataccgatcaccagacgcagctcttgtaccaggcctcagctatgatggtcgagtcgcggtatgcacttctcattgtggattctgcaacagcactttatcggaccgattactctggtcggggtgagctatccgccaggcaaatgcacctggcgaggtttttacgcatgctgctgaggctcgcggatgaatttggtgtagccgtggtgatcaccaaccaagtcgtggcgcaggtcgatggggctgcaatgttcgccgcagaccctaagaagccaatcggcggaaacattatagcacatgctagcactacgagattgtaccttcgcaagggcagaggcgaaactcgcatctgcaaaatttacgatagtccttgtttgcctgaggccgaggctatgttcgcgatcaacgctgacggagttggcgatgccaaggattag

SEQ ID NO: 235233 - DNA, 1023 bp, Artificial Sequence
  derived and/or modified sequence
atggccatgcagatgcagctggaggccaacgcagacacctcagttgaagaggagagcttcggcccacagccaatctcccgactggagcagtgtggaattaacgccaatgacgtcaaaaagctcgaggaggccggtttccatactgtggaagcagtcgcatacgccccaaagaaagagttgatcaatattaaggggatctccgaagcgaaagccgacaaaatactcaccgaatcgagaagtgtcgctagactggagtgcaactccgttatcctggtctattgcactctacgtctaagcggcagctcagactctccggcaagcgcatcccgcgtggtaggtacgacaggcggaatcgaaaccggctcgattactgagatgtttggtgagtttaggaccggcaagactcagatctgccacaccctcgctgtcacatgtcaactgccaatcgatcgaggcggtggcgaaggcaaggcaatgtacatcgatacggagggaacatttcggcctgagcgcctcttagctgtggcagaaaggtacggtctttcaggctctgatgtgctggacaacgtggcttatgcacgcgcttttaacactgatcaccaaacacagttattgtatcaggcaagcgcaatgatggtagaatcacgctatgcccttttgattgtggactccgctaccgccctgtaccgcactgattattccggcaggggcgaactctcagcgaggcagatgcatctcgcacgcttcctgagaatgctgctgcgcctggctgacgaatttggtgtggccgtcgtgataacaaaccaggtggttgcccaggtcgacggcgcagctatgttcgctgcggaccccaagaagcccatcggaggcaatatcattgcgcacgcctccacgacccgactctacctgagaaaaggaagaggtgagacgcggatctgcaagatctacgattctccctgcctgccggaggccgaggctatgttcgctattaatgctgatggagtgggcgacgccaaggactag

SEQ ID NO: 235234 - DNA, 1588 bp, Artificial Sequence
  derived and/or modified sequence
aattctgaaagccgctggcggaccgcgcgcagcggccagagaccgagccctaaggagagtgcggcgcttcccgaggcgtgcagctgggaactgcaactcatctgggttgtgcgcagaaggctggggcaagcgagtagagaagtggagctaatggcaatgcagatgcagcttgaagcaaatgcagatacttcagtggaagaagaaagctttggcccacaacccatttcacggttagagcagtgtggcataaatgccaacgatgtgaagaaattggaagaagctggattccatactgtggaggctgttgcctatgcgccaaagaaggagctaataaatattaagggaattagtgaagccaaagctgataaaattctgacggagtctcgctctgttgccaggctggagtgcaatagcgtgatcttggtctactgcaccctccgcctctcaggttcaagtgattctcctgcctcagcctcccgagtagttgggactacaggtggaattgagactggatctatcacagaaatgtttggagaattccgaactgggaagacccagatctgtcatacgctagctgtcacctgccagcttcccattgaccggggtggaggtgaaggaaaggccatgtacattgacactgagggtacctttaggccagaacggctgctggcagtggctgagaggtatggtctctctggcagtgatgtcctggataatgtagcatatgctcgagcgttcaacacagaccaccagacccagctcctttatcaagcatcagccatgatggtagaatctaggtatgcactgcttattgtagacagtgccaccgccctttacagaacagactactcgggtcgaggtgagctttcagccaggcagatgcacttggccaggtttctgcggatgcttctgcgactcgctgatgagtttggtgtagcagtggtaatcactaatcaggtggtagctcaagtggatggagcagcgatgtttgctgctgatcccaaaaaacctattggaggaaatatcatcgcccatgcatcaacaaccagattgtatctgaggaaaggaagaggggaaaccagaatctgcaaaatctacgactctccctgtcttcctgaagctgaagctatgttcgccattaatgcagatggagtgggagatgccaaagactgaatcattgggtttttcctctgttaaaaaccttaagtgctgcagcctaatgagagtgcactgctccctggggttctctacaggcctcttcctgttgtgactgccaggataaagcttccgggaaaacagctattatatcagcttttctgatggtataaacaggagacaggtcagtagtcacaaactgatctaaaatgtttattccttctgtagtgtattaatctctgtgtgttttctttggttttggaggaggggtatgaagtatctttgacatggtgccttaggaatgacttgggtttaacaagctgtctactggacaatcttatgtttccaagagaactaaagctggagagacctgacccttctctcacttctaaattaatggtaaaataaaatgcctcagctatgtagcaaaggg

SEQ ID NO: 235235 - DNA, 1515 bp, Artificial Sequence
  derived and/or modified sequence
aattctgaaagccgctggcggaccgcgcgcagcggccagagaccgagccctaaggagagtgcggcgcttcccgaggcgtgcagctgggaactgcaactcatctgggttgtgcgcagaaggctggggcaagcgagtagagaagtggagcgtaagccaggggcgttgggggccgtgcgggtcgggcgcgtgccacgcccgcggggtgaagtcggagcgcggggcctgctggagagaggagcgctgcggaccgagtaatggcaatgcagatgcagcttgaagcaaatgcagatacttcagtggaagaagaaagctttggcccacaacccatttcacggttagagcagtgtggcataaatgccaacgatgtgaagaaattggaagaagctggattccatactgtggaggctgttgcctatgcgccaaagaaggagctaataaatattaagggaattagtgaagccaaagctgataaaattctgacggagtctcgctctgttgccaggctggagtgcaatagcgtgatcttggtctactgcaccctccgcctctcaggttcaagtgattctcctgcctcagcctcccgagtagttgggactacaggtggaattgagactggatctatcacagaaatgtttggagaattccgaactgggaagacccagatctgtcatacgctagctgtcacctgccagcttcccattgaccggggtggaggtgaaggaaaggccatgtacattgacactgagggtacctttaggccagaacggctgctggcagtggctgagaggtatggtctctctggcagtgatgtcctggataatgtagcatatgctcgagcgttcaacacagaccaccagacccagctcctttatcaagcatcagccatgatggtagaatctaggtatgcactgcttattgtagacagtgccaccgccctttacagaacagactactcgggtcgaggtgagctttcagccaggcagatgcacttggccaggtttctgcggatgcttctgcgactcgctgatgagtttggtgtagcagtggtaatcactaatcaggtggtagctcaagtggatggagcagcgatgtttgctgctgatcccaaaaaacctattggaggaaatatcatcgcccatgcatcaacaaccagattgtatctgaggaaaggaagaggggaaaccagaatctgcaaaatctacgactctccctgtcttcctgaagctgaagctatgttcgccattaatgcagatggagtgggagatgccaaagactgaatcattgggtttttcctctgttaaaaaccttaagtgctgcagcctaatgagagtgcactgctccctggggttctctacaggcctcttcctgttgtgactgccaggataaagcttccgggaaaacagctattatatcagcttttctgatggtataaacaggagacaggtcagtagtcacaaactgatctaaaatgtttattccttctgtagtgtattaatctctgtgtgttttctttgg

SEQ ID NO: 235236 - protein, 170 aa, Artificial Sequence
  derived and/or modified sequence
MASVRIREAKEGDCGDILRLIRELAEFEKLSDQVKISEEALRADGFGDNPFYHCLVAEILPAPGKLLGPCVVGYGIYYFIYSTWKGRTIYLEDIYVMPEYRGQGIGSKIIKKVAEVALDKGCSQFRLAVLDWNQRAMDLYKALGAQDLTEAEGWHFFCFQGEATRKLAGK

SEQ ID NO: 235237 - protein, 249 aa, Artificial Sequence
  derived and/or modified sequence
MPGQRIASLAYSLLPYGAGIPAPLTRPRLPRRPPRLPPPRSLRLFRIQVRRPFKGSSCRLRGPGTLVPDSGDPDGFRADPRGQGGRLWRYPEADSGEDCRPELAEFEKLSDQVKISEEALRADGFGDNPFYHCLVAEILPAPGKLLGPCVVGYGIYYFIYSTWKGRTIYLEDIYVMPEYRGQGIGSKIIKKVAEVALDKGCSQFRLAVLDWNQRAMDLYKALGAQDLTEAEGWHFFCFQGEATRKLAGK

SEQ ID NO: 235238 - DNA, 513 bp, Artificial Sequence
  derived and/or modified sequence
atggccagcgtgagaatcagagaggccaaggagggcgactgcggcgacatcctgagactgatcagagagctggccgagttcgagaagctgagcgaccaggtgaagatcagcgaggaggccctgagagccgacggcttcggcgacaaccccttctaccactgcctggtggccgagatcctgcccgcccccggcaagctgctgggcccctgcgtggtgggctacggcatctactacttcatctacagcacctggaagggcagaaccatctacctggaggacatctacgtgatgcccgagtacagaggccagggcatcggcagcaagatcatcaagaaggtggccgaggtggccctggacaagggctgcagccagttcagactggccgtgctggactggaaccagagagccatggacctgtacaaggccctgggcgcccaggacctgaccgaggccgagggctggcacttcttctgcttccagggcgaggccaccagaaagctggccggcaagtag

SEQ ID NO: 235239 - DNA, 750 bp, Artificial Sequence
  derived and/or modified sequence
atgcccggccagagaatcgccagcctggcctacagcctgctgccctacggcgccggcatccccgcccccctgaccagacccagactgcccagaagaccccccagactgcccccccccagaagcctgagactgttcagaatccaggtgagaagacccttcaagggcagcagctgcagactgagaggccccggcaccctggtgcccgacagcggcgaccccgacggcttcagagccgaccccagaggccagggcggcagactgtggagataccccgaggccgacagcggcgaggactgcagacccgagctggccgagttcgagaagctgagcgaccaggtgaagatcagcgaggaggccctgagagccgacggcttcggcgacaaccccttctaccactgcctggtggccgagatcctgcccgcccccggcaagctgctgggcccctgcgtggtgggctacggcatctactacttcatctacagcacctggaagggcagaaccatctacctggaggacatctacgtgatgcccgagtacagaggccagggcatcggcagcaagatcatcaagaaggtggccgaggtggccctggacaagggctgcagccagttcagactggccgtgctggactggaaccagagagccatggacctgtacaaggccctgggcgcccaggacctgaccgaggccgagggctggcacttcttctgcttccagggcgaggccaccagaaagctggccggcaagtag

SEQ ID NO: 235240 - DNA, 513 bp, Artificial Sequence
  derived and/or modified sequence
atggccagcgtgcgaattagggaggctaaagagggggattgcggggacatccttcggctcatccgtgagttggctgagttcgagaagttaagcgaccaagtgaagatttccgaggaagctctcagagccgacgggttcggggacaatcccttttaccactgtcttgtcgcagaaatactgcccgcaccgggaaagcttctcggtccatgcgtggtggggtatgggatctattactttatttacagcacttggaagggaaggaccatctaccttgaggatatctacgttatgcctgaatatcgagggcaagggattgggagtaagattatcaaaaaagtggccgaagtcgcactcgacaaaggatgctcacagttccgactggcggtgctggactggaaccaacgcgccatggacttatataaagccctcggagctcaagacctgaccgaagccgaaggctggcattttttttgctttcagggtgaggccacaagaaaactagcgggtaaatag

SEQ ID NO: 235241 - DNA, 750 bp, Artificial Sequence
  derived and/or modified sequence
atgcccgggcagagaatcgccagtttagcttattccttactgccttacggagctggcattcccgcaccccttacgcggccgcgcttgccgaggcgcccgccccggctgcccccgcctcgaagcctccgactctttagaattcaggtgaggagaccattcaaagggagttcctgtaggctccgcgggccagggactttagtgcctgattccggagaccccgatggctttagagccgatccccgtggccagggcggtagattatggcgttacccagaggccgactccggcgaagattgccgtcctgaacttgctgaattcgagaaactgagcgaccaggtcaaaattagcgaggaagcactgcgcgccgacgggtttggagataatcctttttatcactgccttgttgccgagatcctgcctgcaccgggaaaactcttgggtccgtgtgtggtggggtacggaatttattatttcatctacagcacctggaaagggcgcaccatctacctggaagacatctacgttatgcccgagtaccggggtcaagggatcggatcaaagattatcaagaaggttgcagaggtggctctggacaagggttgttcacagtttaggctggcagtgttagattggaaccagcgggccatggatctgtataaagccctgggagcccaggacctaacggaagccgaagggtggcatttcttttgctttcagggcgaagcaactcggaaattggctgggaagtag

SEQ ID NO: 235242 - DNA, 513 bp, Artificial Sequence
  derived and/or modified sequence
atggcctctgtgcgcatccgggaggccaaggagggggactgtggggacatcctgcggctcatccgggagctggccgagtttgagaagctgagtgaccaggtgaagatcagcgaggaggccctgcgggcagatggctttggagacaaccccttctaccactgcctggtggccgagatcctgcctgcccctgggaagctgctgggcccctgtgtggtgggctacggcatctactacttcatctacagcacctggaagggccgcaccatctacctggaggacatctacgtgatgcctgagtaccggggccagggcatcggcagcaagatcatcaagaaggtggccgaggtggccctggacaagggctgcagccagttccggctggccgtgctggactggaaccagagggccatggacctgtacaaggccctgggcgcccaggacctgacagaagctgagggctggcacttcttctgcttccagggcgaggccaccaggaagctggccggcaagtag

SEQ ID NO: 235243 - DNA, 750 bp, Artificial Sequence
  derived and/or modified sequence
atgcctggccagagaattgccagcctggcctacagcctgctgccctacggggccggcatcccagcccccctgacccggccccggctgcccaggaggcctccccggctgcccccacccaggagcctgcggctcttccgcatccaggtgcggcggcccttcaagggcagcagctgccgcctgcggggccctggcaccctggtgcctgacagcggggaccctgatggcttccgggctgacccccggggccagggcggccgcctgtggagatacccagaggccgacagcggggaggactgcaggcctgagctggccgagtttgagaagctgagtgaccaggtgaagatcagcgaggaggccctgcgggcagatggctttggagacaaccccttctaccactgcctggtggccgagatcctgcctgcccctgggaagctgctgggcccctgtgtggtgggctacggcatctactacttcatctacagcacctggaagggccgcaccatctacctggaggacatctacgtgatgcctgagtaccggggccagggcatcggcagcaagatcatcaagaaggtggccgaggtggccctggacaagggctgcagccagttccggctggccgtgctggactggaaccagagggccatggacctgtacaaggccctgggcgcccaggacctgacagaggccgagggctggcacttcttctgcttccagggcgaggccaccaggaagctggccggcaagtag

SEQ ID NO: 235244 - DNA, 513 bp, Artificial Sequence
  derived and/or modified sequence
atggccagcgtgcggatccgggaggccaaggagggcgactgcggcgatatcctcaggcttatccgcgagctagccgagttcgagaagctgtctgaccaagtgaagatctcggaagaagccctcagggccgacggattcggtgacaaccctttctaccattgcctggtagccgagatcctgcccgctcccggaaaactgcttggaccctgtgtcgtgggatacgggatttactacttcatatactctacctggaaaggaagaactatttacttagaagacatctacgtaatgcctgaatacagaggccagggcattggcagtaagatcataaaaaaagtagcggaggtggccctggacaaaggctgcagccagttcaggctcgcagtcctggactggaatcagcgtgccatggacttgtacaaggccctaggagcacaggatctcacagaggccgagggctggcacttcttctgttttcaaggcgaggcaactcgcaagcttgccggaaaatag

SEQ ID NO: 235245 - DNA, 750 bp, Artificial Sequence
  derived and/or modified sequence
atgcccggccagcggatcgccagcctggcctacagcctgctgccctatggtgcggggattcccgcccccctaacgagacctcggcttccacgccgcccaccgagactgccccctccgcggagtctgagactctttcgcatccaggtgcggcgcccttttaaagggagtagctgtagactgaggggcccaggcaccctggtccccgactcaggggaccctgacggatttcgggcagatcccagaggacaggggggtcgcctctggaggtacccggaggcagacagcggcgaggactgccgccctgagctcgcggaatttgagaaattgtcagatcaagtgaagatctcagaggaagcactgagagccgacggcttcggcgataatcctttttatcactgtctcgtagcagaaattctgcccgctcccgggaaactgcttggcccctgcgtggtaggatatggaatctactacttcatttactcaacgtggaaaggccgaacaatttaccttgaagacatttatgtcatgccagagtatcgggggcaagggatcggctcaaagataataaagaaagtcgccgaagtcgccctcgacaaaggctgcagtcaattcaggctcgcagtattggactggaatcagcgggcgatggatctgtacaaagctctcggcgcccaggacctgaccgaggccgagggatggcactttttttgcttccagggggaggccacccgaaagctagcagggaagtag

SEQ ID NO: 235246 - DNA, 513 bp, Artificial Sequence
  derived and/or modified sequence
atggctagtgtgcgcataagggaggccaaggaaggtgattgtggcgatatcctcagactcataagggagttagccgaatttgagaagttgtccgaccaggtcaagattagcgaagaagctctgagagccgacggcttcggggacaatcctttctaccattgtctggttgcggagatactgcccgctcccggaaagttgcttggtccatgtgtggtgggatacggcatctactatttcatttacagtacatggaaaggaagaacgatatacctcgaggatatatacgtgatgcccgagtatcgcggacagggcattggatcgaaaatcattaaaaaagtagctgaggtggccctagacaagggttgttcccagtttagactggcagttctcgattggaaccaaagagctatggacctgtacaaggcgttgggagctcaggacctcactgaggccgaagggtggcacttcttctgcttccagggggaagcgacacgaaagctggctgggaagtag

SEQ ID NO: 235247 - DNA, 750 bp, Artificial Sequence
  derived and/or modified sequence
atgccagggcagaggatcgcatcactggcatattctttactgccctatggcgctggaatacccgctccactcacacggccaagattgccacggaggccgcctcggctaccgccaccacgtagccttcggctgttccgcattcaagtacgccgtcccttcaagggttcttcctgtcggctccggggacccggaacactggtacctgatagcggggatccggacggcttccgggctgatcctaggggacagggcggacggctgtggaggtaccccgaagctgattctggcgaggattgtcggcctgagctggccgagttcgagaagctaagcgaccaggtaaagatttccgaggaagccctgagggctgacgggttcggtgataatcccttttaccactgcctagttgccgagattctgcctgctccgggaaaactgctcggcccttgtgtggtaggctacgggatttattactttatttattcaacctggaaaggtagaacaatctacctggaggatatctacgtaatgcccgagtatagaggacagggaattgggtccaagattataaaaaaggtggctgaggtggccctggacaagggatgctcccagttccggctagcagtccttgactggaaccagagagcaatggatctgtacaaagcattaggcgctcaagacttgaccgaagcagaggggtggcacttcttttgctttcagggagaggccacgagaaaactcgcaggtaaatag

SEQ ID NO: 235248 - DNA, 963 bp, Artificial Sequence
  derived and/or modified sequence
agaattcgagggggtggggctatgcccggacagaggatcgcctcgctggcctactctctcctcccgtacggcgccggaatcccagctccacttaccaggccgcggctaccccgccgtcccccccgactcccgccaccccgctctctcaggctcttcaggatccaagtccgtaggccctttaaggggtctagttgccgtttgcgaggccctgggactttggtcccagacagcggggatccggatggcttccgtgcggatccgagaggccaaggagggagactgtggagatatcctgaggctgattcgggagctagccgaattcgaaaaactctcggatcaggtgaagatcagtgaagaagccctgagagcagatggctttggagacaatcctttctatcactgtttggtagcagagattcttccagcgcccgggaagctactggggccctgcgtggtgggctatgggatatactatttcatctacagtacatggaagggacgcaccatttatctggaggatatctatgtgatgccggaatatcggggtcaagggattggttccaaaataatcaaaaaggtggctgaggtggccttggataagggctgctcccaattccgcctggccgtcctggactggaaccagagggccatggacttgtacaaggccctaggagcccaagatctgacggaagctgagggctggcacttcttctgctttcaaggagaggcaacgagaaagttggcaggaaagtgacgccatccctaggaggatctctgtcttgagtttctccttccccatcagctgaagcactcttcagagactacgtccacagacactgatgctgaggcctccctggaggaaggagggttaggggtgcctatcctcaagtattggaagagcagaattgagggagagacctttcttccttgttgagggtgaaaaataaataagaattacatgtc

SEQ ID NO: 235249 - DNA, 977 bp, Artificial Sequence
  derived and/or modified sequence
gagggggtggggctatgcccggacagaggatcgcctcgctggcctactctctcctcccgtacggcgccggaatcccagctccacttaccaggccgcggctaccccgccgtcccccccgactcccgccaccccgctctctcaggctcttcaggatccaagtccgtaggccctttaaggggtctagttgccgtttgcgaggccctgggactttggtcccagacagcggggatccggatggcttccgtgcggatccgagaggccaaggagggagactgtggagatatcctgaggctgattcgggtgaagactgcaggccggagctagccgaattcgaaaaactctcggatcaggtgaagatcagtgaagaagccctgagagcagatggctttggagacaatcctttctatcactgtttggtagcagagattcttccagcgcccgggaagctactggggccctgcgtggtgggctatgggatatactatttcatctacagtacatggaagggacgcaccatttatctggaggatatctatgtgatgccggaatatcggggtcaagggattggttccaaaataatcaaaaaggtggctgaggtggccttggataagggctgctcccaattccgcctggccgtcctggactggaaccagagggccatggacttgtacaaggccctaggagcccaagatctgacggaagctgagggctggcacttcttctgctttcaaggagaggcaacgagaaagttggcaggaaagtgacgccatccctaggaggatctctgtcttgagtttctccttccccatcagctgaagcactcttcagagactacgtccacagacactgatgctgaggcctccctggaggaaggagggttaggggtgcctatcctcaagtattggaagagcagaattgagggagagacctttcttccttgttgagggtgaaaaataaataagaattacatgtcctga

SEQ ID NO: 235250 - protein, 1445 aa, Artificial Sequence
  derived and/or modified sequence
MQGPPLLTAAHLLCVCTAALAVAPGPRFLVTAPGIIRPGGNVTIGVELLEHCPSQVTVKAELLKTASNLTVSVLEAEGVFEKGSFKTLTLPSLPLNSADEIYELRVTGRTQDEILFSNSTRLSFETKRISVFIQTDKALYKPKQEVKFRIVTLFSDFKPYKTSLNILIKDPKSNLIQQWLSQQSDLGVISKTFQLSSHPILGDWSIQVQVNDQTYYQSFQVSEYVLPKFEVTLQTPLYCSMNSKHLNGTITAKYTYGKPVKGDVTLTFLPLSFWGKKKNITKTFKINGSANFSFNDEEMKNVMDSSNGLSEYLDLSSPGPVEILTTVTESVTGISRNVSTNVFFKQHDYIIEFFDYTTVLKPSLNFTATVKVTRADGNQLTLEERRNNVVITVTQRNYTEYWSGSNSGNQKMEAVQKINYTVPQSGTFKIEFPILEDSSELQLKAYFLGSKSSMAVHSLFKSPSKTYIQLKTRDENIKVGSPFELVVSGNKRLKELSYMVVSRGQLVAVGKQNSTMFSLTPENSWTPKACVIVYYIEDDGEIISDVLKIPVQLVFKNKIKLYWSKVKAEPSEKVSLRISVTQPDSIVGIVAVDKSVNLMNASNDITMENVVHELELYNTGYYLGMFMNSFAVFQECGLWVLTDANLTKDYIDGVYDNAEYAERFMEENEGHIVDIHDFSLGSSPHVRKHFPETWIWLDTNMGYRIYQEFEVTVPDSITSWVATGFVISEDLGLGLTTTPVELQAFQPFFIFLNLPYSVIRGEEFALEITIFNYLKDATEVKVIIEKSDKFDILMTSNEINATGHQQTLLVPSEDGATVLFPIRPTHLGEIPITVTALSPTASDAVTQMILVKAEGIEKSYSQSILLDLTDNRLQSTLKTLSFSFPPNTVTGSERVQITAIGDVLGPSINGLASLIRMPYGCGEQNMINFAPNIYILDYLTKKKQLTDNLKEKALSFMRQGYQRELLYQREDGSFSAFGNYDPSGSTWLSAFVLRCFLEADPYIDIDQNVLHRTYTWLKGHQKSNGEFWDPGRVIHSELQGGNKSPVTLTAYIVTSLLGYRKYQPNIDVQESIHFLESEFSRGISDNYTLALITYALSSVGSPKAKEALNMLTWRAEQEGGMQFWVSSESKLSDSWQPRSLDIEVAAYALLSHFLQFQTSEGIPIMRWLSRQRNSLGGFASTQDTTVALKALSEFAALMNTERTNIQVTVTGPSSPSPVKFLIDTHNRLLLQTAELAVVQPTAVNISANGFGFAICQLNVVYNVKASGSSRRRRSIQNQEAFDLDVAVKENKDDLNHVDLNVCTSFSGPGRSGMALMEVNLLSGFMVPSEAISLSETVKKVEYDHGKLNLYLDSVNETQFCVNIPAVRNFKVSNTQDASVSIVDYYEPRRQAVRSYNSEVKLSSCDLCSDVQGCRPCEDGASGSHHHSSVIFIFCFKLLYFMELWL

SEQ ID NO: 235251 - DNA, 4338 bp, Artificial Sequence
  derived and/or modified sequence
atgcagggccctcccctcttgactgctgcccatctgttatgcgtgtgcacggccgctttagctgtcgctcctgggccgaggtttctcgttactgcaccaggaattattagaccggggggcaatgtgacgatcggggtggagctgctggaacattgcccatctcaggttaccgttaaggcagagttactcaagacagcatctaacttgactgtctctgttctggaagctgagggtgtttttgagaaaggctcatttaaaacactgaccttgccaagcttgcctctgaacagcgcggacgagatctacgagctgagagtcacaggaagaacccaggacgagattctcttctccaacagcacacgtctgtcatttgaaaccaagcgcatctcggttttcatccagacagataaagctctgtacaagcccaaacaggaagtaaagttcaggatcgtcactctgttcagcgacttcaagccttataaaacatcacttaatatacttattaaagatccaaaatccaatttgatacagcagtggctgagtcagcagtcagacctaggggtcattagcaagaccttccaactgtcctcacatccgatcctcggtgactggagcattcaggtgcaagtgaacgatcagacctactatcagagcttccaggtctctgagtatgtcttaccaaaatttgaggttacgctgcagacgccactttactgttccatgaattcaaagcatctgaatgggaccatcaccgcaaagtatacgtatggcaaaccagtgaagggagacgttactcttacctttctgccactcagcttttggggcaaaaagaaaaatattacaaaaaccttcaaaatcaatgggtctgctaacttttccttcaacgacgaagaaatgaaaaacgtcatggacagttccaacggcctgagcgagtacttggatttatcaagtccaggaccagtagaaatactgaccacggttaccgaatcagtaacaggaataagccggaatgttagtaccaacgtttttttcaaacagcacgattatatcatcgaattcttcgactacaccaccgtgttgaaaccaagtcttaattttacagcgactgtgaaagtcaccagagcagatggcaatcaattaacactggaggagcgaaggaacaacgtcgttattacagttacacagagaaactacaccgagtactggagcggctctaactccggaaaccagaagatggaggccgtccagaagatcaattataccgtcccccaatctgggacctttaagatagagttccctattctggaagactcgtcagagctgcagttgaaggcctacttcttgggatctaaaagctctatggccgtgcactccctgttcaaaagtccatctaaaacatacattcagctcaagactagagacgaaaatataaaggtcggaagtccgttcgagcttgttgtctcgggcaataagcgattgaaagaactcagctatatggtcgtcagccgaggccagctggttgctgtggggaagcagaacagcaccatgttcagtctgacaccagagaattcatggacaccgaaagcgtgtgtgattgtgtactatatcgaagacgacggagagatcatcagcgatgtgttgaagattccggtgcagttggtgtttaaaaacaagatcaagctttactggagcaaagtgaaagcggagcccagcgaaaaagtgagtcttcggatctcggtcacacagcccgattcaatcgtagggatcgttgcagtcgataaatctgtgaacttgatgaacgcgtccaatgatattacaatggagaatgtagtccatgaattagaattgtataatacaggatactacctcgggatgttcatgaactcattcgctgtgttccaagagtgcgggctttgggttctcaccgacgcaaacctgacgaaagactacatcgacggggtttacgacaatgctgaatatgcagaaaggttcatggaggagaatgaagggcacattgttgatattcatgacttttccctcggctctagtccacacgtccgtaagcattttcccgagacgtggatctggctcgataccaatatgggttacagaatctaccaggaatttgaggtcaccgttcccgactcaattacaagctgggtggccacgggctttgtcatcagcgaagacctcggtctggggctgacaaccactccagtcgaactccaggcctttcagccattttttattttcttgaatctgccgtactcggtcattcggggggaagagttcgctctggagatcactatcttcaattacttgaaggatgccacggaagtgaaggtgattatcgaaaaatctgataaattcgacatccttatgacttcaaatgaaattaatgccacggggcaccagcaaacgctgcttgtgccgtccgaggatggagcaaccgtgctctttcccatacggcccacacaccttggcgaaatcccgatcactgtgaccgccctaagtccgacagcaagcgatgctgtgactcaaatgatcctggttaaggctgaggggattgagaagtcctatagccagtcaatcctcctcgacctcacagataatagactgcagagcactctcaaaaccctcagcttcagcttcccacccaacaccgtgacaggctccgaacgcgtgcagattaccgccattggcgatgttctcggaccgagtattaatgggctggctagtttgatacgcatgccatatggatgcggagaacaaaatatgatcaattttgcccccaatatctacatcctggactatctaaccaagaagaaacaattgacagacaacctcaaggagaaagcattaagcttcatgcgacaggggtatcaaagagagctcttgtatcagcgtgaagacggctcattcagtgcctttggtaattacgatcctagcggatccacttggttgtccgctttcgtattacggtgtttcctggaggcggacccatatatcgacattgaccagaacgtacttcaccggacttacacctggttgaagggccatcagaagagtaacggagagttctgggaccctggccgggtaatccactctgaactgcaagggggcaacaaaagtcctgtgaccctgactgcttacattgtgacctcgctgctgggctacagaaagtaccagcctaacatagatgtacaggagtcgatccatttcctcgaatccgaattcagccgtggcattagcgacaactataccctggcactgatcacttatgctctctcttccgttgggtcccccaaggcaaaggaggctctcaacatgctcacctggcgggcagagcaggaaggcgggatgcagttctgggtcagttctgaatccaagctctctgactcttggcagccaagatcgctggatatcgaagtggcagcatacgctttattgagtcatttcctgcaatttcagacctctgagggcattccaatcatgaggtggctgagccggcaacgcaattctctgggcgggttcgcttccacgcaggacacaaccgtagccctgaaagccctgtcggaatttgctgcactcatgaatactgaaaggacaaacattcaagtcacagtgactggcccaagtagccctagcccagttaaattccttatcgatacccacaataggttgctgctgcaaaccgcagaactcgccgtcgtgcagcccacagcagtcaatatcagtgccaacggatttggattcgctatttgccagctgaacgttgtatataatgtaaaggcgagtggttcatctcggcgacggaggtctattcagaaccaagaggcttttgatctggatgtagcagtgaaagaaaacaaagacgatctgaatcatgtcgatctgaatgtttgcacatcattttcaggccccggcaggtccgggatggctctcatggaagttaatctcttgtccggtttcatggttccctccgaggcgatctcactctccgaaaccgtgaaaaaggtcgaatatgatcacgggaaattaaacctgtacctcgattctgtgaacgaaactcagttttgcgtgaatatccctgcggtacgcaacttcaaagtgagcaacacacaggatgctagcgtgagcatcgtggattattatgaacccagaaggcaggccgttaggagctacaatagtgaggtgaaattgagctcatgcgacctttgctccgacgttcagggatgtcgcccttgtgaagatggcgccagcggcagtcaccaccattcctcggtgatatttatattttgtttcaaactgctgtattttatggaactgtggctgtag

SEQ ID NO: 235252 - DNA, 4338 bp, Artificial Sequence
  derived and/or modified sequence
atgcagggcccccccctgctgacagctgcccacctgctgtgtgtgtgcacagctgccctggccgtggcccctggcccccgcttcctggtgacagcccctggcatcatccggcctggaggaaatgtgaccatcggcgtggagctgctggagcactgccccagccaggtgacagtgaaggccgagctgctgaagacagccagcaacctgactgtgtctgtgctggaggccgagggcgtgtttgagaagggcagcttcaagaccctgaccctgcccagcctgcccctgaacagcgcagatgagatctatgagctgcgggtgactggaagaacccaggatgagatcctcttcagcaacagcacccggctgagctttgagaccaagaggatcagcgtcttcatccagacagacaaggccctgtacaagcccaagcaggaggtgaagttccgcatcgtgaccctcttcagtgacttcaagccctacaagaccagcctgaacatcctgatcaaggaccccaagagcaacctgatccagcagtggctgagccagcagagcgacctgggcgtcatcagcaagaccttccagctgagcagccaccccatcctgggggactggagcatccaggtgcaggtgaatgaccagacctactaccagagcttccaggtgtctgaatatgtgctgcccaagtttgaggtgaccctgcagacccccctgtactgcagcatgaacagcaagcacctgaatggcaccatcacagccaagtacacctacggcaagcctgtgaagggagatgtgaccctgaccttcctgcccctgtccttctggggcaagaagaagaacatcaccaagaccttcaagatcaatggaagtgccaacttctccttcaatgatgaggagatgaagaatgtgatggacagcagcaatggcctgtctgagtacctggacctgagcagccctggccctgtggagatcctgaccaccgtgacagagagcgtgacaggcatcagcagaaatgtgtccaccaacgtgttcttcaagcagcacgactacatcatcgagttctttgactacaccaccgtgctgaagcccagcctgaacttcaccgccaccgtgaaggtgaccagggcagatggcaaccagctgaccctggaggagaggaggaacaacgtggtgatcaccgtgacccagaggaactacacagagtactggagcggcagcaacagcggcaaccagaagatggaggccgtgcagaagatcaactacacagtgccccagagcggcaccttcaagattgagttccccatcctggaggacagcagcgagctgcagctgaaggcctacttcctgggcagcaagagctccatggctgtgcacagcctcttcaagagccccagcaagacctacatccagctgaagaccagagatgagaacatcaaggtgggcagcccctttgagctggtggtgtctggcaacaagaggctgaaggagctgagctacatggtggtgtcccggggccagctggtggccgtgggcaagcagaacagcaccatgttcagcctgaccccagagaacagctggacccccaaggcctgcgtcatcgtgtactacattgaagatgatggagagatcatcagtgatgtgctgaagatccctgtgcagctggtgttcaagaacaagatcaagctgtactggagcaaggtgaaggccgagcccagcgagaaggtgtccctgcgcatctctgtgacccagcctgacagcatcgtgggcatcgtggccgtggacaagtctgtgaacctgatgaatgccagcaatgacatcaccatggagaatgtggtgcatgagctggagctgtacaacacaggctactacctgggcatgttcatgaacagctttgctgtgttccaggagtgtggcctgtgggtgctgacagatgccaacctgaccaaggactacattgatggagtgtatgacaatgcagaatatgcagagcgcttcatggaggagaatgaaggccacatcgtggacatccatgacttcagcctgggcagcagcccccacgtgaggaagcacttccctgagacctggatctggctggacaccaacatgggctaccgcatctaccaggagtttgaggtgacagtgcctgacagcatcacctcctgggtggccactggatttgtgatcagcgaggacctgggcctgggcctgaccaccacccctgtggagctgcaggccttccagcccttcttcatcttcctgaacctgccctacagcgtcatccggggggaggagtttgccctggagatcaccatcttcaactacctgaaggatgccacagaggtgaaggtgatcatcgagaagagtgacaagtttgacatcctgatgaccagcaatgagatcaatgccaccggccaccagcagaccctgctggtgcccagtgaagatggagccaccgtgctcttccccatccggcccacccacctgggggagatccccatcaccgtgacagccctgagccccacagccagtgatgctgtgacccagatgatcctggtgaaggccgagggcatcgagaagagctacagccagagcatcctgctggacctgacagacaaccggctgcagagcaccctgaagaccctgtccttctccttcccccccaacacagtgacaggcagcgagcgggtgcagatcacagccatcggagatgtgctgggccccagcatcaatggcctggccagcctcatccgcatgccctacggctgtggggagcagaacatgatcaactttgcccccaacatctacatcctggactacctgaccaagaagaagcagctgacagacaacctgaaggagaaggccctgtccttcatgaggcagggctaccagcgggagctgctgtaccagcgggaggatggcagcttcagcgcctttggaaattatgaccccagcggcagcacctggctgagcgcctttgtgctgcgctgcttcctggaggccgacccctacattgatattgaccagaatgtgctgcacaggacctacacctggctgaagggccaccagaagagcaatggagagttctgggaccccggccgggtcatccacagcgagctgcagggcggcaacaagagccctgtgaccctgacagcctacatcgtgaccagcctgctgggctacaggaagtaccagcccaacattgatgtgcaggagagcatccacttcctggagagcgagttcagccggggcatcagtgacaactacaccctggccctgatcacctacgccctgagctctgtgggcagccccaaggccaaggaggccctgaacatgctgacctggagggctgagcaggagggcggcatgcagttctgggtgtcctctgagagcaagctgagtgacagctggcagcccaggagcctggacatcgaggtggccgcctatgccctgctgagccacttcctgcagttccagaccagcgagggcatccccatcatgcgctggctgagccggcagaggaacagcctgggcggctttgccagcacccaggacaccaccgtggccctgaaggccctgtctgaatttgctgccctgatgaacacagagaggaccaacatccaggtgacagtgacaggccccagcagccccagccctgtgaagttcctgattgacacccacaaccggctgctgctgcagacagctgagctggccgtggtgcagcccacagctgtgaacatcagcgccaacggcttcggctttgccatctgccagctgaatgtggtgtacaacgtgaaggccagcggcagcagcagaagaagaagaagcatccagaaccaggaggcctttgacctggatgtggccgtgaaggagaacaaggatgacctgaaccacgtggacctgaatgtgtgcaccagcttcagcggccctggccgcagcggcatggccctgatggaggtgaacctgctgagcggcttcatggtgcccagcgaggccatcagcctgtctgagaccgtgaagaaggtggagtatgaccacggcaagctgaacctgtacctggacagcgtgaatgagacccagttctgtgtgaacatcccagctgtgaggaacttcaaggtgagcaacacccaggatgcctctgtgtccatcgtggactactatgagccccggcggcaggccgtgcgcagctacaacagcgaggtgaagctgagcagctgtgacctgtgcagtgatgtgcagggctgccggccctgtgaagatggagccagcggcagccaccaccacagcagcgtcatcttcatcttctgcttcaagctgctgtacttcatggagctgtggctgtag

SEQ ID NO: 235253 - DNA, 4338 bp, Artificial Sequence
  derived and/or modified sequence
atgcagggcccccccctgctgaccgccgcccacctgctgtgcgtgtgtactgcagcactggcagtggctcccggcccaaggttcctggttacagctcctggaatcattaggcctggagggaatgttacaatcggcgttgaattacttgaacactgcccaagtcaggttaccgtgaaggcagaattgcttaagacagcatccaatttaacagtgagcgtactggaagccgagggcgttttcgaaaaaggatccttcaagacacttacactaccctcacttccacttaacagcgcagacgagatttatgagctgagagtgaccgggaggacgcaagatgagattcttttcagcaacagtaccagactgtctttcgaaactaagagaatctctgtctttattcagactgacaaggccctttacaaaccgaaacaggaagtaaagtttcgcatcgttacactgttttccgatttcaagccttataagacgtcgctcaatattttaattaaggaccccaagtcgaatctgatccaacaatggctaagccagcagtccgatctgggcgttatttccaagacatttcagttgtcaagccatcccattctcggagactggtctatccaggtccaggtgaatgatcagacgtactatcagtctttccaggtctcggaatatgttctgcctaaatttgaggtcacactgcagacccctctctactgttctatgaactccaaacatttaaatggcacgatcactgcgaaatatacttacgggaaacccgtgaaaggagatgtcactctgaccttcttgcccctcagtttttgggggaagaagaagaatattacaaagaccttcaagataaatggctcagccaacttttccttcaatgatgaagagatgaaaaacgtcatggactcctcgaacggtctgagcgaataccttgatctgtctagtcctggcccagtggaaatcctgactaccgtcaccgagtccgtcactgggatttccaggaatgtctctaccaacgtctttttcaaacagcacgattacatcatcgagttttttgattacactaccgtcctcaaacccagtttgaattttactgctacggtgaaggtgacacgagccgatggcaaccaacttacactggaagaacggaggaacaacgttgtgattactgtgacacagcgcaattatactgagtattggtctggaagcaactcaggcaaccaaaaaatggaagcagtacagaagatcaactacaccgtgccacagagcggcacctttaagatagaatttcctatcctggaagatagttccgagctgcagctcaaagcctattttttgggttcgaaatccagtatggctgtccactcccttttcaagtcaccgagtaaaacatacatccagcttaaaaccagagatgagaatatcaaggtcggcagcccttttgagctggtggtcagtggaaacaaacggttaaaagagcttagctatatggttgtgtctcgggggcagttagtcgccgtgggtaagcagaactccactatgttctcactgaccccagagaactcatggacaccaaaagcatgtgtgattgtctattacatcgaggatgacggcgagattatctctgatgtactgaaaatccccgttcaactggtgtttaaaaataaaattaaactgtattggtccaaagtgaaggccgagccttctgagaaagtgtccttacgcataagcgtgacgcagcctgattcaatagtggggattgtagcagtggacaaatcggtgaacctgatgaatgcatccaacgacataaccatggagaacgtggttcatgaacttgaactgtataacacgggctactacctgggaatgttcatgaactctttcgccgttttccaggagtgcgggctgtgggttctgacagacgccaatttgacaaaggattatatcgatggcgtttacgataatgctgagtatgccgagcggttcatggaggagaacgaaggacacatagtggacattcacgatttcagcctgggatctagcccacatgtcagaaagcatttcccagagacatggatttggctcgataccaacatggggtatcggatttatcaagaattcgaagtgaccgtgcccgacagtatcacttcttgggtcgcaacaggcttcgtgatttccgaggatctggggctcggcctgactacaacccccgtggaactgcaggcttttcagcctttctttatttttttgaacctgccatatagcgtgatcaggggcgaggagtttgccctggagatcaccatcttcaattacttaaaagacgctactgaagtaaaagtgattatcgagaaatccgacaagttcgacattctcatgacaagcaacgagatcaacgcgaccgggcaccagcagactttactggtgccctccgaagacggggcaactgtcctcttccctattcgacctactcatttaggtgaaattcccattacagttaccgctctttcacccacagcatccgatgccgtaacccagatgattctggtgaaagctgaaggcattgagaaatcttacagtcagtccattctgctcgatctgacagacaaccggctgcagtctacattgaaaacactgtcctttagttttcccccaaacacagtcacaggctcagagcgagtgcagatcacagcgatcggagatgtgcttggcccttctattaacggcctggcgagtctgatccgaatgccgtacggctgcggcgaacagaacatgattaatttcgcgccaaatatttatattcttgactatctcaccaaaaagaagcaactgacagacaatctgaaggagaaagccctctccttcatgcggcagggttatcagcgggagcttctgtaccagcgcgaagatggctcttttagcgcatttggaaattatgacccgagcggaagcacatggctgtccgcgtttgttctgcgatgcttcctggaagccgatccctatatcgacatcgaccagaatgtgttgcatagaacatacacttggttgaaagggcaccagaaaagcaacggggagttctgggacccgggtcgggtaatccactccgagttgcagggagggaacaaatccccagtgactctgactgcatatatagttacgtcccttcttgggtacaggaagtaccaacctaatatagatgtgcaggaatccattcattttctggagtcagagttttcaagaggcattagcgacaactatacgctggctttgataacttacgcactgtcctctgtgggctccccaaaagcaaaggaggccttgaatatgcttacctggagagccgagcaggagggcggcatgcagttctgggtaagtagtgaatctaagctgtctgactcatggcaaccgcggtccctggatatcgaagtggcggcatacgccttactgtcacatttcttacagtttcagactagtgaaggtatcccaattatgcggtggctctctcgtcagcgcaacagtcttggcgggtttgctagcacccaggacaccaccgtggcactcaaagccctgtctgaatttgcggcgctgatgaacacagagcggactaatatacaggtgacggtgacggggccctcttcaccaagtcctgtgaaatttctgatcgacacacataatcgactccttctgcagaccgcagaactcgcagtggtgcagccaaccgccgtgaacatctcagctaatggcttcggctttgccatatgtcagctgaatgtcgtctacaacgtaaaggccagcggtagctcacgtagaaggaggtcgatccaaaatcaggaggcctttgacctagacgtcgctgtgaaagagaataaggacgaccttaatcacgtggatctgaatgtgtgtacttccttctcgggtcccggccggagtggtatggcgctaatggaagttaacctcctgtcagggttcatggtgcccagtgaagccattagtctctccgaaacagtgaaaaaagtggagtacgaccacgggaagctgaacctgtatctagacagtgtaaacgagacccaattttgcgtaaacatccctgccgtcagaaatttcaaagtatctaatactcaggatgcttccgtttccatcgtagactattatgagcccagaagacaagcagtccgttcttataactccgaggtgaaactcagcagttgcgacctttgtagcgatgttcagggatgccgaccttgtgaggacggtgcgtccggaagccaccaccatagctccgtcatcttcatcttctgtttcaagttactatattttatggagttatggctgtag

SEQ ID NO: 235254 - DNA, 4338 bp, Artificial Sequence
  derived and/or modified sequence
atgcaaggcccaccactccttacagccgcacacctcctgtgcgtctgtaccgccgctttggctgtagcgccagggcctagatttctcgtgactgcaccaggaatcattagacccggagggaatgttacgataggtgtggagctgctcgagcattgtccctctcaagttacggtgaaggctgagctcctgaagacagcgagtaacctcaccgtcagtgttctcgaggccgagggggtttttgagaaaggaagctttaaaacacttactttgccttcactccctctgaattccgcggatgagatttatgaactccgggttacagggagaacccaggatgaaattctgttttcgaattctacaaggttgagtttcgagactaaacgcatctctgtattcattcagaccgataaggccttatataaacctaaacaagaagtaaagtttcggattgttactcttttctccgactttaaaccatataaaaccagtctgaacatccttatcaaggaccctaaatccaatctcatccagcaatggttaagccagcagtcggatctcggtgttatctccaagacatttcagctatcctcacaccccatcctgggcgactggagtatccaggttcaggtgaacgaccaaacatactatcagagtttccaagtgtctgagtatgttctacccaagttcgaggttaccctacagactccattgtattgcagtatgaattcgaaacacctgaacggcacgattacagcaaaatacacctacggtaaacccgtgaagggcgacgtgacattgacctttctcccgctctccttctggggcaaaaagaagaacatcaccaaaacattcaagataaacggaagcgccaactttagcttcaatgatgaggaaatgaagaacgtgatggatagctcgaacggcctttctgaatacctcgacctgtcgtcccccggacccgttgaaatcctcaccacggttacagagagtgtgacagggattagtcgtaatgtttctacaaacgtcttttttaaacagcatgattatattattgagtttttcgattatacaaccgtcctgaaaccatctttgaactttaccgcaaccgtcaaggtcactagggccgatgggaaccagctcacactcgaagagcgcaggaataacgtggtgataacagtgacacagagaaattataccgaatattggtcaggcagcaatagcgggaaccaaaaaatggaggccgtccagaaaattaactacactgtgcctcagagcggtacattcaaaattgagttccctatccttgaggacagcagcgagttacagctgaaggcttacttcttgggcagcaaatcctccatggccgtccattcccttttcaagagtccatccaagacctacattcagctcaagactcgagatgaaaatatcaaggttggctcaccgtttgaattggtggtcagtgggaacaaacgcctcaaagagctgagttacatggttgtctcccggggacaactcgtcgccgtcgggaaacaaaattctaccatgttctcgttaactcctgaaaactcctggacccccaaagcgtgtgtcatcgtttattacatcgaggacgacggagaaatcatcagcgacgttctgaaaataccggtacaactggtgttcaaaaacaaaatcaagctgtattggtccaaagtgaaggctgaaccctccgaaaaggtgagtctacgcatcagtgtcacccagccagactccatcgtggggatcgttgccgtggacaagtcggtgaaccttatgaatgcgagcaacgatatcaccatggagaacgtggtccacgaactagagctgtacaatacaggctattatctggggatgtttatgaacagcttcgcagtgttccaagaatgtggactgtgggtgcttaccgatgccaacttaaccaaagattacattgatggggtctacgacaacgcagaatacgctgaaaggttcatggaggagaacgaggggcacatagtcgatattcacgactttagccttggcagtagcccccatgtgcgtaaacatttccccgagacatggatctggcttgacaccaatatgggatatcgcatttatcaagaatttgaggttacagtccctgactctattacgtcttgggttgctacaggcttcgtcatctccgaggatctcggactgggattgaccactacgcctgtcgagctacaggccttccaaccattcttcattttcctgaacctcccttacagcgttatacgtggagaggagtttgccctggaaatcacaatcttcaactatttgaaggatgccactgaggttaaggtgatcattgaaaagtccgataagttcgacatcctgatgacctccaacgaaatcaatgctaccggccaccagcagacacttctagtgcccagcgaggatggagccactgtgctctttcctatcaggccaacacatcttggcgaaatacctattaccgtcactgctctgtcccccaccgccagtgatgccgttactcagatgatactggtgaaggcagaaggcattgagaaatcatactcccagagtatcctgttggatctgactgacaaccgcctacagtctaccttgaagaccctgtccttcagcttccctccaaacaccgtaacagggagtgagcgcgtccagatcaccgccataggcgatgtcctgggcccatctatcaatggcttagcatctctaatacgaatgccatacggttgtggcgagcagaatatgataaattttgcccctaatatatacattctggattacctcacaaaaaagaagcaacttactgataatctaaaagagaaagctctgtccttcatgcgtcagggttaccaaagagaactactgtatcagcgggaggatggaagctttagcgctttcggcaactatgatccatctgggagtacgtggctgtccgcctttgttctccggtgttttctggaagctgacccatacatcgacatcgaccagaacgttttgcatagaacctacacgtggttaaagggccaccagaagtccaacggcgaattctgggaccccggtagagtaatccacagtgagctccaggggggaaataaaagcccggttaccttgactgcatatatcgttaccagcctgctgggttatcggaaataccaacccaacatagatgtgcaggagtctattcatttcctggagtcagagttcagcagaggcatctcagacaactatactctagctctgattacatatgcacttagctcagtcggatcccccaaagccaaagaggcgcttaatatgctgacttggcgcgctgagcaggagggcggaatgcagttctgggtctcaagcgagagtaagttaagtgacagctggcaacccagatcactggacattgaagttgcggcttatgctttgctgtcccatttcctccagtttcagacatccgaaggaattcccattatgaggtggttgtccaggcagcggaacagtctgggcggttttgctagcacacaggacaccaccgtggctctgaaagctctatccgaatttgccgctttaatgaacacagaaaggaccaacatacaggtcacggtgaccggaccttcatccccgtcacccgtcaagtttcttatcgatacacacaatcggctgctgctccagacagccgagctcgccgttgttcagcctacggccgtgaatattagcgccaatgggttcggcttcgcaatatgccagctgaatgtggtgtacaatgtgaaagcatctgggtcgtcccggaggcggcgtagtatacagaatcaggaggctttcgacctcgatgtagctgtcaaagaaaacaaagacgacttgaaccatgtggacttgaatgtctgcacgtccttctctggacctgggcgatcaggcatggccctcatggaggttaatctgctttccgggttcatggtgccaagcgaggcaatctctctgtctgaaacagtgaagaaagtagagtatgatcatggaaagctgaatctgtatcttgattctgtgaatgagacccagttctgcgtcaatattccggctgtgagaaactttaaggtgtcaaacacccaagacgcatctgtaagtatcgtggattattacgagcccagacgtcaggccgttcgttcttacaattcagaagtaaaactgtcaagctgtgacctgtgctcagatgtccagggatgtaggccctgcgaagacggcgcttcaggatctcaccaccattcttccgtgatcttcatcttttgctttaagttgctgtacttcatggagttatggctgtag

SEQ ID NO: 235255 - DNA, 5882 bp, Artificial Sequence
  derived and/or modified sequence
ctaaactcgaattaagagggaaaaaaaatcagggaggaggtggcaagccacaccccacggtgcccgcgaacttccccggcagcggactgtagcccaggcagacgccgtcgagatgcagggcccaccgctcctgaccgccgcccacctcctctgcgtgtgcaccgccgcgctggccgtggctcccgggcctcggtttctggtgacagccccagggatcatcaggcccggaggaaatgtgactattggggtggagcttctggaacactgcccttcacaggtgactgtgaaggcggagctgctcaagacagcatcaaacctcactgtctctgtcctggaagcagaaggagtctttgaaaaaggctcttttaagacacttactcttccatcactacctctgaacagtgcagatgagatttatgagctacgtgtaaccggacgtacccaggatgagattttattctctaatagtacccgcttatcatttgagaccaagagaatatctgtcttcattcaaacagacaaggccttatacaagccaaagcaagaagtgaagtttcgcattgttacactcttctcagattttaagccttacaaaacctctttaaacattctcattaaggaccccaaatcaaatttgatccaacagtggttgtcacaacaaagtgatcttggagtcatttccaaaacttttcagctatcttcccatccaatacttggtgactggtctattcaagttcaagtgaatgaccagacatactatcaatcatttcaggtttcagaatatgtattaccaaaatttgaagtgactttgcagacaccattatattgttctatgaattctaagcatttaaatggtaccatcacggcaaagtatacatatgggaagccagtgaaaggagacgtaacgcttacatttttacctttatccttttggggaaagaagaaaaatattacaaaaacatttaagataaatggatctgcaaacttctcttttaatgatgaagagatgaaaaatgtaatggattcttcaaatggactttctgaatacctggatctatcttcccctggaccagtagaaattttaaccacagtgacagaatcagttacaggtatttcaagaaatgtaagcactaatgtgttcttcaagcaacatgattacatcattgagttttttgattatactactgtcttgaagccatctctcaacttcacagccactgtgaaggtaactcgtgctgatggcaaccaactgactcttgaagaaagaagaaataatgtagtcataacagtgacacagagaaactatactgagtactggagcggatctaacagtggaaatcagaaaatggaagctgttcagaaaataaattatactgtcccccaaagtggaacttttaagattgaattcccaatcctggaggattccagtgagctacagttgaaggcctatttccttggtagtaaaagtagcatggcagttcatagtctgtttaagtctcctagtaagacatacatccaactaaaaacaagagatgaaaatataaaggtgggatcgccttttgagttggtggttagtggcaacaaacgattgaaggagttaagctatatggtagtatccaggggacagttggtggctgtaggaaaacaaaattcaacaatgttctctttaacaccagaaaattcttggactccaaaagcctgtgtaattgtgtattatattgaagatgatggggaaattataagtgatgttctaaaaattcctgttcagcttgtttttaaaaataagataaagctatattggagtaaagtgaaagctgaaccatctgagaaagtctctcttaggatctctgtgacacagcctgactccatagttgggattgtagctgttgacaaaagtgtgaatctgatgaatgcctctaatgatattacaatggaaaatgtggtccatgagttggaactttataacacaggatattatttaggcatgttcatgaattcttttgcagtctttcaggaatgtggactctgggtattgacagatgcaaacctcacgaaggattatattgatggtgtttatgacaatgcagaatatgctgagaggtttatggaggaaaatgaaggacatattgtagatattcatgacttttctttgggtagcagtccacatgtccgaaagcattttccagagacttggatttggctagacaccaacatgggttacaggatttaccaagaatttgaagtaactgtacctgattctatcacttcttgggtggctactggttttgtgatctctgaggacctgggtcttggactaacaactactccagtggagctccaagccttccaaccatttttcatttttttgaatcttccctactctgttatcagaggtgaagaatttgctttggaaataactatattcaattatttgaaagatgccactgaggttaaggtaatcattgagaaaagtgacaaatttgatattctaatgacttcaaatgaaataaatgccacaggccaccagcagacccttctggttcccagtgaggatggggcaactgttctttttcccatcaggccaacacatctgggagaaattcctatcacagtcacagctctttcacccactgcttctgatgctgtcacccagatgattttagtaaaggctgaaggaatagaaaaatcatattcacaatccatcttattagacttgactgacaataggctacagagtaccctgaaaactttgagtttctcatttcctcctaatacagtgactggcagtgaaagagttcagatcactgcaattggagatgttcttggtccttccatcaatggcttagcctcattgattcggatgccttatggctgtggtgaacagaacatgataaattttgctccaaatatttacattttggattatctgactaaaaagaaacaactgacagataatttgaaagaaaaagctctttcatttatgaggcaaggttaccagagagaacttctctatcagagggaagatggctctttcagtgcttttgggaattatgacccttctgggagcacttggttgtcagcttttgttttaagatgtttccttgaagccgatccttacatagatattgatcagaatgtgttacacagaacatacacttggcttaaaggacatcagaaatccaacggtgaattttgggatccaggaagagtgattcatagtgagcttcaaggtggcaataaaagtccagtaacacttacagcctatattgtaacttctctcctgggatatagaaagtatcagcctaacattgatgtgcaagagtctatccattttttggagtctgaattcagtagaggaatttcagacaattatactctagcccttataacttatgcattgtcatcagtggggagtcctaaagcgaaggaagctttgaatatgctgacttggagagcagaacaagaaggtggcatgcaattctgggtgtcatcagagtccaaactttctgactcctggcagccacgctccctggatattgaagttgcagcctatgcactgctctcacacttcttacaatttcagacttctgagggaatcccaattatgaggtggctaagcaggcaaagaaatagcttgggtggttttgcatctactcaggataccactgtggctttaaaggctctgtctgaatttgcagccctaatgaatacagaaaggacaaatatccaagtgaccgtgacggggcctagctcaccaagtcctgtaaagtttctgattgacacacacaaccgcttactccttcagacagcagagcttgctgtggtacagccaacggcagttaatatttccgcaaatggttttggatttgctatttgtcagctcaatgttgtatataatgtgaaggcttctgggtcttctagaagacgaagatctatccaaaatcaagaagcctttgatttagatgttgctgtaaaagaaaataaagatgatctcaatcatgtggatttgaatgtgtgtacaagcttttcgggcccgggtaggagtggcatggctcttatggaagttaacctattaagtggctttatggtgccttcagaagcaatttctctgagcgagacagtgaagaaagtggaatatgatcatggaaaactcaacctctatttagattctgtaaatgaaacccagttttgtgttaatattcctgctgtgagaaactttaaagtttcaaatacccaagatgcttcagtgtccatagtggattactatgagccaaggagacaggctgtgagaagttacaactctgaagtgaagctgtcctcctgtgacctttgcagtgatgtccagggctgccgtccttgtgaggatggagcttcaggctcccatcatcactcttcagtcatttttattttctgtttcaagcttctgtactttatggaactttggctgtgatttatttttaaaggactctgtgtaacactaacatttccagtagtcacatgtgattgttttgttttcgtagaagaatactgcttctattttgaaaaaagagttttttttctttctatggggttgcagggatggtgtacaacaggtcctagcatgtatagctgcatagatttcttcacctgatctttgtgtggaagatcagaatgaatgcagttgtgtgtctatattttcccctctcaaaatcttttagaatttttttggaggtgtttgttttctccagaataaaggtattactttagaataggtattctcctcattttgtgaaagaaatgaacctagattcttaagcattattacacatccatgtttgcttaaagatggatttccctgggaatgggagaaaacagccagcaggaggagcttcatctgttcccttcccacctccaacctagccctactgcccaccccaccccaacccaccccatgcccagtggtctcagtagatacttcttaactggaaattctttcttttcagaatctaggtggtgaattttttttaagtggcacggtctttttctgcttgaaatctgatcacaccccccagccattgccctccctctctttttcctctgtagagaaatgtgaggggcagtacatttactgtgcttttcacaccatctcagaggttgaggagcatactgaaaattgccctggggggtgctgggtgtgctatctccttcccacatcctcagccccacaccagctctatttcaggggtgagagtcagagagcactgcaatatgtgcttcatgggatttcgattcgaagatcctagaccagggagacactgtgagccagggatacaacaaaatactaggtaagtcactgcagaccgacctccctgcagtttgggaaagaagctgggtttgtggagaatcagagcatcttgacatgactgctgacctaaagatccctggcattggccagggatcctgtggaacctcttctagttcaggggtgtgagcattagactgccagttgtctagtgacatctgatgcttgctgtgaacttttaagatccccgaatcctgagcacctcaatctttaattgccctgtattccgaagggtaatataatttatctggatggaaattttaaagatgaatcccccttttttcttttcttctctcttttctttccttctccctttcttctttgccttctaaatatactgaaatgatttagatatgtgtcaacaattaatgatcttttattcaatctaagaaatggtttagtttttctctttagctctatggcatttcactcaagtggacaggggaaaaagtaattgccatgggctccaaagaatttgctttatgtttttagctatttaaaaataaatccatcaaaaataaagtatgcaaatgtatctttt

SEQ ID NO: 235256 - DNA, 4338 bp, Artificial Sequence
  derived and/or modified sequence
atgcagggcccccccctgctgaccgccgcccacctgctgtgcgtgtgcaccgccgccctggccgtggcccccggccccagattcctggtgaccgcccccggcatcatcagacccggcggcaacgtgaccatcggcgtggagctgctggagcactgccccagccaggtgaccgtgaaggccgagctgctgaagaccgccagcaacctgaccgtgagcgtgctggaggccgagggcgtgttcgagaagggcagcttcaagaccctgaccctgcccagcctgcccctgaacagcgccgacgagatctacgagctgagagtgaccggcagaacccaggacgagatcctgttcagcaacagcaccagactgagcttcgagaccaagagaatcagcgtgttcatccagaccgacaaggccctgtacaagcccaagcaggaggtgaagttcagaatcgtgaccctgttcagcgacttcaagccctacaagaccagcctgaacatcctgatcaaggaccccaagagcaacctgatccagcagtggctgagccagcagagcgacctgggcgtgatcagcaagaccttccagctgagcagccaccccatcctgggcgactggagcatccaggtgcaggtgaacgaccagacctactaccagagcttccaggtgagcgagtacgtgctgcccaagttcgaggtgaccctgcagacccccctgtactgcagcatgaacagcaagcacctgaacggcaccatcaccgccaagtacacctacggcaagcccgtgaagggcgacgtgaccctgaccttcctgcccctgagcttctggggcaagaagaagaacatcaccaagaccttcaagatcaacggcagcgccaacttcagcttcaacgacgaggagatgaagaacgtgatggacagcagcaacggcctgagcgagtacctggacctgagcagccccggccccgtggagatcctgaccaccgtgaccgagagcgtgaccggcatcagcagaaacgtgagcaccaacgtgttcttcaagcagcacgactacatcatcgagttcttcgactacaccaccgtgctgaagcccagcctgaacttcaccgccaccgtgaaggtgaccagagccgacggcaaccagctgaccctggaggagagaagaaacaacgtggtgatcaccgtgacccagagaaactacaccgagtactggagcggcagcaacagcggcaaccagaagatggaggccgtgcagaagatcaactacaccgtgccccagagcggcaccttcaagatcgagttccccatcctggaggacagcagcgagctgcagctgaaggcctacttcctgggcagcaagagcagcatggccgtgcacagcctgttcaagagccccagcaagacctacatccagctgaagaccagagacgagaacatcaaggtgggcagccccttcgagctggtggtgagcggcaacaagagactgaaggagctgagctacatggtggtgagcagaggccagctggtggccgtgggcaagcagaacagcaccatgttcagcctgacccccgagaacagctggacccccaaggcctgcgtgatcgtgtactacatcgaggacgacggcgagatcatcagcgacgtgctgaagatccccgtgcagctggtgttcaagaacaagatcaagctgtactggagcaaggtgaaggccgagcccagcgagaaggtgagcctgagaatcagcgtgacccagcccgacagcatcgtgggcatcgtggccgtggacaagagcgtgaacctgatgaacgccagcaacgacatcaccatggagaacgtggtgcacgagctggagctgtacaacaccggctactacctgggcatgttcatgaacagcttcgccgtgttccaggagtgcggcctgtgggtgctgaccgacgccaacctgaccaaggactacatcgacggcgtgtacgacaacgccgagtacgccgagagattcatggaggagaacgagggccacatcgtggacatccacgacttcagcctgggcagcagcccccacgtgagaaagcacttccccgagacctggatctggctggacaccaacatgggctacagaatctaccaggagttcgaggtgaccgtgcccgacagcatcaccagctgggtggccaccggcttcgtgatcagcgaggacctgggcctgggcctgaccaccacccccgtggagctgcaggccttccagcccttcttcatcttcctgaacctgccctacagcgtgatcagaggcgaggagttcgccctggagatcaccatcttcaactacctgaaggacgccaccgaggtgaaggtgatcatcgagaagagcgacaagttcgacatcctgatgaccagcaacgagatcaacgccaccggccaccagcagaccctgctggtgcccagcgaggacggcgccaccgtgctgttccccatcagacccacccacctgggcgagatccccatcaccgtgaccgccctgagccccaccgccagcgacgccgtgacccagatgatcctggtgaaggccgagggcatcgagaagagctacagccagagcatcctgctggacctgaccgacaacagactgcagagcaccctgaagaccctgagcttcagcttcccccccaacaccgtgaccggcagcgagagagtgcagatcaccgccatcggcgacgtgctgggccccagcatcaacggcctggccagcctgatcagaatgccctacggctgcggcgagcagaacatgatcaacttcgcccccaacatctacatcctggactacctgaccaagaagaagcagctgaccgacaacctgaaggagaaggccctgagcttcatgagacagggctaccagagagagctgctgtaccagagagaggacggcagcttcagcgccttcggcaactacgaccccagcggcagcacctggctgagcgccttcgtgctgagatgcttcctggaggccgacccctacatcgacatcgaccagaacgtgctgcacagaacctacacctggctgaagggccaccagaagagcaacggcgagttctgggaccccggcagagtgatccacagcgagctgcagggcggcaacaagagccccgtgaccctgaccgcctacatcgtgaccagcctgctgggctacagaaagtaccagcccaacatcgacgtgcaggagagcatccacttcctggagagcgagttcagcagaggcatcagcgacaactacaccctggccctgatcacctacgccctgagcagcgtgggcagccccaaggccaaggaggccctgaacatgctgacctggagagccgagcaggagggcggcatgcagttctgggtgagcagcgagagcaagctgagcgacagctggcagcccagaagcctggacatcgaggtggccgcctacgccctgctgagccacttcctgcagttccagaccagcgagggcatccccatcatgagatggctgagcagacagagaaacagcctgggcggcttcgccagcacccaggacaccaccgtggccctgaaggccctgagcgagttcgccgccctgatgaacaccgagagaaccaacatccaggtgaccgtgaccggccccagcagccccagccccgtgaagttcctgatcgacacccacaacagactgctgctgcagaccgccgagctggccgtggtgcagcccaccgccgtgaacatcagcgccaacggcttcggcttcgccatctgccagctgaacgtggtgtacaacgtgaaggccagcggcagcagcagaagaagaagaagcatccagaaccaggaggccttcgacctggacgtggccgtgaaggagaacaaggacgacctgaaccacgtggacctgaacgtgtgcaccagcttcagcggccccggcagaagcggcatggccctgatggaggtgaacctgctgagcggcttcatggtgcccagcgaggccatcagcctgagcgagaccgtgaagaaggtggagtacgaccacggcaagctgaacctgtacctggacagcgtgaacgagacccagttctgcgtgaacatccccgccgtgagaaacttcaaggtgagcaacacccaggacgccagcgtgagcatcgtggactactacgagcccagaagacaggccgtgagaagctacaacagcgaggtgaagctgagcagctgcgacctgtgcagcgacgtgcagggctgcagaccctgcgaggacggcgccagcggcagccaccaccacagcagcgtgatcttcatcttctgcttcaagctgctgtacttcatggagctgtggctgtag

SEQ ID NO: 235257 - protein, 302 aa, Artificial Sequence
  derived and/or modified sequence
MDEQSQGMQGPPVPQFQPQKALRPDMGYNTLANFRIEKKIGRGQFSEVYRAACLLDGVPVALKKVQIFDLMDAKARADCIKEIDLLKQLNHPNVIKYYASFIEDNELNIVLELADAGDLSRMIKHFKKQKRLIPERTVWKYFVQLCSALEHMHSRRVMHRDIKPANVFITATGVVKLGDLGLGRFFSSKTTAAHSLVGTPYYMSPERIHENGYNFKSDIWSLGCLLYEMAALQSPFYGDKMNLYSLCKKIEQCDYPPLPSDHYSEELRQLVNMCINPDPEKRPDVTYVYDVAKRMHACTASS

SEQ ID NO: 235258 - DNA, 909 bp, Artificial Sequence
  derived and/or modified sequence
atggacgagcagagtcaaggcatgcaggggccccccgtgcctcagtttcagccccaaaaggcattacgtccggatatgggatataataccctggctaattttcgcatcgagaaaaagattggccgcggtcagttttcggaggtgtaccgagcagcatgcctccttgacggtgttcctgtggcactcaaaaaagtacagatcttcgatctgatggacgctaaggcccgcgctgactgcatcaaggagatcgatttgttgaagcaactgaaccacccaaatgttatcaagtactatgctagctttatcgaggacaacgagctaaatatcgtcctggagctggcagacgcaggagacttatcccggatgatcaaacactttaagaagcagaagaggctcattcccgagcggactgtctggaagtacttcgtgcagttgtgcagcgcgttggagcacatgcactctaggagggtcatgcatcgggacataaagccggctaatgtattcataaccgcaactggcgttgttaagctcggagatctgggtctcggtcggttctttagctccaagaccaccgcagcgcattcgctggtgggaacaccttactacatgtctcccgagcgcatccatgagaacggctataattttaagagcgacatctggagcctgggctgcctgctctatgaaatggcagccctgcagtctcccttttacggggacaaaatgaacctttattccctgtgcaagaaaatcgagcagtgcgattaccccccattgccatcagatcattatagcgaagaactgaggcagctggtgaatatgtgcatcaaccctgatcctgagaaacgacccgatgtaacctacgtgtatgatgtggctaagaggatgcacgcgtgtacggcctcttcttag

SEQ ID NO: 235259 - DNA, 909 bp, Artificial Sequence
  derived and/or modified sequence
atggatgagcagagccagggtatgcaggggcctccagtcccccagttccagccccagaaagcattacggccggacatgggctataacaccctggccaactttcgcatcgaaaaaaagatcggcaggggacagttctcagaggtctacagggcagcttgcctactcgatggcgtgcctgtcgctttaaagaaggtacagatctttgacttgatggacgccaaggcccgggcagactgtatcaaggagattgatctcctgaaacagctcaatcaccctaacgtgatcaaatattacgcaagcttcattgaggataatgagctcaatatcgttcttgagctcgctgacgctggcgatctgtccaggatgatcaaacacttcaagaaacagaagagactcattcctgagaggaccgtttggaagtactttgttcaactttgcagcgcactggagcatatgcattctcgacgcgtaatgcatcgggatattaagcctgctaacgttttcatcaccgccaccggtgtagttaaactcggcgatttgggtctgggcaggttctttagctccaaaaccactgccgcccactccctggtaggaaccccctactacatgtctcccgagagaattcacgaaaacggatataatttcaaaagcgacatatggtctctcggttgtttgctgtacgagatggcagccctacagagcccgttctacggggataagatgaacctttacagtctatgcaaaaagattgaacagtgtgattatccccccctgccatcagatcactattctgaagagctcaggcagttagtgaacatgtgtattaatccggatcctgaaaaacgcccagatgtgacgtacgtgtacgatgttgctaaacgaatgcacgcgtgcactgcctccagttag

SEQ ID NO: 235260 - DNA, 909 bp, Artificial Sequence
  derived and/or modified sequence
atggatgagcagagccagggcatgcagggcccccctgtgccccagttccagccccagaaggccctgcggccagacatgggctacaacaccctggccaacttccgcatcgagaagaagattggccggggccagttcagcgaggtgtacagagctgcctgcctgctggatggagtgcctgtggccctgaagaaggtgcagatctttgacctgatggatgccaaggcccgggctgactgcatcaaggagattgacctgctgaagcagctgaaccaccccaacgtcatcaagtactatgccagcttcattgaagataatgagctgaacatcgtgctggagctggctgatgctggggacctgagcaggatgatcaagcacttcaagaagcagaagaggctcatccctgagaggacagtgtggaagtactttgtgcagctgtgcagcgccctggagcacatgcacagcagaagagtgatgcaccgggacatcaagccagccaacgtgttcatcacagccaccggggtggtgaagctgggggacctgggcctgggccgcttcttcagcagcaagaccacagctgcccacagcctggtgggcaccccctactacatgagccctgagcgcatccatgaaaatggctacaacttcaagagtgacatctggagcctgggctgcctgctgtatgagatggccgccctgcagagccccttctatggagacaagatgaacctgtacagcctgtgcaagaagattgagcagtgtgactacccacccctgcccagcgaccactacagcgaggagctgcggcagctggtgaacatgtgcatcaacccagaccctgagaagaggccagatgtgacctacgtgtatgatgtggccaagaggatgcacgcctgcacagccagcagctag

SEQ ID NO: 235261 - DNA, 909 bp, Artificial Sequence
  derived and/or modified sequence
atggacgagcagagccagggcatgcagggcccccccgtgccccagttccagccacagaaggctctccggcctgatatgggatacaacacactcgccaatttccgcatcgaaaagaagatcggccggggtcagtttagcgaggtgtaccgggctgcctgcctactggatggcgtcccagtagctcttaagaaagtgcagatctttgacctaatggatgctaaagctcgcgccgactgcataaaggaaatcgacctgttgaaacagctcaaccacccgaatgttatcaaatattatgccagcttcatagaggataatgagctgaacattgtgctggaactggctgatgcgggggatctctcccggatgataaagcactttaagaagcagaagaggctgattccagaaagaacagtttggaagtatttcgttcagctctgctccgccctcgaacacatgcactcccgaagggtgatgcatcgcgacatcaagcccgctaacgtgtttattacagccactggcgtcgtgaaactaggagatttgggcctaggaaggttctttagttctaagacgactgcagctcattccctggtggggacaccttattacatgagcccagaacgaatacacgaaaatgggtacaatttcaagtccgatatatggagcctgggatgcttgctgtacgagatggcagctctgcaatctcccttctatggcgataaaatgaacttgtattcgctttgtaagaagatcgagcagtgcgattaccccccccttccctctgatcactactctgaagagctcaggcagctagtaaatatgtgtataaatcccgaccctgagaagaggcctgatgtaacctatgtgtacgacgtggccaagcggatgcacgcctgcactgcatcaagctag

SEQ ID NO: 235262 - DNA, 909 bp, Artificial Sequence
  derived and/or modified sequence
atggacgagcagagccagggcatgcagggcccccccgtgccccagttccagccccaaaaggcccttcgcccagacatgggatacaatacccttgccaactttcgtattgagaaaaagattgggcgaggccagttttccgaagtgtaccgagcggcgtgcttgctggacggggttcctgttgccctgaagaaggtccaaatctttgacttaatggacgcaaaagccagggctgattgtatcaaagagatcgatctcctcaagcagctgaaccatcccaatgtgattaaatactatgcctcctttatcgaggacaatgaactcaatatcgttctggagctggcagacgccggtgatctgagcagaatgatcaaacactttaaaaaacagaaaagactcatacccgagaggacggtttggaaatattttgtgcagttatgctccgcattggaacatatgcactctcgccgggtgatgcaccgtgacattaaaccagcgaacgtattcataaccgccacaggcgtcgtgaagctgggcgacttagggctggggcgattcttcagcagtaagacgacagccgcccacagtcttgtggggacaccatattacatgagtcctgagaggatacacgaaaacggatacaatttcaagagcgatatttggtccttggggtgcctactatacgagatggctgccctgcagtcaccattttatggagacaaaatgaacctgtactccctgtgtaagaagattgaacagtgcgactacccccctctgccatccgatcactacagtgaagagctcaggcagctcgttaacatgtgcatcaacccagacccagagaaaaggccagatgtgacatacgtgtatgacgtggccaagaggatgcacgcttgtaccgcatcctcttag

SEQ ID NO: 235263 - DNA, 4149 bp, Artificial Sequence
  derived and/or modified sequence
gccccgcccctctcctcggggatgccgggatgtttacactcctgacagcggcggcagcaggaggaggatcgggagtcgcgggaggatgggccgccgctaggctcgcactccggacgcgcctcgcagtgcgcagggtgggtgccccgcgcctgcagcgtccgccggggcggcgcggcgggaggtggccgacaggctccgggcctcgcagcctcagcccccggcccagcgcgctttccgacggcggcgccgcgccgagccacccgcccgcccaaggtctctcgcgggcgggagaacggaaaactcccaacttcctgagttctaaagttcctgttgcttcagacaatggatgagcaatcacaaggaatgcaagggccacctgttcctcagttccaaccacagaaggccttacgaccggatatgggctataatacattagccaactttcgaatagaaaagaaaattggtcgcggacaatttagtgaagtttatagagcagcctgtctcttggatggagtaccagtagctttaaaaaaagtgcagatatttgatttaatggatgccaaagcacgtgctgattgcatcaaagaaatagatcttcttaagcaactcaaccatccaaatgtaataaaatattatgcatcattcattgaagataatgaactaaacatagttttggaactagcagatgctggcgacctatccagaatgatcaagcattttaagaagcaaaagaggctaattcctgaaagaactgtttggaagtattttgttcagctttgcagtgcattggaacacatgcattctcgaagagtcatgcatagagatataaaaccagctaatgtgttcattacagccactggggtggtaaaacttggagatcttgggcttggccggtttttcagctcaaaaaccacagctgcacattctttagttggtacgccttattacatgtctccagagagaatacatgaaaatggatacaacttcaaatctgacatctggtctcttggctgtctactatatgagatggctgcattacaaagtcctttctatggtgacaaaatgaatttatactcactgtgtaagaagatagaacagtgtgactacccacctcttccttcagatcactattcagaagaactccgacagttagttaatatgtgcatcaacccagatccagagaagcgaccagacgtcacctatgtttatgacgtagcaaagaggatgcatgcatgcactgcaagcagctaaacatgcaagatcatgaagagtgtaaccaaagtaattgaaagtattttgtgcaagtcatacctccccatttatgtctggtgttaagattaatatttcagagctagtgtgctttgaatccttaaccagttttcatataagcttcattttgtaccagtcacctaaatcacctccttgcaacccccaaatgactttggaataactgaattgcatgttaggagagaaaatgaaacatgatggttttgaatggctaaaggtttatagaatttcttacagttttctgctgataaattgtgtttagatagactgtcagtgccaaatattgaaggtgcagcttggcacacatcagaatagactcatacctgagaaaaagtatctgaacatgtgacttgtttcttttttagtaatttatggacattgagatgaacacaattgtgaacttttgtgaagattttatttttaaacgtttgaagtactagttttagttcttagcagagtagttttcaaatatgattcttatgataaatgtagacacaaactatttgagaaacatttagaactcttagcttatacattcaaaatgtaactattaaatgtgaagatttggggacaaaatgtgagtcagacactgaagagttttttgttttgttttaatatttttgatattctctttgcattgaaatggtataaatgaatccatttaaaaagtggttaaggatttgtttagctggtgtgataataatttttaaagttgcacattgcccaaggctttttttgtgtgtttttattgttgtttgtacatttgaaaaatattctttgaataaccttgcagtactatatttcaatttctttataaatttaagtgcattttaactcataattgtacactataatataagcctaagtttttattcataagttttattgaagttctgatcggtccccttcagaaatttttttatattattcttcaagttactttcttatttatattgtatgtgcattttatccattaatgtttcatactttctgagagtataatacccttttaaaagatatttggtataccaatacttttcctggattgaaaactttttttaaactttttaaaatttgggccactctgtatgcatatgtttggtcttgttaaagaggaagaaaggatgtgtgttatactgtacctgtgaatgttgatacagttacaatttatttgacaaggttgtaattctagaatatgcttaataaaatgaaaactggccatgactacagccagaactgttatgagattaacatttctattgagaagcttttgagtaaagtactgtatttgttcatgaagatgactgagatggtaacacttcgtgtagcttaaggaaatgggcagaatttcgtaaatgctgttgtgcagatgtgttttccctgaatgctttcgtattagtggcgaccagtttctcacagaattgtgaagcctgaaggccaagaggaagtcactgttaaaggactctgtgccatcttacaaccttggatgaattatcctgccaacgtgaaaacctcatgttcaaagaacacttccctttagccgatgtaactgctggttttgtttttcatatgtgtttttcttacactcatttgaatgctttcaagcatttgtaaacttaaaaaatgtataaagggcaaaaagtctgaacccttgttttctgaaatctaatcagttatgtatggtttctgaagggtaattttattttggaataggtaaaggaaacctgttttgtttgtttttcctgagggctagatgcattttttttctcacactcttaatgacttttaacatttatactgagcatccatagatatattcctagaagtatgagaagaattattcttattgaccattaatgtcatgttcattttaatgtaatataattgagatgaaatgttctctggttggaacagatactctcttttttttcttgcaatctttaagaatacatagatctaaaattcattagcttgacccctcaaagtaacttttaagtaaagattaaagcttttcttctcagtgaatatatctgctagaaggaaatagctgggaagaatttaatgatcagggaaattcattatttctatatgtggaaactttttgcttcgaatattgtatctttttaaatctaaatgttcatatttttcctgaagaaaccactgtgtaaaaatcaaattttaattttgaatggaataatttcaaagaactatgaagatgatttgaagctctaatttatatagtcacctataaaatgttctttatatgtgttcataagtaaattttatattgattaagttaaacttttgaattgatttgaggagcagtaaaatgaaagctatatctattctaaaccttatttagacattggtaccagttacccaggtgaaaatatggagtaactttgttttgtatggtaaggtttaggaatggtggatgaagggtatctctatataaataaagtgctcaacaatgtgcaatgattgtaaatttagtaagatattacagccatttcatgaatgctttaccattcaacatagtatctattacaaaacacctttcttgtatccatatacttcaggtgttgctgttaacatttactatgatatttattttaaccaaaatgttactcacattaaatgtttattctttaaaatgaatgtattatgtttttaacccacaaatgcatacttaccctgtgcctcatatttcaatagtactgtaatatggacatcttttgtgaaatacttttattttgttatgctttaaatatacatacaaaaagatttctgttattagctttgaaaattgtataatatcctaatataaacaaaaatataaaaataaaaatgaatacagtaaaa

SEQ ID NO: 235264 - DNA, 1036 bp, Artificial Sequence
  derived and/or modified sequence
acactcctgacagcggcggcagcaggaggaggatcgggagtcgcgggaggatgggccgccgctaggctcgcactccggacgcgcctcgcagtgcgcaggagttctaaagttcctgttgcttcagacaatggatgagcaatcacaaggaatgcaagggccacctgttcctcagttccaaccacagaaggccttacgaccggatatgggctataatacattagccaactttcgaatagaaaagaaaattggtcgcggacaatttagtgaagtttatagagcagcctgtctcttggatggagtaccagtagctttaaaaaaagtgcagatatttgatttaatggatgccaaagcacgtgctgattgcatcaaagaaatagatcttcttaagcaactcaaccatccaaatgtaataaaatattatgcatcattcattgaagataatgaactaaacatagttttggaactagcagatgctggcgacctatccagaatgatcaagcattttaagaagcaaaagaggctaattcctgaaagaactgtttggaagtattttgttcagctttgcagtgcattggaacacatgcattctcgaagagtcatgcatagagatataaaaccagctaatgtgttcattacagccactggggtggtaaaacttggagatcttgggcttggccggtttttcagctcaaaaaccacagctgcacattctttagttggtacgccttattacatgtctccagagagaatacatgaaaatggatacaacttcaaatctgacatctggtctcttggctgtctactatatgagatggctgcattacaaagtcctttctatggtgacaaaatgaatttatactcactgtgtaagaagatagaacagtgtgactacccacctcttccttcagatcactattcagaagaactccgacagttagttaatatgtgcatcaacccagatccagagaagcgaccagacgtcacctatgtttatgacgtagcaaagaggatgcatgcatgcactgcaagcagctaa

SEQ ID NO: 235265 - DNA, 909 bp, Artificial Sequence
  derived and/or modified sequence
atggatgaacagagtcagggaatgcagggtcctccagtgcctcagttccagccccagaaagcccttcggcctgacatgggctacaacactctggcgaacttccgtatagaaaaaaaaatcgggcgtggacagttttccgaagtgtaccgggctgcttgtctgcttgatggagttccagttgccctgaagaaagtgcaaatctttgatctgatggacgcaaaggctagagccgactgcattaaagagattgatctgctcaagcagctgaaccatcccaacgtcattaaatactacgctagcttcatcgaagacaacgagctgaacatagtgcttgaactggcagacgctggggatctgtccagaatgattaagcacttcaaaaagcagaagcggttgatcccggagagaaccgtgtggaaatattttgtccagctatgttcagccctggaacatatgcactctaggcgggtgatgcaccgagatatcaagcccgctaatgtgttcataactgccacaggggtcgttaagttaggggatctcgggctgggcagattctttagctccaagactaccgctgcccactctctcgtcggcaccccttactacatgtctcctgaacgcattcacgaaaacggctataactttaagagcgatatctggtccttagggtgtctgctgtatgaaatggctgccctccaaagcccattttatggggacaaaatgaacctatatagcctctgtaagaagatcgagcagtgcgactacccacctctgcctagtgaccactacagcgaagaacttcggcaactggttaacatgtgcattaacccagaccccgaaaagcggccagacgtcacttatgtgtatgatgtcgccaaaagaatgcatgcatgtactgcctcttcttag

SEQ ID NO: 235266 - DNA, 909 bp, Artificial Sequence
  derived and/or modified sequence
atggatgagcagagccagggtatgcagggcccaccggtcccacagttccagccccaaaaggcactgcgaccggacatgggttataacacacttgccaattttcgcatagaaaaaaagattgggcgaggccaattctcagaagtctatcgcgctgcctgcctgcttgacggcgttcccgtagccctcaagaaagtgcagatcttcgacttgatggatgcgaaggcaagagccgactgcattaaggaaattgacttgctgaagcagttaaatcatcctaacgtgattaaatattacgcttccttcattgaagataatgagctgaacattgtccttgaattagcagacgccggtgatctatccagaatgattaaacacttcaagaagcagaaaagactgattcctgaaagaacagtgtggaaatacttcgtgcagctgtgcagtgcactcgaacacatgcacagccgcagagtcatgcatcgagatatcaagccggcaaatgtgtttattacggctactggagtggtgaaactcggagacctgggcctagggaggttcttcagctctaaaaccactgcagctcactcgctggtcggcactccctactacatgtctcctgagcgaatccatgagaacggatacaacttcaaatcagacatatggagtcttggttgcctcttatacgagatggccgcactgcaatcccctttctacggcgataagatgaatttgtattccctctgcaaaaaaattgaacagtgcgattaccctcctctgccatccgatcattacagcgaagagctgcggcagctggtcaacatgtgcatcaatccagatccagaaaagaggcctgatgtaacatacgtgtacgatgttgccaaaagaatgcatgcctgtaccgcctccagttag

SEQ ID NO: 235267 - DNA, 909 bp, Artificial Sequence
  derived and/or modified sequence
atggacgagcagagccagggcatgcagggcccccccgtgccccagttccagccccagaaggccctgagacccgacatgggctacaacaccctggccaacttcagaatcgagaagaagatcggcagaggccagttcagcgaggtgtacagagccgcctgcctgctggacggcgtgcccgtggccctgaagaaggtgcagatcttcgacctgatggacgccaaggccagagccgactgcatcaaggagatcgacctgctgaagcagctgaaccaccccaacgtgatcaagtactacgccagcttcatcgaggacaacgagctgaacatcgtgctggagctggccgacgccggcgacctgagcagaatgatcaagcacttcaagaagcagaagagactgatccccgagagaaccgtgtggaagtacttcgtgcagctgtgcagcgccctggagcacatgcacagcagaagagtgatgcacagagacatcaagcccgccaacgtgttcatcaccgccaccggcgtggtgaagctgggcgacctgggcctgggcagattcttcagcagcaagaccaccgccgcccacagcctggtgggcaccccctactacatgagccccgagagaatccacgagaacggctacaacttcaagagcgacatctggagcctgggctgcctgctgtacgagatggccgccctgcagagccccttctacggcgacaagatgaacctgtacagcctgtgcaagaagatcgagcagtgcgactacccccccctgcccagcgaccactacagcgaggagctgagacagctggtgaacatgtgcatcaaccccgaccccgagaagagacccgacgtgacctacgtgtacgacgtggccaagagaatgcacgcctgcaccgccagcagctag

SEQ ID NO: 235268 - protein, 545 aa, Artificial Sequence
  derived and/or modified sequence
MLKQSERRRSWSYRPWNTTENEGSQHRRSICSLGARSGSQASIHGWTEGNYNYYIEEDEDGEEEDQWKDDLAEEDQQAGEVTTAKPEGPSDPPALLSTLNVNVGGHSYQLDYCELAGFPKTRLGRLATSTSRSRQLSLCDDYEEQTDEYFFDRDPAVFQLVYNFYLSGVLLVLDGLCPRRFLEELGYWGVRLKYTPRCCRICFEERRDELSERLKIQHELRAQAQVEEAEELFRDMRFYGPQRRRLWNLMEKPFSSVAAKAIGVASSTFVLVSVVALALNTVEEMQQHSGQGEGGPDLRPILEHVEMLCMGFFTLEYLLRLASTPDLRRFARSALNLVDLVAILPLYLQLLLECFTGEGHQRGQTVGSVGKVGQVLRVMRLMRIFRILKLARHSTGLRAFGFTLRQCYQQVGCLLLFIAMGIFTFSAAVYSVEHDVPSTNFTTIPHSWWWAAVSISTVGYGDMYPETHLGRFFAFLCIAFGIILNGMPISILYNKFSDYYSKLKAYEYTTIRRERGEVNFMQRARKKIAECLLGSNPQLTPRQEN

SEQ ID NO: 235269 - protein, 320 aa, Artificial Sequence
  derived and/or modified sequence
MLKQSERRRSWSYRPWNTTENEGSQHRRSICSLGARSGSQASIHGWTEGNYNYYIEEDEDGEEEDQWKDDLAEEDQQAGEVTTAKPEGPSDPPALLSTLNVNVGGHSYQLDYCELAGFPKTRLGRLATSTSRSRQLSLCDDYEEQTDEYFFDRDPAVFQLVYNFYLSGVLLVLDGLCPRRFLEELGYWGVRLKYTPRCCRICFEERRDELSERLKIQHLRARLRGGAGAQHRGGDAAALGAGRGRPRPAAHPGARGDAVHGLLHARVPAAPSLHARPEALRAQRPQPGGPGGHPAALPSAAARVLHGRGPPTRPDGGQRG

SEQ ID NO: 235270 - DNA, 1638 bp, Artificial Sequence
  derived and/or modified sequence
atgctgaaacagtccgagcgccggagatcatggtcatatcggccctggaacaccacagagaatgaagggtcgcagcatcggaggtcaatctgttccctaggagctcgtagtggaagccaggcctccatccacggctggacagaaggaaactacaattactacattgaggaagacgaggacggcgaagaagaagaccagtggaaggatgatctagctgaggaggaccagcaggcaggcgaagtcacaacggctaagcccgaagggcctagtgacccacctgctttgctcagcaccttgaatgtaaacgtggggggccattcctaccagctggactactgtgagttggccggctttcctaagacgagactcggtaggctggcaacctcgactagtcgaagtcggcagctaagcttatgtgatgattatgaggagcagacggacgagtacttttttgatagagaccccgccgtttttcaacttgtgtacaatttctatctgagcggcgtcctcttagttctggacggtctttgtcccaggcgcttcctggaggagctgggttattggggtgtacgactgaagtacacacctaggtgctgccggatatgcttcgaggaaagaagggacgagctgtctgaaagacttaaaatccagcatgagctgagggcacaagcccaggtggaagaggctgaggagctgttccgtgacatgcgattttatggccctcagcggcgaagactgtggaatctcatggaaaaaccctttagcagcgtcgcagccaaggccatcggcgtggctagttccacattcgtcctcgtgagcgtcgttgcgcttgctttgaacacagtcgaagaaatgcaacagcactccggacagggcgaaggcggccctgacctgcgcccgatcctcgaacatgtcgagatgctgtgtatgggattcttcaccctggaatacctcctccgtctcgcttctaccccagacttacgcaggtttgcccgctccgcacttaatcttgttgacctggtagccatcctgccgctatatctccagctgctgctggagtgttttactggggaaggtcaccaacggggccagacagtgggaagtgtgggaaaagtaggccaagtccttagagttatgaggctgatgcgaattttccgcatcctcaagctcgcacgccattccaccggactgcgggctttcggatttacccttaggcagtgttaccagcaggttgggtgccttttattgtttatcgctatgggaatttttactttttccgcagccgtctatagtgtggagcacgatgtcccctctaccaacttcacaaccattccacacagctggtggtgggcagccgtgtctattagtaccgtcggatatggcgatatgtaccccgagacccacctgggaaggttttttgcctttctgtgtatcgcctttgggatcatccttaatgggatgccaattagtatcctgtataacaaattcagcgattactattccaagctcaaggcatacgagtataccacaattcgacgagagcgaggggaggttaattttatgcagcgggccaggaagaagatagccgagtgcctcctgggttcaaacccccaactgaccccccgccaggaaaattag

SEQ ID NO: 235271 - DNA, 963 bp, Artificial Sequence
  derived and/or modified sequence
atgcttaagcagtccgagcgacggcgcagttggtcttatagaccctggaatacaacagagaatgagggctcccagcaccggcggagtatctgctcactgggggccaggtcaggcagtcaggcttccatccatggttggactgaaggcaattataactactacatagaagaagacgaggacggggaggaggaagatcagtggaaggatgaccttgccgaggaggatcagcaagcgggagaggtgactaccgctaaaccggaagggccctccgatccacctgcactactctctaccttaaatgtgaatgtgggcggccactcctaccaactggattactgcgagttagccggtttccctaaaacccgtctgggtcgactcgccaccagtacttcccggagcaggcagttaagcctctgtgatgactacgaggagcagactgacgaatactttttcgaccgcgaccctgcagtctttcaattggtttataatttttatttgtctggggtcctcctcgtcctcgatgggctgtgtcctcggcgatttctggaggagctcggatattggggggtcaggctgaagtataccccaagatgctgccgcatctgttttgaagaacggagagatgagctgtccgaacgtctgaagattcagcatctgagagccagattgaggggcggggcaggggcccagcatagagggggcgacgcagctgcacttggtgccgggagaggtagacccagacccgcagcgcatccaggagcgagaggggacgctgtgcacggactgctccacgcaagagtacccgctgcccccagcctccatgcaagacccgaggcccttcgcgcccagcgtccgcagcccggcggaccaggtggacaccccgccgccttgccatccgcagcagcaagggtcctccatggccggggaccacccaccaggcccgatggggggcagagaggttag

SEQ ID NO: 235272 - DNA, 1638 bp, Artificial Sequence
  derived and/or modified sequence
atgctgaagcagagcgagcggcggcgctcctggagctaccggccctggaacaccacagaaaatgaaggcagccagcacagaagaagcatctgcagcctgggcgcccggagcggcagccaggccagcatccacggctggacagagggcaactacaactactacattgaagaagatgaagatggagaggaggaggaccagtggaaggatgacctggccgaggaggaccagcaggccggggaggtgaccacagccaagccagagggccccagcgaccccccagccctgctgagcaccctgaatgtgaatgtgggcggccacagctaccagctggactactgtgagctggccggcttccccaagacccggctgggccgcctggccaccagcaccagccgcagccggcagctgagcctgtgtgatgattatgaggagcagacagatgagtacttctttgaccgggaccctgctgtgttccagctggtgtacaacttctacctgtctggagtgctgctggtgctggatggcctgtgcccccggcgcttcctggaggagctgggctactggggcgtgcggctgaagtacaccccccgctgctgccgcatctgctttgaggagaggagagatgagctgtctgagcggctgaagatccagcacgagctgcgggcccaggcccaggtggaggaggccgaggagctgttccgggacatgaggttctacggcccccagaggcggcggctgtggaacctgatggagaagcccttcagctctgtggccgccaaggccatcggcgtggccagcagcacctttgtgctggtgtctgtggtggccctggccctgaacacagtggaggagatgcagcagcacagcggccagggcgagggcggccctgacctgcggcccatcctggagcacgtggagatgctgtgcatgggcttcttcaccctggagtacctgctgcggctggccagcaccccagacctgcggagatttgcccggagcgccctgaacctggtggacctggtggccatcctgcccctgtacctgcagctgctgctggagtgcttcaccggggagggccaccagaggggccagacagtgggctctgtgggcaaggtgggccaggtgctgcgggtgatgaggctgatgaggatcttccgcatcctgaagctggcccggcacagcacaggcctgcgggccttcggcttcaccctgcggcagtgctaccagcaggtgggctgcctgctgctcttcatcgccatgggcatcttcaccttctctgctgctgtgtacagcgtggagcatgatgtgcccagcaccaacttcaccaccatcccccacagctggtggtgggccgctgtgtccatcagcacagtgggctacggggacatgtacccagagacccacctgggccgcttctttgccttcctgtgcatcgccttcggcatcatcctgaatggcatgcccatcagcatcctgtacaacaagttcagtgactactacagcaagctgaaggcctatgagtacaccaccatccggcgggagcggggggaggtgaacttcatgcagagggccaggaagaagattgctgagtgcctgctgggcagcaacccccagctgaccccccggcaggagaactag

SEQ ID NO: 235273 - DNA, 963 bp, Artificial Sequence
  derived and/or modified sequence
atgctgaagcagagcgagcggcggcgctcctggagctaccggccctggaacaccacagaaaatgaaggcagccagcacagaagaagcatctgcagcctgggcgcccggagcggcagccaggccagcatccacggctggacagagggcaactacaactactacattgaagaagatgaagatggagaggaggaggaccagtggaaggatgacctggccgaggaggaccagcaggccggggaggtgaccacagccaagccagagggccccagcgaccccccagccctgctgagcaccctgaatgtgaatgtgggcggccacagctaccagctggactactgtgagctggccggcttccccaagacccggctgggccgcctggccaccagcaccagccgcagccggcagctgagcctgtgtgatgattatgaggagcagacagatgagtacttctttgaccgggaccctgctgtgttccagctggtgtacaacttctacctgtctggagtgctgctggtgctggatggcctgtgcccccggcgcttcctggaggagctgggctactggggcgtgcggctgaagtacaccccccgctgctgccgcatctgctttgaggagaggagagatgagctgtctgagcggctgaagatccagcacctgcgggcccggctgcggggcggggccggggcccagcacagaggaggagatgctgctgccctgggcgccggccggggccggcccaggcctgctgcccaccctggggcccggggagatgctgtgcacggcctgctgcacgcccgggtgcctgctgcccccagcctgcacgcccggcctgaggccctgcgggcccagaggccccagcccggcggccctgggggccaccctgctgccctgcccagcgctgctgcccgggtgctgcacggccggggcccccccaccaggccagatggcggccagaggggctag

SEQ ID NO: 235274 - DNA, 1638 bp, Artificial Sequence
  derived and/or modified sequence
atgctgaagcagagcgagcggcggcggagctggagctaccggccctggaatactactgaaaatgaagggagccaacatcggcggtccatttgttccctgggtgctcgatcagggtcccaagcaagcattcacgggtggacagaggggaactacaactactatatcgaggaagacgaagacggagaggaagaagaccagtggaaggacgatctggctgaggaggatcaacaggctggagaggtcacgaccgcgaaacctgaggggcccagtgacccccccgccttactgtctaccctgaatgtgaatgtcggtggacactcataccagctggattattgtgaactcgcaggtttcccaaagacaagactaggtcgactggcaacatccacctcacgctcaagacaactgtccctgtgtgacgactacgaggaacagactgatgagtatttttttgacagagatccagccgtgttccagctcgtgtataatttctatctatcgggcgtactcttggtgctggatggcctgtgtcctcggcgatttctggaagagctcgggtactggggtgtgcgtctgaaatacaccccacgctgctgccgcatttgcttcgaagagaggagagacgagctgagtgaaagactcaagattcagcatgaattacgagctcaagcccaggtggaagaggcagaggaactgtttcgagacatgcggttttacgggccccagcgcaggaggttgtggaacttgatggagaagcctttctcctctgtcgcagcaaaggcaatcggcgtggcttctagcacgttcgtactggtctccgtggtcgccttggctctcaatactgtcgaggaaatgcagcaacatagcggacaaggtgagggcggtccagacttgcgacccatcctggagcacgttgagatgttgtgtatgggcttcttcacactcgagtatctcctgagactcgcttcgacaccagacttacggcgcttcgccagaagcgccttaaacctcgtggacctggtggcgatactccctctgtatttacaattactcctggaatgctttaccggggaagggcaccaacgaggtcaaactgtcgggtccgtgggtaaggtggggcaagtgttacgcgtcatgagacttatgcgcatttttagaatcctgaagctggctaggcactcaaccggcctgagagcttttgggttcacacttcggcagtgctatcaacaggtgggatgtttactgctgttcattgccatggggatcttcacctttagcgccgcagtctatagcgtagagcacgatgtgccctcaaccaattttacgaccattcctcactcatggtggtgggctgccgtgtccatcagcacggtcggttatggagatatgtaccctgaaacccacctaggtcgttttttcgcatttctatgcattgcttttggcataatcttaaatggaatgcccattagtattctctacaacaaattctccgactactactctaagttgaaagcttacgagtacaccaccatccgcagggagcggggagaggttaactttatgcagagagcaagaaaaaagatcgctgaatgtctgctgggctctaatccccagctcacaccgcgtcaggaaaattag

SEQ ID NO: 235275 - DNA, 963 bp, Artificial Sequence
  derived and/or modified sequence
atgctgaagcagagcgagcggcggcggagctggagctaccggccctggaacactactgaaaatgaaggcagccaacacaggaggtcgatctgcagccttggggcaagaagcggcagtcaggcctctatccacggatggaccgagggaaactataactattatatcgaagaggacgaggacggggaagaggaagatcagtggaaggatgacttggcagaggaagaccagcaggccggggaggtgacgacggcaaagccagaaggacccagcgacccccccgccctcctgagtacgctgaatgtcaatgtcggcggccattcgtaccaactcgattactgtgaactagcaggattcccaaaaacacgtcttggacggctggctacttctacgtctcgcagccggcagttgtccctgtgtgacgactacgaggagcagactgatgagtattttttcgatagggacccggcagtttttcaactggtttataacttctacctgtcaggggtgctgctggttctggatggcttatgccccaggcggttcttagaagagcttggctactggggcgttagactgaagtacaccccacgctgttgtagaatctgcttcgaggagagaagggatgagctgtccgagagactcaagatacaacacctcagagcgcgactgagaggcggggccggagcccaacacagagggggtgacgctgccgctctcggtgcaggcagagggcgcccccgtcctgccgcacatcctggtgctcgcggcgatgcggtccacggtctgctgcatgcacgggttcctgccgctccttcgctgcatgcccgaccagaagctctgcgtgcccagaggccgcagcccggcggtcccgggggtcaccccgccgctctgccaagtgccgctgcccgagtgctgcacggaaggggccctcctaccaggccagacggcggacagagaggctag

SEQ ID NO: 235276 - DNA, 2186 bp, Artificial Sequence
  derived and/or modified sequence
gcaagattagagcagtcaacagctgactgcgttcagaccctgcaggctgggctggcctgcccaggacctgagaaggggcagctccggtggcaatgtctgagcccctagctgtgctggtccgggctggcctctctaagacagtgcaggccacgtgatccatcctcctagaggcagtgagcaggtgagggacccctaccacagccaggaggaaaaagctaggcgtccactttccgcagccatgctcaaacagagtgagaggagacggtcctggagctacaggccctggaacacgacggagaatgagggcagccaacaccgcaggagcatttgctccctgggtgcccgttccggctcccaggccagcatccacggctggacagagggcaactataactactacatcgaggaagacgaagacggcgaggaggaggaccagtggaaggacgacctggcagaagaggaccagcaggcaggggaggtcaccaccgccaagcccgagggccccagcgaccctccggccctgctgtccacgctgaatgtgaacgtgggtggccacagctaccagctggactactgcgagctggccggcttccccaagacgcgcctaggtcgcctggccacctccaccagccgcagccgccagctaagcctgtgcgacgactacgaggagcagacagacgaatacttcttcgaccgcgacccggccgtcttccagctggtctacaatttctacctgtccggggtgctgctggtgctcgacgggctgtgtccgcgccgcttcctggaggagctgggctactggggcgtgcggctcaagtacacgccacgctgctgccgcatctgcttcgaggagcggcgcgacgagctgagcgaacggctcaagatccagcacgagctgcgcgcgcaggcgcaggtcgaggaggcggaggaactcttccgcgacatgcgcttctacggcccgcagcggcgccgcctctggaacctcatggagaagccattctcctcggtggccgccaaggccatcggggtggcctccagcaccttcgtgctcgtctccgtggtggcgctggcgctcaacaccgtggaggagatgcagcagcactcggggcagggcgagggcggcccagacctgcggcccatcctggagcacgtggagatgctgtgcatgggcttcttcacgctcgagtacctgctgcgcctagcctccacgcccgacctgaggcgcttcgcgcgcagcgccctcaacctggtggacctggtggccatcctgccgctctaccttcagctgctgctcgagtgcttcacgggcgagggccaccaacgcggccagacggtgggcagcgtgggtaaggtgggtcaggtgttgcgcgtcatgcgcctcatgcgcatcttccgcatcctcaagctggcgcgccactccaccggactgcgtgccttcggcttcacgctgcgccagtgctaccagcaggtgggctgcctgctgctcttcatcgccatgggcatcttcactttctctgcggctgtctactctgtggagcacgatgtgcccagcaccaacttcactaccatcccccactcctggtggtgggccgcggtgagcatctccaccgtgggctacggagacatgtacccagagacccacctgggcaggttttttgccttcctctgcattgcttttgggatcattctcaacgggatgcccatttccatcctctacaacaagttttctgattactacagcaagctgaaggcttatgagtataccaccatacgcagggagaggggagaggtgaacttcatgcagagagccagaaagaagatagctgagtgtttgcttggaagcaacccacagctcaccccaagacaagagaattagtattttataggacatgtggctggtagattccatgaacttcaaggcttcattgctctttttttaatcattatgattggcagcaaaaggaaatgtgaagcagacatacacaaaggccatttcgttcacaaagtactgcctctagaaatactcattttggcccaaactcagaatgtctcatagttgctctgtgttgtgtgaaacatctgaccttctcaatgacgttgatattgaaaacctgaggggagcaacagcttagatttttcttgtagcttctcgtggcatctagctcaataaatatttttggacttga

SEQ ID NO: 235277 - DNA, 1863 bp, Artificial Sequence
  derived and/or modified sequence
accatctcaaccatgaagctgaagacacaggcatccgtattctatagctaattcagttgatttcatctcagcacacatacactgagcgcttcctaagagcgaggttgaccgacatttttattagcaataatctctgccttcttctgattacctagagatttaagaccacataatcatcctctacctcacagggtcaagggagtgggggaggaaatgggctaagaggttctaaatccctcctaacacttgcttcttccaaatcagcaagattagagcagtcaacagctgactgcgttcagaccctgcaggctgggctggcctgcccaggacctgagaaggggcagctccggtggcaatgtctgagcccctagctgtgctggtccgggctggcctctctaagacagtgcaggccacgtgatccatcctcctagaggcagtgagcaggtgagggacccctaccacagccaggaggaaaaagctaggcgtccactttccgcagccatgctcaaacagagtgagaggagacggtcctggagctacaggccctggaacacgacggagaatgagggcagccaacaccgcaggagcatttgctccctgggtgcccgttccggctcccaggccagcatccacggctggacagagggcaactataactactacatcgaggaagacgaagacggcgaggaggaggaccagtggaaggacgacctggcagaagaggaccagcaggcaggggaggtcaccaccgccaagcccgagggccccagcgaccctccggccctgctgtccacgctgaatgtgaacgtgggtggccacagctaccagctggactactgcgagctggccggcttccccaagacgcgcctaggtcgcctggccacctccaccagccgcagccgccagctaagcctgtgcgacgactacgaggagcagacagacgaatacttcttcgaccgcgacccggccgtcttccagctggtctacaatttctacctgtccggggtgctgctggtgctcgacgggctgtgtccgcgccgcttcctggaggagctgggctactggggcgtgcggctcaagtacacgccacgctgctgccgcatctgcttcgaggagcggcgcgacgagctgagcgaacggctcaagatccagcaccttcgtgctcgtctccgtggtggcgctggcgctcaacaccgtggaggagatgcagcagcactcggggcagggcgagggcggcccagacctgcggcccatcctggagcacgtggagatgctgtgcatgggcttcttcacgctcgagtacctgctgcgcctagcctccacgcccgacctgaggcgcttcgcgcgcagcgccctcaacctggtggacctggtggccatcctgccgctctaccttcagctgctgctcgagtgcttcacgggcgagggccaccaacgcggccagacggtgggcagcgtgggtaaggtgggtcaggtgttgcgcgtcatgcgcctcatgcgcatcttccgcatcctcaagctggcgcgccactccaccggactgcgtgccttcggcttcacgctgcgccagtgctaccagcaggtgggctgcctgctgctcttcatcgccatgggcatcttcactttctctgcggctgtctactctgtggagcacgatgtgcccagcaccaacttcactaccatcccccactcctggtggtgggccgcggtgagcatctccaccgtgggctacggagacatgtacccagagacccacctgggcaggttttttgccttcctctgcattgcttttgggatcattctcaacgggatgcccatttccatcctctacaacaagttttctgattactacagcaagctgaa

SEQ ID NO: 235278 - DNA, 1638 bp, Artificial Sequence
  derived and/or modified sequence
atgctaaaacagagcgaacgtaggcgatcttggtcctaccgcccttggaatactactgagaacgagggatctcaacacaggaggtctatatgcagtctcggggctcgctctggatcccaagctagtatccacggctggacggaaggtaattataactattacatagaagaggacgaggacggggaagaagaggaccagtggaaagatgatttggccgaggaggaccagcaggcaggagaagtgacgaccgctaaaccagagggtcccagcgaccctcctgcattactatctactctgaatgtgaatgtgggaggacacagctaccagctggactattgcgagctggctggcttccctaagacaaggctgggcagactcgcaacatccacatcaaggtcccgccagctctctctgtgtgatgattatgaagaacagaccgatgagtacttcttcgacagagaccctgccgtattccaactcgtgtataacttctacctgtccggtgtgctgctggtgctggatgggctgtgtcctaggaggtttctcgaagaattaggctactggggagtgaggcttaagtacacacctcgctgttgtcggatctgtttcgaagaacgccgagatgagctctcggaacggctgaaaatccagcatgaactccgggcacaagcccaggtcgaggaagctgaggaactgtttcgggatatgcgattttacggccctcagcgcagacggttatggaatctgatggagaaacccttctcttcggtcgcagccaaggctattggcgtggcctcaagcacctttgttctggtcagcgtggttgccctggcactgaacactgtagaggaaatgcagcagcatagtggccaaggcgagggaggaccggatcttagacctattctggaacacgttgagatgctgtgcatgggatttttcaccttggagtacctgttgagattggcttccacacccgatttgaggcggttcgctcggtctgcattaaatctggtagacctggtagctattctcccattgtacctgcaactgctcctcgagtgcttcaccggtgaaggacaccagagaggacaaacggtgggctcagtggggaaggtaggccaagtcctgcgagtgatgaggttaatgcggatctttagaatcttgaagctggccaggcacagtactggactgagggctttcggttttacactgagacagtgctatcagcaggttggttgcttactgctatttatcgcgatggggatcttcactttttctgccgctgtatattcagttgaacacgacgtgccatctacgaattttactacgattccccactcttggtggtgggctgccgttagtatcagcacagtcgggtacggagatatgtatcctgaaacccatctcggcaggttctttgcctttctgtgcatcgccttcggcattatattaaatggtatgcccatcagcatattgtataacaagttcagcgactattattccaaactgaaagcctatgaatatacaaccataagaagagaacggggtgaggttaacttcatgcagagagcccgaaagaaaattgctgagtgcctactgggtagcaacccacaactgacgccacgacaagagaactag

SEQ ID NO: 235279 - DNA, 963 bp, Artificial Sequence
  derived and/or modified sequence
atgttgaaacagagcgagcggagaaggtcttggagctatcggccatggaacaccactgagaacgaagggtcacagcataggaggtctatctgcagtctcggcgcacggtccgggtcgcaggcatcgatacacggctggaccgaaggcaattacaattactacattgaagaagacgaagacggggaggaggaggaccaatggaaagatgatctagcggaagaagaccagcaggccggagaggtgacaaccgcaaagcccgaaggcccttcagatccacccgctttgctgagcacactgaatgtgaatgtgggtggccactcttatcagctggactactgcgagttagctgggtttcccaagactcgccttgggagacttgcaacgtcaacatcccggagtaggcagttgtctctctgtgatgattatgaagagcagaccgatgagtatttctttgatagagacccagcagtgtttcagcttgtgtacaatttttatctgtcaggcgtacttctggttctggacggattgtgcccacgcagatttttagaggagctcggctactggggcgtccgactaaagtatacccctagatgctgccggatttgtttcgaggagcgacgcgacgaactgagcgaacgtctgaagattcagcacctgcgtgccagacttaggggcggagccggtgcccagcatcggggtggtgatgccgcagcgcttggcgcaggacgcggacggccacggccagcggctcacccaggggcaaggggggatgccgtccacggcctgttgcatgccagggtccccgcagctcccagcctgcacgccaggcccgaggctctgcgcgctcagagaccccagccaggaggacctggcggacaccccgcagccctgcccagcgcggcagctcgtgtgctgcacggacgcggtccccctacaaggccggacgggggacagcggggatag

SEQ ID NO: 235280 - DNA, 1638 bp, Artificial Sequence
  derived and/or modified sequence
atgctgaagcagagcgagagaagaagaagctggagctacagaccctggaacaccaccgagaacgagggcagccagcacagaagaagcatctgcagcctgggcgccagaagcggcagccaggccagcatccacggctggaccgagggcaactacaactactacatcgaggaggacgaggacggcgaggaggaggaccagtggaaggacgacctggccgaggaggaccagcaggccggcgaggtgaccaccgccaagcccgagggccccagcgacccccccgccctgctgagcaccctgaacgtgaacgtgggcggccacagctaccagctggactactgcgagctggccggcttccccaagaccagactgggcagactggccaccagcaccagcagaagcagacagctgagcctgtgcgacgactacgaggagcagaccgacgagtacttcttcgacagagaccccgccgtgttccagctggtgtacaacttctacctgagcggcgtgctgctggtgctggacggcctgtgccccagaagattcctggaggagctgggctactggggcgtgagactgaagtacacccccagatgctgcagaatctgcttcgaggagagaagagacgagctgagcgagagactgaagatccagcacgagctgagagcccaggcccaggtggaggaggccgaggagctgttcagagacatgagattctacggcccccagagaagaagactgtggaacctgatggagaagcccttcagcagcgtggccgccaaggccatcggcgtggccagcagcaccttcgtgctggtgagcgtggtggccctggccctgaacaccgtggaggagatgcagcagcacagcggccagggcgagggcggccccgacctgagacccatcctggagcacgtggagatgctgtgcatgggcttcttcaccctggagtacctgctgagactggccagcacccccgacctgagaagattcgccagaagcgccctgaacctggtggacctggtggccatcctgcccctgtacctgcagctgctgctggagtgcttcaccggcgagggccaccagagaggccagaccgtgggcagcgtgggcaaggtgggccaggtgctgagagtgatgagactgatgagaatcttcagaatcctgaagctggccagacacagcaccggcctgagagccttcggcttcaccctgagacagtgctaccagcaggtgggctgcctgctgctgttcatcgccatgggcatcttcaccttcagcgccgccgtgtacagcgtggagcacgacgtgcccagcaccaacttcaccaccatcccccacagctggtggtgggccgccgtgagcatcagcaccgtgggctacggcgacatgtaccccgagacccacctgggcagattcttcgccttcctgtgcatcgccttcggcatcatcctgaacggcatgcccatcagcatcctgtacaacaagttcagcgactactacagcaagctgaaggcctacgagtacaccaccatcagaagagagagaggcgaggtgaacttcatgcagagagccagaaagaagatcgccgagtgcctgctgggcagcaacccccagctgacccccagacaggagaactag

SEQ ID NO: 235281 - DNA, 963 bp, Artificial Sequence
  derived and/or modified sequence
atgctgaagcagagcgagagaagaagaagctggagctacagaccctggaacaccaccgagaacgagggcagccagcacagaagaagcatctgcagcctgggcgccagaagcggcagccaggccagcatccacggctggaccgagggcaactacaactactacatcgaggaggacgaggacggcgaggaggaggaccagtggaaggacgacctggccgaggaggaccagcaggccggcgaggtgaccaccgccaagcccgagggccccagcgacccccccgccctgctgagcaccctgaacgtgaacgtgggcggccacagctaccagctggactactgcgagctggccggcttccccaagaccagactgggcagactggccaccagcaccagcagaagcagacagctgagcctgtgcgacgactacgaggagcagaccgacgagtacttcttcgacagagaccccgccgtgttccagctggtgtacaacttctacctgagcggcgtgctgctggtgctggacggcctgtgccccagaagattcctggaggagctgggctactggggcgtgagactgaagtacacccccagatgctgcagaatctgcttcgaggagagaagagacgagctgagcgagagactgaagatccagcacctgagagccagactgagaggcggcgccggcgcccagcacagaggcggcgacgccgccgccctgggcgccggcagaggcagacccagacccgccgcccaccccggcgccagaggcgacgccgtgcacggcctgctgcacgccagagtgcccgccgcccccagcctgcacgccagacccgaggccctgagagcccagagaccccagcccggcggccccggcggccaccccgccgccctgcccagcgccgccgccagagtgctgcacggcagaggcccccccaccagacccgacggcggccagagaggctag

SEQ ID NO: 235282 - protein, 669 aa, Artificial Sequence
  derived and/or modified sequence
MNYLRRRLSDSNFMANLPNGYMTDLQRPQPPPPPPGAHSPGATPGPGTATAERSSGVAPAASPAAPSPGSSGGGGFFSSLSNAVKQTTAAAAATFSEQVGGGSGGAGRGGAASRVLLVIDEPHTDWAKYFKGKKIHGEIDIKVEQAEFSDLNLVAHANGGFSVDMEVLRNGVKVVRSLKPDFVLIRQHAFSMARNGDYRSLVIGLQYAGIPSVNSLHSVYNFCDKPWVFAQMVRLHKKLGTEEFPLIDQTFYPNHKEMLSSTTYPVVVKMGHAHSGMGKVKVDNQHDFQDIASVVALTKTYATAEPFIDAKYDVRVQKIGQNYKAYMRTSVSGNWKTNTGSAMLEQIAMSDRYKLWVDTCSEIFGGLDICAVEALHGKDGRDHIIEVVGSSMPLIGDHQDEDKQLIVELVVNKMAQALPRQRQRDASPGRGSHGQTPSPGALPLGRQTSQQPAGPPAQQRPPPQGGPPQPGPGPQRQGPPLQQRPPPQGQQHLSGLGPPAGSPLPQRLPSPTSAPQQPASQAAPPTQGQGRQSRPVAGGPGAPPAARPPASPSPQRQAGPPQATRQTSVSGPAPPKASGAPPGGQQRQGPPQKPPGPAGPTRQASQAGPVPRTGPPTTQQPRPSGPGPAGRPKPQLAQKPSQDVPPPATAAAGGPPHPQLKASPAQAQP

SEQ ID NO: 235283 - DNA, 522 bp, Artificial Sequence
  derived and/or modified sequence
atgaccttcagcaagctgctgatctgcctggacttcctggacgtgctggagcgcatgggtgtcgctcttctctttatttggaagcaggtggaattactgctgggtatcagcctctactcctttctgacgggaatttcagacgcccccgttacagggatggtcagaatgcccttccccggccctggcgagagaatgggtgggtctcagacatgcccttgtgaagccgcactccctggggagcagcgaggtgcacctgccctctcacggtgggatcacgggttggggggccctaagcccctcccccacccctactgtctggccgacacatgggggcggcaggttgctcctggctcatgtttccttgaggtttgtcccggggccgcctgcgacctggccctctcctttccaagctgtcctaagagatgccaccagagcggcccccagcagctgggatgggctcaagaaagctgcgctttggtgctcttatggctcatggtgatccacacgctggtcctgttctag

SEQ ID NO: 235284 - DNA, 570 bp, Artificial Sequence
  derived and/or modified sequence
atgtgcgccaagagactgagaggccccttcagaatcttcctgcccctgagaaagtacagcttcttccccagccaggtggcccagcccttcgccagcgccgccgtggcccaggccctgctgagcagccccggcaccaacctgcagcagaccctggtgggcggcctgagactgagacacggcagcgtgggcggcgcccagtgggtggtgaaggccgcctgcccctgggagccccaggacgtggcctgctgcggcggcttcaccgtgaccgccagaatcgccgcctgcgtgctgctgtgcctgtgcgagcacatgtacacccccagcgcccacgccagaatgaccttcggcaccgagcacctgctgctgtggcccgcccagagaagagccgaccccagaaccgccgcccccatcagactgcaccagggccagctggaccccagcagagaccccgagaacctgagagcctgggccgtgggcagctgcagagccggcgtggagctgcacggcagccccgtgcacctgcacatgagagccggccagcacatcagcatgttcgccggcgtggcctag

SEQ ID NO: 235285 - DNA, 507 bp, Artificial Sequence
  derived and/or modified sequence
atgaaagggaacacaaactcagccgttaccccggctcctaaatgccactggctggaagatctcccgcccgtacgcagacagcataggtgggtgctgagcccgctgaggccggcagccctgaggaggctacagctattgagcgccgaccggaggccgcttagaagaacaggagcacccccagctcagggccccgcccagcacccttggtccagaggtccccctcgccgacctccccgctccgttaagctgtgccgggcacagcagtggccggagacccgagctgatccactgccggctggtactcgccagggagagtcccccctccccagagggagacgccctgatctggggcagggccgcccatctgccaggcgcctgcccagcgggccctggacccatagaacccgaacacgcgtgagaggttccctgcgagctgccgcacgctcgcagaatgcgaggcgcggtagtcccgcccgacaggctgcgaagccgaaattggaggcctag

SEQ ID NO: 235286 - DNA, 2118 bp, Artificial Sequence
  derived and/or modified sequence
atgaactacctgagaagaagactgagcgacagcaacttcatggccaacctgcccaacggctacatgaccgacctgcagagaccccagccccccccccccccccccggcgcccacagccccggcgccacccccggccccggcaccgccaccgccgagagaagcagcggcgtggcccccgccgccagccccgccgcccccagccccggcagcagcggcggcggcggcttcttcagcagcctgagcaacgccgtgaagcagaccaccgccgccgccgccgccaccttcagcgagcaggtgggcggcggcagcggcggcgccggcagaggcggcgccgccagcagagtgctgctggtgatcgacgagccccacaccgactgggccaagtacttcaagggcaagaagatccacggcgagatcgacatcaaggtggagcaggccgagttcagcgacctgaacctggtggcccacgccaacggcggcttcagcgtggacatggaggtgctgagaaacggcgtgaaggtggtgagaagcctgaagcccgacttcgtgctgatcagacagcacgccttcagcatggccagaaacggcgactacagaagcctggtgatcggcctgcagtacgccggcatccccagcgtgaacagcctgcacagcgtgtacaacttctgcgacaagccctgggtgttcgcccagatggtgagactgcacaagaagctgggcaccgaggagttccccctgatcgaccagaccttctaccccaaccacaaggagatgctgagcagcaccacctaccccgtggtggtgaagatgggccacgcccacagcggcatgggcaaggtgaaggtggacaaccagcacgacttccaggacatcgccagcgtggtggccctgaccaagacctacgccaccgccgagcccttcatcgacgccaagtacgacgtgagagtgcagaagatcggccagaactacaaggcctacatgagaaccagcgtgagcggcaactggaagaccaacaccggcagcgccatgctggagcagatcgccatgagcgacagatacaagctgtgggtggacacctgcagcgagatcttcggcggcctggacatctgcgccgtggaggccctgcacggcaaggacggcagagaccacatcatcgaggtggtgggcagcagcatgcccctgatcggcgaccaccaggacgaggacaagcagctgatcgtggagctggtggtgaacaagatggcccaggccctgcccagacagagacagagagacgccagccccggcagaggcagccacggccagacccccagccccggcgccctgcccctgggcagacagaccagccagcagcccgccggcccccccgcccagcagagaccccccccccagggcggccccccccagcccggccccggcccccagagacagggcccccccctgcagcagagaccccccccccagggccagcagcacctgagcggcctgggcccccccgccggcagccccctgccccagagactgcccagccccaccagcgccccccagcagcccgccagccaggccgccccccccacccagggccagggcagacagagcagacccgtggccggcggccccggcgccccccccgccgccagaccccccgccagccccagcccccagagacaggccggccccccccaggccaccagacagaccagcgtgagcggccccgccccccccaaggccagcggcgccccccccggcggccagcagagacagggccccccccagaagccccccggccccgccggccccaccagacaggccagccaggccggccccgtgcccagaaccggcccccccaccacccagcagcccagacccagcggccccggccccgccggcagacccaagccccagctggcccagaagcccagccaggacgtgcccccccccgccaccgccgccgccggcggccccccccacccccagctgaacaagagccagagcctgaccaacgccttcaacctgcccgagcccgccccccccagacccagcctgagccaggacgaggtgaaggccgagaccatcagaagcctgagaaagagcttcgccagcctgttcagcgactag

SEQ ID NO: 235287 - DNA, 2010 bp, Artificial Sequence
  derived and/or modified sequence
atgaactacctgagaagaagactgagcgacagcaacttcatggccaacctgcccaacggctacatgaccgacctgcagagaccccagccccccccccccccccccggcgcccacagccccggcgccacccccggccccggcaccgccaccgccgagagaagcagcggcgtggcccccgccgccagccccgccgcccccagccccggcagcagcggcggcggcggcttcttcagcagcctgagcaacgccgtgaagcagaccaccgccgccgccgccgccaccttcagcgagcaggtgggcggcggcagcggcggcgccggcagaggcggcgccgccagcagagtgctgctggtgatcgacgagccccacaccgactgggccaagtacttcaagggcaagaagatccacggcgagatcgacatcaaggtggagcaggccgagttcagcgacctgaacctggtggcccacgccaacggcggcttcagcgtggacatggaggtgctgagaaacggcgtgaaggtggtgagaagcctgaagcccgacttcgtgctgatcagacagcacgccttcagcatggccagaaacggcgactacagaagcctggtgatcggcctgcagtacgccggcatccccagcgtgaacagcctgcacagcgtgtacaacttctgcgacaagccctgggtgttcgcccagatggtgagactgcacaagaagctgggcaccgaggagttccccctgatcgaccagaccttctaccccaaccacaaggagatgctgagcagcaccacctaccccgtggtggtgaagatgggccacgcccacagcggcatgggcaaggtgaaggtggacaaccagcacgacttccaggacatcgccagcgtggtggccctgaccaagacctacgccaccgccgagcccttcatcgacgccaagtacgacgtgagagtgcagaagatcggccagaactacaaggcctacatgagaaccagcgtgagcggcaactggaagaccaacaccggcagcgccatgctggagcagatcgccatgagcgacagatacaagctgtgggtggacacctgcagcgagatcttcggcggcctggacatctgcgccgtggaggccctgcacggcaaggacggcagagaccacatcatcgaggtggtgggcagcagcatgcccctgatcggcgaccaccaggacgaggacaagcagctgatcgtggagctggtggtgaacaagatggcccaggccctgcccagacagagacagagagacgccagccccggcagaggcagccacggccagacccccagccccggcgccctgcccctgggcagacagaccagccagcagcccgccggcccccccgcccagcagagaccccccccccagggcggccccccccagcccggccccggcccccagagacagggcccccccctgcagcagagaccccccccccagggccagcagcacctgagcggcctgggcccccccgccggcagccccctgccccagagactgcccagccccaccagcgccccccagcagcccgccagccaggccgccccccccacccagggccagggcagacagagcagacccgtggccggcggccccggcgccccccccgccgccagaccccccgccagccccagcccccagagacaggccggccccccccaggccaccagacagaccagcgtgagcggccccgccccccccaaggccagcggcgccccccccggcggccagcagagacagggccccccccagaagccccccggccccgccggccccaccagacaggccagccaggccggccccgtgcccagaaccggcccccccaccacccagcagcccagacccagcggccccggccccgccggcagacccaagccccagctggcccagaagcccagccaggacgtgcccccccccgccaccgccgccgccggcggccccccccacccccagctgaaggccagccccgcccaggcccagccctag

SEQ ID NO: 235288 - DNA, 597 bp, Artificial Sequence
  derived and/or modified sequence
atgcttttgattctgcttagtgtggccctgctagcactcagctctgcacagaacctgaatgaggatgtttcccaggaggagagtccctccctaattgccggtaatccccaggggccctctcctcagggcggtaacaagccgcaggggccacctcccccacctggcaaaccccaggggccaccaccccaaggcggcaacaaacctcagggtccacccccgcctggcaaaccacaggggccccctccccagggagacaagtccaggtcaccccggtcacctcctggaaaacctcaaggtccacctccgcagggcggcaagccacagggaccgccgccccaggggggcaacaaaccccaagggcctcctccccctggaaagccccagggcccacctgcgcaggggggatccaagagtcagtctgcccgaagcccccccggtaaaccacagggcccaccacagcaggaaggtaataaccctcaggggccacctcctcccgcaggggggaaccctcagcagcctcaggcgcctccagctggacaacctcaaggaccacctcggcctccacaggggggcaggccttctagacccccacagtag

SEQ ID NO: 235289 - DNA, 2118 bp, Artificial Sequence
  derived and/or modified sequence
atgaattatctgagaagacggttatccgatagtaactttatggccaatctgcccaatggctatatgaccgaccttcagcggccccagcccccaccacctcccccaggcgctcactctccaggcgccacacctggtcctgggacagctaccgctgaacgatccagcggcgtcgctccagcagctagccctgccgcaccatcacctggcagctccggagggggaggttttttttctagtctcagtaacgccgtcaaacagactacggctgctgccgccgcgactttttccgagcaggttggtggaggctccggtggagccggccgaggaggcgcagcttcaagagtgcttctcgtgatagacgagccacataccgactgggctaagtattttaaaggaaagaaaattcacggagaaattgatatcaaggtggagcaagctgagttttctgacctcaatctggtggctcatgccaatggaggattttccgtagatatggaggtcttgagaaatggagtgaaggtcgtgaggtcactcaaacccgactttgtgctgataagacagcatgccttctcaatggcccgaaacggagattaccggtcccttgtaattggcctacagtatgccggcatccccagcgtgaacagcctgcattcagtatacaatttctgcgacaagccttgggtatttgctcagatggtgagactccacaagaagctaggaacagaggaattcccgctcatcgatcagaccttctatccaaatcataaggaaatgctcagcagcacgacctatcctgtggttgtcaaaatggggcacgctcattccgggatgggcaaggtgaaagtggataatcaacatgacttccaggacatcgcgtccgtggtggcgctgaccaagacatatgcaactgctgagcctttcatcgatgccaagtatgatgtcagagtacagaagattggacagaattacaaggcctatatgagaacctctgtttccggaaattggaagactaacactggctctgccatgctggaacagatagctatgtctgatcgatacaaactgtgggtcgatacctgtagtgaaatctttggcgggctggatatctgcgccgtggaagcattacatggaaaggacggccgcgatcatatcattgaggtggtgggttcgtccatgccgcttatcggtgaccaccaggatgaagataagcagcttattgtcgaactcgtagtgaacaagatggcccaggccttaccacgccagcggcagagagatgcctccccagggaggggctcccatggccagacaccatcacctggtgccctgcccctaggccgacaaacttcccagcagccagcaggccccccagcacaacagaggccgccccctcagggcggcccaccccagcccgggcctggccctcagaggcagggacctcctctgcaacagaggccgccacctcagggacagcagcatctctcagggcttgggccccccgccggctcacctctgccccagaggttaccgtcgcctacaagtgcaccccagcagccagctagtcaggcagcacctcctactcaagggcagggtcggcagagccgtcccgtcgccggcgggcctggcgcaccgcctgctgcccgacccccagccagcccctcgccccagcggcaagctggaccaccacaggctacccgccagacctccgtgagcggccctgccccccctaaggcctcaggcgcacctcctggcggccagcagcggcaggggcctccacagaagcctcccggacctgctggtcccactcgtcaggcatcacaagccgggccagttccgcgtacggggccaccaaccacgcagcagcccaggcctagcggccccggacccgccggacggccaaagccgcagctcgcacaaaaaccctctcaggatgtacctccccctgcaaccgccgcggcggggggaccccctcatcctcagttgaacaaaagtcaatccctgaccaatgcctttaatttgcccgagcctgccccccccaggccttccctgagccaggacgaagtgaaggcagaaaccatacgctccctaagaaagagtttcgcaagcctcttctcagattag

SEQ ID NO: 235290 - DNA, 2010 bp, Artificial Sequence
  derived and/or modified sequence
atgaattatctgaggaggcggttgagcgactcaaattttatggccaatttgccgaacggatatatgaccgacctgcagagacctcagcctcccccacccccgcctggagcccatagccctggcgcaacacccggccctgggacagctacggctgaaagatctagcggggtcgcccctgctgcttccccagctgccccgagcccgggatcttccggcgggggaggcttcttcagctccctgagcaacgcagtcaagcagacaactgccgccgccgccgccacctttagcgaacaggtagggggaggatctggaggggccggccgaggaggcgccgcgtctcgggtgctgctggtgatcgacgagccccacacagactgggctaagtacttcaaaggtaaaaagattcatggcgaaatcgatatcaaggttgaacaagcagagttcagcgacttgaacctcgtggctcacgccaacggtgggttttctgttgatatggaggtactcaggaacggtgtaaaggtggtccggagcttgaaacctgattttgtcctcattcgacagcatgctttctccatggccagaaacggagactaccggtctttagtgatagggctccagtatgccgggattccttcggttaactctctgcatagcgtatacaacttttgcgataagccttgggtgtttgctcagatggtgcggttacataaaaagctggggacggaggaatttccgttaattgaccagaccttttatccaaatcataaagagatgctctccagtaccacctaccccgtggtcgtaaagatggggcacgcacatagcgggatggggaaggttaaagtcgataatcaacacgatttccaggacatcgcttctgtggtcgccctaacaaaaacctacgcaactgctgagcctttcatcgacgccaaatatgacgtgagggtgcagaaaatcggacagaattacaaagcttatatgcggactagcgtcagcggcaactggaagacgaacacgggatctgctatgctggaacaaattgcaatgagcgaccggtataaactgtgggtcgacacatgttctgagatttttggtggcttggacatttgtgccgttgaagccttgcatgggaaagatggcagagatcatatcatcgaagtagtgggtagttctatgccattgatcggcgatcaccaggacgaggataagcagctgatagtggagttagtggtgaataagatggcccaggcccttccccgccagcgccagagagacgcctcgccaggtagggggtcacacggtcaaaccccctctcccggggctcttccccttggccggcagacttctcagcagcccgcgggcccacctgcccaacagcggccaccgcctcagggtggacctccccagccagggcccggtcctcaacggcagggacccccgctccaacaacgaccccccccacaaggtcagcagcacctgtccgggctcggcccgcctgcgggttcgccattgcctcaacggctcccgagccccacttcggccccccaacagccagcttcccaggcagcacccccaacccaaggacaggggagacaatctcggcccgttgccggcggccctggcgcgcccccggctgcccgcccaccagcatccccttcgccccagcgccaggccgggcctccgcaggccacccggcagacttccgtttcaggcccagcccctccaaaagcatctggagctccacctggcggccagcagcgccagggaccccctcagaagccccccggtcctgccggacctaccaggcaggcatcacaggccggccctgtgccgcgcaccggccctccaacaactcagcagccacgcccctccgggccaggacccgctggccgcccaaaaccccagctggcccagaaaccaagccaagacgtgcccccacccgccacagctgctgccggaggtcccccacacccacagctgaaggcttcacctgcacaggcccagccctag

SEQ ID NO: 235291 - DNA, 2118 bp, Artificial Sequence
  derived and/or modified sequence
atgaactacctgcggcggcggctgagtgacagcaacttcatggccaacctgcccaacggctacatgacagacctgcagaggccccagcccccacctcctcctcctggggcccacagccctggggccaccccaggccctggaacagccacagctgagaggagcagtggagtggccccagctgccagccctgctgcccccagccctggcagcagcggcggcggcggcttcttcagcagcctgagcaatgctgtgaagcagaccacagctgctgctgctgccaccttcagcgagcaggtgggcggcggcagcggcggggccggccggggcggggccgccagccgggtgctgctggtgattgatgagccccacacagactgggccaagtacttcaagggcaagaagatccacggggagattgacatcaaggtggagcaggccgagttcagtgacctgaacctggtggcccacgccaacggcggcttctctgtggacatggaggtgctgagaaatggagtgaaggtggtgcgcagcctgaagccagactttgtgctgatccggcagcacgccttctccatggccagaaatggagactaccgcagcctggtgattggcctgcagtatgccggcatccccagcgtgaacagcctgcacagcgtgtacaacttctgtgacaagccctgggtgtttgcccagatggtgcggctgcacaagaagctgggcacagaggagttccccctgattgaccagaccttctaccccaaccacaaggagatgctgagcagcaccacctaccctgtggtggtgaagatgggccacgcccacagcggcatgggcaaggtgaaggtggacaaccagcacgacttccaggacatcgcctctgtggtggccctgaccaagacctacgccacagctgagcccttcattgatgccaagtatgatgtgcgggtgcagaagattggccagaactacaaggcctacatgaggacctctgtgtctggcaactggaagaccaacacaggcagcgccatgctggagcagatcgccatgtctgaccgctacaagctgtgggtggacacctgcagcgagatctttggaggcctggacatctgtgctgtggaggccctgcacggcaaggatggccgggaccacatcatcgaggtggtgggcagctccatgcccctgattggagaccaccaggatgaggacaagcagctgattgtggagctggtggtgaacaagatggcccaggccctgccccggcagaggcagagagatgccagccctggccggggcagccacggccagacccccagccctggggccctgcccctgggccggcagaccagccagcagcctgctggccccccagcccagcagaggcccccaccccagggcggccccccccagcccggccctggcccccagaggcagggcccccccctgcagcagaggcccccaccccagggccagcagcacctgagcggcctgggccccccagctggcagccccctgccccagaggctgcccagccccaccagcgccccccagcagcctgccagccaggccgccccacccacccagggccagggccggcagagcaggcctgtggccggcggccctggggcccctcctgctgcccggcccccagccagccccagcccccagaggcaggccggccccccccaggccacccggcagacctctgtgtctggccctgccccacccaaggccagcggggcccctcctgggggccagcagaggcagggccccccccagaagcccccaggccctgctggccccacccggcaggccagccaggccggccctgtgcccaggactggaccacccaccacccagcagccccggcccagcggccctggccctgctggccggcccaagccccagctggcccagaagcccagccaggatgtgcccccaccagccacagctgctgctgggggccccccccacccccagctgaacaagagccagagcctgaccaatgccttcaacctgcctgagcccgccccaccccggcccagcctgagccaggatgaggtgaaggccgagaccatccgcagcctgaggaagagctttgccagcctcttcagtgactag

SEQ ID NO: 235292 - DNA, 2010 bp, Artificial Sequence
  derived and/or modified sequence
atgaactacctgcggcggcggctgagtgacagcaacttcatggccaacctgcccaacggctacatgacagacctgcagaggccccagcccccacctcctcctcctggggcccacagccctggggccaccccaggccctggaacagccacagctgagaggagcagtggagtggccccagctgccagccctgctgcccccagccctggcagcagcggcggcggcggcttcttcagcagcctgagcaatgctgtgaagcagaccacagctgctgctgctgccaccttcagcgagcaggtgggcggcggcagcggcggggccggccggggcggggccgccagccgggtgctgctggtgattgatgagccccacacagactgggccaagtacttcaagggcaagaagatccacggggagattgacatcaaggtggagcaggccgagttcagtgacctgaacctggtggcccacgccaacggcggcttctctgtggacatggaggtgctgagaaatggagtgaaggtggtgcgcagcctgaagccagactttgtgctgatccggcagcacgccttctccatggccagaaatggagactaccgcagcctggtgattggcctgcagtatgccggcatccccagcgtgaacagcctgcacagcgtgtacaacttctgtgacaagccctgggtgtttgcccagatggtgcggctgcacaagaagctgggcacagaggagttccccctgattgaccagaccttctaccccaaccacaaggagatgctgagcagcaccacctaccctgtggtggtgaagatgggccacgcccacagcggcatgggcaaggtgaaggtggacaaccagcacgacttccaggacatcgcctctgtggtggccctgaccaagacctacgccacagctgagcccttcattgatgccaagtatgatgtgcgggtgcagaagattggccagaactacaaggcctacatgaggacctctgtgtctggcaactggaagaccaacacaggcagcgccatgctggagcagatcgccatgtctgaccgctacaagctgtgggtggacacctgcagcgagatctttggaggcctggacatctgtgctgtggaggccctgcacggcaaggatggccgggaccacatcatcgaggtggtgggcagctccatgcccctgattggagaccaccaggatgaggacaagcagctgattgtggagctggtggtgaacaagatggcccaggccctgccccggcagaggcagagagatgccagccctggccggggcagccacggccagacccccagccctggggccctgcccctgggccggcagaccagccagcagcctgctggccccccagcccagcagaggcccccaccccagggcggccccccccagcccggccctggcccccagaggcagggcccccccctgcagcagaggcccccaccccagggccagcagcacctgagcggcctgggccccccagctggcagccccctgccccagaggctgcccagccccaccagcgccccccagcagcctgccagccaggccgccccacccacccagggccagggccggcagagcaggcctgtggccggcggccctggggcccctcctgctgcccggcccccagccagccccagcccccagaggcaggccggccccccccaggccacccggcagacctctgtgtctggccctgccccacccaaggccagcggggcccctcctgggggccagcagaggcagggccccccccagaagcccccaggccctgctggccccacccggcaggccagccaggccggccctgtgcccaggactggaccacccaccacccagcagccccggcccagcggccctggccctgctggccggcccaagccccagctggcccagaagcccagccaggatgtgcccccaccagccacagctgctgctgggggccccccccacccccagctgaaggccagccctgcccaggcccagccctag

SEQ ID NO: 235293 - DNA, 2118 bp, Artificial Sequence
  derived and/or modified sequence
atgaactacctgcggcggcggctgagcgacagcaacttcatggccaatctgcccaacggatatatgactgatctgcaacgccctcagcctcccccacctcctccaggtgcacactcacctggggctaccccaggccctggtaccgctacggctgagcggtcatctggtgtagcgcctgctgcgagcccagctgctcctagcccaggcagcagcggaggcggagggttcttttcgagtctgagcaacgcagttaaacagactacagcagcagctgctgccacctttagcgagcaggtaggcgggggctcaggaggagcagggaggggcggtgctgcctctagagtcttattagtgatcgacgagcctcacacagactgggccaagtacttcaaagggaagaagatacatggggagatcgatatcaaagtggagcaggcggagtttagcgacctgaacctggtcgcccacgctaatgggggttttagcgtagacatggaagtgcttcggaatggggtgaaagtggttcggtctctcaaacccgatttcgttcttattagacagcatgcttttagcatggccagaaacggcgattatcgaagtctggttatcgggcttcagtatgcaggcattccttccgtaaattctctgcatagtgtttataatttctgtgataaaccctgggtgtttgcccagatggtgagactgcacaagaagctgggcaccgaggagttccccctcattgaccagacattttatccaaatcacaaagagatgctatctagtacaacctacccagtcgtcgtcaagatgggacatgcacattctggtatgggcaaggtgaaagttgacaaccagcatgatttccaggacattgctagtgtcgtggctctcacaaagacatacgctacggcagagcctttcatcgatgctaaatacgacgtacgcgtccaaaagatcggtcagaattataaggcctacatgaggacaagtgttagcggcaactggaagactaatacggggagcgccatgctggagcagatcgctatgtctgatcggtacaagctgtgggtggatacctgcagcgagatatttggcgggctggatatatgtgctgtggaggccctacacgggaaggatgggagggaccatatcatcgaggtcgtgggttcttccatgcctttgataggtgatcaccaggatgaggacaaacagctcattgtagagctggtggtgaataaaatggctcaggccctgccaagacagaggcaaagagacgcttcacctgggaggggcagtcacggtcagacgccgagccctggcgccctgcccctggggagacagacgagccagcagccagctggtcctcctgcccagcagagaccccctccccagggtggtcccccacagccaggcccgggaccccaaaggcaaggacccccccttcagcagcggcccccccctcaaggtcagcagcatctgagcggcctgggaccccctgccggtagccctttacctcaacggttaccctcccccacctccgctccacagcagcccgcatcgcaggccgctcctccgactcaaggccagggcagacagtccagacctgttgccggtggccctggagccccaccggcagcccgccctccggcttcaccaagcccccaacggcaggctggcccaccgcaggccacgaggcagacctcagtctccggcccagcaccccctaaagcctccggagccccccccggcgggcaacagagacagggaccccctcagaaacctccaggccctgccggtccaacacgccaggctagccaggccggacctgttcctaggactggcccacctacaacccaacagccaaggccctccgggcctggacccgccggacggccaaagccccagttggcacagaaaccttcacaggatgtgcccccacccgcgacggcagctgccggtggaccaccgcacccgcaactgaataaaagtcagagcttgaccaacgcttttaatctccctgagccagcgccgccacggccttcgctctctcaggatgaagtgaaggccgagaccattaggtcactgcggaagtccttcgcttccttgtttagcgattag

SEQ ID NO: 235294 - DNA, 2010 bp, Artificial Sequence
  derived and/or modified sequence
atgaactacctgcggcggcggctgagcgacagcaacttcatggccaatcttcccaatggttatatgaccgacctccagcggcctcagcctcctcctccaccacccggagcgcattctcctggtgccacccccggccctggcactgcaactgcagagcgctcttccggggttgcgcccgcagcctcccccgctgcgcctagccctgggagttcaggaggtggtggtttcttctccagcctgtccaatgcggtgaagcagacaaccgccgccgctgctgcaaccttctctgagcaggtcggtggcggctctggcggagcaggccggggtggcgccgcaagccgtgtcctactggtaatagatgagccccacactgactgggcgaaatactttaagggaaagaaaatccacggggaaattgatattaaggttgagcaggccgaattttcagatcttaatctagtagcccacgctaacggcggcttctcggttgacatggaagtcctgcgtaatggtgtaaaggtagtccgatccctgaagccagacttcgtgctgattcgccaacatgcgttctcaatggccagaaatggggactacaggagtctggtcattggtctgcagtatgctggtattcccagcgtaaacagcctgcatagcgtgtacaatttttgtgacaaaccatgggttttcgcacagatggtacggttgcataaaaaactggggacggaggagttcccacttatcgaccagaccttttacccgaaccacaaagagatgttgtcctctaccacctaccccgtggtcgtgaaaatgggccacgcccattctggtatggggaaggtgaaggtcgataatcagcatgacttccaggatatcgcgtcagtggtggctctaacgaagacttacgcaactgcagagcctttcattgatgctaaatatgatgttcgcgtgcagaaaatcgggcagaactacaaagcctacatgaggacttcagtgagtggaaactggaaaacgaatacaggcagcgctatgctcgaacaaattgcgatgagtgataggtacaagctctgggtagatacgtgcagcgaaatcttcggggggctggacatttgtgctgtggaagccctgcacgggaaagatgggcgcgaccatattatagaggtcgtgggcagttccatgccgctcatcggcgaccatcaggacgaggacaagcagttaatcgtggaactagtggtcaacaagatggctcaggccctcccccggcagcgacagagggacgccagccctgggcgtggctcccacggccagacaccaagcccaggagccctgccgttaggtcggcaaacgagtcagcagcccgctggaccccctgctcaacagaggcctccacctcagggaggaccacctcaacctgggccaggcccgcagcgtcaagggccacctctgcaacaacgccctccaccacagggacagcagcatttgagcggacttgggcctcccgccgggagcccactgccgcagaggttgcccagtcccacatccgctcctcagcaacctgcaagtcaggctgctccgcctacacaagggcagggccgccagtccaggcccgttgccggcggcccaggcgcaccccctgccgcccggcctcccgcctctccttccccgcagcgtcaggccggccccccccaggctactcgccaaacatctgtctccggaccagccccccccaaggcaagcggggcacccccagggggtcagcagcggcaggggccgcctcaaaagccacccggaccagctggtcccacccgacaggcctcacaggcagggccagtgcctaggacgggcccacccaccacccaacagcctaggccatccgggcctggccccgcagggcggcctaagccccagctggcacagaagccctcacaggacgtacccccaccagccaccgccgccgctggcggtccaccacacccccagttgaaggcctcccccgctcaagcgcagccgtag

SEQ ID NO: 235295 - DNA, 2118 bp, Artificial Sequence
  derived and/or modified sequence
atgaactacttgagaagaaggctgtctgactctaacttcatggccaatctacctaacggctacatgactgacctgcagaggcctcagccccctcctcccccacccggtgcccactccccaggagcaacgcccggaccaggaacagccactgccgagcgttcgagcggtgtagctcctgccgctagccctgcagcccctagtcctggatcgtcaggtggcggtggattcttttcttctctctccaacgcagtgaaacagacaaccgcggctgctgctgcaaccttcagtgaacaagttgggggtgggagcgggggtgctgggagaggcggagcagcttcccgcgtactgcttgtgatcgatgagcctcataccgactgggcgaagtacttcaaggggaagaagatccacggggaaattgatatcaaggtggagcaggctgaattcagtgatttgaacctggtcgcacacgcaaatggtggtttttctgtggatatggaggtgcttcgaaatggcgttaaggtggtccggagcctgaagccggactttgtgctcatccggcaacacgctttcagcatggcgaggaacggggactaccgctccctggtcatcggactgcagtatgcaggaatcccttccgtgaatagtttgcactcagtttataacttttgcgacaagccatgggtgttcgcccagatggtcagactgcacaagaagctgggcaccgaagagttcccccttatcgaccaaaccttttacccaaatcataaagaaatgctatcatccacaacctaccccgtggtagtcaagatgggccacgctcactcgggtatgggcaaggtcaaagttgataaccagcacgatttccaagatatcgccagcgtcgtggctttgaccaagacatacgcgacagccgaaccctttattgacgcaaagtacgacgtgagagtccaaaagataggccaaaactataaagcctatatgaggacaagtgtgagtggcaattggaagactaacactggatctgccatgctggagcagatcgctatgagcgatcgatacaaattatgggttgatacgtgttccgagatctttgggggtctggacatttgtgccgtcgaagccctacatggaaaggatggacgagaccatatcatcgaagtggtggggtcctctatgccgctgattggggatcaccaagatgaggataagcagctcatagtagagctggtggttaacaagatggctcaggctctcccaagacagcgccagagggatgccagtcctggccgaggaagccatgggcagaccccaagcccgggagcactgccattgggccgtcagactagtcagcagcccgctggacccccagcccagcagcgacccccacctcaggggggaccaccccagcccggtccagggccacagcgtcaggggccacccttacagcagcggcctccgccacagggacagcagcatctgagcggcctagggccacccgcaggctccccgctgccacagaggctgccttctccaacctcagccccacagcaacctgctagccaggccgctccaccaacccaaggacagggacggcaatctaggccagtagctggcggtccgggagcccctcctgcagcccgaccacccgctagtccatcacctcagagacaggcaggccctcctcaggccacgcgacaaacctcagtaagtggtcctgctccccctaaggcctccggagctccaccagggggacagcaaaggcaaggccctcctcagaagcctcccggacccgctggtcccacaagacaggcctcccaggccggtccggtcccgcgtaccgggcctcccacgacccagcagccacggccaagcggaccaggcccagccggtagaccgaaaccccagttggcccaaaaaccctcgcaggatgtgcccccaccagccactgcagccgctggtggtccgccacatccgcagctgaacaagagccagtccttaacgaacgccttcaatcttccagaacctgcaccaccaaggccttccctgtcacaggatgaggtcaaagcagaaaccattcgttccctgcgaaagagcttcgcatcacttttcagcgattag

SEQ ID NO: 235296 - DNA, 2010 bp, Artificial Sequence
  derived and/or modified sequence
atgaactaccttcgacgccgattatctgacagtaattttatggccaacctacccaatggctacatgaccgatcttcagaggcctcaaccaccacccccacctcccggagcacattctccaggcgcaactcccggtcccggaaccgcaacggccgagaggagttccggcgtggcaccggctgcctcccccgctgcaccatcccccggttcctctggaggcggtgggttttttagctctctgagcaatgccgttaaacagactactgccgcagctgccgctacgttttccgagcaggttggcggagggtcagggggtgcgggaaggggcggtgcggcatctcgcgttcttctggttattgacgagccccacaccgattgggccaagtactttaagggcaagaagattcacggggagatagacatcaaggtggagcaggccgaattctctgatctgaatttggtggctcatgccaacggagggtttagtgtggacatggaagtcctacgcaatggggtgaaagtagttagatcactgaaaccagatttcgttttgattcggcagcatgctttttccatggcccgtaatggggattatcgcagcctggtaatcggactgcaatacgccggaataccgagcgtgaacagcctccattcagtttataatttctgcgacaagccttgggttttcgcccagatggtccggcttcacaagaaactgggcacggaggagttccccttaatcgaccagacattctatcctaaccacaaagagatgctgtccagcactacgtaccctgtggttgttaagatggggcacgcccacagcggaatgggaaaagttaaagtggacaaccagcacgattttcaggatatcgcctccgtggtggcccttacgaagacctacgcaacagcagagccttttatcgacgctaaatatgacgtgagagtgcagaagattggccagaattataaggcatatatgcggacgagtgtgagcggaaactggaaaacaaacaccggatccgcaatgctggagcaaattgccatgtctgatcgctataagctgtgggtggatacatgtagtgagatatttgggggattggatatatgtgccgtcgaggccttgcacggtaaagacggacgagatcacattattgaagtggttggaagcagtatgccgctcataggcgatcatcaggatgaggataaacagctgatagttgagctcgtagtgaacaaaatggcacaggctctccccagacagcgtcagagagatgcatcccctggaagaggctcacacggacaaacacccagtcctggcgctctgcccttggggaggcagacaagccagcagcccgctggacccccagctcagcagcgtccgccacctcaggggggacccccacagcctggacctggtcctcaacgccagggtccaccgttgcagcagcgacctcctcctcagggtcagcagcacctatccggcctgggtcccccagctgggtctccactgccacaacggctgcctagccctacatctgctccccagcaacccgctagccaggccgcaccccctactcaggggcaagggaggcagtcacgacccgttgctggagggccaggcgcaccaccagccgctaggccccctgcctctccctcgccccaacggcaggccggtcccccacaggccaccaggcagaccagcgtaagcggaccagccccacctaaggcgagcggagctcccccaggcggtcagcagagacagggtccacctcaaaagcccccaggtccagccggtcccacacggcaggcctctcaagccggacccgtgcccaggactggtcctcccactactcagcaaccgaggcccagcggccctgggcctgcgggaagacccaagcctcagttagctcaaaaaccatctcaggacgtcccccctcctgccacagctgcagctggaggacctccccaccctcagctgaaagcatcccctgcacaggcccagccttag

SEQ ID NO: 235297 - DNA, 3203 bp, Artificial Sequence
  derived and/or modified sequence
tgcggtgggcagcggaggagtcgtgtcgtgcctgagagcgcagctgtgctcctgggcaccgcgcagtccgcccccgcggctcctggccagaccacccctaggaccccctgccccaagtcgcagccatgaactacctgcggcgccgcctgtcggacagcaactttatggccaatctgccaaatgggtacatgacagacctgcagcgtccgcagccgcccccaccgccgcccggtgcccacagccccggagccacgcccggtcccgggaccgccactgccgagaggtcctccggggtcgccccagcggcctctccggccgcccctagccccgggtcctcggggggcggtggcttcttctcgtcgctgtccaacgcggtcaagcagaccacggcggcggcagctgccaccttcagcgagcaggtgggcggcggctctgggggcgcaggccgcgggggagccgcctccagggtgctgctggtcatcgacgagccgcacaccgactgggcaaaatacttcaaagggaaaaagatccatggagaaattgacattaaagtagaacaggccgaattctctgatctcaaccttgtggcccatgccaatggtggattctctgtggatatggaagttcttcggaatggggtgaaggtcgtgcggtctctgaagccggattttgtgctgatccgccagcacgccttcagcatggcacgcaacggagactaccgcagtttggtcattgggctgcagtatgctggaatccccagtgttaactccttgcattctgtctacaacttctgtgacaagccctgggtgtttgcccagatggttcgactgcataagaaactggggacagaagaattccctctaattgatcagaccttctaccccaatcacaaagaaatgctcagcagtacaacgtaccccgtggttgtgaagatggggcacgcacactctgggatgggcaaggtcaaggttgacaaccagcatgacttccaggacatcgcaagtgtcgtggcactgaccaagacgtatgccactgccgagcccttcatcgatgccaaatatgacgtgcgtgtccagaagattgggcagaactacaaggcctacatgaggacgtcagtgtcagggaactggaagaccaatactggctctgcgatgctggagcaaattgccatgtctgacagatacaagctgtgggtggacacgtgctcagagatttttgggggactggacatctgcgcagtggaagcgctacatggcaaggacggaagggatcacatcattgaggtggtgggttcctccatgccgctcattggtgaccaccaggatgaagacaaacagctcatcgtagagctcgtggtcaacaagatggctcaggccctgccccggcagcgacagcgggatgcctcccctggcaggggctcccatggccagactccgtccccaggggccctgcccttgggccgccagacctcccagcagcccgcagggcccccggctcagcagcgacccccaccacagggcggccctccacagccgggtccaggcccccagcgccagggacccccattgcagcagcgcccgcccccgcagggccagcagcacctttcaggccttggacccccagctggcagccccctgccccagcgccttccaagtcccacctcagcgccccagcagcccgcgtcccaggccgcgccgccgacccagggtcaaggccgccaatcccggccagtggcgggaggccccggggcgcctccagcagcccgcccgcccgcctctccgtctccccagcgccaggcgggccccccacaggctacccgtcagacatccgtctctggcccggctccgccaaaggcctctggggccccaccgggcgggcagcagcgccagggcccgccccagaaacccccaggcccagccggccccacacgccaggccagccaggcgggtcccgtgccccgcactgggccacccaccacgcagcagcctcggcccagcggcccgggccccgctggacgtcccaaaccacagctggcccagaaacccagccaggacgtgccgccacccgccaccgccgctgcagggggacctccgcacccccagctcaacaaatcccagtctctgaccaatgccttcaaccttccagagccagccccgcccaggcccagccttagccaggacgaggtgaaagctgagaccatccgcagcctgaggaagtctttcgccagcctcttctccgactgataccccactctgagaaccccaaaatccctgggcaacccttctctgggccctgaatccatttctcacttttggagtctccaaatcccttgagaacccatctcccggttctccaagattccacctctcattcctcaagatccccgagtaccttgagaaacctgactcctcctggccctaaatccggttctcacatgtggaatccccaagtccttttagaaccccactcgtggtcacttcaggatctacttctgttttagaacctccacattcctgaagacctccgcccctggtttccccagagggcgttttccttcctggaagtgcccaaataccaggcaacccattgcagaatcccttcctggagccctgaagttcctggaaaaccctatttttggtcccaaatctctccagcacacctatttcccatcataattttccaaatcctcaagaaacccctactgttgagccccttcccatggatcttccatccctctgaagatccacatcttcaaatgccacccaacacctagccccacaaggatttcccttcaccagctcccctcaacctcattcaataccttgggagcccctcccacttccaggacccctcggttcccccagggaccccctccccagtttcctgcctctgacagctgtctttaaatatgcaaactccacccatcttcccagaatcctttgcacacggaaggccagtggtctccgcttccccacctttgctgtggtgtctgtgtctgtgactgacgtggcctccttttgtgccgtgcttggcatatgtggtcctcgttcatcgtgccgcctgtggtgatgcgtgcagtgacgctgtttatgtggtccgcacctccccctgaccttcactccttgcctggactcaccccacccctcagcggctctgaaccccaagagaagagtcgggaaacaaaataaacaagcaaaggccca

SEQ ID NO: 235298 - DNA, 3165 bp, Artificial Sequence
  derived and/or modified sequence
tgcggtgggcagcggaggagtcgtgtcgtgcctgagagcgcagctgtgctcctgggcaccgcgcagtccgcccccgcggctcctggccagaccacccctaggaccccctgccccaagtcgcagccatgaactacctgcggcgccgcctgtcggacagcaactttatggccaatctgccaaatgggtacatgacagacctgcagcgtccgcagccgcccccaccgccgcccggtgcccacagccccggagccacgcccggtcccgggaccgccactgccgagaggtcctccggggtcgccccagcggcctctccggccgcccctagccccgggtcctcggggggcggtggcttcttctcgtcgctgtccaacgcggtcaagcagaccacggcggcggcagctgccaccttcagcgagcaggtgggcggcggctctgggggcgcaggccgcgggggagccgcctccagggtgctgctggtcatcgacgagccgcacaccgactgggcaaaatacttcaaagggaaaaagatccatggagaaattgacattaaagtagaacaggccgaattctctgatctcaaccttgtggcccatgccaatggtggattctctgtggatatggaagttcttcggaatggggtgaaggtcgtgcggtctctgaagccggattttgtgctgatccgccagcacgccttcagcatggcacgcaacggagactaccgcagtttggtcattgggctgcagtatgctggaatccccagtgttaactccttgcattctgtctacaacttctgtgacaagccctgggtgtttgcccagatggttcgactgcataagaaactggggacagaagaattccctctaattgatcagaccttctaccccaatcacaaagaaatgctcagcagtacaacgtaccccgtggttgtgaagatggggcacgcacactctgggatgggcaaggtcaaggttgacaaccagcatgacttccaggacatcgcaagtgtcgtggcactgaccaagacgtatgccactgccgagcccttcatcgatgccaaatatgacgtgcgtgtccagaagattgggcagaactacaaggcctacatgaggacgtcagtgtcagggaactggaagaccaatactggctctgcgatgctggagcaaattgccatgtctgacagatacaagctgtgggtggacacgtgctcagagatttttgggggactggacatctgcgcagtggaagcgctacatggcaaggacggaagggatcacatcattgaggtggtgggttcctccatgccgctcattggtgaccaccaggatgaagacaaacagctcatcgtagagctcgtggtcaacaagatggctcaggccctgccccggcagcgacagcgggatgcctcccctggcaggggctcccatggccagactccgtccccaggggccctgcccttgggccgccagacctcccagcagcccgcagggcccccggctcagcagcgacccccaccacagggcggccctccacagccgggtccaggcccccagcgccagggacccccattgcagcagcgcccgcccccgcagggccagcagcacctttcaggccttggacccccagctggcagccccctgccccagcgccttccaagtcccacctcagcgccccagcagcccgcgtcccaggccgcgccgccgacccagggtcaaggccgccaatcccggccagtggcgggaggccccggggcgcctccagcagcccgcccgcccgcctctccgtctccccagcgccaggcgggccccccacaggctacccgtcagacatccgtctctggcccggctccgccaaaggcctctggggccccaccgggcgggcagcagcgccagggcccgccccagaaacccccaggcccagccggccccacacgccaggccagccaggcgggtcccgtgccccgcactgggccacccaccacgcagcagcctcggcccagcggcccgggccccgctggacgtcccaaaccacagctggcccagaaacccagccaggacgtgccgccacccgccaccgccgctgcagggggacctccgcacccccagctcaaagccagccccgcccaggcccagccttagccaggacgaggtgaaagctgagaccatccgcagcctgaggaagtctttcgccagcctcttctccgactgataccccactctgagaaccccaaaatccctgggcaacccttctctgggccctgaatccatttctcacttttggagtctccaaatcccttgagaacccatctcccggttctccaagattccacctctcattcctcaagatccccgagtaccttgagaaacctgactcctcctggccctaaatccggttctcacatgtggaatccccaagtccttttagaaccccactcgtggtcacttcaggatctacttctgttttagaacctccacattcctgaagacctccgcccctggtttccccagagggcgttttccttcctggaagtgcccaaataccaggcaacccattgcagaatcccttcctggagccctgaagttcctggaaaaccctatttttggtcccaaatctctccagcacacctatttcccatcataattttccaaatcctcaagaaacccctactgttgagccccttcccatggatcttccatccctctgaagatccacatcttcaaatgccacccaacacctagccccacaaggatttcccttcaccagctcccctcaacctcattcaataccttgggagcccctcccacttccaggacccctcggttcccccagggaccccctccccagtttcctgcctctgacagctgtctttaaatatgcaaactccacccatcttcccagaatcctttgcacacggaaggccagtggtctccgcttccccacctttgctgtggtgtctgtgtctgtgactgacgtggcctccttttgtgccgtgcttggcatatgtggtcctcgttcatcgtgccgcctgtggtgatgcgtgcagtgacgctgtttatgtggtccgcacctccccctgaccttcactccttgcctggactcaccccacccctcagcggctctgaaccccaagagaagagtcgggaaacaaaataaacaagcaaaggccca

SEQ ID NO: 235299 - protein, 359 aa, Artificial Sequence
  derived and/or modified sequence
MKATIILLLLAQVSWAGPFQQRGLFDFMLEDEASGIGPEVPDDRDFEPSLGPVCPFRCQCHLRVVQCSDLGLDKVPKDLPPDTTLLDLQNNKITEIKDGDFKNLKNLHALILVNNKISKVSPGAFTPLVKLERLYLSKNQLKELPEKMPKTLQELRAHENEITKVRKVTFNGLNQMIVIELGTNPLKSSGIENGAFQGMKKLSYIRIADTNITSIPQGLPPSLTELHLDGNKISRVDAASLKGLNNLAKLGLSFNSISAVDNGSLANTPHLRELHLDNNKLTRVPGGLAEHKYIQVVYLHNNNISVVGSSDFCPPGHNTKKASYSGVSLFSNPVQYWEIQPSTFRCVYVRSAIQLGNYK

SEQ ID NO: 235300 - protein, 75 aa, Artificial Sequence
  derived and/or modified sequence
MKATIILLLLAQVSWAGPFQQRGLFDFMLEDEASGIGPEVPDDRDFEPSLGPVCPFRCQCHLRVVQCSDLGCLPS

SEQ ID NO: 235301 - protein, 179 aa, Artificial Sequence
  derived and/or modified sequence
MKATIILLLLAQVSWAGPFQQRGLFDFMLEDEASGIGPEVPDDRDFEPSLGPVCPFRCQCHLRVVQCSDLGLDKVPKDLPPDTTLLDLQNNKITEIKDGDFKNLKNLHALILVNNKISKVSPGAFTPLVKLERLYLSKNQLKELPEKMPKTLQELRAHENEITKVRKVTFNGLNQMIVI

SEQ ID NO: 235302 - protein, 119 aa, Artificial Sequence
  derived and/or modified sequence
MKATIILLLLAQVSWAGPFQQRGLFDFMLEDEASGIGPEVPDDRDFEPSLGPVCPFRCQCHLRVVQCSDLGLDKVPKDLPPDTTLLDLQNNKITEIKDGDFKNLKNLHALILVNNKISK

SEQ ID NO: 235303 - protein, 174 aa, Artificial Sequence
  derived and/or modified sequence
MKATIILLLLAQVSWAGPFQQRGLFDFMLEDEASGIGPEVPDDRDFEPSLGPVCPFRCQCHLRVVQCSDLGLDKVPKDLPPDTTLLDLQNNKITEIKDGDFKNLKNLHALILVNNKISKVSPGAFTPLVKLERLYLSKNQLKELPEKMPKTLQELRAHENEITKVRKVTFNGLN

SEQ ID NO: 235304 - protein, 178 aa, Artificial Sequence
  derived and/or modified sequence
MKATIILLLLAQVSWAGPFQQRGLFDFMLEDEASGIGPEVPDDRDFEPSLGPVCPFRCQCHLRVVQCSDLGLDKVPKDLPPDTTLLDLQNNKITEIKDGDFKNLKNLHALILVNNKISKVSPGAFTPLVKLERLYLSKNQLKELPEKMPKTLQELRAHENEITKVRKVTFNGLNQMIV

SEQ ID NO: 235305 - DNA, 1080 bp, Artificial Sequence
  derived and/or modified sequence
atgaaagccaccataatcctgctgttgttggcccaggtgagctgggcaggcccgttccagcagcgcggacttttcgacttcatgctcgaagacgaagcctcaggcatcgggcctgaagtgccagacgatcgggatttcgagccaagtttaggacccgtatgtccattccggtgtcagtgccacctgagagtggtgcagtgctccgatctgggacttgataaggtaccaaaagatctccccccagacacgacactcctcgacctgcaaaataataaaattaccgagattaaagacggagactttaaaaatttaaaaaacttacacgctttaatcctggtgaataacaagatctctaaagtgagtccaggcgcattcacacctctggttaaacttgaaagactgtatctctccaagaaccaacttaaggaattacccgagaaaatgcctaagacactgcaggagctgagggcgcacgaaaacgagattacaaaggtgaggaaggttacattcaatggactgaatcaaatgattgtgatcgagcttggtaccaaccccctaaagagttcaggcattgaaaacggcgccttccaaggcatgaagaagctgtcgtatataagaatcgcagataccaatattacttccatcccacagggactccccccatcactgaccgagctccatctagatggtaacaaaatcagccgcgttgatgcagcatctctgaaagggctcaataatctcgcaaaattaggcctgtcctttaattcgatcagcgcagtggataacggcagcctagctaatactcctcacctgcgtgagctccaccttgacaataataagctaacccgggttccaggcggccttgccgaacacaagtatattcaggtggtgtacctgcataacaataacatcagcgtggtggggtcgagcgacttttgcccccctggccacaataccaaaaaggctagttactctggagtgtctctgttttctaaccctgttcagtactgggagattcagccatctacctttagatgcgtctatgtgcgctctgcaatccaattgggcaattataagtag

SEQ ID NO: 235306 - DNA, 1080 bp, Artificial Sequence
  derived and/or modified sequence
atgaaagccaccatcatcctccttctgctagcccaggtatcatgggcaggaccatttcagcagcgtgggctgtttgacttcatgctggaggacgaggcaagtggaattggacctgaggtgccggacgaccgggacttcgaacccagcttgggtcctgtgtgcccatttcggtgccagtgtcacctgagagtagttcagtgttccgacctcgggctcgacaaagttccgaaggacctgcctccagataccaccttgctggacctgcagaacaacaagatcaccgagatcaaggacggagattttaagaatcttaaaaacctgcatgccctgattcttgtaaataacaaaatatctaaggtgagccccggagcgttcaccccgttggtgaagcttgagagattgtacttgagcaagaaccaattgaaagagctgcctgaaaagatgcccaaaactcttcaggaactcagagcccatgagaacgaaatcacgaaagtaaggaaggttactttcaatggcctcaatcagatgatcgtcatagagttagggacaaatccccttaagtcttcaggcatagaaaatggtgcatttcagggaatgaagaagttgagctacatcagaatcgcggacacaaatattacgtcaatcccacagggactgcccccctctctcacagagctgcatctggacggtaacaagattagtagggtcgatgcagcctccctgaaaggattgaacaacctcgccaagcttgggctcagttttaacagcatttcagccgtggacaatggctccctggcaaataccccccatctgagagagctgcatctggacaacaacaaactaactcgcgtacctgggggcctggctgaacataagtacatccaggtggtgtatctgcacaacaacaatattagcgtcgtgggttcctctgatttttgtccaccagggcacaataccaagaaggcttcctattccggcgtttcactgttttccaaccctgtgcagtattgggagatccagccgtcaaccttcaggtgcgtgtatgtcagatcagcaattcagctgggcaattacaagtag

SEQ ID NO: 235307 - DNA, 540 bp, Artificial Sequence
  derived and/or modified sequence
atgaaggcaactattattttgctgcttctcgcccaggtatcttgggctggcccatttcaacaacgcggcctcttcgatttcatgctcgaggacgaagcatctggaattgggcctgaggtgccagatgatagagatttcgagccaagtttagggccagtatgcccatttcgatgccaatgccatctgcgagtcgttcagtgcagcgatttgggcttggacaaggtgcccaaggacttgccacccgacacaactctgctggatctccagaacaataagatcacagagataaaagatggagatttcaaaaacctcaaaaacctgcacgccctgatacttgtgaacaataagatctctaaagtgagcccgggagcgttcacacccctggtcaagctggaaagactatacctcagcaagaatcagctgaaagagctgcccgagaagatgcctaagaccctgcaagaactcagagctcatgaaaacgaaattactaaggtgaggaaagttacattcaacggcttaaatcaaatgatcgtcatttag

SEQ ID NO: 235308 - DNA, 360 bp, Artificial Sequence
  derived and/or modified sequence
atgaaagccacaatcattctgctgctgctggcccaggtgtcgtgggctggtccattccaacagaggggcctgtttgatttcatgctcgaagatgaggcatcaggcatcggacccgaggtacctgatgacagagacttcgagccctctctgggccccgtgtgccctttccgctgccagtgtcacctccgcgtggtgcaatgttctgatctggggctggacaaggtgccaaaagatctgccaccggacaccacactgctggatctccagaataacaagatcaccgagatcaaggacggggattttaaaaatctgaagaatctacacgcgcttattctggtgaataacaaaatttcaaaatag

SEQ ID NO: 235309 - DNA, 525 bp, Artificial Sequence
  derived and/or modified sequence
atgaaagcgactatcattttgctgctcctagcacaggtgagctgggcgggacctttccagcaacggggcctattcgacttcatgttggaggacgaagcaagcggtattggaccggaggttcctgatgatagggacttcgaaccttctttgggtccagtctgcccatttcggtgccaatgtcatctgagagtcgtccagtgctctgatctaggactcgacaaggtgcctaaagatctcccaccagacactactctactggacctccagaataataagattacggaaatcaaagacggggatttcaagaatctcaaaaacctgcacgccctgatcctggtgaacaataaaatctcgaaagtgtcacccggtgcctttactccgctggtgaagcttgagcggctttacctgagcaagaatcaactgaaggagttgccagagaaaatgcctaagactctgcaagaactcagagctcacgaaaacgagatcacaaaagtgagaaaggttacctttaatggacttaactag

SEQ ID NO: 235310 - DNA, 537 bp, Artificial Sequence
  derived and/or modified sequence
atgaaggctactattatattgcttctgctggctcaggtgtcttgggctggcccctttcagcaaaggggactgtttgattttatgctagaggacgaggcctctggcatcgggcctgaagtgcctgacgatagagatttcgagccttcccttggtcctgtgtgtccctttcggtgtcagtgtcaccttagggtggtgcagtgtagtgatctaggtctggacaaggtgccaaaggacctgcctcccgataccactctgctcgatctgcaaaacaacaagatcaccgagatcaaagatggcgactttaaaaacttgaagaatctgcacgcccttatacttgttaataataaaatctcgaaggtgtcacccggcgccttcaccccattagttaagcttgaacgcttatacttgtccaagaatcagctgaaggagctgccagagaaaatgcctaagaccctccaggaactgagagcccatgaaaatgaaattaccaaggtcagaaaagtcactttcaacgggcttaatcagatgatcgtctag

SEQ ID NO: 235311 - DNA, 1080 bp, Artificial Sequence
  derived and/or modified sequence
atgaaggccaccattatcctcctgctcctggcacaggtatcttgggcggggccatttcaacaacgcgggcttttcgactttatgttggaggatgaagccagcggaatcggtccggaagttcccgacgatagagatttcgagccctcactcgggccagtttgcccatttcggtgccagtgtcatctcagagtcgtacagtgctcagacctgggactggacaaagttcccaaagacctgccccccgacaccactctactggacttacagaacaataaaatcaccgagattaaggatggcgactttaagaatcttaagaacttgcatgcactcatcctggtgaacaacaaaatttcgaaggtctcccccggggcttttacgcctttggtcaaactggaacgcttatacctaagcaagaatcagctgaaagaactccccgagaaaatgcccaagacgctccaggagttgcgcgctcacgagaacgagataacaaaagtgcggaaagtcacctttaacggactgaatcagatgatcgttatagaactcgggaccaatccgttgaagagcagcgggatcgagaacggcgcttttcagggcatgaaaaaactttcatacatcagaatcgcagacacaaatatcacatccattccacaaggtcttcctccatctctgaccgagcttcatctggatggtaataagatctcccgcgtggacgccgcctccttgaaagggttaaacaacttggcaaagcttgggctgtctttcaatagtattagcgccgtcgacaatggatctctggccaacacgccacacttgagagagctgcacttggataataataagttgacgcgtgtgcctgggggtttagccgaacataaatacatccaagtcgtctatcttcacaataataacattagcgtcgtgggatcctcagatttctgtccgcccggacataacaccaaaaaagcatcctatagtggagtgtcgctcttctcaaacccagtccaatactgggagatccaaccttcaaccttcaggtgtgtgtacgtgcgctcagctattcaactcggtaattataagtag

SEQ ID NO: 235312 - DNA, 1080 bp, Artificial Sequence
  derived and/or modified sequence
atgaaggccaccatcatcctgctgctgctggcccaggtgtcctgggccggccccttccagcagaggggcctgtttgacttcatgctggaggatgaggccagcggcatcggccctgaggtgcctgatgaccgggactttgagcccagcctgggccctgtgtgccccttccgctgccagtgccacctgcgggtggtgcagtgcagcgacctgggcctggacaaggtgcccaaggacctgcccccagacaccaccctgctggacctgcagaacaacaagatcacagagatcaaggatggagacttcaagaacctgaagaacctgcacgccctgatcctggtgaacaacaagatcagcaaggtgtcccctggggccttcacccccctggtgaagctggagcggctgtacctgagcaagaaccagctgaaggagctgcctgagaagatgcccaagaccctgcaggagctgcgggcccatgaaaatgagatcaccaaggtgaggaaggtgaccttcaacggcctgaaccagatgattgtgattgagctgggcaccaaccccctgaagagcagcggcattgaaaatggagccttccagggcatgaagaagctgagctacatcagaattgctgacaccaacatcaccagcatcccccagggcctgccccccagcctgacagagctgcacctggatggcaacaagatcagccgggtggatgctgccagcctgaagggcctgaacaacctggccaagctgggcctgtccttcaacagcatctctgctgtggacaatggcagcctggccaacaccccccacctgcgggagctgcacctggacaacaacaagctgaccagggtgcctgggggcctggccgagcacaagtacatccaggtggtgtacctgcacaacaacaacatctctgtggtgggcagcagtgacttctgccccccaggccacaacaccaagaaggccagctacagcggcgtgtccctcttcagcaaccctgtgcagtactgggagatccagcccagcaccttccgctgtgtgtatgtgcgcagcgccatccagctgggcaactacaagtag

SEQ ID NO: 235313 - DNA, 540 bp, Artificial Sequence
  derived and/or modified sequence
atgaaggccaccatcatcctgctgctgctggcccaggtgtcctgggccggccccttccagcagaggggcctgtttgacttcatgctggaggatgaggccagcggcatcggccctgaggtgcctgatgaccgggactttgagcccagcctgggccctgtgtgccccttccgctgccagtgccacctgcgggtggtgcagtgcagcgacctgggcctggacaaggtgcccaaggacctgcccccagacaccaccctgctggacctgcagaacaacaagatcacagagatcaaggatggagacttcaagaacctgaagaacctgcacgccctgatcctggtgaacaacaagatcagcaaggtgtcccctggggccttcacccccctggtgaagctggagcggctgtacctgagcaagaaccagctgaaggagctgcctgagaagatgcccaagaccctgcaggagctgcgggcccatgaaaatgagatcaccaaggtgaggaaggtgaccttcaacggcctgaaccagatgatcgtcatctag

SEQ ID NO: 235314 - DNA, 360 bp, Artificial Sequence
  derived and/or modified sequence
atgaaggccaccatcatcctgctgctgctggcccaggtgtcctgggccggccccttccagcagaggggcctgtttgacttcatgctggaggatgaggccagcggcatcggccctgaggtgcctgatgaccgggactttgagcccagcctgggccctgtgtgccccttccgctgccagtgccacctgcgggtggtgcagtgcagcgacctgggcctggacaaggtgcccaaggacctgcccccagacaccaccctgctggacctgcagaacaacaagatcacagagatcaaggatggagacttcaagaacctgaagaacctgcacgccctgatcctggtgaacaacaagatcagcaagtag

SEQ ID NO: 235315 - DNA, 525 bp, Artificial Sequence
  derived and/or modified sequence
atgaaggccaccatcatcctgctgctgctggcccaggtgtcctgggccggccccttccagcagaggggcctgtttgacttcatgctggaggatgaggccagcggcatcggccctgaggtgcctgatgaccgggactttgagcccagcctgggccctgtgtgccccttccgctgccagtgccacctgcgggtggtgcagtgcagcgacctgggcctggacaaggtgcccaaggacctgcccccagacaccaccctgctggacctgcagaacaacaagatcacagagatcaaggatggagacttcaagaacctgaagaacctgcacgccctgatcctggtgaacaacaagatcagcaaggtgtcccctggggccttcacccccctggtgaagctggagcggctgtacctgagcaagaaccagctgaaggagctgcctgagaagatgcccaagaccctgcaggagctgcgggcccatgaaaatgagatcaccaaggtgaggaaggtgaccttcaacggcctgaactag

SEQ ID NO: 235316 - DNA, 537 bp, Artificial Sequence
  derived and/or modified sequence
atgaaggccaccatcatcctgctgctgctggcccaggtgtcctgggccggccccttccagcagaggggcctgtttgacttcatgctggaggatgaggccagcggcatcggccctgaggtgcctgatgaccgggactttgagcccagcctgggccctgtgtgccccttccgctgccagtgccacctgcgggtggtgcagtgcagcgacctgggcctggacaaggtgcccaaggacctgcccccagacaccaccctgctggacctgcagaacaacaagatcacagagatcaaggatggagacttcaagaacctgaagaacctgcacgccctgatcctggtgaacaacaagatcagcaaggtgtcccctggggccttcacccccctggtgaagctggagcggctgtacctgagcaagaaccagctgaaggagctgcctgagaagatgcccaagaccctgcaggagctgcgggcccatgaaaatgagatcaccaaggtgaggaaggtgaccttcaacggcctgaaccagatgattgtgtag

SEQ ID NO: 235317 - DNA, 1080 bp, Artificial Sequence
  derived and/or modified sequence
atgaaggccaccatcatcctgctgctgctggcccaggtgagctgggcagggccattccagcagaggggtctcttcgatttcatgctggaggacgaagcttctggaattgggcctgaggttccagatgatcgggacttcgaacccagcttgggacctgtgtgcccattccgatgtcagtgccatttacgcgttgtgcaatgcagcgacctaggcctcgataaggtccctaaggatctgccccctgataccactctgttagatttacagaataacaaaattacagagataaaagacggcgatttcaaaaatctcaaaaatctgcatgctctgatcctggtcaataacaaaatttctaaagtgtctcccggcgctttcactcctttggtaaagctcgaacggctctatctctccaagaaccagttgaaagagttgcccgaaaagatgcccaagacacttcaggagttgcgggcccacgaaaatgaaattactaaagtcagaaaggtcacctttaatggcctgaatcagatgatcgtgatcgaattaggtaccaaccccctaaagagcagcggcatagaaaatggagccttccaagggatgaaaaagctgagttacatccgcatcgccgatacaaatattacaagtataccacaagggttgccccccagtttgacagagctccatttagacgggaacaagatctcgcgggtggatgccgcaagcctgaaaggactgaataacttagcaaagctcggtctttcttttaatagtatctctgccgtggacaatgggtcactggccaacaccccacacttacgtgagctgcacctggataataataagctgactcgggtacctggaggcctggccgagcacaagtacattcaggtggtgtatcttcataacaataacatatccgtggtaggttctagcgatttttgcccaccagggcacaacacaaaaaaggcttcttactccggagtttccctattctccaatccggtccagtattgggaaatccagccttccacattcaggtgcgtgtacgtccgcagcgcaatacagctcggcaactataagtag

SEQ ID NO: 235318 - DNA, 1080 bp, Artificial Sequence
  derived and/or modified sequence
atgaaggccaccatcatcctgctgctgctggcccaggtgagctgggctggcccatttcagcaacggggcctgtttgacttcatgttggaagatgaggccagcggcattgggcctgaagtgcccgacgatagggattttgagccttccctggggccagtgtgcccattccggtgtcagtgtcacctgagagttgttcagtgttcggatctcggcctagacaaagtgcccaaagacctgccccctgacactaccctgcttgacctacagaataacaagataactgaaatcaaggacggggatttcaagaatctcaagaacttgcatgccttaatcctcgtgaataacaaaattagtaaggtttctccaggcgcatttactcccctcgtgaagttggagcgactctacctgagcaaaaaccaattgaaggaactgcccgaaaagatgcccaagactcttcaggagttaagagcccatgagaatgaaatcactaaggtgcggaaagtgactttcaacgggctaaatcagatgattgtgattgagctgggtacaaacccgctcaaaagcagtggaatagagaatggagcctttcaggggatgaagaagttgtcatacatccgtattgcagataccaacataacaagtatcccccaaggcctccctccctctctgactgagctgcacctcgacggtaataaaatttctcgcgtggatgccgcttctctcaagggtctcaataacctggctaaactgggactgtccttcaattccatttccgcagttgataacggctccctagccaatacaccccacctgcgtgagctgcatctcgataacaacaagttaacgcgagttcctggcggattggcagaacataaatacatccaggtagtgtatctccataataacaacatatctgttgtgggatccagtgacttctgcccaccaggtcacaataccaagaaagcttcctactcaggcgtttctttgtttagcaaccctgttcagtactgggaaatccaaccatccacctttagatgtgtttatgtgcggagcgcgattcagctgggtaactacaagtag

SEQ ID NO: 235319 - DNA, 540 bp, Artificial Sequence
  derived and/or modified sequence
atgaaggccaccatcatcctgctgctgctggcccaggtgagctgggccgggcctttccagcagaggggcctttttgattttatgctggaggacgaggccagcggaataggacctgaagtgccagacgaccgcgacttcgagccttcgctgggtccagtgtgcccctttaggtgccagtgtcacctgagagttgtacagtgttctgatttgggactggataaagtacccaaggatttgcctccagataccacccttctcgacctgcagaataacaaaatcaccgagataaaggatggcgatttcaagaatcttaaaaatcttcacgcgctgatacttgtgaacaacaagatcagcaaagtcagtcccggtgcatttacaccccttgtgaaactagagaggctttacctgtctaaaaatcagctgaaggaactgcctgaaaaaatgccaaagacactgcaggaactgcgggcccacgaaaacgaaatcaccaaggtgagaaaggtcacttttaacggactgaatcagatgattgtaatctag

SEQ ID NO: 235320 - DNA, 360 bp, Artificial Sequence
  derived and/or modified sequence
atgaaggccaccatcatcctgctgctgctggcccaggtgagctgggctggacctttccagcagcgcggcctctttgacttcatgctggaagatgaagcctcaggcatcggcccggaggttccggatgatagggacttcgaacctagcttagggccagtgtgtccatttaggtgccagtgtcacttacgagtggtccagtgttccgatcttggactagacaaagtacccaaagacctgcctcccgacaccacattactcgatctgcagaacaataaaatcactgaaataaaagacggtgacttcaagaaccttaagaacctacacgccctcatcctggtcaataataagataagcaagtag

SEQ ID NO: 235321 - DNA, 525 bp, Artificial Sequence
  derived and/or modified sequence
atgaaggccaccatcatcctgctgctgctggcccaggtgagctgggccggtcctttccagcagcgtggattgtttgacttcatgttggaggatgaggctagtggcataggaccggaagtgcctgacgatagagattttgagccttccctagggccagtgtgtccctttcggtgccagtgccacctgcgtgtggtgcaatgttctgacctcgggctcgataaggtgccaaaagaccttccccccgacaccaccctcctggatctgcaaaacaataaaattaccgaaataaaagacggggatttcaagaacctgaagaaccttcacgcactgatactggttaataataagatcagcaaggtgtctcccggtgctttcacccccctggtgaaacttgagaggctttacctgtccaaaaaccaactgaaggaactccccgagaagatgcccaaaacacttcaggagctgcgagcacatgaaaacgagatcaccaaggtgagaaaggtgactttcaatggcctgaactag

SEQ ID NO: 235322 - DNA, 537 bp, Artificial Sequence
  derived and/or modified sequence
atgaaggccaccatcatcctgctgctgctggcccaggtgagctgggcaggccccttccaacagagggggcttttcgattttatgctggaggatgaagcttcaggcattggacccgaggtcccggacgacagggattttgagcccagtctgggccctgtgtgtccctttcggtgtcagtgtcacctcagggtggtccagtgcagcgacctgggcctcgacaaagttcccaaggatcttccacctgacacaactttactggaccttcaaaacaacaagatcactgaaatcaaggatggtgatttcaaaaatctgaagaatctgcatgcccttatcctcgtgaacaataaaatctcaaaggtctcccctggggcctttaccccgctcgtaaagctcgaaaggctgtatcttagcaaaaatcagttgaaggagctccccgaaaaaatgcccaaaactctgcaggagctgcgggcccacgagaacgaaataactaaagttcgcaaggtcactttcaacgggcttaatcagatgatcgtctag

SEQ ID NO: 235323 - DNA, 1080 bp, Artificial Sequence
  derived and/or modified sequence
atgaaggccaccatcatcctgctgctgctggcccaggtgagctgggccggaccgtttcagcaacgcgggcttttcgacttcatgcttgaagatgaggctagcggcataggccctgaagtgcccgatgatagagactttgagcccagtctgggccctgtgtgccctttcaggtgccaatgccacctgcgagtggtacagtgctccgatctcgggctggataaggttcccaaggacctcccaccggataccacccttctggacctccaaaataataagatcaccgagatcaaagacggagattttaaaaacctgaaaaacctacacgcccttatcctggttaataacaagatttcaaaggtctctccaggtgcgtttacgcctctggttaaactggaaaggctctatttgtcaaagaatcagcttaaggagctccctgagaagatgcctaagacgctgcaggagttgcgcgcccatgagaacgagatcaccaaagttaggaaagtgacgttcaacgggctgaaccagatgattgtgatcgagcttgggacgaacccactgaaatccagcggcatcgagaatggagccttccagggaatgaagaaactttcttacatccggatcgccgatactaatatcacatccatcccccagggattgcccccttctctcactgaacttcacttggatggaaacaagattagtcgggtcgatgctgcaagcctgaaagggttgaataatctcgccaagctgggcctcagcttcaactctatctcagccgtcgacaacggctctcttgccaacacaccccacttgagagagctccacctggataacaataagcttacacgagtgcctggcggattagccgaacataaatacattcaggttgtatacctgcataataacaacatcagcgtcgtaggctccagcgacttttgtccccctggtcacaacactaagaaggcttcgtactctggcgtgagtctgttctccaacccggtccagtattgggagatccagccttccacgttccggtgcgtgtacgtaaggtctgccattcaactcggcaactacaagtag

SEQ ID NO: 235324 - DNA, 1080 bp, Artificial Sequence
  derived and/or modified sequence
atgaaagccactataatactgctcctcctggcccaggtctcttgggcgggaccattccagcaacggggtctgtttgactttatgcttgaggacgaggccagcggtattggacccgaagtgccagatgatcgcgattttgaaccttccctgggcccagtttgtccattcagatgtcagtgtcatctccgtgtggtccagtgcagtgacctgggactggataaagtgccaaaggacttaccccctgatacgaccctactcgatttgcagaacaataagataaccgagatcaaagatggggattttaagaacctgaaaaacctgcatgcccttatactcgtgaataacaaaatcagcaaggtatctcccggagcttttacgccactggtcaagcttgagagactgtacctatccaagaatcagctaaaggaactgcctgaaaagatgcccaagacgcttcaagaacttcgagctcatgaaaatgaaatcactaaggtccgcaaggtgactttcaatggtctgaatcagatgatagtgatcgaacttggaacaaatcccttaaaatcttccgggatagaaaacggggcttttcagggaatgaagaagctctcatatatcaggatagcagacactaatataacctcaatcccacaaggactcccacctagtcttactgagctgcacctagacggtaataagatatcccgggttgacgccgcaagcttgaagggtttaaacaacctggcaaagctggggctctccttcaatagtatttcagctgttgacaacggctctcttgcgaacacaccccacctccgagaactacatctggacaataacaagttaaccagagtcccagggggacttgccgagcataaatacatacaggtagtatacctgcataacaataacatttctgtagtcgggagttctgacttctgcccacccggtcacaatactaaaaaggcctcctactcaggagtgagtctgttcagcaatcccgtgcagtattgggagatccaacccagcactttccgttgcgtgtacgtgcggtcagcgattcagctgggtaattacaagtag

SEQ ID NO: 235325 - DNA, 1080 bp, Artificial Sequence
  derived and/or modified sequence
atgaaggccaccattatcctcctgcttttggcccaagtctcatgggccggacctttccagcagagaggcctgttcgactttatgctggaagatgaggcgtccgggatagggcctgaagtgccagatgatcgcgatttcgaaccatcccttggccctgtatgccccttccgatgtcagtgtcacctgagggtcgtgcaatgcagtgacctcggactggacaaggttcccaaagatctgcctcctgatacaacacttctggacctgcaaaataataaaataaccgaaatcaaggatggtgacttcaagaacctgaagaatctccacgcactcattctcgtcaacaacaaaattagcaaggtgagcccaggagccttcacaccattagtgaagctagaacggctgtacttatccaagaaccaacttaaagagctcccggagaaaatgccaaagacacttcaggaactcagagcacacgagaacgaaattactaaagtgaggaaggtgacgtttaacgggctcaaccaaatgatcgttattgagctgggcaccaaccccctcaaatcgagcggcattgagaatggggctttccagggaatgaaaaagttgagttacatccgaatcgcggataccaatattacctccatccctcagggcttgcctccgagtctcaccgaactgcatctggacggcaacaagatctccagggtggatgccgctagcctgaaagggctaaataacttagccaaactcggcctttcattcaactccataagcgctgtcgacaacggtagtttggctaacacaccgcacctaagggaactccatttggacaacaacaaattaaccagagtccccggaggactggcagagcacaagtatattcaagtggtataccttcataacaacaacatatccgtggtgggttcctccgacttctgtccgccaggccataatactaagaaggcatcatatagcggagttagcctgttttccaaccctgtacagtattgggagatacagcccagcactttcaggtgtgtgtacgttagatctgctattcagttaggtaactacaaatag

SEQ ID NO: 235326 - DNA, 540 bp, Artificial Sequence
  derived and/or modified sequence
atgaaggccacgattattctgctgctattggctcaggtaagctgggctggcccttttcagcagcgaggccttttcgactttatgctggaggacgaggcctctggaatcgggccagaggtgcctgatgaccgggacttcgagccatctttaggtcctgtgtgtccatttcgctgtcagtgccacctccgagtggtgcagtgttctgatctcggactggacaaggtccccaaagatttacctcccgataccacactgctggatctgcaaaataacaaaattacagagataaaggatggagatttcaagaatctcaaaaatctgcacgcgctgatactggtgaataacaaaataagcaaggtctcgccaggtgcttttactcctctggtgaaactggagagactgtaccttagtaagaaccaactaaaagagctgcccgagaaaatgccgaaaacccttcaggaattacgtgctcatgagaacgaaattaccaaagttaggaaggtgactttcaatggtctgaatcagatgatcgttatctag

SEQ ID NO: 235327 - DNA, 360 bp, Artificial Sequence
  derived and/or modified sequence
atgaaggccactattattctcctgctcctggctcaggtctcctgggccggacccttccagcaaagaggtttgtttgacttcatgcttgaggatgaggcctctggcattggaccagaagtccctgacgatagggattttgagccttcactgggacccgtttgtccttttcggtgccagtgccacctgagggtcgtgcagtgctccgacctgggactcgacaaggtgccaaaggacctgcctcccgatactactctactggacctccagaacaataaaattacggagatcaaagatggagattttaagaatctcaaaaatctacatgcgctcatcctggtgaacaataaaataagtaagtag

SEQ ID NO: 235328 - DNA, 525 bp, Artificial Sequence
  derived and/or modified sequence
atgaaagccactatcattctgctattgcttgcgcaggtgtcctgggcaggcccttttcaacaaagaggactcttcgactttatgttggaggacgaggcatccggaatcggccctgaagtcccggatgacagggatttcgaaccctccctagggcctgtgtgtccattccgctgccagtgccatctccgcgtcgtccagtgcagcgacctggggctcgataaggtgccaaaagacctgccacctgacactacactgcttgaccttcagaataataagataaccgaaattaaagacggagatttcaaaaatcttaaaaacttacatgcactcattttggtaaataacaaaatcagtaaggtgagccctggtgccttcacccccctggtgaagttagaacggctgtacctatccaagaatcaacttaaagagttgccagaaaaaatgccgaaaacactacaagaattacgggcacatgaaaatgagattactaaggtgcgtaaagtcacctttaatggattgaattag

SEQ ID NO: 235329 - DNA, 537 bp, Artificial Sequence
  derived and/or modified sequence
atgaaggctactatcattctcttactcctggcgcaggtttcttgggccggtccttttcagcagagaggacttttcgacttcatgcttgaggatgaggcaagtggaatcggccctgaagtgcccgacgatcgggatttcgagccctcgctcggccctgtttgtcccttcagatgccagtgccacctccgagtggtgcaatgctcagacctgggactggacaaggtgcctaaagacctaccaccagatactacactcttagatctgcagaacaacaaaatcacggagattaaagatggtgatttcaagaacttgaagaatcttcatgccctgatattagtgaataacaaaatatccaaggtctcccctggcgcttttaccccactggtgaaactggaacgcctctacttatcaaaaaaccagttgaaagagcttcctgaaaagatgccaaagacccttcaggaactcagggcacacgagaacgagatcactaaagtgcgcaaggtgacatttaacggcctgaaccagatgattgtttag

SEQ ID NO: 235330 - DNA, 1080 bp, Artificial Sequence
  derived and/or modified sequence
atgaaggccactataattctgctgctgttagcacaggtctcctgggctggccctttccagcagaggggactctttgacttcatgcttgaggatgaggctagtggtatcggtccagaagttcctgatgaccgagactttgagccgagcctggggccagtatgtccatttcgctgccagtgtcacctcagagtggtgcagtgcagcgatctcggacttgacaaggtaccaaaggacctgccaccagatacgaccctgctggatcttcaaaacaataagatcacagaaattaaagacggggacttcaaaaatttgaaaaacctccacgctcttatccttgttaataataaaatttccaaggtgtctcccggtgcttttacccccctggtaaagctcgagcggctgtatctgtcaaagaaccagcttaaggagctgcctgaaaaaatgcccaagacacttcaggagctgagagcgcatgaaaatgagattaccaaggtccgcaaggtgacattcaatggccttaatcaaatgatcgtgatagagctaggaaccaatccactgaagtcctcgggtatcgagaacggggcttttcagggaatgaagaagctctcttacattagaatcgccgatacaaatatcactagtatccctcagggtctgcccccttcactcaccgagcttcacctggacggtaacaaaatcagtagggtggacgctgcgtctttgaaaggactgaacaacctcgccaaactcggactctcttttaatagcattagcgcggttgataatggatctctggcaaacacgcctcacttgcgcgaattgcatcttgataacaacaaattgactcgggtccctggaggactagccgagcacaagtacatacaggttgtgtacctgcataacaacaatataagtgtggtggggtcctcagacttttgcccaccgggtcacaatacaaaaaaggcctcatactcaggcgtttctctgttctccaatccagtgcaatattgggagattcagccatctacatttcgctgtgtgtacgtccgaagtgccatacagctgggcaactacaagtag

SEQ ID NO: 235331 - DNA, 1080 bp, Artificial Sequence
  derived and/or modified sequence
atgaaggcaacaattatactgttgttgttggctcaggtaagctgggcaggaccctttcagcagcggggccttttcgacttcatgttagaggatgaggcatcaggtattggaccagaagtgcctgacgaccgagacttcgaaccttcgctgggccccgtttgccctttccgatgtcagtgtcatcttagggtggtgcagtgctcggatttgggcctggataaggtgcctaaagatctccctccagataccactctcctggatttacagaataataagattacagagatcaaagatggtgactttaaaaatctgaaaaacctacacgctctgatcctggtgaacaataagatcagtaaagtaagcccaggcgcgtttacgcccttggtcaagctggaacgcttatacctctcaaagaaccagctaaaagagctgcccgaaaagatgcctaaaacacttcaggagctcagagcccatgagaacgagataacaaaagtccgaaaggtgacatttaatggccttaatcagatgatcgtgatcgaactgggaacgaacccgttgaaaagctcaggaattgagaatggcgcatttcaggggatgaaaaaattatcctatatccgtattgccgacacaaacatcacttcaataccacagggtctaccgccctctctcactgaactgcacctcgacgggaacaaaatatctagagtggatgcagcctcccttaagggtctcaacaatctcgcaaagcttgggctgtctttcaactcaatttctgcagtggacaatgggtccctcgccaacactccacacctaagggaactccacctggacaacaacaaacttacacgcgtcccgggaggactagcagaacacaagtacatccaagtggtatatttacacaacaataatatttctgtcgtaggatctagtgatttctgtcccccaggacacaacaccaagaaggcctcttactctggcgtcagtctattttcaaaccccgtgcagtattgggagatccaaccgtcaacttttcgatgcgtctatgtccgctcagccattcaactgggaaactacaaatag

SEQ ID NO: 235332 - DNA, 1080 bp, Artificial Sequence
  derived and/or modified sequence
atgaaggcaaccattattctactgttgttagctcaggtcagctgggctgggccattccaacaaaggggccttttcgacttcatgctggaagacgaagcaagcggtattggcccggaagttcccgatgatcgcgacttcgaaccctccctgggcccagtttgtccattcagatgtcagtgccacttgcgggtcgtacagtgcagcgatttaggcctagataaagtacccaaagatctccctcctgacaccactttgttggacttacaaaataataaaatcaccgaaattaaggatggagacttcaaaaatctgaagaatctccacgcactgatcctggttaataataaaatctctaaggtttcccccggcgcatttaccccacttgtgaagttggaacggctttatctgtctaaaaaccagcttaaggagttgcctgaaaaaatgcccaaaactctccaggaactgagagcccacgaaaatgaaattacaaaagtgcgaaaagtcaccttcaatggactgaatcaaatgattgtcatcgaactcggcacaaatccactgaaatcaagcggtattgaaaacggcgcatttcaaggcatgaagaaactctcttacatcaggatcgccgatacgaatattacctccatacctcagggcctgcctcctagcctcaccgagctccatcttgatggaaataagatctcacgagtagatgccgctagccttaaaggactcaacaacctcgcaaagcttggactttcctttaatagcataagtgcagtggacaatggcagcctcgcaaatactcctcacctacgggaacttcacctggacaataataaactaactcgggttccaggcggactagccgagcataaatatatccaagtagtgtaccttcacaacaataatatttctgtcgtaggatctagtgatttctgtcccccaggacacaacaccaagaaggcctcttactctggcgtcagtctattttcaaaccccgtgcagtattgggagatccaaccgtcaacttttcgatgcgtctatgtccgctcagccattcaactgggaaactacaaatag

SEQ ID NO: 235333 - DNA, 1080 bp, Artificial Sequence
  derived and/or modified sequence
atgaaggccaccatcatcctgctgctgctggcccaggtgagctgggccggccccttccagcagagaggcctgttcgacttcatgctggaggacgaggccagcggcatcggccccgaggtgcccgacgacagagacttcgagcccagcctgggccccgtgtgccccttcagatgccagtgccacctgagagtggtgcagtgcagcgacctgggcctggacaaggtgcccaaggacctgccccccgacaccaccctgctggacctgcagaacaacaagatcaccgagatcaaggacggcgacttcaagaacctgaagaacctgcacgccctgatcctggtgaacaacaagatcagcaaggtgagccccggcgccttcacccccctggtgaagctggagagactgtacctgagcaagaaccagctgaaggagctgcccgagaagatgcccaagaccctgcaggagctgagagcccacgagaacgagatcaccaaggtgagaaaggtgaccttcaacggcctgaaccagatgatcgtgatcgagctgggcaccaaccccctgaagagcagcggcatcgagaacggcgccttccagggcatgaagaagctgagctacatcagaatcgccgacaccaacatcaccagcatcccccagggcctgccccccagcctgaccgagctgcacctggacggcaacaagatcagcagagtggacgccgccagcctgaagggcctgaacaacctggccaagctgggcctgagcttcaacagcatcagcgccgtggacaacggcagcctggccaacaccccccacctgagagagctgcacctggacaacaacaagctgaccagagtgcccggcggcctggccgagcacaagtacatccaggtggtgtacctgcacaacaacaacatcagcgtggtgggcagcagcgacttctgcccccccggccacaacaccaagaaggccagctacagcggcgtgagcctgttcagcaaccccgtgcagtactgggagatccagcccagcaccttcagatgcgtgtacgtgagaagcgccatccagctgggcaactacaagtag

SEQ ID NO: 235334 - DNA, 540 bp, Artificial Sequence
  derived and/or modified sequence
atgaaggccaccatcatcctgctgctgctggcccaggtgagctgggccggccccttccagcagagaggcctgttcgacttcatgctggaggacgaggccagcggcatcggccccgaggtgcccgacgacagagacttcgagcccagcctgggccccgtgtgccccttcagatgccagtgccacctgagagtggtgcagtgcagcgacctgggcctggacaaggtgcccaaggacctgccccccgacaccaccctgctggacctgcagaacaacaagatcaccgagatcaaggacggcgacttcaagaacctgaagaacctgcacgccctgatcctggtgaacaacaagatcagcaaggtgagccccggcgccttcacccccctggtgaagctggagagactgtacctgagcaagaaccagctgaaggagctgcccgagaagatgcccaagaccctgcaggagctgagagcccacgagaacgagatcaccaaggtgagaaaggtgaccttcaacggcctgaaccagatgatcgtgatctag

SEQ ID NO: 235335 - DNA, 360 bp, Artificial Sequence
  derived and/or modified sequence
atgaaggccaccatcatcctgctgctgctggcccaggtgagctgggccggccccttccagcagagaggcctgttcgacttcatgctggaggacgaggccagcggcatcggccccgaggtgcccgacgacagagacttcgagcccagcctgggccccgtgtgccccttcagatgccagtgccacctgagagtggtgcagtgcagcgacctgggcctggacaaggtgcccaaggacctgccccccgacaccaccctgctggacctgcagaacaacaagatcaccgagatcaaggacggcgacttcaagaacctgaagaacctgcacgccctgatcctggtgaacaacaagatcagcaagtag

SEQ ID NO: 235336 - DNA, 525 bp, Artificial Sequence
  derived and/or modified sequence
atgaaggccaccatcatcctgctgctgctggcccaggtgagctgggccggccccttccagcagagaggcctgttcgacttcatgctggaggacgaggccagcggcatcggccccgaggtgcccgacgacagagacttcgagcccagcctgggccccgtgtgccccttcagatgccagtgccacctgagagtggtgcagtgcagcgacctgggcctggacaaggtgcccaaggacctgccccccgacaccaccctgctggacctgcagaacaacaagatcaccgagatcaaggacggcgacttcaagaacctgaagaacctgcacgccctgatcctggtgaacaacaagatcagcaaggtgagccccggcgccttcacccccctggtgaagctggagagactgtacctgagcaagaaccagctgaaggagctgcccgagaagatgcccaagaccctgcaggagctgagagcccacgagaacgagatcaccaaggtgagaaaggtgaccttcaacggcctgaactag

SEQ ID NO: 235337 - DNA, 537 bp, Artificial Sequence
  derived and/or modified sequence
atgaaggccaccatcatcctgctgctgctggcccaggtgagctgggccggccccttccagcagagaggcctgttcgacttcatgctggaggacgaggccagcggcatcggccccgaggtgcccgacgacagagacttcgagcccagcctgggccccgtgtgccccttcagatgccagtgccacctgagagtggtgcagtgcagcgacctgggcctggacaaggtgcccaaggacctgccccccgacaccaccctgctggacctgcagaacaacaagatcaccgagatcaaggacggcgacttcaagaacctgaagaacctgcacgccctgatcctggtgaacaacaagatcagcaaggtgagccccggcgccttcacccccctggtgaagctggagagactgtacctgagcaagaaccagctgaaggagctgcccgagaagatgcccaagaccctgcaggagctgagagcccacgagaacgagatcaccaaggtgagaaaggtgaccttcaacggcctgaaccagatgatcgtgtag

SEQ ID NO: 235338 - DNA, 2392 bp, Artificial Sequence
  derived and/or modified sequence
aatgctacttgtaaacaaggctagaaagggtggagaatgaaatgagatggggggtggggaaacaaaccctttagttacaatatcttagggaaatgaatctacaataagacaaatttcaaatcaagttgctccactatactgcataagcagtttagaatcttaagcagatgcaaaaagaataaagcaaatgggaggaaaaaaaaggccgataaagtttctggctacaatacaagagacatatcattaccatatgatctaatgtgggtgtcagccggattgtgttcattgagggaaaccttattttttaactgtgctatggagtagaagcaggaggttttcaacctagtcacagagcagcacctaccccctcctcctttccacacctgcaaactcttttacttgggctgaatatttagtgtaattacatctcagctttgagggctcctgtggcaaattcccggattaaaaggttccctggttgtgaaaatacatgagataaatcatgaaggccactatcatcctccttctgcttgcacaagtttcctgggctggaccgtttcaacagagaggcttatttgactttatgctagaagatgaggcttctgggataggcccagaagttcctgatgaccgcgacttcgagccctccctaggcccagtgtgccccttccgctgtcaatgccatcttcgagtggtccagtgttctgatttgggtctggacaaagtgccaaaggatcttccccctgacacaactctgctagacctgcaaaacaacaaaataaccgaaatcaaagatggagactttaagaacctgaagaaccttcacgcattgattcttgtcaacaataaaattagcaaagttagtcctggagcatttacacctttggtgaagttggaacgactttatctgtccaagaatcagctgaaggaattgccagaaaaaatgcccaaaactcttcaggagctgcgtgcccatgagaatgagatcaccaaagtgcgaaaagttactttcaatggactgaaccagatgattgtcatagaactgggcaccaatccgctgaagagctcaggaattgaaaatggggctttccagggaatgaagaagctctcctacatccgcattgctgataccaatatcaccagcattcctcaaggtcttcctccttcccttacggaattacatcttgatggcaacaaaatcagcagagttgatgcagctagcctgaaaggactgaataatttggctaagttgggattgagtttcaacagcatctctgctgttgacaatggctctctggccaacacgcctcatctgagggagcttcacttggacaacaacaagcttaccagagtacctggtgggctggcagagcataagtacatccaggttgtctaccttcataacaacaatatctctgtagttggatcaagtgacttctgcccacctggacacaacaccaaaaaggcttcttattcgggtgtgagtcttttcagcaacccggtccagtactgggagatacagccatccaccttcagatgtgtctacgtgcgctctgccattcaactcggaaactataagtaattctcaagaaagccctcatttttataacctggcaaaatcttgttaatgtcattgctaaaaaataaataaaagctagatactggaaacctaactgcaatgtggatgttttacccacatgacttattatgcataaagccaaatttccagtttaagtaattgcctacaataaaaagaaattttgcctgccattttcagaatcatcttttgaagctttctgttgatgttaactgagctactagagatattcttatttcactaaatgtaaaatttggagtaaatatatatgtcaatatttagtaaagcttttcttttttaatttccaggaaaaaataaaaagagtatgagtcttctgtaattcattgagcagttagctcatttgagataaagtcaaatgccaaacactagctctgtattaatccccatcattactggtaaagcctcatttgaatgtgtgaattcaatacaggctatgtaaaatttttactaatgtcattattttgaaaaaataaatttaaaaatacattcaaaattactattgtatacaagcttaattgttaatattccctaaacacaattttatgaagggagaagacattggtttgttgacaataacagtacatcttttcaagttctcagctatttcttctacctctccctatcttacatttgagtatggtaacttatgtcatctatgttgaatgtaagcttataaagcacaaagcatacatttcctgactggtctagagaactgatgtttcaatttacccctctgctaaataaatattaaaactatcatgtgacttcatgtaa

SEQ ID NO: 235339 - DNA, 2133 bp, Artificial Sequence
  derived and/or modified sequence
ggaataataagacacgccctgaaggagtacatcgtctagtgagggacagaccaagcacgcaaaacaaattgcaatataatgtgataagttctttaaaagaggtaagagcaacgtgctttgggagcagagaagagggagaaagcagcatcttgcctggatgagccaggggacacagaagagaagcccactatctcatttaatctttacaactctcttgcaaggttccctggttgtgaaaatacatgagataaatcatgaaggccactatcatcctccttctgcttgcacaagtttcctgggctggaccgtttcaacagagaggcttatttgactttatgctagaagatgaggcttctgggataggcccagaagttcctgatgaccgcgacttcgagccctccctaggcccagtgtgccccttccgctgtcaatgccatcttcgagtggtccagtgttctgatttgggtctggacaaagtgccaaaggatcttccccctgacacaactctgctagacctgcaaaacaacaaaataaccgaaatcaaagatggagactttaagaacctgaagaaccttcacgcattgattcttgtcaacaataaaattagcaaagttagtcctggagcatttacacctttggtgaagttggaacgactttatctgtccaagaatcagctgaaggaattgccagaaaaaatgcccaaaactcttcaggagctgcgtgcccatgagaatgagatcaccaaagtgcgaaaagttactttcaatggactgaaccagatgattgtcatagaactgggcaccaatccgctgaagagctcaggaattgaaaatggggctttccagggaatgaagaagctctcctacatccgcattgctgataccaatatcaccagcattcctcaaggtcttcctccttcccttacggaattacatcttgatggcaacaaaatcagcagagttgatgcagctagcctgaaaggactgaataatttggctaagttgggattgagtttcaacagcatctctgctgttgacaatggctctctggccaacacgcctcatctgagggagcttcacttggacaacaacaagcttaccagagtacctggtgggctggcagagcataagtacatccaggttgtctaccttcataacaacaatatctctgtagttggatcaagtgacttctgcccacctggacacaacaccaaaaaggcttcttattcgggtgtgagtcttttcagcaacccggtccagtactgggagatacagccatccaccttcagatgtgtctacgtgcgctctgccattcaactcggaaactataagtaattctcaagaaagccctcatttttataacctggcaaaatcttgttaatgtcattgctaaaaaataaataaaagctagatactggaaacctaactgcaatgtggatgttttacccacatgacttattatgcataaagccaaatttccagtttaagtaattgcctacaataaaaagaaattttgcctgccattttcagaatcatcttttgaagctttctgttgatgttaactgagctactagagatattcttatttcactaaatgtaaaatttggagtaaatatatatgtcaatatttagtaaagcttttcttttttaatttccaggaaaaaataaaaagagtatgagtcttctgtaattcattgagcagttagctcatttgagataaagtcaaatgccaaacactagctctgtattaatccccatcattactggtaaagcctcatttgaatgtgtgaattcaatacaggctatgtaaaatttttactaatgtcattattttgaaaaaataaatttaaaaatacattcaaaattactattgtatacaagcttaattgttaatattccctaaacacaattttatgaagggagaagacattggtttgttgacaataacagtacatcttttcaagttctcagctatttcttctacctctccctatcttacatttgagtatggtaacttatgtcatctatgttgaatgtaagcttataaagcacaaagcatacatttcctgactggtctagagaactgatgtttcaatttacccctctgctaaataaatattaaaactatcatgtg

SEQ ID NO: 235340 - DNA, 750 bp, Artificial Sequence
  derived and/or modified sequence
tttctttttctctttctttctttccttttctttcttccttctttctttctttcttccttccttctttctttcttcttttttttaatatgctacaattggataatgactcaaaacagctgtaagattctacttacgaacgtacagctttaatatggattcgtctaagtgtacaattcaaggttccctggttgtgaaaatacatgagataaatcatgaaggccactatcatcctccttctgcttgcacaagtttcctgggctggaccgtttcaacagagaggcttatttgactttatgctagaagatgaggcttctgggataggcccagaagttcctgatgaccgcgacttcgagccctccctaggcccagtgtgccccttccgctgtcaatgccatcttcgagtggtccagtgttctgatttgggtctggacaaagtgccaaaggatcttccccctgacacaactctgctagacctgcaaaacaacaaaataaccgaaatcaaagatggagactttaagaacctgaagaaccttcacgcattgattcttgtcaacaataaaattagcaaagttagtcctggagcatttacacctttggtgaagttggaacgactttatctgtccaagaatcagctgaaggaattgccagaaaaaatgcccaaaactcttcaggagctgcgtgcccatgagaatgagatcaccaaagtgcgaaaagttactttcaatggactgaaccagatgattgtcatag

SEQ ID NO: 235341 - DNA, 920 bp, Artificial Sequence
  derived and/or modified sequence
aacattttctttttgtgggttgttagtgaaacaaccaggcatgttctgctctggagaaaagatttcaaagtgacatctgcattaactgtcgttgctatttattaaatctgcaatgactttgcttcatttttcttttaaacttgtaagacattaaatatgcaaggctagcaagcttgtggtaaaccataaacattgcatttttaatgggaaacagatacaaaaccactccctcagatacaatccaaaggaacaggctgccaaaacaaaagtcttctcttaaagggatactcagtaactgaatgagagtgggctgctagaagaagcttaatgttgaacttaaagtggcagtgtgaataataatctttatgatattttgttaaatgaaaagccacaagcctgtattcaacatgtgctgccttagacacatatcagtagtaaatataaactaagaacaaacatgtaagaaactgaaaaacatttgtttcttctctagagaatctaggcaaaaattcccagaagataccttaaggttccctggttgtgaaaatacatgagataaatcatgaaggccactatcatcctccttctgcttgcacaagtttcctgggctggaccgtttcaacagagaggcttatttgactttatgctagaagatgaggcttctgggataggcccagaagttcctgatgaccgcgacttcgagccctccctaggcccagtgtgccccttccgctgtcaatgccatcttcgagtggtccagtgttctgatttgggtctggacaaagtgccaaaggatcttccccctgacacaactctgctagacctgcaaaacaacaaaataaccgaaatcaaagatggagactttaagaacctgaagaaccttcacgcattgattcttgtcaacaataaaattagcaaag

SEQ ID NO: 235342 - DNA, 593 bp, Artificial Sequence
  derived and/or modified sequence
attctacatggcaagtagctttgattgtcagggttcaggttccctggttgtgaaaatacatgagataaatcatgaaggccactatcatcctccttctgcttgcacaagtttcctgggctggaccgtttcaacagagaggcttatttgactttatgctagaagatgaggcttctgggataggcccagaagttcctgatgaccgcgacttcgagccctccctaggcccagtgtgccccttccgctgtcaatgccatcttcgagtggtccagtgttctgatttgggtctggacaaagtgccaaaggatcttccccctgacacaactctgctagacctgcaaaacaacaaaataaccgaaatcaaagatggagactttaagaacctgaagaaccttcacgcattgattcttgtcaacaataaaattagcaaagttagtcctggagcatttacacctttggtgaagttggaacgactttatctgtccaagaatcagctgaaggaattgccagaaaaaatgcccaaaactcttcaggagctgcgtgcccatgagaatgagatcaccaaagtgcgaaaagttactttcaatggactgaac

SEQ ID NO: 235343 - DNA, 648 bp, Artificial Sequence
  derived and/or modified sequence
atggttttcaataattgtcctgaactctgctacagactaataaaacttcggtcaagttgcgagcaaaagggattatttggttccctggttgtgaaaatacatgagataaatcatgaaggccactatcatcctccttctgcttgcacaagtttcctgggctggaccgtttcaacagagaggcttatttgactttatgctagaagatgaggcttctgggataggcccagaagttcctgatgaccgcgacttcgagccctccctaggcccagtgtgccccttccgctgtcaatgccatcttcgagtggtccagtgttctgatttgggtctggacaaagtgccaaaggatcttccccctgacacaactctgctagacctgcaaaacaacaaaataaccgaaatcaaagatggagactttaagaacctgaagaaccttcacgcattgattcttgtcaacaataaaattagcaaagttagtcctggagcatttacacctttggtgaagttggaacgactttatctgtccaagaatcagctgaaggaattgccagaaaaaatgcccaaaactcttcaggagctgcgtgcccatgagaatgagatcaccaaagtgcgaaaagttactttcaatggactgaaccagatgattgtcat

SEQ ID NO: 235344 - DNA, 1930 bp, Artificial Sequence
  derived and/or modified sequence
attttttaactgtgctatggagtagaagcaggaggttttcaacctagtcacagagcagcacctaccccctcctcctttccacacctgcaaactcttttacttgggctgaatatttagtgtaattacatctcagctttgagggctcctgtggcaaattcccggattaaaagactgattgcttggaacaaatggaataaatcgtcttgtcaataaagtgatggtcaattgagtcatttgtgtgcaaaatattgtgcaaggcccgggtacagaacaaggaataataagacacgccctgaaggagtacatcgtctagtgagggacagaccaagcacgcaaaacaaattgcaatataatgtgataagttctttaaaagaggtaagagcaacgtgctttgggagcagagaagagggagaaagcagcatcttgcctggatgagccaggggacacagaagagaagcccactatctcatttaatctttacaactctcttgcaaggttccctggttgtgaaaatacatgagataaatcatgaaggccactatcatcctccttctgcttgcacaagtttcctgggctggaccgtttcaacagagaggcttatttgactttatgctagaagatgaggcttctgggataggcccagaagttcctgatgaccgcgacttcgagccctccctaggcccagtgtgccccttccgctgtcaatgccatcttcgagtggtccagtgttctgatttgggtctggacaaagtgccaaaggatcttccccctgacacaactctgctagacctgcaaaacaacaaaataaccgaaatcaaagatggagactttaagaacctgaagaaccttcacgcattgattcttgtcaacaataaaattagcaaagttagtcctggagcatttacacctttggtgaagttggaacgactttatctgtccaagaatcagctgaaggaattgccagaaaaaatgcccaaaactcttcaggagctgcgtgcccatgagaatgagatcaccaaagtgcgaaaagttactttcaatggactgaaccagatgattgtcatagaactgggcaccaatccgctgaagagctcaggaattgaaaatggggctttccagggaatgaagaagctctcctacatccgcattgctgataccaatatcaccagcattcctcaaggtcttcctccttcccttacggaattacatcttgatggcaacaaaatcagcagagttgatgcagctagcctgaaaggactgaataatttggctaagttgggattgagtttcaacagcatctctgctgttgacaatggctctctggccaacacgcctcatctgagggagcttcacttggacaacaacaagcttaccagagtacctggtgggctggcagagcataagtacatccaggttgtctaccttcataacaacaatatctctgtagttggatcaagtgacttctgcccacctggacacaacaccaaaaaggcttcttattcgggtgtgagtcttttcagcaacccggtccagtactgggagatacagccatccaccttcagatgtgtctacgtgcgctctgccattcaactcggaaactataagtaattctcaagaaagccctcatttttataacctggcaaaatcttgttaatgtcattgctaaaaaataaataaaagctagatactggaaacctaactgcaatgtggatgttttacccacatgacttattatgcataaagccaaatttccagtttaagtaattgcctacaataaaaagaaattttgcctgccattttcagaatcatcttttgaagctttctgttgatgttaactgagctactagagatattcttatttcactaaatgtaaaatttggagtaaatatatatgtcaatatttagtaaagcttttcttttttaatttcca

SEQ ID NO: 235345 - protein, 250 aa, Artificial Sequence
  derived and/or modified sequence
MKATIILLLLAQVSWAGPFQQRGLFDFMLEDEASGIGPEVPDDRDFEPSLGPVCPFRCQCHLRVVQCSDLELGTNPLKSSGIENGAFQGMKKLSYIRIADTNITSIPQGLPPSLTELHLDGNKISRVDAASLKGLNNLAKLGLSFNSISAVDNGSLANTPHLRELHLDNNKLTRVPGGLAEHKYIQVVYLHNNNISVVGSSDFCPPGHNTKKASYSGVSLFSNPVQYWEIQPSTFRCVYVRSAIQLGNYK

SEQ ID NO: 235346 - DNA, 753 bp, Artificial Sequence
  derived and/or modified sequence
atgaaggcaactattattttgctgctcctggctcaagtctcatgggctggcccatttcagcaacgagggctctttgacttcatgctggaggacgaggcaagcggaatcggtccggaagtgccagatgacagagatttcgagcccagtttaggcccagtttgcccatttcgctgtcagtgtcacctgcgagtggtgcagtgtagcgatctcgaattgggaaccaaccccctgaagagttccggaatcgagaacggtgcatttcaggggatgaagaagctgtcgtatataaggatagctgatacaaatattacctcaatcccgcaaggtcttcctccatccctgacggaactgcacctggatggaaacaaaatctcccgggtggatgccgcgtccttgaaaggtcttaacaacctagcaaagttaggcttgtctttcaattcaatctccgctgttgacaatgggtcactggccaacacacctcacctcagggagctgcatttagacaacaacaaactgactagggttccgggaggactcgccgaacacaaatatatccaagtggtgtatctgcataacaacaacatctcagtggttgggtccagtgacttttgtccacccggtcataatacaaagaaggcttcatattctggcgtgagtctgttctccaatcccgtgcagtactgggaaatccagccgagcacatttcgctgtgtgtatgtaagatctgccatccagcttggcaattataaatag

SEQ ID NO: 235347 - DNA, 753 bp, Artificial Sequence
  derived and/or modified sequence
atgaaagccacaatcatccttttgctgcttgcccaggtgagttgggccggcccgtttcagcaacgtggcctgtttgacttcatgctggaagatgaggccagcggaatcgggccagaagtgcctgatgatcgcgacttcgagccatccctgggtccagtttgtccgtttagatgtcaatgtcatctaagggtcgtgcagtgttcagaccttgaactgggcactaatcctctcaagtccagtggcatagagaacggagcctttcaggggatgaaaaagctaagctatatccgaatagcagatactaatataactagcattccccaggggctcccaccttctctcactgaactccacctggatggtaacaagatctctcgcgtcgatgccgcctctctgaaagggttaaataatttggccaagcttggcttaagtttcaatagcatcagcgccgtggacaacggcagcttggctaacacccctcaccttcgagaacttcatcttgacaacaacaagctgacacgggtgccagggggactagctgaacacaaatacatacaagtggtttacctgcacaataacaacatctccgtagttggatcttccgacttctgcccccccggccacaacacaaagaaggcctcttattccggggtgagtctgttcagtaacccagttcagtattgggagattcagccctctacttttcgttgtgtctacgttcgaagcgcaattcagctcgggaactacaagtag

SEQ ID NO: 235348 - DNA, 753 bp, Artificial Sequence
  derived and/or modified sequence
atgaaggccaccatcatcctgctgctgctggcccaggtgtcctgggccggccccttccagcagaggggcctgtttgacttcatgctggaggatgaggccagcggcatcggccctgaggtgcctgatgaccgggactttgagcccagcctgggccctgtgtgccccttccgctgccagtgccacctgcgggtggtgcagtgcagcgacctggagctgggcaccaaccccctgaagagcagcggcattgaaaatggagccttccagggcatgaagaagctgagctacatcagaattgctgacaccaacatcaccagcatcccccagggcctgccccccagcctgacagagctgcacctggatggcaacaagatcagccgggtggatgctgccagcctgaagggcctgaacaacctggccaagctgggcctgtccttcaacagcatctctgctgtggacaatggcagcctggccaacaccccccacctgcgggagctgcacctggacaacaacaagctgaccagggtgcctgggggcctggccgagcacaagtacatccaggtggtgtacctgcacaacaacaacatctctgtggtgggcagcagtgacttctgccccccaggccacaacaccaagaaggccagctacagcggcgtgtccctcttcagcaaccctgtgcagtactgggagatccagcccagcaccttccgctgtgtgtatgtgcgcagcgccatccagctgggcaactacaagtag

SEQ ID NO: 235349 - DNA, 753 bp, Artificial Sequence
  derived and/or modified sequence
atgaaggccaccatcatcctgctgctgctggcccaggtgagctgggctggcccatttcaacagcgagggctgtttgacttcatgttggaggacgaggcaagcggaattggtcctgaggttcccgatgaccgcgattttgagccttctctggggcccgtgtgccccttccgatgccagtgtcacctacgcgtcgttcagtgttctgacctggaactcggcacgaatcctctcaaatcctcaggcatcgaaaatggcgccttccaaggcatgaagaagctgtcatatatccgaattgccgacaccaacatcacttccatacctcaggggttgccccctagccttactgagctgcatttggatggcaacaaaattagccgcgtggacgctgcatcactaaaaggactgaataacctggctaagctgggactgtccttcaatagcatttctgccgtcgacaacggaagtcttgcgaacaccccccacctgagggagctgcacctcgacaacaacaagcttaccagggttcccggggggctggcggagcacaagtacatccaggtcgtttacctgcataataacaacatttctgttgtagggtccagtgacttttgtccacctggacacaataccaagaaggcctcatactctggtgtttccctcttcagcaatcccgtacaatactgggaaatccagcccagtacgttccggtgcgtgtatgttcggagtgccattcaactgggcaattacaaatag

SEQ ID NO: 235350 - DNA, 753 bp, Artificial Sequence
  derived and/or modified sequence
atgaaggccaccatcatcctgctgctgctggcccaggtgagctgggcaggtccttttcagcagcgcggtctgtttgattttatgctggaggatgaggcctccgggattggccctgaagttcctgacgaccgcgatttcgagcctagcttagggcctgtgtgtccattcagatgccagtgtcatcttcgagtggtgcagtgtagtgacttagaactgggaactaatcccctgaagagcagtggcattgagaatggggcattccaaggcatgaaaaagctgagttacatccgcattgccgatactaatataaccagtatcccgcagggtctgcccccgtccctaacagagctgcatctcgatggcaataagatcagtcgcgtggacgcagcttcactgaaaggccttaacaatctggcaaagcttggactaagcttcaattctatctctgcagtcgacaatggatcccttgcaaacactcctcaccttagggaacttcacctggataataacaagctgacccgggttcccggtggcttagcggaacacaagtatattcaggttgtttatttgcacaacaataatatctcagttgtaggaagcagcgatttctgtcccccaggtcacaacactaagaaagcctcatattctggtgtttccctgttctccaaccctgtgcagtactgggaaatccagccctctaccttcaggtgtgtgtacgtgaggtccgcaatccagctggggaattataagtag

SEQ ID NO: 235351 - DNA, 753 bp, Artificial Sequence
  derived and/or modified sequence
atgaaggcaacaattattctgctcctcctggcccaggtctcctgggctggaccatttcaacagcggggactctttgatttcatgctggaggacgaggcatccgggattggacctgaagtaccagacgaccgcgattttgaaccatcccttggcccagtttgtccttttcgctgtcagtgtcatctgcgcgtggtccagtgcagcgaccttgagttgggtactaacccgctaaagagttcgggcatcgaaaatggcgcatttcaaggcatgaagaagctcagttacatcagaatagccgatacaaatattacctcaattccacagggccttccacctagtctgactgagctgcacttggacggaaataagatttctagagtggatgcagcatctttgaaaggcctgaacaatttggcgaagttgggtctgtcctttaattccataagtgccgtggataatggctctctggccaataccccgcacttgcgtgagcttcacctggacaataacaagttaactagggtaccagggggattggccgaacacaaatacatacaagttgtatatctgcataataataatattagtgtggtgggctcttcagatttctgccctcctggtcataatacaaagaaggcatcctattctggcgtatccttattttcaaatcctgtgcaatactgggaaatccaaccttcaacttttagatgcgtgtacgtacgttcagcaatccagcttggaaactataaatag

SEQ ID NO: 235352 - DNA, 753 bp, Artificial Sequence
  derived and/or modified sequence
atgaaggccaccataatccttctgctgcttgcgcaggtatcttgggctggcccattccaacagcgcggtttatttgactttatgctggaagacgaggcctctgggatcggccctgaggtccccgacgacagggactttgagccatccctaggaccagtctgccctttcaggtgccaatgccacctcagagtggtgcaatgtagcgacttagaactggggacaaaccctctaaaaagttctggaattgagaatggcgcatttcaggggatgaagaagttgtcgtatattaggatagctgacaccaatattacctcaatcccccagggcctgccaccttctctgactgaactccatctggacgggaataaaatcagccgtgtagatgccgcaagcttgaaggggctgaacaacctggctaaactgggactttcctttaatagtattagtgcggtggacaatggcagcctcgcaaacacgccccatctgcgggagcttcatctcgacaacaataagctgacccgggtgcctgggggactggcagagcacaagtacatacaggtcgtgtacttgcacaacaacaatatatccgtagtggggtcctccgatttttgtccacccggacataacactaaaaaagcctcctacagcggtgtttctttattctctaaccctgtgcagtactgggagattcaacctagtaccttccggtgcgtgtacgtccggtccgcaatccagttggggaattataagtag

SEQ ID NO: 235353 - DNA, 753 bp, Artificial Sequence
  derived and/or modified sequence
atgaaggccaccatcatcctgctgctgctggcccaggtgagctgggccggccccttccagcagagaggcctgttcgacttcatgctggaggacgaggccagcggcatcggccccgaggtgcccgacgacagagacttcgagcccagcctgggccccgtgtgccccttcagatgccagtgccacctgagagtggtgcagtgcagcgacctggagctgggcaccaaccccctgaagagcagcggcatcgagaacggcgccttccagggcatgaagaagctgagctacatcagaatcgccgacaccaacatcaccagcatcccccagggcctgccccccagcctgaccgagctgcacctggacggcaacaagatcagcagagtggacgccgccagcctgaagggcctgaacaacctggccaagctgggcctgagcttcaacagcatcagcgccgtggacaacggcagcctggccaacaccccccacctgagagagctgcacctggacaacaacaagctgaccagagtgcccggcggcctggccgagcacaagtacatccaggtggtgtacctgcacaacaacaacatcagcgtggtgggcagcagcgacttctgcccccccggccacaacaccaagaaggccagctacagcggcgtgagcctgttcagcaaccccgtgcagtactgggagatccagcccagcaccttcagatgcgtgtacgtgagaagcgccatccagctgggcaactacaagtag

SEQ ID NO: 235354 - DNA, 1960 bp, Artificial Sequence
  derived and/or modified sequence
gaatctacaataagacaaatttcaaatcaagttgctccactatactgcataagcagtttagaatcttaagcagatgcaaaaagaataaagcaaatgggaggaaaaaaaaggccgataaagtttctggctacaatacaagagacatatcattaccatatgatctaatgtgggtgtcagccggattgtgttcattgagggaaaccttattttttaactgtgctatggagtagaagcaggaggttttcaacctagtcacagagcagcacctaccccctcctcctttccacacctgcaaactcttttacttgggctgaatatttagtgtaattacatctcagctttgagggctcctgtggcaaattcccggattaaaaggttccctggttgtgaaaatacatgagataaatcatgaaggccactatcatcctccttctgcttgcacaagtttcctgggctggaccgtttcaacagagaggcttatttgactttatgctagaagatgaggcttctgggataggcccagaagttcctgatgaccgcgacttcgagccctccctaggcccagtgtgccccttccgctgtcaatgccatcttcgagtggtccagtgttctgatttggaactgggcaccaatccgctgaagagctcaggaattgaaaatggggctttccagggaatgaagaagctctcctacatccgcattgctgataccaatatcaccagcattcctcaaggtcttcctccttcccttacggaattacatcttgatggcaacaaaatcagcagagttgatgcagctagcctgaaaggactgaataatttggctaagttgggattgagtttcaacagcatctctgctgttgacaatggctctctggccaacacgcctcatctgagggagcttcacttggacaacaacaagcttaccagagtacctggtgggctggcagagcataagtacatccaggttgtctaccttcataacaacaatatctctgtagttggatcaagtgacttctgcccacctggacacaacaccaaaaaggcttcttattcgggtgtgagtcttttcagcaacccggtccagtactgggagatacagccatccaccttcagatgtgtctacgtgcgctctgccattcaactcggaaactataagtaattctcaagaaagccctcatttttataacctggcaaaatcttgttaatgtcattgctaaaaaataaataaaagctagatactggaaacctaactgcaatgtggatgttttacccacatgacttattatgcataaagccaaatttccagtttaagtaattgcctacaataaaaagaaattttgcctgccattttcagaatcatcttttgaagctttctgttgatgttaactgagctactagagatattcttatttcactaaatgtaaaatttggagtaaatatatatgtcaatatttagtaaagcttttcttttttaatttccaggaaaaaataaaaagagtatgagtcttctgtaattcattgagcagttagctcatttgagataaagtcaaatgccaaacactagctctgtattaatccccatcattactggtaaagcctcatttgaatgtgtgaattcaatacaggctatgtaaaatttttactaatgtcattattttgaaaaaataaatttaaaaatacattcaaaattactattgtatacaagcttaattgttaatattccctaaacacaattttatgaagggagaagacattggtttgttgacaataacagtacatcttttcaagttctcagctatttcttctacctctccctatcttacatttgagtatggtaacttatgtcatctatgttgaatgtaagcttataaagcacaaagcatacatttcctgactggtctagagaactgatgtttcaatttacccctctgctaaataaatattaaaactatcatgtg

SEQ ID NO: 235355 - DNA, 753 bp, Artificial Sequence
  derived and/or modified sequence
atgaaggccactatcatcctccttctgcttgcacaagtttcctgggctggaccgtttcaacagagaggcttatttgactttatgctagaagatgaggcttctgggataggcccagaagttcctgatgaccgcgacttcgagccctccctaggcccagtgtgccccttccgctgtcaatgccatcttcgagtggtccagtgttctgatttggaactgggcaccaatccgctgaagagctcaggaattgaaaatggggctttccagggaatgaagaagctctcctacatccgcattgctgataccaatatcaccagcattcctcaaggtcttcctccttcccttacggaattacatcttgatggcaacaaaatcagcagagttgatgcagctagcctgaaaggactgaataatttggctaagttgggattgagtttcaacagcatctctgctgttgacaatggctctctggccaacacgcctcatctgagggagcttcacttggacaacaacaagcttaccagagtacctggtgggctggcagagcataagtacatccaggttgtctaccttcataacaacaatatctctgtagttggatcaagtgacttctgcccacctggacacaacaccaaaaaggcttcttattcgggtgtgagtcttttcagcaacccggtccagtactgggagatacagccatccaccttcagatgtgtctacgtgcgctctgccattcaactcggaaactataagtaa

SEQ ID NO: 235356 - protein, 212 aa, Artificial Sequence
  derived and/or modified sequence
MKATIILLLLAQVSWAGPFQQRGLFDFMLEDEASGIGPEVPDDRDFEPSLGPVCPFRCQCHLRVVQCSDLGLPPSLTELHLDGNKISRVDAASLKGLNNLAKLGLSFNSISAVDNGSLANTPHLRELHLDNNKLTRVPGGLAEHKYIQVVYLHNNNISVVGSSDFCPPGHNTKKASYSGVSLFSNPVQYWEIQPSTFRCVYVRSAIQLGNYK

SEQ ID NO: 235357 - DNA, 639 bp, Artificial Sequence
  derived and/or modified sequence
atgaaggctaccattatcctcctacttttagctcaagtgagctgggccggccctttccagcaacgcgggctcttcgactttatgctcgaagacgaagcttctggaatcgggccggaggtcccggatgacagagattttgaacctagcctggggccagtatgcccttttaggtgccagtgccacttgcgcgtcgttcaatgtagcgatcttgggctcccaccatctctcaccgaactgcatttagacgggaacaagatctctagagtcgacgcagcttctcttaaaggtcttaataatctggctaaattagggctgtcctttaattccatcagtgctgtcgacaatggtagtttggccaacactccccacctgcgagagctgcacctagataataacaagctaacacgggtgcccggtggactagcggaacacaagtacattcaggttgtctatctgcacaacaataatatttccgtagtaggtagttccgacttctgtccccctggccacaatacgaagaaggcttcttattcaggagtgagcctgttttcaaatccagtgcagtactgggaaatccagccgtccacttttaggtgtgtttacgttagatctgccatccagctggggaattacaagtag

SEQ ID NO: 235358 - DNA, 639 bp, Artificial Sequence
  derived and/or modified sequence
atgaaagcgactatcattttactcctgctggcccaagtcagctgggccggcccctttcagcagcgaggtctgttcgattttatgttagaagatgaagcgtctggaatcggccctgaagtgcccgatgaccgagatttcgagccctcattgggcccagtttgtcctttccgttgccagtgtcacctgagagttgtgcagtgtagtgacctaggcctgcctccttctttaacagagttacatcttgatgggaataagatcagcagggttgatgctgccagcttgaaggggttaaataacctcgcaaaactcggattgtcctttaacagtatctccgccgtggacaatgggtctctggcaaatacaccccatttaagggaactgcacctggacaacaataaactgactcgcgtgccaggcggcctggcagagcacaaatatattcaggtggtgtatctgcataacaataatatttctgttgttgggtccagtgacttctgtcctccaggacacaacacaaaaaaagcctcctactctggtgtgtccctgttttcaaaccctgtccagtattgggagattcaaccgagtacttttagatgtgtgtatgtgaggtctgctattcagttgggtaattataaatag

SEQ ID NO: 235359 - DNA, 639 bp, Artificial Sequence
  derived and/or modified sequence
atgaaggccaccatcatcctgctgctgctggcccaggtgtcctgggccggccccttccagcagaggggcctgtttgacttcatgctggaggatgaggccagcggcatcggccctgaggtgcctgatgaccgggactttgagcccagcctgggccctgtgtgccccttccgctgccagtgccacctgcgggtggtgcagtgcagcgacctgggcctgccccccagcctgacagagctgcacctggatggcaacaagatcagccgggtggatgctgccagcctgaagggcctgaacaacctggccaagctgggcctgtccttcaacagcatctctgctgtggacaatggcagcctggccaacaccccccacctgcgggagctgcacctggacaacaacaagctgaccagggtgcctgggggcctggccgagcacaagtacatccaggtggtgtacctgcacaacaacaacatctctgtggtgggcagcagtgacttctgccccccaggccacaacaccaagaaggccagctacagcggcgtgtccctcttcagcaaccctgtgcagtactgggagatccagcccagcaccttccgctgtgtgtatgtgcgcagcgccatccagctgggcaactacaagtag

SEQ ID NO: 235360 - DNA, 639 bp, Artificial Sequence
  derived and/or modified sequence
atgaaggccaccatcatcctgctgctgctggcccaggtgagctgggcaggcccatttcagcaacgcgggctcttcgactttatgctggaagacgaggcctccggcatcgggccggaggtcccagatgaccgcgactttgagcctagcctcggtccggtctgccctttccgatgccagtgccacctacgagtcgtacagtgtagtgacctgggcctgcccccgtccctgactgagctgcatcttgacggaaataagattagccgcgtggacgctgctagcctgaaggggctgaacaatctagccaagcttgggcttagcttcaatagcatcagtgctgtcgacaatggcagcctcgccaacacgccgcaccttcgtgagttgcacctggacaacaacaaattaactagagtgccggggggtctcgcggagcacaagtatatccaggtggtgtatctccacaacaacaatatctctgtggtaggctcgagtgatttctgcccccccgggcataacacaaagaaagcaagctacagcggggtgtcattgttttccaaccctgtacagtactgggagatacagcctagtaccttcagatgtgtgtacgtcaggtccgccatacagctcgggaactacaagtag

SEQ ID NO: 235361 - DNA, 639 bp, Artificial Sequence
  derived and/or modified sequence
atgaaggccaccatcatcctgctgctgctggcccaggtgagctgggcaggacccttccaacaaaggggtctgtttgattttatgctggaagacgaggcatctggcattgggccagaagtgccagatgatcgggattttgaaccctcccttgggcccgtgtgtcccttcagatgccagtgccatttgcgcgtcgtgcagtgcagtgatctgggactacctccttccctgactgaactccacctggacggtaataagatcagtagggttgacgccgcctcactgaagggacttaataacctagcaaaattaggattgagttttaattcaattagcgccgttgataacgggtcactcgccaacacacctcacctccgagagttacatctggacaataacaagttgactagggtgccaggtggactggctgaacacaagtacatacaggtggtatatctacacaataacaacattagcgtggtcggtagtagtgacttttgtccccccggacataataccaagaaagcttcctactctggtgtgtctcttttctcaaatcccgttcagtactgggaaatccagcctagcaccttcaggtgcgtgtacgtgcgttctgccatccagctgggcaactataagtag

SEQ ID NO: 235362 - DNA, 639 bp, Artificial Sequence
  derived and/or modified sequence
atgaaggctacaatcattttgctcctactggctcaggtttcttgggcgggtccattccaacagagaggcctgttcgacttcatgttagaagacgaggcatcaggcattggccctgaagtgccagatgaccgcgactttgagccaagtctgggtccagtgtgtccttttaggtgccagtgccacctcagggtcgtgcagtgctcagacctcggactgcccccatcactgacagaactgcacctggacggtaacaaaatctcacgcgtcgacgccgcatccttaaaaggacttaacaatttagccaagctgggcctgtccttcaacagtatcagtgctgtggacaacggatctctggccaacactccgcatctgagagagcttcatcttgacaacaataagcttacccgggttcccggagggctggctgagcacaagtacatccaggtcgtgtacctccacaataataatattagcgtcgttggctcatctgatttttgtccccctgggcataatactaagaaagcctcctatagcggcgtctctttgttcagcaaccctgttcagtattgggaaatccagcccagcacctttaggtgcgtatacgtgagatccgctatccagctgggaaattacaagtag

SEQ ID NO: 235363 - DNA, 639 bp, Artificial Sequence
  derived and/or modified sequence
atgaaagcgaccatcattctcctcctgctagcacaggtctcttgggcaggcccttttcagcagcgcggactctttgatttcatgctggaggatgaggcatcggggataggccctgaggtgcctgacgatagagattttgaaccctctctcggcccagtttgtcctttcaggtgccaatgccatctgcgagtggtgcaatgttcagatctaggtttaccaccttcccttactgagctgcatctagatggtaacaagatttctagagtggatgctgcttcactgaaagggttaaacaaccttgccaagcttggcctgtcctttaacagtattagtgccgtggataacggatctctcgctaacactccgcatttgcgggaactccacctcgacaataataagctgacaagggtccctggcggtctcgcggaacataaatacatccaggtggtgtatctacataataataatattagtgtcgttgggtctagcgacttctgcccaccaggacataacacaaagaaagcttcttacagtggagtttccctattttcaaaccccgttcagtactgggagattcagccgtccacctttaggtgcgtgtacgtcagatcagccatccaactggggaactataagtag

SEQ ID NO: 235364 - DNA, 639 bp, Artificial Sequence
  derived and/or modified sequence
atgaaggccaccatcatcctgctgctgctggcccaggtgagctgggccggccccttccagcagagaggcctgttcgacttcatgctggaggacgaggccagcggcatcggccccgaggtgcccgacgacagagacttcgagcccagcctgggccccgtgtgccccttcagatgccagtgccacctgagagtggtgcagtgcagcgacctgggcctgccccccagcctgaccgagctgcacctggacggcaacaagatcagcagagtggacgccgccagcctgaagggcctgaacaacctggccaagctgggcctgagcttcaacagcatcagcgccgtggacaacggcagcctggccaacaccccccacctgagagagctgcacctggacaacaacaagctgaccagagtgcccggcggcctggccgagcacaagtacatccaggtggtgtacctgcacaacaacaacatcagcgtggtgggcagcagcgacttctgcccccccggccacaacaccaagaaggccagctacagcggcgtgagcctgttcagcaaccccgtgcagtactgggagatccagcccagcaccttcagatgcgtgtacgtgagaagcgccatccagctgggcaactacaagtag

SEQ ID NO: 235365 - DNA, 1438 bp, Artificial Sequence
  derived and/or modified sequence
atgaaggccactatcatcctccttctgcttgcacaagtttcctgggctggaccgtttcaacagagaggcttatttgactttatgctagaagatgaggcttctgggataggcccagaagttcctgatgaccgcgacttcgagccctccctaggcccagtgtgccccttccgctgtcaatgccatcttcgagtggtccagtgttctgatttgggtcttcctccttcccttacggaattacatcttgatggcaacaaaatcagcagagttgatgcagctagcctgaaaggactgaataatttggctaagttgggattgagtttcaacagcatctctgctgttgacaatggctctctggccaacacgcctcatctgagggagcttcacttggacaacaacaagcttaccagagtacctggtgggctggcagagcataagtacatccaggttgtctaccttcataacaacaatatctctgtagttggatcaagtgacttctgcccacctggacacaacaccaaaaaggcttcttattcgggtgtgagtcttttcagcaacccggtccagtactgggagatacagccatccaccttcagatgtgtctacgtgcgctctgccattcaactcggaaactataagtaattctcaagaaagccctcatttttataacctggcaaaatcttgttaatgtcattgctaaaaaataaataaaagctagatactggaaacctaactgcaatgtggatgttttacccacatgacttattatgcataaagccaaatttccagtttaagtaattgcctacaataaaaagaaattttgcctgccattttcagaatcatcttttgaagctttctgttgatgttaactgagctactagagatattcttatttcactaaatgtaaaatttggagtaaatatatatgtcaatatttagtaaagcttttcttttttaatttccaggaaaaaataaaaagagtatgagtcttctgtaattcattgagcagttagctcatttgagataaagtcaaatgccaaacactagctctgtattaatccccatcattactggtaaagcctcatttgaatgtgtgaattcaatacaggctatgtaaaatttttactaatgtcattattttgaaaaaataaatttaaaaatacattcaaaattactattgtatacaagcttaattgttaatattccctaaacacaattttatgaagggagaagacattggtttgttgacaataacagtacatcttttcaagttctcagctatttcttctacctctccctatcttacatttgagtatggtaacttatgtcatctatgttgaatgtaagcttataaagcacaaagcatacatttcctgactggtctagagaactgatgtttcaatttacccctctgctaaataaatattaaaactatcatgtg

SEQ ID NO: 235366 - DNA, 823 bp, Artificial Sequence
  derived and/or modified sequence
gagtagaagcaggaggttttcaacctagtcacagagcagcacctaccccctcctcctttccacacctgcaaactcttttacttgggctgaatatttagtgtaattacatctcagctttgagggctcctgtggcaaattcccggattaaaaggttccctggttgtgaaaatacatgagataaatcatgaaggccactatcatcctccttctgcttgcacaagtttcctgggctggaccgtttcaacagagaggcttatttgactttatgctagaagatgaggcttctgggataggcccagaagttcctgatgaccgcgacttcgagccctccctaggcccagtgtgccccttccgctgtcaatgccatcttcgagtggtccagtgttctgatttgggtcttcctccttcccttacggaattacatcttgatggcaacaaaatcagcagagttgatgcagctagcctgaaaggactgaataatttggctaagttgggattgagtttcaacagcatctctgctgttgacaatggctctctggccaacacgcctcatctgagggagcttcacttggacaacaacaagcttaccagagtacctggtgggctggcagagcataagtacatccaggttgtctaccttcataacaacaatatctctgtagttggatcaagtgacttctgcccacctggacacaacaccaaaaaggcttcttattcgggtgtgagtcttttcagcaacccggtccagtactgggagatacagccatccaccttcagatgtgtctacgtgcgctctgccattcaactcggaaactataagtaa

SEQ ID NO: 235367 - protein, 172 aa, Artificial Sequence
  derived and/or modified sequence
MKATIILLLLAQVSWAGPFQQRGLFDFMLEDEASGIGPEVPDDRDFEPSLGPVCPFRCQCHLRVVQCSDLGLDKVPKDLPPDTTLLDLQNNKITEIKDGDFKNLKNLHVVYLHNNNISVVGSSDFCPPGHNTKKASYSGVSLFSNPVQYWEIQPSTFRCVYVRSAIQLGNYK

SEQ ID NO: 235368 - DNA, 519 bp, Artificial Sequence
  derived and/or modified sequence
atgaaggctaccattattctcctactcctcgcccaagtcagttgggcaggcccgtttcagcaacggggactctttgatttcatgctggaggacgaagcatctggcatcggccctgaagtgcccgacgaccgtgacttcgaaccttctcttggccccgtctgtccctttaggtgtcagtgtcaccttagagtggtgcagtgcagtgacctcggcctcgacaaagtgccaaaagatctgccgccagacactactcttctggatctgcaaaataataagataacggaaatcaaagatggcgacttcaaaaatctaaagaaccttcacgtggtttatctccataacaataatatctcagtggtcgggagcagtgacttctgcccacccggccataatactaagaaggcctcctactcaggggtgtccctctttagcaaccctgttcagtattgggagattcaaccctcaacgttccggtgcgtctacgttcgcagtgctatccaactggggaattacaagtag

SEQ ID NO: 235369 - DNA, 519 bp, Artificial Sequence
  derived and/or modified sequence
atgaaggccaccattatactcctgctactggcccaggtgtcatgggctggacctttccagcagcggggcctgttcgactttatgctagaggacgaagcctccggaatagggccagaggttcctgacgatcgcgatttcgaaccgagcctgggtcctgtatgtccattccgttgtcagtgtcacttacgagtagttcagtgcagtgacctggggctggacaaggtgccgaaggatttgccaccagacacaacactcctcgatcttcagaataacaagattaccgaaataaaggacggtgactttaagaatcttaagaacttacacgtcgtttatctccacaataacaacatttcagttgttggctcatctgacttctgtcctccagggcacaacactaaaaaggccagctattccggtgtgtctctctttagtaaccccgtccagtattgggagatccagccgagcacattccggtgtgtgtacgtgcggtccgccatccagctcggcaactacaaatag

SEQ ID NO: 235370 - DNA, 519 bp, Artificial Sequence
  derived and/or modified sequence
atgaaggccaccatcatcctgctgctgctggcccaggtgtcctgggccggccccttccagcagaggggcctgtttgacttcatgctggaggatgaggccagcggcatcggccctgaggtgcctgatgaccgggactttgagcccagcctgggccctgtgtgccccttccgctgccagtgccacctgcgggtggtgcagtgcagcgacctgggcctggacaaggtgcccaaggacctgcccccagacaccaccctgctggacctgcagaacaacaagatcacagagatcaaggatggagacttcaagaacctgaagaacctgcacgtggtgtacctgcacaacaacaacatctctgtggtgggcagcagtgacttctgccccccaggccacaacaccaagaaggccagctacagcggcgtgtccctcttcagcaaccctgtgcagtactgggagatccagcccagcaccttccgctgtgtgtatgtgcgcagcgccatccagctgggcaactacaagtag

SEQ ID NO: 235371 - DNA, 519 bp, Artificial Sequence
  derived and/or modified sequence
atgaaggccaccatcatcctgctgctgctggcccaggtgagctgggccggaccattccagcagcggggactgttcgacttcatgcttgaggatgaggcttctgggattggacctgaggtgccagacgatagggatttcgaaccatctcttgggccggtgtgtccatttaggtgccagtgtcacttgcgagtcgtgcaatgctctgatctgggcctcgacaaggttccaaaagacttgcctcccgatacaaccttgctggaccttcagaataacaaaattacggaaataaaagacggtgactttaagaacttgaagaacctccatgtggtctatctacataataataatatttccgtggttggcagttctgatttctgtccccccggacacaacaccaaaaaggcaagctactccggtgtgagtctgttcagtaaccctgtccaatactgggaaattcagccttcaacttttcggtgcgtctatgttaggagcgcaattcagctcgggaattacaagtag

SEQ ID NO: 235372 - DNA, 519 bp, Artificial Sequence
  derived and/or modified sequence
atgaaggccaccatcatcctgctgctgctggcccaggtgagctgggccggccctttccaacagaggggtttgtttgattttatgttagaagacgaggcctctggtatcgggcccgaggttccggacgaccgagatttcgaacctagcctaggacccgtgtgccccttccgatgccagtgccacctccgggtcgtgcagtgctccgacttaggcctcgacaaggtccctaaggacctgccacctgacacaacgctactggatctgcagaacaacaagattacggagattaaagacggagattttaagaacttaaagaatctccacgtcgtttacctgcataacaacaacatatcagtggtcggatcatcagatttctgtcccccgggacacaacacgaagaaggccagctactctggggtttctctgttttccaatccagtccagtactgggagatccaacccagcacatttcgatgtgtgtacgttaggtctgccatccagttgggtaactataagtag

SEQ ID NO: 235373 - DNA, 519 bp, Artificial Sequence
  derived and/or modified sequence
atgaaggccaccatcattctcctgttactcgcccaggtgtcgtgggcgggtcccttccagcagagggggctctttgactttatgcttgaggatgaggcgtctggtatcggcccagaagttcccgacgacagagatttcgaaccttccctcggcccagtgtgtccttttagatgccagtgtcacctgcgcgtggtgcaatgcagtgatctgggcctagataaggtgcccaaagaccttccaccggatacgactttgcttgacctccaaaataataagatcacagagatcaaagacggcgatttcaagaacctcaaaaatctgcacgtggtctatctgcataataacaatatcagtgtcgtgggttcatctgatttctgtccaccaggccataatacgaagaaagcttcttacagtggagtctcattgtttagcaatccagtccaatactgggaaattcagccctcaacctttcgttgtgtatacgtgcgttcagccatccagctggggaactacaagtag

SEQ ID NO: 235374 - DNA, 519 bp, Artificial Sequence
  derived and/or modified sequence
atgaaggcaaccatcatcttattactgttagctcaggtgagctgggccggtccattccagcagaggggactattcgacttcatgttggaggatgaagcctctggaattggaccagaagtacctgatgatcgggacttcgagcccagcctgggcccagtgtgtcctttcagatgccagtgccatctccgcgtcgtccagtgctctgatcttggccttgacaaggttcctaaggatctgccccctgatacaacactgttagacttgcagaataacaaaatcaccgagatcaaggacggtgacttcaagaatttaaaaaacttacacgtggtctatctgcacaacaataatatttctgtcgtggggtccagtgatttttgcccgcctggccataatactaagaaagccagctacagcggggtgagcctgttctctaatccggttcaatattgggaaatccagccaagcacttttcgctgcgtgtacgtaagaagcgcaattcagttggggaactataagtag

SEQ ID NO: 235375 - DNA, 519 bp, Artificial Sequence
  derived and/or modified sequence
atgaaggccaccatcatcctgctgctgctggcccaggtgagctgggccggccccttccagcagagaggcctgttcgacttcatgctggaggacgaggccagcggcatcggccccgaggtgcccgacgacagagacttcgagcccagcctgggccccgtgtgccccttcagatgccagtgccacctgagagtggtgcagtgcagcgacctgggcctggacaaggtgcccaaggacctgccccccgacaccaccctgctggacctgcagaacaacaagatcaccgagatcaaggacggcgacttcaagaacctgaagaacctgcacgtggtgtacctgcacaacaacaacatcagcgtggtgggcagcagcgacttctgcccccccggccacaacaccaagaaggccagctacagcggcgtgagcctgttcagcaaccccgtgcagtactgggagatccagcccagcaccttcagatgcgtgtacgtgagaagcgccatccagctgggcaactacaagtag

SEQ ID NO: 235376 - DNA, 1726 bp, Artificial Sequence
  derived and/or modified sequence
gaatctacaataagacaaatttcaaatcaagttgctccactatactgcataagcagtttagaatcttaagcagatgcaaaaagaataaagcaaatgggaggaaaaaaaaggccgataaagtttctggctacaatacaagagacatatcattaccatatgatctaatgtgggtgtcagccggattgtgttcattgagggaaaccttattttttaactgtgctatggagtagaagcaggaggttttcaacctagtcacagagcagcacctaccccctcctcctttccacacctgcaaactcttttacttgggctgaatatttagtgtaattacatctcagctttgagggctcctgtggcaaattcccggattaaaaggttccctggttgtgaaaatacatgagataaatcatgaaggccactatcatcctccttctgcttgcacaagtttcctgggctggaccgtttcaacagagaggcttatttgactttatgctagaagatgaggcttctgggataggcccagaagttcctgatgaccgcgacttcgagccctccctaggcccagtgtgccccttccgctgtcaatgccatcttcgagtggtccagtgttctgatttgggtctggacaaagtgccaaaggatcttccccctgacacaactctgctagacctgcaaaacaacaaaataaccgaaatcaaagatggagactttaagaacctgaagaaccttcacgttgtctaccttcataacaacaatatctctgtagttggatcaagtgacttctgcccacctggacacaacaccaaaaaggcttcttattcgggtgtgagtcttttcagcaacccggtccagtactgggagatacagccatccaccttcagatgtgtctacgtgcgctctgccattcaactcggaaactataagtaattctcaagaaagccctcatttttataacctggcaaaatcttgttaatgtcattgctaaaaaataaataaaagctagatactggaaacctaactgcaatgtggatgttttacccacatgacttattatgcataaagccaaatttccagtttaagtaattgcctacaataaaaagaaattttgcctgccattttcagaatcatcttttgaagctttctgttgatgttaactgagctactagagatattcttatttcactaaatgtaaaatttggagtaaatatatatgtcaatatttagtaaagcttttcttttttaatttccaggaaaaaataaaaagagtatgagtcttctgtaattcattgagcagttagctcatttgagataaagtcaaatgccaaacactagctctgtattaatccccatcattactggtaaagcctcatttgaatgtgtgaattcaatacaggctatgtaaaatttttactaatgtcattattttgaaaaaataaatttaaaaatacattcaaaattactattgtatacaagcttaattgttaatattccctaaacacaattttatgaagggagaagacattggtttgttgacaataacagtacatcttttcaagttctcagctatttcttctacctctccctatcttacatttgagtatggtaacttatgtcatctatgttgaatgtaagcttataaagcacaaagcatacatttcctgactggtctagagaactgatgtttcaatttacccctctgctaaataaatattaaaactatcatgtg

SEQ ID NO: 235377 - DNA, 519 bp, Artificial Sequence
  derived and/or modified sequence
atgaaggccactatcatcctccttctgcttgcacaagtttcctgggctggaccgtttcaacagagaggcttatttgactttatgctagaagatgaggcttctgggataggcccagaagttcctgatgaccgcgacttcgagccctccctaggcccagtgtgccccttccgctgtcaatgccatcttcgagtggtccagtgttctgatttgggtctggacaaagtgccaaaggatcttccccctgacacaactctgctagacctgcaaaacaacaaaataaccgaaatcaaagatggagactttaagaacctgaagaaccttcacgttgtctaccttcataacaacaatatctctgtagttggatcaagtgacttctgcccacctggacacaacaccaaaaaggcttcttattcgggtgtgagtcttttcagcaacccggtccagtactgggagatacagccatccaccttcagatgtgtctacgtgcgctctgccattcaactcggaaactataagtaa

SEQ ID NO: 235378 - DNA, 228 bp, Artificial Sequence
  derived and/or modified sequence
atgaaggccactattatcttgctcctcctggcccaggtgtcgtgggccgggccttttcagcagcgcggtctgtttgacttcatgctggaggacgaggcgagcgggattggccccgaggtgccagacgatagggactttgagccctctctgggacccgtgtgtcccttccgctgtcaatgccatttgcgcgtagtgcaatgtagcgatctggggtgcctgccctcatag

SEQ ID NO: 235379 - DNA, 228 bp, Artificial Sequence
  derived and/or modified sequence
atgaaggccaccatcatcctgctgctgctggcccaggtgtcctgggccggccccttccagcagaggggcctgtttgacttcatgctggaggatgaggccagcggcatcggccctgaggtgcctgatgaccgggactttgagcccagcctgggccctgtgtgccccttccgctgccagtgccacctgcgggtggtgcagtgcagcgacctgggctgcctgcccagctag

SEQ ID NO: 235380 - DNA, 228 bp, Artificial Sequence
  derived and/or modified sequence
atgaaggccaccatcatcctgctgctgctggcccaggtgagctgggcaggaccttttcagcagcgcggcctgtttgatttcatgctagaagacgaagccagcggcatcgggccggaggtgcccgacgacagagattttgagccatcgctgggccctgtatgtccctttcggtgtcagtgccatcttcgcgtcgtccaatgcagcgacttggggtgtctgccatcatag

SEQ ID NO: 235381 - DNA, 228 bp, Artificial Sequence
  derived and/or modified sequence
atgaaagccacaattatcctgttactattggcacaggtgtcctgggctgggcctttccagcagcgtggtctcttcgatttcatgttagaggacgaagcctctggcattggcccagaagtcccagacgaccgagacttcgagccttctctgggaccagtgtgcccatttcgctgtcagtgccacttacgggttgtccaatgctccgacctgggctgtctgccctcctag

SEQ ID NO: 235382 - DNA, 228 bp, Artificial Sequence
  derived and/or modified sequence
atgaaggccaccatcatcctgctgctgctggcccaggtgagctgggccggccccttccagcagagaggcctgttcgacttcatgctggaggacgaggccagcggcatcggccccgaggtgcccgacgacagagacttcgagcccagcctgggccccgtgtgccccttcagatgccagtgccacctgagagtggtgcagtgcagcgacctgggctgcctgcccagctag

SEQ ID NO: 235383 - DNA, 228 bp, Artificial Sequence
  derived and/or modified sequence
atgaaggccactatcatcctccttctgcttgcacaagtttcctgggctggaccgtttcaacagagaggcttatttgactttatgctagaagatgaggcttctgggataggcccagaagttcctgatgaccgcgacttcgagccctccctaggcccagtgtgccccttccgctgtcaatgccatcttcgagtggtccagtgttctgatttgggttgtctaccttcataa

SEQ ID NO: 235384 - protein, 384 aa, Artificial Sequence
  derived and/or modified sequence
MGSKKLKRVGLSQELCDRLSRHQILTCQDFLCLSPLELMKVTGLSYRGVHELLCMVSRACAPKMQTAYGIKAQRSADFSPAFLSTTLSALDEALHGGVACGSLTEITGPPGCGKTQFCIMMSILATLPTNMGGLEGAVVYIDTESAFSAERLVEIAESRFPRYFNTEEKLLLTSSKVHLYRELTCDEVLQRIESLEEEIISKGIKLVILDSVASVVRKEFDAQLQGNLKERNKFLAREASSLKYLAEEFSIPVILTNQITTHLSGALASQADLVSPADDLSLSEGTSGSSCVIAALGNTWSHSVNTRLILQYLDSERRQILIAKSPLAPFTSFVYTIKEEGLVLQETTFCSVTQAELNWAPEILPPQPPEQLGLQMCHHTQLIF

SEQ ID NO: 235385 - DNA, 1155 bp, Artificial Sequence
  derived and/or modified sequence
atgggcagcaagaagctgaagagagtgggcctgagccaggagctgtgcgacagactgagcagacaccagatcctgacctgccaggacttcctgtgcctgagccccctggagctgatgaaggtgaccggcctgagctacagaggcgtgcacgagctgctgtgcatggtgagcagagcctgcgcccccaagatgcagaccgcctacggcatcaaggcccagagaagcgccgacttcagccccgccttcctgagcaccaccctgagcgccctggacgaggccctgcacggcggcgtggcctgcggcagcctgaccgagatcaccggcccccccggctgcggcaagacccagttctgcatcatgatgagcatcctggccaccctgcccaccaacatgggcggcctggagggcgccgtggtgtacatcgacaccgagagcgccttcagcgccgagagactggtggagatcgccgagagcagattccccagatacttcaacaccgaggagaagctgctgctgaccagcagcaaggtgcacctgtacagagagctgacctgcgacgaggtgctgcagagaatcgagagcctggaggaggagatcatcagcaagggcatcaagctggtgatcctggacagcgtggccagcgtggtgagaaaggagttcgacgcccagctgcagggcaacctgaaggagagaaacaagttcctggccagagaggccagcagcctgaagtacctggccgaggagttcagcatccccgtgatcctgaccaaccagatcaccacccacctgagcggcgccctggccagccaggccgacctggtgagccccgccgacgacctgagcctgagcgagggcaccagcggcagcagctgcgtgatcgccgccctgggcaacacctggagccacagcgtgaacaccagactgatcctgcagtacctggacagcgagagaagacagatcctgatcgccaagagccccctggcccccttcaccagcttcgtgtacaccatcaaggaggagggcctggtgctgcaggagaccaccttctgcagcgtgacccaggccgagctgaactgggcccccgagatcctgcccccccagccccccgagcagctgggcctgcagatgtgccaccacacccagctgatcttctag

SEQ ID NO: 235386 - DNA, 1155 bp, Artificial Sequence
  derived and/or modified sequence
atgggttccaagaaacttaagcgcgtcgggctttctcaggagctgtgcgatcgactctcccgtcaccaaattctgacttgccaagactttctgtgtctcagcccactggagctgatgaaagttaccggactgtcctacaggggtgtgcatgaactgctctgtatggtgagtagagcctgtgcacccaagatgcagactgcgtacggaattaaggcacagcgaagtgcagacttctcgccagccttcctgagtaccactctctccgccctcgatgaggccctacacgggggcgtggcatgcggctctctgacagagatcacaggcccccccggttgtgggaagactcagttctgtattatgatgtcgattctggctacacttcctaccaatatgggtggccttgagggcgcagtcgtttacatcgacaccgagagcgcattttccgcagaacggctggtggaaatcgccgagtcaaggtttcctcggtacttcaacacagaggagaaactactgctcactagcagtaaagtccacctatacagggagctaacatgtgacgaggtgctgcagaggatcgaatccctggaggaagagattatatccaaggggatcaagctcgtcatcctggatagcgtcgcttccgtggttcggaaggagttcgatgctcagttgcaggggaacttgaaggaacgtaataaattcctggctagagaggcatcctcactgaaatacctcgccgaagaattcagtataccggtgatcctcacaaatcagatcaccacccatttgagcggagcgcttgcttcccaggccgacttagtctctcctgctgatgatctatccttgagtgagggcaccagtggtagcagttgtgtcatcgccgctctggggaatacctggagccatagtgtgaataccagacttatactacagtacctggactctgagcggcgacagattctcattgcaaaatcgccacttgccccttttactagcttcgtgtataccatcaaagaggagggattggtgctacaggagacgacgttttgtagtgtgacccaggcggagctcaattgggccccagagatcctgcctccccagccaccagaacagctgggcctccaaatgtgccatcacacgcaactgattttttag

SEQ ID NO: 235387 - DNA, 1155 bp, Artificial Sequence
  derived and/or modified sequence
atgggcagcaagaagctgaagagggtgggcctgagccaggagctgtgtgaccggctgagccgccaccagatcctgacctgccaggacttcctgtgcctgagccccctggagctgatgaaggtgacaggcctgagctaccggggcgtgcatgagctgctgtgcatggtgtcccgggcctgtgcccccaagatgcagacagcctacggcatcaaggcccagaggtctgctgacttcagccctgccttcctgagcaccaccctgagcgccctggatgaggccctgcatggaggagtggcctgtggcagcctgacagagatcactggacctcctggctgtgggaagacccagttctgcatcatgatgagcatcctggccaccctgcccaccaacatgggcggcctggagggcgctgtggtgtacatcgacacagaaagtgccttctctgctgagcggctggtggagattgctgagagccgcttcccccgctacttcaacacagaggagaagctgctgctgaccagcagcaaggtgcacctgtaccgggagctgacctgtgatgaggtgctgcagagaattgagagcctggaggaggagatcatcagcaagggcatcaagctggtgatcctggacagcgtggcctctgtggtgaggaaggagtttgatgcccagctgcagggcaacctgaaggagaggaacaagttcctggcccgggaggccagcagcctgaagtacctggccgaggagttcagcatccctgtgatcctgaccaaccagatcaccacccacctgagcggggccctggccagccaggccgacctggtgtccccagcagatgacctgagcctgtctgagggcaccagcggcagcagctgtgtgattgctgccctgggcaacacctggagccacagcgtgaacaccaggctcatcctgcagtacctggacagcgagcggcggcagatcctgattgccaagagccccctggcccccttcaccagctttgtgtacaccatcaaggaggagggcctggtgctgcaggagaccaccttctgcagcgtgacccaggccgagctgaactgggcccctgagatcctgcccccccagcccccagagcagctgggcctgcagatgtgccaccacacccagctgatcttctag

SEQ ID NO: 235388 - DNA, 1155 bp, Artificial Sequence
  derived and/or modified sequence
atgggcagcaagaagctgaagcgggtgggcctgagccaggagctgtgcgaccgtctctcgagacaccagatcctcacgtgccaagatttcctgtgtctttcaccactggagctgatgaaagtgacagggttatcctacaggggtgtccatgaactcctttgcatggtgagtcgggcctgcgcacctaagatgcaaacggcttacggaataaaagctcagaggtctgccgacttttcgccagcttttctctcaacgacgctgagcgccctggacgaagcactgcacggaggtgtcgcctgcggctctctgactgagatcaccggaccccccggctgcggcaagacccagttctgtatcatgatgagcatcctcgctaccctcccaacaaacatgggcggcctcgagggcgctgttgtatatatagatacagaatcagctttcagtgcagagcgcctagtggagattgccgagagccggtttccacgctatttcaacaccgaagaaaagttactgcttacatcctccaaggtccatctgtacagggagctaacatgtgacgaggttttgcaaaggatcgaatccctggaagaggagatcatctccaaagggattaagttggtgatcctcgacagcgtggcttctgtggtcagaaaggagttcgatgcccaactgcaaggtaatttaaaagaaaggaacaagtttctcgcccgagaggcgagttccctgaagtatcttgctgaagagttctcaatcccagttatactaactaaccaaataaccactcacctgagcggagccctggcctctcaggccgatcttgtgtcacccgccgacgacctgagtctcagtgagggtacgtctggatctagctgcgttattgctgcattagggaatacctggtcccacagtgtgaacacacgcctcattttgcagtacctggattctgaacgccgacaaattttgattgccaagagtccattggccccatttacctctttcgtttatacgattaaggaggaggggctagtgctacaggagacaacattctgctccgtgacccaggcagagctcaactgggcccctgaaatcctcccaccacaacctcccgaacagctggggctgcagatgtgtcatcatacacagctaatcttttag

SEQ ID NO: 235389 - DNA, 1155 bp, Artificial Sequence
  derived and/or modified sequence
atgggaagcaagaagctgaagagagtaggacttagccaggagctgtgcgatcggctaagccggcatcagatattaacttgtcaggactttttatgcttgagccccctggagttgatgaaagtgactgggctgtcctatcgcggtgtccatgagttactatgcatggtaagtagagcttgcgcccctaaaatgcagaccgcatatggtattaaagcacagagatcagctgacttctctccggcatttctgtccacgacactcagcgccctggacgaggcgctccacggtggggtcgcatgcgggtctcttactgaaatcacgggtcctcctggctgcggcaaaacgcagttctgcattatgatgtctatcctggcaacccttccaacgaacatgggagggctcgaaggagcagtggtgtacatagataccgaatcggccttctccgctgagcgattggtggaaatagcggagtcaaggtttcctcggtatttcaacacggaggaaaaactgctcttgacctcaagcaaagtccatctgtatcgtgaacttacatgtgacgaggtactccaacgcattgagagccttgaagaagaaataatttctaaaggcatcaagctggtcatcctcgatagcgtggcttccgtggtgcggaaagagtttgatgcccagctgcagggcaacctgaaagaaagaaataagttcttggcccgagaagcctcatcactgaaatacttagctgaagaattctcgatccccgtgatactgactaaccagatcactacacatctgagcggcgcactggccagccaggccgatctcgtgtccccggcagacgatctaagtctaagcgaagggacaagcggctcctcctgtgtgatagccgcactgggtaacacctggtcccactcagtgaacacgcggttgatccttcagtaccttgacagcgagaggagacagatcctgatcgccaagtctcctttagctccctttacgtctttcgtctacacaatcaaggaagaagggctggttttgcaggagaccaccttttgctcagttacccaggccgagctgaactgggccccagaaattttgccccctcaacctcctgagcagttggggctgcagatgtgtcaccatactcagctcattttttag

SEQ ID NO: 235390 - DNA, 2596 bp, Artificial Sequence
  derived and/or modified sequence
ctgtgtaaagggtggggaaacttgaaagttggatgctgcagacccggcatgggtagcaagaaactaaaacgagtgggtttatcacaagagctgtgtgaccgtctgagtagacatcagatccttacctgtcaggactttttatgtctttccccactggagcttatgaaggtgactggtctgagttatcgaggtgtccatgaacttctatgtatggtcagcagggcctgtgccccaaagatgcaaacggcttatgggataaaagcacaaaggtctgctgatttctcaccagcattcttatctactaccctttctgctttggacgaagccctgcatggtggtgtggcttgtggatccctcacagagattacaggtccaccaggttgtggaaaaactcagttttgtataatgatgagcattttggctacattacccaccaacatgggaggattagaaggagctgtggtgtacattgacacagagtctgcatttagtgctgaaagactggttgaaatagcagaatcccgttttcccagatattttaacactgaagaaaagttacttttgacaagtagtaaagttcatctttatcgggaactcacctgtgatgaagttctacaaaggattgaatctttggaagaagaaattatctcaaaaggaattaaacttgtgattcttgactctgttgcttctgtggtcagaaaggagtttgatgcacaacttcaaggcaatctcaaagaaagaaacaagttcttggcaagagaggcatcctccttgaagtatttggctgaggagttttcaatcccagttatcttgacgaatcagattacaacccatctgagtggagccctggcttctcaggcagacctggtgtctccagctgatgatttgtccctgtctgaaggcacttctggatccagctgtgtgatagccgcactaggaaatacctggagtcacagtgtgaatacccggctgatcctccagtaccttgattcagagagaagacagattcttattgccaagtcccctctggctcccttcacctcatttgtctacaccatcaaggaggaaggcctggttcttcaagagacaacattttgctctgtcacccaagctgaactgaactgggctccagaaatcctcccacctcagcctcctgagcagctaggactacagatgtgccaccatacccagctaattttttaattttttgtagaggtggggtctcattatgttgcccaagctgatctcaaactcctggcttcaagagatccacccacctcagcctcccaaagcgctaggattacaagtatgagactttgccattccaatgagaattttgtccttagcaatctcatccaatggccactggagatgtgtgtagggccacaagaatgagaaagggggcaatggagtgacaggtgacctgctcaggtgcccctccccagaccaaatgtcccaggcacacagcccatgccctccaccatggagtacattttctccctggcttgctgctgagctaaaggaccagggacgtggaaacaggaggtgaactaaggcaccccgccacccactgtggcagcttgaatttcttgaggctgagacaaactaggatccagtagcctagattttgccccagtttctccactgagtatttactcagtgctcctgagccgatgccttcccctctgcctagatgaaccacagcattttggtaaatgcctcagcatgttaggagcgctggaacgtttattctcttccctcccaattatccactctaatggagcagaacacttacatggaaaatcctaaacatggaagatgatttaaaaatgattcaccctggaatacatgcttccagttgcttctacaggtttaccttgctaaaggcatttcgcttcctttgctgttacaataagcttgcctgccttgaagaaaagaagaccagggccaaagggaaatcagtcaagggagcctgttttgtctgaaataatgcatccatgaacaaatgaattgagtataactgtctttttacatcagtgtttctgtggaattaagagaacatccaaggccactcctagcttgagtagattaaatttgtccttgtgtttggagcaagggttgtgaagtctgtctggcccatcaaatgaccaatggcttttaaggaaggactaagtgacttatgaccagaacaagggagcagcctgagtcagtctccccaatgtctacattgtgttatttatactagcaaaaaaatagacacaactaaatgttcgaccatatggtattggttaaattaacatctatacgatggaatactagatggtcattaaaattatgtgtcagaagaaggcttaatctcatgggaaagtgttcacaccatattattaaagagaaaaaacagattataaagcaatatgcatacaatgtagtagttctgtaagaaaaaagtattatgtgcattttaactggaaaaatatgtataaaaatgttaacagtgcaatctctgggcaataagattatacttgacttttatttcttttttggaattgtcttttttttttttttttcaagtttcctcccattaacatgcatgttc

SEQ ID NO: 235391 - protein, 350 aa, Artificial Sequence
  derived and/or modified sequence
MGSKKLKRVGLSQELCDRLSRHQILTCQDFLCLSPLELMKVTGLSYRGVHELLCMVSRACAPKMQTAYGIKAQRSADFSPAFLSTTLSALDEALHGGVACGSLTEITGPPGCGKTQFCIMMSILATLPTNMGGLEGAVVYIDTESAFSAERLVEIAESRFPRYFNTEEKLLLTSSKVHLYRELTCDEVLQRIESLEEEIISKGIKLVILDSVASVVRKEFDAQLQGNLKERNKFLAREASSLKYLAEEFSIPVILTNQITTHLSGALASQADLVSPADDLSLSEGTSGSSCVIAALGNTWSHSVNTRLILQYLDSERRQILIAKSPLAPFTSFVYTIKEEGLVLQGQETP

SEQ ID NO: 235392 - protein, 350 aa, Artificial Sequence
  derived and/or modified sequence
MGSKKLKRVGLSQELCDRLSRHQILTCQDFLCLSPLELMKVTGLSYRGVHELLCMVSRACAPKMQTAYGIKAQRSADFSPAFLSTTLSALDEALHGGVACGSLTEITGPPGCGKTQFCIMMSILATLPTNMGGLEGAVVYIDTESAFSAERLVEIAESRFPRYFNTEEKLLLTSSKVHLYRELTCDEVLQRIESLEEEIISKGIKLVILDSVASVVRKEFDAQLQGNLKERNKFLAREASSLKYLAEEFSIPVILTNQITTHLSGALASQADLVSPADDLSLSEGTSGSSCVIAALGNTWSHSVNTRLILQYLDSERRQILIAKSPLAPFTSFVYTIKEEGLVLQGQEKP

SEQ ID NO: 235393 - DNA, 1053 bp, Artificial Sequence
  derived and/or modified sequence
atgggcagcaagaagctgaagagagtgggcctgagccaggagctgtgcgacagactgagcagacaccagatcctgacctgccaggacttcctgtgcctgagccccctggagctgatgaaggtgaccggcctgagctacagaggcgtgcacgagctgctgtgcatggtgagcagagcctgcgcccccaagatgcagaccgcctacggcatcaaggcccagagaagcgccgacttcagccccgccttcctgagcaccaccctgagcgccctggacgaggccctgcacggcggcgtggcctgcggcagcctgaccgagatcaccggcccccccggctgcggcaagacccagttctgcatcatgatgagcatcctggccaccctgcccaccaacatgggcggcctggagggcgccgtggtgtacatcgacaccgagagcgccttcagcgccgagagactggtggagatcgccgagagcagattccccagatacttcaacaccgaggagaagctgctgctgaccagcagcaaggtgcacctgtacagagagctgacctgcgacgaggtgctgcagagaatcgagagcctggaggaggagatcatcagcaagggcatcaagctggtgatcctggacagcgtggccagcgtggtgagaaaggagttcgacgcccagctgcagggcaacctgaaggagagaaacaagttcctggccagagaggccagcagcctgaagtacctggccgaggagttcagcatccccgtgatcctgaccaaccagatcaccacccacctgagcggcgccctggccagccaggccgacctggtgagccccgccgacgacctgagcctgagcgagggcaccagcggcagcagctgcgtgatcgccgccctgggcaacacctggagccacagcgtgaacaccagactgatcctgcagtacctggacagcgagagaagacagatcctgatcgccaagagccccctggcccccttcaccagcttcgtgtacaccatcaaggaggagggcctggtgctgcagggccaggagaccccctag

SEQ ID NO: 235394 - DNA, 1053 bp, Artificial Sequence
  derived and/or modified sequence
atgggcagcaagaagctgaagagagtgggcctgagccaggagctgtgcgacagactgagcagacaccagatcctgacctgccaggacttcctgtgcctgagccccctggagctgatgaaggtgaccggcctgagctacagaggcgtgcacgagctgctgtgcatggtgagcagagcctgcgcccccaagatgcagaccgcctacggcatcaaggcccagagaagcgccgacttcagccccgccttcctgagcaccaccctgagcgccctggacgaggccctgcacggcggcgtggcctgcggcagcctgaccgagatcaccggcccccccggctgcggcaagacccagttctgcatcatgatgagcatcctggccaccctgcccaccaacatgggcggcctggagggcgccgtggtgtacatcgacaccgagagcgccttcagcgccgagagactggtggagatcgccgagagcagattccccagatacttcaacaccgaggagaagctgctgctgaccagcagcaaggtgcacctgtacagagagctgacctgcgacgaggtgctgcagagaatcgagagcctggaggaggagatcatcagcaagggcatcaagctggtgatcctggacagcgtggccagcgtggtgagaaaggagttcgacgcccagctgcagggcaacctgaaggagagaaacaagttcctggccagagaggccagcagcctgaagtacctggccgaggagttcagcatccccgtgatcctgaccaaccagatcaccacccacctgagcggcgccctggccagccaggccgacctggtgagccccgccgacgacctgagcctgagcgagggcaccagcggcagcagctgcgtgatcgccgccctgggcaacacctggagccacagcgtgaacaccagactgatcctgcagtacctggacagcgagagaagacagatcctgatcgccaagagccccctggcccccttcaccagcttcgtgtacaccatcaaggaggagggcctggtgctgcagggccaggagaagccctag

SEQ ID NO: 235395 - DNA, 1053 bp, Artificial Sequence
  derived and/or modified sequence
atgggaagcaagaagctgaagagagtaggactgtcccaggaactgtgcgacaggctgtccaggcaccagattcttacttgccaggacttcttgtgtttgagccctctggaactcatgaaggtgaccggcttgagttatcggggagtgcacgagctgttgtgcatggtctccagagcatgcgctcccaagatgcagaccgcctacggcatcaaggcccagcggagcgcggatttcagtccagctttccttagcactacactgagtgctctagatgaagccctacatgggggtgtggcttgcggatcgcttactgaaattaccggccccccgggatgcggcaagacccagttttgcatcatgatgtcaattttggctactttgccaacgaacatgggaggcctggagggggctgttgtgtatatcgatactgaaagcgccttcagcgccgagaggctggttgagatcgctgaatctcgcttccctcgctactttaataccgaggaaaaactgctgctgacctcatcaaaggtgcacctgtacagggagctcacgtgcgatgaagtgctgcagcggatcgagtccttagaggaagaaatcatctctaagggcatcaagctggtgattctggactccgttgccagcgtggtgaggaaggaatttgacgcacaacttcaaggtaatctgaaggaacggaataagttcctagccagggaggcatccagccttaagtatctggcagaagaattttccatccctgtgatcttgacaaatcagataactacgcacctgtcgggggctctcgcttcacaagctgacctggtgtcacctgccgatgacttaagtctctctgagggcacttctggctcgtcttgcgtgatcgccgcactcggcaatacttggtcgcactcagttaataccagactgatcctgcaatatcttgactctgagcggcggcagattctcattgcaaagagcccgctagccccattcaccagttttgtctataccatcaaggaagagggcctggtcctgcagggccaagaaacgccatag

SEQ ID NO: 235396 - DNA, 1053 bp, Artificial Sequence
  derived and/or modified sequence
atggggagtaaaaaactgaagcgggtgggattgtcccaggaattgtgcgacagattgtcaagacatcagattctcacatgtcaggatttcctatgtctttctcccctggaactcatgaaagtgaccggcctatcatatagaggagttcacgagctgctgtgcatggtctctagagcgtgtgcccccaaaatgcagacagcatatggaattaaagcccagcggtccgctgattttagcccagcctttctgagcaccacgctgagcgcattggacgaggcactccatggcggggtggcctgcggcagcctgaccgagatcacaggacctcccgggtgcgggaagacccagttttgcattatgatgtcaattctggccaccctgccaaccaatatgggcggcctcgaaggcgccgtcgtatatatcgacacagaatccgccttttccgctgaaaggctggtcgaaattgctgaatctcgctttccgcggtatttcaacactgaggagaagttactgctaaccagcagcaaggttcatctgtatcgtgagctgacatgtgacgaggtactgcagagaatcgagtctttagaggaggagatcatttccaagggcattaagctggttattctcgactctgtagcgtcagtggtaagaaaagagtttgacgcccaattgcaggggaaccttaaggagcggaataagtttttggcccgggaggcgtcaagccttaaatatctggccgaggaatttagcatccctgtgattctgacaaaccaaatcaccacccacttatccggcgccctggcctcacaggctgatcttgtgagtcccgcggacgacctatccttgagcgagggcacaagtggttccagttgtgtgatcgccgccctcggaaacacgtggtctcactctgtgaatactcggctaattctccagtaccttgactccgagcgcaggcagatcctgatcgcaaaatcaccactcgccccattcacttcgttcgtatacaccataaaggaggagggattagtgctccagggccaggagaagccgtag

SEQ ID NO: 235397 - DNA, 1053 bp, Artificial Sequence
  derived and/or modified sequence
atgggcagcaagaagctgaagagggtgggcctgagccaggagctgtgtgaccggctgagccgccaccagatcctgacctgccaggacttcctgtgcctgagccccctggagctgatgaaggtgacaggcctgagctaccggggcgtgcatgagctgctgtgcatggtgtcccgggcctgtgcccccaagatgcagacagcctacggcatcaaggcccagaggtctgctgacttcagccctgccttcctgagcaccaccctgagcgccctggatgaggccctgcatggaggagtggcctgtggcagcctgacagagatcactggacctcctggctgtgggaagacccagttctgcatcatgatgagcatcctggccaccctgcccaccaacatgggcggcctggagggcgctgtggtgtacatcgacacagaaagtgccttctctgctgagcggctggtggagattgctgagagccgcttcccccgctacttcaacacagaggagaagctgctgctgaccagcagcaaggtgcacctgtaccgggagctgacctgtgatgaggtgctgcagagaattgagagcctggaggaggagatcatcagcaagggcatcaagctggtgatcctggacagcgtggcctctgtggtgaggaaggagtttgatgcccagctgcagggcaacctgaaggagaggaacaagttcctggcccgggaggccagcagcctgaagtacctggccgaggagttcagcatccctgtgatcctgaccaaccagatcaccacccacctgagcggggccctggccagccaggccgacctggtgtccccagcagatgacctgagcctgtctgagggcaccagcggcagcagctgtgtgattgctgccctgggcaacacctggagccacagcgtgaacaccaggctcatcctgcagtacctggacagcgagcggcggcagatcctgattgccaagagccccctggcccccttcaccagctttgtgtacaccatcaaggaggagggcctggtgctgcagggccaggagaccccctag

SEQ ID NO: 235398 - DNA, 1053 bp, Artificial Sequence
  derived and/or modified sequence
atgggcagcaagaagctgaagagggtgggcctgagccaggagctgtgtgaccggctgagccgccaccagatcctgacctgccaggacttcctgtgcctgagccccctggagctgatgaaggtgacaggcctgagctaccggggcgtgcatgagctgctgtgcatggtgtcccgggcctgtgcccccaagatgcagacagcctacggcatcaaggcccagaggtctgctgacttcagccctgccttcctgagcaccaccctgagcgccctggatgaggccctgcatggaggagtggcctgtggcagcctgacagagatcactggacctcctggctgtgggaagacccagttctgcatcatgatgagcatcctggccaccctgcccaccaacatgggcggcctggagggcgctgtggtgtacatcgacacagaaagtgccttctctgctgagcggctggtggagattgctgagagccgcttcccccgctacttcaacacagaggagaagctgctgctgaccagcagcaaggtgcacctgtaccgggagctgacctgtgatgaggtgctgcagagaattgagagcctggaggaggagatcatcagcaagggcatcaagctggtgatcctggacagcgtggcctctgtggtgaggaaggagtttgatgcccagctgcagggcaacctgaaggagaggaacaagttcctggcccgggaggccagcagcctgaagtacctggccgaggagttcagcatccctgtgatcctgaccaaccagatcaccacccacctgagcggggccctggccagccaggccgacctggtgtccccagcagatgacctgagcctgtctgagggcaccagcggcagcagctgtgtgattgctgccctgggcaacacctggagccacagcgtgaacaccaggctcatcctgcagtacctggacagcgagcggcggcagatcctgattgccaagagccccctggcccccttcaccagctttgtgtacaccatcaaggaggagggcctggtgctgcagggccaggagaagccctag

SEQ ID NO: 235399 - DNA, 1053 bp, Artificial Sequence
  derived and/or modified sequence
atgggcagcaagaagctgaagcgggtgggcctgagccaggagctgtgcgacagattatcgaggcatcagatcctgacttgccaggatttcttatgtttatcacctctggagttgatgaaagtgacagggctgagctataggggagtacacgaacttctgtgtatggtaagtcgcgcctgtgcacccaaaatgcaaactgcttatgggattaaggctcagcggagtgcagatttcagcccagcatttctttctacaacactcagtgccttagacgaggcccttcatggtggcgtggcctgcgggagccttaccgaaattacgggacctcctggttgtggaaaaactcagttttgtatcatgatgtccatcctggctaccctccctacaaatatggggggcctggaaggtgctgtcgtctatattgacaccgagtcagcattctcagccgagcgcttagtcgaaatcgccgagagccgattcccaaggtactttaacacagaggaaaaattactgctaacatctagcaaggtgcacctgtacagggagcttacctgtgacgaggtactccaaagaattgagagtttagaagaagagattatatctaaaggaatcaaattggtcatcctggattccgtggccagtgttgtgcgcaaggagtttgacgctcaactccagggaaatcttaaagagcggaataaattcttagccagggaagccagcagcctcaagtacctggctgaggagttctcaattccagttatcctaactaaccagatcacgacacatctcagcggagccctggccagccaagccgacctggtttccccggccgacgatttgtccctttcagagggcacaagcggttcctcgtgcgtgattgcggctctgggcaatacttggtctcactcagtcaacacacgcctcattctgcagtaccttgatagcgagcggcgtcagattctaatcgccaagtcacctctggcccccttcacatcattcgtgtacacaatcaaggaggaaggcttagtcttacaggggcaggaaaccccttag

SEQ ID NO: 235400 - DNA, 1053 bp, Artificial Sequence
  derived and/or modified sequence
atgggcagcaagaagctgaagcgggtgggcctgagccaggagctgtgtgaccggttatcccgacaccaaatcctgacgtgtcaggactttctttgtttaagcccacttgaactaatgaaggtaacaggtttatcttacaggggcgtgcacgagcttctgtgcatggtatccagagcctgcgctccgaagatgcagacagcctatggcattaaggcccaaagatctgctgacttctcaccagcattcctctccactactttaagcgcgcttgacgaagccctccacgggggtgtcgcttgcggcagcctgaccgaaattactgggccgccaggatgtgggaagacacaattctgtatcatgatgagtatactcgcaaccctgcccactaacatgggcggcctggaaggtgctgttgtgtatatcgacaccgaaagtgccttttctgccgagagattagtggaaattgcagaatcacggttcccaagatattttaacaccgaggagaagctacttctgacatcgtctaaggtgcacttgtatagggaattgacatgtgacgaagtcttgcagcgcatcgagagtcttgaggaagagattatttctaagggtatcaaactggtgatcctggattccgtagctagtgtggttcggaaggagtttgatgcccagctgcaaggaaatttgaaagaaaggaataagttcctggcaagagaagcttcgtcactgaagtatttggccgaagagttctctattcccgttatcctgactaaccaaataacaacccatctgagcggtgcactggcaagccaagcagatttggttagtccagcagatgatttgtccttgtctgaggggacctctggcagttcgtgcgtcatcgccgctctgggcaacacttggtcccacagcgtgaatacccgcttaatcttgcagtacttggactcagagaggagacagattctcattgcaaagagtccccttgccccttttacctcctttgtgtatactatcaaagaagaagggcttgtgttgcagggccaggaaaagccctag

SEQ ID NO: 235401 - DNA, 1053 bp, Artificial Sequence
  derived and/or modified sequence
atgggttctaagaagcttaaacgagtcggacttagtcaggaattatgcgaccgactgagtcggcaccagattttgacttgccaggattttctgtgtctcagtccgctcgagcttatgaaagtgaccggcctgtcataccgaggagtccacgagctgctgtgcatggtgtccagggcgtgtgccccaaaaatgcagaccgcctatggcatcaaagcgcaacggtccgccgattttagcccagccttcctgtccaccacactgtccgctttagatgaggcactgcacggcggagtggcatgcggcagcttaacggaaatcaccggaccccctgggtgcggcaagactcagttctgcattatgatgagcatactggcaacgcttcccactaatatgggaggactcgagggtgctgtcgtgtatatagataccgaaagcgccttctctgccgagcgcctggtcgaaatcgccgagtcccggtttcctaggtatttcaacaccgaggaaaaactactgctgacaagttccaaggtgcacctttaccgggaactcacttgtgatgaggtgttgcagcgaatagaatctctggaggaagaaatcatcagtaaaggtattaagctcgttatcttagatagtgtggcctcggtcgtgagaaaagagttcgatgctcagctccaagggaatcttaaagagagaaacaaatttctcgctagagaggcatcatctctgaagtacctcgcagaggaattctccatccccgtcatcctcaccaaccaaattactacccacctgtccggcgctctggcgagccaggccgacctggtgagtcccgcagacgatctgtcactgtcagaaggtactagtggctccagttgtgtgatcgccgcactgggaaacacttggtcccacagcgtgaacacacggttaattcttcagtatttggactcagagaggcgccagatccttatcgcaaagtcccctctggcaccttttactagctttgtctatactataaaggaggaggggttggtgcttcaagggcaggagacgccctag

SEQ ID NO: 235402 - DNA, 1053 bp, Artificial Sequence
  derived and/or modified sequence
atgggctctaaaaaattaaaacgcgttggcctgtcccaggaattatgcgaccgtctgagtcggcaccagattctgacctgtcaggactttctgtgtctgagcccactcgagctcatgaaagtgacaggactgtcgtacaggggggtccacgaactgctgtgcatggtctcccgagcatgcgctcctaaaatgcagaccgcctacggaataaaggcccaaaggagcgccgacttttcacccgctttcctgtctacaaccttgagcgcacttgatgaggccctgcacggtggggtggcttgcggcagtctcacagaaatcacaggaccaccgggttgtggcaagacccagttttgtataatgatgtccatcctggccacccttcctaccaatatgggaggtttggagggcgctgtcgtgtacattgacaccgagagcgccttttccgcagagcgcctggtggagatcgctgagtctagatttccgagatactttaatacagaggaaaagctgctgttgacaagttcgaaggttcatctttacagggagttgacatgtgatgaggtcctgcaacggattgagtcactggaggaggagataatatctaaggggatcaagctagttattctagatagtgtggcgtctgtggtgagaaaagagtttgacgcccagctgcagggtaacttgaaggaaaggaacaagttcttggctcgggaggcctcgtctctgaagtatctggcagaggaattctctatccccgtgatcctcaccaaccagattacaacccatttaagtggggcactggcctctcaggccgacttggtttccccagcagatgatctgtccctgtccgaaggaacgtccgggtctagctgtgttatcgcagcgttaggcaatacctggagtcactcggtgaacacgcggctcatcttacaatatttagactctgagcgacgtcagatcctaatcgctaaaagcccactggccccatttacctcatttgtctacaccatcaaggaggagggactcgtactgcagggacaggaaaaaccctag

SEQ ID NO: 235403 - DNA, 1050 bp, Artificial Sequence
  derived and/or modified sequence
atgggtagcaagaaactaaaacgagtgggtttatcacaagagctgtgtgaccgtctgagtagacatcagatccttacctgtcaggactttttatgtctttccccactggagcttatgaaggtgactggtctgagttatcgaggtgtccatgaacttctatgtatggtcagcagggcctgtgccccaaagatgcaaacggcttatgggataaaagcacaaaggtctgctgatttctcaccagcattcttatctactaccctttctgctttggacgaagccctgcatggtggtgtggcttgtggatccctcacagagattacaggtccaccaggttgtggaaaaactcagttttgtataatgatgagcattttggctacattacccaccaacatgggaggattagaaggagctgtggtgtacattgacacagagtctgcatttagtgctgaaagactggttgaaatagcagaatcccgttttcccagatattttaacactgaagaaaagttacttttgacaagtagtaaagttcatctttatcgggaactcacctgtgatgaagttctacaaaggattgaatctttggaagaagaaattatctcaaaaggaattaaacttgtgattcttgactctgttgcttctgtggtcagaaaggagtttgatgcacaacttcaaggcaatctcaaagaaagaaacaagttcttggcaagagaggcatcctccttgaagtatttggctgaggagttttcaatcccagttatcttgacgaatcagattacaacccatctgagtggagccctggcttctcaggcagacctggtgtctccagctgatgatttgtccctgtctgaaggcacttctggatccagctgtgtgatagccgcactaggaaatacctggagtcacagtgtgaatacccggctgatcctccagtaccttgattcagagagaagacagattcttattgccaagtcccctctggctcccttcacctcatttgtctacaccatcaaggaggaaggcctggttcttcaagggcaggagacccca

SEQ ID NO: 235404 - DNA, 1536 bp, Artificial Sequence
  derived and/or modified sequence
ctgtgtaaagggtggggaaacttgaaagttggatgctgcagacccggcatgggtagcaagaaactaaaacgagtgggtttatcacaagagctgtgtgaccgtctgagtagacatcagatccttacctgtcaggactttttatgtctttccccactggagcttatgaaggtgactggtctgagttatcgaggtgtccatgaacttctatgtatggtcagcagggcctgtgccccaaagatgcaaacggcttatgggataaaagcacaaaggtctgctgatttctcaccagcattcttatctactaccctttctgctttggacgaagccctgcatggtggtgtggcttgtggatccctcacagagattacaggtccaccaggttgtggaaaaactcagttttgtataatgatgagcattttggctacattacccaccaacatgggaggattagaaggagctgtggtgtacattgacacagagtctgcatttagtgctgaaagactggttgaaatagcagaatcccgttttcccagatattttaacactgaagaaaagttacttttgacaagtagtaaagttcatctttatcgggaactcacctgtgatgaagttctacaaaggattgaatctttggaagaagaaattatctcaaaaggaattaaacttgtgattcttgactctgttgcttctgtggtcagaaaggagtttgatgcacaacttcaaggcaatctcaaagaaagaaacaagttcttggcaagagaggcatcctccttgaagtatttggctgaggagttttcaatcccagttatcttgacgaatcagattacaacccatctgagtggagccctggcttctcaggcagacctggtgtctccagctgatgatttgtccctgtctgaaggcacttctggatccagctgtgtgatagccgcactaggaaatacctggagtcacagtgtgaatacccggctgatcctccagtaccttgattcagagagaagacagattcttattgccaagtcccctctggctcccttcacctcatttgtctacaccatcaaggaggaaggcctggttcttcaaggccaagagaagccatagggatactgtgacctttgtctagagttgatgggggtgtgatttgtgaaataaaacaggaccgtactgcttggaagaaggaaacggaagctgacataatggggattaattagttgattgctgttgagatggtaacagatttgctcctaaaccattgagctagcgatttcagacctagcagggaaggtgaagatgaagaagcctttgttcaggtctctagatgtgtagggctgagggctttgccgccatgggatgtcaacagccataataataatttgcacttatatagcacctttcaaccaggcacctcaaagcggtttaaccacattaattaattaaagcccacaatcctcctggggagaggaggaggatgactaacaagatttgtaattacaggagggaacatttccgaataaagtattgtctaccagataaaaa

SEQ ID NO: 235405 - protein, 514 aa, Artificial Sequence
  derived and/or modified sequence
MMNFLRRRLSDSSLFSSLSQAVKQTAASAGLVDAPGAAPAAARKAKVLLVVDEPHADWAKCFRGKKVLGDYDIKVEQAEFSELNLVAHADGTYAVDMQVLRNGTKVVRSFRPDFVLIRQHAFGMAENEDFRHLIIGMQYAGLPSINSLESIYNFCDKPWVFAQLVAIYKTLGGEKFPLIEQTYYPNHKEMLTLPTFPVVVKIGHAHSGMGKVKVENHYDFQDIASVVALTQTYATAEPFIDSKYDIRVQKIGNNYKAYMRTSISGNWKTNTGSAMLEQIAMSDRYKLWVDTCSEMFGGLDICAVKAVHGKDGKDYIFEVMDCSMPLIGEHQVEDRQLITELVISKMNQLLSRTPALSPQRPLTTQQPQSGTLKDPDSSKTPPQRPPPQGGPGQPQGMQPPGKVLPPRRLPPGPSLPPSSSSSSSSSSSAPQRPGGPTTHGDAPSSSSSLAEAQPPLAAPPQKPQPHPQLNKSQSLTNAFSFSESSFFRSSANEDEAKAETIRSLRKSFASLFSD

SEQ ID NO: 235406 - DNA, 1545 bp, Artificial Sequence
  derived and/or modified sequence
atgatgaacttcctgagaagaagactgagcgacagcagcctgttcagcagcctgagccaggccgtgaagcagaccgccgccagcgccggcctggtggacgcccccggcgccgcccccgccgccgccagaaaggccaaggtgctgctggtggtggacgagccccacgccgactgggccaagtgcttcagaggcaagaaggtgctgggcgactacgacatcaaggtggagcaggccgagttcagcgagctgaacctggtggcccacgccgacggcacctacgccgtggacatgcaggtgctgagaaacggcaccaaggtggtgagaagcttcagacccgacttcgtgctgatcagacagcacgccttcggcatggccgagaacgaggacttcagacacctgatcatcggcatgcagtacgccggcctgcccagcatcaacagcctggagagcatctacaacttctgcgacaagccctgggtgttcgcccagctggtggccatctacaagaccctgggcggcgagaagttccccctgatcgagcagacctactaccccaaccacaaggagatgctgaccctgcccaccttccccgtggtggtgaagatcggccacgcccacagcggcatgggcaaggtgaaggtggagaaccactacgacttccaggacatcgccagcgtggtggccctgacccagacctacgccaccgccgagcccttcatcgacagcaagtacgacatcagagtgcagaagatcggcaacaactacaaggcctacatgagaaccagcatcagcggcaactggaagaccaacaccggcagcgccatgctggagcagatcgccatgagcgacagatacaagctgtgggtggacacctgcagcgagatgttcggcggcctggacatctgcgccgtgaaggccgtgcacggcaaggacggcaaggactacatcttcgaggtgatggactgcagcatgcccctgatcggcgagcaccaggtggaggacagacagctgatcaccgagctggtgatcagcaagatgaaccagctgctgagcagaacccccgccctgagcccccagagacccctgaccacccagcagccccagagcggcaccctgaaggaccccgacagcagcaagacccccccccagagaccccccccccagggcggccccggccagccccagggcatgcagccccccggcaaggtgctgccccccagaagactgccccccggccccagcctgccccccagcagcagcagcagcagcagcagcagcagcagcgccccccagagacccggcggccccaccacccacggcgacgcccccagcagcagcagcagcctggccgaggcccagccccccctggccgcccccccccagaagccccagccccacccccagctgaacaagagccagagcctgaccaacgccttcagcttcagcgagagcagcttcttcagaagcagcgccaacgaggacgaggccaaggccgagaccatcagaagcctgagaaagagcttcgccagcctgttcagcgactag

SEQ ID NO: 235407 - DNA, 1545 bp, Artificial Sequence
  derived and/or modified sequence
atgatgaactttttgcgccgccggctttccgattccagcctgtttagcagcctctctcaggccgtaaagcagaccgccgcctccgcgggcctcgtggacgctccaggcgctgccccggctgctgccaggaaggccaaggtcttactcgtggtggacgagcctcacgcggactgggcgaagtgcttccgcggaaagaaagtactgggcgactatgacataaaggtggaacaggcagagttttctgaactcaaccttgtggcccacgccgatggcacgtatgctgtggacatgcaggtgctcaggaacggcacaaaggtggttcgttcgtttcggcctgacttcgtactgatccgacaacacgcttttggcatggccgaaaacgaagacttcaggcatttgatcattggaatgcagtacgccggcttgccctccataaattcactggagtccatctataatttctgtgacaaaccgtgggtgttcgcacagctcgtggcgatttataagaccctgggcggggaaaagtttcccctgatagagcagacctactaccctaaccataaggagatgctgaccctgccaaccttcccggtagtcgtcaaaattgggcacgcacattcaggaatgggcaaagtgaaggtcgaaaatcattacgactttcaggacatcgcaagtgtggtggcactaacgcagacttacgcaacagccgagccctttatagattctaaatatgatattagggtccagaaaatcggtaataattacaaggcttacatgcgaacatcaatttctggcaattggaagacaaataccggatctgcaatgctagaacaaatagcgatgtccgataggtacaaattgtgggtggacacctgcagcgaaatgttcgggggtctcgacatctgtgccgtaaaggccgtccacgggaaagatggtaaggattatatcttcgaggtaatggactgttctatgccactcattggggagcatcaggtggaagaccgccaattgattacagaacttgtgatatctaaaatgaatcaactgctgagccggaccccagcgctgtccccccaaagaccgttgacgactcaacaaccacaaagcggcaccttgaaggatcctgattctagcaaaacgcccccccaacggccaccacctcagggtggaccaggtcagccgcaggggatgcaaccacccgggaaggtgttgccacctagacgtcttccccccgggccaagcctgccaccttcctcttcttcgtccagcagtagctcatccagcgcccctcagcgccccggaggacccactactcatggcgatgcaccaagcagctcttcttccctcgcagaggcgcagccaccgctggccgcgcccccccaaaagccacaaccccatccgcaactgaataagtctcagtctctgaccaacgccttttcctttagcgagtccagcttcttccggagctccgctaatgaggacgaagctaaagctgagacaatccggtccttgaggaaaagtttcgcatcgctgtttagcgattag

SEQ ID NO: 235408 - DNA, 1545 bp, Artificial Sequence
  derived and/or modified sequence
atgatgaacttcctgcggcggcggctgagtgacagcagcctcttcagcagcctgagccaggccgtgaagcagacagctgccagcgctggcctggtggatgcccctggagctgccccagctgctgccaggaaggccaaggtgctgctggtggtggatgagccccacgccgactgggccaagtgcttccggggcaagaaggtgctgggggactatgacatcaaggtggagcaggccgagttcagcgagctgaacctggtggcccatgctgatggcacctatgctgtggacatgcaggtgctgagaaatggcaccaaggtggtgcgctccttccggccagactttgtgctgatccggcagcacgccttcggcatggccgagaatgaagacttccgccacctgatcatcggcatgcagtatgccggcctgcccagcatcaacagcctggagagcatctacaacttctgtgacaagccctgggtgtttgcccagctggtggccatctacaagaccctgggcggggagaagttccccctgattgagcagacctactaccccaaccacaaggagatgctgaccctgcccaccttccctgtggtggtgaagattggccacgcccacagcggcatgggcaaggtgaaggtggagaaccactatgacttccaggacatcgcctctgtggtggccctgacccagacctacgccacagctgagcccttcatcgacagcaaatatgacatccgggtgcagaagattggcaacaactacaaggcctacatgaggaccagcatcagcggcaactggaagaccaacacaggcagcgccatgctggagcagatcgccatgtctgaccgctacaagctgtgggtggacacctgcagcgagatgtttggaggcctggacatctgtgctgtgaaggctgtgcacggcaaggatggcaaggactacatctttgaggtgatggactgcagcatgcccctgattggagagcaccaggtggaggaccggcagctgatcacagagctggtgatcagcaagatgaaccagctgctgagcaggaccccagccctgagcccccagaggcccctgaccacccagcagccccagagcggcaccctgaaggaccctgacagcagcaagaccccaccccagaggcccccaccccagggcggccctggccagccccagggcatgcagcccccaggcaaggtgctgcccccccggcggctgcccccaggccccagcctgccccccagcagcagcagcagcagcagcagcagcagcagcgccccccagaggcctgggggccccaccacccatggagatgcccccagcagcagcagcagcctggccgaggcccagccccccctggccgccccaccccagaagccccagccccacccccagctgaacaagagccagagcctgaccaatgccttctccttcagcgagagcagcttcttccgcagcagcgccaatgaagatgaggccaaggccgagaccatccgcagcctgaggaagagctttgccagcctcttcagtgactag

SEQ ID NO: 235409 - DNA, 1545 bp, Artificial Sequence
  derived and/or modified sequence
atgatgaacttcctgcggcggcggctgagcgacagcagcctgttcagttccctatctcaggctgtgaagcagacagcagctagtgccggtctagtggatgctcctggcgcagccccagccgccgccaggaaggcgaaggtgctcctcgtcgtagacgagccacatgcagattgggccaagtgctttcggggcaagaaggtcctgggagattatgatatcaaggtcgagcaggccgagttctcggaactgaatctagtggcccacgcagacggaacttatgcggtggacatgcaggtcttgaggaacggaactaaggtcgtaaggagcttccgcccagacttcgtcctgattaggcagcacgccttcggaatggcggagaacgaggacttccgacatcttatcattggaatgcaatacgccggtttgccatccatcaacagcctagaatctatttataatttttgcgataagccctgggtcttcgcccagttagtggctatttacaagacattgggtggagagaaatttcccctgatagagcaaacctactatcccaatcataaggagatgctaacactgccaactttcccagtcgtggtaaaaatcgggcatgcacatagcggcatgggcaaggtaaaagtggagaaccattacgattttcaagacatcgcctcagttgtagccttaacacagacttatgccacagctgaaccgtttattgactccaagtatgatatccgcgttcagaaaatcggcaataattacaaggcatacatgaggacgagtatatctggtaattggaaaacaaatacagggtctgccatgttggaacaaatcgcaatgagcgacaggtacaagttgtgggtggacacatgctcagagatgttcgggggtctggatatttgcgcagtaaaagctgtgcatgggaaagatgggaaggactacatctttgaggtaatggattgctctatgcctctcatcggggagcatcaggtggaggaccggcagttgatcactgaattggtgataagcaaaatgaatcagctcttgagtagaacccccgcgcttagtcctcaacgtccactcactacacaacagcctcagtcgggcactctcaaggatccagattcctccaaaacaccgccacagcgtcccccgccacagggtggtcccgggcagcctcaggggatgcagcctccggggaaagtgctgccaccacggaggctcccacccggtccctcactgcccccatcttccagtagttcaagctcgagctcctcctctgctcctcagcgtcccggcggccctaccacgcacggagatgctccatcgagcagtagctcgctcgcagaagcacagccacccttggcggcccctccccagaaacctcaaccacacccccagctgaacaaatcacagagcctgaccaatgccttttcatttagtgagtcctccttcttcagatcctcagccaacgaggacgaggccaaagccgagaccatacgatctctgagaaagtcattcgcatccttgttcagcgactag

SEQ ID NO: 235410 - DNA, 1545 bp, Artificial Sequence
  derived and/or modified sequence
atgatgaactttctgcgcaggcggctgtcagattcgtcccttttttcttcccttagccaggccgtgaagcagactgcggcaagcgcaggcctggtagacgcaccaggtgctgctccagccgctgcacgaaaggcaaaggtgctcttagtggtggacgagccccacgctgactgggctaagtgctttagggggaaaaaagtcctcggcgattacgacatcaaagtcgagcaagccgagttttccgagctgaacctggtggcacacgccgatgggacctacgctgtcgacatgcaggtactacgtaatggcacaaaggtcgtgcggtcttttcgcccagacttcgtcctgattaggcaacacgcgttcgggatggccgagaatgaggattttcgtcacctcattatcgggatgcagtacgccggactcccttctatcaactctttggaaagcatctataacttctgcgacaaaccttgggtgttcgctcagctggtcgcgatctataaaactcttggcggagaaaagttccccctgatagaacagacttactatcctaatcacaaggaaatgctcacactgcccacttttcctgtcgttgtcaaaattgggcacgcccattctggtatgggaaaagtcaaagtagaaaatcactacgattttcaggacatagccagcgtggtggctcttacgcaaacgtacgccactgctgaacccttcatcgattctaaatacgacataagggtgcagaaaatcggcaataattacaaggcctatatgagaacatccatcagcggcaattggaagaccaacaccgggagcgcgatgctggaacagatcgccatgagcgatagatataaactttgggttgatacttgcagcgaaatgttcgggggtctcgatatttgtgctgtaaaagccgtccacggcaaggatggcaaggattacatttttgaggtgatggattgctcaatgcccctcatcggcgaacaccaggtcgaggatcgacagttgataacagagctggtcataagtaagatgaaccagctgctcagcagaacaccagcactctctccccaaaggcctctgacaacacagcagcctcagagtggaaccctgaaagatcctgattcaagtaaaacccccccacagcggccacctccacaggggggtcctggccaacctcaggggatgcagccaccaggaaaggttctgccacctcggagattacctccaggtccaagcctccccccatcttcgagttcttcctctagctcctcatcctccgcccctcaacgacccggaggaccaacgacacacggagacgccccatcctccagttcctcgctcgcagaggcccagcccccattggccgctccaccccagaaaccgcagccccaccctcagttaaacaaatcccagagtctgactaatgcgttctccttctctgagtcttctttcttccggtcaagcgcaaacgaggacgaggctaaggctgaaactatccggagcttgcggaagagttttgctagtctgttcagcgattag

SEQ ID NO: 235411 - DNA, 2491 bp, Artificial Sequence
  derived and/or modified sequence
agaccgccgctgctgtctgcggggtctggtgccggggcctgagtctctgctggctaagccgacgcctcagccgcctcagtcgcctcaatctcgccttccgccctcgctctccctccgcgccaccggaccccgtagccccgcgcgcccccagacctttaagccagatgatgaacttcctgcggcgccggctgtcggacagcagcttattcagctcgctgtcccaagcggtaaagcagacggccgcctcggctggcctggtggacgcgcccggtgccgcgccggcagccgccaggaaggccaaggtgctgctggtggtcgacgagccgcacgccgactgggccaagtgctttcggggcaaaaaagtccttggagattatgatatcaaggtggaacaggcagaattttcagagctcaacctggtggcccatgcagatggcacctatgctgtggatatgcaggttctccggaatggcacaaaggttgtccggtccttccggccagacttcgtgctcatccggcagcatgcatttggcatggcggagaatgaggacttccgccacctgatcattggtatgcagtatgcaggcctccccagcatcaactcactggaatccatatacaacttctgtgacaagccatgggtgtttgcccagctggtcgctatctataagacactgggaggagaaaagttccctctcattgaacagacatactaccccaaccacaaagagatgctgacactgcccacgttccctgtggtggtgaagattggccacgctcactcaggcatgggcaaggtcaaagtggaaaaccactacgacttccaggacattgccagcgtggtggctctcacccagacctatgccactgcagagcctttcattgactccaagtatgacatccgggtccagaagattggcaacaactacaaggcttacatgaggacatcgatctcagggaactggaagacgaacactggctctgcgatgctggagcagattgccatgtcagacaggtacaaactgtgggtggacacctgctctgagatgtttggcggcctggacatctgtgctgtcaaagctgtacatggcaaagatgggaaagactacatttttgaggtcatggactgtagcatgccactgattggggaacatcaggtggaggacaggcaactcatcaccgaactagtcatcagcaagatgaaccagctgctgtccaggactcctgccctgtctcctcagagacccctaacaacccagcagccacagagcggaacacttaaggatccggactcaagcaagaccccacctcagcggccaccccctcaagggggccctgggcaaccccaaggaatgcagcccccaggcaaggtgctgcctccacgccggctcccccctggaccatcactgccaccttcctcctcttcctcctcttcttcctcctcctcggctcctcagcggccgggcggccccaccacccacggagatgcaccctccagcagcagctccctggcagaggcccagccacccctggctgctccaccacagaagccccagcctcacccacagctcaacaagtcgcagtccctgacaaatgccttcagcttctctgagtcctccttcttccggtcttcagccaatgaggatgaagccaaagcagagaccatccggagcttgaggaagtcctttgccagcctcttttcagattagctcttcagacacacggggcacccagcccaaccgggaaaggcatctaagacattcaccaacaacagtcagccagcttggtggttatgtcccatgaccttgacgtgtgtggtcccttcctctgctctgttgtactaagtgatgttgtgcagcccagaaaggaccatttgacagtctcagggcaggtgcctacccagcaaggggtacctggcatcagagaggaaagagctgcttccctgtagtcatgagagcttccttctgaagtcatcgttcgctgtgagtttagtggccttattgtgacagtgccatcatgtcttattcttccctgtgaaaccaggattaatcgtggactcctggcagcttaacctagctcagttgcagtgctaagcatgccccgcccccattcagtgatacctgtttgggaagtatatacttccccaaaagtactcttggccctaagttttaggaactttccccgacctggatcccttgtcatacctgtgttactgtttaaagcacacccacccaacttacaagatcttaggctgctgtggtggtgaagcaccttgagtctgctgatattcgggagaacaaggatctgcagtttccccttttctcccctctgaagagtggttcttatgtgcaatctgcagtaaccttgaactccagagctgcactatagaggagaatgcatgccactatgacagcagtatgccaagctttgtgttcatctcctaataaacgttaagacctttggtgtaataaaagcagcagcattcaccaac

SEQ ID NO: 235412 - protein, 216 aa, Artificial Sequence
  derived and/or modified sequence
MGVLRVGLCPGLTEEMIQLLRSHRIKTVVDLVSADLEEVAQKCGLSYKAEALRRIQVVHAFDIFQMLDVLQELRGTVAQQVTGSSGTVKVVVVDSVTAVVSPLLGGQQREGLALMMQLARELKTLARDLGMAVVVTNHITRDRDSGRLKPALGRSWSFVPSTRILLDTIEGAGASGGRRMACLAKSSRQPTGFQEMVDIGTWGTSEQSATLQGDQT

SEQ ID NO: 235413 - DNA, 651 bp, Artificial Sequence
  derived and/or modified sequence
atgggcgtgctgagagtgggcctgtgccccggcctgaccgaggagatgatccagctgctgagaagccacagaatcaagaccgtggtggacctggtgagcgccgacctggaggaggtggcccagaagtgcggcctgagctacaaggccgaggccctgagaagaatccaggtggtgcacgccttcgacatcttccagatgctggacgtgctgcaggagctgagaggcaccgtggcccagcaggtgaccggcagcagcggcaccgtgaaggtggtggtggtggacagcgtgaccgccgtggtgagccccctgctgggcggccagcagagagagggcctggccctgatgatgcagctggccagagagctgaagaccctggccagagacctgggcatggccgtggtggtgaccaaccacatcaccagagacagagacagcggcagactgaagcccgccctgggcagaagctggagcttcgtgcccagcaccagaatcctgctggacaccatcgagggcgccggcgccagcggcggcagaagaatggcctgcctggccaagagcagcagacagcccaccggcttccaggagatggtggacatcggcacctggggcaccagcgagcagagcgccaccctgcagggcgaccagacctag

SEQ ID NO: 235414 - DNA, 651 bp, Artificial Sequence
  derived and/or modified sequence
atgggggtcctgcgcgtaggattatgccctggcctaactgaggagatgattcagttgctgcggtctcatcgtataaaaacagtggtggatttagtgtctgctgatctggaggaggtagctcagaagtgtggtcttagctacaaagccgaagcactgcgaagaatccaggtggtgcacgcatttgacatttttcaaatgctggacgttctgcaggagttaagagggactgtcgcccagcaagttacaggatcatccgggactgtgaaggttgtggttgttgactcagtgactgcagttgtgtctcctctcttgggtggccagcaacgggaagggttagccttaatgatgcagctcgcccgagaactcaaaacattggccagggacctcggcatggcagtcgtcgtgaccaaccatatcaccagagatcgggacagcgggcggctgaaacccgccctcgggcgctcgtggtcgtttgtgccttctactagaatccttctggataccattgaaggagccggcgcctctggtggcagacggatggcatgcttggccaagtcaagcagacagccaaccggctttcaggagatggttgatatcggcacatggggtacaagcgagcaatccgcaactctgcagggcgaccagacatag

SEQ ID NO: 235415 - DNA, 651 bp, Artificial Sequence
  derived and/or modified sequence
atgggcgtgctgcgggtgggcctgtgccccggcctgacagaggagatgatccagctgctgcggagccaccgcatcaagacagtggtggacctggtgtctgctgacctggaggaggtggcccagaagtgtggcctgagctacaaggccgaggccctgcggcgcatccaggtggtgcacgcctttgacatcttccagatgctggatgtgctgcaggagctgcggggcaccgtggcccagcaggtgacaggcagcagcggcaccgtgaaggtggtggtggtggacagcgtgacagctgtggtgagccccctgctgggcggccagcagcgggagggcctggccctgatgatgcagctggcccgggagctgaagaccctggcccgggacctgggcatggctgtggtggtgaccaaccacatcacccgggaccgggacagcggccgcctgaagccagccctgggccgctcctggagctttgtgcccagcacccgcatcctgctggacaccattgaaggagctggggccagcggcggccgcaggatggcctgcctggccaagagcagccggcagcccaccggcttccaggagatggtggacatcggcacctggggcaccagcgagcagagcgccaccctgcagggcgaccagacctag

SEQ ID NO: 235416 - DNA, 651 bp, Artificial Sequence
  derived and/or modified sequence
atgggcgtgctgcgggtgggcctgtgccccggcctgaccgaggagatgatccagctgctgcgcagccatagaataaaaacggtagtggacctggtgtcggccgacctcgaggaggttgcccagaaatgtggcctgagttacaaggccgaggcactcagaagaattcaggtcgtgcacgcttttgacattttccagatgttggacgtgctgcaggagttgcggggtacggtcgctcagcaggtgaccgggtcaagtggaacggtgaaggttgtcgttgtggattctgtcacagcagtcgtgagtcccctgctgggaggccagcagcgggagggcctggctctgatgatgcaactggcccgagaactgaaaaccctggcccgggatctgggcatggcagtggttgtgaccaaccacatcaccagagatcgtgattccgggcggcttaaacctgcactgggtcggagctggagctttgtcccgtcaacaagaatcctgctggacaccattgagggggcaggcgcatccggcgggcgccgcatggcctgcctcgccaaatctagcagacagcccacgggattccaagaaatggtggatatcggcacatgggggacctctgagcagtcagccacacttcaaggtgaccagacatag

SEQ ID NO: 235417 - DNA, 651 bp, Artificial Sequence
  derived and/or modified sequence
atgggagtgctcagagtgggtttatgtcctggcctcactgaggaaatgatccagcttctcaggagtcaccgtataaagaccgtggtcgatctggtatcagcggacctggaggaagtggcccagaagtgtggcttatcttacaaggccgaggccctccgtcggatccaggttgtacacgcattcgatatcttccagatgctggatgtgttacaggagctgagagggaccgtggcccagcaggtaacaggatccagtggaacggtaaaggtggttgtcgttgattcagtaacagctgtcgtaagccctctgctgggtggccagcaacgcgaaggcttggcgctgatgatgcagcttgcacgggagctgaagactctggccagggatctgggaatggccgttgtggtgacgaaccacattacaagagatagagacagcgggcgattaaagcctgcactcggacgctcatggtccttcgtaccctccacacgaattctactggatactattgagggagcaggagcttcaggtggcaggcggatggcctgcctggccaagtcttcccgacagccgacaggtttccaagaaatggtggatattggtacctggggtacttccgaacagtcagcaacactgcagggcgatcaaacatag

SEQ ID NO: 235418 - DNA, 1327 bp, Artificial Sequence
  derived and/or modified sequence
tgtgtcctctctaggaaggggtaggggaggggcgtctggagaggaccccccgcgaatgcccacgtgacgtgcagtccccctggggctgttccggcctgcggggaacatgggcgtgctcagggtcggactgtgccctggccttaccgaggagatgatccagcttctcaggagccacaggatcaagacagtggtggacctggtttctgcagacctggaagaggtagctcagaaatgtggcttgtcttacaaggcagaagctctccggaggatccaggtggtgcatgcatttgacatcttccagatgctggatgtgctgcaggagctccgaggcactgtggcccagcaggtgactggttcttcaggaactgtgaaggtggtggttgtggactcggtcactgcggtggtttccccacttctgggaggtcagcagagggaaggcttggccttgatgatgcagctggcccgagagctgaagaccctggcccgggaccttggcatggcagtggtggtgaccaaccacataactcgagacagggacagcgggaggctcaaacctgccctcggacgctcctggagctttgtgcccagcactcggattctcctggacaccatcgagggagcaggagcatcaggcggccggcgcatggcgtgtctggccaaatcttcccgacagccaacaggtttccaggagatggtagacattgggacctgggggacctcagagcagagtgccacattacagggtgatcagacatgacctgtgctgttgtttgggaaacagggaagcattggggacccctcccaacttttcttcccagtaacgcctgctgtttactgccacctggcactggtgactacagacgttctcaggctggccagaagagacatcttgggttccttggcctcactctctgtaagcatataaaccacaggcgaaagaggatgctgcattgcgaggacccagaaattcatactggtgccacgtttccttcccttatttctaacgtgtatgtttctggtggaaaccaagttcaccctggctgggagcatctctgatgaggcatgctggcgactggatggataatcctgtgcatcaccattgtgtcctgtgctccctcctagcgcagtggccaagccgggaaagcctctaacttgcctttgctgctgctgccttttttttcttttgtctctgcctttccatttgttagatgggggcccactcttccttagctctgtctctgagttactgggtggaaataagcttataaatgaaatactcttcttcatctctgttttgctcttaaaaatataaaaaggcaattccccg

SEQ ID NO: 235419 - protein, 1606 aa, Artificial Sequence [sequence omitted]

SEQ ID NO: 235420 - protein, 1606 aa, Artificial Sequence
  derived and/or modified sequence
MIAEPAHFYLFGLICLCSGSRLRQEDFPPRIVEHPSDLIVSKGEPATLNCKAEGRPTPTIEWYKGGERVETDKDDPRSHRMLLPSGSLFFLRIVHGRKSRPDEGVYVCVARNYLGEAVSHNASLEVAILRDDFRQNPSDVMVAVGEPAVMECQPPRGHPEPTISWKKDGSPLDDKDERITIRGGKLMITYTRKSDAGKYVCVGTNMVGERESEVAELTVLERPSFVKRPSNLAVTVDDSAEFKCEARGDPVPTVRWRKDDGELPKSRYEIRDDHTLKIRKVTAGDMGSYTCVAENMVGKAEASATLTVQVGSEPPHFVVKPRDQVVALGRTVTFQCEATGNPQPAIFWRREGSQNLLFSYQPPQSSSRFSVSQTGDLTITNVQRSDVGYYICQTLNVAGSIITKAYLEVTDVIADRPPPVIRQGPVNQTVAVDGTFVLSCVATGSPVPTILWRKDGVLVSTQDSRIKQLENGVLQIRYAKLGDTGRYTCIASTPSGEATWSAYIEVQEFGVPVQPPRPTDPNLIPSAPSKPEVTDVSRNTVTLSWQPNLNSGATPTSYIIEAFSHASGSSWQTVAENVKTETSAIKGLKPNAIYLFLVRAANAYGISDPSQISDPVKTQDVLPTSQGVDHKQVQRELGNAVLHLHNPTVLSSSSIEVHWTVDQQSQYIQGYKILYRPSGANHGESDWLVFEVRTPAKNSVVIPDLRKGVNYEIKARPFFNEFQGADSEIKFAKTLEEAPSAPPQGVTVSKNDGNGTAILVSWQPPPEDTQNGMVQEYKVWCLGNETRYHINKTVDGSTFSVVIPFLVPGIRYSVEVAASTGAGSGVKSEPQFIQLDAHGNPVSPEDQVSLAQQISDVVKQPAFIAGIGAACWIILMVFSIWLYRHRKKRNGLTSTYAGIRKVTYQRGGEAVSSGGRPGLLNISEPAAQPWLADTWPNTGNNHNDCSISCCTAGNGNSDSNLTTYSRPADCIANYNNQLDNKQTNLMLPESTVYGDVDLSNKINEMKTFNSPNLKDGRFVNPSGQPTPYATTQLIQSNLSNNMNNGSGDSGEKHWKPLGQQKQEVAPVQYNIVEQNKLNKDYRANDTVPPTIPYNQSYDQNTGGSYNSSDRGSSTSGSQGHKKGARTPKVPKQGGMNWADLLPPPPAHPPPHSNSEEYNISVDESYDQEMPCPVPPARMYLQQDELEEEEDERGPTPPVRGAASSPAAVSYSHQSTATLTPSPQEELQPMLQDCPEETGHMQHQPDRRRQPVSPPPPPRPISPPHTYGYISGPLVSDMDTDAPEEEEDEADMEVAKMQTRRLLLRGLEQTPASSVGDLESSVTGSMINGWGSASEEDNISSGRSSVSSSDGSFFTDADFAQAVAAAAEYAGLKVARRQMQDAAGRRHFHASQCPRPTSPVSTDSNMSAAVMQKTRPAKKLKHQPGHLRRETYTDDLPPPPVPPPAIKSPTAQSKTQLEVRPVVVPKLPSMDARTDRSSDRKGSSYKGREVLDGRQVVDMRTNPGDPREAQEQQNDGKGRGNKAAKRDLPPAKTHLIQEDILPYCRPTFPTSNNPRDPSSSSSMSSRGSGSRQREQANVGRRNIAEMQVLGGYERGEDNNEELEETES

SEQ ID NO: 235421 - DNA, 4821 bp, Artificial Sequence
  derived and/or modified sequence
atgatcgccgagccagcccatttttatctttttggtctgatctgtctctgttcaggctctcgtctccggcaggaggacttccccccacgaatcgtggagcatcccagtgaccttatcgtatcgaaaggtgagcccgctacactcaattgtaaggcagaaggaaggccaacgccaaccatcgagtggtataagggtggggagagagttgagactgataaggatgatccaagaagccaccggatgctgctcccatctggttcactgttttttcttaggattgttcacggtcgaaaatctaggcccgatgaaggagtgtatgtgtgtgttgcacgcaactacctcggagaggccgtaagtcataatgcatctcttgaggttgccatcctccgagacgactttaggcagaatccctcagacgttatggtggctgttggcgagcctgccgtgatggaatgccagccccctcgggggcaccctgagcctaccatttcttggaaaaaggacggaagcccactcgatgacaaggatgagcgaataaccattaggggcggcaagctcatgataacctacacgcggaagagtgacgccggaaaatacgtgtgtgtcgggaccaacatggttggcgaacgcgagagcgaggtggcggaactcaccgtcctggagagaccttcattcgtcaaacgcccgagcaacctggcagtaacagtggacgactcagcggaatttaaatgtgaagccagaggagaccctgttccaactgtaaggtggcgaaaagacgatggggaactccctaaaagtcggtacgaaatcagagacgatcatactcttaagatccgtaaggttaccgccggggacatgggctcctacacttgcgtggccgagaatatggttggcaaagctgaagcgagcgctacacttacagttcaggcgccatccgagccaccgcactttgtcgtaaaaccaagggatcaggtagtggccctggggagaacagtgacattccagtgcgaggccacagggaacccacaaccagctatattctggaggagggagggctcgcaaaacctcctcttctcctaccaaccccctcagtcctcctcccggttctccgtttcacagaccggagatctgacgatcaccaacgttcaacgctctgacgttggatactacatctgccagactctgaatgtggctggttccatcatcaccaaggcctacttagaggttacggatgtcatagccgaccgccccccaccagtgatacggcagggaccagtaaaccaaaccgttgcagttgatgggaccttcgtgctgtcgtgtgtggccacggggagccctgtccctacaatactctggcggaaggacggcgtcctcgtctccacacaggattccagaataaaacagctcgagaacggggtgctgcagataagatacgccaaattgggcgacactggtcggtacacatgcatcgcctccacaccctctggcgaggcgacttggtctgcatatatcgaggtgcaagaatttggagtgcccgtacaaccaccacgcccaactgaccctaacttgataccatccgccccctctaaacccgaggtgaccgacgtgtcccgcaacactgtgactttatcctggcagcctaacctgaactcaggcgcgacccccacatcctacatcatcgaggcattcagccatgcatccggctcctcctggcaaactgtagccgagaacgttaagacagaaacctcagcaatcaagggactgaaacccaatgccatttatctatttttagtccgcgctgcaaatgcctatggcatcagtgatccatctcagattagcgatcccgttaagacccaggacgtcctgccgacatctcaaggggttgaccacaagcaggtgcagcgtgagcttggcaacgcagtgttgcacctccacaaccctaccgttttgtcatcttcttccattgaggttcactggactgtagaccagcaatctcagtacattcagggctacaagatcctgtatcgaccatccggtgccaatcacggagaatctgactggttggtgtttgaagttcgaaccccggccaaaaattcggtcgtgatccctgacttaagaaagggcgtgaattacgagatcaaagctcggccattcttcaacgagtttcagggagccgactctgaaattaaattcgcgaagacattggaagaggccccttctgcccctccccagggcgtgacagtaagtaagaatgatgggaacggtacagcgattcttgtgtcctggcaaccacctcccgaggatacccaaaatgggatggttcaggagtacaaggtgtggtgcctgggaaatgagactagatatcacatcaacaaaaccgtagatggttcaaccttctcagttgtgatcccgttcctggtgccagggatacgctactctgtagaggtcgccgcttcaactggcgcgggaagcggagtgaaatcagaacctcagtttattcagttggacgcccacggcaaccctgtctctcccgaggaccaggtgtcactggcacagcaaattagcgatgtggtgaaacagccagcatttattgcagggattggtgccgcttgttggattatacttatggtgttctccatttggttgtacagacatcggaagaaaaggaatggactaacgtccacttacgctgggattaggaaagtaacatatcagagaggaggcgaagctgtgtcctcaggaggccgccccggccttttgaatattagcgaaccagccgcgcagccctggcttgcggatacatggcccaacaccgggaacaaccacaacgattgcagcatttcatgctgcacagctggcaacggaaactccgacagcaaccttaccacatatagcaggccggctgattgcatcgctaactataacaatcagttagacaataaacaaaccaacctaatgttgccagagtccactgtgtatggcgacgtggatctgagtaacaaaattaacgaaatgaagacctttaactccccaaacttaaaagacggcagattcgtgaatcctagcgggcagccaactccatatgccaccacacaactgatccagagtaatctaagcaataacatgaataacggctccggagactccggagaaaaacattggaaaccattgggccagcagaaacaggaagtggctcctgtccagtacaacatcgtggagcagaataagctgaacaaggattatcgagctaacgatacagtcccacctactattccttacaatcaaagctacgaccagaatactggcgggtcctacaatagtagcgacagaggctcttctaccagtggtagccagggccacaagaaaggagccagaacgcctaaagtgcccaagcagggcggcatgaactgggccgacctcctcccgccaccccccgctcacccaccgcctcactcgaacagcgaagagtacaacatcagcgtggacgagagctatgatcaggaaatgccttgtcctgtgccgccggctagaatgtatctccagcaggatgaactggaggaggaggaggatgaacggggcccaacaccccctgtccgcggagcggcaagctccccagccgctgtgtcctactctcatcagtcaactgcgactctgactccttcacctcaagaagagcttcaacccatgctccaggattgtcctgaggaaactggccacatgcagcatcaacccgatcgtcgcagacagccagtaagtcccccgcctcctcctagaccaataagcccacctcatacctacgggtacataagcgggcctttagtgtccgatatggataccgacgcccctgaggaagaagaagatgaagctgatatggaggttgccaagatgcagactagacgtctcttgctcaggggattggagcagacacccgctagtagtgttggcgatctagaatctagtgtcactggcagcatgattaatgggtggggatcggcaagtgaagaagataatatatcgtccggtcgttctagcgtctcttccagtgatggctcctttttcactgacgccgacttcgcacaagcggtggccgctgccgcggagtatgcggggctcaaggtggccaggcgtcagatgcaagatgctgcgggccgccggcatttccatgcctctcaatgcccccggccaacttcacctgttagcacagactccaatatgtctgcggctgtgatgcaaaagacgcggcctgccaagaagctcaagcaccagccaggccacctcagaagggagacctacactgatgacctgccaccccctcctgtgcctccaccggccatcaagagccccaccgcacaatctaagacacaattagaagtccggcctgtcgtggtgcctaaactgcctagcatggacgcaaggactgacaggagttcagatagaaagggtagcagctataaaggacgggaggtgctggacggcaggcaagtggtagacatgaggaccaatcctggtgacccacgcgaagcccaggaacagcagaacgatgggaaagggcgtggcaacaaggccgcaaaaagggatcttccgccggctaaaactcatctaattcaggaggacatattgccctactgtcgccctacctttccaacatccaacaacccacgcgatccgtcctcgtcatcaagtatgagctcccgcgggtctgggtcacgccagcgggagcaagctaacgtcgggcggagaaacattgcggaaatgcaggtgctagggggctatgaacggggagaggataacaacgaagagctggaagagacagaaagttag

SEQ ID NO: 235422 - DNA, 4821 bp, Artificial Sequence
  derived and/or modified sequence
atgatcgccgaacccgcccatttttatctcttcgggttgatctgcctctgttcgggcagtcggctgagacaagaggactttccgcctcgaatcgtggagcacccgagcgacctcattgtgtctaagggggaaccagcaactttgaattgcaaggccgagggtcgtcctacacctactattgagtggtataagggaggcgaaagagtggaaaccgacaaggacgatccacggagccacagaatgcttcttcccagcgggtccctcttctttctgagaatcgtgcacggccgcaaatccagacctgacgagggcgtctatgtatgcgtcgcacgcaactatctgggagaggctgtatcccataatgccagtttggaagtcgctatactacgggatgattttagacaaaaccccagtgatgtgatggtggccgtcggagagccagctgtgatggaatgtcagccacctcgcggtcaccccgaaccgacaatatcctggaagaaagacggctctcctctggatgacaaggacgagagaataacaattcggggcggcaaactcatgatcacttacacccggaaatcagatgcaggcaagtatgtttgcgtggggacaaacatggtgggagagagagagtccgaagttgcggagttaactgtgctggaaagaccatcattcgtgaagaggcccagtaacctcgctgtcaccgtagacgactctgccgagttcaagtgcgaagctaggggcgatcccgtgcctactgtgcgttggcgcaaggatgacggggagctcccgaaatcccgctacgagatccgggatgaccacaccttgaagatcagaaaggtaacagctggtgatatgggatcctacacctgtgtggcggaaaatatggtcggcaaggctgaggctagcgcaacactgactgtacaggtcggatcagaacctccccatttcgttgtcaagcctagggatcaagtggtggcccttggacgtactgtaactttccaatgcgaagcaaccgggaatccccagcccgcaatcttttggagaagagaggggagccagaacctgctgttctcctaccagccccctcaaagtagttctcggttttctgtctcgcagacaggcgacctaactataaccaacgtccagcgcagcgacgtggggtactatatttgtcaaacactgaatgtggccggcagcataataactaaggcctatctggaggtaaccgacgtgatcgccgatcggccgccacccgtcatcaggcaggggcccgtcaaccagacggtggcagtggatggaaccttcgtactgagttgcgtggccactggaagccccgtgccgacgatcctgtggagaaaggacggcgtcctggtttctacccaggactcgcggatcaaacagctcgagaatggtgttctgcagattcgctacgcaaagctgggcgacaccggccgctatacctgtattgcaagcactccaagcggggaggccacatggagcgcatacattgaagttcaggagtttggagtacctgtgcagcccccccgcccaaccgaccccaaccttattccttccgcgccaagcaagcctgaggtcacagacgtgagtcgcaatacggtgactctgagctggcagcccaacttgaattctggcgctacccccacatcttacataatcgaagccttttcccacgcttccggtagtagctggcagactgtggctgagaatgttaagactgagacatctgccatcaagggactgaagcctaacgcaatatatctgtttttggtgagagctgccaatgcatatgggatctcagatccttcacagatcagcgacccagttaaaactcaggacgtcctgcctacctctcagggagttgaccacaagcaggtccagcgtgaactgggcaacgccgtcttacacctccacaatccgactgtgttgagctcaagctctattgaggtccattggactgttgaccagcaaagccagtacattcaggggtacaagatactttaccggcctagcggagctaaccacggagagtcggactggcttgtctttgaggtcaggaccccagccaagaactcagtcgtgatccctgaccttagaaagggagtgaattatgagatcaaagctcgcccattctttaatgaattccagggcgctgatagtgaaattaaattcgccaaaactttggaggaagccccgtccgcccctcctcagggtgtcaccgtgagtaaaaatgatggcaatgggaccgctatcttggtgagttggcagccacctccggaggatacccagaacggcatggtccaagaatataaggtctggtgcctcgggaacgagacacggtaccacattaataagaccgtggacggtagcacattttcggtggtaattccatttttagtgcccgggatcaggtactcagtcgaagtggctgcgtccacaggcgcaggctcgggtgtcaaatcagaaccgcagtttatccaattggacgcccacgggaacccggtgagccctgaagaccaggtttccctcgcacagcagatcagcgatgtcgtgaagcaacctgcctttatcgccggaatcggcgcagcctgctggatcatcctgatggtcttcagcatctggctatacaggcaccgtaaaaaacgcaacggacttacaagcacctatgccggaatccggaaggtgacctatcagcgcggaggcgaggccgtgtcctccggagggaggccaggcctactgaacatatctgaaccggctgcccagccctggctggccgacacatggccgaataccgggaacaaccataatgactgttccatctcgtgttgcactgccggaaatggcaactccgatagcaatctgaccacttatagccgacctgctgactgtatcgctaactacaataatcagttagacaataaacaaactaatctcatgttgccagaatcgaccgtctacggggatgtggacctctccaacaagataaatgagatgaagaccttcaattccccgaatctgaaggacggacgctttgtgaaccctagcggacagcctacaccatacgctaccacacagctgattcagtccaatttatccaataatatgaataatgggtccggcgacagtggggagaagcattggaagccgctcggacagcagaagcaggaagttgctcccgttcaatacaacatcgttgaacaaaacaaactgaacaaagactacagagcaaatgacacggtgccaccaaccatcccatataatcagtcctatgatcaaaacactggcggatcatataatagctccgacagaggttctagtacttctggatcccagggacataagaaaggagctcggacacccaaagtgccgaagcagggcgggatgaactgggcagacctgttgcctcctccacccgctcaccctcctccacatagtaatagtgaagagtacaatatctcggtcgacgaatcctacgatcaagagatgccgtgcccagtcccaccggccaggatgtatctgcaacaggacgagcttgaagaggaggaagatgagcgcgggcctaccccaccagtaaggggcgctgcaagcagccctgccgctgtgtcctatagtcaccagagcacggctactctcactccctccccgcaggaggaattacaaccgatgctgcaggattgcccggaagaaacaggccacatgcagcaccagccggacaggcggcgccaacccgtctctccccctcctccccctaggcccatttcacccccccatacgtacggatacatctctggcccactggttagtgacatggataccgatgcccccgaggaggaagaagacgaggcagatatggaggtagcgaagatgcagactcgtaggctcttgctgcggggactggagcagacaccagccagcagtgtcggagaccttgagtccagcgtaactggtagcatgatcaacggctggggctctgcgtccgaggaagacaacatctccagcgggcgcagttccgtgtccagtagcgatggatccttcttcacggacgcagatttcgctcaggccgttgccgcagctgctgaatatgcgggcctgaaagtggcgcgtaggcagatgcaggatgcagccgggcgcaggcacttccacgcttcacagtgtccaagacccacctcacccgtcagcactgatagcaacatgagcgcggctgtgatgcagaagactaggcctgccaagaagctaaaacaccagccaggtcacttgcgcagagagacttataccgatgacttgcctccacccccagttccgccaccggctataaagtctcccacggctcaatcaaaaacccaactcgaggtgcggccagttgtggtacctaagctgccctctatggacgccagaaccgaccgctcaagcgatcgcaagggcagttcctataaaggtagggaggttctcgacggaagacaggtggtggacatgcggacaaaccccggcgaccccagggaggcacaagaacagcagaatgacgggaaaggaagggggaacaaagcagcaaagcgcgacttgccgcccgctaagactcatttgattcaagaggatatcttgccctactgtcgccccacgtttccaaccagcaacaacccacgagatccttcatccagctccagcatgtcttcgcggggttctggatctaggcagcgagagcaagctaatgtaggaaggagaaacatcgcagaaatgcaggtgctcggaggctacgagcggggggaggataataatgaggagctcgaagagaccgagtcctag

SEQ ID NO: 235423 - DNA, 4821 bp, Artificial Sequence
  derived and/or modified sequence
atgattgctgagcccgcccacttctacctgtttggcctcatctgcctgtgcagcggcagccggctgcggcaggaggacttccccccaagaattgtggagcaccccagcgacctgattgtgtccaagggggagcccgccaccctgaactgcaaggccgagggccggcccacccccaccatcgagtggtacaagggcggggagcgggtggagacagacaaggatgaccccaggagccacaggatgctgctgcccagcggcagcctcttcttcctgagaattgtgcacggcaggaagagcaggccagatgagggcgtgtatgtgtgtgtggccaggaactacctgggggaggccgtgagccacaatgccagcctggaggtggccatcctgagagatgacttccggcagaaccccagtgatgtgatggtggccgtgggggagcctgctgtgatggagtgccagcccccccggggccaccctgagcccaccatctcctggaagaaggatggcagccccctggatgacaaggatgagcgcatcaccatccggggcggcaagctgatgatcacctacaccaggaagagtgatgctgggaagtatgtgtgtgtgggcaccaacatggtgggggagcgggagagcgaggtggccgagctgactgtgctggagcggcccagctttgtgaagaggcccagcaacctggccgtgacagtggatgattctgctgagttcaagtgtgaggcccggggggaccctgtgcccaccgtgcgctggaggaaggatgatggagagctgcccaagagccgctatgagatcagagatgaccacaccctgaagatcaggaaggtgacagctggggacatgggcagctacacctgtgtggccgagaacatggtgggcaaggccgaggccagcgccaccctgactgtgcaggcccccagcgagcccccccactttgtggtgaagccccgggaccaggtggtggccctgggccgcacagtgaccttccagtgtgaggccactggaaacccccagcctgccatcttctggaggcgggagggcagccagaacctgctcttctcctaccagcccccccagagcagcagccgcttctctgtgtcccagacaggagacctgaccatcaccaacgtgcagaggagtgatgtgggctactacatctgccagaccctgaatgtggccggcagcatcatcaccaaggcctacctggaggtgacagatgtgattgctgacaggcctcctcctgtgatccggcagggccctgtgaaccagacagtggccgtggatggcacctttgtgctgagctgtgtggccaccggcagccctgtgcccaccatcctgtggaggaaggatggagtgctggtgtccacccaggacagccgcatcaagcagctggagaatggagtgctgcagatccgctatgccaagctgggggacaccggccgctacacctgcatcgccagcaccccatctggagaggccacctggagcgcctacatcgaggtgcaggagtttggagtgcctgtgcagcccccccggcccacagaccccaacctgatccccagcgcccccagcaagccagaggtgacagatgtgtccaggaacacagtgaccctgtcctggcagcccaacctgaacagcggggccacccccaccagctacatcatcgaggccttcagccacgccagcggcagctcctggcagacagtggccgagaatgtgaagacagagaccagcgccatcaagggcctgaagcccaatgccatctacctgttcctggtgcgggccgccaatgcctacggcatcagtgaccccagccagatcagtgaccctgtgaagacccaggatgtgctgcccaccagccagggcgtggaccacaagcaggtgcagcgggagctgggcaatgctgtgctgcacctgcacaaccccaccgtgctgagcagcagcagcattgaggtgcactggacagtggaccagcagagccagtacatccagggctacaagatcctgtaccggcccagcggggccaaccacggggagagtgactggctggtgtttgaggtgaggaccccagccaagaacagcgtggtgatcccagacctgaggaaaggagtgaactatgagatcaaggcccggcccttcttcaatgagttccagggcgctgacagcgagatcaagtttgccaagaccctggaggaggcccccagcgccccaccccagggcgtgacagtgtccaagaatgatggaaatggaacagccatcctggtgtcctggcagcccccacctgaggacacccagaatggcatggtgcaggagtacaaggtgtggtgcctgggcaatgagacccgctaccacatcaacaagacagtggatggcagcaccttctctgtggtgatccccttcctggtgcccggcatccgctacagcgtggaggtggccgccagcactggagctggcagcggcgtgaagtctgagccccagttcatccagctggatgcccacggcaaccctgtgtccccagaggaccaggtgtccctggcccagcagatcagtgatgtggtgaagcagcctgccttcatcgccggcattggagctgcctgctggatcatcctgatggtgttcagcatctggctgtaccgccacaggaagaagagaaatggcctgaccagcacctacgccggcatcaggaaggtgacctaccagagaggaggagaggccgtgtcctctgggggccggcccggcctgctgaacatcagcgagcctgctgcccagccctggctggccgacacctggcccaacacaggcaacaaccacaatgactgcagcatcagctgctgcacagctggaaatggaaacagcgacagcaacctgaccacctacagcaggcctgctgactgcatcgccaactacaacaaccagctggacaacaagcagaccaacctgatgctgcctgagagcacagtgtatggagatgtggacctgagcaacaagatcaatgagatgaagaccttcaacagccccaacctgaaggatggccgctttgtgaaccccagcggccagcccaccccctatgccaccacccagctgatccagagcaacctgagcaacaacatgaacaacggcagcggggacagcggggagaagcactggaagcccctgggccagcagaagcaggaggtggcccctgtgcagtacaacatcgtggagcagaacaagctgaacaaggactaccgggccaatgacacagtgccccccaccatcccctacaaccagagctatgaccagaacacaggaggcagctacaacagcagtgaccggggcagcagcaccagcggcagccagggccacaagaagggggcccggacccccaaggtgcccaagcagggcggcatgaactgggccgacctgctgcccccacctccagcccaccccccaccccacagcaacagcgaggagtacaacatctctgtggatgagagctatgaccaggagatgccctgccctgtgcccccagccaggatgtacctgcagcaggatgagctggaggaggaggaggatgagcggggccccaccccacctgtgagaggagctgccagcagccctgctgctgtgtcctacagccaccagagcacagccaccctgacccccagcccccaggaggagctgcagcccatgctgcaggactgcccagaggagaccggccacatgcagcaccagcctgacagaagacggcagcctgtgtccccacctcctccaccccggcccatcagccccccccacacctacggctacatcagcggccccctggtgtctgacatggacacagatgcccctgaggaggaggaggatgaagctgacatggaggtggccaagatgcagacccggcggctgctgctgcggggcctggagcagaccccagccagctctgtgggggacctggagagctctgtgacaggctccatgatcaatggctggggcagcgccagcgaggaggacaacatcagcagcggccgcagctctgtgagcagcagtgatggcagcttcttcacagatgctgactttgcccaggccgtggccgctgctgctgaatatgccggcctgaaggtggcccggcggcagatgcaggatgctgctggccgccgccacttccacgccagccagtgcccccggcccaccagccctgtgtccacagacagcaacatgtctgctgctgtgatgcagaagaccaggcctgccaagaagctgaagcaccagcccggccacctgcggcgggagacctacacagatgacctgcccccacctcctgtgcccccaccagccatcaagagccccacagcccagagcaagacccagctggaggtgcggcctgtggtggtgcccaagctgcccagcatggatgccaggacagacaggagcagtgacaggaagggcagcagctacaagggccgggaggtgctggatggccggcaggtggtggacatgaggaccaaccctggggacccccgggaggcccaggagcagcagaatgatggcaagggccggggcaacaaggccgccaagagggacctgcccccagccaagacccacctgatccaggaggacatcctgccctactgccggcccaccttccccaccagcaacaacccccgggaccccagcagcagcagctccatgagcagccggggcagcggcagccggcagcgggagcaggccaacgtgggcagaagaaatattgctgagatgcaggtgctgggcggctatgaaagaggagaggacaacaatgaggagctggaggagacagagagctag

SEQ ID NO: 235424 - DNA, 4821 bp, Artificial Sequence
  derived and/or modified sequence
atgattgctgagcccgcccacttctacctgtttggcctcatctgcctgtgcagcggcagccggctgcggcaggaggacttccccccaagaattgtggagcaccccagcgacctgattgtgtccaagggggagcccgccaccctgaactgcaaggccgagggccggcccacccccaccatcgagtggtacaagggcggggagcgggtggagacagacaaggatgaccccaggagccacaggatgctgctgcccagcggcagcctcttcttcctgagaattgtgcacggcaggaagagcaggccagatgagggcgtgtatgtgtgtgtggccaggaactacctgggggaggccgtgagccacaatgccagcctggaggtggccatcctgagagatgacttccggcagaaccccagtgatgtgatggtggccgtgggggagcctgctgtgatggagtgccagcccccccggggccaccctgagcccaccatctcctggaagaaggatggcagccccctggatgacaaggatgagcgcatcaccatccggggcggcaagctgatgatcacctacaccaggaagagtgatgctgggaagtatgtgtgtgtgggcaccaacatggtgggggagcgggagagcgaggtggccgagctgactgtgctggagcggcccagctttgtgaagaggcccagcaacctggccgtgacagtggatgattctgctgagttcaagtgtgaggcccggggggaccctgtgcccaccgtgcgctggaggaaggatgatggagagctgcccaagagccgctatgagatcagagatgaccacaccctgaagatcaggaaggtgacagctggggacatgggcagctacacctgtgtggccgagaacatggtgggcaaggccgaggccagcgccaccctgactgtgcaggtgggcagcgagcccccccactttgtggtgaagccccgggaccaggtggtggccctgggccgcacagtgaccttccagtgtgaggccactggaaacccccagcctgccatcttctggaggcgggagggcagccagaacctgctcttctcctaccagcccccccagagcagcagccgcttctctgtgtcccagacaggagacctgaccatcaccaacgtgcagaggagtgatgtgggctactacatctgccagaccctgaatgtggccggcagcatcatcaccaaggcctacctggaggtgacagatgtgattgctgacaggcctcctcctgtgatccggcagggccctgtgaaccagacagtggccgtggatggcacctttgtgctgagctgtgtggccaccggcagccctgtgcccaccatcctgtggaggaaggatggagtgctggtgtccacccaggacagccgcatcaagcagctggagaatggagtgctgcagatccgctatgccaagctgggggacaccggccgctacacctgcatcgccagcaccccatctggagaggccacctggagcgcctacatcgaggtgcaggagtttggagtgcctgtgcagcccccccggcccacagaccccaacctgatccccagcgcccccagcaagccagaggtgacagatgtgtccaggaacacagtgaccctgtcctggcagcccaacctgaacagcggggccacccccaccagctacatcatcgaggccttcagccacgccagcggcagctcctggcagacagtggccgagaatgtgaagacagagaccagcgccatcaagggcctgaagcccaatgccatctacctgttcctggtgcgggccgccaatgcctacggcatcagtgaccccagccagatcagtgaccctgtgaagacccaggatgtgctgcccaccagccagggcgtggaccacaagcaggtgcagcgggagctgggcaatgctgtgctgcacctgcacaaccccaccgtgctgagcagcagcagcattgaggtgcactggacagtggaccagcagagccagtacatccagggctacaagatcctgtaccggcccagcggggccaaccacggggagagtgactggctggtgtttgaggtgaggaccccagccaagaacagcgtggtgatcccagacctgaggaaaggagtgaactatgagatcaaggcccggcccttcttcaatgagttccagggcgctgacagcgagatcaagtttgccaagaccctggaggaggcccccagcgccccaccccagggcgtgacagtgtccaagaatgatggaaatggaacagccatcctggtgtcctggcagcccccacctgaggacacccagaatggcatggtgcaggagtacaaggtgtggtgcctgggcaatgagacccgctaccacatcaacaagacagtggatggcagcaccttctctgtggtgatccccttcctggtgcccggcatccgctacagcgtggaggtggccgccagcactggagctggcagcggcgtgaagtctgagccccagttcatccagctggatgcccacggcaaccctgtgtccccagaggaccaggtgtccctggcccagcagatcagtgatgtggtgaagcagcctgccttcatcgccggcattggagctgcctgctggatcatcctgatggtgttcagcatctggctgtaccgccacaggaagaagagaaatggcctgaccagcacctacgccggcatcaggaaggtgacctaccagagaggaggagaggccgtgtcctctgggggccggcccggcctgctgaacatcagcgagcctgctgcccagccctggctggccgacacctggcccaacacaggcaacaaccacaatgactgcagcatcagctgctgcacagctggaaatggaaacagcgacagcaacctgaccacctacagcaggcctgctgactgcatcgccaactacaacaaccagctggacaacaagcagaccaacctgatgctgcctgagagcacagtgtatggagatgtggacctgagcaacaagatcaatgagatgaagaccttcaacagccccaacctgaaggatggccgctttgtgaaccccagcggccagcccaccccctatgccaccacccagctgatccagagcaacctgagcaacaacatgaacaacggcagcggggacagcggggagaagcactggaagcccctgggccagcagaagcaggaggtggcccctgtgcagtacaacatcgtggagcagaacaagctgaacaaggactaccgggccaatgacacagtgccccccaccatcccctacaaccagagctatgaccagaacacaggaggcagctacaacagcagtgaccggggcagcagcaccagcggcagccagggccacaagaagggggcccggacccccaaggtgcccaagcagggcggcatgaactgggccgacctgctgcccccacctccagcccaccccccaccccacagcaacagcgaggagtacaacatctctgtggatgagagctatgaccaggagatgccctgccctgtgcccccagccaggatgtacctgcagcaggatgagctggaggaggaggaggatgagcggggccccaccccacctgtgagaggagctgccagcagccctgctgctgtgtcctacagccaccagagcacagccaccctgacccccagcccccaggaggagctgcagcccatgctgcaggactgcccagaggagaccggccacatgcagcaccagcctgacagaagacggcagcctgtgtccccacctcctccaccccggcccatcagccccccccacacctacggctacatcagcggccccctggtgtctgacatggacacagatgcccctgaggaggaggaggatgaagctgacatggaggtggccaagatgcagacccggcggctgctgctgcggggcctggagcagaccccagccagctctgtgggggacctggagagctctgtgacaggctccatgatcaatggctggggcagcgccagcgaggaggacaacatcagcagcggccgcagctctgtgagcagcagtgatggcagcttcttcacagatgctgactttgcccaggccgtggccgctgctgctgaatatgccggcctgaaggtggcccggcggcagatgcaggatgctgctggccgccgccacttccacgccagccagtgcccccggcccaccagccctgtgtccacagacagcaacatgtctgctgctgtgatgcagaagaccaggcctgccaagaagctgaagcaccagcccggccacctgcggcgggagacctacacagatgacctgcccccacctcctgtgcccccaccagccatcaagagccccacagcccagagcaagacccagctggaggtgcggcctgtggtggtgcccaagctgcccagcatggatgccaggacagacaggagcagtgacaggaagggcagcagctacaagggccgggaggtgctggatggccggcaggtggtggacatgaggaccaaccctggggacccccgggaggcccaggagcagcagaatgatggcaagggccggggcaacaaggccgccaagagggacctgcccccagccaagacccacctgatccaggaggacatcctgccctactgccggcccaccttccccaccagcaacaacccccgggaccccagcagcagcagctccatgagcagccggggcagcggcagccggcagcgggagcaggccaacgtgggcagaagaaatattgctgagatgcaggtgctgggcggctatgaaagaggagaggacaacaatgaggagctggaggagacagagagctag

SEQ ID NO: 235425 - DNA, 4821 bp, Artificial Sequence
  derived and/or modified sequence
atgatcgccgagcccgcccacttctacctgttcggcctgatctgcctatgtagcggcagtcggttgcgccaggaagactttcctccccgcattgtggagcatccttccgatctaatagtaagtaagggggagcccgccacgctgaactgtaaggctgaaggccgaccaacccctaccatcgagtggtacaaaggcggagagcgggtggaaaccgataaggacgacccaagaagtcacagaatgctccttccaagtggctctctattctttctgagaatagttcacggtcgaaaatcgaggccggatgagggggtgtacgtctgcgtggcgcggaattacctgggcgaggctgtgagccataatgcaagcctggaagtggcaatcctgcgggatgattttcgtcagaatcctagcgacgtgatggttgccgtcggcgagccagccgtgatggagtgtcaaccaccaaggggccatcccgaacctactataagctggaagaaggatgggtctccccttgatgataaagacgaacgcatcaccatcagagggggcaaactgatgattacatatacacgcaaatctgatgccggcaaatatgtgtgcgtgggtaccaacatggttggcgaaagagaaagcgaggttgcggaactaacagttctcgagaggccatctttcgtaaagcggccaagcaacttggccgttacggtagacgattctgccgagttcaagtgtgaggcaaggggagaccctgtcccgacagtaaggtggcggaaggacgacggagaacttccaaagtctagatatgaaatcagggatgaccacactttaaaaataaggaaggtgaccgcgggcgatatggggagctacacatgtgtggcggaaaacatggtcggcaaagcagaagcctctgctactctaactgtgcaagccccttccgagccaccccacttcgttgtgaaacctcgtgatcaggtggtagccctcggacgcaccgtgaccttccagtgcgaggctacgggcaaccctcaaccagctattttctggcgccgggaaggctctcagaatctgctcttctcttaccaaccgccccagtcaagcagccggttttccgtgtctcagaccggagatctgactatcactaacgttcagcgatccgacgtcggctattatatttgccaaacattaaacgtcgccggatcaataatcacgaaggcctacctggaagtcactgacgtcatagccgacaggccaccaccagtgattcggcagggacccgtaaatcagacagtggcagtcgacggtacctttgtcctgtcatgtgtggccacaggatccccagtgccaacaattctatggaggaaagatggagtgttagtgtccactcaggacagcaggattaaacagctagaaaacggagtccttcaaataagatacgcaaagctaggcgacactggacggtatacttgtattgcaagcacaccttccggagaggcgacatggtcagcctacatcgaggtacaggagtttggcgtgccagtgcagccaccccggcccaccgatccaaatctgattccgtcagccccttcaaagcctgaggttacggatgtatccagaaacaccgtcaccctgtcttggcagcctaaccttaattccggtgccacccccacatcgtatatcatcgaggcattttcccacgcttccggcagctcctggcagactgtagctgagaacgtaaagactgaaacgagcgctattaaaggactgaagcctaacgccatatatttgttcctcgtgagggcagccaacgcctacggaatctcggatccaagccagattagcgatcccgtcaagacacaggatgttctccctaccagccagggagtggaccacaagcaagtgcagcgggagttaggcaacgctgtgctccatttgcacaacccaactgtcctgagcagctcttcaatcgaagtgcactggactgtggaccagcagtctcaatatatccagggttataagatcctgtacagacctagcggcgccaatcatggagagtctgactggttggtgtttgaggtccgcaccccggcaaagaacagtgtggttatcccagacctccggaagggtgtcaattatgaaattaaggctcggccatttttcaacgaattccagggggcagacagtgagatcaaattcgcaaagaccttggaagaggcaccgtcggcccctccacagggcgtaaccgtttcaaaaaacgatggcaacggcacagcgatcctggtgtcctggcagcctccccctgaagacacacaaaatggcatggtccaagaatataaggtctggtgcctgggcaacgaaacccgctatcatatcaataaaaccgtggatggaagtaccttctcggtcgtcataccctttctcgtacccggcattaggtacagtgtcgaggtggccgcctctaccggagccgggtcgggtgtaaaaagtgaacctcagttcattcagttggatgcacacggcaaccctgtgtctccggaagaccaagtatcgctggcacaacagatctctgatgtggtgaagcaacccgcattcatcgcagggatcggggccgcatgctggattatccttatggtcttcagcatttggctatatcgtcatagaaagaaaagaaacggcctgacttctacatacgccggaatacggaaggtaacatatcaaagaggaggcgaggccgtctcttccggcggccggcccgggctgctcaatatctcagagcctgccgcacagccctggctggcggacacatggcccaatactggtaataatcacaatgattgttctatttcgtgctgcactgcagggaacggcaactccgacagcaacctgacaacttattccaggcctgcagattgcattgcaaactacaacaaccagctggacaacaagcagaccaatctcatgttgccagagtctacagtgtacggagacgtggatctctccaataagatcaatgagatgaaaacgttcaattcgccaaatctcaaggacgggcgttttgtcaacccgtcaggtcagcccacgccatacgcaactacacaacttatccagagcaatctgagcaataacatgaataacggctccggagattcaggagaaaagcactggaagcctctgggccagcagaaacaagaagtggctcctgtacagtacaacatcgtggagcagaataaacttaataaggactacagggccaatgacacagtgccacctactatcccttacaatcagtcctacgatcagaatacgggtggaagctacaacagcagtgatagagggtcttcaacgtcggggagccagggacacaagaagggcgcccgcaccccgaaggtccccaaacagggaggaatgaactgggcagacctactgcccccgccacctgctcaccctcccccccactccaactccgaagaatacaacatttccgttgatgagagctacgatcaagaaatgccctgtcccgtaccacccgcgcggatgtacttgcagcaggatgagctggaggaggaggaggatgaacgagggccgacccccccggtacggggtgccgcgtcttcccccgccgctgtgtcatattctcaccagtcaaccgcaacattgacgccgagcccccaggaagaactccaacccatgttgcaggattgcccggaggagacagggcatatgcagcaccagccggaccggcggcggcagcccgtgtccccaccaccgcctccccgacctatatcgccgcctcacacatatgggtatatctctggccccctggtcagcgatatggacacagacgctccggaggaggaggaagatgaggctgacatggaggtggccaaaatgcagactcggaggttgctactcaggggactcgagcagactccggctagcagtgtgggagacctggagtcatcagtcactggatcaatgattaatggctggggatctgcatctgaagaggataatatttccagtggaaggtcgtccgtctctagttccgatggatcttttttcaccgacgctgactttgcacaggctgtggccgcggcggctgaatatgctggcctgaaggtggcaagacggcaaatgcaggacgccgccggaaggaggcatttccacgcgtcccaatgtccccgcccaacaagtcctgtgagtaccgactcaaatatgtccgctgctgtgatgcagaagacgcgccccgccaagaagctgaaacatcagccgggccacctgcgccgggagacctacaccgatgatctccctcctccccccgtgccccctcccgcgattaagtctcctacagcacagagcaagacccagttagaagtccgaccagtggtcgtgcccaaactgccgtctatggatgctaggactgataggtccagtgaccgaaaaggttcaagctataaagggcgggaggtacttgacggaaggcaagtcgtggacatgcgtacaaatccgggagatccccgggaggctcaagagcaacagaatgacggaaaggggcgaggtaataaagcagctaaaagagatctgcccccagctaagacacatttaattcaagaagacatacttccctactgccgcccaacttttccgacctcgaacaacccgagggacccatcttcctcctcgtccatgtcctcccgcggctcaggctctagacaacgcgagcaggcaaatgtgggccggcgtaacattgcagagatgcaagtgctgggaggctacgagaggggagaggataacaacgaggaactggaagaaacagagagttag

SEQ ID NO: 235426 - DNA, 4821 bp, Artificial Sequence
  derived and/or modified sequence
atgatcgccgagcccgcccacttctacctgttcggcctgatctgcctttgcagcggatctaggctgcgtcaggaggactttccgcctagaatcgtcgagcacccctccgatttaattgtttccaaaggggaaccggccaccttgaattgtaaggcggagggcaggcctactcccactatagagtggtacaaaggcggtgagagagtggagaccgacaaggatgatccaaggtcccatcgaatgctgctcccttcaggcagcttgttttttctcagaatagtgcatggccgtaaatccagacccgatgaaggggtctatgtttgcgtggcccgtaattacctcggtgaggcggtgtcacataacgcctctttggaagtggctattctgagagatgacttcagacagaacccttctgatgtaatggtagcagtcggggaacctgcagtgatggaatgccaaccacctcggggccatccagagcctacgatcagctggaagaaagacggctcacctctggacgacaaggatgagcgaattaccatccggggggggaaactgatgattacttacacaagaaaaagcgacgcaggtaaatatgtgtgcgtgggaacaaacatggtaggcgagagggagagtgaagtcgccgagctcacagtgctagaaagaccatcctttgtcaagagaccctctaacctggccgtgactgtcgacgacagtgcggagtttaagtgcgaagcaagaggggatcccgtgcccacggtgagatggcgcaaagacgacggagagttgccaaaaagcaggtacgagattagagacgatcacacccttaaaattagaaaagtcacagcaggggacatgggctcctacacttgtgtggcagaaaatatggtcggaaaggctgaggcatccgccacgttgacagtacaggtcgggagcgaacctcctcacttcgtggtcaagccacgggaccaagtggtggcgttaggccggaccgtaacattccagtgcgaggctactggcaacccgcagcctgcaatcttttggcgtagggaggggtcccaaaacctcctcttctcctaccagcccccgcagagctcatctcgtttcagcgtctcccagactggcgatctgaccatcacaaatgttcagaggagtgatgtgggttattacatctgccaaaccctcaacgttgccggctcaatcataaccaaagcctatctggaagtgacagatgtgatcgcggatcgaccccccccagttattaggcagggccccgtgaatcagacagtggctgtcgacggcactttcgtcctgtcttgtgtcgccacaggcagtcccgtacctaccatcctatggcgaaaggatggagtgctggttagtactcaagatagtcgtatcaagcagcttgagaatggcgtcctgcagattaggtacgctaaacttggggacacaggcaggtatacttgtatcgccagtacacctagcggagaggcaacctggtccgcctacattgaggtgcaagagttcggcgtgccagtgcagccgccgagacctaccgatcctaatctgataccctccgcgccaagtaagcccgaggtaaccgacgtgagtcgcaacaccgtcactctctcgtggcaacccaatcttaactccggcgctacacctacttcctatattattgaagccttcagtcatgcaagtgggagctcatggcaaacagtcgcagaaaacgtgaagactgagacttcagccatcaaggggctgaagccaaacgctatttacttgtttctggtcagggcagccaatgcatacggtatttccgatcctagccaaattagtgatccagtgaaaacacaggacgtgcttcctacctcccaaggggtcgatcacaagcaagtccaacgagagctgggaaacgcggtgctgcacttacataaccctacagtgctgtcttcgagttccatagaggtgcattggaccgtggaccagcagtcccaatatatacagggatataaaatcctctatcgccccagtggagctaaccatggtgaatcagactggctggtatttgaggtgcgcactccggcaaaaaacagtgtggtaatccctgacctaaggaagggcgtgaactatgaaatcaaagccagacccttcttcaatgagttccagggggccgatagtgaaattaagttcgcaaaaaccttagaagaagcaccgagcgccccaccgcagggtgtaactgtatctaaaaacgacggcaacggtacggctattttagtgagctggcagccccccccagaagatactcagaacggcatggtgcaggaatataaggtgtggtgtctcggaaatgagacaaggtaccacatcaacaagaccgtcgatggatcaaccttttcagtcgtgatcccttttcttgtgcctgggatacggtactctgtggaggtggccgcctctacgggcgcaggctccggggtcaagagcgaaccccagttcatccaactggacgctcacggcaacccagttagtcccgaggaccaggtcagtcttgcccaacagatttcggatgtggtaaaacagccagctttcatcgcaggaattggcgcggcttgttggatcatcttgatggtgttcagtatttggctctataggcaccggaagaagagaaatgggttgacctccacttatgccggtattaggaaagttacctatcagagaggcggcgaggccgtgtcttccggaggtcggcctggcctgctgaacatcagcgagccggccgctcagccctggctggctgacacttggcctaataccggcaataaccacaatgattgtagcatatcctgctgcaccgcggggaatggaaattccgattcgaatcttacaacttactcccggcccgccgactgtatcgcaaattacaataatcagctggacaacaagcagacaaatctcatgcttcctgagtcaactgtctacggcgacgtcgacttgtcgaataagatcaatgaaatgaagacattcaatagccccaatctgaaggatggacgctttgtcaaccccagtggccaacctaccccgtacgcgactactcagttgattcagagtaacctgtctaacaacatgaataatggatcaggtgattcaggagagaagcattggaagccactaggacagcagaaacaggaggtggctccagtccagtacaacatagtggagcaaaataagttaaacaaagactaccgggccaatgatacagttcctcctaccattccttacaaccagagctatgaccagaatacaggaggcagctacaattcctccgatcgcggtagtagtacctcaggctctcagggacataaaaagggagctcggacgccaaaggtgcccaagcaggggggcatgaactgggccgacctgcttcctccccccccagcacacccacccccccattccaactcggaagaatacaacatctcagtcgatgaatcctatgatcaagaaatgccctgccccgtgcccccggcccgcatgtacctgcagcaggatgagctggaggaagaagaagacgagcgcggccctacccctcctgtgagaggagccgctagtagtccagccgcagtgagctatagtcaccaaagtaccgctactcttaccccgagcccacaggaggaactgcagccgatgcttcaggactgcccggaagagacaggccatatgcagcatcagccagacaggaggcggcagcctgtatccccacccccccccccgaggccgattagccctccacatacatacggttatatcagcgggcctctggtgagtgacatggacaccgatgcccccgaagaggaagaggacgaagcagatatggaggtggccaagatgcagacacggcggctcctcctccggggtctggaacagactccagctagcagcgtaggggatctcgagtcatctgtgaccggtagtatgattaatggctggggcagtgcgagtgaggaggataatatcagttctggccggagcagcgtgtcttcttccgatggttcctttttcactgatgccgactttgcccaagcagtggccgctgccgccgagtacgctggcctgaaagtagcccggcgccagatgcaggacgctgccggcagacgccacttccacgccagtcaatgccccagacccacttctcccgtgtctactgactctaatatgtcggccgccgtaatgcagaagacaagaccagcgaaaaagttgaagcaccaaccaggtcatctgcgccgcgagacctacacagatgatctcccaccaccacctgtgcccccccccgcaattaagtcccccacagctcaaagtaaaactcagctcgaggttcgccctgtcgtcgttcctaaactccctagcatggacgcccggacggacaggagttcagatcgtaaaggaagctcctataagggacgggaggtgctggacggacgccaggtcgtggatatgagaactaacccgggtgatccaagagaggctcaggagcaacaaaatgatggtaaggggaggggcaacaaagccgctaaacgcgacctgccacccgccaaaacacatctgatccaagaggacatcctaccttactgcaggcctaccttcccaacctcaaataacccaagagatccaagtagttctagctcaatgtctagtcgggggtctggctctcggcagcgcgaacaggccaatgtcggtcgaaggaacattgcggagatgcaagtgctgggcggctatgaacgcggagaggacaacaacgaagagttggaggagactgaaagttag

SEQ ID NO: 235427 - DNA, 4820 bp, Artificial Sequence
  derived and/or modified sequence
atgatcgctgaacccgcacatttctacctgttcggcctcatctgtctgtgttcgggctcacgcctcaggcaggaggattttccaccacgcatcgtggaacaccctagtgacttgatcgtctcgaagggtgaacctgctaccctgaattgtaaggccgagggacgtccaacacctacaattgagtggtataaaggaggcgagcgggtcgaaacggacaaggatgaccccagatcacacaggatgctgctgccaagcgggtccctgttcttcctaaggattgtccacggaagaaaatcccgccctgacgagggggtgtatgtgtgcgttgccaggaactatctgggtgaggccgtctcgcacaatgccagtttggaagtggctattttacgggacgacttcagacagaacccctccgacgtaatggtggctgtcggggaaccagccgttatggaatgccagcctccacgagggcatccagaacccacaatctcatggaaaaaggatggctctccactagacgacaaagacgagcggatcactatcagggggggaaaactgatgatcacctacaccagaaagtcagacgcagggaaatacgtatgtgtcggcacaaacatggtgggggagagagagtccgaggttgctgaacttaccgtcctggaacggccatcttttgtaaaaaggccatcgaatcttgctgtcacagtagatgatagcgctgaatttaaatgtgaggccaggggagatcccgtgccaaccgtacgctggcgaaaggacgacggagaactgcccaagtctcgttacgaaatccgggacgaccatacgctgaagattcggaaagttaccgctggggacatgggttcttacacttgtgtggctgaaaacatggtaggtaaagccgaagctagcgccacattaaccgttcaggctccgtctgagcctcctcatttcgtcgtaaagccaagggatcaggttgtggcgctgggaaggacagtgacattccagtgcgaagcaaccggaaacccccaacccgctattttctggaggcgggagggctcccagaacttgctattctcatatcagcccccacagtcatcatcgcggttcagcgtgtcccagactggtgatttaacgataaccaacgtacaaagaagcgatgtgggttactatatatgccaaacactgaacgtcgctggtagcattatcaccaaggcctacttggaggtgactgatgtgatcgcagacaggcctccccctgttatcaggcagggaccggtcaatcagacagtggctgtcgacggcaccttcgtcctgagttgtgtcgccactggatcgcccgttcccacaattctgtggcggaaggatggggtgctggtaagcacacaagacagtaggatcaagcagcttgagaacggagtcctccagatacggtatgccaaactcggcgatacaggtcgctatacatgcatagccagtaccccgtccggagaggctacatggagcgcttacatagaggtccaagaatttggggtgcccgtgcagcctccaagaccaaccgaccctaatctgattccttccgcccctagcaaacctgaggtcaccgatgtgtctaggaacaccgtgaccttgagctggcaacccaaccttaattccggtgccactcccaccagttacattatagaggctttctcacacgcaagcgggtcctcctggcagaccgtcgcggagaatgttaagacagaaacctccgcaatcaagggactaaagcccaacgcaatttacttgttccttgtgagagctgccaatgcatacggaatctctgaccccagccaaatctctgatccagtcaagacccaggatgttctcccaacatctcagggggtcgatcacaagcaagtgcagagagaattagggaatgcagtcctgcatctccacaatcccactgtgttatccagtagttccattgaggtgcactggacggtagaccagcagtctcagtacattcaaggctataaaatactgtacagaccttctggggctaaccatggtgaatccgactggctggtgtttgaagtgcgaactcctgcaaagaattcagtcgtgattccagatctgcgcaagggcgtcaattatgagataaaggctcggccattttttaatgaattccaaggtgctgattccgagataaagttcgctaaaaccttggaggaggcgccttctgcgccaccacaaggtgtcactgttagtaagaacgatggaaatggaacagctattctggtatcatggcagcctcctccggaagacacccagaatggaatggtgcaggaatacaaagtctggtgcctgggaaatgaaactaggtaccacattaataagaccgtggacgggagcacatttagcgtggtgatcccttttcttgtgcctggaatcagatactcagtggaagtggcagctagcacaggagctggatcaggggtcaaatctgaaccccaattcatccagctagacgcacacggaaatcccgtgtcccccgaggaccaggtgagtctcgcacagcaaatttcagacgtggtgaaacagccagcgttcatcgcaggaatcggggcagcttgctggataatcctcatggttttttccatttggctgtataggcaccgcaagaagcggaacgggctcacgagcacgtacgcagggataaggaaggtgacgtatcagaggggaggcgaggccgtgtccagtggaggacggcctggcttgctgaacatctctgaacctgcagcgcagccctggttggcagacacttggcctaacactggtaataatcacaatgactgttccattagttgctgcaccgctgggaatgggaactccgactcaaacctaaccacctattccaggcctgctgattgcatagcaaactataacaaccagctcgataacaaacagacaaatctcatgctacctgaatcgactgtgtacggggacgtggaccttagcaacaaaatcaatgaaatgaaaacctttaactccccaaatctgaaagacggcaggttcgtgaatccatcaggccagcccacgccctacgctacgactcaactgatccaaagtaatctttccaacaatatgaacaacggttccggagattctggggaaaaacactggaaacccctcggccagcagaagcaggaagtcgcgcctgtccaatataatattgtcgaacaaaacaaacttaacaaagattaccgggctaacgacaccgtgccgccaactatcccatataatcagtcttacgatcaaaacactggcggaagttacaattcaagtgaccgcggatcgagcacgtccggaagccagggtcataaaaagggcgcacggacgcccaaagttcccaaacagggaggtatgaattgggcagatctcctgccaccccctcccgctcatcccccaccgcactctaattctgaagaatacaatatctcggtggacgagtcttatgaccaagaaatgccctgccctgtccctccagccagaatgtacctgcagcaggacgagctcgaggaggaggaggacgaacggggacccacccctcctgttcgcggagccgcaagtagcccagccgcagtgtcctacagccatcagtcgacggccactctgacaccatcccctcaggaagagttgcaacctatgctccaagattgcccagaagagacgggccatatgcagcaccagcccgacagacggcgtcagccggtctctccaccaccgccaccgcgtccgatctccccccctcatacttatgggtacatctccggaccgttagttagcgacatggataccgacgcgcctgaggaggaggaggacgaagcagatatggaggtggcaaaaatgcagacgcgtagactactactccgcggattagagcagacgccggctagctctgtaggagatttggagtctagtgtgacgggcagcatgatcaacggttggggatccgcaagcgaggaggataacatatcaagtgggcgaagctcagtgtcctcatccgacgggtcctttttcacagatgctgacttcgcccaggcagttgccgctgccgctgagtatgcgggactcaaagtggccagacgacagatgcaggatgctgcaggtcggagacactttcacgcctctcaatgcccacggcctacctctcctgttagcacagattcgaacatgagtgcggctgtgatgcagaaaactcggcctgctaaaaagttgaaacatcagccaggccatctgcgtagagaaacgtacacagacgacctccctcctccacctgtgcctccccctgcgatcaagagccctaccgcacagtcaaagactcagctcgaggtaagacccgtagtcgtgcccaaactgccttccatggatgctcgtaccgaccgcagcagtgacaggaagggttcctcctacaagggacgagaggttctggacggcaggcaggtagtggatatgcgcaccaatccaggggaccccagagaagcacaggagcagcagaacgacggcaagggaaggggcaacaaagccgctaagcgcgatttgcctccagcaaagacccacctgatccaagaggacattctcccctattgccgcccaacgtttccaaccagcaataatcctcgggacccaagctcatcatcgtccatgtcctcccggggatctggtagccgtcagagggagcaggcgaacgttggcagaaggaacattgccgagatgcaggtgttggggggttatgagcgcggtgaagacaacaatgaggagcttgaagagacagagtcata

SEQ ID NO: 235428 - DNA, 4821 bp, Artificial Sequence
  derived and/or modified sequence
atgatagcagagcctgcccacttttacttgtttggccttatctgcttgtgtagtggatctagactgaggcaggaggacttccctccacgaattgtggagcacccttctgatcttatcgtgtcaaagggggagccagccactctgaactgtaaagcagagggacggccaactcctacaattgagtggtataagggtggcgaaagagttgaaaccgataaagacgatccacgaagccatcgaatgcttctgccctccgggagcctgtttttcctgagaatcgtgcacgggaggaagtcacgccctgatgagggggtgtatgtttgcgtggctcggaattatctcggagaagctgtgtcgcacaatgctagcctggaggtggccatccttcgcgatgacttcaggcagaatccttcagatgttatggtcgcagtgggggaacccgcagtaatggaatgtcagcctccacggggacatcccgaacccaccattagctggaagaaggacgggtcacccttagacgacaaggacgagagaatcacaataagggggggaaagctgatgatcacctacacccggaaaagcgatgctggaaagtacgtgtgcgtcggaacaaacatggtgggcgaacgtgagtccgaggttgccgagctcacagtgttagaacgaccatcctttgtaaaacgtccctctaatctcgcggtaaccgtggatgatagcgccgaatttaaatgtgaagcacgcggtgaccctgtgcctacagtgcgctggcgtaaagatgacggggagttgccgaaatctcggtacgagatacgggatgatcacacactgaaaatcagaaaagtcacggcaggagatatgggatcctacacatgtgtggctgaaaatatggtgggcaaggcagaggctagtgctacactaaccgtccaggtgggcagcgagccacctcacttcgtggtgaagccacgtgaccaggtggtggccctgggacgaacagtcacttttcagtgtgaggcgactggcaacccgcaacctgccattttttggagacgtgaagggtcccaaaatctgctgttctcctaccaacccccacagtctagcagcaggttctctgttagccagaccggcgatcttacaatcaccaatgtgcaacggtccgacgttggatactatatttgtcaaacgctcaacgtcgccggtagcatcattaccaaggcttacctggaagtgacggatgtgattgcagatcggcctcccccagtgattagacagggacccgtgaaccagactgtggcagtggatggtacgttcgttctctcgtgtgttgcgactgggagccccgttccaactattctgtggcgtaaggacggcgtgctggtaagtacccaggattcccgaataaaacagctcgaaaacggcgtgctgcagatcaggtacgctaaactgggcgacaccggcaggtacacatgcatcgccagtactccctctggtgaggccacttggtcggcatacattgaggttcaagagttcggggttccagtgcagcccccacggcctacagatcctaacctcataccttccgctccctctaagcctgaagttactgacgtctcaagaaataccgtcacattaagctggcagccaaatctgaactcaggcgcaacccccacaagctatattattgaggccttctctcatgcatcaggatcctcatggcaaactgtggccgaaaacgtcaagaccgaaacttccgccatcaaaggcttgaaaccgaacgctatttacctttttctggtgcgcgcagccaatgcctatgggattagtgatccgtctcaaatcagcgatccggtcaagactcaagacgtcctccccacctctcagggcgtggatcacaagcaagtccagagggaactgggaaatgccgttctgcacctgcataaccctaccgttctgagctcatcctctatagaggtgcactggacagtggaccagcagagccaatatatccaggggtataagatcctctaccgcccatccggagccaatcacggcgagtctgactggctggtgtttgaagtgagaacaccagctaaaaactccgttgtgatcccggacctgcgaaagggagttaactatgaaattaaggcaaggccttttttcaacgaattccaaggcgctgatagtgaaattaagttcgccaagaccttagaggaagccccatctgctccaccccagggtgttactgtaagcaaaaacgacgggaatgggactgccatattagtgtcatggcagccccctccggaggacacgcagaacgggatggtgcaagaatacaaggtgtggtgcttaggaaacgaaacgcgttaccacatcaacaaaaccgtcgatggcagtacttttagcgtcgtgataccatttctcgtaccaggcatcaggtatagtgtggaagttgcggcatcaacaggggcaggctctggcgttaagtcggagccacagtttatacaattagacgcccacggaaatccggtctcccccgaggatcaggtgtccctggcccagcagatcagcgatgtggtgaaacaacctgcttttatcgccggtatcggcgcagcatgctggattattcttatggtgtttagcatctggctgtataggcatcgaaagaagcgcaatggactcacctctacttacgctggcataaggaaggtgacctatcagcgcggaggtgaagcagtgtctagcggcggacgtcctggcttactcaacattagcgagcccgctgcccaaccctggctagcagatacttggcctaacacaggaaacaaccacaatgactgttctatttcctgttgtactgcaggaaacggtaactccgactccaacctcaccacatattcgcgaccagcggattgcatcgcaaactataacaaccaattggataataagcaaacaaacctcatgcttccagagtccactgtgtatggcgatgtggatctcagcaataaaatcaatgaaatgaagaccttcaacagccctaacttgaaggatggcagatttgtgaacccctctggtcagccaactccgtatgccacaactcagttgatacaatcaaatctgagcaacaacatgaacaatgggagcggggattctggggaaaaacattggaagcccttaggacagcagaagcaagaggtggcccctgtgcagtacaatatcgtggagcaaaataagcttaacaaggactatagagccaacgacactgtacctcctaccattccatacaaccagtcgtatgatcaaaataccggcggttcatacaactcgagtgatcgcggaagctccacttctggaagccaggggcacaagaaaggcgctcggacaccaaaagtacctaaacaggggggaatgaactgggccgacctactgcctcctcctcctgcgcacccacctcctcacagtaactccgaggaatataacatcagtgtggacgagagctacgatcaggagatgccgtgtccggtgccgccagccaggatgtacctccagcaagatgagcttgaagaagaggaggacgagcggggtccaacacccccagtgcgaggtgccgcttcgtcacctgccgctgtctcctatagccaccagtctaccgctactctgactccctccccccaggaggaactccagcccatgttgcaggactgtccagaagaaacaggacacatgcagcatcagccagataggcgtcgacagccggtcagcccccctccccctcctaggccaatctctcctccgcatacttacgggtatatctcgggaccattggtaagcgacatggacactgacgccccagaagaggaggaagacgaggcggacatggaagttgccaaaatgcagacccggagattactgctacgtggccttgagcagactccagcgagcagtgttggcgacctggagtctagtgttactggatccatgatcaacggctggggttccgcttctgaagaggacaacatttcctcaggtagaagtagcgttagttcaagcgatggaagtttcttcaccgacgccgacttcgctcaggcagttgcagcagctgctgaatacgccggacttaaggtggctcggaggcaaatgcaggacgccgcaggcaggagacactttcacgcctcccagtgcccaagaccaacttctcctgtgtctactgatagtaacatgagtgccgcagttatgcaaaagaccagacccgctaaaaaactgaaacaccagccgggtcacctccggagggaaacctacaccgacgacctcccaccaccccctgttccgcctccggctatcaagtctccaaccgcacagagcaagactcagctggaagtgcgacccgtggtcgttccaaagctaccatccatggatgcgaggactgaccgaagttccgacagaaaaggaagttcttacaagggcagagaggtcctcgacggtagacaagtagtggatatgcggacgaaccccggtgacccacgtgaggcacaggagcagcagaacgatggcaaaggccgagggaataaagccgctaaaagagatttgcctccagccaaaacgcacctcatccaggaagacatcctcccttattgtcgccctaccttccctacttcaaacaatcccagagaccctagctcctctagttcgatgtcaagcaggggttccgggagccgccaacgagagcaagctaacgtgggcaggcgcaatatagcagagatgcaggtgcttggcggatatgaaaggggggaggacaacaacgaagagctggaggaaaccgaatcatag

SEQ ID NO: 235429 - DNA, 7492 bp, Artificial Sequence
  derived and/or modified sequence
aattgagctggagaggaggcagcgtgagagcagaaacttcagacgccgctgatccgggaggagctggggtgagccgcggcggccgtctctcccacccgcagcagcatcctctctgcccttctctgccaccccggggagagccgggagctgcctctttacagcttccacgagccaggggtgcaggcagctgcccccaggaagtttgggcttctgcgtagtttaggggtgcctgcgagcgccccagagggcgaggggccgagggcgatgttgggcgccgcgcggggctgggggcgcccagaagacgtgcgagtgtccgcggtcctgctgctgtctccagtaccctccgcatcccccaagtgatgggaacaagggcccgcccaggcagccgctgtcgccgcaccgccccctcgctcgctctctgcgcgcggagtcacccagtcacactcccggcaccccgagcccttcctccggagctgctgcttctactttggctgctatcgccgccgccgcgggtggcccgctgctgactgggctcgccgggagacggagaagcactttttggccctccctcagcagctctcacaccccaactttgccgccgccgccgcgcctgccctcgcagcggcgctcggccgcacattgtgggggcgcacgccgggaggctccgcaagaccgtggaggcaggaaacggcactactgcgcttctgcctcggctctttgttgttcgctttggatggttcttgaaagtgtctgagcctcctcggaaatcctggggccggagaagacaaaccttggaattcttcctctgcaaaagtctctgagatactgacaagcgtccggaaaggtcgacgagtaattgccctgaaaactcttggctaattgacccacgttgcttatattaagcctttgtgtgtggtgtgtggcttcatacatttggggaccctatttccactccctcctcttggcatgagactgtatacaggatccacccgaggacaatgattgcggagcccgctcacttttacctgtttggattaatatgtctctgttcaggctcccgtcttcgtcaggaagattttccacctcgcattgttgaacacccttcagacctgattgtctcaaaaggagaacctgcaactttgaactgcaaagctgaaggccgccccacacccactattgaatggtacaaagggggagagagagtggagacagacaaagatgaccctcgctcacaccgaatgttgctgccgagtggatctttatttttcttacgtatagtacatggacggaaaagtagacctgatgaaggagtctatgtctgtgtagcaaggaattaccttggagaggctgtgagccacaatgcatcgctggaagtagccatacttcgggatgacttcagacaaaacccttcggatgtcatggttgcagtaggagagcctgcagtaatggaatgccaacctccacgaggccatcctgagcccaccatttcatggaagaaagatggctctccactggatgataaagatgaaagaataactatacgaggaggaaagctcatgatcacttacacccgtaaaagtgacgctggcaaatatgtttgtgttggtaccaatatggttggggaacgtgagagtgaagtagccgagctgactgtcttagagagaccatcatttgtgaagagacccagtaacttggcagtaactgtggatgacagtgcagaatttaaatgtgaggcccgaggtgaccctgtacctacagtacgatggaggaaagatgatggagagctgcccaaatccagatatgaaatccgagatgatcataccttgaaaattaggaaggtgacagctggtgacatgggttcatacacttgtgttgcagaaaatatggtgggcaaagctgaagcatctgctactctgactgttcaagctccttcagaacctccacattttgttgtgaaaccccgtgaccaggttgttgctttgggacggactgtaacttttcagtgtgaagcaaccggaaatcctcaaccagctattttctggaggagagaagggagtcagaatctacttttctcatatcaaccaccacagtcatccagccgattttcagtctcccagactggcgacctcacaattactaatgtccagcgatctgatgttggttattacatctgccagactttaaatgttgctggaagcatcatcacaaaggcatatttggaagttacagatgtgattgcagatcggcctcccccagttattcgacaaggtcctgtgaatcagactgtagccgtggatggcactttcgtcctcagctgtgtggccacaggcagtccagtgcccaccattctgtggagaaaggatggagtcctcgtttcaacccaagactctcgaatcaaacagttggagaatggagtactgcagatccgatatgctaagctgggtgatactggtcggtacacctgcattgcatcaacccccagtggtgaagcaacatggagtgcttacattgaagttcaagaatttggagttccagttcagcctccaagacctactgacccaaatttaatccctagtgccccatcaaaacctgaagtgacagatgtcagcagaaatacagtcacattatcgtggcaaccaaatttgaattcaggagcaactccaacatcttatattatagaagccttcagccatgcatctggtagcagctggcagaccgtagcagagaatgtgaaaacagaaacatctgccattaaaggactcaaacctaatgcaatttaccttttccttgtgagggcagctaatgcatatggaattagtgatccaagccaaatatcagatccagtgaaaacacaagatgtcctaccaacaagtcagggggtggaccacaagcaggtccagagagagctgggaaatgctgttctgcacctccacaaccccaccgtcctttcttcctcttccatcgaagtgcactggacagtagatcaacagtctcagtatatacaaggatataaaattctctatcggccatctggagccaaccacggagaatcagactggttagtttttgaagtgaggacgccagccaaaaacagtgtggtaatccctgatctcagaaagggagtcaactatgaaattaaggctcgccctttttttaatgaatttcaaggagcagatagtgaaatcaagtttgccaaaaccctggaagaagcacccagtgccccaccccaaggtgtaactgtatccaagaatgatggaaacggaactgcaattctagttagttggcagccacctccagaagacactcaaaatggaatggtccaagagtataaggtttggtgtctgggcaatgaaactcgataccacatcaacaaaacagtggatggttccaccttttccgtggtcattccctttcttgttcctggaatccgatacagtgtggaagtggcagccagcactggggctgggtctggggtaaagagtgagcctcagttcatccagctggatgcccatggaaaccctgtgtcacctgaggaccaagtcagcctcgctcagcagatttcagatgtggtgaagcagccggccttcatagcaggtattggagcagcctgttggatcatcctcatggtcttcagcatctggctttatcgacaccgcaagaagagaaacggacttactagtacctacgcgggtatcagaaaagtaacttaccagagaggaggcgaagctgtcagcagtggagggaggcctggacttctcaacatcagtgaacctgccgcgcagccatggctggcagacacgtggcctaatactggcaacaaccacaatgactgctccatcagctgctgcacggcaggcaatggaaacagcgacagcaacctcactacctacagtcgcccagctgattgtatagcaaattataacaaccaactggataacaaacaaacaaatctgatgctccctgagtcaactgtttatggtgatgtggaccttagtaacaaaatcaatgagatgaaaaccttcaatagcccaaatctgaaggatgggcgttttgtcaatccatcagggcagcctactccttacgccaccactcagctcatccagtcaaacctcagcaacaacatgaacaatggcagcggggactctggcgagaagcactggaaaccactgggacagcagaaacaagaagtggcaccagttcagtacaacatcgtggagcaaaacaagctgaacaaagattatcgagcaaatgacacagttcctccaactatcccatacaaccaatcatacgaccagaacacaggaggatcctacaacagctcagaccggggcagtagtacatctgggagtcaggggcacaagaaaggggcaagaacacccaaggtaccaaaacagggtggcatgaactgggcagacctgcttcctcctcccccagcacatcctcctccacacagcaatagcgaagagtacaacatttctgtagatgaaagctatgaccaagaaatgccatgtcccgtgccaccagcaaggatgtatttgcaacaagatgaattagaagaggaggaagatgaacgaggccccactccccctgttcggggagcagcttcttctccagctgccgtgtcctatagccatcagtccactgccactctgactccctccccacaggaagaactccagcccatgttacaggattgtccagaggagactggccacatgcagcaccagcccgacaggagacggcagcctgtgagtcctcctccaccaccacggccgatctcccctccacatacctatggctacatttcaggacccctggtctcagatatggatacggatgcgccagaagaggaagaagacgaagccgacatggaggtagccaagatgcaaaccagaaggcttttgttacgtgggcttgagcagacacctgcctccagtgttggggacctggagagctctgtcacggggtccatgatcaacggctggggctcagcctcagaggaggacaacatttccagcggacgctccagtgttagttcttcggacggctcctttttcactgatgctgactttgcccaggcagtcgcagcagcggcagagtatgctggtctgaaagtagcacgacggcaaatgcaggatgctgctggccgtcgacattttcatgcgtctcagtgccctaggcccacaagtcccgtgtctacagacagcaacatgagtgccgccgtaatgcagaaaaccagaccagccaagaaactgaaacaccagccaggacatctgcgcagagaaacctacacagatgatcttccaccacctcctgtgccgccacctgctataaagtcacctactgcccaatccaagacacagctggaagtacgacctgtagtggtgccaaaactcccttctatggatgcaagaacagacagatcatcagacagaaaaggaagcagttacaaggggagagaagtgttggatggaagacaggttgttgacatgcgaacaaatccaggtgatcccagagaagcacaggaacagcaaaatgacgggaaaggacgtggaaacaaggcagcaaaacgagaccttccaccagcaaagactcatctcatccaagaggatattctaccttattgtagacctacttttccaacatcaaataatcccagagatcccagttcctcaagctcaatgtcatcaagaggatcaggaagcagacaaagagaacaagcaaatgtaggtcgaagaaatattgcagaaatgcaggtacttggaggatatgaaagaggagaagataataatgaagaattagaggaaactgaaagctgaagacaaccaagaggcttatgagatctaatgtgaaaatcatcactcaagatgcctcctgtcagatgacacatgacgccagataaaatgttcagtgcaatcagagtgtacaaattgtcgtttttattcctcttattgggatatcattttaaaaactttattgggtttttattgttgttgtttgatccctaaccctacaaagagccttcctattcccctcgctgttggagcaaaccattataccttacttccagcaagcaaagtgctttgacttcttgcttcagtcatcagccagcaagagggaacaaaactgttcttttgcattttgccgctgagatatggcattgcactgcttatatgccaagctaatttatagcaagatattgatcaaatatagaaagttgatattcaacctcacaagggctctcaaagtataatctttctatagccaactgctaatgcaaattaaaacatatttcattttaacatgatttcaaaatcagtttttcatactaccctttgctggaagaaactaaaaatatagcaaatgcagaaccacaaacaattcgaatggggtagaaacattgtaaatatttactctttgcaaaccctggtggtattttattttggcttcatttcaatcattgaagtatattcttattggaaatgtacttttggataagtagggctaagccagttggatctctggttgtctagtcattgtcataagtaaacctagtaaaaccttgttctatttttcaatcatcaaaaagtaattataaatacgtattacaaacaagtggatgtttttaatgaccaattgagtaagaacatccctgtcttaactggcctaaatttcttctggtagtgtcagttcaactttcagaagtgccacttaaggaagtttgatttttgtttttgtaatgcactgtttttaatctctctctctttttttttttttttttggttttaaaagcacaatcactaaactttatttgtaaaccattgtaactattaaccttttttgtcttattgaaaaaaaaaatgttgagaagcgtttttaacctgttttgttaatgctctatgtttgtatttggaatatttgaataatgacagatggtgaagtaacatgcatactttattgtgggccatgaaccaaatggttcttacttttcctggacttaaagaaaaaaagaggtttaagtttgttgtggccaatgtcgaaacctacaagatttccttaaaatctctaatagaggcattacttgctttcaattgacaaatgatgccctctgactagtagatttctatgatccttttttgtcattttatgaatatcattgattttataattggtgctatttgaagaaaaaaatgtacatttattcatagatagataagtatcaggtctgaccccagtggaaaacaaagccaaacaaaactgaaccacaaaaaaaaaggctggtgttcaccaaaaccaaacttgttcatttagataatttgaaaaagttccatagaaaaggcgtgcagtactaagggaacaatccatgtgattaatgttttcattatgttcatgtaagaagccccttatttttagccataattttgcatactgaaaatccaataatcagaaaagtaattttgtcacattatttattaaaaatgttctcaaatac

SEQ ID NO: 235430 - DNA, 5600 bp, Artificial Sequence
  derived and/or modified sequence
tcccggcaccccgagcccttcctccggagctgctgcttctactttggctgctatcgccgccgccgcgggtggcccgctgctgactgggctcgccgggagacggagaagcactttttggccctccctcagcagctctcacaccccaactttgccgccgccgccgcgcctgccctcgcagcggcgctcggccgcacattgtgggggcgcacgccgggaggctccgcaagaccgtggaggcaggaaacggcactactgcgcttctgcctcggctctttgttgttcgctttggatggttcttgaaagtgtctgagcctcctcggaaatcctggggccggagaagacaaaccttggaattcttcctctgcaaaagtctctgagatactgacaagcgtccggaaaggtcgacgagtaattgccctgaaaactcttggctaattgacccacgttgcttatattaagcctttgtgtgtggtgtgtggcttcatacatttggggaccctatttccactccctcctcttggcatgagactgtatacaggatccacccgaggacaatgattgcggagcccgctcacttttacctgtttggattaatatgtctctgttcaggctcccgtcttcgtcaggaagattttccacctcgcattgttgaacacccttcagacctgattgtctcaaaaggagaacctgcaactttgaactgcaaagctgaaggccgccccacacccactattgaatggtacaaagggggagagagagtggagacagacaaagatgaccctcgctcacaccgaatgttgctgccgagtggatctttatttttcttacgtatagtacatggacggaaaagtagacctgatgaaggagtctatgtctgtgtagcaaggaattaccttggagaggctgtgagccacaatgcatcgctggaagtagccatacttcgggatgacttcagacaaaacccttcggatgtcatggttgcagtaggagagcctgcagtaatggaatgccaacctccacgaggccatcctgagcccaccatttcatggaagaaagatggctctccactggatgataaagatgaaagaataactatacgaggaggaaagctcatgatcacttacacccgtaaaagtgacgctggcaaatatgtttgtgttggtaccaatatggttggggaacgtgagagtgaagtagccgagctgactgtcttagagagaccatcatttgtgaagagacccagtaacttggcagtaactgtggatgacagtgcagaatttaaatgtgaggcccgaggtgaccctgtacctacagtacgatggaggaaagatgatggagagctgcccaaatccagatatgaaatccgagatgatcataccttgaaaattaggaaggtgacagctggtgacatgggttcatacacttgtgttgcagaaaatatggtgggcaaagctgaagcatctgctactctgactgttcaagttgggtctgaacctccacattttgttgtgaaaccccgtgaccaggttgttgctttgggacggactgtaacttttcagtgtgaagcaaccggaaatcctcaaccagctattttctggaggagagaagggagtcagaatctacttttctcatatcaaccaccacagtcatccagccgattttcagtctcccagactggcgacctcacaattactaatgtccagcgatctgatgttggttattacatctgccagactttaaatgttgctggaagcatcatcacaaaggcatatttggaagttacagatgtgattgcagatcggcctcccccagttattcgacaaggtcctgtgaatcagactgtagccgtggatggcactttcgtcctcagctgtgtggccacaggcagtccagtgcccaccattctgtggagaaaggatggagtcctcgtttcaacccaagactctcgaatcaaacagttggagaatggagtactgcagatccgatatgctaagctgggtgatactggtcggtacacctgcattgcatcaacccccagtggtgaagcaacatggagtgcttacattgaagttcaagaatttggagttccagttcagcctccaagacctactgacccaaatttaatccctagtgccccatcaaaacctgaagtgacagatgtcagcagaaatacagtcacattatcgtggcaaccaaatttgaattcaggagcaactccaacatcttatattatagaagccttcagccatgcatctggtagcagctggcagaccgtagcagagaatgtgaaaacagaaacatctgccattaaaggactcaaacctaatgcaatttaccttttccttgtgagggcagctaatgcatatggaattagtgatccaagccaaatatcagatccagtgaaaacacaagatgtcctaccaacaagtcagggggtggaccacaagcaggtccagagagagctgggaaatgctgttctgcacctccacaaccccaccgtcctttcttcctcttccatcgaagtgcactggacagtagatcaacagtctcagtatatacaaggatataaaattctctatcggccatctggagccaaccacggagaatcagactggttagtttttgaagtgaggacgccagccaaaaacagtgtggtaatccctgatctcagaaagggagtcaactatgaaattaaggctcgccctttttttaatgaatttcaaggagcagatagtgaaatcaagtttgccaaaaccctggaagaagcacccagtgccccaccccaaggtgtaactgtatccaagaatgatggaaacggaactgcaattctagttagttggcagccacctccagaagacactcaaaatggaatggtccaagagtataaggtttggtgtctgggcaatgaaactcgataccacatcaacaaaacagtggatggttccaccttttccgtggtcattccctttcttgttcctggaatccgatacagtgtggaagtggcagccagcactggggctgggtctggggtaaagagtgagcctcagttcatccagctggatgcccatggaaaccctgtgtcacctgaggaccaagtcagcctcgctcagcagatttcagatgtggtgaagcagccggccttcatagcaggtattggagcagcctgttggatcatcctcatggtcttcagcatctggctttatcgacaccgcaagaagagaaacggacttactagtacctacgcgggtatcagaaaagtaacttaccagagaggaggcgaagctgtcagcagtggagggaggcctggacttctcaacatcagtgaacctgccgcgcagccatggctggcagacacgtggcctaatactggcaacaaccacaatgactgctccatcagctgctgcacggcaggcaatggaaacagcgacagcaacctcactacctacagtcgcccagctgattgtatagcaaattataacaaccaactggataacaaacaaacaaatctgatgctccctgagtcaactgtttatggtgatgtggaccttagtaacaaaatcaatgagatgaaaaccttcaatagcccaaatctgaaggatgggcgttttgtcaatccatcagggcagcctactccttacgccaccactcagctcatccagtcaaacctcagcaacaacatgaacaatggcagcggggactctggcgagaagcactggaaaccactgggacagcagaaacaagaagtggcaccagttcagtacaacatcgtggagcaaaacaagctgaacaaagattatcgagcaaatgacacagttcctccaactatcccatacaaccaatcatacgaccagaacacaggaggatcctacaacagctcagaccggggcagtagtacatctgggagtcaggggcacaagaaaggggcaagaacacccaaggtaccaaaacagggtggcatgaactgggcagacctgcttcctcctcccccagcacatcctcctccacacagcaatagcgaagagtacaacatttctgtagatgaaagctatgaccaagaaatgccatgtcccgtgccaccagcaaggatgtatttgcaacaagatgaattagaagaggaggaagatgaacgaggccccactccccctgttcggggagcagcttcttctccagctgccgtgtcctatagccatcagtccactgccactctgactccctccccacaggaagaactccagcccatgttacaggattgtccagaggagactggccacatgcagcaccagcccgacaggagacggcagcctgtgagtcctcctccaccaccacggccgatctcccctccacatacctatggctacatttcaggacccctggtctcagatatggatacggatgcgccagaagaggaagaagacgaagccgacatggaggtagccaagatgcaaaccagaaggcttttgttacgtgggcttgagcagacacctgcctccagtgttggggacctggagagctctgtcacggggtccatgatcaacggctggggctcagcctcagaggaggacaacatttccagcggacgctccagtgttagttcttcggacggctcctttttcactgatgctgactttgcccaggcagtcgcagcagcggcagagtatgctggtctgaaagtagcacgacggcaaatgcaggatgctgctggccgtcgacattttcatgcgtctcagtgccctaggcccacaagtcccgtgtctacagacagcaacatgagtgccgccgtaatgcagaaaaccagaccagccaagaaactgaaacaccagccaggacatctgcgcagagaaacctacacagatgatcttccaccacctcctgtgccgccacctgctataaagtcacctactgcccaatccaagacacagctggaagtacgacctgtagtggtgccaaaactcccttctatggatgcaagaacagacagatcatcagacagaaaaggaagcagttacaaggggagagaagtgttggatggaagacaggttgttgacatgcgaacaaatccaggtgatcccagagaagcacaggaacagcaaaatgacgggaaaggacgtggaaacaaggcagcaaaacgagaccttccaccagcaaagactcatctcatccaagaggatattctaccttattgtagacctacttttccaacatcaaataatcccagagatcccagttcctcaagctcaatgtcatcaagaggatcaggaagcagacaaagagaacaagcaaatgtaggtcgaagaaatattgcagaaatgcaggtacttggaggatatgaaagaggagaagataataatgaagaattagaggaaactgaaagctgaagacaaccaagaggcttatgagatctaatgtgaaaatcatcactcaagatgcctcctgtcagatgacacatgacgccagataaaatgttcagtgcaatcagagtgtacaaattgtcgtttttattcctcttattgggatatcattttaaaaactttattgggtttttattgttgttgtttgatccctaaccctacaaagagccttcctattcccctcgctgttgg

SEQ ID NO: 235431 - DNA, 4821 bp, Artificial Sequence
  derived and/or modified sequence
atgatcgccgagcccgcccacttctacctgttcggcctgatctgcctgtgcagcggcagcagactgagacaggaggacttcccccccagaatcgtggagcaccccagcgacctgatcgtgagcaagggcgagcccgccaccctgaactgcaaggccgagggcagacccacccccaccatcgagtggtacaagggcggcgagagagtggagaccgacaaggacgaccccagaagccacagaatgctgctgcccagcggcagcctgttcttcctgagaatcgtgcacggcagaaagagcagacccgacgagggcgtgtacgtgtgcgtggccagaaactacctgggcgaggccgtgagccacaacgccagcctggaggtggccatcctgagagacgacttcagacagaaccccagcgacgtgatggtggccgtgggcgagcccgccgtgatggagtgccagccccccagaggccaccccgagcccaccatcagctggaagaaggacggcagccccctggacgacaaggacgagagaatcaccatcagaggcggcaagctgatgatcacctacaccagaaagagcgacgccggcaagtacgtgtgcgtgggcaccaacatggtgggcgagagagagagcgaggtggccgagctgaccgtgctggagagacccagcttcgtgaagagacccagcaacctggccgtgaccgtggacgacagcgccgagttcaagtgcgaggccagaggcgaccccgtgcccaccgtgagatggagaaaggacgacggcgagctgcccaagagcagatacgagatcagagacgaccacaccctgaagatcagaaaggtgaccgccggcgacatgggcagctacacctgcgtggccgagaacatggtgggcaaggccgaggccagcgccaccctgaccgtgcaggcccccagcgagcccccccacttcgtggtgaagcccagagaccaggtggtggccctgggcagaaccgtgaccttccagtgcgaggccaccggcaacccccagcccgccatcttctggagaagagagggcagccagaacctgctgttcagctaccagcccccccagagcagcagcagattcagcgtgagccagaccggcgacctgaccatcaccaacgtgcagagaagcgacgtgggctactacatctgccagaccctgaacgtggccggcagcatcatcaccaaggcctacctggaggtgaccgacgtgatcgccgacagacccccccccgtgatcagacagggccccgtgaaccagaccgtggccgtggacggcaccttcgtgctgagctgcgtggccaccggcagccccgtgcccaccatcctgtggagaaaggacggcgtgctggtgagcacccaggacagcagaatcaagcagctggagaacggcgtgctgcagatcagatacgccaagctgggcgacaccggcagatacacctgcatcgccagcacccccagcggcgaggccacctggagcgcctacatcgaggtgcaggagttcggcgtgcccgtgcagccccccagacccaccgaccccaacctgatccccagcgcccccagcaagcccgaggtgaccgacgtgagcagaaacaccgtgaccctgagctggcagcccaacctgaacagcggcgccacccccaccagctacatcatcgaggccttcagccacgccagcggcagcagctggcagaccgtggccgagaacgtgaagaccgagaccagcgccatcaagggcctgaagcccaacgccatctacctgttcctggtgagagccgccaacgcctacggcatcagcgaccccagccagatcagcgaccccgtgaagacccaggacgtgctgcccaccagccagggcgtggaccacaagcaggtgcagagagagctgggcaacgccgtgctgcacctgcacaaccccaccgtgctgagcagcagcagcatcgaggtgcactggaccgtggaccagcagagccagtacatccagggctacaagatcctgtacagacccagcggcgccaaccacggcgagagcgactggctggtgttcgaggtgagaacccccgccaagaacagcgtggtgatccccgacctgagaaagggcgtgaactacgagatcaaggccagacccttcttcaacgagttccagggcgccgacagcgagatcaagttcgccaagaccctggaggaggcccccagcgcccccccccagggcgtgaccgtgagcaagaacgacggcaacggcaccgccatcctggtgagctggcagcccccccccgaggacacccagaacggcatggtgcaggagtacaaggtgtggtgcctgggcaacgagaccagataccacatcaacaagaccgtggacggcagcaccttcagcgtggtgatccccttcctggtgcccggcatcagatacagcgtggaggtggccgccagcaccggcgccggcagcggcgtgaagagcgagccccagttcatccagctggacgcccacggcaaccccgtgagccccgaggaccaggtgagcctggcccagcagatcagcgacgtggtgaagcagcccgccttcatcgccggcatcggcgccgcctgctggatcatcctgatggtgttcagcatctggctgtacagacacagaaagaagagaaacggcctgaccagcacctacgccggcatcagaaaggtgacctaccagagaggcggcgaggccgtgagcagcggcggcagacccggcctgctgaacatcagcgagcccgccgcccagccctggctggccgacacctggcccaacaccggcaacaaccacaacgactgcagcatcagctgctgcaccgccggcaacggcaacagcgacagcaacctgaccacctacagcagacccgccgactgcatcgccaactacaacaaccagctggacaacaagcagaccaacctgatgctgcccgagagcaccgtgtacggcgacgtggacctgagcaacaagatcaacgagatgaagaccttcaacagccccaacctgaaggacggcagattcgtgaaccccagcggccagcccaccccctacgccaccacccagctgatccagagcaacctgagcaacaacatgaacaacggcagcggcgacagcggcgagaagcactggaagcccctgggccagcagaagcaggaggtggcccccgtgcagtacaacatcgtggagcagaacaagctgaacaaggactacagagccaacgacaccgtgccccccaccatcccctacaaccagagctacgaccagaacaccggcggcagctacaacagcagcgacagaggcagcagcaccagcggcagccagggccacaagaagggcgccagaacccccaaggtgcccaagcagggcggcatgaactgggccgacctgctgccccccccccccgcccacccccccccccacagcaacagcgaggagtacaacatcagcgtggacgagagctacgaccaggagatgccctgccccgtgccccccgccagaatgtacctgcagcaggacgagctggaggaggaggaggacgagagaggccccaccccccccgtgagaggcgccgccagcagccccgccgccgtgagctacagccaccagagcaccgccaccctgacccccagcccccaggaggagctgcagcccatgctgcaggactgccccgaggagaccggccacatgcagcaccagcccgacagaagaagacagcccgtgagccccccccccccccccagacccatcagccccccccacacctacggctacatcagcggccccctggtgagcgacatggacaccgacgcccccgaggaggaggaggacgaggccgacatggaggtggccaagatgcagaccagaagactgctgctgagaggcctggagcagacccccgccagcagcgtgggcgacctggagagcagcgtgaccggcagcatgatcaacggctggggcagcgccagcgaggaggacaacatcagcagcggcagaagcagcgtgagcagcagcgacggcagcttcttcaccgacgccgacttcgcccaggccgtggccgccgccgccgagtacgccggcctgaaggtggccagaagacagatgcaggacgccgccggcagaagacacttccacgccagccagtgccccagacccaccagccccgtgagcaccgacagcaacatgagcgccgccgtgatgcagaagaccagacccgccaagaagctgaagcaccagcccggccacctgagaagagagacctacaccgacgacctgccccccccccccgtgcccccccccgccatcaagagccccaccgcccagagcaagacccagctggaggtgagacccgtggtggtgcccaagctgcccagcatggacgccagaaccgacagaagcagcgacagaaagggcagcagctacaagggcagagaggtgctggacggcagacaggtggtggacatgagaaccaaccccggcgaccccagagaggcccaggagcagcagaacgacggcaagggcagaggcaacaaggccgccaagagagacctgccccccgccaagacccacctgatccaggaggacatcctgccctactgcagacccaccttccccaccagcaacaaccccagagaccccagcagcagcagcagcatgagcagcagaggcagcggcagcagacagagagagcaggccaacgtgggcagaagaaacatcgccgagatgcaggtgctgggcggctacgagagaggcgaggacaacaacgaggagctggaggagaccgagagctag

SEQ ID NO: 235432 - DNA, 4821 bp, Artificial Sequence
  derived and/or modified sequence
atgatcgccgagcccgcccacttctacctgttcggcctgatctgcctgtgcagcggcagcagactgagacaggaggacttcccccccagaatcgtggagcaccccagcgacctgatcgtgagcaagggcgagcccgccaccctgaactgcaaggccgagggcagacccacccccaccatcgagtggtacaagggcggcgagagagtggagaccgacaaggacgaccccagaagccacagaatgctgctgcccagcggcagcctgttcttcctgagaatcgtgcacggcagaaagagcagacccgacgagggcgtgtacgtgtgcgtggccagaaactacctgggcgaggccgtgagccacaacgccagcctggaggtggccatcctgagagacgacttcagacagaaccccagcgacgtgatggtggccgtgggcgagcccgccgtgatggagtgccagccccccagaggccaccccgagcccaccatcagctggaagaaggacggcagccccctggacgacaaggacgagagaatcaccatcagaggcggcaagctgatgatcacctacaccagaaagagcgacgccggcaagtacgtgtgcgtgggcaccaacatggtgggcgagagagagagcgaggtggccgagctgaccgtgctggagagacccagcttcgtgaagagacccagcaacctggccgtgaccgtggacgacagcgccgagttcaagtgcgaggccagaggcgaccccgtgcccaccgtgagatggagaaaggacgacggcgagctgcccaagagcagatacgagatcagagacgaccacaccctgaagatcagaaaggtgaccgccggcgacatgggcagctacacctgcgtggccgagaacatggtgggcaaggccgaggccagcgccaccctgaccgtgcaggtgggcagcgagcccccccacttcgtggtgaagcccagagaccaggtggtggccctgggcagaaccgtgaccttccagtgcgaggccaccggcaacccccagcccgccatcttctggagaagagagggcagccagaacctgctgttcagctaccagcccccccagagcagcagcagattcagcgtgagccagaccggcgacctgaccatcaccaacgtgcagagaagcgacgtgggctactacatctgccagaccctgaacgtggccggcagcatcatcaccaaggcctacctggaggtgaccgacgtgatcgccgacagacccccccccgtgatcagacagggccccgtgaaccagaccgtggccgtggacggcaccttcgtgctgagctgcgtggccaccggcagccccgtgcccaccatcctgtggagaaaggacggcgtgctggtgagcacccaggacagcagaatcaagcagctggagaacggcgtgctgcagatcagatacgccaagctgggcgacaccggcagatacacctgcatcgccagcacccccagcggcgaggccacctggagcgcctacatcgaggtgcaggagttcggcgtgcccgtgcagccccccagacccaccgaccccaacctgatccccagcgcccccagcaagcccgaggtgaccgacgtgagcagaaacaccgtgaccctgagctggcagcccaacctgaacagcggcgccacccccaccagctacatcatcgaggccttcagccacgccagcggcagcagctggcagaccgtggccgagaacgtgaagaccgagaccagcgccatcaagggcctgaagcccaacgccatctacctgttcctggtgagagccgccaacgcctacggcatcagcgaccccagccagatcagcgaccccgtgaagacccaggacgtgctgcccaccagccagggcgtggaccacaagcaggtgcagagagagctgggcaacgccgtgctgcacctgcacaaccccaccgtgctgagcagcagcagcatcgaggtgcactggaccgtggaccagcagagccagtacatccagggctacaagatcctgtacagacccagcggcgccaaccacggcgagagcgactggctggtgttcgaggtgagaacccccgccaagaacagcgtggtgatccccgacctgagaaagggcgtgaactacgagatcaaggccagacccttcttcaacgagttccagggcgccgacagcgagatcaagttcgccaagaccctggaggaggcccccagcgcccccccccagggcgtgaccgtgagcaagaacgacggcaacggcaccgccatcctggtgagctggcagcccccccccgaggacacccagaacggcatggtgcaggagtacaaggtgtggtgcctgggcaacgagaccagataccacatcaacaagaccgtggacggcagcaccttcagcgtggtgatccccttcctggtgcccggcatcagatacagcgtggaggtggccgccagcaccggcgccggcagcggcgtgaagagcgagccccagttcatccagctggacgcccacggcaaccccgtgagccccgaggaccaggtgagcctggcccagcagatcagcgacgtggtgaagcagcccgccttcatcgccggcatcggcgccgcctgctggatcatcctgatggtgttcagcatctggctgtacagacacagaaagaagagaaacggcctgaccagcacctacgccggcatcagaaaggtgacctaccagagaggcggcgaggccgtgagcagcggcggcagacccggcctgctgaacatcagcgagcccgccgcccagccctggctggccgacacctggcccaacaccggcaacaaccacaacgactgcagcatcagctgctgcaccgccggcaacggcaacagcgacagcaacctgaccacctacagcagacccgccgactgcatcgccaactacaacaaccagctggacaacaagcagaccaacctgatgctgcccgagagcaccgtgtacggcgacgtggacctgagcaacaagatcaacgagatgaagaccttcaacagccccaacctgaaggacggcagattcgtgaaccccagcggccagcccaccccctacgccaccacccagctgatccagagcaacctgagcaacaacatgaacaacggcagcggcgacagcggcgagaagcactggaagcccctgggccagcagaagcaggaggtggcccccgtgcagtacaacatcgtggagcagaacaagctgaacaaggactacagagccaacgacaccgtgccccccaccatcccctacaaccagagctacgaccagaacaccggcggcagctacaacagcagcgacagaggcagcagcaccagcggcagccagggccacaagaagggcgccagaacccccaaggtgcccaagcagggcggcatgaactgggccgacctgctgccccccccccccgcccacccccccccccacagcaacagcgaggagtacaacatcagcgtggacgagagctacgaccaggagatgccctgccccgtgccccccgccagaatgtacctgcagcaggacgagctggaggaggaggaggacgagagaggccccaccccccccgtgagaggcgccgccagcagccccgccgccgtgagctacagccaccagagcaccgccaccctgacccccagcccccaggaggagctgcagcccatgctgcaggactgccccgaggagaccggccacatgcagcaccagcccgacagaagaagacagcccgtgagccccccccccccccccagacccatcagccccccccacacctacggctacatcagcggccccctggtgagcgacatggacaccgacgcccccgaggaggaggaggacgaggccgacatggaggtggccaagatgcagaccagaagactgctgctgagaggcctggagcagacccccgccagcagcgtgggcgacctggagagcagcgtgaccggcagcatgatcaacggctggggcagcgccagcgaggaggacaacatcagcagcggcagaagcagcgtgagcagcagcgacggcagcttcttcaccgacgccgacttcgcccaggccgtggccgccgccgccgagtacgccggcctgaaggtggccagaagacagatgcaggacgccgccggcagaagacacttccacgccagccagtgccccagacccaccagccccgtgagcaccgacagcaacatgagcgccgccgtgatgcagaagaccagacccgccaagaagctgaagcaccagcccggccacctgagaagagagacctacaccgacgacctgccccccccccccgtgcccccccccgccatcaagagccccaccgcccagagcaagacccagctggaggtgagacccgtggtggtgcccaagctgcccagcatggacgccagaaccgacagaagcagcgacagaaagggcagcagctacaagggcagagaggtgctggacggcagacaggtggtggacatgagaaccaaccccggcgaccccagagaggcccaggagcagcagaacgacggcaagggcagaggcaacaaggccgccaagagagacctgccccccgccaagacccacctgatccaggaggacatcctgccctactgcagacccaccttccccaccagcaacaaccccagagaccccagcagcagcagcagcatgagcagcagaggcagcggcagcagacagagagagcaggccaacgtgggcagaagaaacatcgccgagatgcaggtgctgggcggctacgagagaggcgaggacaacaacgaggagctggaggagaccgagagctag

SEQ ID NO: 235433 - protein, 444 aa, Artificial Sequence
  derived and/or modified sequence
MNFLRRRLSDSSFMANLPNGYMTDLQRPDSSTSSPASPAMERRHPQPLAASFSSPGSSLFSSLSSAMKQAPQATSGLMEPPGPSTPIVQRPRILLVIDDAHTDWSKYFHGKKVNGEIEIRVEQAEFSELNLAAYVTGGCMVDMQVVRNGTKVVSRSFKPDFILVRQHAYSMALGEDYRSLVIGLQYGGLPAVNSLYSVYNFCSKPWVFSQLIKIFHSLGPEKFPLVEQTFFPNHKPMVTAPHFPVVVKLGHAHAGMGKIKVENQLDFQDITSVVAMAKTYATTEAFIDSKYDIRIQKIGSNYKAYMRTSISGNWKANTGSAMLEQVAMTERYRLWVDSCSEMFGGLDICAVKAVHSKDGRDYIIEVMDSSMPLIGEHVEEDRQLMADLVVSKMSQLPMPGGTAPSPLRPWAPQIKSAKSPGQAQLGPQLGQPQPRPPPQVSFSP

SEQ ID NO: 235434 - DNA, 1743 bp, Artificial Sequence
  derived and/or modified sequence
atgaacttcctgagaagaagactgagcgacagcagcttcatggccaacctgcccaacggctacatgaccgacctgcagagacccgacagcagcaccagcagccccgccagccccgccatggagagaagacacccccagcccctggccgccagcttcagcagccccggcagcagcctgttcagcagcctgagcagcgccatgaagcaggccccccaggccaccagcggcctgatggagccccccggccccagcacccccatcgtgcagagacccagaatcctgctggtgatcgacgacgcccacaccgactggagcaagtacttccacggcaagaaggtgaacggcgagatcgagatcagagtggagcaggccgagttcagcgagctgaacctggccgcctacgtgaccggcggctgcatggtggacatgcaggtggtgagaaacggcaccaaggtggtgagcagaagcttcaagcccgacttcatcctggtgagacagcacgcctacagcatggccctgggcgaggactacagaagcctggtgatcggcctgcagtacggcggcctgcccgccgtgaacagcctgtacagcgtgtacaacttctgcagcaagccctgggtgttcagccagctgatcaagatcttccacagcctgggccccgagaagttccccctggtggagcagaccttcttccccaaccacaagcccatggtgaccgccccccacttccccgtggtggtgaagctgggccacgcccacgccggcatgggcaagatcaaggtggagaaccagctggacttccaggacatcaccagcgtggtggccatggccaagacctacgccaccaccgaggccttcatcgacagcaagtacgacatcagaatccagaagatcggcagcaactacaaggcctacatgagaaccagcatcagcggcaactggaaggccaacaccggcagcgccatgctggagcaggtggccatgaccgagagatacagactgtgggtggacagctgcagcgagatgttcggcggcctggacatctgcgccgtgaaggccgtgcacagcaaggacggcagagactacatcatcgaggtgatggacagcagcatgcccctgatcggcgagcacgtggaggaggacagacagctgatggccgacctggtggtgagcaagatgagccagctgcccatgcccggcggcaccgcccccagccccctgagaccctgggccccccagatcaagagcgccaagagccccggccaggcccagctgggcccccagctgggccagccccagcccagaccccccccccagggcggccccagacaggcccagagcccccagccccagagaagcggcagccccagccagcagagactgagcccccagggccagcagcccctgagcccccagagcggcagcccccagcagcagagaagccccggcagcccccagctgagcagagccagcagcggcagcagccccaaccaggccagcaagcccggcgccaccctggccagccagcccagaccccccgtgcagggcagaagcaccagccagcagggcgaggagagcaagaagcccgcccccccccacccccacctgaacaagagccagagcctgaccaacagcctgagcaccagcgacaccagccagagaggcacccccagcgaggacgaggccaaggccgagaccatcagaaacctgagaaagagcttcgccagcctgttcagcgactag

SEQ ID NO: 235435 - DNA, 1335 bp, Artificial Sequence
  derived and/or modified sequence
atgaacttcctgagaagaagactgagcgacagcagcttcatggccaacctgcccaacggctacatgaccgacctgcagagacccgacagcagcaccagcagccccgccagccccgccatggagagaagacacccccagcccctggccgccagcttcagcagccccggcagcagcctgttcagcagcctgagcagcgccatgaagcaggccccccaggccaccagcggcctgatggagccccccggccccagcacccccatcgtgcagagacccagaatcctgctggtgatcgacgacgcccacaccgactggagcaagtacttccacggcaagaaggtgaacggcgagatcgagatcagagtggagcaggccgagttcagcgagctgaacctggccgcctacgtgaccggcggctgcatggtggacatgcaggtggtgagaaacggcaccaaggtggtgagcagaagcttcaagcccgacttcatcctggtgagacagcacgcctacagcatggccctgggcgaggactacagaagcctggtgatcggcctgcagtacggcggcctgcccgccgtgaacagcctgtacagcgtgtacaacttctgcagcaagccctgggtgttcagccagctgatcaagatcttccacagcctgggccccgagaagttccccctggtggagcagaccttcttccccaaccacaagcccatggtgaccgccccccacttccccgtggtggtgaagctgggccacgcccacgccggcatgggcaagatcaaggtggagaaccagctggacttccaggacatcaccagcgtggtggccatggccaagacctacgccaccaccgaggccttcatcgacagcaagtacgacatcagaatccagaagatcggcagcaactacaaggcctacatgagaaccagcatcagcggcaactggaaggccaacaccggcagcgccatgctggagcaggtggccatgaccgagagatacagactgtgggtggacagctgcagcgagatgttcggcggcctggacatctgcgccgtgaaggccgtgcacagcaaggacggcagagactacatcatcgaggtgatggacagcagcatgcccctgatcggcgagcacgtggaggaggacagacagctgatggccgacctggtggtgagcaagatgagccagctgcccatgcccggcggcaccgcccccagccccctgagaccctgggccccccagatcaagagcgccaagagccccggccaggcccagctgggcccccagctgggccagccccagcccagaccccccccccaggtgagcttcagcccctag

SEQ ID NO: 235436 - DNA, 1743 bp, Artificial Sequence
  derived and/or modified sequence
atgaacttccttaggcgtagattgtccgattcctcgtttatggcaaatctgcctaacggctacatgacagatctccaacggccagatagttccacgtccagtccggctagtcctgccatggaacggaggcatccgcaacctctggcggccagttttagtagccccgggagtagcctgttttcatccctgtctagcgccatgaaacaggccccgcaggcgacatccggtctgatggagccgcccgggccaagcactcctattgtccaaagaccaaggattctgttagtgatcgacgatgcgcatacagactggagtaagtattttcacggcaagaaagtgaatggtgagatagagattcgtgtggagcaggctgaatttagcgaactaaatttagctgcatacgtgactgggggatgcatggtggatatgcaggtggtccggaatggtaccaaagtggtgagcaggagtttcaagccagatttcatattagtgcggcagcacgcctactcaatggccctgggcgaggattatagaagcctggtgatcggcttgcagtacgggggcttgcccgcagtaaactcactctatagtgtgtacaacttctgtagtaaaccatgggtgttttcccaattaattaaaatcttccacagcctagggccagagaaattccccctcgtcgagcagacctttttcccgaatcataagcccatggttaccgccccccacttccccgtcgtggtaaaactgggacacgctcatgccgggatgggtaagatcaaggtcgagaaccagctcgattttcaggacatcacatctgtggtcgcaatggctaaaacatatgcaactactgaagccttcatcgactcaaagtatgatattcgcatccaaaaaatcgggagcaattataaagcgtacatgaggacaagcatctctggaaattggaaggcaaataccggttctgccatgctggaacaagtagccatgacagaacgctatcgcctgtgggttgattcctgtagtgagatgttcggggggctggacatctgcgctgttaaggccgtgcacagtaaagatggtagggattacatcatcgaggttatggattcatcgatgccactgattggtgagcacgtggaagaggacaggcagctaatggccgacctggtggtgtctaagatgagccagctgccaatgcccggcggcactgcaccatcgcctcttcgaccctgggcaccccagataaagagcgctaaaagccccggacaagcccagctggggccccagctgggccaacctcaaccaagaccccctccacagggaggccctaggcaggcccagtctccgcagccacagaggagcgggtcaccaagccagcagagactgtccccccaggggcagcagcctctcagccctcagtctggctcgccacagcagcaacggagtcccggttccccacaacttagcagagcatcgagtggatctagtcccaatcaagcctccaaacccggtgcaaccctggcaagtcaacctaggccccccgtccaaggaagaagcacaagccagcagggagaggagagcaagaaacccgccccccctcatccccatctaaataagagccagagtctgacaaactctttgtctacgagtgacacctctcagcgagggacaccttctgaggacgaggcaaaggcagagacgattcggaatttgcgtaagagctttgcatcactattcagtgattag

SEQ ID NO: 235437 - DNA, 1743 bp, Artificial Sequence
  derived and/or modified sequence
atgaatttccttcgcagacgtctgagtgactcaagcttcatggctaatctgccaaacgggtacatgacagatctgcagcgccctgattccagcacgagctcgcccgcttcacccgccatggagaggaggcacccccagccacttgccgctagtttcagcagtcctggcagttctctgttctctagtctttcctctgccatgaagcaggcaccccaggccacctcaggtctgatggagcccccagggcccagtactcccatcgtgcagagaccacgcattctgctggtcatagatgacgctcataccgactggagtaaatattttcatggcaaaaaagtgaatggcgaaatagagattcgggtcgagcaggcagagttcagtgagctgaatttggcggcttatgtgacaggaggatgtatggtcgatatgcaggtggtgagaaacggaacaaaagtggtgtctcgctcttttaagccagattttatccttgtcaggcagcacgcctactccatggcattaggggaggattatcggtctctggtcatcggactacaatacggtggactccctgccgtgaattctttgtacagtgtatataacttttgtagcaagccgtgggtcttcagccagttgataaagatcttccattctctgggaccggaaaaattccccctggtcgagcagactttctttcccaaccacaaaccaatggtcactgcgccccatttccctgtcgtcgtgaagctcggtcacgctcatgctggcatgggaaagattaaggtcgaaaatcaattggatttccaagatattaccagcgtagtcgctatggcaaagacatatgccacaacggaagcctttattgactctaaatatgatattaggattcagaagattgggtctaactataaggcttacatgcggaccagtatctccggcaactggaaggcaaacaccgggtcggcaatgttggagcaggttgcaatgacagaacggtataggctctgggtagacagctgtagtgagatgtttggaggactagatatttgcgccgtgaaggccgtacactccaaggacgggcgggactacattattgaagtcatggactcctcaatgcccctcatcggcgagcacgtggaggaggaccgccagctgatggcggatctggtagtaagcaaaatgtcccaacttcccatgcccggcggaaccgccccctcaccattacgaccctgggcgcctcagattaagtctgcgaagtcccccggccaggcacagctcggaccacagctggggcaacctcagccacggcccccacctcagggaggacctaggcaggcccaaagcccacagccccaacgctcgggaagcccgtcccaacagcggctaagtccccaggggcagcagcctctttccccacaatccggaagtccccagcaacagcgcagccccggatctccccagctcagccgagcttctagcggaagctcccccaaccaggcctctaagcccggagctacattggccagtcaaccgaggccccccgtgcaggggagatccacctctcaacagggggaggaatctaaaaagcccgctccaccacatccacatttgaacaagagtcaaagtctgacaaactccctcagtactagcgacacctcgcagcggggcacaccctccgaggacgaggcaaaggccgagacaatacggaatctcagaaaatcattcgcgtcactcttcagcgactag

SEQ ID NO: 235438 - DNA, 1335 bp, Artificial Sequence
  derived and/or modified sequence
atgaattttcttcgaagacgcctctccgatagttctttcatggctaatctccctaatgggtacatgactgacctgcagcggccagattctagtacttcgagcccagcaagcccagccatggagaggaggcatccacaacccctcgcagccagcttcagctcccccgggagctcactgttttcgtccctgagctccgccatgaagcaggcaccccaagccacatccggactaatggagcctccgggcccatccacccccattgttcaaagaccccgcatcctgctcgtgatcgatgatgcacacacagactggagcaagtattttcatggaaagaaggtgaacggggagattgagattagagtggagcaggctgaattttccgaactcaatctggccgcatatgtgacagggggctgcatggttgatatgcaggtcgttagaaacggcacaaaagtggtctcccgttccttcaaaccagattttatcctagtgcgccaacatgcttactctatggccctgggtgaggactatagatccctcgttattggactgcagtatggaggactccccgcagtgaacagcttatattccgtctataacttttgttctaagccatgggtgttttctcagctgattaagattttccacagtctgggccccgaaaaatttcccctcgttgaacaaacctttttccccaatcacaaaccaatggtcacggcacctcacttccctgtggttgtcaaattaggacacgcccacgctggcatgggcaagataaaagtggaaaaccaacttgacttccaggacatcacaagtgttgttgccatggctaaaacttacgcgaccactgaagccttcattgattctaaatatgacattaggattcagaagattggctccaactacaaggcttacatgcgtaccagtatttccgggaattggaaggccaataccggcagcgctatgttagagcaggtggcaatgactgagcggtatagattgtgggtcgattcgtgtagtgaaatgttcggcggactggacatttgcgccgtgaaagctgttcactctaaggacgggagagactatattattgaggtgatggatagctccatgcccctgatcggtgagcacgtagaagaagatcgccagctgatggcggaccttgtggtgtctaaaatgagccagttgccaatgccagggggcacagccccgtcccccctacggccgtgggcaccccaaatcaagtcggccaagtcacccgggcaggcacagctcgggccccagttggggcagcctcagcctcggcctcccccccaagtttcattcagcccttag

SEQ ID NO: 235439 - DNA, 1743 bp, Artificial Sequence
  derived and/or modified sequence
atgaacttcctgcggcggcggctgagtgacagcagcttcatggccaacctgcccaacggctacatgacagacctgcagaggccagacagcagcaccagcagccctgccagccctgccatggagcggcggcacccccagcccctggccgccagcttcagcagccctggcagcagcctcttcagcagcctgagcagcgccatgaagcaggccccccaggccaccagcggcctgatggagcccccaggccccagcacccccatcgtgcagaggccccgcatcctgctggtgattgatgatgcccacacagactggagcaagtacttccacggcaagaaggtgaatggagaaattgagatccgggtggagcaggccgagttcagcgagctgaacctggccgcctacgtgactggaggctgcatggtggacatgcaggtggtgagaaatggcaccaaggtggtgagccgctccttcaagccagacttcatcctggtgcggcagcacgcctacagcatggccctgggggaggactaccgcagcctggtgattggcctgcagtatggaggcctgcctgctgtgaacagcctgtacagcgtgtacaacttctgcagcaagccctgggtgttcagccagctgatcaagatcttccacagcctgggccctgagaagttccccctggtggagcagaccttcttccccaaccacaagcccatggtgacagccccccacttccctgtggtggtgaagctgggccacgcccacgccggcatgggcaagatcaaggtggagaaccagctggacttccaggacatcacctctgtggtggccatggccaagacctacgccaccacagaggccttcatcgacagcaaatatgacatccgcatccagaagattggcagcaactacaaggcctacatgaggaccagcatcagcggcaactggaaggccaacacaggcagcgccatgctggagcaggtggccatgacagagcgctaccgcctgtgggtggacagctgcagcgagatgtttggaggcctggacatctgtgctgtgaaggctgtgcacagcaaggatggccgggactacatcatcgaggtgatggacagctccatgcccctcatcggggagcacgtggaggaggaccggcagctgatggctgacctggtggtgtccaagatgagccagctgcccatgcctgggggcacagcccccagccccctgcggccctgggccccccagatcaagagcgccaagagccctggccaggcccagctgggcccccagctgggccagccccagccccggcccccaccccagggcggcccccggcaggcccagagcccccagccccagaggagcggcagccccagccagcagaggctgagcccccagggccagcagcccctgagcccccagagcggcagcccccagcagcagaggagccctggcagcccccagctgagccgggccagcagcggcagcagccccaaccaggccagcaagccaggggccaccctggccagccagccccggccccctgtgcagggccgcagcaccagccagcagggcgaggagagcaagaagccagccccaccccacccccacctgaacaagagccagagcctgaccaacagcctgagcaccagtgacaccagccagaggggcacccccagtgaagatgaggccaaggccgagaccatccggaacctgaggaagagctttgccagcctcttcagtgactag

SEQ ID NO: 235440 - DNA, 1335 bp, Artificial Sequence
  derived and/or modified sequence
atgaacttcctgcggcggcggctgagtgacagcagcttcatggccaacctgcccaacggctacatgacagacctgcagaggccagacagcagcaccagcagccctgccagccctgccatggagcggcggcacccccagcccctggccgccagcttcagcagccctggcagcagcctcttcagcagcctgagcagcgccatgaagcaggccccccaggccaccagcggcctgatggagcccccaggccccagcacccccatcgtgcagaggccccgcatcctgctggtgattgatgatgcccacacagactggagcaagtacttccacggcaagaaggtgaatggagaaattgagatccgggtggagcaggccgagttcagcgagctgaacctggccgcctacgtgactggaggctgcatggtggacatgcaggtggtgagaaatggcaccaaggtggtgagccgctccttcaagccagacttcatcctggtgcggcagcacgcctacagcatggccctgggggaggactaccgcagcctggtgattggcctgcagtatggaggcctgcctgctgtgaacagcctgtacagcgtgtacaacttctgcagcaagccctgggtgttcagccagctgatcaagatcttccacagcctgggccctgagaagttccccctggtggagcagaccttcttccccaaccacaagcccatggtgacagccccccacttccctgtggtggtgaagctgggccacgcccacgccggcatgggcaagatcaaggtggagaaccagctggacttccaggacatcacctctgtggtggccatggccaagacctacgccaccacagaggccttcatcgacagcaaatatgacatccgcatccagaagattggcagcaactacaaggcctacatgaggaccagcatcagcggcaactggaaggccaacacaggcagcgccatgctggagcaggtggccatgacagagcgctaccgcctgtgggtggacagctgcagcgagatgtttggaggcctggacatctgtgctgtgaaggctgtgcacagcaaggatggccgggactacatcatcgaggtgatggacagctccatgcccctcatcggggagcacgtggaggaggaccggcagctgatggctgacctggtggtgtccaagatgagccagctgcccatgcctgggggcacagcccccagccccctgcggccctgggccccccagatcaagagcgccaagagccctggccaggcccagctgggcccccagctgggccagccccagccccggcccccaccccaggtgtccttcagcccctag

SEQ ID NO: 235441 - DNA, 1743 bp, Artificial Sequence
  derived and/or modified sequence
atgaacttcctgcggcggcggctgagcgacagcagcttcatggccaacctgcccaatgggtacatgaccgacctgcagcggcctgactccagcactagctcccccgcctctcccgccatggagcggaggcaccctcagcctctggcagcaagcttctcaagccctggctcatctctattctcatctctgtcttcggccatgaagcaggcaccccaggccacaagcggtctgatggaaccaccaggcccctctactcctatcgtacagcgtccaagaattctcctcgtaatagacgacgcccataccgattggtccaagtattttcacggaaaaaaggttaacggagaaattgaaatccgcgttgaacaagccgagtttagtgagcttaacctagctgcttacgtgaccgggggttgtatggtagacatgcaggttgtgcggaatgggaccaaggtggtcagccggtcattcaaaccagacttcattctggtgagacagcacgcttattccatggccctcggagaggattatcgatccctggttatcggtctgcagtacggtggactccctgcagtaaattctctttatagtgtttacaatttctgcagtaagccatgggtgttttcccagttaatcaagatcttccatagtctcgggcctgaaaagttccctctggtggaacagacgttcttccccaatcacaagcccatggtgacagcccctcacttcccagttgtggtaaagctgggccacgcccacgcaggcatgggcaaaatcaaagtggaaaatcagctggacttccaggatattactagcgtcgtggccatggctaagacatatgccaccaccgaagcgtttattgatagcaagtatgatattcggatacagaaaattggctcaaactataaagcatacatgaggaccagtatctccggaaattggaaagccaacaccgggtccgctatgctcgagcaggtggcaatgacagagcgctaccgtttgtgggtggactcttgtagtgaaatgtttggcggactggatatatgtgccgtgaaggccgtgcactctaaggacggccgagactatataatagaggttatggatagtagcatgcccttaattggcgaacatgtggaggaggatcggcagcttatggccgacctggtcgtcagcaagatgagtcagctgccaatgcctggggggaccgccccctcacccttgagaccctgggcacctcagatcaaatctgcaaagtctccgggacaggcacagctgggtcctcagctcggtcagccccagccaaggcctcctcctcaaggcgggccgaggcaggcccagagcccacagccccagcgctccgggtcgcccagccagcaacgccttagtccccagggacagcagcccctgtccccccagtcaggatcaccccagcagcagcggagcccaggtagcccccagctgtcaagggctagctccggctcatctccaaatcaggcctctaaaccaggcgccacactggctagtcagccacgtcccccagtgcagggtagatccacatcacagcagggtgaggaaagcaaaaaaccagcacccccccatccgcatctaaataaaagccagagtctcaccaattctttgagcacttcggacacctctcagcggggtactccctccgaggatgaggccaaagccgaaacaattagaaacttaaggaaaagcttcgcaagcttgtttagtgactag

SEQ ID NO: 235442 - DNA, 1743 bp, Artificial Sequence
  derived and/or modified sequence
atgaacttcctgcggcggcggctgagcgacagcagcttcatggccaacttgccaaatggctacatgactgacttacagcgccccgactcttccacctcttcaccagcaagtccagcaatggaacgaaggcacccacaacctctggcagcatctttctcaagtccgggcagcagcctcttctcttccctgtcctccgccatgaaacaagctccacaggccactagcgggttgatggagccaccaggtccatccacacccattgttcagaggccgcgtatcctcctggtgatcgacgacgctcatacagactggtcaaaatatttccatgggaagaaggtaaacggtgaaattgagattagggttgaacaggccgagttctcagagctcaacctggctgcatatgtcaccggaggctgcatggtggatatgcaggtagtccggaatggaacaaaagtagtttcccggtctttcaagcccgacttcatcttggtgagacagcacgcttacagtatggctctcggagaggactacaggagcctggtcatcggactgcagtacggaggtcttccggctgtgaatagtctctattccgtgtataacttttgcagcaaaccctgggtcttcagccagctgatcaagatcttccactctctgggaccggaaaagttcccgttagtcgagcagacttttttcccaaaccataaacctatggtgactgccccccacttccctgtggttgtgaagctgggacacgctcatgctggaatgggtaagattaaggttgaaaatcagctggacttccaagatattacaagcgtggtggcgatggccaagacatacgcgacaactgaagcattcattgactcgaagtacgacatcagaatccaaaagattggcagcaattacaaagcctatatgagaaccagcattagtgggaactggaaagcgaacacaggatcggctatgctagaacaagtcgccatgactgaacgatatcgcctgtgggtggacagttgcagtgaaatgttcggaggcctcgacatttgcgcagtgaaggctgtgcatagtaaggacggtcgtgactatattatcgaagtgatggattcttctatgcctttgatcggtgagcatgtcgaagaagatcgccaattgatggccgacctcgtcgtgagtaaaatgtctcaactgccaatgccgggcggtactgcgcctagccctctgcgcccttgggcccctcaaatcaagagcgccaagtccccggggcaggcgcagctagggcctcaactgggccaaccacagccgcggccaccacctcaaggaggcccacgtcaggcccagagtccgcagccacaacggtctggttcaccatcgcagcagcgcctaagtcctcagggtcaacaacctctcagccctcagtccggctctccacagcaacagcgctccccaggcagtcctcaactttcccgagcctccagtgggtccagccccaaccaggcaagcaagccaggggccactcttgcctcgcagccgaggccaccagtgcagggacgctctacgtctcagcagggggaagaaagtaagaagcctgctcccccgcatccacacctcaacaaaagtcaatccctgaccaactcattgtctacttctgatacaagccagagaggcactccatctgaggatgaagccaaagccgagaccatcagaaacttgcgtaaatcttttgctagcctatttagtgactag

SEQ ID NO: 235443 - DNA, 1335 bp, Artificial Sequence
  derived and/or modified sequence
atgaacttcctgcggcggcggctgagcgacagcagcttcatggccaacttgcctaatggatacatgactgatctgcagcgccccgattcaagcaccagtagcccagctagtcccgccatggaaagaagacacccacagccgctggcggcttctttttccagccctggctccagtttgttctcctccctaagcagtgccatgaaacaagcccctcaggccacatccggtcttatggaacctccaggcccatcgacaccaattgtccagagaccacgtatcctgctcgtgatcgatgatgctcacacagattggagtaagtatttccatgggaagaaggtaaacggagagatcgagattcgggtggagcaggcggagttttcagagctcaatttagctgcctacgttactggcgggtgtatggtggatatgcaggtggttcgtaatggcactaaagttgtgagcaggtcgtttaagccagactttatcctcgtgagacagcatgcctactccatggcattgggcgaggactatcgcagcttggtgatcggcctgcaatacggcgggctcccggcagttaactctctgtattccgtgtataatttttgctcaaaaccatgggtgttcagtcagttaattaagatatttcattcactggggcccgaaaagttcccccttgttgagcagacgttttttcctaaccacaaacctatggtgactgcaccacatttccccgtggttgtgaagctgggtcacgctcatgccggaatgggtaagatcaaagtggagaatcagctcgactttcaggacattacatcggtcgtagcaatggccaagacttacgccacgaccgaggcctttattgactccaagtacgatataagaattcaaaagattggatccaactataaggcatacatgaggacatcaatttctggcaactggaaggcaaacacaggaagcgccatgcttgaacaggtggctatgacagagagataccgattgtgggtggactcctgctctgagatgtttggggggctcgatatctgcgctgttaaggccgtacactcgaaggacggcagggactatattatcgaggtgatggattcctcgatgcccttaattggagagcacgtggaggaggacaggcaactgatggctgatttagtggtctccaagatgtctcaattgccaatgccaggcgggaccgcgccatctcccctgagaccatgggcaccacagataaaatcggccaagtcaccaggccaggcccaactaggcccacagctgggccagccacaaccacggccccccccacaggtctctttctctccgtag

SEQ ID NO: 235444 - DNA, 1743 bp, Artificial Sequence
  derived and/or modified sequence
atgaactttttgcgcaggcgcttgtccgactcctcctttatggcaaatctccctaatgggtatatgactgatctgcagaggcccgacagcagcacttcgtccccagccagcccagctatggagcggaggcatcctcaacctctcgccgcatctttcagctctccaggcagcagtctgttcagtagcctgtcttctgccatgaaacaggcaccccaggcaacctcaggtttgatggagccccctgggccttcgacgccaatcgttcagaggccacggatcctgctcgtgatcgatgacgcccacaccgactggtcaaagtactttcatggaaagaaagtcaacggcgagatcgagatacgggtggagcaggctgagttcagcgagctgaacctggccgcatatgtaacaggcggttgcatggtcgacatgcaggtagtgcgcaatgggactaaagtcgtatctaggtcattcaagccagattttattctggtcaggcagcatgcttatagtatggctctcggtgaagattaccgttctttagtaatcgggctgcagtatggaggcttacctgctgtgaatagcttatactccgtgtataatttctgttcaaaaccatgggtgttcagccagctgatcaagatcttccactccctaggccctgaaaagttcccgctcgtggagcaaaccttttttcccaaccataaaccaatggttacggcccctcactttcctgtcgtcgtaaaactcggccatgctcatgctggcatggggaagatcaaagttgagaaccagctcgacttccaggatatcacatctgtggtggctatggccaaaacatatgcaactacagaggcattcatcgactctaagtacgacattagaatacagaagatcggaagtaactacaaagcgtatatgaggaccagcatctcaggcaactggaaggctaacactgggtcggcgatgctggaacaagttgccatgacagaacgttatagactctgggtggactcatgcagtgagatgttcggaggcctagacatttgtgcagtcaaggcagttcatagtaaggacggacgtgattatatcattgaagtgatggatagctcgatgcccctcatcggagagcatgttgaagaggatagacagctgatggccgacttagtggttagcaagatgtcacagcttcctatgcctggaggcactgcacccagcccattgcggccttgggccccacagattaaatctgcgaaaagccctggccaggcgcagctgggccctcagctcggtcagccccagcccagacccccaccccaaggaggacccaggcaggcccagtccccacagccccagcgctcagggagtcctagtcagcagcgtttatctccccagggccagcagcctctctccccacagagcggttctcctcagcagcagcggagccctggtagcccacaattatctcgggcaagtagtggctcatctccaaatcaggcctccaaacctggggctacactggcttctcagccaaggccacctgtgcagggacggagtacatcacagcagggcgaagaatccaagaagccagccccacctcacccgcacctgaataagtcacagtcactgactaattctctgagcacatctgacaccagccagagagggacaccgagtgaagatgaggcaaaggctgaaacaatccgcaacctacggaaaagctttgcgtctctgttttccgattag

SEQ ID NO: 235445 - DNA, 1743 bp, Artificial Sequence
  derived and/or modified sequence
atgaactttctccgcaggagactgtcagattcaagcttcatggccaacctacctaatggctacatgaccgatctgcagagacctgattccagtactagttcccccgcaagcccagctatggaaagacgacacccccagccgctagccgcatcattctcgagccctggaagttctctgttctcatcactctcgagcgccatgaaacaggcccctcaagccacctctggcctcatggagccacctggtcctagcacgccaatcgttcaaagaccacgcattcttctggtaattgatgacgcacatactgattggagtaagtatttccatggtaaaaaggtgaacggagaaattgaaatccgcgtggagcaggctgagttttcggagctgaaccttgcagcctatgtcaccggcggttgcatggtggacatgcaggtggtgagaaatggtactaaggtcgtcagcagaagttttaagccagactttatcctggtgcgccagcatgcttactccatggccttaggcgaagactaccgctcactcgtgattgggctccagtacggcggattacccgcagtcaatagcctgtacagcgtgtacaacttctgtagcaagccatgggtgttcagccagctgattaagattttccactcacttgggcctgagaagtttcctcttgtggaacaaactttttttcctaaccataagccaatggtgaccgccccacattttcccgtagtggttaaactgggtcacgcgcatgcgggaatggggaagatcaaggttgagaaccagctcgacttccaggacattacctcagtcgtagccatggcaaagacctatgccacaaccgaagcattcatcgactccaaatatgacatcagaatacagaagattggaagcaactataaggcatacatgagaacctctatttccgggaactggaaggcaaacactggcagcgccatgctagaacaggtggccatgactgagcggtataggctgtgggttgacagttgctctgagatgttcggaggtctggatatctgtgccgtcaaggctgtacatagcaaagatggcagggactatattatcgaggtgatggatagtagcatgcctctcattggggaacatgtggaagaagataggcagctcatggccgacctggtggtgtctaagatgagtcagctgcccatgcccggaggaacagccccttccccacttcgaccttgggccccacagatcaaatctgcgaagtctccagggcaggcccaattgggcccacagctaggtcagccccagcctcggccaccaccgcagggcggacctaggcaggcccagtccccacaaccgcagcgcagtggctcgccatctcagcagcgcctgtccccccagggccagcaaccgctgagcccccagtctggaagcccccagcagcaaaggagcccgggaagtccacagttgtcccgcgctagctctggaagttcacccaatcaagcttccaagccgggagctacgctcgcctcccagcctcgccctcctgtgcaaggaaggtcaacctcccaacagggcgaggagtccaagaagccagcccctcctcatcctcacttgaacaaaagccagagtctgactaattctctgagcacgtccgacaccagccagcgaggcactcccagcgaggacgaagccaaggcggagacaatccgcaacttacgcaaatccttcgcctccctgttttccgactag

SEQ ID NO: 235446 - DNA, 1335 bp, Artificial Sequence
  derived and/or modified sequence
atgaacttcctgcggcgaagattaagcgattccagcttcatggctaacctgccgaatgggtatatgaccgacttgcagcggccagactcatccacatcaagtcccgctagcccggctatggaacgtcgccacccacagccactcgctgctagttttagtagccccggttcttccctgttcagtagtttatccagcgcaatgaagcaggccccacaggctacgagcggccttatggaacctccagggccaagcactccaatcgtgcagagacctagaattctgctggtcattgatgacgcacataccgattggagtaaatacttccatggaaagaaggtaaacggcgagatcgaaattagggtcgagcaggcagaattttctgagttaaatttggctgcgtacgtcaccggcggatgcatggtagacatgcaagtcgttcgcaatgggactaaggttgttagcaggtcatttaagccagactttatccttgtgcggcagcatgcttactccatggcgctgggagaggattatagatcccttgtgatcgggttgcagtacgggggtctcccagcagtgaatagcctctattctgtttataatttttgtagcaagccgtgggtgtttagccagttgatcaagatatttcacagccttggtccagagaaatttcctctggtggagcagacattcttccctaatcataagcccatggtgacagcacctcatttcccagtggtggtgaagctcggacacgcgcatgcaggaatgggtaagatcaaggtcgagaatcagctggacttccaggatatcacgagcgtggtcgccatggccaagacgtacgcaactaccgaggcctttattgacagcaaatatgatatccgtattcagaaaatcggtagcaattataaagcctatatgcgtacttctatctccggcaattggaaagccaacactggctccgcgatgctcgaacaggtcgctatgactgaacgttaccgactgtgggtggactcatgctctgagatgtttggcggacttgatatctgcgctgtgaaagccgtgcactctaaagacggcagggattacatcatcgaggttatggatagttctatgcccctaatcggggaacatgtggaagaagacagacagctgatggccgacttggtggtgtctaagatgagccaactgcccatgcctggtggcacagcaccatcacccctgcgcccatgggcacctcaaatcaagtccgcaaaaagtccaggccaggcacaactgggcccacaattaggccagccacagccaaggcctccgccacaggtgtcttttagcccctag

SEQ ID NO: 235447 - DNA, 3039 bp, Artificial Sequence
  derived and/or modified sequence
gtaaataaaggcagctaaagctgactgctggttgcgcaaaatccccctggctcttctggctaaagtcctaccactccctgtacctggcagcagcctgtcttctgggcctcacctacacacgtctgggtaggagccagtcatctccatccatccacagccatgaatttcctccggcgacgtctctctgacagcagcttcatggccaacctgcctaatggctatatgacggacctgcaacgcccagatagctccaccagctcacctgcttcccccgccatggagaggaggcacccccagcccctggctgcctccttctcctctccaggatccagcctttttagctccctctccagtgccatgaagcaggcccctcaggccacctcaggactgatggagcctccaggtccctccacgcccattgttcaaagacccaggatcctgttggtgatcgatgatgcccatacagactggtcgaagtatttccatgggaagaaggtgaatggagagattgagatccgagtggagcaggctgaattctcagagttgaacctagctgcctatgtgaccgggggctgcatggtggacatgcaggtcgtgagaaatgggaccaaagtggtgagcagatccttcaagccagacttcatcctggtccgccagcatgcctacagcatggccctgggggaagactaccgcagcctggtcatcggcctgcagtatggagggctgcctgctgtcaactctctctactccgtctacaacttctgcagcaagccctgggtgttctctcagctcattaagatcttccattccctgggtcctgagaagttcccgcttgtggagcaaacatttttccccaaccataagccaatggtcacagccccacacttcccggtggtagtcaagctgggacatgcccacgctggaatgggaaagatcaaagtggaaaaccagcttgacttccaggacatcaccagcgtggtcgccatggccaaaacctacgccaccaccgaggccttcatcgactccaagtacgacatccgcatccagaaaattggatccaactacaaggcttacatgagaacctccatctctgggaactggaaggccaacacaggctctgccatgctggagcaggtggccatgacagagaggtacaggctgtgggtggacagctgctcggaaatgtttggcggcctggacatctgtgccgtcaaggctgtccacagcaaggatggcagagattacatcatcgaggtaatggacagctcaatgccgctgattggagagcatgtggaagaggacagacagctgatggccgaccttgttgtctccaaaatgagccagctcccgatgccaggaggcacagcgccctcccccctcagaccttgggctccacagattaaatcagcgaaatccccagggcaagcccagctggggcctcagctaggccagccccagccacgcccacctccgcaaggaggccctcgccaagctcagtctcctcagccccagagatctggaagcccctcccaacagaggctctccccacaaggccagcagcccctgagcccccagtccggatctccacagcagcaaaggtcaccaggctctccgcagctatcccgggcatccagtggcagctccccaaaccaggcctccaagccaggtgccaccctcgcctcacagccccggccccctgtgcagggccgtagtacctcccagcagggtgaagagtccaagaagccagcaccaccccatccgcatctcaacaaatctcagtccctgactaacagcctcagcacatccgacacctcccagcgtgggaccccaagtgaagacgaggccaaggctgaaaccatccgcaacctgaggaagtcttttgccagcctgttctctgactaacgccatccaggctgggaggggaagagtgctctgctacactcgtccccctcctgcctcatcttccttctcagccttggttcctgatgggaacagaatggagggcctgagaacatactttctaaatgcctttgacccaggaaccgattatctatatttgttcccattttccttcaccgtgacattccagcattgtctgactgtgaggtgggcctttgagagcctccaggttcctcaaaacaggcctgagcgatgggcatcacaccctctgcctacccacgtgcctgcttacctgccagataaccaagtgagatgtctgcgagtggctagttttcacattcttactagtgtttggctcacctttgggcaaaggccccctctaggccttgccccacctccatcaaacgcagacactgtagtcagacctcagcaatataggaggcaataatcttttaacagtgttttgcaaacaaacaaaaagagaaaaatcccagccaggggaactcgccacctgcccacgctagttccatccacgctcaagacccgcccttagaccaggcaggcaaaggcccccatcacactcggccactagtggggtcctgaggccaagaaagaaaccagaccctgtatgacaagtggggtctttcagaacacgacagaaacaggggggcccttgtaatgccactcatactcagagcattattcttatttggacagccaagggcagatcacaggttattgtaggaataaagactagtttacaaaggagaaagaggccctggacttcccaaggaaagggtcaggttagggctcctgtacccattctgttccaccactgtttgatctctctggcctcccaccaggaatgccgtttcctttttatggatctgttgggaaccagagagaatcaacagatcaatgacataggatccgaagtgcaatgatagtcacttctagtttggcatttcacaaactctgtacagcaaggtattggtaggttactcaatttcaaaagggccccatggccaaatatgtttaggaaccgctgtttgtatttctttttttggagacgcattgtatataatatatgtcaaaggctttcggaattcctgcaggaaagaaatcagctttgttaaatcc

SEQ ID NO: 235448 - DNA, 3126 bp, Artificial Sequence
  derived and/or modified sequence
gctcccgggacccggagcggatcgactggcgggcgccgcgccgaggcaccaccgggcgccgagttcctggcggctcgcacgcaggtaaataaaggcagctaaagctgactgctggttgcgcaaaatccccctggctcttctggctaaagtcctaccactccctgtacctggcagcagcctgtcttctgggcctcacctacacacgtctgggtaggagccagtcatctccatccatccacagccatgaatttcctccggcgacgtctctctgacagcagcttcatggccaacctgcctaatggctatatgacggacctgcaacgcccagatagctccaccagctcacctgcttcccccgccatggagaggaggcacccccagcccctggctgcctccttctcctctccaggatccagcctttttagctccctctccagtgccatgaagcaggcccctcaggccacctcaggactgatggagcctccaggtccctccacgcccattgttcaaagacccaggatcctgttggtgatcgatgatgcccatacagactggtcgaagtatttccatgggaagaaggtgaatggagagattgagatccgagtggagcaggctgaattctcagagttgaacctagctgcctatgtgaccgggggctgcatggtggacatgcaggtcgtgagaaatgggaccaaagtggtgagcagatccttcaagccagacttcatcctggtccgccagcatgcctacagcatggccctgggggaagactaccgcagcctggtcatcggcctgcagtatggagggctgcctgctgtcaactctctctactccgtctacaacttctgcagcaagccctgggtgttctctcagctcattaagatcttccattccctgggtcctgagaagttcccgcttgtggagcaaacatttttccccaaccataagccaatggtcacagccccacacttcccggtggtagtcaagctgggacatgcccacgctggaatgggaaagatcaaagtggaaaaccagcttgacttccaggacatcaccagcgtggtcgccatggccaaaacctacgccaccaccgaggccttcatcgactccaagtacgacatccgcatccagaaaattggatccaactacaaggcttacatgagaacctccatctctgggaactggaaggccaacacaggctctgccatgctggagcaggtggccatgacagagaggtacaggctgtgggtggacagctgctcggaaatgtttggcggcctggacatctgtgccgtcaaggctgtccacagcaaggatggcagagattacatcatcgaggtaatggacagctcaatgccgctgattggagagcatgtggaagaggacagacagctgatggccgaccttgttgtctccaaaatgagccagctcccgatgccaggaggcacagcgccctcccccctcagaccttgggctccacagattaaatcagcgaaatccccagggcaagcccagctggggcctcagctaggccagccccagccacgcccacctccgcaaggaggccctcgccaagctcagtctcctcagccccagagatctggaagcccctcccaacagaggctctccccacaaggccagcagcccctgagcccccagtccggatctccacagcagcaaaggtcaccaggctctccgcagctatcccgggcatccagtggcagctccccaaaccaggcctccaagccaggtgccaccctcgcctcacagccccggccccctgtgcagggccgtagtacctcccagcagggtgaagagtccaagaagccagcaccaccccatccgcatctcaacaaatctcagtccctgactaacagcctcagcacatccgacacctcccagcgtgggaccccaagtgaagacgaggccaaggctgaaaccatccgcaacctgaggaagtcttttgccagcctgttctctgactaacgccatccaggctgggaggggaagagtgctctgctacactcgtccccctcctgcctcatcttccttctcagccttggttcctgatgggaacagaatggagggcctgagaacatactttctaaatgcctttgacccaggaaccgattatctatatttgttcccattttccttcaccgtgacattccagcattgtctgactgtgaggtgggcctttgagagcctccaggttcctcaaaacaggcctgagcgatgggcatcacaccctctgcctacccacgtgcctgcttacctgccagataaccaagtgagatgtctgcgagtggctagttttcacattcttactagtgtttggctcacctttgggcaaaggccccctctaggccttgccccacctccatcaaacgcagacactgtagtcagacctcagcaatataggaggcaataatcttttaacagtgttttgcaaacaaacaaaaagagaaaaatcccagccaggggaactcgccacctgcccacgctagttccatccacgctcaagacccgcccttagaccaggcaggcaaaggcccccatcacactcggccactagtggggtcctgaggccaagaaagaaaccagaccctgtatgacaagtggggtctttcagaacacgacagaaacaggggggcccttgtaatgccactcatactcagagcattattcttatttggacagccaagggcagatcacaggttattgtaggaataaagactagtttacaaaggagaaagaggccctggacttcccaaggaaagggtcaggttagggctcctgtacccattctgttccaccactgtttgatctctctggcctcccaccaggaatgccgtttcctttttatggatctgttgggaaccagagagaatcaacagatcaatgacataggatccgaagtgcaatgatagtcacttctagtttggcatttcacaaactctgtacagcaaggtattggtaggttactcaatttcaaaagggccccatggccaaatatgtttaggaaccgctgtttgtatttctttttttggagacgcattgtatataatatatgtcaaaggctttcggaattcctgcaggaaagaaatcagctttgttaaatccaaa

SEQ ID NO: 235449 - DNA, 1332 bp, Artificial Sequence
  derived and/or modified sequence
atgaatttcctccggcgacgtctctctgacagcagcttcatggccaacctgcctaatggctatatgacggacctgcaacgcccagatagctccaccagctcacctgcttcccccgccatggagaggaggcacccccagcccctggctgcctccttctcctctccaggatccagcctttttagctccctctccagtgccatgaagcaggcccctcaggccacctcaggactgatggagcctccaggtccctccacgcccattgttcaaagacccaggatcctgttggtgatcgatgatgcccatacagactggtcgaagtatttccatgggaagaaggtgaatggagagattgagatccgagtggagcaggctgaattctcagagttgaacctagctgcctatgtgaccgggggctgcatggtggacatgcaggtcgtgagaaatgggaccaaagtggtgagcagatccttcaagccagacttcatcctggtccgccagcatgcctacagcatggccctgggggaagactaccgcagcctggtcatcggcctgcagtatggagggctgcctgctgtcaactctctctactccgtctacaacttctgcagcaagccctgggtgttctctcagctcattaagatcttccattccctgggtcctgagaagttcccgcttgtggagcaaacatttttccccaaccataagccaatggtcacagccccacacttcccggtggtagtcaagctgggacatgcccacgctggaatgggaaagatcaaagtggaaaaccagcttgacttccaggacatcaccagcgtggtcgccatggccaaaacctacgccaccaccgaggccttcatcgactccaagtacgacatccgcatccagaaaattggatccaactacaaggcttacatgagaacctccatctctgggaactggaaggccaacacaggctctgccatgctggagcaggtggccatgacagagaggtacaggctgtgggtggacagctgctcggaaatgtttggcggcctggacatctgtgccgtcaaggctgtccacagcaaggatggcagagattacatcatcgaggtaatggacagctcaatgccgctgattggagagcatgtggaagaggacagacagctgatggccgaccttgttgtctccaaaatgagccagctcccgatgccaggaggcacagcgccctcccccctcagaccttgggctccacagattaaatcagcgaaatccccagggcaagcccagctggggcctcagctaggccagccccagccacgcccacctccgcaagttagtttttcacca

SEQ ID NO: 235450 - protein, 429 aa, Artificial Sequence
  derived and/or modified sequence
MATLSFVFLLLGAVSWPPASASGQEFWPGQSAADILSGAASRRRYLLYDVNPPEGFNLRRDVYIRIASLLKTLLKTEEWVLVLPPWGRLYHWQSPDIHQVRIPWSEFFDLPSLNKNIPVIEYEQFIAESGGPFIDQVYVLQSYAEGWKEGTWEEKVDERPCIDQLLYSQDKHEYYRGWFWGYEETRGLNVSCLSVQGSASIVAPLLLRNTSARSVMLDRAENLLHDHYGGKEYWDTRRSMVFARHLREVGDEFRSRHLNSTDDADRIPFQEDWMKMKVKLGSALGGPYLGVHLRRKDFIWGHRQDVPSLEGAVRKIRSLMKTHRLDKVFVATDAVRKEYEELKKLLPEMVRFEPTWEELELYKDGGVAIIDQWICAHARFFIGTSVSTFSFRIHEEREILGLDPKTTYNRFCGDQEKACEQPTHWKITY

SEQ ID NO: 235451 - DNA, 1290 bp, Artificial Sequence
  derived and/or modified sequence
atggccaccctgagcttcgtgttcctgctgctgggcgccgtgagctggccccccgccagcgccagcggccaggagttctggcccggccagagcgccgccgacatcctgagcggcgccgccagcagaagaagatacctgctgtacgacgtgaacccccccgagggcttcaacctgagaagagacgtgtacatcagaatcgccagcctgctgaagaccctgctgaagaccgaggagtgggtgctggtgctgcccccctggggcagactgtaccactggcagagccccgacatccaccaggtgagaatcccctggagcgagttcttcgacctgcccagcctgaacaagaacatccccgtgatcgagtacgagcagttcatcgccgagagcggcggccccttcatcgaccaggtgtacgtgctgcagagctacgccgagggctggaaggagggcacctgggaggagaaggtggacgagagaccctgcatcgaccagctgctgtacagccaggacaagcacgagtactacagaggctggttctggggctacgaggagaccagaggcctgaacgtgagctgcctgagcgtgcagggcagcgccagcatcgtggcccccctgctgctgagaaacaccagcgccagaagcgtgatgctggacagagccgagaacctgctgcacgaccactacggcggcaaggagtactgggacaccagaagaagcatggtgttcgccagacacctgagagaggtgggcgacgagttcagaagcagacacctgaacagcaccgacgacgccgacagaatccccttccaggaggactggatgaagatgaaggtgaagctgggcagcgccctgggcggcccctacctgggcgtgcacctgagaagaaaggacttcatctggggccacagacaggacgtgcccagcctggagggcgccgtgagaaagatcagaagcctgatgaagacccacagactggacaaggtgttcgtggccaccgacgccgtgagaaaggagtacgaggagctgaagaagctgctgcccgagatggtgagattcgagcccacctgggaggagctggagctgtacaaggacggcggcgtggccatcatcgaccagtggatctgcgcccacgccagattcttcatcggcaccagcgtgagcaccttcagcttcagaatccacgaggagagagagatcctgggcctggaccccaagaccacctacaacagattctgcggcgaccaggagaaggcctgcgagcagcccacccactggaagatcacctactag

SEQ ID NO: 235452 - DNA, 1290 bp, Artificial Sequence
  derived and/or modified sequence
atggccaccctgtcgttcgtcttcctactgctcggagctgtcagttggccgccggcctcagccagtggccaggagttttggccaggccaaagcgccgctgatattctgagcggggcagcgagcaggcgtcgctatcttctatacgatgtgaatcctcccgaaggatttaatctccgccgagatgtttacataagaattgcgtccctgttgaaaacgctgctgaaaactgaggaatgggttttggtcctcccaccctggggccgcctgtaccactggcagagccctgacatacatcaagtacgcatcccttggagcgagttctttgacctgccgtccctcaataagaatatacctgttatcgagtatgagcagtttatagctgagagtggtggcccttttatcgatcaggtgtatgttctgcaatcttatgcagaaggatggaaagagggaacctgggaggagaaagttgacgaacgaccgtgcatcgatcagttgttgtacagccaggacaaacatgagtattatagaggctggttctggggttatgaggagaccagagggctcaacgtaagttgcctctctgttcaaggatcagccagtatcgtagctcctctgcttcttcgcaacacatcggcaagatccgtgatgctcgatagggccgaaaacttgctccatgatcattatggaggcaaggaatactgggatactcggcggtcgatggtgtttgcccgtcatctaagagaagttggcgacgagttcagaagtcggcaccttaactccacagacgacgctgatagaatcccattccaagaagattggatgaagatgaaagttaagcttggctctgcactggggggcccttacttgggcgtgcacctgcgccgtaaagactttatctgggggcacaggcaggatgtcccttctctcgagggggctgtgcggaagattcgcagtctgatgaaaactcataggttagataaggtttttgtagccactgatgccgttagaaaagagtacgaagaactgaagaaactcctacccgagatggtgagatttgagccaacctgggaggaattggagctgtataaagacggcggagtcgcaattattgatcaatggatttgtgcgcacgcaaggttcttcatcgggacttctgtgtcaacattcagctttcgtatacatgaggaacgcgaaatactagggctcgatcccaaaactacatataatcgcttctgcggggaccaggagaaagcctgtgaacagccaacacattggaagattacatactag

SEQ ID NO: 235453 - DNA, 1290 bp, Artificial Sequence
  derived and/or modified sequence
atggccaccctgagctttgtgttcctgctgctgggcgctgtgtcctggcccccagccagcgccagcggccaggagttctggccaggccagagcgctgctgacatcctgtctggagctgccagcagaagacgctacctgctgtatgatgtgaaccccccagagggcttcaacctgcggagagatgtgtacatccgcatcgccagcctgctgaagaccctgctgaagacagaggagtgggtgctggtgctgcccccctggggccgcctgtaccactggcagagcccagacatccaccaggtgcgcatcccctggagcgagttctttgacctgcccagcctgaacaagaacatccctgtgattgaatatgagcagttcatcgccgagagcggcggccccttcatcgaccaggtgtatgtgctgcagagctatgcagagggctggaaggagggcacctgggaggagaaggtggatgagcggccctgcatcgaccagctgctgtacagccaggacaagcatgagtactaccggggctggttctggggctatgaggagacccggggcctgaatgtgtcctgcctgtctgtgcagggcagcgccagcatcgtggcccccctgctgctgaggaacaccagcgcccggtctgtgatgctggacagagctgagaacctgctgcatgaccactacggcggcaaggagtactgggacaccaggaggtccatggtgtttgcccggcacctgcgggaggtgggagatgagttccgcagccgccacctgaacagcacagatgatgctgaccgcatccccttccaggaggactggatgaagatgaaggtgaagctgggcagcgccctgggcggcccctacctgggcgtgcacctgcggaggaaggacttcatctggggccaccggcaggatgtgcccagcctggagggcgctgtgaggaagatccgcagcctgatgaagacccaccggctggacaaggtgtttgtggccacagatgctgtgaggaaggagtatgaggagctgaagaagctgctgcctgagatggtgcgctttgagcccacctgggaggagctggagctgtacaaggatggcggcgtggccatcatcgaccagtggatctgtgcccacgcccgcttcttcatcggcacctctgtgtccaccttctccttccgcatccacgaggagcgggagatcctgggcctggaccccaagaccacctacaaccgcttctgtggggaccaggagaaggcctgtgagcagcccacccactggaagatcacctactag

SEQ ID NO: 235454 - DNA, 1290 bp, Artificial Sequence
  derived and/or modified sequence
atggccaccctgagcttcgtgttcctgctgctgggcgccgtgagctggccccctgcctctgcctctggtcaggagttctggcccggacagagcgcagccgatatcctttcgggcgccgctagcaggcgcagatatttattatacgatgtgaacccaccggagggctttaacttgcggcgggatgtgtacatccgcattgcaagcctactgaaaacgctgctaaagacggaggaatgggtgctggtgctacccccgtggggccggctgtaccactggcagtcaccagatattcatcaggtgaggattccctggtcggagttctttgacctgccaagtctaaacaagaatatcccggtgatagaatatgaacagttcattgctgagtccggaggccctttcatcgaccaggtctacgtgttgcagagctatgccgaagggtggaaggaaggaacttgggaggagaaggttgacgagcggccctgcatcgaccagctcttgtactcgcaagataaacacgaatattataggggctggttctgggggtatgaggagacaagaggtctgaacgtgagctgcttgagcgttcaaggctctgcctccattgtggcgccactcctgctgaggaatacttctgcccgctccgtgatgcttgatcgcgccgagaacctcctccatgaccactacggcggaaaggaatactgggacacccgccgctccatggttttcgccaggcatctgcgcgaagtgggcgatgagttccgaagcagacacctgaattccacagacgatgccgaccgaatacccttccaagaagactggatgaagatgaaggtcaaattaggctcagccttgggcggcccttatttaggcgtccatctgagacgtaaagattttatttggggccacaggcaagacgtgcccagccttgagggcgctgtacgaaagatacgaagtctcatgaagacacaccgattggataaggtgtttgtcgctaccgacgccgtgcggaaagagtatgaggagctgaagaaactgctccccgaaatggtgcgattcgagcccacctgggaagagttggagctttataaggacggcggtgtggccattatcgaccagtggatctgcgcccatgcaaggttttttatcggcacaagcgttagcacatttagcttcaggatccacgaggagagggagatcttgggcttggatccaaaaacaacctataatcgattttgtggggaccaggagaaagcatgcgagcagcccactcattggaaaatcacatattag

SEQ ID NO: 235455 - DNA, 2871 bp, Artificial Sequence
  derived and/or modified sequence
gccggaagtgcgtggccgcccggggccatggcgacactcagcttcgtcttcctgctgctgggggcagtgtcctggcctccggcttctgcctccggccaggagttctggcccggacaatcggcggccgatattctgtcgggggcggcttcccgcagacggtatcttctgtatgacgtcaaccccccggaaggcttcaacctgcgcagggatgtctatatccgaatcgcctctctcctgaagactctgctgaagacggaggagtgggtgcttgtcctgcctccatggggccgcctctatcactggcagagtcctgacatccaccaggtccggattccctggtctgagttttttgatcttccaagtctcaataaaaacatccccgtcatcgagtatgagcagttcatcgcagaatctggtgggccctttattgaccaggtttacgtcctgcaaagttacgcagaggggtggaaagaagggacctgggaagagaaggtggacgagcggccgtgtattgatcagctcctgtactcccaggacaagcacgagtactacagaggatggttttggggttatgaggagaccaggggtctaaacgtctcctgtctgtccgtccagggctcagcctccatcgtggcgcccctgctgctgagaaacacatcagcccggtccgtgatgttagacagagccgagaacctacttcacgaccactatggagggaaagaatactgggatacccgtcgcagcatggtgtttgccaggcacctgcgggaggtgggagacgagttcaggagcagacatctcaactccacggacgacgcagacaggatccccttccaggaggactggatgaagatgaaggtcaagctgggctccgcgctagggggcccctacctgggagtccacctgagaagaaaagatttcatctggggtcacagacaggatgtacccagtctggaaggggccgtgaggaagatccgcagcctcatgaagacccaccggctggacaaggtgtttgtggccacagatgccgtcagaaaggaatatgaagagctaaaaaagctgttacccgagatggtgaggtttgaacccacgtgggaggagctggagctctacaaggacggaggcgttgcgattattgaccagtggatctgcgcacacgccaggttttttattggcacctcagtctcaacattttcttttcggattcatgaggaaagagaaatcctggggttggaccccaagacgacgtacaacaggttctgcggagaccaagagaaggcgtgtgagcaacccacccactggaagatcacctactgaggaggatcctccagggccgctccccggacccgacaggcgcgggtggatgcaggttctgtcgccgtggagtcaccgtctactgccagccgggagctgggcggacaggaccgtccctcgcagggtcccaggcccagaagaggccccacgcctctagagctgggctccgtcctcggcgttgccagccgccatggctgatgaagaggctccgctgctctcgggggtggcggttgttttcaggcagcgtctgtgaacccacagctcggttgccagcagtgcccgcgtggtgacccagaagcaggagtgtttgtcaggctcccgctctggcctttccagccacctttcatgtcttcatattttaagtgcattgaggatagatgcaggcgggtgagctgccctccgtcaggtggacccgggctgacatttccctgggagctggtgcaaggagaagcgtcattttaaatgtctgcagagcgaccaggggcctcatgaatctctccgttgccctccgcgcagcaggaggctgcctgtgtgtttcctcctgggatgcgtgcaaggcagacctggtgctgcaaaggaaagggcctgaggcctcagggagccccgtggagggatgacagttcaggccctactgctggcacgtcagagcactgggaagtttttcagtgacgtctctggggcactcagtggattgtctgtaggaaacttgcagctctgctcctcacaccaggcccggctggccacccaccctcgcccccactggccacccctccctcgccccgactgccccgccccaccctcaccccgactgccccgccctcgcccggctggccgtccctgccctcgccccggctggcaggtgcacatggggcctccaggtctgccattcgctattgagaactagaaatgaggaaggacagttacgctaactccaaaaggctgtctaggatgagctgctttatcagggagctccttgtacccattttacagaaatcatttttaggtctttgtgccaccaccacgaggggcatctgcaaagagggcaacgctagacacagaatccgtggaaggtgcagcagtgcctcaggggtcctcagggtcagggagcccccctcaccctcttggcccgttaccctttgtgactttccaccatggtgtcgtgtgaccctcagtcaggttggtgggggctgagtcctcactgagcagccactttccacatctgctagaggaacagtgacatggacacctgtgacagagagaggacagttaggagggacagacagctcttcctttcggagcctggctagtctaggacatcaccttgctgtgtcttctcaagcttttaaaattgaccctgaacgtgtgacagggtcctatggtgttactcaaagctgtgcagggtaaatgatgacatatttattctttttccatttgttctagaaacagtgcctttttcatcagttgcattttccaggctgagagctgtataaaacattttggactgtgaccatgtaccttcctttttaagaaaaataaactgctttatggaagttggta

SEQ ID NO: 235456 - DNA, 1290 bp, Artificial Sequence
  derived and/or modified sequence
atggccacactcagctttgtgtttttactgcttggcgcagtgagctggccccctgcgagcgcctctgggcaggagttctggccaggccagtcagccgctgatattctgagcggtgctgctagccggcgtcgctatctgctgtatgacgtgaaccccccagaaggattcaatctgcggcgagatgtttacatccgaatcgcctcactcctgaagacactcctaaagacagaagagtgggtgctcgtgctgcccccatgggggcgactctatcattggcaaagtcccgacatacaccaagtgcggattccttggtccgagttttttgacctgccctcattgaacaagaacatacctgttattgaatatgagcaatttattgccgaatccggcggtcctttcatagaccaggtgtacgtgctgcagagctacgccgaaggatggaaagaggggacttgggaggaaaaagtcgacgagaggccatgtattgaccagctgctctactcccaggataaacatgagtactaccggggttggttttggggctacgaagagaccagaggcttaaacgtctcatgcctctctgtgcaaggatctgcatctatcgttgcaccacttcttttgcgaaatactagtgcgaggagcgtgatgctcgacagagctgaaaacctcctgcatgatcactatggtgggaaggagtattgggacacgagacgttccatggtcttcgctagacacctgcgcgaggttggggatgagttccggtcgagacacctgaactccaccgacgatgctgacagaatcccttttcaagaggattggatgaagatgaaagtgaagttaggctccgctctaggaggaccgtatctgggtgtccacctcagacgtaaggactttatctggggtcacaggcaggatgtgcccagtcttgaaggcgctgttagaaaaattcgaagcttgatgaagactcatagactggacaaagtgtttgtcgcgacagatgcggtgagaaaagagtacgaagagctgaagaaactgctgccagagatggtgcgcttcgaacccacttgggaagagctagagctgtataaggatgggggtgtcgctatcattgaccaatggatttgtgcccacgccagattctttattgggacgtcagtgtctacgttcagcttcagaatccacgaggagcgggagatcctgggcctcgaccctaaaacaacatataacaggttctgcggcgatcaagagaaagcttgcgagcaacccactcattggaagatcacatactag

SEQ ID NO: 235457 - protein, 1101 aa, Artificial Sequence
  derived and/or modified sequence
MDECGSRIRRRVSLPKRNRPSLGCIFGAPTAAELVPGDEGKEEEEMVAENRRRKTAGVLPVEVQPLLLSDSPECLVLGGGDTNPDLLRHMPTDRGVGDQPNDSEVDMFGDYDSFTENSFIAQVDDLEQKYMQLPEHKKHATDFATENLCSESIKNKLSITTIGNLTELQTDKHTENQSGYEGVTIEPGADLLYDVPSSQAIYFENLQNSSNDLGDHSMKERDWKSSSHNTVNEELPHNCIEQPQQNDESSSKVRTSSDMNRRKSIKDHLKNAMTGNAKAQTPIFSRSKQLKDTLLSEEINVAKKTVESSSNDLGPFYSLPSKVRDLYAQFKGIEKLYEWQHTCLTLNSVQERKNLIYSLPTSGGKTLVAEILMLQELLCCRKDVLMILPYVAIVQEKISGLSSFGIELGFFVEEYAGSKGRFPPTKRREKKSLYIATIEKGHSLVNSLIETGRIDSLGLVVVDELHMIGEGSRGATLEMTLAKILYTSKTTQIIGMSATLNNVEDLQKFLQAEYYTSQFRPVELKEYLKINDTIYEVDSKAENGMTFSRLLNYKYSDTLKKMDPDHLVALVTEVIPNYSCLVFCPSKKNCENVAEMICKFLSKEYLKHKEKEKCEVIKNLKNIGNGNLCPVLKRTIPFGVAYHHSGLTSDERKLLEEAYSTGVLCLFTCTSTLAAGVNLPARRVILRAPYVAKEFLKRNQYKQMIGRAGRAGIDTIGESILILQEKDKQQVLELITKPLENCYSHLVQEFTKGIQTLFLSLIGLKIATNLDDIYHFMNGTFFGVQQKVLLKEKSLWEITVESLRYLTEKGLLQKDTIYKSEEEVQYNFHITKLGRASFKGTIDLAYCDILYRDLKKGLEGLVLESLLHLIYLTTPYDLVSQCNPDWMIYFRQFSQLSPAEQNVAAILGVSESFIGKKASGQAIGKKVDKNVVNRLYLSFVLYTLLKETNIWTVSEKFNMPRGYIQNLLTGTASFSSCVLHFCEELEEFWVYRALLVELTKKLTYCVKAELIPLMEVTGVLEGRAKQLYSAGYKSLMHLANANPEVLVRTIDHLSRRQAKQIVSSAKMLLHEKAEALQEEVEELLRLPSDFPGAVASSTDKA

SEQ ID NO: 235458 - DNA, 3306 bp, Artificial Sequence
  derived and/or modified sequence
atggacgagtgcggcagcagaatcagaagaagagtgagcctgcccaagagaaacagacccagcctgggctgcatcttcggcgcccccaccgccgccgagctggtgcccggcgacgagggcaaggaggaggaggagatggtggccgagaacagaagaagaaagaccgccggcgtgctgcccgtggaggtgcagcccctgctgctgagcgacagccccgagtgcctggtgctgggcggcggcgacaccaaccccgacctgctgagacacatgcccaccgacagaggcgtgggcgaccagcccaacgacagcgaggtggacatgttcggcgactacgacagcttcaccgagaacagcttcatcgcccaggtggacgacctggagcagaagtacatgcagctgcccgagcacaagaagcacgccaccgacttcgccaccgagaacctgtgcagcgagagcatcaagaacaagctgagcatcaccaccatcggcaacctgaccgagctgcagaccgacaagcacaccgagaaccagagcggctacgagggcgtgaccatcgagcccggcgccgacctgctgtacgacgtgcccagcagccaggccatctacttcgagaacctgcagaacagcagcaacgacctgggcgaccacagcatgaaggagagagactggaagagcagcagccacaacaccgtgaacgaggagctgccccacaactgcatcgagcagccccagcagaacgacgagagcagcagcaaggtgagaaccagcagcgacatgaacagaagaaagagcatcaaggaccacctgaagaacgccatgaccggcaacgccaaggcccagacccccatcttcagcagaagcaagcagctgaaggacaccctgctgagcgaggagatcaacgtggccaagaagaccgtggagagcagcagcaacgacctgggccccttctacagcctgcccagcaaggtgagagacctgtacgcccagttcaagggcatcgagaagctgtacgagtggcagcacacctgcctgaccctgaacagcgtgcaggagagaaagaacctgatctacagcctgcccaccagcggcggcaagaccctggtggccgagatcctgatgctgcaggagctgctgtgctgcagaaaggacgtgctgatgatcctgccctacgtggccatcgtgcaggagaagatcagcggcctgagcagcttcggcatcgagctgggcttcttcgtggaggagtacgccggcagcaagggcagattcccccccaccaagagaagagagaagaagagcctgtacatcgccaccatcgagaagggccacagcctggtgaacagcctgatcgagaccggcagaatcgacagcctgggcctggtggtggtggacgagctgcacatgatcggcgagggcagcagaggcgccaccctggagatgaccctggccaagatcctgtacaccagcaagaccacccagatcatcggcatgagcgccaccctgaacaacgtggaggacctgcagaagttcctgcaggccgagtactacaccagccagttcagacccgtggagctgaaggagtacctgaagatcaacgacaccatctacgaggtggacagcaaggccgagaacggcatgaccttcagcagactgctgaactacaagtacagcgacaccctgaagaagatggaccccgaccacctggtggccctggtgaccgaggtgatccccaactacagctgcctggtgttctgccccagcaagaagaactgcgagaacgtggccgagatgatctgcaagttcctgagcaaggagtacctgaagcacaaggagaaggagaagtgcgaggtgatcaagaacctgaagaacatcggcaacggcaacctgtgccccgtgctgaagagaaccatccccttcggcgtggcctaccaccacagcggcctgaccagcgacgagagaaagctgctggaggaggcctacagcaccggcgtgctgtgcctgttcacctgcaccagcaccctggccgccggcgtgaacctgcccgccagaagagtgatcctgagagccccctacgtggccaaggagttcctgaagagaaaccagtacaagcagatgatcggcagagccggcagagccggcatcgacaccatcggcgagagcatcctgatcctgcaggagaaggacaagcagcaggtgctggagctgatcaccaagcccctggagaactgctacagccacctggtgcaggagttcaccaagggcatccagaccctgttcctgagcctgatcggcctgaagatcgccaccaacctggacgacatctaccacttcatgaacggcaccttcttcggcgtgcagcagaaggtgctgctgaaggagaagagcctgtgggagatcaccgtggagagcctgagatacctgaccgagaagggcctgctgcagaaggacaccatctacaagagcgaggaggaggtgcagtacaacttccacatcaccaagctgggcagagccagcttcaagggcaccatcgacctggcctactgcgacatcctgtacagagacctgaagaagggcctggagggcctggtgctggagagcctgctgcacctgatctacctgaccaccccctacgacctggtgagccagtgcaaccccgactggatgatctacttcagacagttcagccagctgagccccgccgagcagaacgtggccgccatcctgggcgtgagcgagagcttcatcggcaagaaggccagcggccaggccatcggcaagaaggtggacaagaacgtggtgaacagactgtacctgagcttcgtgctgtacaccctgctgaaggagaccaacatctggaccgtgagcgagaagttcaacatgcccagaggctacatccagaacctgctgaccggcaccgccagcttcagcagctgcgtgctgcacttctgcgaggagctggaggagttctgggtgtacagagccctgctggtggagctgaccaagaagctgacctactgcgtgaaggccgagctgatccccctgatggaggtgaccggcgtgctggagggcagagccaagcagctgtacagcgccggctacaagagcctgatgcacctggccaacgccaaccccgaggtgctggtgagaaccatcgaccacctgagcagaagacaggccaagcagatcgtgagcagcgccaagatgctgctgcacgagaaggccgaggccctgcaggaggaggtggaggagctgctgagactgcccagcgacttccccggcgccgtggccagcagcaccgacaaggcctag

SEQ ID NO: 235459 - DNA, 3306 bp, Artificial Sequence
  derived and/or modified sequence
atggatgagtgcggaagtcgcatccgcagacgggtgtctctgcctaagcgcaacaggccgtctctcggttgcattttcggtgctcccaccgccgccgagctggttccaggcgatgaggggaaagaggaagaagagatggtggcggagaaccgacgcaggaaaacagccggggtcctgcctgtcgaggtgcagcccctgttgctttcagactcccccgaatgcctggtacttggcggaggggacaccaatcccgatttgctgagacacatgccgaccgaccggggagttggggatcaacctaacgactccgaggttgacatgtttggcgattacgactcctttactgagaattcctttattgcgcaagtcgatgacctggaacagaagtacatgcaactccccgagcacaagaagcacgcgaccgactttgcaacggaaaacctgtgtagcgaaagtatcaaaaataagctttcgatcaccaccataggcaacttgactgagcttcaaaccgacaagcacaccgaaaatcagtccgggtacgaaggagtcacaattgaacctggggccgatcttctgtatgacgtcccgagtagtcaggccatctatttcgagaacctgcagaatagttccaacgacttgggtgatcactctatgaaggaaagggattggaagtccagctctcacaatactgtgaacgaagaattaccccacaactgtattgaacagccacagcagaacgatgagtcatcctccaaggttcggactagcagcgacatgaataggcgtaaaagcataaaagaccatctgaaaaacgcaatgaccgggaacgcgaaggcacagacgcccatcttcagcagatctaaacagctgaaggacacactgctctccgaagaaattaacgtggctaaaaaaactgtcgagtcgtcttctaacgacctgggtccattctactccctgccctccaaagttcgagacttgtacgctcaattcaagggaatagagaagttgtatgaatggcagcacacatgcctgactctgaatagtgttcaagagcgaaaaaatctcatctactcactgcccacgagcggagggaaaaccctggtggcagagatcctgatgctgcaggaactgctgtgttgccgtaaggacgtcctgatgatcctgccgtacgtcgccattgtgcaagaaaagatcagtggcctgtctagctttggaatcgaactcggttttttcgtcgaggaatatgcaggatccaaggggagatttccacccactaaaaggcgagagaagaagtctctgtacattgcgacaattgagaagggacactctctggtaaactctctcatcgaaaccggtcgcatcgattctctgggcctcgtggtggtggatgaattgcacatgattggagagggctcccggggggccaccctcgagatgacgcttgctaaaattctctatacctcaaagacaacccaaataattggtatgtctgccaccctgaataacgttgaagatctgcagaagtttctgcaagcggaatattataccagtcagtttaggccagtggagctgaaggaatacctaaagataaacgatactatctatgaggttgatagcaaggcagagaatggcatgacgttttcgcgtttattgaattacaaatacagcgacacccttaaaaagatggatcctgatcacctcgttgcattggttaccgaagttatccctaactattcctgcctggtgttttgccctagcaagaaaaattgcgaaaatgtggcagagatgatttgtaaatttctgtcgaaagagtatttaaagcacaaggaaaaagaaaagtgtgaagtgattaagaacctcaaaaacattggaaatgggaacctgtgccccgtcttgaagcgtactatccctttcggcgtcgcttatcatcattctggcttgacctcagatgaacggaagctactcgaggaagcctacagcaccggtgtgctgtgcttattcacctgtacaagcaccttagcggcgggagtcaatctgcccgctcgcagagtgatacttcgtgccccatatgtagctaaggagtttcttaaacgcaaccagtacaaacagatgataggacgggctggccgcgcgggaattgatacaatcggcgaatcgattcttatactccaggaaaaagacaagcaacaagtcctggagttgattactaaacccctggaaaattgttatagtcacctggtgcaggaatttaccaagggaattcaaactctctttctgagcctgatcggcctaaaaattgcaactaatctggacgatatctaccattttatgaatggaacattcttcggcgtccaacagaaggttctgctcaaagaaaaatctctttgggagatcactgttgaaagtctccgatatcttacagagaagggtttgctgcagaaggatacaatctataagagcgaggaagaagtacaatacaacttccacattaccaagctggggcgcgctagttttaagggtacaattgatctggcctattgtgatatcttgtatagagatctgaagaaaggtctagaaggtctggttctggaatctctgctgcaccttatctacctgactactccttatgatcttgtatcccagtgtaacccagactggatgatttacttcagacagttctcccaactgtcccctgcagagcagaacgtggctgcaattctgggcgtctctgagagctttatcggaaagaaggcaagtgggcaggctataggtaagaaagtggacaagaatgtagtgaatcggctgtacttgtcattcgtgttatatactctcctgaaggaaactaacatctggactgtgtctgagaagttcaacatgccacgagggtatatccagaacctgctcactggcaccgcctctttttcctcttgtgttttacacttctgcgaagagcttgaagagttttgggtctatcgagcactcctcgtggaactgaccaaaaaactcacttactgtgtgaaggccgaattgattccattaatggaagtaactggagtgctcgagggacgggcaaaacagctctactctgccggttacaaatcgctcatgcacctagcgaatgccaatccagaggtcttagtgcgcacaatcgatcacttgagtcgtcgccaggccaaacaaatagtgagctcggccaagatgctcttgcacgagaaagccgaagctttacaggaagaagtggaggagctcctgcgcctaccttccgactttccaggcgcagtcgcatcctctactgataaggcttag

SEQ ID NO: 235460 - DNA, 3306 bp, Artificial Sequence
  derived and/or modified sequence
atggatgaatgtggcagccgcatcagaagaagagtgtccctgcccaagaggaaccggcccagcctgggctgcatctttggagcccccacagctgctgagctggtgcctggagatgagggcaaggaggaggaggagatggtggctgaaaatagaagaaggaagacagctggggtgctgcctgtggaggtgcagcccctgctgctgagtgacagcccagaatgtctggtgctgggcggcggggacaccaacccagacctgctgcggcacatgcccacagacagaggagtgggggaccagcccaatgattctgaggtggacatgtttggagactatgacagcttcacagagaacagcttcatcgcccaggtggatgacctggagcagaagtacatgcagctgcctgagcacaagaagcacgccacagactttgccacagagaacctgtgcagcgagagcatcaagaacaagctgagcatcaccaccatcggcaacctgacagagctgcagacagacaagcacacagagaaccagagcggctatgagggcgtgaccatcgagcctggagctgacctgctgtatgatgtgcccagcagccaggccatctactttgagaacctgcagaacagcagcaatgacctgggggaccacagcatgaaggagcgggactggaagagcagcagccacaacacagtgaatgaggagctgccccacaactgcatcgagcagccccagcagaatgatgagagcagcagcaaggtgaggaccagcagtgacatgaacagaaggaagagcatcaaggaccacctgaagaatgccatgactggaaatgccaaggcccagacccccatcttcagccgcagcaagcagctgaaggacaccctgctgtctgaggagatcaacgtggccaagaagacagtggagagcagcagcaatgacctgggccccttctacagcctgcccagcaaggtgcgggacctgtatgcccagttcaagggcatcgagaagctgtatgagtggcagcacacctgcctgaccctgaacagcgtgcaggagaggaagaacctgatctacagcctgcccaccagcggcggcaagaccctggtggccgagatcctgatgctgcaggagctgctgtgctgcaggaaggatgtgctgatgatcctgccctacgtggccatcgtgcaggagaagatcagcggcctgagcagctttggcatcgagctgggcttctttgtggaggagtatgccggcagcaagggccgcttcccccccaccaagagaagagagaagaagagcctgtacatcgccaccatcgagaagggccacagcctggtgaacagcctgattgaaacaggaagaattgacagcctgggcctggtggtggtggatgagctgcacatgattggagagggcagcagaggagccaccctggagatgaccctggccaagatcctgtacaccagcaagaccacccagatcatcggcatgtctgccaccctgaacaacgtggaggacctgcagaagttcctgcaggccgagtactacaccagccagttccggcctgtggagctgaaggagtacctgaagatcaatgacaccatctatgaggtggacagcaaggccgagaatggcatgaccttcagccggctgctgaactacaagtacagcgacaccctgaagaagatggaccctgaccacctggtggccctggtgacagaggtgatccccaactacagctgcctggtgttctgccccagcaagaagaactgtgaaaatgtggccgagatgatctgcaagttcctgagcaaggagtacctgaagcacaaggagaaggagaagtgtgaggtgatcaagaacctgaagaacattggaaatggaaacctgtgccctgtgctgaagaggaccatccccttcggcgtggcctaccaccacagcggcctgaccagtgatgagaggaagctgctggaggaggcctacagcactggagtgctgtgcctcttcacctgcaccagcaccctggccgccggcgtgaacctgcctgcccggcgggtcatcctgcgggccccctacgtggccaaggagttcctgaagaggaaccagtacaagcagatgattggccgggccggccgggccggcatcgacaccatcggggagagcatcctgatcctgcaggagaaggacaagcagcaggtgctggagctgatcaccaagcccctggagaactgctacagccacctggtgcaggagttcaccaagggcatccagaccctcttcctgagcctcatcggcctgaagatcgccaccaacctggatgacatctaccacttcatgaatggcaccttcttcggcgtgcagcagaaggtgctgctgaaggagaagagcctgtgggagatcaccgtggagagcctgcgctacctgacagagaagggcctgctgcagaaggacaccatctacaagtctgaggaggaggtgcagtacaacttccacatcaccaagctgggccgggccagcttcaagggcaccatcgacctggcctactgtgacatcctgtacagagacctgaagaagggcctggagggcctggtgctggagagcctgctgcacctgatctacctgaccaccccctatgacctggtgtcccagtgcaacccagactggatgatctacttccggcagttcagccagctgagccctgctgagcagaatgtggccgccatcctgggcgtgtctgagagcttcatcggcaagaaggccagcggccaggccatcggcaagaaggtggacaagaatgtggtgaacagactctacctgagctttgtgctgtacaccctgctgaaggagaccaacatctggacagtgtctgagaagttcaacatgccccggggctacatccagaacctgctgactggaacagccagcttcagcagctgtgtgctgcacttctgtgaggagctggaggagttctgggtgtaccgggccctgctggtggagctgaccaagaagctgacctactgtgtgaaggccgagctgatccccctgatggaggtgactggagtgctggagggccgggccaagcagctgtacagcgctggctacaagagcctgatgcacctggccaatgccaaccctgaggtgctggtgaggaccatcgaccacctgagccggcggcaggccaagcagatcgtgagcagcgccaagatgctgctgcacgagaaggccgaggccctgcaggaggaggtggaggagctgctgcggctgcccagcgacttccctggagctgtggccagcagcacagacaaggcctag

SEQ ID NO: 235461 - DNA, 3579 bp, Artificial Sequence
  derived and/or modified sequence
gaagtttatgcgtgcttccggtccgcgagccctgagagctaacttggggtcttttcccaaggtggatgtagaagcgggctccggcgtcccactctcccttccatatgggcttagcgtctgggtcactgagaacgacgtctgaatagggccctgggtccttgccatggatgaatgtggttcccgcatccgccggcgggtgtctctccccaaaaggaaccgtccaagcttggggtgtatttttggcgctcccaccgcggccgagctcgtgcccggagatgaggggaaagaggaggaggaaatggtggctgagaacaggaggcggaaaaccgcgggcgtactgccggttgaggtacagccccttctactctcagattccccggaatgtctcgtccttggaggtggtgatacaaacccggacctcctacgtcacatgcccactgacagaggggtgggagaccagcctaatgacagtgaagtggacatgtttggtgactatgatagctttactgaaaactcctttatagctcaagttgacgacctggaacaaaaatatatgcaactccctgaacataagaaacatgctacagactttgccactgaaaatctttgctcggaaagtatcaaaaacaaactcagcattactaccataggcaaccttactgaattacaaactgataagcacacagagaaccagagtggatatgaaggtgtcactattgaacctggagctgatcttttgtatgatgtaccttcctcacaggctatatactttgaaaatttgcagaactcttcaaatgatttgggtgatcattctatgaaagaaagggattggaagtcatcctctcacaacactgtgaatgaggaactgccccataattgcatagagcaaccccagcaaaatgatgagtcctcttccaaagtcagaactagttcagatatgaacaggagaaaaagtattaaagatcatctaaaaaatgccatgactggaaatgcgaaggcccagacaccaatattttctagaagtaaacagctcaaagacactctcctatctgaggaaattaatgttgctaagaaaacagttgagtcatcatcaaatgaccttggtcctttttattcattacccagcaaagtgagagacctttatgcccaattcaagggaattgaaaaattatatgaatggcaacatacttgtttaacattgaattctgtgcaagaaagaaaaaatttaatatattccttgccaacaagtggtggaaaaaccctcgtggctgagattttaatgctgcaagaactgctttgctgtcggaaagatgttttaatgattcttccatatgtggcaattgtccaagaaaagatttcaggtttgtcaagttttggtatagaactcggtttctttgttgaagaatatgctggaagcaaaggaagatttcctccaactaaaagaagggaaaagaaatcactctatattgccactattgaaaaaggacatagcttggtgaactccttgattgaaactggaagaattgacagtctgggtctggttgttgtagacgagttgcacatgattggtgaaggaagccgtggagctacactggaaatgaccctagcaaaaatcctctacactagcaaaacgactcaaattattggtatgagtgcaacattaaacaatgttgaagacctacaaaagtttcttcaagcagaatattataccagtcaatttagaccagttgagttaaaagaatatctgaaaataaatgatacaatatatgaagttgacagcaaagctgagaatggcatgactttttcacgtcttcttaattataagtattctgataccctaaaaaagatggatcctgatcacttggtagcattggtgacagaagttattcccaattattcctgcttagttttttgtcctagtaagaagaactgtgaaaatgtagcagaaatgatatgcaaatttttaagcaaggaatatctgaaacataaggagaaagaaaaatgtgaggtgattaagaacttgaagaatattggcaatggcaacctgtgtcctgttttaaagcgcactatcccatttggagttgcctatcaccacagtggcttaacaagtgatgaaaggaaactcttggaggaggcctactccacaggagtgctctgtctttttacctgcacatctaccctagcggcaggtgtcaacctaccagctcgaagagttattttaagagctccctatgttgctaaggaatttttaaagaggaatcaatataaacagatgattggcagagctggtcgtgctggaatagatactattggggagagtatcctcatattgcaagaaaaagacaaacaacaggtattggagttaataactaaaccattggaaaactgttacagccatcttgttcaggaattcaccaagggaatccaaacattatttctctctttgattggtttgaagattgcaacgaatcttgatgacatctatcatttcatgaatggtacattttttggtgttcagcaaaaggttttattgaaagaaaaaagtctctgggaaataactgttgaatcacttagatacctgacagaaaaaggactcctacaaaaagacactatttataagtctgaagaagaggtccaatataattttcatattacaaagttgggacgtgcttcatttaagggaactatagatttagcttattgtgacattctgtacagagacttgaagaaaggtcttgaaggacttgtgcttgaaagccttcttcatctaatctacctaacaaccccctatgatctggtttcacagtgtaaccctgattggatgatatacttcaggcagtttagccaactcagtccagcagaacaaaatgtagctgccattcttggagtctctgaaagctttattgggaagaaagcatcaggccaagccatcggaaagaaggtggacaagaacgttgtcaacaggctatatctgtcttttgttctttataccttgctcaaagagaccaacatttggactgtatctgaaaaatttaatatgcctcgaggatatatacaaaatcttctcactggaactgcctcattctcatcttgtgtgttacatttctgtgaggagcttgaggagttttgggtttacagagcccttttggtagaacttaccaagaagctgacttactgtgtaaaggcagaattaatccctctcatggaagttactggagttttagagggtcgagcaaaacagttatacagtgcaggttacaaaagtctaatgcacttagctaatgcaaatcctgaagtgctcgtaaggacaattgatcatttatcaagacgccaagccaagcaaattgtttcatcagcaaagatgctgttgcatgaaaaagcagaagccctgcaagaagaggtagaagagttactaagattgccttctgatttccctggtgctgtggcttcttccactgacaaagcatgaagctatctgatgagaattttcatatatgaattatttattgtacatgtgtgttattaaagataacttatactttataaatgaaaaaatacatttcagttatacattaagaa

SEQ ID NO: 235462 - DNA, 3306 bp, Artificial Sequence
  derived and/or modified sequence
atggacgagtgcggcagccggatccggcggcgggtgagcctgcccaaaagaaaccgacccagtctaggctgtatcttcggcgctccgacagccgccgaactcgttcccggtgacgaggggaaagaagaagaggaaatggtagcagaaaacaggaggcggaaaaccgctggggttcttccggtggaggtgcagcccctgcttctgtcggacagccctgaatgtctggtgttaggcggaggagacacgaatccagacctcctacgccatatgcctaccgaccggggggtcggtgaccaacctaatgatagtgaagtagacatgttcggagactatgacagcttcacagagaactctttcattgcccaggttgacgacctcgagcagaagtatatgcagctgcctgagcacaagaagcacgcaactgacttcgccaccgagaacctgtgctctgagtcgatcaaaaacaagctttccattaccacaattggcaacctgaccgagttacaaactgataagcacacagagaatcagagcggctacgagggcgtcaccattgagcctggggccgacctgctgtatgatgttccgagtagccaggcgatttacttcgagaatcttcagaactcttcaaacgatctaggagaccatagcatgaaagaacgggactggaagtcatccagccataatacagttaatgaagagcttccgcacaattgtatcgaacagccacagcagaacgatgaatcatcctccaaggttcggacctccagcgacatgaatcgaaggaagtccatcaaagaccacctcaaaaatgcaatgaccggcaacgccaaggcacaaacccctatcttctctcgttctaagcaattgaaagataccttgcttagcgaagaaatcaatgtagccaagaaaaccgtggagagcagctcaaacgatctgggtcctttttatagcttgccaagcaaagtgcgagacctctatgcgcagttcaagggaattgaaaaactgtatgaatggcagcatacctgcctgaccctgaatagtgtccaggagcggaagaacctgatttactcgcttcccacctcaggagggaagacactagtcgccgagattctaatgttgcaagagttgctgtgctgcagaaaggacgtcctgatgattcttccttatgtggcaattgttcaggagaaaataagtgggctgagctccttcggtattgagctgggcttttttgtcgaagaatacgcaggctccaaagggcgctttcctccaaccaaacgccgggaaaagaaatcattgtacatagctacaatcgagaaagggcactctcttgtgaattctcttatagagaccggtcggattgacagcctgggcctggtggtcgttgacgagctgcatatgatcggggaggggtcccgcggcgcaactcttgaaatgacgcttgccaagatcctgtacacaagtaaaacaactcagattataggtatgtccgccaccttaaataatgtggaggatcttcagaagtttctacaggccgagtattatactagtcagttcagaccagtcgagctgaaagagtacctgaaaattaacgacaccatctatgaggttgacagcaaagccgagaacggaatgaccttcagcagactccttaattataagtacagcgacaccctgaaaaagatggatccggaccacttagttgcattagttaccgaagtaatacctaattacagttgcttggtcttctgtcccagcaaaaaaaattgcgagaatgtagctgagatgatctgtaaattcctgtctaaggaatacctaaaacacaaagaaaaggagaaatgcgaagtcatcaaaaatcttaaaaatattggaaatggaaatttatgcccggtgctcaaacgaaccatcccgtttggagttgcctatcatcactccgggttaacttcagatgaacggaaattgcttgaagaggcatacagtactggagttctctgtcttttcacttgtaccagcaccctggccgccggtgtgaatctgcccgcacggcgagtcattctcagggcgccctatgtagctaaagaattcctcaagagaaaccagtataaacagatgatcggcagggctggccgggcaggcatagatacaattggcgagtcaattcttatcttacaggagaaggacaaacagcaggtgttagagctgattacaaaacccctcgaaaactgttatagccaccttgtgcaggagtttaccaaaggaatccagacactcttcctctccttgattggacttaaaattgccacaaatctggacgatatctatcactttatgaatggtacgttttttggagtgcaacagaaggtattgctgaaggagaaaagcctgtgggagataaccgtggagtctctgcggtacctgacagaaaaaggccttcttcagaaagataccatttataagagcgaggaggaagtgcaatataacttccatatcaccaaactggggagggccagcttcaaaggaacgattgacctagcatactgtgatatcctgtacagggacttgaaaaaaggactggaaggactggtcctggagtctcttttgcatcttatttacttgactacgccttacgatctggtctcacagtgtaatcctgactggatgatttactttcggcagtttagtcaacttagccccgcagagcagaatgtggctgctattctgggggtttccgagtccttcatcggaaaaaaagcaagcggacaagctatcggcaagaaggtggataagaacgtggtgaacagactatacttatcatttgtcttgtacacgctactcaaggagaccaatatctggactgtttccgagaagtttaacatgccccggggctacatacagaacctccttactggaaccgcgagcttcagttcatgcgtgctccacttttgcgaagagctggaggagttctgggtgtaccgtgctctactggttgagcttaccaaaaagctcacatattgtgtaaaggcagaattgattccactgatggaagtcactggagtgctcgagggacgagccaaacagctgtatagtgctggatacaaaagcctcatgcatcttgccaacgctaaccccgaagtgctggtgcgaactatcgatcatctctctcgacgacaggctaagcagattgtatcaagcgctaaaatgctgctccatgagaaggcagaagcgctgcaagaggaagtggaagagttactccgtctccccagtgatttccccggggctgttgcctcgtcgacagataaggcctag

SEQ ID NO: 235463 - DNA, 3306 bp, Artificial Sequence
  derived and/or modified sequence
atggacgagtgtggatcacgaatcagacggagggtcagtctgcctaagaggaaccgcccttccctgggctgcatcttcggggctcctacagctgcggagctggtgcccggtgatgaggggaaggaggaggaggagatggtggctgagaacagaaggcgcaaaactgcaggcgtgctccccgtagaagtgcaaccactcctgctctccgatagccctgaatgcctggtgttaggcggaggagatactaaccctgatctgctgagacacatgcctacagaccggggagtcggggaccaaccaaacgacagcgaagtggatatgtttggggactatgacagtttcacagagaatagttttatcgcacaggtcgatgacctggagcagaagtatatgcagctacccgaacacaagaaacacgcaactgattttgctaccgaaaacctatgttctgagtccattaaaaataagctctctattacaaccatagggaatctcactgaactccagactgacaaacacaccgagaatcaatctgggtatgaaggcgtaactattgagcctggagctgacttgttgtatgatgtaccaagcagtcaggccatctacttcgagaaccttcagaatagcagcaatgatctcggagatcatagcatgaaagaacgcgactggaagagcagcagccataatacagtgaacgaggagctcccccacaattgtatcgagcaacctcagcagaacgatgagagttccagtaaagtgaggaccagctccgacatgaataggcgcaaaagtatcaaggaccatctaaagaacgctatgacaggcaatgcaaaagcccagaccccaatctttagccggtcgaagcagctcaaagatacactcctcagcgaagagataaacgtggctaaaaaaacagtggagtcatcatccaacgaccttggccctttttattcgttgccatcgaaggtcagagacctgtacgcacagtttaagggcatcgagaaattatacgaatggcagcacacgtgccttaccctcaatagtgtacaggagaggaaaaacctgatatactccctgccgacctctgggggaaagactttagtggccgagatattaatgctccaggagctcctgtgttgtagaaaggacgtcctgatgatcttaccctacgttgcaatagttcaggaaaaaatctccggattatccagttttggaattgaacttggtttctttgtcgaggaatatgctggcagtaaagggagattcccccctactaaaagaagggaaaaaaagagcctctatatcgccactatagagaaaggtcactctctcgttaactcactgatcgagaccggaagaattgatagcctgggcctggtggttgtggatgaactccacatgatcggcgaaggcagccgcggtgccacactggagatgaccctcgcgaagatactttatacgtccaagactactcagatcatcggcatgagtgccacgctgaacaatgtggaggatctgcagaagttcctgcaggctgaatactatacttcgcagttccggccagtggagttgaaggagtacttaaagattaacgacacaatctacgaagtggactccaaggccgagaacggcatgacattctcccgccttctgaactacaaatattccgacaccctgaaaaaaatggatcctgaccacttagtcgcactcgttacagaggtgattcccaactactcctgcctcgtgttctgcccgtcaaagaagaattgcgagaacgtcgccgaaatgatatgcaaattcctctccaaggaatatctcaaacataaggagaaggagaagtgcgaggtgattaagaatttgaagaacatcggaaatggcaatctttgccccgtcctaaaaaggacgatccccttcggagtcgcgtatcaccactccggtctgacgtccgatgaaaggaagttgctggaagaagcttactctacaggcgtgctgtgcctgttcacatgtacgagtacgctagctgcaggcgtcaacttgcctgccaggcgagttattctccgcgcaccatacgtggcgaaagaattcctgaagaggaaccagtacaaacagatgataggtcgagcaggaagagctggaatcgacaccatcggtgaaagcatactgatccttcaggagaaggacaaacagcaagtcttggaactgatcactaaacctctagagaattgctattcacatctggtccaggaatttactaaggggattcaaactctgtttttgtctctgatcggactcaagatcgcaaccaatctggacgatatctatcacttcatgaacggaaccttctttggtgtccagcagaaagtgttgctcaaagaaaaatccctgtgggaaataactgtggagtctctgcgttatttgacagagaaaggattgctacaaaaggataccatctacaaatccgaagaagaagttcagtacaacttccatatcactaaacttgggagggcctcgtttaaaggtaccatcgatctggcttattgtgatattttgtatcgcgaccttaagaaaggactcgaagggttggtactagaaagtcttctgcacctaatctaccttaccaccccgtatgatctagtatcccagtgcaatcctgattggatgatctacttcaggcagttttcacaactgtccccagccgagcagaatgtggcagcaatcctgggtgtttccgaatctttcatcgggaaaaaagccagtgggcaggccataggcaagaaagtggacaaaaatgtcgtgaataggctctaccttagctttgtgttgtacaccctgcttaaggagacaaatatttggactgtctcagagaagttcaacatgccacgagggtacatacaaaatctgttgaccggtacagccagcttctcaagctgtgttctgcatttctgcgaggaactggaagagttttgggtgtaccgagccctcctggtggaactgactaaaaagctcacatactgtgtaaaggctgaactgattcctctaatggaagtgacaggggttctggagggcagggcgaaacagctgtattcagctggctacaaaagcctcatgcatctcgctaatgctaacccagaagtccttgtgcgcacaattgaccacctgtctcgtcgtcaggcaaagcagattgtttccagcgctaagatgctgctccacgaaaaggccgaagcccttcaggaagaggtagaagagctactgagacttccctcggactttcccggtgctgtcgcctcttctactgacaaagcatag

SEQ ID NO: 235464 - protein, 1207 aa, Artificial Sequence
  derived and/or modified sequence
MRLTHICCCCLLYQLGFLSNGIVSELQFAPDREEWEVVFPALWRREPVDPAGGSGGSADPGWVRGVGGGGSARAQAAGSSREVRSVAPVPLEEPVEGRSESRLRPPPPSEGEEDEELESQELPRGSSGAAALSPGAPASWQPPPPPQPPPSPPPAQHAEPDGDEVLLRIPAFSRDLYLLLRRDGRFLAPRFAVEQRPNPGPGPTGAASAPQPPAPPDAGCFYTGAVLRHPGSLASFSTCGGGLMGFIQLNEDFIFIEPLNDTMAITGHPHRVYRQKRSMEEKVTEKSALHSHYCGIISDKGRPRSRKIAESGRGKRYSYKLPQEYNIETVVVADPAMVSYHGADAARRFILTILNMVFNLFQHKSLSVQVNLRVIKLILLHETPPELYIGHHGEKMLESFCKWQHEEFGKKNDIHLEMSTNWGEDMTSVDAAILITRKDFCVHKDEPCDTVGIAYLSGMCSEKRKCIIAEDNGLNLAFTIAHEMGHNMGINHDNDHPSCADGLHIMSGEWIKGQNLGDVSWSRCSKEDLERFLRSKASNCLLQTNPQSVNSVMVPSKLPGMTYTADEQCQILFGPLASFCQEMQHVICTGLWCKVEGEKECRTKLDPPMDGTDCDLGKWCKAGECTSRTSAPEHLAGEWSLWSPCSRTCSAGISSRERKCPGLDSEARDCNGPRKQYRICENPPCPAGLPGFRDWQCQAYSVRTSSPKHILQWQAVLDEEKPCALFCSPVGKEQPILLSEKVMDGTSCGYQGLDICANGRCQKVGCDGLLGSLAREDHCGVCNGNGKSCKIIKGDFNHTRGAGYVEVLVIPAGARRIKVVEEKPAHSYLALRDAGKQSINSDWKIEHSGAFNLAGTTVHYVRRGLWEKISAKGPTTAPLHLLVLLFQDQNYGLHYEYTIPSDPLPENQSSKAPEPLFMWTHTSWEDCDATCGGGERKTTVSCTKIMSKNISIVDNEKCKYLTKPEPQIRKCNEQPCQTRWMMTEWTPCSRTCGKGMQSRQVACTQQLSNGTLIRARERDCIGPKPASAQRCEGQDCMTVWEAGVWSECSVKCGKGIRHRTVRCTNPRKKCVLSTRPREAEDCEDYSKCYVWRMGDWSKCSITCGKGMQSRVIQCMHKITGRHGNECFSSEKPAAYRPCHLQPCNEKINVNTITSPRLAALTFKCLGDQWPVYCRVIREKNLCQDMRWYQRCCETCRDFYAQKLQQKS

SEQ ID NO: 235465 - DNA, 3624 bp, Artificial Sequence
  derived and/or modified sequence
atgcgcttgacccatatctgttgctgctgtttgctttaccagctgggctttttgagcaacggcatagtctctgagctgcagttcgcccctgaccgtgaagagtgggaggttgtgttcccagcactgtggaggagagagcccgtggaccccgcaggcggatccggaggcagcgcagatccaggctgggtgaggggggttggaggtgggggaagtgccagagcccaggccgcaggaagcagtcgtgaggtccgaagtgtggccccagtaccattggaagaaccagtcgagggtcggagcgagtctcgccttagaccaccacctccctctgaaggagaggaagacgaggaacttgaatcccaggagcttcccaggggatctagcggcgcagcagcgttgtcacctggcgcaccagcgagttggcagcctccccctccacctcagccccctccttcacctccccctgcacaacatgctgaacccgatggcgatgaagtgctgctgcgaattcctgcattcagtagggacctttacctacttctgagacgggatggaagatttctggcaccccgttttgccgtggagcagaggcctaatcccggacctggtcctacaggggctgctagtgccccacaaccacctgccccacccgatgcaggctgtttttacaccggcgctgtgctgagacaccctggaagcttagcttctttcagcacttgtggtggcggactgatgggattcatacagcttaatgaagactttattttcatcgagcctctcaatgacacgatggctattactgggcacccccatagagtctaccgtcagaaaaggagtatggaggagaaagttacagagaaaagcgcactgcattcacattactgtggcataatcagtgacaaaggcagacctagatctcgcaagatagctgagtccggaaggggcaagcgctacagttataagctgccccaggagtacaacattgagacggtcgtggtggctgatcccgctatggtctcatatcacggagcagacgccgcacggagattcattctaacgatcctcaacatggtgttcaaccttttccagcacaagtccctgtctgtccaggtcaatctgagagtgataaagctgattttgctgcacgagaccccccctgagttatatattggacaccatggcgaaaagatgctagaaagtttctgtaagtggcaacacgaagagtttggaaagaagaatgacatccaccttgaaatgtcaacaaattggggcgaagacatgacaagtgttgatgccgcaattctgatcacccgcaaggatttttgcgtgcacaaggatgagccctgcgatactgtgggtatcgcttatctctcaggaatgtgttccgaaaaaaggaagtgtattattgcggaggacaacggacttaacctggctttcaccattgctcacgaaatgggccacaatatggggataaaccatgacaatgaccatccgagctgtgccgatgggttacatatcatgtctggggaatggattaaagggcagaacctgggggatgtgtcgtggtctcgatgctctaaggaagatctggagcggttcctcagatctaaggctagcaactgtctgttgcagacaaacccccaatcagttaactccgttatggtgccttcaaagcttccagggatgacatacaccgcagacgagcagtgtcaaattttattcggaccactcgcaagcttttgccaagaaatgcagcacgtgatctgcacaggactttggtgcaaagtggaaggagagaaggagtgccggacaaaattggatccacccatggacgggacggattgcgacctgggcaaatggtgtaaagccggtgagtgcaccagccgcacctcggcacctgaacatctggcgggtgaatggagcctgtggagtccgtgctcacgtacctgctctgctgggatcagttccagggaacgaaaatgcccaggcctggacagtgaggcacgagattgcaatggaccgcgaaaacagtacagaatctgtgaaaaccccccttgtcctgccggactccccggttttcgcgactggcagtgtcaggcgtacagtgttcgtactagttcccctaaacatatccttcagtggcaggcagtgctcgacgaggaaaagccctgtgcactgttctgctcccccgtgggcaaggaacagcccattcttctgtccgagaaagtaatggacggtaccagctgcggatatcaaggcctggatatatgtgctaacggtcgctgccagaaagttggatgtgacgggctactgggctcccttgcacgggaagaccactgtggcgtctgtaacgggaatggaaaaagctgtaaaattattaagggtgatttcaaccacacacgaggcgcaggctacgtcgaagttcttgtgatccccgcaggcgcacgaaggatcaaagtggtggaagaaaagccggcacactcttacctggccttgcgagacgccggaaagcagagcattaacagtgactggaagattgaacactcaggcgcatttaatctggcgggtaccaccgtgcattatgtccgcagaggtctctgggagaagataagcgctaaaggcccaactaccgcacctctgcatctcctggtactgctcttccaggatcagaattacggtctccactacgagtacaccattccttctgatcctctgcctgaaaaccagtcatccaaggcacccgagccactgtttatgtggacccacacctcatgggaggactgcgatgctacctgcgggggaggcgagcgcaagactacagtgagttgtacaaaaatcatgtccaaaaatatcagcattgtggataacgagaagtgtaagtacctcacaaaaccagagcctcagatcaggaagtgcaacgagcaaccatgccaaacacgctggatgatgacagaatggaccccgtgtagcaggacctgcggtaaggggatgcagagtagacaagtcgcctgcactcaacagttgtccaacggcacactgatcagggcaagagaacgggactgcatcggacccaagccagcttctgcccagaggtgtgaagggcaggattgcatgactgtgtgggaggccggagtctggagtgaatgctcagtcaaatgcggcaagggcatccgacacagaaccgtgcggtgtactaatcccaggaagaagtgtgttctgtccacgcggcctagggaggcagaagactgcgaggattattcaaaatgctatgtgtggcggatgggtgattggtctaaatgcagtatcacctgcggaaagggcatgcaaagcagagtaattcaatgtatgcataaaattaccggtcgtcacggcaatgagtgcttttccagcgagaagcccgctgcgtaccgcccttgccacttgcagccttgtaacgagaaaatcaacgtgaacacaattacttctcccagactagcagcgcttaccttcaagtgcctgggtgatcagtggcctgtctattgtcgagtcattcgagaaaaaaatctgtgccaggatatgaggtggtaccagagatgttgcgaaacctgccgtgacttctacgcccagaaactccagcagaaatcctag

SEQ ID NO: 235466 - DNA, 3624 bp, Artificial Sequence
  derived and/or modified sequence
atgaggttgactcacatttgttgctgttgccttctgtaccaactgggtttccttagtaatggcatcgtttctgaactgcagttcgccccagacagggaggagtgggaggtcgtgtttccagcactttggaggcgggagcctgtcgacccagcgggaggatcaggagggagcgctgaccctggatgggtgcgcggcgtaggagggggcggcagtgccagagcacaggcagcagggtcttcccgggaggtcaggtccgtcgctcccgtccctctggaagagcccgttgaggggcggagcgagtcccgtctgcgaccccccccaccttccgagggggaggaggacgaggagctggaatcgcaggagctcccccgtggcagcagtggagcagccgccctcagccctggcgccccggccagctggcagccccctcccccaccacagccaccgcctagcccccctcccgctcaacatgccgagccagacggcgatgaggtcttgctgcggatacctgctttttcacgggatttatacctgctcctgcggagagacggccgttttctggctccacgttttgccgtcgaacagcgacccaacccgggccctgggccaacaggggcggcctcagccccccaaccgcctgccccgccggatgcaggttgcttttatactggtgcagtcttacgacacccggggagcctcgctagcttttccacttgcggcggcggattgatgggctttatccaactgaacgaggatttcatctttattgaaccgcttaacgacacaatggctatcaccggacaccctcaccgcgtgtaccggcagaagagatctatggaggagaaagtaaccgagaagtcagctcttcattcccactactgcggaattatctccgataagggtagaccaaggtcaaggaaaatcgcagagtctggacggggtaaaagatattcctataagctaccacaagaatacaacattgaaactgtcgtggttgctgaccctgcgatggttagctatcacggtgcggacgctgctcggcgcttcatcttgacaattctgaatatggtctttaaccttttccaacataaaagcctcagcgtccaggtcaacctccgggttataaagctgattttactccacgaaacaccaccagaactttacattggccaccacggcgagaagatgttggaatccttctgtaaatggcaacacgaggagtttggcaagaagaatgatattcacctagaaatgtctacaaattggggggaagatatgaccagcgtcgacgctgccatcctcattacgaggaaagatttttgtgtccacaaggacgaaccctgtgataccgtgggcattgcatacctctcaggcatgtgctctgaaaaaaggaaatgtattattgccgaagacaacgggctgaacctggccttcaccatcgcccatgagatgggccataacatgggtatcaaccacgataacgaccatccttcttgtgccgacggactccacattatgtctggagaatggattaaaggccagaacctgggtgatgtcagctggagtcggtgttccaaggaggacctggaacgcttccttagaagcaaggcttccaactgcttgctccagacaaacccgcagagcgtgaactccgtgatggtgcctagtaaactcccagggatgacttacaccgccgacgagcaatgccaaatactctttggacctctggccagtttctgccaggaaatgcaacacgttatttgtacagggctttggtgcaaggtggagggcgagaaggaatgtcgcaccaagctcgatccgcccatggacggaaccgattgtgatctgggcaagtggtgcaaggctggcgaatgtacctcaaggacatcagcacctgagcacttagcaggggaatggtccctctggagcccctgttcaaggacctgcagcgccggtatcagctcaagggaacggaagtgccccggcttggactcagaagccagggattgtaacgggccccgaaagcagtatagaatttgtgaaaatcctccctgtccagctgggcttcctggattcagggactggcagtgtcaggcgtactctgtgaggacgtctagccctaagcacatactgcagtggcaggctgtgttggacgaagaaaagccttgcgcgctcttctgcagcccggtcggaaaagagcagcctatcctgctcagtgaaaaggtcatggacggcactagctgtggctaccaggggttggatatttgcgcaaatggtcgctgccaaaaagtgggatgtgacggactacttggctcccttgcgcgggaggaccactgcggagtgtgcaatgggaacgggaaaagctgtaagattattaagggagactttaatcacacccgaggggccgggtacgtcgaggtgctcgtgattcccgctggtgcccgccgcataaaagtagtcgaggagaaaccagctcactcatatctggcgcttcgcgacgctggaaaacaaagcataaatagcgattggaagattgaacacagcggggcattcaatttagccggcacaacagtgcattatgttaggcgcggactgtgggaaaaaattagtgcgaaaggaccgactactgctccactgcacttacttgtcctcctctttcaggatcagaattatggacttcattatgagtataccatccctagcgatccccttccggagaatcagtcgagcaaggcccctgaacctttatttatgtggacgcacacatcctgggaggactgcgacgcaacctgcggtggcggcgagcgcaagacaaccgtttcctgcaccaaaatcatgagtaagaacatttctatagtggacaatgagaaatgcaaatacctaacgaaacctgaacctcaaatccggaaatgcaacgaacagccatgccagacacggtggatgatgaccgagtggactccctgctcaagaacctgtgggaagggcatgcagagccggcaagtggcttgcacgcagcagctcagcaacggcacccttattagggccagggaacgagactgtattggtcccaaacccgcctctgcacagcgatgcgaaggccaggattgcatgactgtttgggaagccggcgtctggtccgaatgctccgtgaaatgcggaaaggggatccggcacagaactgtacggtgtacaaatccacgtaagaagtgcgtgttaagcacacggcctcgagaagcagaagattgcgaggattattctaagtgttacgtgtggcgcatgggtgattggagcaagtgtagtataacttgtggcaaagggatgcagagtagagtcatccagtgcatgcataaaattacagggcggcacggcaatgaatgcttttcgtcggagaagcctgctgcctacaggccttgtcacctgcagccatgcaacgagaagattaatgtgaatactattacctcacctagactggctgccctgacctttaaatgtctgggagaccaatggccagtgtattgtcgggtcatccgagagaaaaatctgtgtcaagacatgcgatggtaccagcggtgttgtgagacatgtcgggacttttatgcccagaagctgcagcagaagagctag

SEQ ID NO: 235467 - DNA, 3624 bp, Artificial Sequence
  derived and/or modified sequence
atgcggttaacccacatttgctgttgttgcctgctttaccagctcggctttctttcaaatggcattgtgtccgaactccaattcgccccagatagagaagaatgggaagtagtctttccagcactttggaggcgcgaacctgtagacccggccggggggagcggtgggtccgctgatccggggtgggtgcgcggcgtaggtgggggaggctcagcccgtgctcaggccgcaggttccagtcgtgaggtccgttcagtcgcccccgttccactggaggaacccgtcgaaggccgctccgaatccagactacgccctcccccccctagtgaaggcgaagaagatgaagagttagaatcacaggaactgccacgcgggagctcaggagccgccgctctttccccaggtgcccccgccagctggcagccccccccgccaccccagccgcccccgtcacctccacccgcgcaacatgctgagcccgacggtgatgaggtcctgctcagaattccagccttctctcgcgacttgtacctgctgcttcgacgcgacggccggtttctcgcccccagattcgcagtggagcagcgaccaaacccaggcccaggaccaacaggagccgcttctgcaccgcaaccacccgctccacccgatgccggttgcttttatacgggagctgtgttacgccaccctgggagtctggcctccttttccacttgcggcgggggactcatgggattcatccagctgaacgaggacttcatttttatcgaaccactgaatgacacaatggccatcactgggcatccacaccgcgtgtaccgccagaagaggtcaatggaagaaaaagtgaccgaaaaatctgccttacattcccactattgtggaattatttcagacaaaggtaggccgcgctcccgtaaaatcgcagaatcaggtcgcggtaagcgctattcctataaattgccccaggagtacaatattgaaaccgtggttgttgccgaccctgcgatggtttcctatcatggcgctgatgcagcccgacgttttattttaacaatcctgaacatggtctttaatcttttccaacacaagtcattgagtgtgcaggtcaacctacgcgtaattaagctgatcctgcttcatgagacccctcccgagttgtatattggacaccacggcgagaagatgcttgaaagcttctgcaaatggcagcacgaagaattcggcaagaagaatgatatacacctggaaatgtccacaaactggggggaggatatgacttcagtagatgccgccattctaattactagaaaagatttttgtgtacacaaggacgaaccatgcgatacagtggggatagcatacttaagcggtatgtgctcagagaagcgaaaatgtatcatcgccgaagacaacggccttaacctggcttttaccattgcgcacgaaatgggacataacatggggataaatcacgataatgatcacccaagctgtgctgacggccttcacattatgagtggtgaatggattaagggacagaatctcggtgacgtcagttggtctcgatgctctaaagaagacctcgaacgatttctgcgcagtaaggcctccaactgcctcctccagacaaatcctcaaagcgttaactcagtaatggtcccttccaaactgccaggcatgacctacacagctgatgaacagtgtcagatactcttcggccctttagccagcttctgccaggagatgcagcacgttatttgcacaggactgtggtgcaaggtagagggggaaaaggagtgtagaacaaaactggacccccctatggatggtaccgactgcgatcttggcaaatggtgtaaagcaggtgagtgcacgagcagaacgtcggctcctgaacacctggccggcgagtggtctttatggtcaccttgtagcaggacatgctccgccggcatatcatcgagagagagaaagtgcccagggttggactccgaagctcgcgattgcaacggacccaggaaacagtacaggatttgtgaaaacccaccttgccctgctgggttacccggtttcagagattggcagtgtcaagcatactctgtccgcaccagttctcccaaacacatcttgcagtggcaggcagtgttagatgaggagaagccctgcgccctgttctgttctccagtgggcaaggaacaacctatactgctatcagagaaagtgatggatgggaccagttgcggctaccagggacttgatatctgtgcaaacggacgctgtcaaaaagtgggatgtgatggacttttagggtctcttgccagggaagaccattgcggcgtgtgtaacggtaacggaaagtcttgcaagattattaagggcgattttaaccacactcgaggtgcaggatacgtggaagttctggtcatcccagccggcgcccgacgtattaaagtcgttgaagagaagccggcgcatagctacctcgccctcagagacgcaggaaaacaatctattaatagcgactggaaaattgaacacagcggtgcctttaatctcgcgggtactacagtccattatgtacgcagaggattatgggaaaagatttccgcaaaggggccaaccaccgcgccgcttcacctgcttgtactcctgttccaggaccagaactacgggttgcattacgagtacacgattcccagcgaccctctccctgaaaatcagtcatctaaggccccagaaccgctcttcatgtggacgcacactagctgggaagactgcgacgccacttgtgggggcggtgagcgaaagaccacagtatcctgcactaagatcatgagcaaaaatatatcgatagtggacaatgaaaaatgcaagtatctgaccaagcccgagcctcaaattagaaagtgcaatgaacagccgtgtcagactagatggatgatgaccgaatggaccccttgctctcgaacctgcggaaaggggatgcaaagtaggcaagtggcctgcacacagcaactctcaaatggaacactgatcagggcaagggaaagagactgcattggtcccaaaccggcaagtgcccagcgatgtgagggccaagattgtatgacagtgtgggaggcaggcgtttggtccgaatgctcagtgaagtgcggcaaaggaatcagacatcggaccgtgcgatgtacgaacccacgaaaaaagtgtgtcctgagtacaagacccagagaagccgaagattgcgaagactatagcaaatgctacgtctggagaatgggagactggagtaaatgcagcattacttgtggaaaaggaatgcaatcccgagtcatccagtgcatgcacaaaattaccggaaggcacggcaacgaatgcttttcaagcgagaagcctgccgcctatcgaccgtgtcaccttcagccttgcaacgagaaaatcaatgtgaacaccataaccagccccagactcgcggctcttacatttaaatgcttgggcgatcaatggcctgtttactgtagagtcatccgtgagaaaaacttatgtcaagacatgcgatggtaccaacggtgctgtgagacctgtagagacttctatgcccaaaagctccaacagaaatcctag

SEQ ID NO: 235468 - DNA, 5234 bp, Artificial Sequence
  derived and/or modified sequence
ggcagacaaagggcctgggcaaattcgccgcccggcctcctagcgctccggggaggccgctgcgccccggagtggatcgcgctggaggcgtgcgccgggcgagaagccgcggccgcgggagcgcagtatggggaagaaccgcgagatgcgcctgactcacatctgctgctgctgcctcctttaccagctggggttcctgtcgaatgggatcgtttcagagctgcagttcgcccccgaccgcgaggagtgggaagtcgtgtttcctgcgctctggcgccgggagccggtggacccggctggcggcagcgggggcagcgcggacccgggctgggtgcgcggcgttgggggcggcggaagcgcccgggcgcaggctgccggcagctcacgcgaggtgcgctctgtggctccggtgcctttggaggagcccgtggagggccgatcagagtcccggctccggcccccgccgccgtcggagggtgaggaggacgaggagctcgagtcgcaggagctgccgcggggatccagcggggctgccgccttgtccccgggcgccccggcctcgtggcagccgccgcctcccccgcagccgcccccgtccccgcccccggcccagcatgccgagccggatggcgacgaagtgttgctgcggatcccggccttctctcgggacctgtacctgctgctccggagagacggccgcttcctggcgccgcgcttcgcagtggaacagcggccaaatcccggccccggccccacgggggcagcatccgccccgcaacctcccgcgccaccagacgcaggctgcttctacaccggagctgtgctgcggcaccctggctcgctggcttctttcagcacctgtggaggtggcctgatgggatttatacagctcaatgaggacttcatatttattgagccactcaatgatacaatggccataacaggtcacccacaccgtgtatataggcagaaaaggtccatggaggaaaaggtcacagagaagtcagctcttcacagtcattactgtggtatcatttcagataaaggaagacctaggtctagaaaaatagcagaaagtggaagagggaaacgatattcatacaaattacctcaagaatacaacatagagactgtagtggttgcagacccagcaatggtttcctatcatggagcagatgcagccaggagattcattctaaccatcttaaatatggtatttaaccttttccaacacaagagtctgagtgtgcaggtcaatcttcgtgtgataaagcttattctgctccatgaaactccaccagaactatatattgggcatcatggagaaaaaatgctagagagtttttgtaagtggcaacatgaagaatttggcaaaaagaatgatatacatttagagatgtcaacaaactggggggaagacatgacttcagtggatgcagctatacttataacaaggaaagatttctgtgtgcacaaagatgaaccatgtgatactgttggtatagcttacttgagtggaatgtgtagtgaaaagagaaaatgtattattgctgaagacaatggcttgaatcttgcttttacaattgctcatgaaatgggtcacaacatgggcattaaccatgacaatgaccacccatcgtgtgctgatggtcttcatatcatgtctggtgaatggattaaaggacagaatcttggtgacgtttcatggtctcgatgtagcaaggaagatttggaaagatttctcaggtcaaaggccagtaactgcttgctacaaacaaatccgcagagtgtcaattctgtgatggttccctccaagctgccagggatgacatacactgctgatgaacaatgccagatcctttttgggccattggcttctttttgtcaggagatgcagcatgttatttgcacaggattatggtgcaaggtagaaggtgagaaagaatgcagaaccaagctagacccaccaatggatggaactgactgtgaccttggtaagtggtgtaaggctggagaatgtaccagcaggacctcagcacctgaacatctggccggagagtggagcctgtggagtccttgtagccgaacctgcagtgctgggatcagcagtcgagagcgcaaatgtcctgggctagattctgaagcaagggattgtaatggtcccagaaaacaatacagaatatgtgagaatccaccttgtcctgcaggtttgcctggattcagagactggcaatgtcaggcttatagtgttagaacttcctccccaaagcatatacttcagtggcaagctgtcctggatgaagaaaaaccatgtgccttgttttgctctcctgttggaaaagaacagcctattcttctatcagaaaaagtgatggatggaacttcttgtggctatcagggattagatatctgtgcaaatggcaggtgccagaaagttggctgtgatggtttattagggtctcttgcaagagaagatcattgtggtgtatgcaatggcaatggaaaatcatgcaagatcattaaaggggattttaatcacaccagaggagcaggttatgtagaagtgctggtgatacctgctggagcaagaagaatcaaagttgtggaggaaaagccggcacatagctatttagctctccgagatgctggcaaacagtctattaatagtgactggaagattgaacactctggagccttcaatttggctggaactaccgttcattatgtaagacgaggcctctgggagaagatctctgccaaaggtcctactacagcacctttacatcttctggtgctcctgtttcaggatcagaattatggtcttcactatgaatacactatcccatcagaccctcttccagaaaaccagagctctaaagcacctgagcccctcttcatgtggacacacacaagctgggaagattgcgatgccacttgtggaggaggagaaaggaagacaacagtgtcctgcacaaaaatcatgagcaaaaatatcagcattgtggacaatgagaaatgcaaatacttaaccaagccagagccacagattcgaaagtgcaatgagcaaccatgtcaaacaaggtggatgatgacagaatggaccccttgttcacgaacttgtggaaaaggaatgcagagcagacaagtggcctgtacccaacaactgagcaatggaacactgattagagcccgagagagggactgcattgggcccaagcccgcctctgcccagcgctgtgagggccaggactgcatgaccgtgtgggaggcgggagtgtggtctgagtgttcagtcaagtgtggcaaaggcatacgtcatcggaccgttagatgtaccaacccaagaaagaagtgtgtcctctctaccagacccagggaggctgaagactgtgaggattattcaaaatgctatgtgtggcgaatgggtgactggtctaagtgctcaattacctgtggcaaaggaatgcagtcccgtgtaatccaatgcatgcataagatcacaggaagacatggaaatgaatgtttttcctcagaaaaacctgcagcatacaggccatgccatcttcaaccctgcaatgagaaaattaatgtaaataccataacatcacccagactggctgctctgactttcaagtgcctgggagatcagtggccagtgtactgccgagtgatacgtgaaaagaacctatgtcaggacatgcggtggtatcagcgctgctgtgaaacatgcagggacttctatgcccaaaagctgcagcagaagagttgacctctagcaggctggctggatcacagctcttggcaattacattatttataaacacacacactagcatgtttttcagaccaaatattatcagattacatataatttaatcaaattaatttatttttttgcctgccaaacatccaatgtggtgcttgttttggttacacaaacattttgatttatactatatggcttcataaataattttatatgaatgaattagttggatccagtaatataataaaaagaaaaaggaaaaaaatagatcattatacttaaaacaagttttcgttgtttgttagggctatctctaaggtgctactctctccccaccaataacattgaattatccagaatgtatactgacttagcataatagtttaggtgtatatgaagagaaactatttttgttttttggtgtcctgctgcagaattagcccattttctgtcacctgcaggagatgtgtaaacataatgaacctcatgctgttgaacaggtttttagagaatgtattatgaatttggttcagatttatagacatccataggaaaaattctgctgtaattataaccttattttgatatggaaaagaaaagtcaaaatagagactttgatcatgttcatgaacatgtacttgaacacaagtattgtaacaatgaaacactgtaatgatttacactgaatcacaattgcactgttgatatagtgtagagaaatcgttagaaatggtgacatcttacaaaaaatgtgtattattttaacatgttatcactagattttagctttttttaaatatttttaacaaagaaaacattgatccacccatttccctgtatctttttagcagatttattaaagagtatagtacttagcctcacgaatcataattagaaaatttactagtatttctcagccttttccctaggaacaaggaaaaacagaaagcatataatacggtggtcgtttcattgtgtttttcttccttttaaaaattaaaaagttttacaattatgtgaaacgttcaaaagccagcttaaaatttttcttgtgagaaaatattatacatgattcacatgatttcttagatttttcaataaaatatgtaaaacttcccactgagagacaattcttcatagacttgtcacatatccacatgtctgatgaacaaaggtactgtctacttttgttctggagtatcttctagaggatgtttatagagtgaactgccttggaagatagtatgtctcttgggagcaaagggcaaacatacttctcattataaaagtttcaggttccctaaaattggggtttctttactataagacaatccaatgtatgttctgaggtcacctggctctcttcatgtcaccctttgggaaatggggctcaacgagccagtacaggaaaagctgattccctggctactactatcgctgtgagtaataaagtcctttgtgtctaatg

SEQ ID NO: 235469 - DNA, 3624 bp, Artificial Sequence
  derived and/or modified sequence
atgagactgacccacatctgctgctgctgcctgctgtaccagctgggcttcctgagcaacggcatcgtgagcgagctgcagttcgcccccgacagagaggagtgggaggtggtgttccccgccctgtggagaagagagcccgtggaccccgccggcggcagcggcggcagcgccgaccccggctgggtgagaggcgtgggcggcggcggcagcgccagagcccaggccgccggcagcagcagagaggtgagaagcgtggcccccgtgcccctggaggagcccgtggagggcagaagcgagagcagactgagaccccccccccccagcgagggcgaggaggacgaggagctggagagccaggagctgcccagaggcagcagcggcgccgccgccctgagccccggcgcccccgccagctggcagccccccccccccccccagcccccccccagccccccccccgcccagcacgccgagcccgacggcgacgaggtgctgctgagaatccccgccttcagcagagacctgtacctgctgctgagaagagacggcagattcctggcccccagattcgccgtggagcagagacccaaccccggccccggccccaccggcgccgccagcgccccccagccccccgccccccccgacgccggctgcttctacaccggcgccgtgctgagacaccccggcagcctggccagcttcagcacctgcggcggcggcctgatgggcttcatccagctgaacgaggacttcatcttcatcgagcccctgaacgacaccatggccatcaccggccacccccacagagtgtacagacagaagagaagcatggaggagaaggtgaccgagaagagcgccctgcacagccactactgcggcatcatcagcgacaagggcagacccagaagcagaaagatcgccgagagcggcagaggcaagagatacagctacaagctgccccaggagtacaacatcgagaccgtggtggtggccgaccccgccatggtgagctaccacggcgccgacgccgccagaagattcatcctgaccatcctgaacatggtgttcaacctgttccagcacaagagcctgagcgtgcaggtgaacctgagagtgatcaagctgatcctgctgcacgagaccccccccgagctgtacatcggccaccacggcgagaagatgctggagagcttctgcaagtggcagcacgaggagttcggcaagaagaacgacatccacctggagatgagcaccaactggggcgaggacatgaccagcgtggacgccgccatcctgatcaccagaaaggacttctgcgtgcacaaggacgagccctgcgacaccgtgggcatcgcctacctgagcggcatgtgcagcgagaagagaaagtgcatcatcgccgaggacaacggcctgaacctggccttcaccatcgcccacgagatgggccacaacatgggcatcaaccacgacaacgaccaccccagctgcgccgacggcctgcacatcatgagcggcgagtggatcaagggccagaacctgggcgacgtgagctggagcagatgcagcaaggaggacctggagagattcctgagaagcaaggccagcaactgcctgctgcagaccaacccccagagcgtgaacagcgtgatggtgcccagcaagctgcccggcatgacctacaccgccgacgagcagtgccagatcctgttcggccccctggccagcttctgccaggagatgcagcacgtgatctgcaccggcctgtggtgcaaggtggagggcgagaaggagtgcagaaccaagctggacccccccatggacggcaccgactgcgacctgggcaagtggtgcaaggccggcgagtgcaccagcagaaccagcgcccccgagcacctggccggcgagtggagcctgtggagcccctgcagcagaacctgcagcgccggcatcagcagcagagagagaaagtgccccggcctggacagcgaggccagagactgcaacggccccagaaagcagtacagaatctgcgagaaccccccctgccccgccggcctgcccggcttcagagactggcagtgccaggcctacagcgtgagaaccagcagccccaagcacatcctgcagtggcaggccgtgctggacgaggagaagccctgcgccctgttctgcagccccgtgggcaaggagcagcccatcctgctgagcgagaaggtgatggacggcaccagctgcggctaccagggcctggacatctgcgccaacggcagatgccagaaggtgggctgcgacggcctgctgggcagcctggccagagaggaccactgcggcgtgtgcaacggcaacggcaagagctgcaagatcatcaagggcgacttcaaccacaccagaggcgccggctacgtggaggtgctggtgatccccgccggcgccagaagaatcaaggtggtggaggagaagcccgcccacagctacctggccctgagagacgccggcaagcagagcatcaacagcgactggaagatcgagcacagcggcgccttcaacctggccggcaccaccgtgcactacgtgagaagaggcctgtgggagaagatcagcgccaagggccccaccaccgcccccctgcacctgctggtgctgctgttccaggaccagaactacggcctgcactacgagtacaccatccccagcgaccccctgcccgagaaccagagcagcaaggcccccgagcccctgttcatgtggacccacaccagctgggaggactgcgacgccacctgcggcggcggcgagagaaagaccaccgtgagctgcaccaagatcatgagcaagaacatcagcatcgtggacaacgagaagtgcaagtacctgaccaagcccgagccccagatcagaaagtgcaacgagcagccctgccagaccagatggatgatgaccgagtggaccccctgcagcagaacctgcggcaagggcatgcagagcagacaggtggcctgcacccagcagctgagcaacggcaccctgatcagagccagagagagagactgcatcggccccaagcccgccagcgcccagagatgcgagggccaggactgcatgaccgtgtgggaggccggcgtgtggagcgagtgcagcgtgaagtgcggcaagggcatcagacacagaaccgtgagatgcaccaaccccagaaagaagtgcgtgctgagcaccagacccagagaggccgaggactgcgaggactacagcaagtgctacgtgtggagaatgggcgactggagcaagtgcagcatcacctgcggcaagggcatgcagagcagagtgatccagtgcatgcacaagatcaccggcagacacggcaacgagtgcttcagcagcgagaagcccgccgcctacagaccctgccacctgcagccctgcaacgagaagatcaacgtgaacaccatcaccagccccagactggccgccctgaccttcaagtgcctgggcgaccagtggcccgtgtactgcagagtgatcagagagaagaacctgtgccaggacatgagatggtaccagagatgctgcgagacctgcagagacttctacgcccagaagctgcagcagaagagctag

SEQ ID NO: 235470 - DNA, 3624 bp, Artificial Sequence
  derived and/or modified sequence
atgcggctgacgcacatttgttgctgttgtttgttataccagctggggttccttagtaacggtattgtgtcagagctgcaatttgccccagaccgcgaagaatgggaagtggtgtttcctgcgctctggcggcgggagccggtggaccctgcaggcggaagcggcggaagcgctgaccccggctgggtgaggggagtggggggtggcggcagtgccagagctcaagctgccgggagttctagggaagtgcggagcgtggcccccgtgccccttgaggaaccggttgagggtcgctctgaaagccggctgcggcctccccctccctcagaaggggaggaggatgaagaactggaatcccaggagctaccacgcggctcaagcggcgccgcagcgctatctccgggagctccagcctcctggcagcccccacccccaccccagccacctccctcaccacctccagcccagcacgctgaacccgacggggatgaagttctgctccggatacctgcctttagcagagacctgtacctcctactgaggcgggacggacgcttccttgctccaaggtttgcagtggaacagcgcccgaatcccggtccaggtcctactggggccgcctcagcacctcagccacctgcccccccggatgccggttgtttctataccggcgcggtgctgaggcacccaggctcactagcctcatttagcacttgcggaggcggactgatggggtttattcagctgaatgaggatttcatttttatagaacccttaaatgatacaatggccatcactggccacccacaccgcgtatataggcagaaacggtcaatggaagaaaaggtgacggagaaaagcgcacttcatagccattactgtggaattatttcggacaaaggccgaccaagaagccgtaagattgcagaaagcggcaggggaaagagatattcttacaagcttccccaagagtataatattgagactgtggtcgtggctgaccccgcaatggtctcctaccacggcgcggatgcagctcgcaggttcatcctcactatcctcaatatggtctttaatctgttccagcacaaatccttgagcgttcaggtgaacctgagagtaataaaactcatcttacttcacgaaaccccacctgaactatatatcggacatcatggcgagaaaatgcttgagtcattctgtaaatggcagcatgaggaatttggaaaaaaaaatgatatacacctggagatgagtacaaattggggcgaggacatgacctccgttgacgccgcgatattgatcacccgcaaagacttttgcgttcacaaagacgagccatgtgacacagttggtatcgcctacctgagtggcatgtgttctgaaaagcggaaatgcatcatcgctgaagacaatggcctcaacctggccttcacaattgctcacgaaatgggacacaatatggggatcaaccatgataacgaccatccctcatgcgccgacggtctgcatattatgagtggcgagtggatcaagggacagaacctgggagacgtgtcttggagccgctgttcaaaagaggacctggagcgattcctgcgaagcaaggcttctaattgtctgctccagaccaatcctcagagcgtgaacagcgttatggtcccttcgaagcttcccggcatgacctacactgcggacgagcagtgccagatcctcttcgggcccctcgcgtcgttctgccaggagatgcagcatgtcatttgcaccggactctggtgcaaagtagagggcgagaaagaatgtcggacaaagctggacccgccaatggatggcactgactgtgatctcggaaagtggtgcaaggcaggagagtgcacttcccgcacatctgctccagaacacttagcaggggaatggtccctgtggtctccatgctccagaacgtgtagcgccggaattagtagtagagaacggaagtgccctggattggattccgaggcaagagattgtaatgggcctcgcaagcagtataggatctgcgagaaccctccttgccccgctggcttgcctggctttcgggattggcagtgtcaagcttactcagtgcgcacctcttctcctaagcacatactccagtggcaggccgtgctggacgaggagaagccctgtgctctgttctgcagccccgttggtaaggagcaaccaattttgctctctgagaaagtgatggacgggacgtcctgcgggtaccagggcttggacatttgtgctaacgggcgctgtcagaaggttggctgcgatggcctcctcggctcactggccagggaagatcactgtggagtgtgtaacggcaatggcaaatcctgtaaaatcataaaaggggactttaaccacacacggggagctggctacgtcgaagtgttggttattccagccggtgccaggcggataaaggttgttgaagagaaacccgcccactcctatttagcactgcgcgacgctggcaagcaatctattaacagtgattggaaaattgagcacagtggggcctttaatttggctggcaccaccgtccattacgtaaggcggggcctttgggaaaaaatctcagccaaggggcctactacagctcctctccatctacttgtgttgctgttccaggaccagaattatggcttgcactacgagtacacaattccctccgatcctttgcctgagaatcagtcatccaaggcacctgaaccactgttcatgtggactcatacctcatgggaagactgtgacgctacctgcggtgggggcgaaagaaagactaccgtttcttgtactaaaattatgtcaaagaacattagcatagtggacaacgaaaaatgcaagtatctgactaagcccgagccacagatccgcaagtgtaatgagcagccatgtcaaaccagatggatgatgacagaatggacgccttgctccagaacctgtggtaaggggatgcagagccgacaagtggcttgcacgcagcaactgtcgaacggcaccctcattagagctcgggaacgcgactgcattgggcccaagcccgcctcagcacaacgctgtgagggacaggattgcatgactgtttgggaggcaggggtgtggagcgagtgtagcgttaagtgtggtaaggggatccggcatcgcacagtgcggtgcacaaatccacgcaagaaatgtgtcttgagcacacgcccccgggaggctgaagactgcgaggactattctaaatgctacgtctggcgaatgggcgattggtcaaagtgctctatcacatgtggcaaaggaatgcagagtcgggtgattcagtgcatgcacaagatcacaggccgacacggaaacgaatgtttctcctccgagaagcctgcagcctacagaccatgtcacctgcaaccttgtaatgagaagataaatgtcaataccattacatcacctaggttagccgcactcaccttcaaatgtctgggggaccaatggccagtgtactgtcgggtcataagggagaaaaatctttgccaggacatgcgctggtatcagcgctgctgcgaaacatgtcgcgacttttacgcccaaaagttgcagcagaaatcatag

SEQ ID NO: 235471 - DNA, 3624 bp, Artificial Sequence
  derived and/or modified sequence
atgaggctgacccacatctgctgctgctgcctgctgtaccagctgggcttcctgagcaatggcatcgtgtctgagctgcagtttgccccagaccgggaggagtgggaggtggtgtttcctgccctgtggaggcgggagcctgtggaccctgctgggggcagcggcggcagcgctgaccccggctgggtgcggggcgtgggcggcggcggcagcgcccgggcccaggccgccggcagcagccgggaggtgcgctctgtggcccctgtgcccctggaggagcctgtggagggccgctctgagagccggctgcggcccccacctccttctgagggggaggaggatgaggagctggagagccaggagctgccccggggcagcagtggagctgctgccctgagccctggggccccagcctcctggcagcccccacctccaccccagcccccacccagccccccaccagcccagcacgccgagccagatggagatgaggtgctgctgcgcatcccagccttcagccgggacctgtacctgctgctgcggagagatggccgcttcctggcccccaggtttgctgtggagcagaggcccaaccctggccctggccccaccggggccgccagcgccccccagcccccagcccccccagatgctggctgcttctacacaggagctgtgctgcggcaccctggcagcctggccagcttcagcacctgtggcggcggcctgatgggcttcatccagctgaatgaagacttcatcttcatcgagcccctgaatgacaccatggccatcaccggccacccccaccgggtgtaccggcagaagaggtccatggaggagaaggtgacagagaagagcgccctgcacagccactactgcggcatcatcagtgacaagggccggcccaggagcaggaagattgctgagagcggccggggcaagcgctacagctacaagctgccccaggagtacaacattgaaacagtggtggtggccgaccctgccatggtgtcctaccatggagcagatgctgcccggcgcttcatcctgaccatcctgaacatggtgttcaacctcttccagcacaagagcctgtctgtgcaggtgaacctgcgggtcatcaagctgatcctgctgcacgagaccccacctgagctgtacatcggccaccacggggagaagatgctggagagcttctgcaagtggcagcacgaggagtttgggaagaagaatgacatccacctggagatgagcaccaactggggcgaggacatgacctctgtggatgctgccatcctgatcaccaggaaggacttctgtgtgcacaaggatgagccctgtgacacagtgggcatcgcctacctgagcggcatgtgcagcgagaagaggaagtgcatcatcgccgaggacaatggcctgaacctggccttcaccatcgcccacgagatgggccacaacatgggcatcaaccacgacaatgaccaccccagctgtgctgatggcctgcacatcatgtctggagagtggatcaagggccagaacctgggagatgtgtcctggagccgctgcagcaaagaagacctggagcgcttcctgcggagcaaggccagcaactgcctgctgcagaccaacccccagagcgtgaacagcgtgatggtgcccagcaagctgcccggcatgacctacacagcagatgagcagtgccagatcctgtttggccccctggccagcttctgccaggagatgcagcacgtgatctgcaccggcctgtggtgcaaggtggagggggagaaggagtgcaggaccaagctggacccccccatggatggaacagactgtgacctgggcaagtggtgcaaggccggggagtgcaccagcaggaccagcgcccctgagcacctggccggggagtggagcctgtggagcccctgcagcaggacctgcagcgctggcatcagcagccgggagaggaaatgtcctggcctggacagcgaggcccgggactgcaatggccccaggaagcagtaccgcatctgtgaaaatccaccctgcccagctggcctgcccggcttccgggactggcagtgccaggcctacagcgtgaggaccagcagccccaagcacatcctgcagtggcaggccgtgctggatgaggagaagccctgtgccctcttctgcagccctgtgggcaaggagcagcccatcctgctgtctgagaaggtgatggatggcaccagctgtggctaccagggcctggacatctgtgccaacggccgctgccagaaggtgggctgtgatggcctgctgggcagcctggcccgggaggaccactgcggcgtgtgcaatggaaatggcaagagctgcaagatcatcaagggggacttcaaccacaccaggggggccggctacgtggaggtgctggtgatcccagctggggcccggcgcatcaaggtggtggaggagaagccagcccacagctacctggccctgagagatgctgggaagcagagcatcaacagcgactggaagattgagcacagcggggccttcaacctggccggcaccaccgtgcactacgtgcggcggggcctgtgggagaagatcagcgccaagggccccaccacagcccccctgcacctgctggtgctgctcttccaggaccagaactacggcctgcactatgagtacaccatccccagcgaccccctgcctgagaaccagagcagcaaggcccctgagcccctcttcatgtggacccacacctcctgggaggactgtgatgccacctgtggcggcggggagaggaagaccaccgtgtcctgcaccaagatcatgagcaagaacatcagcatcgtggacaatgagaagtgcaagtacctgaccaagccagagccccagatcaggaagtgcaatgagcagccctgccagacccgctggatgatgacagagtggaccccctgcagcaggacctgtgggaagggcatgcagagccggcaggtggcctgcacccagcagctgagcaatggcaccctcatccgggcccgggagcgggactgcatcggccccaagccagccagcgcccagagatgtgagggccaggactgcatgacagtgtgggaggccggcgtgtggagcgaatgttctgtgaagtgtgggaagggcatccgccacaggacagtgcgctgcaccaaccccaggaagaagtgtgtgctgagcacccggccccgggaggccgaggactgtgaggactacagcaaatgttatgtgtggaggatgggagactggagcaagtgcagcatcacctgtgggaagggcatgcagagcagggtcatccagtgcatgcacaagatcaccggccgccacggcaatgaatgcttcagcagcgagaagccagctgcctaccggccctgccacctgcagccctgcaatgagaagatcaacgtgaacaccatcaccagcccccggctggccgccctgaccttcaagtgcctgggggaccagtggcctgtgtactgcagggtcatccgggagaagaacctgtgccaggacatgcgctggtaccagcgctgctgtgagacctgccgggacttctacgcccagaagctgcagcagaagagctag

SEQ ID NO: 235472 - DNA, 3624 bp, Artificial Sequence
  derived and/or modified sequence
atgcggctgacccacatctgctgctgctgcctgctgtaccagctgggattcctttctaacgggatcgtgagcgagctgcagtttgcaccggatagggaagagtgggaagtggtgtttcctgccctttggaggcgagagccagtcgaccctgctggtggaagcgggggctctgctgacccaggctgggtgcgcggggtgggagggggcggaagcgctagagcgcaggccgccggcagctcacgtgaagtgagatcagtggcccccgtgcccctagaagagcccgtggaaggcagatcagaatctcggttacgccctcccccccctagcgagggggaggaagatgaggaactagaatcccaggaattgccacggggatcctccggggccgcggccctatcccctggggcaccagcttcatggcaacccccaccacccccacagcctccgccctccccaccacccgcacagcatgccgaacccgacggggacgaagtcctgctgagaatcccggccttcagccgagacctttacctactgctcagaagagacggaaggttcctggcgccccgtttcgccgtcgaacagcggccaaatccagggccaggtcctaccggtgccgctagtgcaccacagcctcccgctcccccagacgccgggtgtttctataccggcgctgtccttcggcacccgggatctctagcgtccttcagtacatgcggtggtggtctcatgggtttcatccagctgaatgaagattttattttcatcgaacccttgaatgacaccatggcaatcacggggcatcctcatcgggtttacagacagaagagaagtatggaagaaaaggtcacagaaaaaagcgcgctgcattcccactattgtgggatcatatctgataagggccgcccacggtctcgcaagatcgctgaatccggacgcgggaaaaggtatagctacaaattgccgcaagagtataacatcgagacagtagtggttgcagaccccgctatggtatcctaccacggagctgacgctgcaaggcgttttattttaactatcctaaacatggtcttcaatctatttcagcacaagtccctcagtgtccaggtcaatctccgagtgatcaagttaattctgctgcacgagaccccacccgaactctatattggtcatcatggcgagaaaatgctggagagcttctgtaaatggcagcacgaggaattcggcaagaagaacgacattcatttggaaatgtctacgaattggggggaggatatgacctccgtggatgcggctatcctgattactcggaaagatttctgcgtgcataaagatgagccatgcgacaccgtcggaatcgcatatctaagtggaatgtgtagtgaaaagcgcaaatgcatcatcgccgaagacaacggattaaatctcgcctttaccattgcccatgaaatggggcacaacatgggaatcaaccatgacaatgaccatccttcctgcgctgatgggttgcacatcatgtctggtgaatggatcaaaggacagaatttaggggacgtgagctggtcccggtgctccaaagaagaccttgagcgttttcttcggtccaaagcttccaattgcctgctgcagaccaatcctcagtcagtaaattctgttatggtgccgtccaagctccccggcatgacttataccgccgacgagcaatgtcagattctctttggcccgctcgcgtctttctgccaggaaatgcagcatgttatttgcacggggctgtggtgtaaggtggaaggcgagaaggagtgccgtacaaaactcgatccccctatggatgggaccgattgtgacctcggaaagtggtgtaaggctggtgaatgtacaagccgaacatcagccccagaacatttggctggtgagtggagcctctggagcccatgcagcagaacctgttcggctggtatttcttcaagagaaagaaagtgcccaggcctagactcagaggcccgggactgcaatggcccccggaagcagtataggatctgtgaaaaccctccgtgccccgcaggcctccctggatttcgggattggcaatgccaagcctactcagtacgcactagcagtccaaaacacatcctgcagtggcaggccgtgttggacgaggaaaaaccctgtgctctattttgctcacccgtaggtaaagagcagccaattctgctcagcgagaaagtcatggatggcacctcttgtggttaccagggactggatatttgcgccaacggtagatgtcagaaagtcggttgcgacggcctgctgggtagcctcgcgagagaggaccactgtggggtttgtaacggaaatggaaaaagttgcaagattataaagggtgacttcaatcatacaagaggagccggttatgtggaggttttggtgatccctgcaggggcccggaggatcaaagtggtcgaggagaagcctgcccattcctacctagccctgagagatgcaggaaaacagagcattaactccgactggaaaatagaacacagtggtgcatttaacctggccgggaccacagttcattatgtgcgaagagggctatgggagaaaatctccgccaagggtcctaccacagccccccttcatctcctcgtgctgcttttccaggaccagaattatggtctccactatgagtacactattccttctgaccccctgccagaaaaccaatctagcaaggcaccggaacccctgtttatgtggacccacacgtcctgggaggattgtgatgcaacgtgtggaggcggggagcgaaagaccacagtgtcctgcacaaaaattatgagtaagaatataagcattgtggataatgaaaaatgtaagtacctgacaaaacccgagccccagatccgcaagtgcaacgaacagccctgccagacgcgttggatgatgacagaatggactccttgtagcaggacatgtggtaaaggtatgcagagtagacaggttgcctgtacgcagcaactgtccaacggcaccttaattagagcccgggagcgcgactgtatcggacctaaacctgccagcgctcagaggtgcgaaggccaagactgtatgactgtatgggaggccggcgtctggtcagaatgttccgtaaaatgcgggaagggcattcggcacaggacggtgaggtgcactaatcctcgcaagaagtgcgttctgtccacgcgcccacgagaagccgaggactgcgaggactacagtaagtgctacgtttggcgcatgggtgactggtccaaatgctccatcacttgtggcaaggggatgcagtccagagttattcagtgtatgcacaagataacaggtcgacatggaaatgagtgcttctcaagcgaaaagccggccgcctaccggccctgtcacctccagccctgtaatgagaagattaacgttaatactatcacaagcccacgactggccgctctgacttttaaatgcttgggagatcaatggcccgtatactgtagggttattagggaaaagaatctttgtcaggacatgaggtggtaccagaggtgctgtgaaacttgcagggacttttacgcacagaagctccagcagaaatcctag

SEQ ID NO: 235473 - RNA, 3624 nt, Artificial Sequence
  derived and/or modified sequence
augagguugacucacauuuguugcuguugccuucuguaccaacuggguuuccuuaguaauggcaucguuucugaacugcaguucgccccagacagggaggagugggaggucguguuuccagcacuuuggaggcgggagccugucgacccagcgggaggaucaggagggagcgcugacccuggaugggugcgcggcguaggagggggcggcagugccagagcacaggcagcagggucuucccgggaggucagguccgucgcucccgucccucuggaagagcccguugaggggcggagcgagucccgucugcgaccccccccaccuuccgagggggaggaggacgaggagcuggaaucgcaggagcucccccguggcagcaguggagcagccgcccucagcccuggcgccccggccagcuggcagcccccucccccaccacagccaccgccuagccccccucccgcucaacaugccgagccagacggcgaugaggucuugcugcggauaccugcuuuuucacgggauuuauaccugcuccugcggagagacggccguuuucuggcuccacguuuugccgucgaacagcgacccaacccgggcccugggccaacaggggcggccucagccccccaaccgccugccccgccggaugcagguugcuuuuauacuggugcagucuuacgacacccggggagccucgcuagcuuuuccacuugcggcggcggauugaugggcuuuauccaacugaacgaggauuucaucuuuauugaaccgcuuaacgacacaauggcuaucaccggacacccucaccgcguguaccggcagaagagaucuauggaggagaaaguaaccgagaagucagcucuucauucccacuacugcggaauuaucuccgauaaggguagaccaaggucaaggaaaaucgcagagucuggacgggguaaaagauauuccuauaagcuaccacaagaauacaacauugaaacugucgugguugcugacccugcgaugguuagcuaucacggugcggacgcugcucggcgcuucaucuugacaauucugaauauggucuuuaaccuuuuccaacauaaaagccucagcguccaggucaaccuccggguuauaaagcugauuuuacuccacgaaacaccaccagaacuuuacauuggccaccacggcgagaagauguuggaauccuucuguaaauggcaacacgaggaguuuggcaagaagaaugauauucaccuagaaaugucuacaaauuggggggaagauaugaccagcgucgacgcugccauccucauuacgaggaaagauuuuuguguccacaaggacgaacccugugauaccgugggcauugcauaccucucaggcaugugcucugaaaaaaggaaauguauuauugccgaagacaacgggcugaaccuggccuucaccaucgcccaugagaugggccauaacauggguaucaaccacgauaacgaccauccuucuugugccgacggacuccacauuaugucuggagaauggauuaaaggccagaaccugggugaugucagcuggagucgguguuccaaggaggaccuggaacgcuuccuuagaagcaaggcuuccaacugcuugcuccagacaaacccgcagagcgugaacuccgugauggugccuaguaaacucccagggaugacuuacaccgccgacgagcaaugccaaauacucuuuggaccucuggccaguuucugccaggaaaugcaacacguuauuuguacagggcuuuggugcaagguggagggcgagaaggaaugucgcaccaagcucgauccgcccauggacggaaccgauugugaucugggcaaguggugcaaggcuggcgaauguaccucaaggacaucagcaccugagcacuuagcaggggaauggucccucuggagccccuguucaaggaccugcagcgccgguaucagcucaagggaacggaagugccccggcuuggacucagaagccagggauuguaacgggccccgaaagcaguauagaauuugugaaaauccucccuguccagcugggcuuccuggauucagggacuggcagugucaggcguacucugugaggacgucuagcccuaagcacauacugcaguggcaggcuguguuggacgaagaaaagccuugcgcgcucuucugcagcccggucggaaaagagcagccuauccugcucagugaaaaggucauggacggcacuagcuguggcuaccagggguuggauauuugcgcaaauggucgcugccaaaaagugggaugugacggacuacuuggcucccuugcgcgggaggaccacugcggagugugcaaugggaacgggaaaagcuguaagauuauuaagggagacuuuaaucacacccgaggggccggguacgucgaggugcucgugauucccgcuggugcccgccgcauaaaaguagucgaggagaaaccagcucacucauaucuggcgcuucgcgacgcuggaaaacaaagcauaaauagcgauuggaagauugaacacagcggggcauucaauuuagccggcacaacagugcauuauguuaggcgcggacugugggaaaaaauuagugcgaaaggaccgacuacugcuccacugcacuuacuuguccuccucuuucaggaucagaauuauggacuucauuaugaguauaccaucccuagcgauccccuuccggagaaucagucgagcaaggccccugaaccuuuauuuauguggacgcacacauccugggaggacugcgacgcaaccugcgguggcggcgagcgcaagacaaccguuuccugcaccaaaaucaugaguaagaacauuucuauaguggacaaugagaaaugcaaauaccuaacgaaaccugaaccucaaauccggaaaugcaacgaacagccaugccagacacgguggaugaugaccgaguggacucccugcucaagaaccugugggaagggcaugcagagccggcaaguggcuugcacgcagcagcucagcaacggcacccuuauuagggccagggaacgagacuguauuggucccaaacccgccucugcacagcgaugcgaaggccaggauugcaugacuguuugggaagccggcgucugguccgaaugcuccgugaaaugcggaaaggggauccggcacagaacuguacgguguacaaauccacguaagaagugcguguuaagcacacggccucgagaagcagaagauugcgaggauuauucuaaguguuacguguggcgcaugggugauuggagcaaguguaguauaacuuguggcaaagggaugcagaguagagucauccagugcaugcauaaaauuacagggcggcacggcaaugaaugcuuuucgucggagaagccugcugccuacaggccuugucaccugcagccaugcaacgagaagauuaaugugaauacuauuaccucaccuagacuggcugcccugaccuuuaaaugucugggagaccaauggccaguguauugucgggucauccgagagaaaaaucugugucaagacaugcgaugguaccagcgguguugugagacaugucgggacuuuuaugcccagaagcugcagcagaagagcuag

SEQ ID NO: 235474 - RNA, 3624 nt, Artificial Sequence
  derived and/or modified sequence
augcgguuaacccacauuugcuguuguugccugcuuuaccagcucggcuuucuuucaaauggcauuguguccgaacuccaauucgccccagauagagaagaaugggaaguagucuuuccagcacuuuggaggcgcgaaccuguagacccggccggggggagcgguggguccgcugauccggggugggugcgcggcguaggugggggaggcucagcccgugcucaggccgcagguuccagucgugagguccguucagucgcccccguuccacuggaggaacccgucgaaggccgcuccgaauccagacuacgcccuccccccccuagugaaggcgaagaagaugaagaguuagaaucacaggaacugccacgcgggagcucaggagccgccgcucuuuccccaggugcccccgccagcuggcagccccccccgccaccccagccgcccccgucaccuccacccgcgcaacaugcugagcccgacggugaugagguccugcucagaauuccagccuucucucgcgacuuguaccugcugcuucgacgcgacggccgguuucucgcccccagauucgcaguggagcagcgaccaaacccaggcccaggaccaacaggagccgcuucugcaccgcaaccacccgcuccacccgaugccgguugcuuuuauacgggagcuguguuacgccacccugggagucuggccuccuuuuccacuugcggcgggggacucaugggauucauccagcugaacgaggacuucauuuuuaucgaaccacugaaugacacaauggccaucacugggcauccacaccgcguguaccgccagaagaggucaauggaagaaaaagugaccgaaaaaucugccuuacauucccacuauuguggaauuauuucagacaaagguaggccgcgcucccguaaaaucgcagaaucaggucgcgguaagcgcuauuccuauaaauugccccaggaguacaauauugaaaccgugguuguugccgacccugcgaugguuuccuaucauggcgcugaugcagcccgacguuuuauuuuaacaauccugaacauggucuuuaaucuuuuccaacacaagucauugagugugcaggucaaccuacgcguaauuaagcugauccugcuucaugagaccccucccgaguuguauauuggacaccacggcgagaagaugcuugaaagcuucugcaaauggcagcacgaagaauucggcaagaagaaugauauacaccuggaaauguccacaaacuggggggaggauaugacuucaguagaugccgccauucuaauuacuagaaaagauuuuuguguacacaaggacgaaccaugcgauacaguggggauagcauacuuaagcgguaugugcucagagaagcgaaaauguaucaucgccgaagacaacggccuuaaccuggcuuuuaccauugcgcacgaaaugggacauaacauggggauaaaucacgauaaugaucacccaagcugugcugacggccuucacauuaugaguggugaauggauuaagggacagaaucucggugacgucaguuggucucgaugcucuaaagaagaccucgaacgauuucugcgcaguaaggccuccaacugccuccuccagacaaauccucaaagcguuaacucaguaauggucccuuccaaacugccaggcaugaccuacacagcugaugaacagugucagauacucuucggcccuuuagccagcuucugccaggagaugcagcacguuauuugcacaggacuguggugcaagguagagggggaaaaggaguguagaacaaaacuggaccccccuauggaugguaccgacugcgaucuuggcaaaugguguaaagcaggugagugcacgagcagaacgucggcuccugaacaccuggccggcgaguggucuuuauggucaccuuguagcaggacaugcuccgccggcauaucaucgagagagagaaagugcccaggguuggacuccgaagcucgcgauugcaacggacccaggaaacaguacaggauuugugaaaacccaccuugcccugcuggguuacccgguuucagagauuggcagugucaagcauacucuguccgcaccaguucucccaaacacaucuugcaguggcaggcaguguuagaugaggagaagcccugcgcccuguucuguucuccagugggcaaggaacaaccuauacugcuaucagagaaagugauggaugggaccaguugcggcuaccagggacuugauaucugugcaaacggacgcugucaaaaagugggaugugauggacuuuuagggucucuugccagggaagaccauugcggcguguguaacgguaacggaaagucuugcaagauuauuaagggcgauuuuaaccacacucgaggugcaggauacguggaaguucuggucaucccagccggcgcccgacguauuaaagucguugaagagaagccggcgcauagcuaccucgcccucagagacgcaggaaaacaaucuauuaauagcgacuggaaaauugaacacagcggugccuuuaaucucgcggguacuacaguccauuauguacgcagaggauuaugggaaaagauuuccgcaaaggggccaaccaccgcgccgcuucaccugcuuguacuccuguuccaggaccagaacuacggguugcauuacgaguacacgauucccagcgacccucucccugaaaaucagucaucuaaggccccagaaccgcucuucauguggacgcacacuagcugggaagacugcgacgccacuugugggggcggugagcgaaagaccacaguauccugcacuaagaucaugagcaaaaauauaucgauaguggacaaugaaaaaugcaaguaucugaccaagcccgagccucaaauuagaaagugcaaugaacagccgugucagacuagauggaugaugaccgaauggaccccuugcucucgaaccugcggaaaggggaugcaaaguaggcaaguggccugcacacagcaacucucaaauggaacacugaucagggcaagggaaagagacugcauuggucccaaaccggcaagugcccagcgaugugagggccaagauuguaugacagugugggaggcaggcguuugguccgaaugcucagugaagugcggcaaaggaaucagacaucggaccgugcgauguacgaacccacgaaaaaaguguguccugaguacaagacccagagaagccgaagauugcgaagacuauagcaaaugcuacgucuggagaaugggagacuggaguaaaugcagcauuacuuguggaaaaggaaugcaaucccgagucauccagugcaugcacaaaauuaccggaaggcacggcaacgaaugcuuuucaagcgagaagccugccgccuaucgaccgugucaccuucagccuugcaacgagaaaaucaaugugaacaccauaaccagccccagacucgcggcucuuacauuuaaaugcuugggcgaucaauggccuguuuacuguagagucauccgugagaaaaacuuaugucaagacaugcgaugguaccaacggugcugugagaccuguagagacuucuaugcccaaaagcuccaacagaaauccuag

SEQ ID NO: 235475 - protein, 236 aa, Artificial Sequence
  derived and/or modified sequence
MPPRELSEAEPPPLRAPTPPPRRRSAPPELGIKCVLVGDGAVGKSSLIVSYTCNGYPARYRPTALDTFSVQVLVDGAPVRIELWDTAGQEDFDRLRSLCYPDTDVFLACFSVVQPSSFQNITEKWLPEIRTHNPQAPVLLVGTQADLRDDVNVLIQLDQGGREGPVPQPQAQGLAEKIRACCYLECSALTQKNLKEVFDSAILSAIEHKARLEKKLNAKGVRTLSRCRWKKFFCFV

SEQ ID NO: 235476 - DNA, 711 bp, Artificial Sequence
  derived and/or modified sequence
atgccccccagagagctgagcgaggccgagcccccccccctgagagcccccacccccccccccagaagaagaagcgccccccccgagctgggcatcaagtgcgtgctggtgggcgacggcgccgtgggcaagagcagcctgatcgtgagctacacctgcaacggctaccccgccagatacagacccaccgccctggacaccttcagcgtgcaggtgctggtggacggcgcccccgtgagaatcgagctgtgggacaccgccggccaggaggacttcgacagactgagaagcctgtgctaccccgacaccgacgtgttcctggcctgcttcagcgtggtgcagcccagcagcttccagaacatcaccgagaagtggctgcccgagatcagaacccacaacccccaggcccccgtgctgctggtgggcacccaggccgacctgagagacgacgtgaacgtgctgatccagctggaccagggcggcagagagggccccgtgccccagccccaggcccagggcctggccgagaagatcagagcctgctgctacctggagtgcagcgccctgacccagaagaacctgaaggaggtgttcgacagcgccatcctgagcgccatcgagcacaaggccagactggagaagaagctgaacgccaagggcgtgagaaccctgagcagatgcagatggaagaagttcttctgcttcgtgtag

SEQ ID NO: 235477 - DNA, 711 bp, Artificial Sequence
  derived and/or modified sequence
atgcctccaagggaactgtccgaggctgaacccccaccactgcgggcccctacccctcctccgcgccgaagatctgcacctccagaacttggaatcaagtgcgttctggtcggtgacggcgctgtggggaagagttctctgattgtctcctatacctgcaacggttatccagctcggtatcgaccaaccgctcttgacaccttctctgtacaggtcctcgtcgatggcgccccggtgagaatcgaactttgggacacagccggccaggaggacttcgataggctcaggagtctgtgttatcccgatacagatgtgtttctcgcctgcttttccgtagttcagccttcatcttttcagaatatcacagaaaagtggctcccagaaatcaggactcataatccccaggcccctgtcctcctggtaggaacacaagctgacctgcgagacgacgtgaatgtcttgatccagctggaccagggcggtagggagggccctgttcctcaaccccaggcccaggggctagccgagaagatacgggcatgttgctacttggagtgcagcgccttaacacaaaagaacttgaaagaggtcttcgatagtgctattctaagtgccatcgagcataaggcccgactcgagaagaaactgaacgccaaaggggtgagaaccctaagtcgatgccgctggaaaaaattcttctgttttgtatag

SEQ ID NO: 235478 - DNA, 711 bp, Artificial Sequence
  derived and/or modified sequence
atgccaccccgggagctgtctgaggccgagcccccacccctgcgggcccccaccccaccacccaggagaagaagtgcccctcctgagctgggcatcaagtgtgtgctggtgggagatggagctgtgggcaagagcagcctcatcgtgtcctacacctgcaatggctacccagcccgctaccggcccacagccctggacaccttctctgtgcaggtgctggtggatggagcccctgtgagaattgagctgtgggacacagctggccaggaggactttgaccggctgcggagcctgtgctacccagacacagatgtgttcctggcctgcttctctgtggtgcagcccagcagcttccagaacatcacagagaagtggctgcctgagatccgcacccacaacccccaggcccctgtgctgctggtgggcacccaggccgacctgagagatgatgtgaatgtgctgatccagctggaccagggcggccgggagggccctgtgccccagccccaggcccagggcctggccgagaagatccgggcctgctgctacctggagtgcagcgccctgacccagaagaacctgaaggaggtgtttgacagcgccatcctgagcgccatcgagcacaaggcccggctggagaagaagctgaatgccaagggcgtgaggaccctgagccgctgccgctggaagaagttcttctgctttgtgtag

SEQ ID NO: 235479 - DNA, 711 bp, Artificial Sequence
  derived and/or modified sequence
atgcccccccgggagctgagcgaggccgagcccccccccctgcgggctccaacgcccccacctcggagacggtcagcacctccagagcttggaatcaagtgcgtcttggtcggagatggagcagtgggaaaatcatctttgatcgtgagctatacatgtaatggataccctgcccgttataggccaaccgccctggacaccttttccgtgcaggtgctggtggacggcgcacctgtgaggattgagttgtgggacactgcaggacaagaggattttgataggctaaggtcactgtgttacccagatacggatgtgttcctggcttgcttcagtgtggttcagcccagttcgttccagaacataactgagaaatggctgccagagatccgtacacacaacccccaggcaccagtcctgctcgtgggcacccaggccgacctcagagatgacgtgaacgtactaattcaactggaccagggcggacgagagggaccggtccctcagccgcaagcccaagggctcgctgaaaagatacgcgcctgttgctatcttgagtgttccgcgctgactcagaagaatctaaaagaggtctttgattctgcgattctgtccgctatcgagcacaaagcccggctcgaaaaaaagttaaatgccaaaggagttcgcacactgtcaaggtgtaggtggaagaagttcttttgcttcgtctag

SEQ ID NO: 235480 - DNA, 1705 bp, Artificial Sequence
  derived and/or modified sequence
gggcggggccctacacaaacccgctggtagcgctgggccgactcgcccagcctggacccattcagtcagaggcagccagcgggacctgcttcaccgagcgcagcgaagccgagacccgggctggcccctctgctgcccccggagcgggccatgccgccgcgggagctgagcgaggccgagccgcccccgctccgggccccgacccctcccccgcggcggcgtagcgcgcccccagagctgggcatcaagtgcgtgctggtgggcgacggcgccgtgggcaagagcagcctcatcgtcagctacacctgcaatgggtaccccgcgcgctaccggcccactgcgctggacaccttctctgtgcaagtcctggtggatggagctccggtgcgcattgagctctgggacacagcgggacaggaggattttgaccgacttcgttccctttgctacccggataccgatgtcttcctggcgtgcttcagcgtggtgcagcccagctcctttcaaaacatcacagagaaatggctgcccgagatccgcacgcacaacccccaggcgcctgtgctgctggtgggcacccaggccgacctgagggacgatgtcaacgtactaattcagctggaccaggggggccgggagggccccgtgccccaaccccaggctcagggtctggccgagaagatccgagcctgctgctaccttgagtgctcagccttgacgcagaagaacttgaaggaagtatttgactcggctattctcagtgccattgagcacaaagcccggctggagaagaaactgaatgccaaaggtgtgcgcaccctctcccgctgccgctggaagaagttcttctgcttcgtttgagcagctatggctgcatagcaagtagtaggcaggaggccaaagacttctgagacctggggcacccgggcctttgcggcagctactggcagggcctggccacctcataggactcagttcccttctgaacactcgggggacatgggcctctaactgcccactctgatatgcctgggtgagcctaggagggaaggctctgatttggatttctccagtcaaagctcacagaaaaaaacctggcactttgattttcatgggatggtcctaacagggtcagtcacctccgagcagtttgggaacccagtttcttgtcctgggccctcaggtcagcctggctgaattaggacccttccttggcacaggggtgagaaagagcttggggaacgcttggcattatggagggctggaaggggctcaaccccgatttggagagaagtttgggatggagtgggcgagagattgagagagcgagcaggaaaagaggtcttggagcctgggactgatggtggataaggcctggaaagaagatgacgaggaggaggagagagggaagtggggtggatgaggagcaggctgacacctgggctgccctcaatccccaaggccagggagggcggggctggcccctgggaagaactgggtctctgggctccctaggcactgcccaaactggctgagccaggagtggggcaggaagtgagagtcaaggcccagcaaaaggagggggaggagctgcaaattagaacctgaaggaggaccgggttggggatcatccctttcctcaaggtcacacagcctagaagctagagcagtgcagagtctgcaaataaaaccttaagtctgtgaa

SEQ ID NO: 235481 - DNA, 711 bp, Artificial Sequence
  derived and/or modified sequence
atgcctcccagggagctcagcgaggccgagcctcctcctctgagagccccaacgccccctcctagacgtcggagcgctccaccagaactgggtattaagtgcgtcttggtgggagacggcgctgtgggaaagagcagtctgattgtaagttatacgtgcaacgggtaccccgcaagatatcgccctaccgcattagacacatttagtgtgcaggtcttagtagacggcgctcctgtgcgcattgagctgtgggatactgctggtcaggaagattttgatcgtctgcgcagcctgtgctaccccgatacagatgtgttcctggcatgcttctccgttgtgcagcctagtagtttccagaatatcacggagaagtggttgcccgagatccgcacccacaaccctcaggctcccgtactcctcgttggaacacaggctgaccttcgagacgacgttaatgttcttatccagttggaccagggcggtagggaaggacccgttccccaaccccaagcccaggggctggcagaaaagataagagcttgctgttatcttgagtgcagcgccctgacgcagaaaaacctgaaagaagtctttgactctgccatcctgtcagccatcgagcacaaggccagactggagaaaaaattgaacgctaagggagtgcgcacactatcccgctgtaggtggaagaaattcttctgctttgtgtag

SEQ ID NO: 235482 - protein, 200 aa, Artificial Sequence
  derived and/or modified sequence
MAQQRALPQSKETLLQSYNKRLKDDIKSIMDNFTEIIKTAKIEDETQVSRATQGEQDNYEMHVRAANIVRAGESLMKLVSDLKQFLILNDFPSVNEAIDQRNQQLRTLQEECDRKLITLRDEISIDLYELEEEYYSSSSSLCEANDLPLCEAYGRLDLDTDSADGLSAPLLASPEPSAGPLQVAAPAHSHAGGPGPTEHA

SEQ ID NO: 235483 - protein, 137 aa, Artificial Sequence
  derived and/or modified sequence
MAQQRALPQSKETLLQSYNKRLKDDIKSIMDNFTEIIKTAKIEDETQVSRATQGEQDNYEMHVRAANIVRAGESLMKLVSDLKQFLILNDFPSVNEAIDQRNQQLRTLQEECDRKLITLRDEISIDLYELEEEYYSS

SEQ ID NO: 235484 - protein, 111 aa, Artificial Sequence
  derived and/or modified sequence
MAQQRALPQSKETLLQSYNKRLKDDIKSIMDNFTEIIKTAKIEDETQVSRATQGEQDNYEMHVRAANIVRAGESLMKLVSDLKQFLILNDFPSVNEAIDQRNQQLRTLQEE

SEQ ID NO: 235485 - protein, 135 aa, Artificial Sequence
  derived and/or modified sequence
MAQQRALPQSKETLLQSYNKRLKDDIKSIMDNFTEIIKTAKIEDETQVSRATQGEQDNYEMHVRAANIVRAGESLMKLVSDLKQFLILNDFPSVNEAIDQRNQQLRTLQEECDRKLITLRDEISIDLYELEEEYY

SEQ ID NO: 235486 - DNA, 1437 bp, Artificial Sequence
  derived and/or modified sequence
aaaaatcgaggcggggctgagaggctgcggcggctgactaggttttcggaccgcggcgcggcggggaagagagactgcggcgggagggccaggccgtgggagagacgcgggaaagtgcgggtcgcagaggcacttgaccaccccgccctaggccgacccggcggacgcggcgtctggtgtgcgggcgctggggcgggtcccaggtctccccgctgcgctgcttgaggctcagccatggcccagcagagagccctgccccagagcaaggagacgctgctgcagtcctacaacaagcggctgaaggacgacattaagtccatcatggacaacttcaccgagatcatcaagaccgccaagattgaggacgagacgcaggtgtcacgggccactcagggtgaacaggacaattacgagatgcatgtgcgagccgccaacatcgtccgagccggcgagtccctgatgaagctggtgtccgacctcaagcagttcctgatcctcaatgacttcccctccgtgaacgaggccattgaccagcgcaaccagcagctgcgcacactgcaggaggagtgcgaccggaagctcatcacgctgcgagacgagatctccattgacctctacgagctggaggaggagtattactcgtccagctcaagcctttgcgaagctaatgacctgcctctgtgcgaagcttacgggaggctggacctcgacacagactctgctgatggcctctcggcccctctgctggcgtccccggagcccagtgctggccccctacaggtggcagcccctgcccactcccatgctggtggccctggccccactgagcacgcctgagcctccggggccacgcttcgttctcaggaacaaaacctgaggcagccctttggatgccctcacagccttgcttctctcagcctaggttcccatttggggacttcaggaccccagagccactaggacttccttgggaagcccgttagcccagggtgggtcccaccaggacagtagggaaacagttgtttccctagccatttccgaatagcccatcattccgagtcatcatctctgtttgctgccttcctggccagccaggtggaagaaagtttccaagctaggtctggcccgttggggatctcagcagtggggcaggagggtgcctgatttcggggagtcctgacccgagcctgttgtcagagttgggaggggctctgagcagtgttgggcaggccgggtctcccatcccgaggccagcgttcctgtgcagagccccatccactggttcttgccctgagccacatatgtctgtgccatgggctgagtgccacgacaggcccgtgtgacagctgctgcccacgcatgtggaagctaggtgggactcattcctaattctgccgttgtaatgagacttgattaaaacaccgccacttttttgca

SEQ ID NO: 235487 - DNA, 4380 bp, Artificial Sequence
  derived and/or modified sequence
ctgagcaccgcgcgcaaaggcccggccccagggccaggcaactccagcgccgaggccgtccagtgcggctggagggcagaggccgagaggcgcggcgcggaacttgagccccttgtcccggcgcaccggggaaccatgagggatgttaagcgagggagtggaattaccccccttttttttttcttttggagacgtagtctccccctgtcgcccaggctggagtgcagtggcgcgatctcggctcactgcgacctgtgcttcccgggttcaagcgattctcctgcctcagcctcccgagtagctgggattacaggcgcctgccatcacgcccggctaatttttgtatttttagtagagttggggtttcaccatgttggtcaggctagtctcaaactcctgacctcaggtgatccctgcctcggcctcccaaagtgctgggattacaggcgtgagccaccgcgcccggttggaatgaccactttttaggacctcttccctgccgcgcagagactggagggagcggggcccgcagtgcagggatgaggtcccaggtctccccgctgcgctgcttgaggctcagccatggcccagcagagagccctgccccagagcaaggagacgctgctgcagtcctacaacaagcggctgaaggacgacattaagtccatcatggacaacttcaccgagatcatcaagaccgccaagattgaggacgagacgcaggtgtcacgggccactcagggtgaacaggacaattacgagatgcatgtgcgagccgccaacatcgtccgagccggcgagtccctgatgaagctggtgtccgacctcaagcagttcctgatcctcaatgacttcccctccgtgaacgaggccattgaccagcgcaaccagcagctgcgcacactgcaggaggagtgcgaccggaagctcatcacgctgcgagacgagatctccattgacctctacgagctggaggaggagtattactcgtccagctcaagcctttgcgaagctaatgacctgcctctgtgcgaagcttacgggaggctggacctcgacacagactctgctgatggcctctcggcccctctgctggcgtccccggagcccagtgctggccccctacaggtggcagcccctgcccactcccatgctggtggccctggccccactgagcacgcctgagcctccggggccacgcttcgttctcaggaacaaaacctgaggcagccctttggatgccctcacagccttgcttctctcagcctaggttcccatttggggacttcaggaccccagagccactaggacttccttgggaagcccgttagcccagggtgggtcccaccaggacagtagggaaacagttgtttccctagccatttccgaatagcccatcattccgagtcatcatctctgtttgctgccttcctggccagccaggtggaagaaagtttccaagctaggtctggcccgttggggatctcagcagtggggcaggagggtgcctgatttcggggagtcctgacccgagcctgttgtcagagttgggaggggctctgagcagtgttgggcaggccgggtctcccatcccgaggccagcgttcctgtgcagagccccatccactggttcttgccctgagccacatatgtctgtgccatgggctgagtgccacgacaggcccgtgtgacagctgctgcccacgcatgtggaagctaggtgggactcattcctaattctgccgttgtaatgagacttgattaaaacaccgccacttttttgcattgctgctctttcttcctcattccttgtcagtccaggaccatccttggtctcccagcagttgtccgagcagcagctcctcagctctgcctggacagcctggcccaaggtcactctctcctcattggcacctggtaggtccccagtattcagtgaatggacctgctgccatcattgcacatccaggcacctgtgcctctgctggcatctcatcctcactgctaccagagccggtgctcctagtgccggtattttagagaggagaggatgtggacttagaaggggtgaggtgtaccacggccacagagctaggaagtgaagtggcaggaatcagaacttgaacctgatggaagtctagacccagtgtcttttggtgccaggctcaccttagaaatgcagaagtcacaacactgggcaggaagtgtggggggagcacagttcgtccacaggaagtatgggggagcactgtgggggagcaccccaccccagttcctccagcaccatccatgtgcttcatcttctcatgggggaggccatcgtctttcccgatgtatgaatgaggtgacagcccaggatccagccttggggacaggtaagaacacagctgacccatcaccacctgaaccagagaaccccacagccaagcagaaggcaccagacagacaggagcttgaggcccagtcctggctctggacctggcttctggggtggcctagggaagttgcttcccctctgagggagaatttccccattgatacgtgtggtgatctgttcccgcactattttagctgtggaaatgccttgtacttaaccactgaggaagaaaaagattacaaccagatggaagcatatatgaagcgagagcccggaaggaactggccagactttgtggtgggatcccacttaccctgttcctaaaatcctgagcgataagacctgccatcagcttcattttctgcttggccaggaccatcattcccatgtgaaaatcaagttatttctccttcttaaagccaagccgctctgctgaccttttttcctctccagctcatggccttggcagcagagctccacggggaagcagctgataaccatttgcagttctctcttgggcctacgtcagacaggttttgtctccatgactctagcaaaactacacctattaaggtcaccagtggcctccacattgctaagccccggcccattctcagtccatgtaactcttttatcccaagctttttattttgagggcagtggaactcatggaagtacttgtcagtttgcctctctgagcacattctccttcgtccatcaccacaaccagaatggatgatgattgcatatcctctggtatctagctgtattcagatttcttcagttgttccccaaatagtttttttaatgcctattttttttctttctagtccagaggtcttttatttttttaacacccacgatgccatgaattcatagggaagaggttccagcagctcaggctccttcccattggttctcacagtgtgctgctctgggtggagcaggctggcgcttcagttgaatccaggtacctttctctttggcttccctctttttctgatcattttccttcacgcgtttcaggaagctctctcggctcttagagtgcttagtgtgctgaatatgcacattcattctcttggcaagaatcttgcccttacttgtttacaacagtgccaacagcatgctggggaacactgtagactctcccagtctagccatggtgacatttgtggggcattcctttttgaacagtacccattcccttgatatctacaatatcacctttctcatcaatttgcatatacttggccaaaggaacaactgcatgttttctgaaaggcctagagaacatatattgggtgcctctcctctttccctttgtgttcgtcattttggcgaattactggaaggtggcggttccagctgaaaggcttttatgcctatttttattgtgtgttgcatttggttgttattttggaatcttaaaatctaaaacaggaccaggtcaggcccagtggctcctgctgtaatcccagcactttgagaagccaaagcgggtggatcacttgtggtcagaagttttgagaccagcctgggcaacatggagaaaccccgtctctactaaaaagtatagaaatcggccgggcgcggtggcttacgcctgcaaccccagcactttgggaggccaaggcgggcggatcacctgaggtcgggatttccagaccagcctgaccaacatggagaaaccctgtctctactaaaaagtatagaaattggccgggcgcggtggctcacgcctgtaatcccagcactttgggaggccgaggcgggcagatcacctgaggtcgggagttccagaccagcctgaccaacatggagaaaccctgtctctactaaaaatacaaaaattagccgggcgtgctggtccatgcctataatcccagctacttggtaggcggaggcaggagaatcgcttgaacccgggaggcagaggttgcagtgagccgagatcgggccactgcactccagcttgggcaacaagagcgaaactccacctc

SEQ ID NO: 235488 - DNA, 603 bp, Artificial Sequence
  derived and/or modified sequence
atggcgcagcaacgggcattgcctcaaagcaaagaaactttgctccagtcctataataaaagattaaaggatgacatcaaatccatcatggataactttaccgagatcattaagacagcgaaaatcgaggacgagacacaggtgagccgggccacacagggggaacaggacaattacgagatgcatgtaagggctgccaatatcgtccgggctggagaatccctcatgaaattggttagtgacttaaaacaattcttaatccttaacgacttcccttccgtaaacgaggcgattgaccagaggaaccagcagctacgaaccctgcaagaggaatgcgatcgcaaacttataaccctgagggatgagatttcgattgatctgtacgagcttgaggaggagtattactcatcgagttcatccttgtgtgaggcaaacgatttgccactgtgcgaggcctatggaagattagacctggacacagactccgccgatggtctgagcgccccacttctcgctagtcctgaaccatcagctgggcctctgcaggtggccgcccccgcacatagccacgccggaggacctggtcccaccgaacatgcgtag

SEQ ID NO: 235489 - DNA, 603 bp, Artificial Sequence
  derived and/or modified sequence
atggctcagcaacgcgcgctccctcagagcaaagagacgctgctgcagagttataacaaaagactcaaggacgacatcaagtctattatggataacttcactgagatcatcaaaaccgctaagatcgaggacgaaactcaagtgagtcgcgctacccaaggtgaacaggacaactatgagatgcatgtgcgggccgccaacattgtccgggccggagagtctctgatgaaactggtgtccgacctgaagcaattcctcatcctaaacgactttcctagcgtgaacgaagccatcgatcagaggaaccagcaactccgcacactgcaggaagaatgcgacagaaagttgatcacgctgcgcgatgagataagcatcgacctgtacgaactagaggaggagtattactcctcgtcgagttctctttgtgaggccaatgacctacccttgtgtgaggcttatggaaggttggacttagatactgacagcgcagacggcctcagtgcccccctcctggctagccccgagccaagcgcaggcccgttgcaggtcgcagccccagcgcactcacatgctggtggccctggaccaaccgagcatgcgtag

SEQ ID NO: 235490 - DNA, 603 bp, Artificial Sequence
  derived and/or modified sequence
atggcccagcagagggccctgccccagagcaaggagaccctgctgcagagctacaacaagaggctgaaggatgacatcaagagcatcatggacaacttcacagagatcatcaagacagccaagattgaagatgagacccaggtgtcccgggccacccagggcgagcaggacaactatgagatgcacgtgcgggccgccaacatcgtgcgggccggggagagcctgatgaagctggtgtctgacctgaagcagttcctgatcctgaatgacttccccagcgtgaatgaggccatcgaccagaggaaccagcagctgcggaccctgcaggaggagtgtgacaggaagctgatcaccctgagagatgagatcagcattgacctgtatgagctggaggaggagtactacagcagcagcagcagcctgtgtgaggccaatgacctgcccctgtgtgaggcctacggccgcctggacctggacacagacagcgcagatggcctgagcgcccccctgctggccagccctgagcccagcgctggccccctgcaggtggccgccccagcccacagccatgctgggggccctggccccacagaacatgcctag

SEQ ID NO: 235491 - DNA, 603 bp, Artificial Sequence
  derived and/or modified sequence
atggcccagcagcgggccctgccccagagcaaggagaccctgctgcagtcctataataagcgcctgaaagatgatattaaatctatcatggataactttaccgaaataatcaagacggcgaagatcgaggatgaaactcaggtgagtagggctacacagggcgagcaagataattacgagatgcacgtgagagctgccaatattgtgagggctggggagagcctcatgaaacttgtctcagatctgaagcaatttttgatcctgaacgattttccctctgtgaatgaagcaatcgatcaacgcaatcagcaactcagaaccctgcaggaagaatgcgacagaaaactaatcacactgcgagatgagatatcaatcgacctgtacgagctggaagaagagtattactcttcaagtagctcactctgtgaggccaacgatctgcccctttgtgaggcttacggccggcttgatctcgacactgattccgcagatggccttagcgcccccctactcgccagtccggaaccttctgctggccctttgcaggtggccgcccctgcgcacagccatgccggaggacccggaccgaccgagcacgcctag

SEQ ID NO: 235492 - DNA, 603 bp, Artificial Sequence
  derived and/or modified sequence
atggcccagcagcgggccctgccccagagcaaggagaccctgctgcaaagttacaacaagagactcaaggacgacataaaaagcattatggataactttacagagattattaaaacggccaagatcgaagacgagacccaggtgtcccgcgcaactcagggcgaacaggacaactacgagatgcacgtgcgcgccgccaacatcgtgcgggccggggagtctctcatgaagctggtgagcgacctaaaacagttcctgatactgaatgactttcctagcgtcaacgaagcaattgaccagaggaatcagcagctccgcaccctccaggaggaatgtgacagaaaactcattacactcagagatgaaatctctatcgacctttatgagctggaagaggagtactacagttcatcatcatcactatgcgaggcaaacgacttgcccttgtgcgaggcctacgggcgcctcgatctggatacggactccgccgatggcctctcggctcctttactggcatcaccggaaccatcagccggccccctccaggttgccgccccagctcatagccacgctgggggcccaggacctacagagcacgcatag

SEQ ID NO: 235493 - DNA, 603 bp, Artificial Sequence
  derived and/or modified sequence
atggcacagcagagggctctgcctcagtccaaggaaacgcttttacagtcctataacaaaaggctgaaagatgacatcaaaagcatcatggacaatttcaccgaaatcattaagaccgcgaaaatcgaggacgagacgcaggtctcaagagcgacccagggcgagcaagacaattatgagatgcacgttagggccgctaatatcgtgagagccggtgaatctctgatgaaactggttagcgacctcaaacaattcctgatcctaaacgatttcccctcagtgaatgaggctattgatcagcgtaatcagcagctgcgtaccctgcaggaagaatgcgatagaaaactgattaccctccgcgacgagatctctattgacctctatgagttggaagaggaatactattcctcatcatcatctttgtgtgaagcaaacgacttgccactctgtgaggcatatggccgactggatctagacaccgactcggctgacggattgtcggccccacttcttgctagcccggaacccagcgccggacccctgcaggtggccgcacccgcacatagtcatgccggaggccctgggcctactgaacatgcctag

SEQ ID NO: 235494 - DNA, 603 bp, Artificial Sequence
  derived and/or modified sequence
atggcgcagcagcgagccctgccccagtctaaggagaccctgctccagtcgtacaacaagcgcttgaaagacgacattaaaagtatcatggacaacttcaccgagatcattaagaccgcaaagattgaggatgagacccaggtgagtcgggctactcagggtgaacaggacaattatgagatgcacgtccgcgctgccaacattgtcagagcgggagagagcttgatgaaactcgtgagtgacctcaaacagtttctcattttgaatgactttcctagcgtcaacgaagccatagatcagagaaatcagcagctacggacactccaggaggaatgtgatcgcaaactgataaccttgcgcgatgaaatcagcatagacctatatgaacttgaggaggaatactactctagctcctcttcactgtgtgaggcgaacgacctgcccctctgcgaagcatatggcaggctggacctggacacagatagcgccgatggtctctcagcaccacttctggcctccccggagccttccgcgggacccttgcaggtggccgcacctgcacacagccatgcgggtggccctggccctacagagcacgcatag

SEQ ID NO: 235495 - DNA, 603 bp, Artificial Sequence
  derived and/or modified sequence
atggcccagcagagagccctgccccagagcaaggagaccctgctgcagagctacaacaagagactgaaggacgacatcaagagcatcatggacaacttcaccgagatcatcaagaccgccaagatcgaggacgagacccaggtgagcagagccacccagggcgagcaggacaactacgagatgcacgtgagagccgccaacatcgtgagagccggcgagagcctgatgaagctggtgagcgacctgaagcagttcctgatcctgaacgacttccccagcgtgaacgaggccatcgaccagagaaaccagcagctgagaaccctgcaggaggagtgcgacagaaagctgatcaccctgagagacgagatcagcatcgacctgtacgagctggaggaggagtactacagcagcagcagcagcctgtgcgaggccaacgacctgcccctgtgcgaggcctacggcagactggacctggacaccgacagcgccgacggcctgagcgcccccctgctggccagccccgagcccagcgccggccccctgcaggtggccgcccccgcccacagccacgccggcggccccggccccaccgagcacgcctag

SEQ ID NO: 235496 - protein, 524 aa, Artificial Sequence
  derived and/or modified sequence
MWRGLWTLAAQAARGPRRLCTRRSSGAPAPGSGATIFALSSGQGRCGIAVIRTSGPASGHALRILTAPRDLPLARHASLRLLSDPRSGEPLDRALVLWFPGPQSFTGEDCVEFHVHGGPAVVSGVLQALGSVPGLRPAEAGEFTRRAFANGKLNLTEVEGLADLIHAETEAQRRQALRQLDGELGHLCRGWAETLTKALAHVEAYIDFGEDDNLEEGVLEQGGSTWWWGRKTPHISPQRLPSLSLSACLLSPTADIEVRALQVALGAHLRDARRGQRLRSGVHVVVTGPPNAGKSSLVNLLSRKPVSIVSPEPGTTRDVLETPVDLAGFPVLLSDTAGLREGVGPVEQEGVRRARERLEQADLILAMLDASDLASPSSCNFLATVVASVGAQSPSDSSQRLLLVLNKSDLLSPEGPGPGPDLPPHLLLSCLTGEGLDGLLEALRKELAAVCGDPSTDPPLLTRARHQHHLQGCLDALGHYKQSKDLALAAEALRVARGHLTRLTGGGGTEEILDIIFQDFCVGK

SEQ ID NO: 235497 - DNA, 1575 bp, Artificial Sequence
  derived and/or modified sequence
atgtggagaggcctgtggaccctggccgcccaggccgccagaggccccagaagactgtgcaccagaagaagcagcggcgcccccgcccccggcagcggcgccaccatcttcgccctgagcagcggccagggcagatgcggcatcgccgtgatcagaaccagcggccccgccagcggccacgccctgagaatcctgaccgcccccagagacctgcccctggccagacacgccagcctgagactgctgagcgaccccagaagcggcgagcccctggacagagccctggtgctgtggttccccggcccccagagcttcaccggcgaggactgcgtggagttccacgtgcacggcggccccgccgtggtgagcggcgtgctgcaggccctgggcagcgtgcccggcctgagacccgccgaggccggcgagttcaccagaagagccttcgccaacggcaagctgaacctgaccgaggtggagggcctggccgacctgatccacgccgagaccgaggcccagagaagacaggccctgagacagctggacggcgagctgggccacctgtgcagaggctgggccgagaccctgaccaaggccctggcccacgtggaggcctacatcgacttcggcgaggacgacaacctggaggagggcgtgctggagcagggcggcagcacctggtggtggggcagaaagaccccccacatcagcccccagagactgcccagcctgagcctgagcgcctgcctgctgagccccaccgccgacatcgaggtgagagccctgcaggtggccctgggcgcccacctgagagacgccagaagaggccagagactgagaagcggcgtgcacgtggtggtgaccggcccccccaacgccggcaagagcagcctggtgaacctgctgagcagaaagcccgtgagcatcgtgagccccgagcccggcaccaccagagacgtgctggagacccccgtggacctggccggcttccccgtgctgctgagcgacaccgccggcctgagagagggcgtgggccccgtggagcaggagggcgtgagaagagccagagagagactggagcaggccgacctgatcctggccatgctggacgccagcgacctggccagccccagcagctgcaacttcctggccaccgtggtggccagcgtgggcgcccagagccccagcgacagcagccagagactgctgctggtgctgaacaagagcgacctgctgagccccgagggccccggccccggccccgacctgcccccccacctgctgctgagctgcctgaccggcgagggcctggacggcctgctggaggccctgagaaaggagctggccgccgtgtgcggcgaccccagcaccgacccccccctgctgaccagagccagacaccagcaccacctgcagggctgcctggacgccctgggccactacaagcagagcaaggacctggccctggccgccgaggccctgagagtggccagaggccacctgaccagactgaccggcggcggcggcaccgaggagatcctggacatcatcttccaggacttctgcgtgggcaagtag

SEQ ID NO: 235498 - DNA, 1575 bp, Artificial Sequence
  derived and/or modified sequence
atgtggagaggcctgtggacactggcagcacaagcagccaggggcccccggcggctttgcacacgaaggtcttcaggggcccctgccccgggcagcggcgcaacaatcttcgctctgagcagcggacaggggcgatgtggcatcgcggtgatacggaccagtgggcccgccagcggacatgcactacgaattctcacggccccacgtgatttacctctggcgcggcacgcttcactgaggcttctgagtgacccaagaagtggagagcctctggatcgcgctctggtcctgtggttccccggaccccagtctttcacaggggaggattgtgttgagtttcacgtacatggaggccctgccgtcgtgtctggcgtgttacaggccttggggtccgtgccaggactacggcctgccgaggcaggggaattcacgcgccgtgcattcgctaatgggaagctgaacctgaccgaagtggaaggtttggccgacttgattcacgcagagactgaggcccagcggcgtcaggcacttcgccagctcgatggtgaactcggccacttatgtcgcggatgggccgagacccttactaaggctttggcccacgtagaagcgtatattgatttcggcgaagacgacaacctggaagagggggtgttagagcaagggggaagcacctggtggtggggcagaaagactccccacataagccctcagagactgcctagcttgtctctctcagcatgtctcttgagtccaaccgcggatatcgaggtgagagccctacaagtcgccctaggggcgcacctccgagatgcccggaggggacagcggctccggagcggcgtccatgttgtcgtgactggccctccgaacgcggggaaatctagcctggtcaatctgttgagccggaagcctgtctccatagtgagtccagaaccgggtacgacacgcgacgttctcgagacacccgtggatctcgcgggatttcccgttctgcttagcgacactgctggcttaagagagggagtggggcccgtggaacaggagggggtacgtcgggcccgcgagaggttggaacaggccgacctaatcctggcaatgttagacgcaagcgacctcgcctcgcctagttcttgcaatttcctcgctaccgtggtcgcatcggtgggagcacagtccccgtccgattcctctcagagactgctcctggtcttgaataaaagcgatttgctgagtcctgaagggcctggccccgggcccgacctgccaccccacctgctccttagttgcctcactggggaggggctcgatggcctgctggaagctctgcgcaaggagctggccgctgtgtgtggagaccctagtaccgatcctccattactgacccgggcccgccaccagcaccacttgcaaggatgccttgacgcgctgggccactacaaacaatccaaagatcttgcattagcagctgaggccctgagagtggcgaggggacacctgacgcggctaacaggcggtggaggcacagaagaaattctggacataatatttcaggacttttgcgtggggaagtag

SEQ ID NO: 235499 - DNA, 1913 bp, Artificial Sequence
  derived and/or modified sequence
ggcaggcgggtcgcaggttgtaaatccatgtggcgggggctttggaccctggcggcccaagcggcacgtgggcctcgcagattgtgcacgcgccggagcagcggcgcaccagcccccggctccggcgccaccatcttcgcgctaagctctggccaaggccgctgcggcatcgcagtgatccggaccagcggccccgccagcggccacgccctccgaattctcacagcaccccgagacctgccccttgctcgccacgccagcctgcgcctgctcagcgatccccgctccggggagcctctggaccgcgcactggtgctctggttcccaggtccccagagtttcaccggtgaggactgcgtggagttccacgtgcatggaggcccggcagtggtgagcggcgtcctgcaggccttgggcagcgtgccagggcttcgaccggcggaggcaggcgagttcaccagacgggcgttcgccaatgggaagctgaacctgaccgaagtggaggggctggcggaccttatccacgcggaaacagaggcgcagcggcggcaggccctcaggcagctggacggagagctgggccacctctgccgtggctgggccgagaccctcaccaaagctctggcccacgtggaggcctatatcgatttcggcgaggatgacaacctggaggagggggtcctggagcaaggtgggtctacctggtggtgggggaggaagacacctcatatcagccctcaaaggctcccctcactgtctctctctgcctgccttctctcacccacagccgacatcgaagtacgggcactgcaggtggccctgggtgcacatctacgagatgccaggcgcgggcagaggctccgctcaggggtgcacgtagtggtcactggaccccccaatgcgggcaagagcagcctagtgaacctgctcagtcggaagcctgtgtccatcgtgtccccggagccagggaccacccgtgacgtgctggagaccccagtcgacctggccggatttcctgtgctgctgagcgacacggctgggttgcgggagggcgtggggcccgtggagcaggagggcgtgcggcgcgcccgggagaggctagagcaggctgacctcattctggccatgctggatgcttctgacctggcctctccctccagttgcaacttcctggccaccgtcgtagcctctgtgggagcccagagccccagtgacagcagccagcgcctcctcctggtgctgaacaagtcggacctgctgtccccggagggcccaggtcccggtcctgacctgcccccgcacctgctgctgtcctgtctgacgggagaggggctggacggcctcctggaggcgctgaggaaggagctagctgcagtgtgtggggacccgtccacagatcccccgctgctgacccgagcaaggcaccagcaccacctccagggttgcctggatgccctcggccactacaagcagtcaaaagacctggccctggcggcagaggcgctgcgggtggcccggggtcacctgacccggctcacaggtggagggggtaccgaggagatcctggacatcatcttccaggacttctgtgtgggcaagtgacgggatccagggaagtcgcacccaagctgcgtggagacccaggagcctcgggggatctggaaacagtttaggccaattgggattctcattcgcctgggaaagaacttgattctcaaatagtgaagcaacacagctgagaggtagtgagatccctgcagggactccctggagattcaggccctggaatggggctgaatggaggtcccgttcgacccttgatgctggggcatccgggttgggatggagataggaggatctcagtatatttgtttcgtagttttttatttattttgcaaataccaaaggaatgt

SEQ ID NO: 235500 - DNA, 1575 bp, Artificial Sequence
  derived and/or modified sequence
atgtggaggggcctgtggaccctggccgcccaggccgcccggggcccccggcggctgtgcacccggcgcagcagcggggccccagcccctggcagcggggccaccatctttgccctgagcagcggccagggccgctgtggcattgctgtgatccgcaccagcggccctgccagcggccacgccctgcgcatcctgacagccccccgggacctgcccctggcccggcatgccagcctgcggctgctgagtgaccccaggtctggagagcccctggaccgggccctggtgctgtggttccctggcccccagagcttcaccggggaggactgtgtggagttccacgtgcacggcggccctgctgtggtgtctggagtgctgcaggccctgggctctgtgcccggcctgcggcctgctgaggccggggagttcacccggcgggcctttgccaacgggaagctgaacctgacagaggtggagggcctggccgacctgattcatgctgagacagaggcccagaggcggcaggccctgcggcagctggatggagagctgggccacctgtgccggggctgggccgagaccctgaccaaggccctggcccacgtggaggcctacatcgactttggagaagatgacaacctggaggagggcgtgctggagcagggcggcagcacctggtggtggggcaggaagaccccccacatcagcccccagaggctgcccagcctgagcctgagcgcctgcctgctgagccccacagctgacatcgaggtgcgggccctgcaggtggccctgggcgcccacctgagagatgcccggcggggccagaggctgcggtctggagtgcacgtggtggtgactggacctccaaatgctgggaagagcagcctggtgaacctgctgagcaggaagcctgtgtccatcgtgtccccagagcccggcaccaccagagatgtgctggagacccctgtggacctggccggcttccctgtgctgctgagtgacacagctggcctgcgggagggcgtgggccctgtggagcaggagggcgtgcggcgggcccgggagcggctggagcaggccgacctgatcctggccatgctggatgccagtgacctggccagccccagcagctgcaacttcctggccaccgtggtggcctctgtgggcgcccagagccccagcgacagcagccagaggctgctgctggtgctgaacaagagtgacctgctgagccctgagggccctggccctggccctgacctgcccccccacctgctgctgagctgcctgaccggggagggcctggatggcctgctggaggccctgaggaaggagctggccgctgtgtgtggggaccccagcacagacccccccctgctgacccgggcccggcaccagcaccacctgcagggctgcctggatgccctgggccactacaagcagagcaaggacctggccctggccgctgaggccctgcgggtggcccggggccacctgacccggctgaccggcggcggcggcacagaggagatcctggacatcatcttccaggacttctgtgtgggcaagtag

SEQ ID NO: 235501 - DNA, 1575 bp, Artificial Sequence
  derived and/or modified sequence
atgtggcggggcctgtggaccctggccgcccaggccgcccggggcccacggaggctctgtacacgcagaagcagcggcgcaccagctccaggttccggggccaccatctttgcgttgagcagtggccagggtcggtgcggcattgcggtcattcggacatccggtccagcatcgggccacgcccttaggattctgaccgctccccgtgatcttcccctcgcccgacacgcatctctccgtctgctcagcgatcccaggagtggcgagccactggatagagctctcgtgctgtggtttcctggtccacagtcttttaccggcgaggattgcgttgagtttcacgtgcacggcggcccggcggtggtctccggagtgcttcaagccctggggtccgtcccgggactaaggcctgcagaggctggcgagttcacacgacgagcctttgccaatggcaagctgaatctgaccgaagttgagggtctggccgatctgatacacgccgaaacggaagcgcaacggcgtcaagccctcagacagctggatggagaactcggccacctgtgcaggggctgggcagaaacattgacaaaggctttggctcacgttgaggcttacatcgacttcggggaggacgacaacctggaagagggcgtgctcgagcagggggggagtacatggtggtggggaagaaagacgccccatattagcccacaacggctgccatctctgtctttatcagcctgcctactgtcccccaccgccgatattgaggtgcgcgccctgcaagtggcactgggggcccatctccgagatgccagacgagggcagagactgcggtctggggtccatgtggtcgtgacgggcccgccaaatgcaggaaaaagctcactggtgaatttactatccagaaagcctgtcagcattgtttcgcccgaaccgggcaccactagggacgtcctggagaccccagttgacctggcaggctttccagtgctgctttccgacacagccggattaagagagggcgttggtccggtggagcaggagggtgtgcggagggcaagagaacgtctcgaacaggctgacttgatcctggccatgctagacgcctcagacttggcctcaccatcttcctgtaacttcttagctactgttgttgccagtgtcggggcacagagcccatctgactccagccagcgtcttctcttagtgctgaacaaaagtgatctcctttcccctgagggacccggacccggtcccgatttgcctccgcacctgttgctttcttgtttaaccggggaagggcttgacggtctgctcgaagccctgcggaaagagctggccgctgtatgtggcgacccttcgactgatccccctttgctaacgagggcgcggcatcagcaccatcttcaggggtgcttggatgcactcgggcactacaagcagagtaaggacctcgcactggccgcagaagcccttcgagtggcacggggccatcttactaggctcactggaggtggcggtacagaggagatcctggatattatttttcaggacttttgtgtggggaaatag

SEQ ID NO: 235502 - DNA, 1575 bp, Artificial Sequence
  derived and/or modified sequence
atgtggaggggcctgtggacacttgcagcccaggctgcccgaggcccacggagattgtgtacccgcagatcctcaggggctccagccccaggctctggcgctactatattcgctctatcctcgggccaagggagatgcggcatcgccgtcattagaacatccggtccagcttccgggcatgctctgagaatacttacagctcccagggatctgcctctggcacggcatgcttccttgagactcctgtcagatccgcgatccggcgaacctttggatcgggcacttgttctctggttcccaggccctcagtcttttacgggagaggactgtgtggaatttcatgtccacgggggacccgctgtagtgagcggcgtcctgcaggcccttggttcagtgcccggtttgcggcctgcagaggccggagagttcacacgaagggccttcgccaatggaaagctgaacctcactgaagtggaggggctcgctgatttgatacatgccgaaacggaggctcagaggaggcaagctctccggcaattagatggggaacttggccacctgtgccgtgggtgggcagaaacattgacaaaggctttagctcacgtggaagcctatatcgactttggagaagacgacaacctggaggaaggggtgcttgagcaggggggatccacttggtggtgggggagaaaaacaccacacattagcccacaacggctgccgagtctgtctttgtccgcttgccttctctctcctacggctgatatcgaggtccgtgcattgcaagtggcactcggagctcatctccgcgatgcaagacggggtcaacgcttgaggtctggagtgcatgtagtcgtcaccggacccccaaacgcgggaaagtcctctctcgtgaacctgctgtctcgcaagcccgtcagtattgtgtcccctgaacccggtaccacacgcgatgtgttggaaacccctgtcgatctagctggattccccgtcctcctgtctgacaccgcgggtttgcgcgagggagtgggtccggtggagcaggagggcgtgcggcgagcccgagaacggctagagcaggctgacttgatactggccatgctggacgcatctgaccttgcgtctccaagttcctgcaacttcctggccaccgtcgtagcctcggtgggtgcacagagcccatcggactcctctcagcggctcctgctcgtgctgaataaaagcgatcttctgtctccggaggggccaggccctggaccagacctcccccctcatctgttacttagttgtcttaccggggagggactcgatggcctcctagaggctctcagaaaagagttagccgctgtctgtggcgatccgagcaccgacccgcctctcttaacaagggccagacatcaacatcacctccaggggtgcctggacgccctgggccactacaagcagtcaaaggacctggcgttggctgctgaagcactcagggtggcccgaggacacctcacacgattgaccggtgggggtggaaccgaggaaattttagatatcatcttccaggacttctgcgttggcaagtag

SEQ ID NO: 235503 - protein, 717 aa, Artificial Sequence
  derived and/or modified sequence
MFYFRGCGRWVAVSFTKQQFPLARLSSDSAAPRTPHFDVIVIGGGHAGTEAATAAARCGSRTLLLTHRVDTIGQMSCNPSFGGIGKGHLMREVDALDGLCSRICDQSGVHYKVLNRRKGPAVWGLRAQIDRKLYKQNMQKEILNTPLLTVQEGAVEDLILTEPEPEHTGKCRVSGVVLVDGSTVYAESVILTTGTFLRGMIVIGLETHPAGRLGDQPSIGLAQTLEKLGFVVGRLKTGTPPRIAKESINFSILNKHIPDNPSIPFSFTNETVWIKPEDQLPCYLTHTNPRVDEIVLKNLHLNSHVKETTRGPRYCPSIESKVLRFPNRLHQVWLEPEGMDSDLIYPQGLSMTLPAELQEKMITCIRGLEKAKVIQPDGVLLLLPRMECNGAISAHHNLPLPGYGVQYDYLDPRQITPSLETHLVQRLFFAGQINGTTGYEEAAAQGVIAGINASLRVSRKPPFVVSRTEGYIGVLIDDLTTLGTSEPYRMFTSRVEFRLSLRPDNADSRLTLRGYKDAGCVSQQRYERACWMKSSLEEGISVLKSIEFLSSKWKKLIPEASISTSRSLPVRALDVLKYEEVDMDSLAKAVPEPLKKYTKCRELAERLKIEATYESVLFHQLQEIKGVQQDEALQLPKDLDYLTIRDVSLSHEVREKLHFSRPQTIGAASRIPGVTPAAIINLLRFVKTTQRRQSAMNESSKTDQYLCDADRLQEREL

SEQ ID NO: 235504 - protein, 643 aa, Artificial Sequence
  derived and/or modified sequence
MSCNPSFGGIGKGHLMREVDALDGLCSRICDQSGVHYKVLNRRKGPAVWGLRAQIDRKLYKQNMQKEILNTPLLTVQEGAVEDLILTEPEPEHTGKCRVSGVVLVDGSTVYAESVILTTGTFLRGMIVIGLETHPAGRLGDQPSIGLAQTLEKLGFVVGRLKTGTPPRIAKESINFSILNKHIPDNPSIPFSFTNETVWIKPEDQLPCYLTHTNPRVDEIVLKNLHLNSHVKETTRGPRYCPSIESKVLRFPNRLHQVWLEPEGMDSDLIYPQGLSMTLPAELQEKMITCIRGLEKAKVIQPDGVLLLLPRMECNGAISAHHNLPLPGYGVQYDYLDPRQITPSLETHLVQRLFFAGQINGTTGYEEAAAQGVIAGINASLRVSRKPPFVVSRTEGYIGVLIDDLTTLGTSEPYRMFTSRVEFRLSLRPDNADSRLTLRGYKDAGCVSQQRYERACWMKSSLEEGISVLKSIEFLSSKWKKLIPEASISTSRSLPVRALDVLKYEEVDMDSLAKAVPEPLKKYTKCRELAERLKIEATYESVLFHQLQEIKGVQQDEALQLPKDLDYLTIRDVSLSHEVREKLHFSRPQTIGAASRIPGVTPAAIINLLRFVKTTQRRQSAMNESSKTDQYLCDADRLQEREL

SEQ ID NO: 235505 - DNA, 2154 bp, Artificial Sequence
  derived and/or modified sequence
atgttctacttcagaggctgcggcagatgggtggccgtgagcttcaccaagcagcagttccccctggccagactgagcagcgacagcgccgcccccagaaccccccacttcgacgtgatcgtgatcggcggcggccacgccggcaccgaggccgccaccgccgccgccagatgcggcagcagaaccctgctgctgacccacagagtggacaccatcggccagatgagctgcaaccccagcttcggcggcatcggcaagggccacctgatgagagaggtggacgccctggacggcctgtgcagcagaatctgcgaccagagcggcgtgcactacaaggtgctgaacagaagaaagggccccgccgtgtggggcctgagagcccagatcgacagaaagctgtacaagcagaacatgcagaaggagatcctgaacacccccctgctgaccgtgcaggagggcgccgtggaggacctgatcctgaccgagcccgagcccgagcacaccggcaagtgcagagtgagcggcgtggtgctggtggacggcagcaccgtgtacgccgagagcgtgatcctgaccaccggcaccttcctgagaggcatgatcgtgatcggcctggagacccaccccgccggcagactgggcgaccagcccagcatcggcctggcccagaccctggagaagctgggcttcgtggtgggcagactgaagaccggcaccccccccagaatcgccaaggagagcatcaacttcagcatcctgaacaagcacatccccgacaaccccagcatccccttcagcttcaccaacgagaccgtgtggatcaagcccgaggaccagctgccctgctacctgacccacaccaaccccagagtggacgagatcgtgctgaagaacctgcacctgaacagccacgtgaaggagaccaccagaggccccagatactgccccagcatcgagagcaaggtgctgagattccccaacagactgcaccaggtgtggctggagcccgagggcatggacagcgacctgatctacccccagggcctgagcatgaccctgcccgccgagctgcaggagaagatgatcacctgcatcagaggcctggagaaggccaaggtgatccagcccgacggcgtgctgctgctgctgcccagaatggagtgcaacggcgccatcagcgcccaccacaacctgcccctgcccggctacggcgtgcagtacgactacctggaccccagacagatcacccccagcctggagacccacctggtgcagagactgttcttcgccggccagatcaacggcaccaccggctacgaggaggccgccgcccagggcgtgatcgccggcatcaacgccagcctgagagtgagcagaaagccccccttcgtggtgagcagaaccgagggctacatcggcgtgctgatcgacgacctgaccaccctgggcaccagcgagccctacagaatgttcaccagcagagtggagttcagactgagcctgagacccgacaacgccgacagcagactgaccctgagaggctacaaggacgccggctgcgtgagccagcagagatacgagagagcctgctggatgaagagcagcctggaggagggcatcagcgtgctgaagagcatcgagttcctgagcagcaagtggaagaagctgatccccgaggccagcatcagcaccagcagaagcctgcccgtgagagccctggacgtgctgaagtacgaggaggtggacatggacagcctggccaaggccgtgcccgagcccctgaagaagtacaccaagtgcagagagctggccgagagactgaagatcgaggccacctacgagagcgtgctgttccaccagctgcaggagatcaagggcgtgcagcaggacgaggccctgcagctgcccaaggacctggactacctgaccatcagagacgtgagcctgagccacgaggtgagagagaagctgcacttcagcagaccccagaccatcggcgccgccagcagaatccccggcgtgacccccgccgccatcatcaacctgctgagattcgtgaagaccacccagagaagacagagcgccatgaacgagagcagcaagaccgaccagtacctgtgcgacgccgacagactgcaggagagagagctgtag

SEQ ID NO: 235506 - DNA, 1932 bp, Artificial Sequence
  derived and/or modified sequence
atgagctgcaaccccagcttcggcggcatcggcaagggccacctgatgagagaggtggacgccctggacggcctgtgcagcagaatctgcgaccagagcggcgtgcactacaaggtgctgaacagaagaaagggccccgccgtgtggggcctgagagcccagatcgacagaaagctgtacaagcagaacatgcagaaggagatcctgaacacccccctgctgaccgtgcaggagggcgccgtggaggacctgatcctgaccgagcccgagcccgagcacaccggcaagtgcagagtgagcggcgtggtgctggtggacggcagcaccgtgtacgccgagagcgtgatcctgaccaccggcaccttcctgagaggcatgatcgtgatcggcctggagacccaccccgccggcagactgggcgaccagcccagcatcggcctggcccagaccctggagaagctgggcttcgtggtgggcagactgaagaccggcaccccccccagaatcgccaaggagagcatcaacttcagcatcctgaacaagcacatccccgacaaccccagcatccccttcagcttcaccaacgagaccgtgtggatcaagcccgaggaccagctgccctgctacctgacccacaccaaccccagagtggacgagatcgtgctgaagaacctgcacctgaacagccacgtgaaggagaccaccagaggccccagatactgccccagcatcgagagcaaggtgctgagattccccaacagactgcaccaggtgtggctggagcccgagggcatggacagcgacctgatctacccccagggcctgagcatgaccctgcccgccgagctgcaggagaagatgatcacctgcatcagaggcctggagaaggccaaggtgatccagcccgacggcgtgctgctgctgctgcccagaatggagtgcaacggcgccatcagcgcccaccacaacctgcccctgcccggctacggcgtgcagtacgactacctggaccccagacagatcacccccagcctggagacccacctggtgcagagactgttcttcgccggccagatcaacggcaccaccggctacgaggaggccgccgcccagggcgtgatcgccggcatcaacgccagcctgagagtgagcagaaagccccccttcgtggtgagcagaaccgagggctacatcggcgtgctgatcgacgacctgaccaccctgggcaccagcgagccctacagaatgttcaccagcagagtggagttcagactgagcctgagacccgacaacgccgacagcagactgaccctgagaggctacaaggacgccggctgcgtgagccagcagagatacgagagagcctgctggatgaagagcagcctggaggagggcatcagcgtgctgaagagcatcgagttcctgagcagcaagtggaagaagctgatccccgaggccagcatcagcaccagcagaagcctgcccgtgagagccctggacgtgctgaagtacgaggaggtggacatggacagcctggccaaggccgtgcccgagcccctgaagaagtacaccaagtgcagagagctggccgagagactgaagatcgaggccacctacgagagcgtgctgttccaccagctgcaggagatcaagggcgtgcagcaggacgaggccctgcagctgcccaaggacctggactacctgaccatcagagacgtgagcctgagccacgaggtgagagagaagctgcacttcagcagaccccagaccatcggcgccgccagcagaatccccggcgtgacccccgccgccatcatcaacctgctgagattcgtgaagaccacccagagaagacagagcgccatgaacgagagcagcaagaccgaccagtacctgtgcgacgccgacagactgcaggagagagagctgtag

SEQ ID NO: 235507 - DNA, 2154 bp, Artificial Sequence
  derived and/or modified sequence
atgttctatttcagaggatgtggaaggtgggttgcggtgagctttaccaagcagcagttccctcttgcccgcctgtcttccgactctgcagctccgcgcacccctcattttgatgtgattgtgattggcggagggcacgccggcacagaggctgccactgctgccgcccgttgtggaagcagaacgcttttgttaacccacagggtggacaccattggtcaaatgagttgcaatccatcattcggtgggattgggaaaggccacttaatgcgtgaagtcgacgctctcgatggcctctgctccaggatttgcgatcagagcggcgttcactacaaagtactgaatcgacggaagggccctgcggtgtggggacttcgcgctcagatagatcgaaagctgtacaaacaaaatatgcagaaagaaatccttaacacaccgctactaacagtgcaagaaggtgctgtggaagatttgattctaactgagccagaacccgaacacaccggaaagtgcagggtgtctggcgtggtgctggtggatggctcaacagtgtatgcggaatctgtcatcctgaccacaggaactttcctgaggggcatgattgtgatcggcctggaaacccaccccgcaggcagactaggcgatcagccttccattggcctggcacaaacgctcgaaaagctgggatttgtagtcggccggctgaagacgggaacaccacctcgaatagcaaaggaatcaatcaattttagcatcctgaacaagcatattcccgacaatccgagcatccccttttcctttactaatgaaacagtgtggatcaaacctgaggatcaactgccatgttatttgacccacactaatccgagagtcgacgagatcgtgttgaaaaatctgcaccttaactctcacgtgaaagagaccactcgcggccccagatattgcccaagcatcgaatccaaagtgttgcgattccccaataggctgcatcaggtgtggctggaacctgagggtatggactctgatctgatttacccacaaggactgagtatgacactgcccgccgaattacaggaaaagatgatcacatgtatccgcggattggagaaggccaaggtaatccagcccgacggtgtcttgctcctgctgccgcgcatggagtgtaacggagccatatctgcacaccacaacctgcccttacctgggtatggcgtgcagtacgactacctcgatccaaggcagataaccccatctctagagacccacctcgtgcaaagattgttctttgcaggtcagattaatggcaccactggctacgaagaggctgcggcgcagggggtgattgccggcatcaatgcgtccctgagagtctctaggaagccaccgttcgtggtgagcagaacggaaggatacataggtgttttaatcgacgacttgacaacactcggaacttcggagccctataggatgtttaccagtcgggttgaattccggttaagtctacggccagataatgcagattctcgcctgaccctcaggggatacaaggatgctggctgtgtttctcagcagagatatgaaagggcctgttggatgaaatcgagtctggaagagggcatctccgtgctgaaatctattgagttcctatcatcgaaatggaagaagctgatccctgaagcttccatatccacatctaggagtttaccggttagagctctggatgttctaaagtatgaggaagtagatatggatagcttggcaaaggcagttccagagcccctcaagaagtacacaaaatgtcgagaactggctgaaagactcaaaatcgaggctacgtatgagtcagtgctctttcatcagctgcaggagataaagggggtgcagcaagacgaagccttgcaactgcctaaggaccttgattacctcaccatacgcgacgtatccctcagccacgaggttagagaaaagctgcacttttcccggccccaaaccatcggagcagcttcccggattcccggcgtcacacctgcggccatcataaacttactgaggtttgtgaagacaacacagcggagacaatctgcaatgaacgagagctcaaaaaccgatcagtacctctgtgacgccgataggctgcaggagcgggaattgtag

SEQ ID NO: 235508 - DNA, 1932 bp, Artificial Sequence
  derived and/or modified sequence
atgtcctgtaatccttctttcggggggattggcaaaggccacctgatgagggaagtggatgcactcgacggcctgtgttcgcgcatatgtgatcaaagtggagtccactataaagtcctgaacaggaggaaaggccccgccgtttggggactcagagcccaaattgatcgaaagctctacaagcagaatatgcaaaaggaaattctgaatactcccctccttaccgtgcaagagggagctgtcgaggacctgatactcaccgagccggagcccgagcatacaggcaaatgccgggtatcaggcgttgtcctggttgacggtagcaccgtgtacgccgagtccgtcatccttactaccggaacttttctcagaggaatgattgtgatcggccttgaaactcaccccgcggggcgcctcggcgatcagcccagcattggacttgctcagacgcttgagaaacttgggttcgttgttgggcgcctaaagactggaacacctccccgcatagctaaagagtcgatcaacttctctattctgaacaagcacattccggataatccatccattcccttcagctttacaaacgaaacagtttggataaaacctgaggatcagctcccttgctacctcacacataccaacccaagagttgatgaaatagtgctaaaaaacctccacctgaatagtcatgtcaaagagacaacccggggtccgcggtattgtccatccatcgagagtaaagtgctgcgttttcctaatcgacttcaccaggtgtggctggagcctgaagggatggactccgatctgatttaccctcaaggactgagtatgacactccctgctgaactgcaggaaaagatgatcacgtgcattagaggtttggaaaaggcaaaggtcatacagccagatggcgtgctgcttctgttgcctaggatggaatgtaacggcgcaatcagcgcacatcacaatctgccactcccagggtatggtgtgcagtatgattatctggatccccgccagatcactccttcactggagactcacctggtgcagaggctgtttttcgccggccaaatcaacggcacaactgggtatgaggaagctgcagcacagggcgtaatagcgggaataaacgcgtccctgcgcgtctcccgaaagcctcctttcgtcgtgagccggacagagggatacatcggcgttctgatagacgatttgacgacactcggcacatccgagccttataggatgttcacctctagggtggagtttagactgagcctgagaccggacaatgctgactctcgactgaccctgagagggtataaggacgcagggtgcgtgagccagcagcggtatgaaagggcatgttggatgaaatcatcactggaagaggggatcagcgttctgaagtctattgaatttttaagttcaaagtggaagaaactgattcccgaggcctcaatctccactagcaggagtctcccagtgcgagcacttgatgtgctgaaatatgaggaggtcgacatggacagtcttgctaaagccgtcccagagcccctcaagaagtataccaagtgtcgagaattggccgaaagactcaagattgaggccacatacgaaagcgtactgtttcatcagctacaagagataaaaggggtgcaacaggacgaagctttgcagttgccgaaggatcttgactacctcaccatacgggatgtatcactttctcacgaggtccgcgaaaagctgcactttagtcggcctcagacgattggagcagccagccgaatcccaggtgtcactccagccgcaattataaatctgctgcggttcgtgaaaacaacccaaagaagacaaagcgctatgaacgaaagctccaaaaccgatcagtacctatgcgacgcagaccggcttcaggaacgcgaactgtag

SEQ ID NO: 235509 - DNA, 2154 bp, Artificial Sequence
  derived and/or modified sequence
atgttctacttccggggctgcggccgctgggtggccgtgtccttcaccaagcagcagttccccctggcccggctgagcagtgacagcgctgcccccaggaccccccactttgatgtgattgtcatcggcggcggccatgctggaacagaagctgccacagctgctgcccgctgtggcagcaggaccctgctgctgacccaccgggtggacaccatcggccagatgagctgcaaccccagctttggaggcatcggcaagggccacctgatgagggaggtggatgccctggatggcctgtgcagccgcatctgtgaccagagcggcgtgcactacaaggtgctgaacagaaggaagggccctgctgtgtggggcctgcgggcccagattgacaggaagctgtacaagcagaacatgcagaaggagatcctgaacacccccctgctgactgtgcaggagggcgctgtggaggacctgatcctgacagagcctgagcctgagcacacaggcaagtgccgggtgtctggagtggtgctggtggatggcagcacagtgtatgcagagagcgtcatcctgaccaccggcaccttcctgcggggcatgattgtgattggcctggagacccaccctgctggccgcctgggggaccagcccagcatcggcctggcccagaccctggagaagctgggctttgtggtgggccgcctgaagacaggcaccccaccaagaattgccaaggagagcatcaacttcagcatcctgaacaagcacatcccagacaaccccagcatccccttctccttcaccaatgaaacagtgtggatcaagccagaggaccagctgccctgctacctgacccacaccaacccccgggtggatgagatcgtgctgaagaacctgcacctgaacagccacgtgaaggagaccacccggggcccccgctactgccccagcattgagagcaaggtgctgcgcttccccaaccggctgcaccaggtgtggctggagcctgagggcatggacagcgacctgatctacccccagggcctgtccatgaccctgcctgctgagctgcaggagaagatgatcacctgcatccggggcctggagaaggccaaggtgatccagccagatggagtgctgctgctgctgcccaggatggagtgcaatggagccatcagcgcccaccacaacctgcccctgcccggctatggagtgcagtatgactacctggacccccggcagatcacccccagcctggagacccacctggtgcagaggctcttctttgctggccagatcaatggcaccaccggctatgaggaggccgccgcccagggcgtgattgctggcatcaatgccagcctgcgggtgtccaggaagcccccatttgtggtgtccaggacagagggctacatcggcgtgctgattgatgacctgaccaccctgggcaccagcgagccctacaggatgttcaccagccgggtggagttccggctgagcctgcggccagacaatgctgacagccggctgaccctgcggggctacaaggatgctggctgtgtgtcccagcagagatatgaaagagcctgctggatgaagagcagcctggaggagggcatctctgtgctgaagagcattgagttcctgagcagcaagtggaagaagctgatccctgaggccagcatcagcaccagccgcagcctgcctgtgcgggccctggatgtgctgaagtatgaggaggtggacatggacagcctggccaaggctgtgcctgagcccctgaagaagtacaccaagtgccgggagctggccgagcggctgaagattgaggccacctatgaatctgtgctcttccaccagctgcaggagatcaagggcgtgcagcaggatgaggccctgcagctgcccaaggacctggactacctgaccatcagagatgtgtccctgagccatgaggtgcgggagaagctgcacttcagccggccccagaccatcggggccgccagccgcatccctggggtgaccccagctgccatcatcaacctgctgcgctttgtgaagaccacccagaggcggcagagcgccatgaatgaaagcagcaagacagaccagtacctgtgtgatgctgaccggctgcaggagcgggagctgtag

SEQ ID NO: 235510 - DNA, 1932 bp, Artificial Sequence
  derived and/or modified sequence
atgagctgcaaccccagctttggaggcatcggcaagggccacctgatgagggaggtggatgccctggatggcctgtgcagccgcatctgtgaccagagcggcgtgcactacaaggtgctgaacagaaggaagggccctgctgtgtggggcctgcgggcccagattgacaggaagctgtacaagcagaacatgcagaaggagatcctgaacacccccctgctgactgtgcaggagggcgctgtggaggacctgatcctgacagagcctgagcctgagcacacaggcaagtgccgggtgtctggagtggtgctggtggatggcagcacagtgtatgcagagagcgtcatcctgaccaccggcaccttcctgcggggcatgattgtgattggcctggagacccaccctgctggccgcctgggggaccagcccagcatcggcctggcccagaccctggagaagctgggctttgtggtgggccgcctgaagacaggcaccccaccaagaattgccaaggagagcatcaacttcagcatcctgaacaagcacatcccagacaaccccagcatccccttctccttcaccaatgaaacagtgtggatcaagccagaggaccagctgccctgctacctgacccacaccaacccccgggtggatgagatcgtgctgaagaacctgcacctgaacagccacgtgaaggagaccacccggggcccccgctactgccccagcattgagagcaaggtgctgcgcttccccaaccggctgcaccaggtgtggctggagcctgagggcatggacagcgacctgatctacccccagggcctgtccatgaccctgcctgctgagctgcaggagaagatgatcacctgcatccggggcctggagaaggccaaggtgatccagccagatggagtgctgctgctgctgcccaggatggagtgcaatggagccatcagcgcccaccacaacctgcccctgcccggctatggagtgcagtatgactacctggacccccggcagatcacccccagcctggagacccacctggtgcagaggctcttctttgctggccagatcaatggcaccaccggctatgaggaggccgccgcccagggcgtgattgctggcatcaatgccagcctgcgggtgtccaggaagcccccatttgtggtgtccaggacagagggctacatcggcgtgctgattgatgacctgaccaccctgggcaccagcgagccctacaggatgttcaccagccgggtggagttccggctgagcctgcggccagacaatgctgacagccggctgaccctgcggggctacaaggatgctggctgtgtgtcccagcagagatatgaaagagcctgctggatgaagagcagcctggaggagggcatctctgtgctgaagagcattgagttcctgagcagcaagtggaagaagctgatccctgaggccagcatcagcaccagccgcagcctgcctgtgcgggccctggatgtgctgaagtatgaggaggtggacatggacagcctggccaaggctgtgcctgagcccctgaagaagtacaccaagtgccgggagctggccgagcggctgaagattgaggccacctatgaatctgtgctcttccaccagctgcaggagatcaagggcgtgcagcaggatgaggccctgcagctgcccaaggacctggactacctgaccatcagagatgtgtccctgagccatgaggtgcgggagaagctgcacttcagccggccccagaccatcggggccgccagccgcatccctggggtgaccccagctgccatcatcaacctgctgcgctttgtgaagaccacccagaggcggcagagcgccatgaatgaaagcagcaagacagaccagtacctgtgtgatgctgaccggctgcaggagcgggagctgtag

SEQ ID NO: 235511 - DNA, 2961 bp, Artificial Sequence
  derived and/or modified sequence
ggccgcgccctgcagattgtctcttgttgcgtaagtttttttgaccgtcactcgtgtcagcttcaaagtcagatagatttttctcccagcatgttctacttccgaggctgtggccgttgggtcgcggtttccttcaccaagcagcaatttccgttggcacggttgagcagtgacagcgcggcgccccggactccgcacttcgacgtgatagtcattggtggaggacatgccgggactgaggcagccaccgccgccgctcggtgcggctctcggactctgctcctcactcaccgcgtggacacgatcggtcagatgtcatgtaatccttcctttggtggcatcggaaagggacatttaatgagggaagtagatgccttggatggcctgtgttctcgcatctgtgaccagtctggtgtacattataaagtattaaaccggcgtaagggaccagctgtgtggggtctgagagctcagattgataggaaactctataaacagaacatgcagaaagaaatcttgaatacaccactgcttactgttcaggagggagctgtagaagatcttattcttacagaaccagagcctgaacacactgggaaatgccgtgtcagtggggttgttttggtggatggaagcacagtatatgcagagagtgtgattctgactactgggacatttctgagaggcatgattgtaattggattggagacgcatccagcaggacgtttaggggatcagccttctataggattggctcagacactggagaagttagggtttgtggtgggaaggttgaagactgggactccaccccgaattgccaaagagtccattaatttcagtattctaaacaagcatataccggacaatccatccataccattcagctttaccaatgagacagtatggattaagccagaagatcagctgccatgttacttgactcacaccaaccctagagtggatgagattgtccttaagaaccttcaccttaatagtcatgttaaagaaacgacaagaggacctcgatactgtccctccattgaatcaaaagttttgcgttttccaaaccgtctacatcaggtttggttggaacctgaaggaatggattctgaccttatctacccacaggggttatctatgacgctaccagctgagttacaagagaaaatgatcacatgcatcagaggcttggagaaagctaaagtgattcagccagacggagttttgctcttgttgcccaggatggagtgcaatggtgcgatctcggctcaccacaacctccccctgccaggctacggtgttcagtatgattacttagatccccgtcagatcaccccttccttggagactcatttggttcaacgactcttctttgctggacagatcaatggcaccactggttatgaggaagctgcagctcaaggtgtgatagccggaatcaacgccagtcttcgggtcagtcgcaagcctccctttgtggttagccgaacagaaggttacataggagtcttgattgatgacctcactactctgggcaccagtgaaccataccgcatgtttaccagccgagtagagttccgtttgtcactgcgccctgataatgctgacagccggctcacactgcgagggtataaagacgctggctgtgtgtcccaacaacgatatgaaagagcttgttggatgaagtcttctttagaagaaggcatttctgtgttgaaatctattgagtttttgagctctaaatggaaaaaattaatcccagaggcttctataagtactagtagaagtctgcctgtcagagctctcgatgttctgaagtatgaggaagttgacatggattcattagccaaggctgttccagagcccttgaagaagtatactaaatgtagagagctggctgaaagactgaaaatagaagccacttatgaatcagtgttgttccatcaactacaagaaataaagggagttcagcaagatgaagctctccaactgccaaaagacctagattatttgactatcagggatgtgtctttgtcccatgaagttcgagagaaactacattttagtcgtccacagacgatcggggctgctagtcgcatacccggagtaacacctgccgccatcatcaatctgctgagatttgtgaagaccactcaacgaagacagtcggctatgaatgaatcatccaagactgatcaatacttatgtgatgcagacagacttcaagagagagagttatagctttcaattcataaaagatttttaaagagcatataaataatttgatcaatacaacagtatagataaaagaattatttagcacatgttaaaatagctttattaggttactatgggtttgccattaatttctgagtgggacagaaattataattgtgctttttcgtgtatatgaaaaaactagtcgtaaacaatttgtactctttctttaaggagctgtaatacaaataactttgtgcagtgttcatcaaagagagagacagtgaacctaaaactgaacctggaataaaactcaacatgcagatttgcctactcatagggactttgcctattaagtctaccaaattaaaagtcttatcattcagcgtgttttgagagttaataatcttttgcttggttatactaggctaggaagcaatatcaaagcccttaaattctcaagactaaagacttgagattatataaaattatccagaatcattcagctaatactattggaatatagtatgtagggtgaaagttgacagaaatctgtacttcttcaggaaatcctcactggtaattgttttgaacattaatgaaagccctataaaatagaaagattggaaatcaccattgtttcctattatccacagtgtggatggatacttatttggtgacctagttatgggagaattgagtaacgttagttattttatatcataccataaaaatattttc

SEQ ID NO: 235512 - DNA, 2174 bp, Artificial Sequence
  derived and/or modified sequence
cgtgatattaaagcaagatggccgcgccctgcagattgtctcttgttgcgtcagatgtcatgtaatccttcctttggtggcatcggaaagggacatttaatgagggaagtagatgccttggatggcctgtgttctcgcatctgtgaccagtctggtgtacattataaagtattaaaccggcgtaagggaccagctgtgtggggtctgagagctcagattgataggaaactctataaacagaacatgcagaaagaaatcttgaatacaccactgcttactgttcaggagggagctgtagaagatcttattcttacagaaccagagcctgaacacactgggaaatgccgtgtcagtggggttgttttggtggatggaagcacagtatatgcagagagtgtgattctgactactgggacatttctgagaggcatgattgtaattggattggagacgcatccagcaggacgtttaggggatcagccttctataggattggctcagacactggagaagttagggtttgtggtgggaaggttgaagactgggactccaccccgaattgccaaagagtccattaatttcagtattctaaacaagcatataccggacaatccatccataccattcagctttaccaatgagacagtatggattaagccagaagatcagctgccatgttacttgactcacaccaaccctagagtggatgagattgtccttaagaaccttcaccttaatagtcatgttaaagaaacgacaagaggacctcgatactgtccctccattgaatcaaaagttttgcgttttccaaaccgtctacatcaggtttggttggaacctgaaggaatggattctgaccttatctacccacaggggttatctatgacgctaccagctgagttacaagagaaaatgatcacatgcatcagaggcttggagaaagctaaagtgattcagccagacggagttttgctcttgttgcccaggatggagtgcaatggtgcgatctcggctcaccacaacctccccctgccaggctacggtgttcagtatgattacttagatccccgtcagatcaccccttccttggagactcatttggttcaacgactcttctttgctggacagatcaatggcaccactggttatgaggaagctgcagctcaaggtgtgatagccggaatcaacgccagtcttcgggtcagtcgcaagcctccctttgtggttagccgaacagaaggttacataggagtcttgattgatgacctcactactctgggcaccagtgaaccataccgcatgtttaccagccgagtagagttccgtttgtcactgcgccctgataatgctgacagccggctcacactgcgagggtataaagacgctggctgtgtgtcccaacaacgatatgaaagagcttgttggatgaagtcttctttagaagaaggcatttctgtgttgaaatctattgagtttttgagctctaaatggaaaaaattaatcccagaggcttctataagtactagtagaagtctgcctgtcagagctctcgatgttctgaagtatgaggaagttgacatggattcattagccaaggctgttccagagcccttgaagaagtatactaaatgtagagagctggctgaaagactgaaaatagaagccacttatgaatcagtgttgttccatcaactacaagaaataaagggagttcagcaagatgaagctctccaactgccaaaagacctagattatttgactatcagggatgtgtctttgtcccatgaagttcgagagaaactacattttagtcgtccacagacgatcggggctgctagtcgcatacccggagtaacacctgccgccatcatcaatctgctgagatttgtgaagaccactcaacgaagacagtcggctatgaatgaatcatccaagactgatcaatacttatgtgatgcagacagacttcaagagagagagttatagctttcaattcataaaagatttttaaagagcatataaataatttgatcaatacaacagtatagataaaagaattatttagcacatgttaaaatagctttattaggttactatgggtttgccattaatttctgagtgggacagaaattataattgtgctttttcgtgtatatgaaaaaactagtcgtaaa

SEQ ID NO: 235513 - DNA, 2154 bp, Artificial Sequence
  derived and/or modified sequence
atgttctacttccggggctgcggccggtgggtggccgtgagcttcacgaaacagcagtttccccttgctcggttaagctctgattctgctgctcccagaacccctcatttcgacgtgatagtgattgggggcgggcacgcaggaaccgaggccgctacagctgccgctaggtgcggatcaagaaccctgctgctgacgcacagagtcgatacaattgggcagatgagctgtaatccgagtttcggggggatcggaaaaggacacctgatgcgggaagtcgacgccttggatggcctttgctcaagaatttgcgaccaaagcggggtgcattataaggttctgaataggagaaaagggcctgctgtatggggtctgcgtgctcagattgaccggaagctctataagcagaatatgcagaaggagattctgaatacgccgctgcttactgtgcaggagggtgcagtggaggacttgattttgacagagccagaacccgagcacactggaaagtgtagggtgtcaggagtggtcctggtggatggatctactgtttatgctgaatcggtgatactcacaaccgggacgtttctcaggggaatgatagtcattgggcttgaaacccaccccgcgggccggctaggggatcagccatctattggtctggcccagactctcgagaagctggggttcgtggttggacgcttaaagactggtactccgccccgaattgcaaaagagtcgatcaactttagtattctgaacaaacacattcccgataatccttcaatccccttttcattcaccaacgagactgtgtggatcaaaccagaagatcagttaccatgttatctgacacatactaaccctcgagtggacgagattgtgttgaagaatctccacctgaacagccatgtcaaggagactacccgaggtccccggtactgccctagcatcgagtcgaaggtcctgcgatttccgaatcgcctccatcaggtgtggctcgagccagagggaatggactcggatctaatatacccacaaggactctcaatgacactgccagccgagcttcaggaaaagatgatcacctgcatcagaggcctggagaaggccaaggtcattcagcctgatggtgtcctactactgctcccccggatggaatgtaacggtgcgatatcggcccaccataacctgcctttacccggttacggggtccaatatgattacctggaccctcgtcagatcaccccttctcttgagactcacttggtgcagagattgttctttgctggacaaatcaacggcacaacaggctatgaagaggctgcggctcagggggtgattgcaggcattaatgcttctctcagggtctcaaggaaacctccctttgtggtgtcccgaactgaagggtatattggcgtgcttatcgacgatctaaccacactgggcacttcagaaccttatagaatgttcacctccagagtcgagttccgccttagcctgcggccagataatgccgacagtaggcttacactgaggggctacaaggatgcgggatgtgtcagtcagcaacgttacgaacgggcctgctggatgaagtcctcgcttgaagagggaattagtgttcttaaaagcattgagtttctctcatctaaatggaagaagctgatccctgaggcatccatctccacctctcgctcgctgccggtacgcgccctcgatgtcctgaaatatgaagaggttgatatggattcgcttgcaaaggctgtgcctgagcccctgaagaagtacaccaagtgtagagagctcgcagaacggttaaagattgaggccacgtatgagtccgtgttatttcatcaactgcaggagatcaagggtgtgcagcaggacgaagccctccaactccctaaggatctggactacctgacaattcgggacgtctccctaagccacgaggttcgggagaagcttcatttctcacgccctcaaaccatcggtgctgcatcccgcatccccggcgtgacgcctgctgcaattattaatctcctccgcttcgtcaagaccacccagcggcgtcagtctgccatgaacgagtcatcaaaaacagaccagtatctatgcgacgcggatcgactgcaagagcgagagctatag

SEQ ID NO: 235514 - DNA, 1932 bp, Artificial Sequence
  derived and/or modified sequence
atgagctgcaaccccagcttcggcggcatcggcaagggccacctgatgcgtgaggtcgacgcactagatggcctatgctccaggatttgtgaccagagcggagtgcattacaaagtccttaataggcggaagggacctgccgtgtggggcctcagggcacagatcgatcgcaaattatacaagcagaatatgcaaaaggagatcctcaacacccctcttctgactgtacaagagggggccgtagaggacctgatcctaacagagccagaacccgagcacaccgggaagtgccgcgtgtccggagtggtcctggtcgacggcagcaccgtctacgccgaatccgtgatcttgactacagggacattcttaagagggatgatcgtgatcggtctggagacacaccctgccggtagattgggagaccagccttccataggtctggctcagaccctcgagaaactgggttttgtcgtggggcgactgaagacgggaacccccccgcgcattgcgaaagagagcataaacttttcaatcttaaacaagcacattcctgacaatccgagcatcccttttagctttaccaatgagacagtgtggatcaagcctgaagaccagttaccttgctatctcacccatacgaatccacgggttgacgagattgttcttaaaaatctccatttgaactctcatgttaaagagacgactcgcggaccacgctattgtccatccattgaatccaaagttctgcgttttccaaaccgattacaccaagtctggttagaacccgagggcatggactccgatctgatctaccctcagggcctctcgatgacattaccggcggaattgcaggagaagatgattacatgcattcggggcctagaaaaagctaaggttattcaaccagacggtgtattgttgttgctgcccaggatggagtgtaatggtgccattagcgcccaccataacttacctttgcccggatatggtgtccagtacgattatctggaccccagacaaatcactccaagtctggagacccatcttgtgcaaaggctcttctttgctggtcaaatcaacggaacgacggggtatgaagaggcagcggctcaaggggtgattgccggaattaatgcctctctccgggtcagcagaaagcccccattcgttgttagcagaaccgaaggatacatcggagtgctgatcgacgatctgaccacactcgggacttctgaaccctatcggatgtttactagccgagtcgagttccggctgtccttgagacccgataacgccgattcacgtttgaccctgcgggggtacaaagatgccgggtgtgtctcccagcaaaggtacgagagagcttgctggatgaaatcatccctcgaggagggtatttccgttttaaaaagcatcgaattcttgagttcaaagtggaagaaactgattcccgaggcatcgatctctacaagccggtctcttccagtgcgagcccttgacgtactgaagtatgaagaggtggacatggatagcctcgccaaggctgtacccgagccactgaagaagtacactaaatgtcgggagctggctgaaaggctcaaaatagaggccacatatgaatcagtactgttccatcaactgcaggagattaagggcgtccagcaggacgaggcactacagctccccaaggacctcgactatctcaccattcgggatgtgtctcttagtcatgaggtgcgggaaaagctgcatttttcaaggcctcaaacaataggggctgcttcccgcattccaggagtaacaccagcagcgattattaatctgctcaggtttgttaaaacaacacaacggagacaatctgcgatgaatgagtccagcaagaccgatcagtatctgtgcgacgccgacaggttgcaggaacgggaactctag

SEQ ID NO: 235515 - DNA, 2154 bp, Artificial Sequence
  derived and/or modified sequence
atgttctatttccgaggttgtggtcggtgggtggctgtctcattcaccaagcaacaattccctctggcacgcctgagtagcgattcagccgctcccaggacgccacacttcgatgttattgtcattgggggaggccatgctgggaccgaggctgccaccgctgccgcacgatgtggatctcggacactgcttttaacacatcgagtggacaccattgggcagatgtcatgtaatccatcgttcggaggtattggcaaggggcatctaatgagagaagtcgatgccttggacggattgtgctctaggatctgtgaccaatctggggtgcattacaaagtgctcaaccgtcgcaaagggccagctgtctggggcttacgagcacagatagatcggaaactgtacaaacagaatatgcagaaagaaatacttaacacaccactgctcaccgtacaggaaggcgctgtcgaggacctgattttaacagaaccagaacccgagcataccggaaaatgtcgagtcagcggggtggttctggtggacggaagcactgtctatgctgaatccgtgatcctcacaacaggcacctttctgcgcggaatgattgtcatcgggctagaaacgcaccccgctgggaggctaggtgaccagccaagtatcggactggcccagacactggagaaattgggttttgtggtgggaaggctaaaaacggggacaccacctagaatcgcaaaggaatcaatcaatttcagcattctgaataagcacatccccgacaacccgtcgatcccattctctttcactaatgaaaccgtctggataaaacctgaagatcagctgccctgttacctgacgcataccaaccccagagtcgacgaaatcgtactcaagaatttgcacctcaattcccacgtgaaggagacaacccgaggacctcggtactgtccctccattgagtccaaagtcctgaggttcccaaacaggctgcaccaggtttggctggaaccagagggaatggacagcgatcttatctacccccagggcctgtctatgaccctaccggcagaactgcaggagaaaatgatcacgtgtattagagggctggagaaggccaaagtcattcagcccgatggtgtgctgttgctgctacccaggatggaatgtaacggcgctatcagtgctcatcacaatttgcccctgcccggatacggcgttcagtacgattacctggacccaagacaaatcaccccctcactagagacgcacctggtccaacgcttgttcttcgctggacaaataaatggtacaactgggtatgaagaggcagccgctcagggtgtgatagctggtatcaatgccagtctgagagttagcaggaagcccccttttgtagtaagcaggactgaggggtacatcggtgtgttgatcgatgacctaactactcttggaaccagcgagccatatcgaatgttcactagtagggtcgaattccggctgagcttgaggccggataatgcggattctagattgacgctgagaggatataaggacgccggttgcgtgagtcagcagcggtatgaacgggcttgttggatgaaaagtagtttagaggaaggcatctccgtgctaaagtctatcgagtttctgagttcgaaatggaagaaactgatcccagaggcttcaatttctacatctagatccctccccgtgagagcattggacgtcctgaagtacgaagaggtggatatggactccttggctaaggctgtacctgaaccgttgaagaaatacaccaagtgcagagagctggcagagcggctgaagattgaggctacctacgagagcgtcttgtttcaccagttacaagagattaagggagttcagcaggacgaagcacttcaactgcctaaagatctggactatctgactatccgggacgtgtcactgtctcacgaagtcagggaaaagcttcacttttcccgccctcagacaattggggcagcctctcgcatccctggggtgacacccgcagccataattaacctactgcgtttcgtgaaaactactcagcgtcgccagtcggccatgaatgaatcatcaaagacagaccagtatctgtgcgatgctgatcgactgcaggaacgcgagctgtag

SEQ ID NO: 235516 - DNA, 1932 bp, Artificial Sequence
  derived and/or modified sequence
atgtcttgcaaccccagtttcggaggaattggtaaaggccatctcatgcgagaggtggacgcgttggacggcctatgtagcaggatctgcgaccagagcggcgtgcattacaaggtgcttaaccgccgtaaaggacctgccgtttggggtttacgggctcaaattgatcgcaagctatataaacagaacatgcagaaagagattctgaatacgccccttctcacggtgcaagagggagctgtggaagatcttattctgaccgagcccgaacctgagcatactggtaaatgccgggtttctggggtcgtgttggtcgacggttcaactgtttacgccgagtccgtgattctgacgactggtacatttctgcggggaatgatcgtcattggactggagactcaccccgctgggaggttaggggatcaaccgagtatcggactggcccaaactctggagaagttagggtttgtggtggggcgactgaagacagggacacccccaaggatcgcgaaggaaagtatcaatttttctatacttaataagcacattcccgataaccccagtatccctttctcgtttaccaatgagacggtgtggataaagcctgaggatcagctcccctgctatttgactcacactaacccgagagtggacgaaatcgtgctgaagaaccttcacctgaatagccacgtcaaggaaaccacacggggacccagatattgcccttcgattgagtccaaggtcctgaggtttccgaatagattgcaccaggtctggctggaacctgaagggatggacagcgaccttatctacccccagggactcagtatgacactccctgccgaactccaagagaaaatgatcacctgcatcaggggcctcgagaaggccaaggtgatacagcctgatggtgtgctactgctgctgccacggatggagtgcaacggggcaatttccgcccaccacaacctcccattgccgggttatggcgtccaatatgattatctggacccacgacaaatcaccccctctctggagacgcatctggtccagcgcttgtttttcgctggacaaatcaatggaactactggctacgaagaagctgctgcgcagggcgtcatcgctggtattaatgccagtctgcgagtctctagaaagccccctttcgtagtctccaggacagagggatatatcggagtcctcattgatgacctgacaaccctgggcactagcgaaccttatcgcatgttcacaagccgcgtcgaatttcgcctgtccctcaggccagataacgcggatagtcggcttactctcagggggtataaggacgcgggatgcgtgagccagcagcgctatgagcgggcatgctggatgaagagctccctggaagagggaatctccgtactgaaaagcatcgagtttctcagtagcaaatggaaaaaactgattcccgaggcatcaattagcacttctcgttcactgcccgtacgcgcacttgacgtgctgaagtatgaagaagtggatatggatagccttgcaaaagctgtgccggaacccttaaagaagtacactaaatgtcgggaacttgcggagagactgaagattgaggcaacctatgaaagtgttctctttcaccaactacaagagattaagggagtgcagcaggacgaggctctccaactccctaaggacctggattatctgacgatacgagacgtgtcattgagtcatgaagtccgagagaaactccacttctcacgaccccagaccataggtgccgcttcgcgcatccccggtgtaacaccagcagccattattaacctgttgagattcgtgaagaccactcagaggcggcaatcagccatgaatgagagctcaaagacagaccagtacctctgtgacgctgatagactccaagaacgggaattgtag

SEQ ID NO: 235517 - protein, 455 aa, Artificial Sequence
  derived and/or modified sequence
MSSLGASFVQIKFDDLQFFENCGGGSFGSVYRAKWISQDKEVAVKKLLKIEKEAEILSVLSHRNIIQFYGVILEPPNYGIVTEYASLGSLYDYINSNRSEEMDMDHIMTWATDVAKGMHYLHMEAPVKVIHRDLKSRNVVIAADGVLKICDFGASRFHNHTTHMSLVGTFPWMAPEVIQSLPVSETCDTYSYGVVLWEMLTREVPFKGLEGLQVAWLVVEKNERLTIPSSCPRSFAELLHQCWEADAKKRPSFKQIISILESMSNDTSLPDKCNSFLHNKAEWRCEIEATLERLKKLERDLSFKEQELKERERRLKMWEQKLTEQSNTPLLLPLAARMSEESYFESKTEESNSAEMSCQITATSNGEGHGMNPSLQAMMLMGFGDIFSMNKAGAVMHSGMQINMQAKQNSSKTTSKRRGKKVNMALGFSDFDLSEGDDDDDDDGEEEDNDMDNSE

SEQ ID NO: 235518 - protein, 138 aa, Artificial Sequence
  derived and/or modified sequence
MSSLGASFVQIKFDDLQFFENCGGGSFGSVYRAKWISQDKEVAVKKLLKIEKEAEILSVLSHRNIIQFYGVILEPPNYGIVTEYASLGSLYDYINSNRSEEMDMDHIMTWATDVAKGMHYLHMEAPVKVIHRDLKSRN

SEQ ID NO: 235519 - protein, 354 aa, Artificial Sequence
  derived and/or modified sequence
MDMDHIMTWATDVAKGMHYLHMEAPVKVIHRDLKSRNVVIAADGVLKICDFGASRFHNHTTHMSLVGTFPWMAPEVIQSLPVSETCDTYSYGVVLWEMLTREVPFKGLEGLQVAWLVVEKNERLTIPSSCPRSFAELLHQCWEADAKKRPSFKQIISILESMSNDTSLPDKCNSFLHNKAEWRCEIEATLERLKKLERDLSFKEQELKERERRLKMWEQKLTEQSNTPLLLPLAARMSEESYFESKTEESNSAEMSCQITATSNGEGHGMNPSLQAMMLMGFGDIFSMNKAGAVMHSGMQINMQAKQNSSKTTSKRRGKKVNMALGFSDFDLSEGDDDDDDDGEEEDNDMDNSE

SEQ ID NO: 235520 - DNA, 1368 bp, Artificial Sequence
  derived and/or modified sequence
atgagcagcctgggcgccagcttcgtgcagatcaagttcgacgacctgcagttcttcgagaactgcggcggcggcagcttcggcagcgtgtacagagccaagtggatcagccaggacaaggaggtggccgtgaagaagctgctgaagatcgagaaggaggccgagatcctgagcgtgctgagccacagaaacatcatccagttctacggcgtgatcctggagccccccaactacggcatcgtgaccgagtacgccagcctgggcagcctgtacgactacatcaacagcaacagaagcgaggagatggacatggaccacatcatgacctgggccaccgacgtggccaagggcatgcactacctgcacatggaggcccccgtgaaggtgatccacagagacctgaagagcagaaacgtggtgatcgccgccgacggcgtgctgaagatctgcgacttcggcgccagcagattccacaaccacaccacccacatgagcctggtgggcaccttcccctggatggcccccgaggtgatccagagcctgcccgtgagcgagacctgcgacacctacagctacggcgtggtgctgtgggagatgctgaccagagaggtgcccttcaagggcctggagggcctgcaggtggcctggctggtggtggagaagaacgagagactgaccatccccagcagctgccccagaagcttcgccgagctgctgcaccagtgctgggaggccgacgccaagaagagacccagcttcaagcagatcatcagcatcctggagagcatgagcaacgacaccagcctgcccgacaagtgcaacagcttcctgcacaacaaggccgagtggagatgcgagatcgaggccaccctggagagactgaagaagctggagagagacctgagcttcaaggagcaggagctgaaggagagagagagaagactgaagatgtgggagcagaagctgaccgagcagagcaacacccccctgctgctgcccctggccgccagaatgagcgaggagagctacttcgagagcaagaccgaggagagcaacagcgccgagatgagctgccagatcaccgccaccagcaacggcgagggccacggcatgaaccccagcctgcaggccatgatgctgatgggcttcggcgacatcttcagcatgaacaaggccggcgccgtgatgcacagcggcatgcagatcaacatgcaggccaagcagaacagcagcaagaccaccagcaagagaagaggcaagaaggtgaacatggccctgggcttcagcgacttcgacctgagcgagggcgacgacgacgacgacgacgacggcgaggaggaggacaacgacatggacaacagcgagtag

SEQ ID NO: 235521 - DNA, 7179 bp, Artificial Sequence
  derived and/or modified sequence
cttcctcattggcgccgtgcagagaggcggaatgttcaactcctaactgcagcggaaacgtgggagccgcgcgggccgctgtcgtcccaacccccgccgccctcgtcgcgcgcggggcctccgcgcccccggctgctgctcacgccccgcccgggagccagattttgtggaagtataatactttgtcattatgagatgtcgtctctcggtgcctcctttgtgcaaattaaatttgatgacttgcagttttttgaaaactgcggtggaggaagttttgggagtgtttatcgagccaaatggatatcacaggacaaggaggtggctgtaaagaagctcctcaaaatagagaaagaggcagaaatactcagtgtcctcagtcacagaaacatcatccagttttatggagtaattcttgaacctcccaactatggcattgtcacagaatatgcttctctgggatcactctatgattacattaacagtaacagaagtgaggagatggatatggatcacattatgacctgggccactgatgtagccaaaggaatgcattatttacatatggaggctcctgtcaaggtgattcacagagacctcaagtcaagaaacgttgttatagctgctgatggagtattgaagatctgtgactttggtgcctctcggttccataaccatacaacacacatgtccttggttggaactttcccatggatggctccagaagttatccagagtctccctgtgtcagaaacttgtgacacatattcctatggtgtggttctctgggagatgctaacaagggaggtcccctttaaaggtttggaaggattacaagtagcttggcttgtagtggaaaaaaacgagagattaaccattccaagcagttgccccagaagttttgctgaactgttacatcagtgttgggaagctgatgccaagaaacggccatcattcaagcaaatcatttcaatcctggagtccatgtcaaatgacacgagccttcctgacaagtgtaactcattcctacacaacaaggcggagtggaggtgcgaaattgaggcaactcttgagaggctaaagaaactagagcgtgatctcagctttaaggagcaggagcttaaagaacgagaaagacgtttaaagatgtgggagcaaaagctgacagagcagtccaacaccccgcttctcttgcctcttgctgcaagaatgtctgaggagtcttactttgaatctaaaacagaggagtcaaacagtgcagagatgtcatgtcagatcacagcaacaagtaacggggagggccatggcatgaacccaagtctgcaggccatgatgctgatgggctttggggatatcttctcaatgaacaaagcaggagctgtgatgcattctgggatgcagataaacatgcaagccaagcagaattcttccaaaaccacatctaagagaagggggaagaaagtcaacatggctctggggttcagtgattttgacttgtcagaaggtgacgatgatgatgatgatgacggtgaggaggaggataatgacatggataatagtgaatgaaagcagaaagcaaagtaataaaatcacaaatgtttggaaaacacaaaagtaacttgtttatctcagtctgtacaaaaacagtaaggaggcagaaagccaagcactgcatttttaggccaatcacatttacatgaccgtaatttcttatcaattctacttttatttttgcttacagaaaaacggggggagaattaagccaaagaagtatatttatgaatcagcaaatgtggtgcctgattatagaaatttgtgatcctatatacaatataggacttttaaagttgtgacattctggctttttcttttaatgaatactttttagtttgtatttgactttatttcctttattcaaatcatttttaaaaacttacattttgaacaaacactcttaactcctaattgttctttgacacgtagtaattctgtgacatactttttttttcttatagcaatacactgtaatatcagaaatggttggcctgagcaacctagtaagacctcgtctctactaataattaaaaaactagctggcatggtagcacacacctgtagtcccagatacttgggaggccaaggcaggaggattgcttgagacctagcaatcagtcagggctgcagtgagccatgatggcaccactgcactctagcctgggcaagagaacaagatcctgtctcaaaaaacaaaaaaaagaaagaattgatagtacaaaatccaacaacaatactgagatgatctaagaaggttataacaaaatgctcttcagaaatacctaagtgctgagaatttttagtactaaagagcacagctgctcaaagtaaagcctgagcagtgttctcagtaatgtatttgaaggaaaaataccctgatttgaaaccaacagcagatgttgcaaactttcataccactgctggccatggaagcctcttaacaacacactgtcatttaaggctgtgcttgtgctttatacaaagagaaagaggtggtcttaaggggatgcttccaggggggtgagttcatgcctctcctgtattttccagcaagtggggtatgtgtggtggtttgttttttagaggggcataataatccaggattctaagcatatgctcagctattttaaagaggaaattaaatattataaaagaaatagtaaagataagttatcctcacttaggcaaaagcacaggtcctttccatatcaagtttagcctaccagggttgttttttgttttaaccctgcttaataatgttggtgttttagaagtagatacaggcactgctctgaaaacctggctagccaaggatattctcagaatgttatcacctgtttgtcaaagcttgtttaaattataaaacacttttaattatatatatgaggcaaaagaactaagacttttttcaaactaaattagaaaggagtgtcattatttgactgttaaaccaaaatatttttggtgggtctttttatggaagtttaaagaaaggacatcatcatagatatgatctaacagtatttctaactatatttgatcattaaaagcctcttggaatttgaagcgtgacgtgtttctaatgccccttgagaggtgaaaaataccacataatgatcagtatgctgtgccagcttcatttggggagaaataactagtagaaagttctgggtgtgaggtgtacagcagtctaggtggcatagtgatgaagaaagggatcagagtctgactgtcactcagaatcctgggctcagttgcttgacaaccttgggaaaattgttttatctttgtgcgtctgtttgctgatcttcagcgtgggaataataacagtacctacttgaaaggatcattgtgcggattaaaagaaataatatatgtaaagcactttaacacagcaccaggcccacggaaagtggctaatgttagctactatgaatggtgccagtgaagacactgaaaaataagtgatttcagtaaccttctggaaagctatcagtttcaaataatattttctctgtagtatgagatgaaattaaaagtggatagctttcaggaaagataaagagaacatgcttagaatgtaagctaaacagattttttctgttgctctttgaaaactatgagccctggccagcttaacctggtctgaggtgagactaaacacaaaaacagtagataaatctctccctaaaagatggattcccccacatacccatgctactagtttctctgtctattcacacatatgtacaaatacatgaacacagcctgtctgtgctcagacatagagaagtactacctgacttgagtcaatgcacccaagaagaaaagcttggagtagagcagaagggagggcttgggactcctgtctttccagcatgccctggggtgcagtggtcagccacctgaagagagagccaatagcatggggtttacaaggcaaagatagtcattcattcaacacatattcatagagctccttctctgtgccagacactgttctggaagatagctagatgaaaatctttgcactcacagagcttacatgccagtgagtgaagatcgatgataaataaagcaaatgcatcatatgttcacatttgataagtatatgccaaaaaatgaagccgggaaggaggacaaggcccatgggtgggtgttgaggtttttaaagtgtggtcaggaaaggccccactgataaggtaacatttgagcaagtctgaaaaaggcaaggggatctttggggctaacttcgggatccctgcactttatgtaagaatgtaaacctggagtctcatttaagaatgatcagcaatacgtttagaacatatgaactgaatgaaatggacattttttcttaatttatgtataaatccatatgattatacataaagttctgatgcattaataaaagcagccaaatagggccaaagagaaaaataacaggactctgtactggacctaactttatcattaattaggtaatattttcctcatttctttactgctgccattttcctcaccagtattccagagatggtcatagctcattactctaccaccaagaacctaaaaggaattagaatacagcagaattggcctcagtgaagagcttaaaattgttctcctcgtagaactggactattgatcattaccacgtgacgttggctctattactttctgttcccaatgtccttctagtggtttgaaaatgttaaaacatccctaaaatctaaatcatataatcagaattctatagtgtcccactctatctgtaaagatcatttggaagactttagactctattaattttaaaaggaatatttattagccatatgcagaatttctaatgatgatattgtacagcttctaattcacttttcagatcagtgtttgaaatggcaattatcagtgttggatttagttccaactacttgatttacaaaaatgtacatttagaggttaaaagaaacagtgagaaatgtaaacattcaaaatgataattgaatctctcagttgtgggaataattatcagagacatgcaactgaaaatgtctcacctttcatctttttttcttaattcataaagttatcttgtagaatttgatgagaccctccctagtcattctcaactggggcggtgctgtcaccgaatggtgtttgagagtgttggggctagggcacatttttggttgtcacagcaactggggtggcatttgctgcccagtgccaggaatagtaacattatgaatgccagggacagtgtgctcagtaaagtcttccatccaaaaggggcagggcacggtggctcacgcctgtaatcccagcactttgggaggccaaggtgggcggatcacctgatgtcaggggttcgagaccagcctggccaacatggtgaaaccctgttgctactaaaaatacaaaaattggctgggtgtggtgtcacatgccagtaaccccagctactagggaggctgaggcaggagaatcacttgaacccgggaggcagaggttgcagtgagctgagattgcaccactacactccagcctggatgacagagtgagacttcatctcaaaaaaaaaaaaaaacaaaaaaaaacaacccggtagcattgtcccttccccactgacaaacttatcaaatccagaagctttagagtttcgtctctaattatttttctcctgaacaaaattacccaagtcaaaacaaaatgtatttttagaattacggcagcatacgacctgaattttgtgagtttcgtggctttatcttaaatcaccatttccctaaaaatggtttctttctccttagaaatgctggtggcaacttgatgaaacagccaaatgcaccagggcaggtcactttcccattacactgattccacaattaaaaaaaaaaaagaaaaaaaactcattgagatagctacagttctataggttaatttaaagcctcctttttctactcatttttgaaagcaaaattacattttactattttacataaccagtgaaaagacgttgaaagcctacagctcactgtttttggtgctctggaaatgttgagggtgggtttttaaccagtgatttttaacgtgcagtgaatttgttagacttttaaacaccagctaaggtagtcaaacttgatccccattaaaaatcaaggaattaggggtcgggggagggtttaggagtgatccagaatgacctcccagaattactgtgcgtacaactttatttttcagagttttcattggaatggtaagagttttatgaaagacagttttaaaacttattctgagttaaatattaatactttaaaaaattattgtactagacttattgcagccttttgaaagtagcagagtttcatcataccacatatataacagagcataaattttctataatcaggcaccttttgctgcttttgagtaagactgttttcctgtttaagtgttaagcatcgccagacataaaaatctattctctcctctcgattgtagcatagcctgacagctctagatacagcatttctatgatgaaaaatgagtatccatcaggaaatctagaagactagccgtgttttctcagactccacctttgtttgcactctgttgcctgtgaggagctttctggcatgtgattatttacttcaaaactagagttccaagcacctacattaattattttatattgtgtgcagaatagtatatcttttaatgtcagatatgatacactgcacatattgcttttgcactcttaaaatttttgtactaaataatagaaaatatttatattctttgagtgtgagctttgaatagatggcattatcactttattgtttttttaacaaaaactttttctcaattattctattgcaatgttattctgagcaagtcctatgccaaatatcttgtataatgtttgtatggaagattaaattttactcttgtgtggtaagactatttcagttactgattttatagttggaatttgatattccagcacaaagtccacagtgtattcagaaatccaagttggtgtcatacatttcattttgatgtgaacttttctttgctttcctttgttctaagactccattttgcaataaacgttttgacagtaaa

SEQ ID NO: 235522 - DNA, 417 bp, Artificial Sequence
  derived and/or modified sequence
atgagcagcctgggcgccagcttcgtgcagatcaagttcgacgacctgcagttcttcgagaactgcggcggcggcagcttcggcagcgtgtacagagccaagtggatcagccaggacaaggaggtggccgtgaagaagctgctgaagatcgagaaggaggccgagatcctgagcgtgctgagccacagaaacatcatccagttctacggcgtgatcctggagccccccaactacggcatcgtgaccgagtacgccagcctgggcagcctgtacgactacatcaacagcaacagaagcgaggagatggacatggaccacatcatgacctgggccaccgacgtggccaagggcatgcactacctgcacatggaggcccccgtgaaggtgatccacagagacctgaagagcagaaactag

SEQ ID NO: 235523 - DNA, 1065 bp, Artificial Sequence
  derived and/or modified sequence
atggacatggaccacatcatgacctgggccaccgacgtggccaagggcatgcactacctgcacatggaggcccccgtgaaggtgatccacagagacctgaagagcagaaacgtggtgatcgccgccgacggcgtgctgaagatctgcgacttcggcgccagcagattccacaaccacaccacccacatgagcctggtgggcaccttcccctggatggcccccgaggtgatccagagcctgcccgtgagcgagacctgcgacacctacagctacggcgtggtgctgtgggagatgctgaccagagaggtgcccttcaagggcctggagggcctgcaggtggcctggctggtggtggagaagaacgagagactgaccatccccagcagctgccccagaagcttcgccgagctgctgcaccagtgctgggaggccgacgccaagaagagacccagcttcaagcagatcatcagcatcctggagagcatgagcaacgacaccagcctgcccgacaagtgcaacagcttcctgcacaacaaggccgagtggagatgcgagatcgaggccaccctggagagactgaagaagctggagagagacctgagcttcaaggagcaggagctgaaggagagagagagaagactgaagatgtgggagcagaagctgaccgagcagagcaacacccccctgctgctgcccctggccgccagaatgagcgaggagagctacttcgagagcaagaccgaggagagcaacagcgccgagatgagctgccagatcaccgccaccagcaacggcgagggccacggcatgaaccccagcctgcaggccatgatgctgatgggcttcggcgacatcttcagcatgaacaaggccggcgccgtgatgcacagcggcatgcagatcaacatgcaggccaagcagaacagcagcaagaccaccagcaagagaagaggcaagaaggtgaacatggccctgggcttcagcgacttcgacctgagcgagggcgacgacgacgacgacgacgacggcgaggaggaggacaacgacatggacaacagcgagtag

SEQ ID NO: 235524 - DNA, 1368 bp, Artificial Sequence
  derived and/or modified sequence
atgagctccctgggcgccagcttcgtccagatcaagtttgacgaccttcagtttttcgaaaactgcggcggaggatccttcggcagtgtatacagggcaaaatggatttcacaggacaaggaagttgctgtgaagaagctgctcaaaatcgaaaaagaggcagaaattcttagtgtgcttagccaccgaaatattatccagttttacggggtgattttggagcctccaaactatggcatagtgaccgaatatgcaagcctcggatcactgtacgactatattaatagcaacagatcagaggagatggatatggaccacatcatgacctgggcaacagacgtggctaagggtatgcattacctgcacatggaggcaccggtgaaggtcattcaccgggatctgaagtccaggaatgttgtgatagccgccgatggtgttctaaaaatttgtgatttcggagcctccagattccacaaccacacaacacacatgagtctcgtggggacttttccgtggatggctcccgaagttatacagagcctcccagtttcagaaacatgcgacacatattcttatggcgtggtgctctgggagatgctgactcgggaggtaccctttaagggtctggaagggcttcaggtggcttggcttgtagtggaaaaaaatgagcgcttaactatcccaagctcttgccctagaagcttcgccgagctgcttcatcagtgttgggaagctgatgctaaaaaacggccgagcttcaagcaaattattagtatcctcgagtcaatgtccaacgatacatctctgcctgataagtgcaattcgttcctgcacaacaaagcagagtggcgctgtgagatcgaagcgactttagagcgcttgaaaaaacttgagcgcgacctttctttcaaggagcaggaactgaaggaaagggaacggcgcttgaaaatgtgggaacagaaactaaccgagcagtcaaatacgccccttttactgccgttggccgctcgcatgagtgaagagtcctactttgagagcaagactgaggagagcaactccgccgagatgagctgtcagatcacagccaccagtaatggggaaggccatggaatgaatccatccctgcaggcgatgatgcttatgggttttggggatattttcagcatgaacaaggccggggcagtcatgcactccgggatgcagattaacatgcaagctaaacaaaactctagcaaaactacttcaaaacggcgcgggaagaaggtcaacatggcactcggattttctgattttgatctgtcagagggggatgatgacgacgatgacgatggggaggaggaggataatgacatggacaacagcgaatag

SEQ ID NO: 235525 - DNA, 417 bp, Artificial Sequence
  derived and/or modified sequence
atgtcctccttgggggcctcttttgtgcagattaagtttgacgacctccagttcttcgaaaactgcggcggcggtagctttggcagtgtttacagagcaaaatggatttcacaggacaaggaggtggccgtgaaaaagctgctcaagatcgaaaaagaagcggaaattctctctgtgctgtcccatagaaacatcatccaattttatggcgtaatcttagagcctcctaattatggaattgtgacagagtatgcaagtctgggctcactatacgactatattaacagcaacagaagcgaggaaatggacatggaccacattatgacctgggcgaccgatgtcgccaagggcatgcactatctccacatggaggcccctgtgaaagtcattcacagggacctcaagtctcgcaattag

SEQ ID NO: 235526 - DNA, 1065 bp, Artificial Sequence
  derived and/or modified sequence
atggacatggatcacattatgacgtgggcgaccgatgtggctaaagggatgcattatctgcacatggaggccccagtgaaagtgattcacagggacctgaaatcacgcaatgtggttatagctgccgatggcgttctgaagatttgtgacttcggcgcatcccggttccacaaccacacaactcatatgagcttggttggcacgtttccctggatggcccccgaagttattcagagcctgcctgtctctgaaacttgtgacacgtattcttacggcgtggtactatgggagatgctcacccgcgaggtgcccttcaagggtctcgaaggactccaggtggcatggcttgttgtggagaaaaacgaacgcttgactatccccagctcatgcccccggagcttcgctgagctgctgcatcagtgctgggaggccgacgccaagaagcgtcctagtttcaagcaaatcatctccattttggagtctatgagtaacgacacctccctccctgataagtgcaatagctttctccacaacaaggctgagtggaggtgcgaaatcgaggctacgctggaacgcttaaagaagttggagcgtgacttgagtttcaaagagcaagagttgaaagagcgggaacggcgcctgaagatgtgggaacaaaagctcacagagcagtcaaatacaccccttctgctgccactagccgcgcgtatgagtgaagaatcatacttcgagtctaaaaccgaagaatccaatagcgctgagatgtcttgccagatcacggccacaagtaacggggaaggccacgggatgaacccatcactgcaggccatgatgttgatgggatttggcgatatattttctatgaataaggcaggagcggtcatgcactccggcatgcaaatcaacatgcaggccaaacagaattcctctaaaaccacttcaaaacggcgcgggaagaaggtgaatatggcattgggattcagtgactttgacctgtcggagggagatgacgatgatgacgacgacggcgaagaggaggataacgacatggacaactcagagtag

SEQ ID NO: 235527 - DNA, 1368 bp, Artificial Sequence
  derived and/or modified sequence
atgagttcccttggggcctcctttgtgcagataaagtttgacgaccttcagttcttcgagaactgcgggggaggcagttttggatccgtgtatagagccaaatggatctctcaggataaagaggtcgcagtcaagaaattactcaagatcgaaaaagaagctgaaatcttaagcgtgctatcccacagaaacataattcaattctatggagtgatcctggagccccctaactatggaattgtgaccgagtacgcctcactcggttcattgtacgattacataaactcgaaccgctctgaagaaatggacatggatcacatcatgacttgggcaaccgatgtggcgaagggaatgcattacctacacatggaggccccggtgaaggtcatccatcgcgacctgaagagcagaaatgtcgttatcgcagctgatggagtgctgaaaatttgcgattttggcgccagtaggtttcataatcatacaactcacatgtccctggtcggtacttttccctggatggcacccgaggtgattcaatcactacctgtgtctgagacatgcgatacatattcttatggtgtggttctctgggaaatgctgacacgggaagtcccattcaagggcctggaaggcttgcaagtagcttggctggtggtcgagaagaatgagagattaacaataccttcgtcatgtcctagaagcttcgctgagctgctgcatcagtgttgggaggccgatgctaagaaaagacccagctttaagcagataatctctattctggagagcatgtccaatgacacaagtctgcctgataagtgcaatagcttccttcacaataaagccgagtggagatgtgagattgaggcaacgcttgagagactaaagaagctggagcgtgacttgtctttcaaggagcaggaactgaaagagcgggagaggagattgaagatgtgggagcaaaagctgactgagcaaagcaacacgccgttactgctcccactggctgcgcgtatgagcgaggaaagttatttcgaatcaaagactgaagagtccaatagcgccgaaatgagctgtcagatcactgcgacctccaacggggagggacatggaatgaatccttcgcttcaggccatgatgctaatgggattcggtgacattttctcaatgaacaaggccggtgcggtgatgcactcgggcatgcaaataaacatgcaagctaagcagaatagctccaagaccacctcaaagaggaggggcaagaaggtgaacatggcattgggcttctctgatttcgacctcagtgagggggacgacgacgatgacgacgacggagaggaagaggacaacgacatggataactccgagtag

SEQ ID NO: 235528 - DNA, 1368 bp, Artificial Sequence
  derived and/or modified sequence
atgagcagcctgggcgccagctttgtgcagatcaagtttgatgacctgcagttctttgagaactgtggcggcggcagctttggatctgtgtaccgggccaagtggatcagccaggacaaggaggtggccgtgaagaagctgctgaagattgagaaggaggccgagatcctgtctgtgctgagccacaggaacatcatccagttctatggagtcatcctggagccccccaactacggcatcgtgacagaatatgccagcctgggcagcctgtatgactacatcaacagcaacagaagtgaggagatggacatggaccacatcatgacctgggccacagatgtggccaagggcatgcactacctgcacatggaggcccctgtgaaggtgatccaccgggacctgaagagcagaaatgtggtgattgctgctgatggagtgctgaagatctgtgactttggagccagccgcttccacaaccacaccacccacatgagcctggtgggcaccttcccctggatggcccctgaggtgatccagagcctgcctgtgtctgagacctgtgacacctacagctatggagtggtgctgtgggagatgctgacccgggaggtgcccttcaagggcctggagggcctgcaggtggcctggctggtggtggagaagaatgaaaggctgaccatccccagcagctgccccaggagctttgctgagctgctgcaccagtgctgggaggctgatgccaagaagaggcccagcttcaagcagatcatcagcatcctggagagcatgagcaatgacaccagcctgcctgacaagtgcaacagcttcctgcacaacaaggccgagtggaggtgtgaaattgaggccaccctggagcggctgaagaagctggagcgggacctgtccttcaaggagcaggagctgaaggagcgggagcggcggctgaagatgtgggagcagaagctgacagagcagagcaacacccccctgctgctgcccctggccgccaggatgtctgaggagagctactttgagagcaagacagaggagagcaacagcgctgagatgagctgccagatcacagccaccagcaatggagagggccacggcatgaaccccagcctgcaggccatgatgctgatgggctttggagacatcttctccatgaacaaggccggggctgtgatgcacagcggcatgcagatcaacatgcaggccaagcagaacagcagcaagaccaccagcaagagaagaggcaagaaggtgaacatggccctgggcttcagtgactttgacctgtctgaaggagatgatgatgatgatgatgatggagaggaggaggacaatgacatggacaacagcgagtag

SEQ ID NO: 235529 - DNA, 417 bp, Artificial Sequence
  derived and/or modified sequence
atgagcagcctgggcgccagctttgtgcagatcaagtttgatgacctgcagttctttgagaactgtggcggcggcagctttggatctgtgtaccgggccaagtggatcagccaggacaaggaggtggccgtgaagaagctgctgaagattgagaaggaggccgagatcctgtctgtgctgagccacaggaacatcatccagttctatggagtcatcctggagccccccaactacggcatcgtgacagaatatgccagcctgggcagcctgtatgactacatcaacagcaacagaagtgaggagatggacatggaccacatcatgacctgggccacagatgtggccaagggcatgcactacctgcacatggaggcccctgtgaaggtgatccaccgggacctgaagagcagaaattag

SEQ ID NO: 235530 - DNA, 1065 bp, Artificial Sequence
  derived and/or modified sequence
atggacatggaccacatcatgacctgggccacagatgtggccaagggcatgcactacctgcacatggaggcccctgtgaaggtgatccaccgggacctgaagagcagaaatgtggtgattgctgctgatggagtgctgaagatctgtgactttggagccagccgcttccacaaccacaccacccacatgagcctggtgggcaccttcccctggatggcccctgaggtgatccagagcctgcctgtgtctgagacctgtgacacctacagctatggagtggtgctgtgggagatgctgacccgggaggtgcccttcaagggcctggagggcctgcaggtggcctggctggtggtggagaagaatgaaaggctgaccatccccagcagctgccccaggagctttgctgagctgctgcaccagtgctgggaggctgatgccaagaagaggcccagcttcaagcagatcatcagcatcctggagagcatgagcaatgacaccagcctgcctgacaagtgcaacagcttcctgcacaacaaggccgagtggaggtgtgaaattgaggccaccctggagcggctgaagaagctggagcgggacctgtccttcaaggagcaggagctgaaggagcgggagcggcggctgaagatgtgggagcagaagctgacagagcagagcaacacccccctgctgctgcccctggccgccaggatgtctgaggagagctactttgagagcaagacagaggagagcaacagcgctgagatgagctgccagatcacagccaccagcaatggagagggccacggcatgaaccccagcctgcaggccatgatgctgatgggctttggagacatcttctccatgaacaaggccggggctgtgatgcacagcggcatgcagatcaacatgcaggccaagcagaacagcagcaagaccaccagcaagaggcggggcaagaaggtgaacatggccctgggcttcagtgactttgacctgtctgaaggagatgatgatgatgatgatgatggagaggaggaggacaatgacatggacaacagcgagtag

SEQ ID NO: 235531 - DNA, 1368 bp, Artificial Sequence
  derived and/or modified sequence
atgagcagcctgggcgccagcttcgtgcagatcaagttcgacgacctgcagttcttcgagaattgtggtggagggtcatttggttctgtctatagagcaaagtggatttcccaagacaaagaagtcgctgtgaaaaagttattgaagatcgagaaggaagcagagattctgagtgtgctgagccatcggaatataatccaattctacggtgtgattttggaacccccaaactacgggattgtgactgaatacgctagtctgggaagcttgtacgactatattaactctaatcgaagtgaggaaatggacatggatcatattatgacatgggccacagatgttgccaagggaatgcattaccttcacatggaagcacctgttaaggtgatccaccgtgaccttaagagtcgtaatgtggtgatcgccgccgacggggtcctaaaaatctgtgactttggcgctagccgcttccataaccacactacccacatgagtctggtgggcaccttcccttggatggctcctgaagttatacagtccttgcccgtgagcgaaacttgtgacacatacagttacggtgtggtgctctgggagatgctgactcgcgaggtcccctttaaggggctggagggccttcaagtcgcatggctggtcgtggagaagaacgagcgactgactatccctagctcatgtccacgctcattcgctgagctgcttcaccaatgttgggaagctgatgcaaaaaaacgaccctcttttaagcaaatcatatcaatattggagagcatgtcaaatgacacgagcctgcccgataaatgcaacagtttcctgcacaacaaggccgaatggcggtgtgaaatcgaagctaccctagagcgactaaagaagttagagagagacctgtcctttaaggagcaagagctcaaagagcgcgagcgaagactcaagatgtgggagcagaagctcactgaacagagtaatacaccattgctgttgccactggctgccagaatgagcgaagagagttattttgagtccaagacagaagagtcaaattctgctgaaatgagctgtcaaatcactgcaacctctaatggcgagggacacggcatgaatccatcccttcaggccatgatgttgatgggctttggcgacatcttcagcatgaacaaggctggcgcagttatgcactcgggcatgcagatcaacatgcaggcaaaacaaaactcttccaaaacaaccagcaagcgccggggaaagaaagttaacatggcactgggcttttctgactttgatctgagcgagggcgatgatgacgacgatgatgacggggaagaggaagataatgatatggacaacagtgagtag

SEQ ID NO: 235532 - DNA, 417 bp, Artificial Sequence
  derived and/or modified sequence
atgagcagcctgggcgccagcttcgtgcagatcaagttcgacgacctgcagtttttcgagaactgcggcggagggtccttcggatctgtgtatagagcaaagtggatttcacaagacaaagaagtcgcggtgaagaaactcctgaagatcgagaaggaagccgagattctgtctgtcctgagtcataggaatatcatccagttctacggcgtgatcctcgagccaccaaattatggtattgttacagagtacgcttcactgggttcactgtacgactacataaacagtaacagatcggaagagatggacatggatcatatcatgacatgggcaaccgacgtcgccaagggcatgcactatctgcacatggaggccccagtgaaggttattcacagagatctgaaatcaagaaactag

SEQ ID NO: 235533 - DNA, 1065 bp, Artificial Sequence
  derived and/or modified sequence
atggacatggaccacatcatgacctgggccaccgacgtggccaagggtatgcattacctgcacatggaggctcctgtaaaagtgatccatagggatctgaagagccgcaacgttgtcatcgcagcagacggcgtgctcaagatatgcgactttggtgccagtcggtttcataaccacacaacgcacatgtccctagttggaaccttcccatggatggcaccagaggttatacagagcctgcctgtcagtgagacatgcgatacgtactcttatggcgtagtgttgtgggaaatgttaacaagagaagtgccttttaagggactcgagggcctgcaggtcgcctggctggtggtcgagaaaaatgaacgccttaccatcccgtcttcttgcccgcgatcctttgccgagttgctgcaccagtgctgggaagctgacgcaaagaaaaggccatcattcaaacaaatcatcagcatcctggagagcatgtcaaatgacacttctctccctgataagtgtaattcatttctccacaataaggcggagtggaggtgcgaaatcgaagccaccctggagagacttaagaagctggagagagatctgagtttcaaggagcaggagctgaaagaacgtgagagaaggctgaaaatgtgggagcagaagcttaccgaacagtccaacacaccacttctgctgccattggccgctaggatgtcagaggaatcttactttgaatccaagactgaagagtctaacagtgcagagatgtcctgccagattaccgccacttctaacggggagggccatggtatgaatccctctctgcaggccatgatgttgatgggctttggggacatcttctcaatgaataaggccggagctgtgatgcacagtggcatgcagatcaacatgcaggccaaacagaacagttccaagactacatctaagagaagaggcaaaaaagtcaacatggctctcggattctccgattttgacttatcagagggtgacgatgacgacgacgacgatggggaagaggaagacaatgacatggataactcagaatag

SEQ ID NO: 235534 - DNA, 1368 bp, Artificial Sequence
  derived and/or modified sequence
atgagcagcctgggcgccagcttcgtgcagatcaagttcgacgacttacagttcttcgaaaactgtggcgggggctcttttgggtccgtttaccgcgcgaagtggatcagtcaggacaaagaggtggcggtgaagaaattgctgaaaattgagaaggaagctgagattctcagcgtactcagccatagaaacatcattcaattttatggagttatcctggagccccctaattatgggatagtgaccgaatacgcctctttgggcagtctctatgactatatcaactctaaccgatctgaggagatggacatggatcacatcatgacgtgggcgactgacgtagccaaaggcatgcattacctgcatatggaagcccctgttaaggtgatccaccgagacctgaagtcccgtaacgtggtcattgcggctgacggtgttctgaagatatgtgactttggagcctcgcggtttcacaatcacactacccatatgtctcttgtcggaacctttccttggatggctccagaggtcatacagtcgttacctgtcagtgagacatgcgatacctactcttacggcgtggtcctatgggagatgctcacccgagaggtcccatttaagggactcgagggcttgcaggtggcctggctggtggtggaaaaaaatgagaggttaacgatcccgtcgtcatgcccacgctcctttgccgagctgctccaccagtgctgggaagctgacgctaagaaaagacctagtttcaagcagattattagtatactggaaagcatgtcaaacgatacctcccttcctgacaagtgtaatagttttctgcacaacaaggccgaatggcgttgtgagatcgaggccacacttgagcgcctcaaaaaattggaaagggatcttagtttcaaagagcaggagctgaaagaaagagaaaggcgcctgaagatgtgggaacagaagctgaccgaacagtccaacacccctctccttcttccacttgcggccagaatgagtgaagaatcatacttcgagagcaagaccgaagaaagcaattcagcggaaatgtcttgccagattacagccacaagtaatggagaaggccacggaatgaaccccagtcttcaggccatgatgttaatggggtttggggacatcttttccatgaataaggcaggtgcagtaatgcattctgggatgcagattaacatgcaggcaaaacagaatagcagcaagactacctccaagcgtagaggcaaaaaagtcaatatggcactggggttttcagatttcgacctgtcagagggagatgacgatgacgacgatgacggcgaggaggaggacaacgacatggacaatagtgaatag

SEQ ID NO: 235535 - DNA, 1368 bp, Artificial Sequence
  derived and/or modified sequence
atgagctccctgggggctagcttcgttcagatcaaattcgatgatctacaattcttcgagaactgtggcggagggtcattcggatcggtgtacagagccaaatggatttcccaagacaaggaggtggccgttaagaagctgctgaagatcgagaaggaagctgagatcctgagcgtgctttctcatcggaatatcatacagttttacggggtgatccttgagccacccaattacgggattgtcactgagtatgcaagtctgggctccctttacgactacattaatagcaacaggagcgaggaaatggacatggatcacatcatgacctgggctactgacgtggccaaaggtatgcattatctgcacatggaagctccagttaaggtcatccaccgtgaccttaagagtagaaatgtggtgattgccgcagacggagttctgaagatttgcgacttcggggctagccgattccacaaccacactacccacatgagccttgtggggacattcccttggatggctccagaagtgatacagtcactccctgtgagcgaaacttgtgatacctactcctatggggtcgtcttgtgggagatgctgaccagagaggtacctttcaaaggtctcgagggactgcaggtggcctggcttgtggtcgagaagaatgaacggctgaccattcccagctcatgcccccgatcgtttgctgagctgctccatcagtgctgggaggccgacgccaaaaaaaggccctcctttaaacagatcatctccatcctcgagtctatgtccaatgatacatcactgcctgacaagtgcaacagtttcctgcacaacaaggctgagtggcggtgcgaaattgaagccaccctggaaagactgaagaagcttgaaagagacctgtctttcaaggagcaagaattaaaagaacgggagcgcagacttaaaatgtgggaacaaaaattgacggaacagagcaacaccccccttcttcttccgctggcagcaagaatgtccgaggagtcatatttcgagagcaagaccgaggagagtaatagcgccgaaatgagttgccaaatcacggctactagtaatggcgaaggccatggcatgaacccgagcctacaggccatgatgctgatggggttcggagacatattctcaatgaacaaagccggagcagttatgcatagcggtatgcagatcaacatgcaggctaagcagaactcttctaagaccactagtaaacggagaggcaagaaagtgaacatggctttaggcttttctgactttgacctgtctgagggggacgatgacgatgatgatgatggggaagaggaggataatgatatggacaattccgagtag

SEQ ID NO: 235536 - DNA, 661 bp, Artificial Sequence
  derived and/or modified sequence
atgcaagcttgctgtggaaagcatgcttcccgtctgtcagggcttcctgagaggagacctggtgacacagtagcctttcggcagagctccttgggatgagtaggaagtgctgctgcaggttttgtctgggggatatctgagccatttctctgtgggcagctgtgtttcaaagtctgggcaggttgttgttgaattttgcgtgggctgccaggattttgtggaagtataatactttgtcattatgagatgtcgtctctcggtgcctcctttgtgcaaattaaatttgatgacttgcagttttttgaaaactgcggtggaggaagttttgggagtgtttatcgagccaaatggatatcacaggacaaggaggtggctgtaaagaagctcctcaaaatagagaaagaggcagaaatactcagtgtcctcagtcacagaaacatcatccagttttatggagtaattcttgaacctcccaactatggcattgtcacagaatatgcttctctgggatcactctatgattacattaacagtaacagaagtgaggagatggatatggatcacattatgacctgggccactgatgtagccaaaggaatgcattatttacatatggaggctcctgtcaaggtgattcacagagacctcaagtcaagaaacg

SEQ ID NO: 235537 - DNA, 417 bp, Artificial Sequence
  derived and/or modified sequence
atgtcgtcccttggtgccagctttgtccagattaaatttgacgacttacagtttttcgagaattgtggcggaggttccttcgggtccgtgtacagagcaaaatggataagtcaggataaggaggttgccgttaaaaagctgctgaaaatcgaaaaggaggctgaaattctgagcgtgctgtctcatcgaaatatcatccagttctatggtgtgatactggagcctcccaattacgggattgtaactgagtacgctagtttgggtagcctttatgactacattaacagcaatcggagcgaagaaatggatatggaccacattatgacatgggccacggatgtcgcaaagggcatgcactacctccacatggaggcccctgttaaggtgatacacagggacctgaaatccagaaattag

SEQ ID NO: 235538 - DNA, 1065 bp, Artificial Sequence
  derived and/or modified sequence
atggacatggaccacattatgacatgggccactgacgttgctaaagggatgcattatctccacatggaagcccctgtgaaggtaattcacagggacttaaaaagtcgcaacgttgtgatcgccgcagacggcgtcctgaaaatctgcgacttcggagcttcaaggtttcacaatcacacaactcacatgagcttggttggaactttcccttggatggcccctgaggtgatccagtccttgcctgtctctgagacctgtgatacgtacagctacggtgttgtgttatgggagatgcttacccgagaggttccattcaagggcctggagggattgcaggtggcttggcttgtcgtcgagaaaaatgaacgattaacaatcccaagctcctgcccgagaagttttgcagagcttttgcatcaatgctgggaagcagacgccaagaagaggccaagcttcaagcagattatcagcatcctggagagcatgtcaaacgacactagcctgcccgacaagtgtaacagtttcttgcacaataaggccgagtggcgctgcgaaattgaggcaacacttgagcggcttaaaaaattagaacgcgatctgagctttaaagagcaggagcttaaggagagggaaaggcgcctgaagatgtgggagcagaagctaacagaacagtcaaatacgcctcttctcctgccattggctgccaggatgagcgaagagagttattttgagtcaaaaacagaagagtctaactccgccgagatgtcctgccaaataaccgccacatccaatggcgaaggccacggcatgaatccgagcctgcaggccatgatgctgatgggcttcggcgatattttctccatgaacaaagcgggagcagttatgcacagcggcatgcagattaacatgcaggctaagcagaactccagcaaaactaccagcaaacgtagggggaagaaagtgaacatggccctggggtttagcgatttcgatcttagcgagggagacgacgatgatgatgacgatggggaggaggaggacaacgacatggacaactctgagtag

SEQ ID NO: 235539 - DNA, 1783 bp, Artificial Sequence
  derived and/or modified sequence
aactcctaactgcagcggaaacgtgggagccgcgcgggccgctgtcgtcccaacccccgccgccctcgtcgcgcgcggggcctccgcgcccccggctgctgctcacgccccgcccgggagccaggcagaaatactcagtgtcctcagtcacagaaacatcatccagttttatggagtaattcttgaacctcccaactatggcattgtcacagaatatgcttctctgggatcactctatgattacattaacagtaacagaagtgaggagatggatatggatcacattatgacctgggccactgatgtagccaaaggaatgcattatttacatatggaggctcctgtcaaggtgattcacagagacctcaagtcaagaaacgttgttatagctgctgatggagtattgaagatctgtgactttggtgcctctcggttccataaccatacaacacacatgtccttggttggaactttcccatggatggctccagaagttatccagagtctccctgtgtcagaaacttgtgacacatattcctatggtgtggttctctgggagatgctaacaagggaggtcccctttaaaggtttggaaggattacaagtagcttggcttgtagtggaaaaaaacgagagattaaccattccaagcagttgccccagaagttttgctgaactgttacatcagtgttgggaagctgatgccaagaaacggccatcattcaagcaaatcatttcaatcctggagtccatgtcaaatgacacgagccttcctgacaagtgtaactcattcctacacaacaaggcggagtggaggtgcgaaattgaggcaactcttgagaggctaaagaaactagagcgtgatctcagctttaaggagcaggagcttaaagaacgagaaagacgtttaaagatgtgggagcaaaagctgacagagcagtccaacaccccgcttctcttgcctcttgctgcaagaatgtctgaggagtcttactttgaatctaaaacagaggagtcaaacagtgcagagatgtcatgtcagatcacagcaacaagtaacggggagggccatggcatgaacccaagtctgcaggccatgatgctgatgggctttggggatatcttctcaatgaacaaagcaggagctgtgatgcattctgggatgcagataaacatgcaagccaagcagaattcttccaaaaccacatctaagagaagggggaagaaagtcaacatggctctggggttcagtgattttgacttgtcagaaggtgacgatgatgatgatgatgacggtgaggaggaggataatgacatggataatagtgaatgaaagcagaaagcaaagtaataaaatcacaaatgtttggaaaacacaaaagtaacttgtttatctcagtctgtacaaaaacagtaaggaggcagaaagccaagcactgcatttttaggccaatcacatttacatgaccgtaatttcttatcaattctacttttatttttgcttacagaaaaacggggggagaattaagccaaagaagtatatttatgaatcagcaaatgtggtgcctgattatagaaatttgtgatcctatatacaatataggacttttaaagttgtgacattctggctttttcttttaatgaatactttttagtttgtatttgactttatttcctttattcaaatcatttttaaaaacttacattttgaacaaacactcttaactcctaattgttctttgacacgtagtaattctgtgacatactttttttttcttatagc

SEQ ID NO: 235540 - DNA, 1368 bp, Artificial Sequence
  derived and/or modified sequence
atgagcagtctgggggctagcttcgtacagattaagttcgacgacctgcagttcttcgagaactgtggaggcggatcctttgggtctgtctaccgggctaaatggataagccaggacaaagaagtggccgttaaaaaactcctcaaaatagagaaagaggccgagatattgagcgtcctctcgcatcggaacattattcaattctatggggtgatcctagaacctccgaattacggaattgtgacagagtatgcatcgctgggctctttgtacgattatatcaattctaaccgttcagaggagatggacatggatcatatcatgacctgggctacagatgtggccaagggcatgcattacctgcatatggaggctccagtgaaagtgatccacagggatctcaagagcagaaatgtggtaattgcagcagacggggttttgaagatctgcgactttggtgcttcaaggtttcacaatcacaccactcacatgagcctcgtaggcacatttccatggatggcccctgaggtgatccagtcgttgcccgtcagtgagacctgcgatacctattcttacggggtggttttgtgggaaatgttgactcgggaagtgccattcaaagggctggagggactccaagtcgcctggttggtcgtggaaaagaacgaaagattgaccatcccttcttcttgccctcgcagcttcgccgaactgctgcatcagtgttgggaggctgacgcgaagaagaggccatcctttaagcagattatctccatcctggagtcaatgtccaatgatacaagcctccccgacaagtgcaatagttttcttcataacaaggccgaatggagatgtgagattgaggccaccctggagcgcttgaagaagctggaacgggacctttcattcaaagaacaagagttgaaagagcgagaacggagattgaaaatgtgggagcaaaaactgacagaacagagtaataccccactgctgttgccactagcagcccgaatgtctgaggaaagctacttcgagtccaaaacagaagagtcgaatagcgcagaaatgtcgtgccagatcacagccacaagtaacggagaaggccatggcatgaacccttccctccaagccatgatgctgatggggttcggagacatcttctcaatgaacaaggctggcgctgttatgcatagtggtatgcagattaatatgcaggctaaacaaaacagctccaagactacgtccaagaggcgaggtaagaaagtgaatatggcactggggttctctgacttcgatctttctgaaggcgacgatgatgatgacgatgacggtgaggaagaggacaacgacatggacaatagcgaatag

SEQ ID NO: 235541 - DNA, 2312 bp, Artificial Sequence
  derived and/or modified sequence
agagaggcagccttcagacctatgttcccagaaatctctacgtttgtgcctttcccaactagagaattaactcttgcggggcacaaaacagcctctatttctttgcgtccccagcgcctgtttgttgaagactgagttgaaggagtagcaggtggtgttaatttgtcaaaaagatgagttaaggtgctgggggcgagggggaacacccccacggccctccccccacagcaaggcagattttgtggaagtataatactttgtcattatgagatgtcgtctctcggtgcctcctttgtgcaaattaaatttgatgacttgcagttttttgaaaactgcggtggaggaagttttgggagtgtttatcgagccaaatggatatcacaggacaaggaggtggctgtaaagaagctcctcaaaatagagaaagaggcagaaatactcagtgtcctcagtcacagaaacatcatccagttttatggagtaattcttgaacctcccaactatggcattgtcacagaatatgcttctctgggatcactctatgattacattaacagtaacagaagtgaggagatggatatggatcacattatgacctgggccactgatgtagccaaaggaatgcattatttacatatggaggctcctgtcaaggtgattcacagagacctcaagtcaagaaacgttgttatagctgctgatggagtattgaagatctgtgactttggtgcctctcggttccataaccatacaacacacatgtccttggttggaactttcccatggatggctccagaagttatccagagtctccctgtgtcagaaacttgtgacacatattcctatggtgtggttctctgggagatgctaacaagggaggtcccctttaaaggtttggaaggattacaagtagcttggcttgtagtggaaaaaaacgagagattaaccattccaagcagttgccccagaagttttgctgaactgttacatcagtgttgggaagctgatgccaagaaacggccatcattcaagcaaatcatttcaatcctggagtccatgtcaaatgacacgagccttcctgacaagtgtaactcattcctacacaacaaggcggagtggaggtgcgaaattgaggcaactcttgagaggctaaagaaactagagcgtgatctcagctttaaggagcaggagcttaaagaacgagaaagacgtttaaagatgtgggagcaaaagctgacagagcagtccaacaccccgcttctcttgcctcttgctgcaagaatgtctgaggagtcttactttgaatctaaaacagaggagtcaaacagtgcagagatgtcatgtcagatcacagcaacaagtaacggggagggccatggcatgaacccaagtctgcaggccatgatgctgatgggctttggggatatcttctcaatgaacaaagcaggagctgtgatgcattctgggatgcagataaacatgcaagccaagcagaattcttccaaaaccacatctaagagaagggggaagaaagtcaacatggctctggggttcagtgattttgacttgtcagaaggtgacgatgatgatgatgatgacggtgaggaggaggataatgacatggataatagtgaatgaaagcagaaagcaaagtaataaaatcacaaatgtttggaaaacacaaaagtaacttgtttatctcagtctgtacaaaaacagtaaggaggcagaaagccaagcactgcatttttaggccaatcacatttacatgaccgtaatttcttatcaattctacttttatttttgcttacagaaaaacggggggagaattaagccaaagaagtatatttatgaatcagcaaatgtggtgcctgattatagaaatttgtgatcctatatacaatataggacttttaaagttgtgacattctggctttttcttttaatgaatactttttagtttgtatttgactttatttcctttattcaaatcatttttaaaaacttacattttgaacaaacactcttaactcctaattgttctttgacacgtagtaattctgtgacatactttttttttcttatagcaatacactgtaatatcagaaatggttggcctgagcaacctagtaagacctcgtctctactaataattaaaaaactagctggcatggtagcacacacctgtagtcccagatacttgggaggccaaggcaggaggattgcttgagacctagcaatcagtcagggctgcagtgagccatgatggcaccactgcactctagcctgggcaagagaacaagatcctgtct

SEQ ID NO: 235542 - protein, 522 aa, Artificial Sequence
  derived and/or modified sequence
MSITSDEVNFLVYRYLQESGFSHSAFTFGIESHISQSNINGTLVPPSALISILQKGLQYVEAEISINKDGTVFDSRPIESLSLIVAVIPDVVQMRQQAFGEKLTQQQASAAATEASAMAKAATMTPAAISQQNPPKNREATVNGEENGAHEINNHSKPMEIDGDVEIPPNKATVLRGHESEVFICAWNPVSDLLASGSGDSTARIWNLNENSNGGSTQLVLRHCIREGGHDVPSNKDVTSLDWNSDGTLLAMGSYDGFARIWTENGNLASTLGQHKGPIFALKWNKKGNYVLSAGVDKTTIIWDAHTGEAKQQFPFHSAPALDVDWQNNMTFASCSTDMCIHVCRLGCDHPVKTFQGHTNEVNAIKWDPSGMLLASCSDDMTLKIWSMKQDACVHDLQAHSKEIYTIKWSPTGPATSNPNSSIMLASASFDSTVRLWDVEQGVCTHTLMKHQEPVYSVAFSPDGKYLASGSFDKYVHIWNTQSGSLVHSYQGTGGIFEVCWNARGDKVGASASDGSVCVLDL

SEQ ID NO: 235543 - protein, 45 aa, Artificial Sequence
  derived and/or modified sequence
MSITSDEVNFLVYRYLQESGFSHSAFTFGIESHISQSNINGTLVP

SEQ ID NO: 235544 - DNA, 1569 bp, Artificial Sequence
  derived and/or modified sequence
atgagcatcaccagcgacgaggtgaacttcctggtgtacagatacctgcaggagagcggcttcagccacagcgccttcaccttcggcatcgagagccacatcagccagagcaacatcaacggcaccctggtgccccccagcgccctgatcagcatcctgcagaagggcctgcagtacgtggaggccgagatcagcatcaacaaggacggcaccgtgttcgacagcagacccatcgagagcctgagcctgatcgtggccgtgatccccgacgtggtgcagatgagacagcaggccttcggcgagaagctgacccagcagcaggccagcgccgccgccaccgaggccagcgccatggccaaggccgccaccatgacccccgccgccatcagccagcagaacccccccaagaacagagaggccaccgtgaacggcgaggagaacggcgcccacgagatcaacaaccacagcaagcccatggagatcgacggcgacgtggagatcccccccaacaaggccaccgtgctgagaggccacgagagcgaggtgttcatctgcgcctggaaccccgtgagcgacctgctggccagcggcagcggcgacagcaccgccagaatctggaacctgaacgagaacagcaacggcggcagcacccagctggtgctgagacactgcatcagagagggcggccacgacgtgcccagcaacaaggacgtgaccagcctggactggaacagcgacggcaccctgctggccatgggcagctacgacggcttcgccagaatctggaccgagaacggcaacctggccagcaccctgggccagcacaagggccccatcttcgccctgaagtggaacaagaagggcaactacgtgctgagcgccggcgtggacaagaccaccatcatctgggacgcccacaccggcgaggccaagcagcagttccccttccacagcgcccccgccctggacgtggactggcagaacaacatgaccttcgccagctgcagcaccgacatgtgcatccacgtgtgcagactgggctgcgaccaccccgtgaagaccttccagggccacaccaacgaggtgaacgccatcaagtgggaccccagcggcatgctgctggccagctgcagcgacgacatgaccctgaagatctggagcatgaagcaggacgcctgcgtgcacgacctgcaggcccacagcaaggagatctacaccatcaagtggagccccaccggccccgccaccagcaaccccaacagcagcatcatgctggccagcgccagcttcgacagcaccgtgagactgtgggacgtggagcagggcgtgtgcacccacaccctgatgaagcaccaggagcccgtgtacagcgtggccttcagccccgacggcaagtacctggccagcggcagcttcgacaagtacgtgcacatctggaacacccagagcggcagcctggtgcacagctaccagggcaccggcggcatcttcgaggtgtgctggaacgccagaggcgacaaggtgggcgccagcgccagcgacggcagcgtgtgcgtgctggacctgtag

SEQ ID NO: 235545 - DNA, 1095 bp, Artificial Sequence
  derived and/or modified sequence
atggagatcgacggcgacgtggagatcccccccaacaaggccaccgtgctgagaggccacgagagcgaggtgttcatctgcgcctggaaccccgtgagcgacctgctggccagcggcagcggcgacagcaccgccagaatctggaacctgaacgagaacagcaacggcggcagcacccagctggtgctgagacactgcatcagagagggcggccacgacgtgcccagcaacaaggacgtgaccagcctggactggaacagcgacggcaccctgctggccatgggcagctacgacggcttcgccagaatctggaccgagaacggcaacctggccagcaccctgggccagcacaagggccccatcttcgccctgaagtggaacaagaagggcaactacgtgctgagcgccggcgtggacaagaccaccatcatctgggacgcccacaccggcgaggccaagcagcagttccccttccacagcgcccccgccctggacgtggactggcagaacaacatgaccttcgccagctgcagcaccgacatgtgcatccacgtgtgcagactgggctgcgaccaccccgtgaagaccttccagggccacaccaacgaggtgaacgccatcaagtgggaccccagcggcatgctgctggccagctgcagcgacgacatgaccctgaagatctggagcatgaagcaggacgcctgcgtgcacgacctgcaggcccacagcaaggagatctacaccatcaagtggagccccaccggccccgccaccagcaaccccaacagcagcatcatgctggccagcgccagcttcgacagcaccgtgagactgtgggacgtggagcagggcgtgtgcacccacaccctgatgaagcaccaggagcccgtgtacagcgtggccttcagccccgacggcaagtacctggccagcggcagcttcgacaagtacgtgcacatctggaacacccagagcggcagcctggtgcacagctaccagggcaccggcggcatcttcgaggtgtgctggaacgccagaggcgacaaggtgggcgccagcgccagcgacggcagcgtgtgcgtgctggacctgtag

SEQ ID NO: 235546 - DNA, 138 bp, Artificial Sequence
  derived and/or modified sequence
atgagcatcaccagcgacgaggtgaacttcctggtgtacagatacctgcaggagagcggcttcagccacagcgccttcaccttcggcatcgagagccacatcagccagagcaacatcaacggcaccctggtgccctag

SEQ ID NO: 235547 - DNA, 1569 bp, Artificial Sequence
  derived and/or modified sequence
atgagtatcacatcagatgaagttaacttcttagtgtaccgatacctgcaagagagtggattttcccactccgcctttacctttggaatcgagagccatatctcccaatccaatatcaacggaaccctggtgccgccctctgcactcatctccattctacagaaaggtcttcagtacgtggaagccgagataagcatcaataaagacgggactgtgtttgattcacgccctattgagagcctgtctcttattgtggcggtgattccggatgtggtacagatgagacagcaagctttcggagagaagctcacccagcagcaggcttccgccgcggcaactgaggcttctgcaatggccaaagctgccaccatgactcccgccgccatatcacagcagaaccctcccaagaaccgggaggccaccgtaaacggtgaagagaatggcgcccacgagatcaacaaccatagcaagccaatggagatcgatggcgacgtggaaattccccccaataaggccacagtactcaggggccacgagtccgaggtcttcatttgtgcatggaatccagtgtcggatctgctcgcatcaggctcaggggactccactgcgagaatttggaacctgaacgaaaactcaaatggaggttctactcagttggtgctgcggcattgcataagagagggagggcatgatgtcccatccaacaaagacgtcacctcactggattggaacagcgacggaactctactggccatgggttcttatgatggatttgcccgcatttggactgaaaacggcaatttggcgtcaaccttaggtcaacacaaggggccgatatttgccttgaagtggaataaaaaaggcaattatgttttgagcgctggcgtggacaagactaccatcatctgggatgcccatacgggcgaggccaagcagcagtttccctttcattcagctcctgcactggacgttgattggcagaataatatgacatttgcctcctgctcaactgatatgtgcatacacgtatgtcgtttggggtgtgatcaccctgttaaaaccttccaagggcatacaaatgaggtgaacgctatcaaatgggacccatcagggatgcttttggcctcctgctccgacgatatgacattgaaaatatggagtatgaaacaagatgcctgcgttcacgatcttcaggcacattccaaagaaatatacactatcaaatggagtcctacgggtccagccactagcaatccgaattcctccatcatgttggcctctgcctccttcgatagcactgtcagactctgggatgtggaacagggagtctgcacgcacacgctaatgaagcatcaggaaccagtctacagcgtggccttcagtcccgatggcaaatacctggcctctgggagcttcgacaagtatgttcatatttggaatacccagtctggttctttggtccactcgtaccagggaaccgggggcattttcgaggtgtgctggaatgctcggggggataaggtaggggcatccgccagtgacgggagcgtctgtgtgctggacttgtag

SEQ ID NO: 235548 - DNA, 1569 bp, Artificial Sequence
  derived and/or modified sequence
atgagcatcaccagtgatgaggtcaattttctggtctacaggtatctccaagagtccggtttttcccacagtgccttcacctttgggatcgaaagccatatctcacagagcaacataaatggaaccttggtgccaccgagcgctctgataagtatcctccagaagggcctgcagtacgtcgaagcggaaatctccatcaacaaggacgggactgtcttcgatagccggccaatcgagtctctcagcctgatcgtcgcagtcatcccggatgtcgtacagatgcggcagcaagccttcggtgaaaagctgacccagcagcaggcaagcgctgcagctacggaagcctcagccatggccaaggctgcgaccatgacgccagctgcaatctctcagcaaaacccacctaagaatagggaggccactgtgaatggagaggagaatggtgcccatgagattaataatcattctaagcccatggagattgacggggacgtcgaaatcccccctaacaaggcgactgttctgagggggcatgagtcggaggtcttcatctgcgcttggaatccagtctcagatttactggcatcgggctctggggactccactgctagaatctggaatctgaacgagaactctaatggaggcagcacacagctggtgctgcggcattgcatccgtgaaggggggcacgatgttccctcaaataaagacgtaaccagtttggattggaattcagacggcacactgctggctatgggctcttatgacggctttgcacggatatggaccgagaatggcaatctagcaagcacgctggggcagcataagggccctatctttgcgctcaagtggaacaagaaaggaaattacgtgctgtccgctggggtggacaaaacaacgattatttgggacgcacatacaggtgaggcaaagcagcagtttccgttccactcggctccagctttggatgtggattggcagaacaacatgactttcgctagctgctccactgacatgtgcatccacgtctgcagacttggatgcgaccatcctgtgaaaacgttccagggtcacactaatgaagtgaacgctataaagtgggacccatcgggcatgctactggcctcttgcagcgacgacatgacactcaagatttggtccatgaagcaggatgcttgcgttcatgacctccaagcccattcgaaggagatctacacgatcaagtggagcccaaccggtcccgcaacatctaatcctaattccagtattatgctcgcctccgccagcttcgacagtaccgttcggctttgggacgtggagcaaggcgtgtgtacccacacccttatgaaacaccaggaacccgtttattccgtggcattcagccccgatggaaagtaccttgccagcggcagcttcgacaagtatgtgcatatctggaatacacagagcggctctctagtgcattcctaccagggcactggtggaattttcgaagtgtgctggaacgctcgcggagataaggtgggcgcctcagcatccgatgggtcagtctgcgtcctcgatctctag

SEQ ID NO: 235549 - DNA, 1569 bp, Artificial Sequence
  derived and/or modified sequence
atgagcattacaagcgatgaggtaaacttccttgtttatcgctatttacaggagtccgggttctctcatagcgcgttcacttttggaatcgaatcacatatcagccagtcaaatatcaacggcactctggtccccccatccgctttgatcagcatcctgcagaagggtctgcaatacgtcgaagccgaaattagcataaataaggacggcacagtcttcgacagccgtcctatcgaaagcctcagcctcatagtagccgtgatcccggatgtcgtgcagatgcggcaacaggcctttggtgagaagttgacccagcaacaggccagtgccgccgctacggaggccagcgccatggccaaggccgccaccatgacacctgccgctatctctcaacagaaccccccaaaaaaccgcgaagccacagtcaatggagaagaaaatggagcacatgagataaacaaccacagcaaaccaatggagattgacggggatgtcgagatccctcctaataaggcgaccgtcttgcgcggccacgagtcagaagtgttcatctgtgcatggaacccggtgagtgatctgctggcttccggatccggggactctactgcacggatttggaaccttaacgaaaattcgaacggtggctctacccagctcgtgttacggcactgtattagagaagggggacacgacgttccgagcaacaaggacgtgacgtctctagactggaactcagatggaactttactggccatggggtcttacgacggctttgcaagaatttggacagagaatgggaacctagcttccactctgggacagcacaagggcccgattttcgcactgaaatggaataagaaagggaactacgtcctttcagctggggttgacaaaacgacaatcatatgggacgctcacactggtgaggcaaagcagcagtttccgttccattccgcgcccgctctcgacgtcgattggcaaaataatatgacgtttgcttcatgcagtaccgacatgtgtattcatgtgtgtagactcggctgcgaccacccagtaaagacgtttcagggccataccaatgaggtcaatgctattaagtgggatcctagcgggatgctcttggccagttgctccgacgatatgactctaaagatatggtctatgaagcaggacgcctgcgtacacgatctccaggctcatagcaaggagatctataccatcaaatggagccccactggaccggcaactagcaatccaaactccagcatcatgcttgcaagtgctagcttcgattccaccgtcaggctctgggacgtggagcagggtgtctgcactcacaccctgatgaagcaccaggagccagtgtattccgtcgccttcagccccgatggaaagtacttagcttcgggaagctttgataaatatgtccacatctggaacacacagtctggctccttagtgcatagctaccaaggcactgggggcattttcgaggtctgctggaacgctcggggggacaaggtgggcgcttctgcttccgacggctctgtttgtgtgttggacctgtag

SEQ ID NO: 235550 - DNA, 1095 bp, Artificial Sequence
  derived and/or modified sequence
atggagatagatggcgacgttgagattcccccaaataaagctacggtcctcagaggtcatgaaagcgaagtctttatttgcgcttggaatcccgtgtcagacttgttggcctccggatctggtgattctactgccaggatctggaatttgaatgagaactctaacggtggatccacacagctggtcctgaggcactgcatccgggagggggggcatgacgtgccatctaataaagacgtaactagcctcgattggaattccgacggcacactcctcgcgatgggcagctacgacgggttcgcccggatttggacagaaaacgggaatctggccagcacactgggccaacataaaggcccaatctttgcattaaaatggaataagaagggcaattatgtgttgtctgcaggtgtggacaaaacaacaattatatgggacgctcacactggggaggctaaacagcaattcccattccattcagccccagccctcgatgttgactggcagaacaatatgacctttgctagctgttctaccgacatgtgtattcacgtgtgcaggttagggtgtgatcatcctgtgaaaactttccaagggcataccaacgaggtgaatgcaattaagtgggatccttccggcatgcttttagcttcctgctccgacgatatgaccctgaagatctggagtatgaagcaggacgcctgtgtgcatgatctgcaagcacattctaaagagatttacaccattaaatggagccccacaggacccgctacctccaatccgaatagcagcattatgttggccagtgccagcttcgacagtacagttcgtctgtgggatgttgaacaaggagtatgtactcacacccttatgaagcaccaagagcccgtttattcagtggccttctccccagacggaaaatacctggcctcaggcagctttgataagtatgtgcacatatggaatactcagagcggttccctcgtgcacagctatcaggggactggcgggatctttgaggtgtgttggaacgccagaggggacaaggttggtgccagcgcttctgatgggagcgtttgtgtgctggatttgtag

SEQ ID NO: 235551 - DNA, 138 bp, Artificial Sequence
  derived and/or modified sequence
atgtccattacttccgatgaagtgaatttcctcgtttataggtatctgcaggagagcggcttctcacattcagcctttacatttggcatcgaatcacatatttcccagtctaatattaatggcacactcgtcccctag

SEQ ID NO: 235552 - DNA, 1569 bp, Artificial Sequence
  derived and/or modified sequence
atgagcatcaccagtgatgaggtgaacttcctggtgtaccgctacctgcaggagagcggcttcagccacagcgccttcaccttcggcatcgagagccacatcagccagagcaacatcaatggcaccctggtgcccccatctgccctgatcagcatcctgcagaagggcctgcagtatgtggaggccgagatcagcatcaacaaggatggcaccgtgtttgacagccggcccatcgagagcctgagcctcatcgtggccgtcatcccagatgtggtgcagatgaggcagcaggcctttggagagaagctgacccagcagcaggccagcgctgctgccacagaggccagcgccatggccaaggccgccaccatgaccccagctgccatcagccagcagaacccccccaagaaccgggaggccaccgtgaatggagaggagaatggagcccacgagatcaacaaccacagcaagcccatggagattgatggagatgtggagatcccccccaacaaggccaccgtgctgcggggccacgagagcgaggtgttcatctgtgcctggaaccctgtgtctgacctgctggccagcggcagcggggacagcacagcccgcatctggaacctgaatgaaaacagcaatggaggcagcacccagctggtgctgcggcactgcatccgggagggcggccatgatgtgcccagcaacaaggatgtgaccagcctggactggaacagtgatggcaccctgctggccatgggcagctatgatggctttgcccgcatctggacagaaaatggaaacctggccagcaccctgggccagcacaagggccccatctttgccctgaagtggaacaagaagggcaactacgtgctgtctgctggggtggacaagaccaccatcatctgggatgcccacactggagaggccaagcagcagttccccttccacagcgccccagccctggatgtggactggcagaacaacatgacctttgccagctgcagcacagacatgtgcatccacgtgtgccgcctgggctgtgaccaccctgtgaagaccttccagggccacaccaatgaggtgaatgccatcaagtgggaccccagcggcatgctgctggccagctgcagtgatgacatgaccctgaagatctggagcatgaagcaggatgcctgtgtgcatgacctgcaggcccacagcaaggagatctacaccatcaagtggagccccaccggccctgccaccagcaaccccaacagcagcatcatgctggccagcgccagctttgacagcacagtgcggctgtgggatgtggagcagggcgtgtgcacccacaccctgatgaagcaccaggagcctgtgtacagcgtggccttctccccagatggcaagtacctggccagcggcagctttgacaagtatgtgcacatctggaacacccagagcggcagcctggtgcacagctaccagggcactggaggcatctttgaggtgtgctggaatgcccggggggacaaggtgggcgccagcgccagtgatggctctgtgtgtgtgctggacctgtag

SEQ ID NO: 235553 - DNA, 1095 bp, Artificial Sequence
  derived and/or modified sequence
atggagattgatggagatgtggagatcccccccaacaaggccaccgtgctgcggggccacgagagcgaggtgttcatctgtgcctggaaccctgtgtctgacctgctggccagcggcagcggggacagcacagcccgcatctggaacctgaatgaaaacagcaatggaggcagcacccagctggtgctgcggcactgcatccgggagggcggccatgatgtgcccagcaacaaggatgtgaccagcctggactggaacagtgatggcaccctgctggccatgggcagctatgatggctttgcccgcatctggacagaaaatggaaacctggccagcaccctgggccagcacaagggccccatctttgccctgaagtggaacaagaagggcaactacgtgctgtctgctggggtggacaagaccaccatcatctgggatgcccacactggagaggccaagcagcagttccccttccacagcgccccagccctggatgtggactggcagaacaacatgacctttgccagctgcagcacagacatgtgcatccacgtgtgccgcctgggctgtgaccaccctgtgaagaccttccagggccacaccaatgaggtgaatgccatcaagtgggaccccagcggcatgctgctggccagctgcagtgatgacatgaccctgaagatctggagcatgaagcaggatgcctgtgtgcatgacctgcaggcccacagcaaggagatctacaccatcaagtggagccccaccggccctgccaccagcaaccccaacagcagcatcatgctggccagcgccagctttgacagcacagtgcggctgtgggatgtggagcagggcgtgtgcacccacaccctgatgaagcaccaggagcctgtgtacagcgtggccttctccccagatggcaagtacctggccagcggcagctttgacaagtatgtgcacatctggaacacccagagcggcagcctggtgcacagctaccagggcactggaggcatctttgaggtgtgctggaatgcccggggggacaaggtgggcgccagcgccagtgatggctctgtgtgtgtgctggacctgtag

SEQ ID NO: 235554 - DNA, 138 bp, Artificial Sequence
  derived and/or modified sequence
atgagcatcaccagtgatgaggtgaacttcctggtgtaccgctacctgcaggagagcggcttcagccacagcgccttcaccttcggcatcgagagccacatcagccagagcaacatcaatggcaccctggtgccctag

SEQ ID NO: 235555 - DNA, 1569 bp, Artificial Sequence
  derived and/or modified sequence
atgagcatcaccagcgacgaggtgaacttcctggtgtaccggtacctccaggaaagcgggtttagccatagcgccttcactttcgggatcgaatcacacataagccagtcaaacatcaacgggactttggtgccccctagcgcactgatcagcatattgcagaagggtctccagtatgttgaagctgaaatctcgattaataaggatgggacagtatttgactctcgaccaatagagagtctctctctcatcgtcgccgttatacctgacgtggttcagatgcggcaacaggcctttggtgagaaactgacacagcagcaggcatctgctgccgccacagaagcttccgcgatggccaaggctgctacaatgactccagctgccattagtcaacagaatcctcccaaaaaccgagaagccaccgtcaacggggaggagaacggcgcccatgagattaataatcactctaaacccatggagatcgatggcgacgtggagatcccgccaaataaggcaactgttctgcgcgggcatgagagtgaggtctttatttgcgcatggaaccctgtgtctgatctgctcgctagtggatcaggcgattccacggcccggatctggaatctgaatgagaactccaacggcggctcgacccaacttgtcctcagacactgtatccgcgaaggtggtcatgatgtgccttcaaataaagatgtgacatctctggattggaactctgacggcacgctgctggcgatgggctcatacgacggatttgcccggatttggactgaaaacggaaatctcgctagtacgctgggtcagcataaaggcccaatattcgccctgaaatggaacaagaagggaaattacgtgctgtccgctggagtggataaaacaacgattatatgggatgcccataccggtgaggcaaaacagcaatttccattccattcagcaccagctctagatgtcgactggcagaataacatgacgttcgcaagttgcagcacagacatgtgtattcacgtgtgccgacttggctgcgaccacccggtcaaaaccttccaggggcataccaacgaggttaatgccataaaatgggatcccagtggtatgctgctggccagctgcagcgatgatatgacgcttaaaatttggtcgatgaagcaggacgcatgtgtgcatgacttgcaggcacactctaaagaaatctacaccatcaagtggtcccctactggtccagcaacctccaaccctaacagcagcatcatgcttgcatccgcgtcttttgattccaccgtgcggctttgggatgtggaacagggggtctgtacacacaccttgatgaagcatcaggaaccagtttacagcgtggcatttagccctgacggaaagtacttagcttcaggctcttttgacaagtacgttcacatatggaatacccagagtggttccctcgttcattcatatcagggcactgggggcatcttcgaggtctgctggaacgccagaggtgacaaggtgggggcctcggcatctgacggatctgtgtgtgttctggatttgtag

SEQ ID NO: 235556 - DNA, 1569 bp, Artificial Sequence
  derived and/or modified sequence
atgagcatcaccagcgacgaggtgaacttcctggtgtaccggtaccttcaagagagtggcttcagccactccgctttcacttttgggatcgaaagccatatttcacaatccaacattaatggcactctagttcccccctcagctctgattagcattctgcagaagggattacaatatgttgaggctgagattagcatcaacaaagacggcactgtgtttgatagtcgacccatcgagtcgttgagcctgattgtggctgtgatacccgatgtcgtccagatgaggcaacaggcatttggggagaaactgacccagcaacaggctagcgcagcggccactgaggccagtgcgatggctaaggccgctacaatgacccctgccgcgatatcgcagcagaatcctccgaagaacagagaagccacagtcaacggagaggaaaatggggctcacgaaatcaataaccactccaaacctatggaaatcgacggggatgtcgagatcccccctaacaaagccaccgtcttacggggccacgagtctgaagtgttcatctgcgcctggaacccagtatctgatcttcttgctagtggtagtggcgactctaccgctagaatctggaatctgaatgaaaacagcaacggcggatccactcagctagtcctgcggcactgtatccgcgagggcggccacgacgtgcccagtaataaagacgtcacgagcttggattggaatagcgatggaacgttactcgctatgggctcctacgacggcttcgccagaatctggactgaaaacggcaatctggcctcaaccctgggacaacataaggggcctatatttgcgctaaagtggaataagaaaggcaattatgtcctttccgctggagttgacaagactaccattatttgggatgctcacactggggaggccaagcagcagttcccgttccactctgcgcccgctctggatgttgattggcagaacaacatgacatttgcttcctgcagtaccgacatgtgcatccatgtgtgccggctaggatgcgatcatcctgttaagacgtttcagggacatacgaatgaagttaatgctattaaatgggatcctagcgggatgcttctggcgtcgtgttcagatgacatgaccctgaagatatggtcaatgaagcaagacgcttgcgtccatgaccttcaagcacactccaaggaaatctacacgattaaatggagccccactggccctgccacctctaaccccaacagctccatcatgctggcgagcgccagcttcgactccactgtgcgtctgtgggacgtggaacagggggtgtgcactcacaccctaatgaagcaccaagaaccagtgtatagcgtggcgttcagcccagatggcaagtatctggcctccggttcctttgacaaatacgtccacatttggaatactcaaagcgggtccttagtccattcctaccagggaacagggggtatcttcgaggtatgctggaacgctcgcggcgacaaggtgggcgcaagtgcctccgatggatcagtctgcgtgttggatttatag

SEQ ID NO: 235557 - DNA, 1569 bp, Artificial Sequence
  derived and/or modified sequence
atgagcatcaccagcgacgaggtgaacttcctggtgtaccggtaccttcaggaaagcggattctctcattctgcctttactttcggtattgagtcccatatcagccagagtaatatcaatggcacactggttccccccagtgctctgatctcaatactgcagaaaggtcttcagtatgttgaagccgaaatcagcatcaacaaggatggtacggtgttcgactctagacctatcgaaagtctctctctcattgtggccgtgataccggatgttgtccagatgcggcagcaggccttcggcgagaagctgacccagcaacaggcttccgccgcagccactgaagccagtgccatggccaaagccgctacaatgacccctgccgccataagccagcagaaccctcccaagaacagggaggcgactgtcaacggcgaggagaatggcgctcacgagatcaacaatcatagtaaacctatggagatcgacggagacgttgaaatacccccgaataaagcgaccgtgctcagaggacacgaatctgaagtattcatctgcgcatggaatcctgtgagtgacctcctagcctccggaagcggagattccaccgcaaggatctggaaccttaatgagaactcgaatggcggctctacccagctcgtgctgagacattgtattagagaggggggccacgacgtacctagtaataaagatgttacgtcactggattggaacagcgatgggacattgttagcaatgggatcttatgacggatttgctcgcatttggaccgaaaatggcaacctagcttctacacttggacagcataaaggacctatcttcgcactgaagtggaacaagaaagggaactatgtgctgtcggctggagttgacaagactacgattatctgggacgcccatactggcgaggcaaagcagcaattcccctttcactcagcgccagccctggatgtcgactggcagaataacatgacatttgccagctgctcaacggatatgtgcattcatgtgtgtcggctggggtgcgatcatcctgtgaagacatttcagggtcacaccaacgaggtgaatgcaataaaatgggacccctccgggatgctattggcctcatgtagcgatgacatgacactgaagatctggtcaatgaagcaggacgcgtgcgtgcacgacctccaagcccatagtaaggagatttataccatcaagtggtctcctaccggaccagccacctccaatccaaacagcagcataatgctggctagcgcaagcttcgactccacagtgcgtctgtgggatgtagagcagggagtgtgtacacatacattgatgaagcaccaggagcctgtttattctgtggccttttcaccagatggcaaatacctcgcaagcggcagttttgataagtatgtgcatatatggaatactcaatcgggatccctggttcactcttatcaggggacaggcggcatttttgaggtgtgctggaacgctagaggcgacaaagtcggagcaagcgcatcagatggatcagtatgcgtactcgacttgtag

SEQ ID NO: 235558 - DNA, 1095 bp, Artificial Sequence
  derived and/or modified sequence
atggagatcgacggcgacgtggagatcccccccaacaaggccaccgtcctccgcgggcacgagagtgaggtgtttatttgcgcatggaaccctgtgagcgatttgctggcatccggatccggcgacagtacagcaagaatctggaaccttaatgagaattccaatggggggtcgacgcagcttgtgctgaggcattgcatcagggaaggggggcatgatgtgccatctaataaggacgtgacctctctggactggaactctgatgggacactgctggccatggggagctacgacggcttcgccagaatctggaccgagaacgggaacctggctagtaccttggggcagcataagggaccaatttttgccttgaaatggaataagaaggggaattatgtgctgagtgctggagtggacaagactacaatcatctgggacgcccacaccggggaggctaaacaacaatttccttttcattccgcccccgctctcgacgtggattggcagaacaatatgaccttcgcttcttgcagtacggacatgtgcattcacgtttgtcgcctgggatgcgatcaccctgtgaagaccttccagggccacaccaatgaggtcaatgcgatcaaatgggatccatcagggatgctcttagcttcatgttctgatgatatgacattgaagatctggtcaatgaaacaagatgcctgtgtgcacgacttgcaggcccactcaaaagaaatctacactattaaatggtcgcccacgggtccggcaacaagtaatcctaattccagcataatgctcgccagtgccagctttgactccaccgtgcgcttgtgggacgtggagcagggggtatgcactcacacgcttatgaagcatcaggagcccgtttactcagttgcattcagtccagacggtaagtatctcgccagtggatcatttgataaatatgtacacatctggaacactcagtcaggttcacttgttcattcctatcagggtaccggggggatttttgaagtgtgctggaacgcccgaggcgacaaagtcggtgcctcagccagcgacggttccgtgtgtgttctggatttatag

SEQ ID NO: 235559 - DNA, 138 bp, Artificial Sequence
  derived and/or modified sequence
atgagcatcaccagcgacgaggtgaacttcctggtgtaccggtacctgcaagagagcggattttcacactctgctttcacattcggcatcgaatcgcacatcagccagagcaacataaacggaaccctggtcccgtag

SEQ ID NO: 235560 - DNA, 1569 bp, Artificial Sequence
  derived and/or modified sequence
atgtcaatcacctcagacgaggtgaattttctggtttatcgctacttacaggagtctggtttctctcatagcgcctttacttttggtatcgaatcccacatctcccagtcaaacatcaacgggactctagtgcctccctccgccctgatttccatacttcaaaagggattacagtatgtggaagcagaaatcagtataaataaggatggcaccgtcttcgattctaggcctatcgagtctctgtccctcatcgtcgcagtcatcccagatgttgtgcagatgcggcagcaagctttcggcgagaagctgactcagcaacaagctagcgctgccgcaactgaggcaagcgccatggcaaaggctgcaactatgacacctgccgcaatcagtcagcagaacccccctaagaatagggaggcaacagtaaatggggaggaaaacggagcccacgaaataaacaatcactcaaagcctatggaaattgacggcgatgtggagatcccccctaacaaagcaactgtgctccggggacacgaaagcgaggtgttcatttgtgcttggaacccagttagcgatttactggcttctgggtctggggacagcacggccaggatttggaacttgaacgaaaactcgaacgggggttccacccaactagtgctgaggcactgtattcgtgaaggtggccacgacgtgccatctaacaaagatgtcacttcacttgattggaatagcgatgggacactcctcgccatgggcagctacgacgggttcgccaggatctggactgagaatggcaacctggcctccaccctggggcagcataaaggcccaatattcgccttgaaatggaacaagaagggcaactacgtgctgagtgccggtgtcgacaagactactataatttgggatgcccacacgggggaggcaaagcaacagtttccctttcatagcgcacctgcactcgatgtggactggcaaaataacatgactttcgcaagctgctctaccgacatgtgtatccatgtttgcaggcttggatgcgaccatccagtgaaaacctttcagggccatacaaacgaggtcaatgctattaaatgggacccctctgggatgctgctggcttcttgctccgatgacatgacactaaagatatggtcaatgaagcaggacgcttgcgtgcatgatcttcaagcacattccaaagaaatctatactatcaagtggtctcctacggggccagccacgagcaacccaaattccagtattatgctggcttcggccagcttcgacagtacagtacggctgtgggacgtggaacagggcgtctgtacacataccttgatgaaacaccaggagccagtgtattctgtggctttctcacctgacggaaaatatctcgcttccgggtccttcgataaatacgtgcacatctggaacactcagtcaggaagcctggtgcattcataccagggaacgggtggcatctttgaggtttgttggaatgcccgtggagataaggtaggcgcatctgcgtccgacggaagcgtgtgcgtgctggatttgtag

SEQ ID NO: 235561 - DNA, 1569 bp, Artificial Sequence
  derived and/or modified sequence
atgagtattacctccgatgaggtcaacttcctggtttataggtacctgcaggagtcaggcttcagccactctgcatttacctttggtatagaaagccacatctctcagtcgaatatcaatggtaccctcgtgcctccctccgctcttatttcgattctgcaaaaaggcctgcagtacgtcgaggcagagatctccatcaataaagatgggacagtgtttgactctaggcccattgagtcactgagcttgattgtggcagtcatacccgacgtagtgcagatgaggcaacaagccttcggagagaagctgacgcagcagcaggcctcagctgccgcaactgaggcctcagctatggctaaggccgctaccatgactcccgctgccattagtcagcagaaccctccaaaaaaccgggaagccaccgtgaatggagaagagaacggagctcacgagatcaacaatcatagtaagccaatggagatcgacggggacgtggagatcccacctaacaaggctacagtgctgagaggacacgaatctgaggtgtttatctgcgcatggaatccggtctccgatctcctggcatctggctcgggcgatagtaccgccagaatatggaacctaaacgaaaattcaaacgggggttcaacccaattggtactcagacactgcattcgggagggaggccacgacgtgccctcgaacaaggacgtgacctctctagattggaactctgacggcacgcttctggcaatgggcagctatgacggcttcgctaggatctggacagaaaatggtaatctggcttcaacgttgggacagcacaaagggcctatctttgcgctgaagtggaataaaaagggcaactacgtgctgagtgctggcgtggataaaacgaccatcatttgggacgcgcatacaggcgaggctaagcagcagtttcccttccattcggcccctgctcttgatgtggattggcagaacaacatgacctttgcctcttgttccactgacatgtgtatccatgtatgcaggctcggatgcgaccatcctgttaaaacgttccaagggcacaccaatgaagtgaatgcgatcaaatgggaccctagtggaatgctgcttgccagctgctccgatgatatgaccctgaagatttggtccatgaaacaggatgcctgtgtgcacgatttgcaagcacacagtaaagagatctacaccataaaatggtcaccgacaggccctgctacgtccaaccccaacagctctattatgttggcctccgcatcttttgactccacagttcggctatgggacgtagaacagggggtgtgcacccacaccttaatgaaacaccaggagcccgtgtattccgtggccttcagccctgatgggaagtacctcgcatctggatcattcgacaagtatgttcacatttggaatacccagtctggctccctggtgcatagttaccaagggaccgggggaatctttgaggtttgctggaatgcaaggggggacaaagtcggagctagtgcttcggacggctctgtgtgcgttcttgacttgtag

SEQ ID NO: 235562 - DNA, 1569 bp, Artificial Sequence
  derived and/or modified sequence
atgtccatcacctctgatgaggttaatttcctggtttaccggtatctgcaggaatccggcttctcgcactcggcatttacttttggtattgagtcccatatatcacagtccaatattaacggcactctggtcccaccgtcagcccttatttctattctccaaaaaggcctgcagtacgtcgaggccgaaatatcaataaacaaagacggaacagtctttgactccaggccaatcgagtctttgtcgctcatagtcgccgtgataccagacgttgtacagatgagacaacaagctttcggggagaaactgacccagcagcaagccagcgccgctgctaccgaagcttctgctatggcaaaagcggctacaatgacgcccgcagctatatctcagcagaatcctccaaaaaaccgtgaggcgacggtgaatggtgaggaaaatggtgctcatgagataaataatcactccaagccaatggagatcgacggcgacgtggagatccctccgaataaagccaccgtgctgagaggccatgagtccgaggtgttcatctgtgcctggaatcccgtctcagacctcctggcatctggctctggggattctacggccaggatttggaatctgaatgagaattccaatgggggatccacccagctcgtgctaagacactgtatccgggaggggggtcatgacgtcccttcaaacaaggatgtgacctcgctggattggaattccgacgggacacttcttgctatgggctcctacgacggcttcgccagaatctggaccgagaatgggaatctcgccagtacccttggccagcacaagggaccaattttcgctctgaaatggaataagaaaggcaattacgtgcttagcgccggagtagacaaaactaccattatctgggatgcccacactggcgaagctaaacagcagtttcccttccactctgctccggcactggatgtggactggcagaataacatgacatttgcctcctgttctaccgacatgtgtatccatgtgtgtaggctcgggtgcgatcatcctgtcaagaccttccaaggccacactaacgaagtcaatgctatcaagtgggatccttccggtatgcttctcgcttcttgcagcgacgatatgacgctcaaaatctggagcatgaagcaagatgcttgtgtgcatgacctccaggcacacagcaaggaaatctacacaattaagtggtctcccacaggccctgccacatctaatcctaattcctctatcatgttggctagtgcatcattcgactccacagttcggctgtgggatgtagaacaaggcgtctgcactcacactctcatgaagcaccaggagcccgtttattctgtggccttctcgcctgatggcaagtatctggctagcggctcctttgataagtatgttcacatatggaacacccaatctggaagcctggtccactcctatcaggggacaggcggaatcttcgaggtctgttggaacgcaaggggagacaaggttggtgcctccgcaagcgacgggtctgtttgtgtgctggacttgtag

SEQ ID NO: 235563 - DNA, 1095 bp, Artificial Sequence
  derived and/or modified sequence
atggagattgatggtgacgtcgaaatcccccctaacaaagccaccgtgttgcgcggtcatgaatctgaagtgtttatatgtgcctggaacccagtgtctgatcttctcgcgtccggctccggggactctaccgcaaggatctggaacctgaatgagaactctaatggaggcagcacccagctcgtgcttcgccactgtatacgggagggcggacacgacgtgccgtccaacaaggatgttaccagtctcgactggaactctgacggcaccttactggcaatgggctcctatgacggatttgcccgaatatggaccgagaacgggaatctggcctcaaccctgggacagcacaaaggacctatcttcgccctgaaatggaacaagaagggcaattacgtgctgtccgctggcgtggacaaaaccactatcatttgggacgcgcataccggcgaggctaagcagcagtttcccttccactctgctcctgccctggacgtcgattggcagaacaacatgacattcgcctcttgcagtaccgacatgtgcatccacgtgtgtagactcggatgcgatcacccagtgaaaacctttcaaggacatactaacgaggtcaacgccattaaatgggacccatccggcatgctcctggcatcttgttcagatgacatgaccctgaagatctggagcatgaaacaagatgcttgcgttcatgacttgcaagcccacagcaaggagatttataccataaagtggtcccccaccggacccgctacctcaaaccctaacagtagcatcatgcttgcatctgccagcttcgacagcacggtgcgcctatgggatgtggagcagggcgtgtgcacacacaccttaatgaagcaccaggaacctgtgtatagcgtagcttttagcccggacggtaaatacctcgccagtggcagctttgacaagtacgtgcatatctggaatacgcagagtggttccctcgttcactcttaccagggaaccggtgggatatttgaagtgtgttggaacgccagaggtgacaaagtgggcgcttcagcctcagacggctccgtgtgcgtgctggacctgtag

SEQ ID NO: 235564 - DNA, 138 bp, Artificial Sequence
  derived and/or modified sequence
atgagcatcacatccgacgaggttaacttcctggtgtaccgctatctccaggaatccggcttctcccactcagcgtttacatttggaatcgaatcacacattagtcagtcaaacattaatggtactttggtgccatag

SEQ ID NO: 235565 - DNA, 2312 bp, Artificial Sequence
  derived and/or modified sequence
ccagtgcccccaattcgcgctcgggagtgaggagccgccaacaccccagctccgctgctgccgccaccgcagtgctctctagtcgccattggttacctaaactttccagtacccgcgacctttccgggactccgcggcggcggggcagaggcggcccaggggcggcacgcggctgctccggtgcgccgggctcttttcggccgccgcacggccgggcctcacaggctgccctcctgagagaggctcagaacacggccaggtacgcgccgccgccacagttgcgctgctagcgacgaggtgttttcctctgctggcacgccagaatccctggttcagcctggaaggcgaggggcaggactccccagacagtggcctcagtgtggcattgatgtcctaggttgtaaggtgctaaggctggtccccacagacggcttgccatttctatgactggatgctgagaagcctgctggttcagaggtccacacatgaagttaccataaagagggtggttccaacttcatcaatacctcatcgccatgaggtgaggctaagatgagcataaccagtgacgaggtgaactttctggtttatcggtatctccaggagtcaggtttttctcactcggctttcacgtttgggatcgagagccacatcagccagtccaacatcaatgggacactagtgccaccgtctgccctcatctccattctccagaagggactgcagtatgtagaggctgagataagcatcaacaaggatggcacagtgttcgacagccgccctatagagtccctgtccctgatagttgctgtgattcctgatgtggtgcagatgcggcagcaggcatttggagagaagctcactcagcagcaagccagtgcagcagccacagaggcatcagcaatggcaaaggcggcaaccatgaccccagctgctatttcccagcaaaatcctccaaagaaccgagaggccacagtgaacggggaagagaatggagcacatgaaatcaataatcactcaaagccaatggaaatagatggggatgttgagattccacccaacaaagccacagtccttcggggccacgagtctgaggtgttcatttgtgcctggaaccctgtcagtgatttgctagcctctggatctggagactcaactgcaaggatatggaacctgaatgagaatagcaacgggggctccacccagctcgtgttgagacattgtatacgagaaggggggcacgacgtcccaagtaataaagatgtcacctcactggactggaacagtgatggaacactattggctatgggttcatatgatggtttcgcaagaatatggacagaaaatggtaacctggccagcaccttaggccaacataaaggccccatcttcgctctgaaatggaacaaaaaggggaattatgttttgagtgctggtgtagacaaaacaacaataatttgggatgctcacacaggagaagccaaacagcagtttccttttcattcagcccccgcccttgatgtggactggcagaacaacatgacctttgcctcctgtagcacagacatgtgtatccatgtgtgcaggctcggctgtgaccacccagtcaaaaccttccagggacacacaaacgaggtcaatgccatcaaatgggatccttctggaatgttgctggcgtcctgctcggatgacatgacattgaagatctggagtatgaagcaggatgcatgcgtccacgatcttcaggctcacagcaaagagatctacaccatcaagtggagccccaccgggcctgccaccagcaacccaaactccagcatcatgttggcaagtgcttcatttgattctacagtgcgactgtgggatgtggagcaaggtgtctgcacccacacactcatgaagcatcaagagcctgtctacagtgtagctttcagccccgatggaaagtacttggctagtggatcctttgacaagtatgttcatatctggaatactcagagtggaagtctcgtccacagctaccaaggcactggcggtatcttcgaggtgtgctggaacgcccgaggagataaagtgggcgccagcgcgtctgatggctctgtgtgtgttctggatctgtgaaagtaaacacaaaatatagaaaaaaagaaaagaattctaatgacctgccttgaatgcatggggttgcagctctgttcaaacacaattctatcagctccaaaatgtgtgaacttgacttgtgttagagtatattctgaaaccaacttgtcccaggccacaggagtgtatatgtttcataatctttatcaaga

SEQ ID NO: 235566 - DNA, 2376 bp, Artificial Sequence
  derived and/or modified sequence
ccagtgcccccaattcgcgctcgggagtgaggagccgccaacaccccagctccgctgctgccgccaccgcagtgctctctagtcgccattggttacctaaactttccagtacccgcgacctttccgggactccgcggcggcggggcagaggcggcccaggggcggcacgcggctgctccggtgcgccgggctcttttcggccgccgcacggccgggcctcacaggctgccctcctgagagaggctcagaacacggccaggtacgcgccgccgccacagttgcgctgctagcgacgaggtgttttcctctgctggcacgccagaatccctggttcagcctggaaggcgaggggcaggactccccagacagtggcctcagtgtggggaatgccagctgttctcttaacagaagggcagtttttgaagaaatgaagcaggacttgatgtggattgtcataaactgtttctccctaaagaggctggtccccacagacggcttgccatttctatgactggatgctgagaagcctgctggttcagaggtccacacatgaagttaccataaagagggtggttccaacttcatcaatacctcatcgccatgaggtgaggctaagatgagcataaccagtgacgaggtgaactttctggtttatcggtatctccaggagtcaggtttttctcactcggctttcacgtttgggatcgagagccacatcagccagtccaacatcaatgggacactagtgccaccgtctgccctcatctccattctccagaagggactgcagtatgtagaggctgagataagcatcaacaaggatggcacagtgttcgacagccgccctatagagtccctgtccctgatagttgctgtgattcctgatgtggtgcagatgcggcagcaggcatttggagagaagctcactcagcagcaagccagtgcagcagccacagaggcatcagcaatggcaaaggcggcaaccatgaccccagctgctatttcccagcaaaatcctccaaagaaccgagaggccacagtgaacggggaagagaatggagcacatgaaatcaataatcactcaaagccaatggaaatagatggggatgttgagattccacccaacaaagccacagtccttcggggccacgagtctgaggtgttcatttgtgcctggaaccctgtcagtgatttgctagcctctggatctggagactcaactgcaaggatatggaacctgaatgagaatagcaacgggggctccacccagctcgtgttgagacattgtatacgagaaggggggcacgacgtcccaagtaataaagatgtcacctcactggactggaacagtgatggaacactattggctatgggttcatatgatggtttcgcaagaatatggacagaaaatggtaacctggccagcaccttaggccaacataaaggccccatcttcgctctgaaatggaacaaaaaggggaattatgttttgagtgctggtgtagacaaaacaacaataatttgggatgctcacacaggagaagccaaacagcagtttccttttcattcagcccccgcccttgatgtggactggcagaacaacatgacctttgcctcctgtagcacagacatgtgtatccatgtgtgcaggctcggctgtgaccacccagtcaaaaccttccagggacacacaaacgaggtcaatgccatcaaatgggatccttctggaatgttgctggcgtcctgctcggatgacatgacattgaagatctggagtatgaagcaggatgcatgcgtccacgatcttcaggctcacagcaaagagatctacaccatcaagtggagccccaccgggcctgccaccagcaacccaaactccagcatcatgttggcaagtgcttcatttgattctacagtgcgactgtgggatgtggagcaaggtgtctgcacccacacactcatgaagcatcaagagcctgtctacagtgtagctttcagccccgatggaaagtacttggctagtggatcctttgacaagtatgttcatatctggaatactcagagtggaagtctcgtccacagctaccaaggcactggcggtatcttcgaggtgtgctggaacgcccgaggagataaagtgggcgccagcgcgtctgatggctctgtgtgtgttctggatctgtgaaagtaaacacaaaatatagaaaaaaagaaaagaattctaatgacctgccttgaatgcatggggttgcagctctgttcaaacacaattctatcagctccaaaatgtgtgaacttgacttgtgttagagtatattctgaaaccaacttgtcccaggccacaggagtgtatatgtttcataatctttatcaaga

SEQ ID NO: 235567 - DNA, 2407 bp, Artificial Sequence
  derived and/or modified sequence
ccagtgcccccaattcgcgctcgggagtgaggagccgccaacaccccagctccgctgctgccgccaccgcagtgctctctagtcgccattggttacctaaactttccagtacccgcgacctttccgggactccgcggcggcggggcagaggcggcccaggggcggcacgcggctgctccggtgcgccgggctcttttcggccgccgcacggccgggcctcacaggctgccctcctgagagaggctcagaacacggccaggtacgcgccgccgccacagttgcgctgctagcgacgaggtgttttcctctgctggcacgccagaatccctggttcagcctggaaggcgaggggcaggactccccagacagtggcctcagtgtggcattgatgtcctaggttgtaaggtgctaaggggaatgccagctgttctcttaacagaagggcagtttttgaagaaatgaagcaggacttgatgtggattgtcataaactgtttctccctaaagaggctggtccccacagacggcttgccatttctatgactggatgctgagaagcctgctggttcagaggtccacacatgaagttaccataaagagggtggttccaacttcatcaatacctcatcgccatgaggtgaggctaagatgagcataaccagtgacgaggtgaactttctggtttatcggtatctccaggagtcaggtttttctcactcggctttcacgtttgggatcgagagccacatcagccagtccaacatcaatgggacactagtgccaccgtctgccctcatctccattctccagaagggactgcagtatgtagaggctgagataagcatcaacaaggatggcacagtgttcgacagccgccctatagagtccctgtccctgatagttgctgtgattcctgatgtggtgcagatgcggcagcaggcatttggagagaagctcactcagcagcaagccagtgcagcagccacagaggcatcagcaatggcaaaggcggcaaccatgaccccagctgctatttcccagcaaaatcctccaaagaaccgagaggccacagtgaacggggaagagaatggagcacatgaaatcaataatcactcaaagccaatggaaatagatggggatgttgagattccacccaacaaagccacagtccttcggggccacgagtctgaggtgttcatttgtgcctggaaccctgtcagtgatttgctagcctctggatctggagactcaactgcaaggatatggaacctgaatgagaatagcaacgggggctccacccagctcgtgttgagacattgtatacgagaaggggggcacgacgtcccaagtaataaagatgtcacctcactggactggaacagtgatggaacactattggctatgggttcatatgatggtttcgcaagaatatggacagaaaatggtaacctggccagcaccttaggccaacataaaggccccatcttcgctctgaaatggaacaaaaaggggaattatgttttgagtgctggtgtagacaaaacaacaataatttgggatgctcacacaggagaagccaaacagcagtttccttttcattcagcccccgcccttgatgtggactggcagaacaacatgacctttgcctcctgtagcacagacatgtgtatccatgtgtgcaggctcggctgtgaccacccagtcaaaaccttccagggacacacaaacgaggtcaatgccatcaaatgggatccttctggaatgttgctggcgtcctgctcggatgacatgacattgaagatctggagtatgaagcaggatgcatgcgtccacgatcttcaggctcacagcaaagagatctacaccatcaagtggagccccaccgggcctgccaccagcaacccaaactccagcatcatgttggcaagtgcttcatttgattctacagtgcgactgtgggatgtggagcaaggtgtctgcacccacacactcatgaagcatcaagagcctgtctacagtgtagctttcagccccgatggaaagtacttggctagtggatcctttgacaagtatgttcatatctggaatactcagagtggaagtctcgtccacagctaccaaggcactggcggtatcttcgaggtgtgctggaacgcccgaggagataaagtgggcgccagcgcgtctgatggctctgtgtgtgttctggatctgtgaaagtaaacacaaaatatagaaaaaaagaaaagaattctaatgacctgccttgaatgcatggggttgcagctctgttcaaacacaattctatcagctccaaaatgtgtgaacttgacttgtgttagagtatattctgaaaccaacttgtcccaggccacaggagtgtatatgtttcataatctttatcaaga

SEQ ID NO: 235568 - DNA, 2675 bp, Artificial Sequence
  derived and/or modified sequence
aattcgcgctcgggagtgaggagccgccaacaccccagctccgctgctgccgccaccgcagtgctctctagtcgccattggttacctaaactttccagtacccgcgacctttccgggactccgcggcggcggggcagaggcggcccaggggcggcacgcggctgctccggtgcgccgggctcttttcggccgccgcacggccgggcctcacaggctgccctcctgagagaggctcagaacacggccaggtacgcgccgccgccacagttgcgctgctagcgacgaggtgttttcctctgctggcacgccagaatccctggttcagcctggaaggcgaggggcaggactccccagacagtggcctcagtgtggcattgatgtcctaggttgtaaggtgctaaggggaatgccagctgttctcttaacagaagggcagtttttgaagaaatgaagcaggacttgatgtggattgtcataaactgtttctccctaaagaggctggtccccacagacggcttgccatttctatgactggatgctgagaagcctgctggttcagaggtccacacatgaagttaccataaaggtttttctcactcggctttcacgtttgggatcgagagccacatcagccagtccaacatcaatgggacactagtgccaccgtctgccctcatctccattctccagaagggactgcagtatgtagaggctgagataagcatcaacaaggatggcacagtgttcgacagccgccctatagagtccctgtccctgatagttgctgtgattcctgatgtggtgcagatgcggcagcaggcatttggagagaagctcactcagcagcaagccagtgcagcagccacagaggcatcagcaatggcaaaggcggcaaccatgaccccagctgctatttcccagcaaaatcctccaaagaaccgagaggccacagtgaacggggaagagaatggagcacatgaaatcaatgcggtggctcttgcctataatcccagcacttgggaggcccaaggaagaagactgattgaatctaggagttcaagaccagactgggaaagagagaaagacctcggctttacagaaaatgtagaaatcagccagataatcactcaaagccaatggaaatagatggggatgttgagattccacccaacaaagccacagtccttcggggccacgagtctgaggtgttcatttgtgcctggaaccctgtcagtgatttgctagcctctggatctggagactcaactgcaaggatatggaacctgaatgagaatagcaacgggggctccacccagctcgtgttgagacattgtatacgagaaggggggcacgacgtcccaagtaataaagatgtcacctcactggactggaacagtgatggaacactattggctatgggttcatatgatggtttcgcaagaatatggacagaaaatggtaacctggccagcaccttaggccaacataaaggccccatcttcgctctgaaatggaacaaaaaggggaattatgttttgagtgctggtgtagacaaaacaacaataatttgggatgctcacacaggagaagccaaacagcagtttccttttcattcagcccccgcccttgatgtggactggcagaacaacatgacctttgcctcctgtagcacagacatgtgtatccatgtgtgcaggctcggctgtgaccacccagtcaaaaccttccagggacacacaaacgaggtcaatgccatcaaatgggatccttctggaatgttgctggcgtcctgctcggatgacatgacattgaagatctggagtatgaagcaggatgcatgcgtccacgatcttcaggctcacagcaaagagatctacaccatcaagtggagccccaccgggcctgccaccagcaacccaaactccagcatcatgttggcaagtgcttcatttgattctacagtgcgactgtgggatgtggagcaaggtgtctgcacccacacactcatgaagcatcaagagcctgtctacagtgtagctttcagccccgatggaaagtacttggctagtggatcctttgacaagtatgttcatatctggaatactcagagtggaagtctcgtccacagctaccaaggcactggcggtatcttcgaggtgtgctggaacgcccgaggagataaagtgggcgccagcgcgtctgatggctctgtgtgtgttctggatctgtgaaagtaaacacaaaatatagaaaaaaagaaaagaattctaatgacctgccttgaatgcatggggttgcagctctgttcaaacacaattctatcagctccaaaatgtgtgaacttgacttgtgttagagtatattctgaaaccaacttgtcccaggccacaggagtgtatatgtttcataatctttatcaagaagtttgttgtttttttttgagttggagttttgctcttgttgcccaggctagagtgcagtggtgtgatctcggctcagtgcatcttctgcctcttgggttcaagtgattctcctgcctcagcctcccaagtagctgggattacaggcatgcggacatgacgctcagctaattttgtatttttagtagagacagggttttaccatgttggttaggctggtctcgtactcctgacctcaggtgatccacccacctt

SEQ ID NO: 235569 - protein, 556 aa, Artificial Sequence
  derived and/or modified sequence
MNEGAPGDSDLETEARVPWSIMGHCLRTGQARMSATPTPAGEGARRDELFGILQILHQCILSSGDAFVLTGVCCSWRQNGKPPYSQKEDKEVQTGYMNAQIEIIPCKICGDKSSGIHYGVITCEGCKGFFRRSQQSNATYSCPRQKNCLIDRTSRNRCQHCRLQKCLAVGMSRDAVKFGRMSKKQRDSLYAEVQKHRMQQQQRDHQQQPGEAEPLTPTYNISANGLTELHDDLSNYIDGHTPEGSKADSAVSSFYLDIQPSPDQSGLDINGIKPEPICDYTPASGFFPYCSFTNGETSPTVSMAELEHLAQNISKSHLETCQYLREELQQITWQTFLQEEIENYQNKQREVMWQLCAIKITEAIQYVVEFAKRIDGFMELCQNDQIVLLKAGSLEVVFIRMCRAFDSQNNTVYFDGKYASPDVFKSLGCEDFISFVFEFGKSLCSMHLTEDEIALFSAFVLMSADRSWLQEKVKIEKLQQKIQLALQHVLQKNHREDGILTKLICKVSTLRALCGRHTEKLMAFKAIYPDIVRLHFPPLYKELFTSEFEPAMQIDG

SEQ ID NO: 235570 - DNA, 10998 bp, Artificial Sequence
  derived and/or modified sequence
gattcacagggcctctgagcattatcccccatactcctccccatcattctccacccagctgttggagccatctgtctgatcaccttggactccatagtacactggggcaaagcacagccccagtttctggaggcagatgggtaaccaggaaaaggcatgaatgagggggccccaggagacagtgacttagagactgaggcaagagtgccgtggtcaatcatgggtcattgtcttcgaactggacaggccagaatgtctgccacacccacacctgcaggtgaaggagccagaagggatgaactttttgggattctccaaatactccatcagtgtatcctgtcttcaggtgatgcttttgttcttactggcgtctgttgttcctggaggcagaatggcaagccaccatattcacaaaaggaagataaggaagtacaaactggatacatgaatgctcaaattgaaattattccatgcaagatctgtggagacaaatcatcaggaatccattatggtgtcattacatgtgaaggctgcaagggctttttcaggagaagtcagcaaagcaatgccacctactcctgtcctcgtcagaagaactgtttgattgatcgaaccagtagaaaccgctgccaacactgtcgattacagaaatgccttgccgtagggatgtctcgagatgctgtaaaatttggccgaatgtcaaaaaagcagagagacagcttgtatgcagaagtacagaaacaccggatgcagcagcagcagcgcgaccaccagcagcagcctggagaggctgagccgctgacgcccacctacaacatctcggccaacgggctgacggaacttcacgacgacctcagtaactacattgacgggcacacccctgaggggagtaaggcagactccgccgtcagcagcttctacctggacatacagccttccccagaccagtcaggtcttgatatcaatggaatcaaaccagaaccaatatgtgactacacaccagcatcaggcttctttccctactgttcgttcaccaacggcgagacttccccaactgtgtccatggcagaattagaacaccttgcacagaatatatctaaatcgcatctggaaacctgccaatacttgagagaagagctccagcagataacgtggcagacctttttacaggaagaaattgagaactatcaaaacaagcagcgggaggtgatgtggcaattgtgtgccatcaaaattacagaagctatacagtatgtggtggagtttgccaaacgcattgatggatttatggaactgtgtcaaaatgatcaaattgtgcttctaaaagcaggttctctagaggtggtgtttatcagaatgtgccgtgcctttgactctcagaacaacaccgtgtactttgatgggaagtatgccagccccgacgtcttcaaatccttaggttgtgaagactttattagctttgtgtttgaatttggaaagagtttatgttctatgcacctgactgaagatgaaattgcattattttctgcatttgtactgatgtcagcagatcgctcatggctgcaagaaaaggtaaaaattgaaaaactgcaacagaaaattcagctagctcttcaacacgtcctacagaagaatcaccgagaagatggaatactaacaaagttaatatgcaaggtgtctacattaagagccttatgtggacgacatacagaaaagctaatggcatttaaagcaatatacccagacattgtgcgacttcattttcctccattatacaaggagttgttcacttcagaatttgagccagcaatgcaaattgatgggtaaatgttatcacctaagcacttctagaatgtctgaagtacaaacatgaaaaacaaacaaaaaaattaaccgagacactttatatggccctgcacagacctggagcgccacacactgcacatcttttggtgatcggggtcaggcaaaggaggggaaacaatgaaaacaaataaaagttgaacttgtttttctcatgcatatgatttccattatgcctacagatatggaccctttttctgtcttgacttcttgatcattgacctctgtttacaacaggaggagggtactaaagtcggaggatttccttttcttgtagctcactgcccacagactttctacagagtcaccaatctgtcagtaacaacagagagtccagcaataatcggtgactggtgtgcatagcggaggttgcggcattactttgcacaactagctctttgtttcatgaaggaagtttttattttttcaccgattattgccagtccgcaggatggcatgaaaagggtccatagcagtagcaacaatagcattataatatattacagggtaaatgggcatgaagactatatatagctaaaagagatattgtttatatattgttttaagtaatataaaatgtagttactggtgtagcttttcctgttgaattgataaggcactttcattttgcacctttttctttaaattaaatgctagcgtgttcactgtcgtgtcgcatgtgcaccagaaacacaagtttaactgagaaggcttggaaggtacgttgggaggtatttatgctgctgtttacaaaattatttttaagagactggctggtcatatctagaaatcaccacgttggattttttttttaacatgtgaatttggaattagaaacggaactctccctaaattatactttgctttttggtaagtttaatgatagatgtgtttatgcttcatacaaagttgaatgattgattggcgtggtggacatataccatcatgctcattttttttttttaaagctttttaaaatgccacctcatggaggcgagggggaggagaagctcattttacacaattcagtagttaaatatggactcggtctcaacttggaattcttatgctttgagaacaaatcaacaaccagaatatttattggaatctagcttttattataagaaggacccaaagattatatcctgagcaaatgcacactccccatgtgaggacatgaagtatttactttgtgaatgtttatgttcttggtataatctaggaaccctatgagtttatctcagagtgaactaattctagatttgttgtcaatagatgctataattcaagaatgttgctctccatatttgaaaaacgatggataggagggtgagggaagcatacaatgttgaaccagtttctcttatttaaatattaaatactttaagcctttaaagtgaagttgatgctagctgcaaacatttactcttgtatttatcttcactaggaaactgtggactgtaatttattttattaaatatttagaagattatttggcttgtgtgttcaggtgagaaatactgagttgtttttgtttaatttcatggtttttttttttttaatgatccctagtgggggaaggggaaaggaatagtctgataaacagatgtgcatattttaaaaacaagtgaccttttgggaatgtaggcatttagacgatgattttagtcgcactaggggtgggattcaaactactggtcaaagaccattttgtacagaaaagggaacatctccgatgggtgttaaggtaggagtttccatgcagccctttatgtctgagaaatagtctcctctgccattggggtccctgcggaatcttctacaggaattgcagctcttcacgtcatgctaggttaccagcatgggcttcccagagcacttcactctgtttctaactccactgacttttctgacttgtttcttgagggacttggaaaaggggaaggtattattcacacagatgtgtgtatgaagcctaaataacatccaactttttttccaaaaacatagtaagagtttaaccataaatagaagagtaatattcctttaaatttcttacaggcatgtaaaattttatgtgtttatagagagatgctaactgtcagcatatagtatttatattggggcaagaagggttaaatcaaatctttaatttaagtaagcatagttcctttaaagatcagtagtatttatactctgaaaagagtaccaagcttagttcagttatttattcatccattttttttctattgtttctcctctggggggaaatggtgttttgtttttgtttgagttttgtgttttagttttttggttttggttttgttttgtttttttgtcattcagattcactaaatttggggatggttttattaaagtatattaacttctttttaaccaaagctttctgaatatgaccagcctcaggtgctagcgcattaaagagcaactaaacctaattccagtgtcgatttgtgaaataataaaagctaattgaatttctctaagggtgagagagaacataatgatgaacttaaaaagaaattccttttcccagaagggattctgcatgtacctacaaacaatcatgctctaaccacagtaatagtcatgccatggtgacattgcttttacggtaaaccaagataggtaatatgatgcttcttcccaggtgtttctgaaagaaaagcagcggtggagcttaagagccaagtccactgattgacataataggatggaattgtagacagagacatgctccatgaaacaaggaaacaactgactactatttggatctaagttgggatctgatgttaaacaataaattcagtttaaaaaaaatatggagctcagaaaaggatgtgaaaaactttgcattttcctttcttcattattacaaaaacacctatgtgatgacataaaatacttgggtgatatcagaacaattatccttaatagtttttataattaaagtttcctaaacttcagtctccaatagtcttttaaggattggaaccacatcactgtcagccccgctgctacaatgcctttgtacaatttttttacataaggcaaataaggcttttgtacaaagcctgaataccttctgttccaatggtgtccaaatggttattatattgtgaaaaacctggccttggtcacaatgcaaacaaaagtacagatgaaagtgctttttggacagtttgcaaattgtgttaaagctacggattttttttaaagtgttcagcatcttaacgtgtattaaagctatggatttttttttaaagtcttcagcatcctaattcaccctttctaacttaagaaaaacatgacttaagacactgcttctaagtttggttgttctttatagtgtggatacccagttatctgtgagcgtatgggggtgggctgagggtcaggtgaggaaggagtgtgtgtgtgtgtgtgtgtgtgtgtgtgtgtgtgtgtgatttgcatgtgtatgatgtgtgtgcgtcggaccgcttctaggctactaagtgtcaatggaaaagaaaatgtattcaaaatacttaaatcaaaactagaagatggggaaaaaaagatttattctatacaaagccttgtctggaccactttagagagacttctatttttttaacccttctataaatatttgatggcacttgaaatattcctgcaataaaatgtgatttgtgtaaagaaaaaaagattttgtaatgtgaaacaaagaaagaaagtaatgtaattttctaaaaaaaaaaatacaaacaaacaaactttgtattattttcttgatggaatttgtctatctgtctttggaaaactttttatttcattgaatgtgccatagtagaaatgtgtgtttttagttttagactaaggaatagctagttgttgtgttccgacattccaaaatgcaaaacaacctagtagtatctttcatgaaaaggtttaagtagtatgtaagcttctctcattgttgcttttttgcacatgttcttcattcctctctagtgcaatatgtacatagagcacttgcgggtgtaccttgatccctcagggaaaaatacatatttgtacagttttttggggtttttttgttttttggttttttttgttttgccttttgtttttggctaaggaatgtcgatcgaatcacttgttattgttgaggggcagccagataataatcctaaagccactgtttccaacattgattgtttaaatcatatgtccttccaatgctattattttaagataataataaaaagttattttctgacagttctttgtgctgactggtgaaaaacaagggtaaataagcaccttataattgacttactgtgaatgacaatccatcttggtatcaacgatagaagccctatcattttggagttggggttaagagtcagaaacaatgtgctcagggatctcctaaaactcttaaaacagggtggccagtactactgggacaaattgtgttttttattattaataataatgataataatactatccctccaaggcacaagtgaactatatagaactgcgtgtgtgtaaactctttactctcgtctcattttgttgagtttagaacttgatgtgctcgtcagtcttgtgtttcaaaacactgaataacttccaaagcaaagttatgccagtgtgttcaaaagataaattaataatgtaccagcaaagagcatcattcaaagtatagtccttgcatattccagttaccatttctctaataattaaaatattcatgataaatatatatatagcatcatatgttaaaaactatttcaaattctacatattaaggatgaaaattttaaaatccagtaataagaggagagacctgcctatcagtacagtgatataggtaaaagatgaaatatgtttttaaaataccagcaattaactattgttttcatgggttctcctctagaagcaaaccaaaaattccttcatggaaaacaattcttacttctacatgtgtagtttatatctgatgcattacaagagctaatgtttaaagacaaaacaaaacctgcctgtatgacagcagcaactcgagccaacatttagtgttacatgttatatttttgaaataccgttttgttatcatattccacatattactttccataaagtcagagaagttcaatgtaattgttggctctgattcttccaccttgggatacacattcacaagaagatttatatattttcttactatgatagaggaacataatctgggaaaacttcccatgtctgtaagatgaaaaggatacctttaccatgttgtttttgataataaagaatatggaaaatggtagaaatctctcctctctatgtgtatttgtatatgtgtgtatacacacacacgttgacatttttacataacatgtgattgccacttcttataaagttatgatatagaaccccatgaaaacaactttatattatagatcaaataatgtgcccagaaacgcaattgcaacagtaaatcttgatctattggtaagagtctatgatacaggtcttcattctatccctaaacataatgttagtaaagaggttccatcagattgtattatagagaccttcctattgctatttatttttaagagatgagaagactgactagcaatgtctccacagtgcaattggtttcacttctgggtctgtctgtctgtttgtgtaggtgagatcagtgttgtcaggctctcagaataatttttaaaagaatccagaagcctgacttcacaccaagtagccatcctagatgggcgggggggatctccatgttcaaccaaaccctcagaacttagagcaataaatacattcagtcatttatttataaatgaatgacagaatattcaatccaaatagaaacaaccttttgtcagtgatgcaacataacatggagtcttatattgagaaagtgaatatgaatattttaaatagatgcctaggaaatctgtgtttgctgtttacatttaatgtactttgccacattagcagtaccacacttcttttactttcatccttctaagaactaatgaaagatagcttgctattagctttgacatgttgcacatgccattatgttgttctctaagaacaactaaattctctccagtgttcatgtgtgattcctttttcatcattattactttaatgtggatgaatactatttctaggaacttgattatcactgaacagattgcatatgtaaatgcagataattcttgagcaatatagtgaaaatgatttcacaaaaaaaatccatatgtactgtatacatcttcctgaatccaaaattctcctgttatccacacagtttgaaatctcatattaaacagtggtaaatttttaaacattaggacattagctggctgcttctataaatgtacctgtattgtctgcctgctccttttgtggagatgtgtttttgtattggatgtttgggccaatgggaggcttcaagctacaacatattttcccactttaaataatatttaacatatgacaaaccccagacaaggcttttaatatgtataaagaactgcagtgttaggtggtttatttgcaaactgttttcagtgttgtccatttttatggcacctttaacaatattcttgtttccaaagtacaaaaaaaataggttaaataatctagccataactgaatgtcaagcaataaaacaaatgacttttgtgcatagacttaaaaaatacaaattttagacatctgcatgtaaatgcaatctcttgtttactgctttcttcaacttgagcaatcgattccttatttactattaacttaagaacttgtaacggcctgtaaacattttctctcttactcttctttcaaatttacctgtccctgcttttgagtcataatatttaatgttgttctgcacatctctatacagttaactttttggctttcattctgtatagataagaaaatgttatattataaacagcctactcagtgcaaatatttatctgtttatcaaatccacaatatgctgtataataccggttttactatataatctattttagacatagctgtttagaactagagtgtgctatttttgtgtttttctgatgtgtggtgctagacaagttacttttgtgaacaacaaaaattatcccttttattcctagacaataccacctttgggtcttgttaatttcactgagtataactatatatttgtatatatatacatatatatatatatctacctatgcccaactggcagctgtatcagagtgctggatttgggacatgcttttctctttaaatacataatatcattatataaattattctagagtgtatttaattaggataaaattacttccttagtatggatatttgacatctatagggtgaatttgtttataaatatggctatatggaaacttattagcatttactttatgtttgctacttggctttacagcatatctcctaagctgaaaaataatttgccaggccttcaagatcctaaagaaacttgtttaatggagtaatatacttttttttcttattaaggaattgtattactggcacctaacacagttgtattcttagctcctattatagataatgggcatttacataaaatatcctagatggcttgatggcagaataaacctttcccctcctacctgagtcatgagaaggatggagacgtcctctgccataacatgggccataaagcaaattcgacatgggatgttctgtttcagtatgacctcaaccagttccatgaactgagtgaaggaccttcattttcaaagttatttaataagtagcttaattaagcctttctacccattctcccaagatctactggcattattgaaaagcaaagtttatcaaatatctaactaaggatgtagttaaccttattaaatattgattagaattgttctgtaatattactgaatttgtaagatctttagcaaagatttttgagcaatttataaatgtagagcaaatgtttctgtttactgcactttttgtaactgaaggtgataaattctcaagccatgattattggcttccatgcactgcaatatttatccacaattctagacattttccatttttgtggaagagttgctgttaccttaattataaatgcaattgtgtggttaatgagagctaatgctagtagttaaccttttaaagtggattggctacagttgagggagaaatctcttttaatataaatcacatcattccttaactgcctctcttggaaagagattgaaaccttttttttaaagcacgatttagcatcctaagcttcctgagggtagagattgtatctttttgcgtctgcacaatggctagcacatgtcagcatttgacaattgttaaatgataacaagtgtgccccaattaaaacgtttttcctgggttgttttgttaaatttacaaagtaagccaagccttacggttaacattctcctctacaaccaagtattaaagccacatttaaaaagaccacatgaaatgctgattctaattgtgtgtaggtcttgaggattaagcacacaaatttcacaaacttctgtttgagtaaacaaactcagccttctgtaaatatacatgcaagtttggaaacagtaatactgtacctataaatatatgctgtctgttttgtgtacagtatgtaaaaactccttttctgccacactaaaaatgcaagccatttatgggaatcctaaaactagtattgaactaaaactttgctaatgatctttattagaggatcgtccaacttttcacttaccttgggttttcttttcaattcactcttacactagtctgcttatttccagctgtttattttattgagtcctgaatttaaaaaaaaaatattttgattcattttgtaaatacaagctgtacaaaaaagagagatttaatgttgtcttttaaatactccaattttcattctaatatgaatgttgttatattgtacttagaaactgtacctttaatattacattacctttattaaaagtgcattgaacacatcaattttagatgtgctttatgtactgttatcctataataaaacttcagcttctaatggaa

SEQ ID NO: 235571 - DNA, 1671 bp, Artificial Sequence
  derived and/or modified sequence
atgaatgagggagccccgggagactccgacctggagactgaggccagagtaccctggtcaattatggggcattgtcttcggacaggccaggcacggatgtccgcgacaccaactccagctggggagggggcaaggcgagacgaactgttcggcattttacagatactccaccagtgtattttaagctccggcgacgcatttgttctgactggagtttgttgctcctggcggcagaacgggaaaccaccttacagccaaaaggaggacaaagaggtgcagacaggctacatgaatgcccaaatcgaaatcatcccctgcaagatctgcggagataaaagcagcggaatccactacggcgtgataacctgcgagggctgcaaagggtttttccgtaggtcccagcagagtaacgccacctattcatgtccacggcagaagaattgtttgatcgatcgtacttcgcgcaaccgttgtcagcattgcagattgcagaaatgtctggcggtgggaatgagccgcgatgctgtgaaattcggacgtatgagcaagaagcaacgggattcactttacgctgaggtgcagaaacatcgaatgcagcaacagcagagggaccaccagcagcaaccaggcgaggctgaacctctcacccccacctataacatttccgccaacggccttactgagcttcatgacgatctgtccaattacatcgacggtcacactccggaaggctccaaagccgactctgcggtgtcctccttctacttggacattcaacctagtcctgaccagtctggcctggatattaacgggattaaacccgaacctatttgtgattatacgccagcatctgggtttttcccttattgttcgttcaccaacggcgagacctctcccaccgtgagcatggcagaactggaacaccttgcgcagaacatttccaagtcacacttggaaacttgtcagtacctccgagaggagctgcagcagatcacttggcaaacctttctgcaggaagaaatcgaaaattatcagaataaacagcgtgaggtgatgtggcagctgtgcgccatcaaaatcacggaagcaattcaatacgtggtagagtttgccaagaggattgatggcttcatggaactctgtcagaacgaccagatagtcctgctcaaggccggtagccttgaggtggtcttcatccgcatgtgtagggccttcgattcgcaaaataacaccgtgtactttgacggcaagtacgccagccctgatgtcttcaagagtctcgggtgtgaagacttcatttctttcgtcttcgagttcggcaagtctctatgtagtatgcacctgacagaagacgaaatcgctctgttttctgctttcgtactaatgagcgcagaccgcagctggctccaggaaaaggtaaaaattgagaaactgcaacagaagatccaactagctctgcagcacgtgcttcagaaaaatcatagggaggacgggatattaacaaaactgatctgcaaggtctccaccttgcgggctttgtgtggacgccataccgagaagctgatggccttcaaagccatttatcctgatattgttcgcttacactttcctcctttgtacaaagagctgttcacctcggaattcgagcctgccatgcagatcgatggatag

SEQ ID NO: 235572 - DNA, 1671 bp, Artificial Sequence
  derived and/or modified sequence
atgaatgaaggagcccctggggacagcgacctggagacagaggcccgggtgccctggagcatcatgggccactgcctgaggacaggccaggccaggatgtctgccacccccaccccagctggggagggcgccaggagagatgagctgtttggcatcctgcagatcctgcaccagtgcatcctgagcagtggagatgcctttgtgctgactggagtgtgctgctcctggaggcagaatggcaagccaccctacagccagaaggaggacaaggaggtgcagacaggctacatgaatgcccagatcgagatcatcccctgcaagatctgtggggacaagagcagcggcatccactacggcgtcatcacctgtgagggctgcaagggcttcttcagaagaagccagcagagcaatgccacctacagctgcccccggcagaagaactgcctgattgacaggaccagcaggaaccgctgccagcactgccgcctgcagaagtgcctggccgtgggcatgagcagagatgctgtgaagtttggccgcatgagcaagaagcagagggacagcctgtatgcagaggtgcagaagcacaggatgcagcagcagcagagggaccaccagcagcagcctggagaggccgagcccctgacccccacctacaacatcagcgccaacggcctgacagagctgcatgatgacctgagcaactacattgatggccacaccccagagggcagcaaggctgacagcgctgtgtcctccttctacctggacatccagcccagcccagaccagagcggcctggacatcaatggcatcaagccagagcccatctgtgactacaccccagccagcggcttcttcccctactgcagcttcaccaacggggagaccagccccaccgtgtccatggccgagctggagcacctggcccagaacatcagcaagagccacctggagacctgccagtacctgcgggaggagctgcagcagatcacctggcagaccttcctgcaggaggagattgagaactaccagaacaagcagcgggaggtgatgtggcagctgtgtgccatcaagatcacagaggccatccagtatgtggtggagtttgccaagagaattgatggcttcatggagctgtgccagaatgaccagatcgtgctgctgaaggccggcagcctggaggtggtgttcatccgcatgtgccgggcctttgacagccagaacaacacagtgtactttgatggcaagtatgccagcccagatgtgttcaagagcctgggctgtgaggacttcatcagctttgtgtttgaatttgggaagagcctgtgcagcatgcacctgacagaagatgaaattgccctcttcagcgcctttgtgctgatgtctgctgaccgctcctggctgcaggagaaggtgaagattgagaagctgcagcagaagatccagctggccctgcagcacgtgctgcagaagaaccaccgggaggatggcatcctgaccaagctgatctgcaaggtgtccaccctgcgggccctgtgtggccgccacacagagaagctgatggccttcaaggccatctacccagacatcgtgcggctgcacttcccccccctgtacaaggagctgttcaccagcgagtttgagcccgccatgcagattgatggatag

SEQ ID NO: 235573 - DNA, 1671 bp, Artificial Sequence
  derived and/or modified sequence
atgaacgagggcgcccccggcgacagcgacctggagaccgaggcccgcgtcccctggagtatcatgggccattgcctccgaaccggacaggcgcggatgtccgcaactcccactcccgcaggcgaaggtgctcgtcgggacgaattgtttggaattttacaaattttgcaccagtgtatcctcagctccggggacgcttttgtgctaaccggagtgtgctgttcttggcgacagaacggcaagcctccctacagccagaaagaggataaggaggtgcaaacaggttatatgaatgcccagattgaaattatcccgtgtaagatctgcggggacaaaagtagcggaattcactacggtgtgatcacatgcgaaggctgcaaaggattctttaggcgatctcaacagagcaacgccacctacagctgtccccgacagaaaaattgtcttatcgacagaacctcccgtaataggtgtcagcattgcaggctgcagaaatgcctggctgtgggcatgagtagagacgccgtgaagtttgggaggatgagcaaaaagcagcgggattccctttatgccgaggtacagaaacaccgcatgcaacagcagcagcgggaccaccagcaacagcccggtgaggcagaacctttaacccccacttacaatatcagcgcaaatggcctcacagagctacatgatgatctgtccaactatatcgacgggcacaccccagaaggaagtaaggcagacagcgccgtgtcatccttttatcttgacattcagccaagccctgaccagtctgggttggacataaacggtattaagcctgagcccatctgcgactatacaccggcctccggcttttttccatactgcagctttaccaacggagaaaccagtccaactgtgagcatggccgaactggagcacctggcccagaacatatccaagtcccacttggagacatgccagtacctcagagaagaactacaacagataacatggcagacatttctgcaagaggagatcgagaattatcagaacaagcagcgtgaagttatgtggcaattgtgcgctatcaaaatcacagaggctatccagtacgtagtggagtttgccaagcgcatagacgggtttatggagctgtgccaaaacgatcagatcgtgctgctgaaggcaggcagtctcgaggttgtctttattcggatgtgtagggctttcgacagccaaaataatacagtgtatttcgacggcaagtatgctagcccagacgtgtttaaaagcctgggctgcgaggactttatttcctttgtctttgagtttgggaaatcactgtgctccatgcacctcaccgaggacgaaatcgccctgttcagcgctttcgtgttaatgagtgcagacaggtcttggttgcaggagaaggttaagatcgaaaagctgcagcaaaaaatccagcttgcgctgcagcatgttctgcagaagaaccacagagaggacgggatcctaacaaagctgatatgtaaggtgagtacactgagagcattatgtggcaggcataccgaaaagcttatggcattcaaggctatctacccagatatcgtgagactgcactttccccccctctataaggaactgtttacgagcgagttcgaacccgcaatgcagatcgatggttag

SEQ ID NO: 235574 - DNA, 1671 bp, Artificial Sequence
  derived and/or modified sequence
atgaatgagggagcacccggagactccgatctggagacggaagccagagtgccctggagtatcatggggcactgcctgcggacgggccaggccagaatgagcgctaccccaactccagcgggagaaggcgcacgcagagatgagctgttcggcatcctccagattctgcatcagtgcatacttagctctggggatgcttttgtgctgacgggggtctgctgtagctggcggcagaacggcaagccaccatactctcagaaagaggataaggaagtccaaacaggatatatgaatgcacagattgaaatcatcccctgtaagatttgcggagataagagctccggcatacactacggcgtaattacctgcgagggttgcaagggctttttccggaggtcacagcaatcaaacgccacctattcctgccctagacagaaaaactgtctcatagacaggacgtccaggaatcggtgtcagcactgtcggcttcagaagtgtctagcggtaggcatgtcgcgagatgccgtcaagttcggacggatgagtaaaaagcagagggacagcctgtatgcagaagtccagaagcaccggatgcaacagcaacagcgagaccaccagcaacagcctggagaggccgaacccttgacccctacttacaatatttcggctaatgggcttacagaactgcatgatgacctgtcaaattacattgacggacacactccagagggctctaaggccgacagcgccgtgtccagcttttatctggatatccagccctcccccgatcagtccggactggatattaacggcatcaaacccgagccaatatgcgactatacaccggcaagtgggtttttcccatactgtagttttacaaacggcgagacgtctcccacggtctcgatggccgaactggagcatttggcccagaatattagcaagtcccacctggagacctgtcaatacctgagagaggaactccaacagattacttggcagaccttcctccaagaggaaatcgaaaactatcagaataagcaacgggaagtcatgtggcagctgtgcgccattaagattaccgaggcaatccaatatgtggtggaatttgctaagcgtatcgatgggttcatggagctttgtcaaaatgatcagatagttctcttgaaagccggttccttggaagtggtctttatccgcatgtgccgagcttttgattctcaaaacaatacagtatacttcgacggaaaatacgcatctcccgacgtgtttaagagcctcggctgcgaagacttcatttcattcgtctttgagttcggcaaaagcctgtgcagtatgcatctgaccgaggatgagatagccctgttcagtgcattcgtcctgatgtccgccgacagatcatggttgcaggagaaggtgaaaattgaaaagctacagcagaaaatacagctagctctgcagcacgtgctgcagaaaaatcatcgcgaagacggcattctgactaaattaatctgtaaggtctcgacactgcgagccctttgcggtaggcacactgaaaagttgatggcattcaaggccatctaccctgacatcgtgagactgcacttcccccctctgtataaagaattgttcacatctgagttcgagccagccatgcagattgacggatag

SEQ ID NO: 235575 - DNA, 1951 bp, Artificial Sequence
  derived and/or modified sequence
ccatctgtctgatcaccttggactccatagtacactggggcaaagcacagccccagtttctggaggcagatgggtaaccaggaaaaggcatgaatgagggggccccaggagacagtgacttagagactgaggcaagagtgccgtggtcaatcatgggtcattgtcttcgaactggacaggccagaatgtctgccacacccacacctgcaggtgaaggagccagaagggatgaactttttgggattctccaaatactccatcagtgtatcctgtcttcaggtgatgcttttgttcttactggcgtctgttgttcctggaggcagaatggcaagccaccatattcacaaaaggaagataaggaagtacaaactggatacatgaatgctcaaattgaaattattccatgcaagatctgtggagacaaatcatcaggaatccattatggtgtcattacatgtgaaggctgcaagggctttttcaggagaagtcagcaaagcaatgccacctactcctgtcctcgtcagaagaactgtttgattgatcgaaccagtagaaaccgctgccaacactgtcgattacagaaatgccttgccgtagggatgtctcgagatgctgtaaaatttggccgaatgtcaaaaaagcagagagacagcttgtatgcagaagtacagaaacaccggatgcagcagcagcagcgcgaccaccagcagcagcctggagaggctgagccgctgacgcccacctacaacatctcggccaacgggctgacggaacttcacgacgacctcagtaactacattgacgggcacacccctgaggggagtaaggcagactccgccgtcagcagcttctacctggacatacagccttccccagaccagtcaggtcttgatatcaatggaatcaaaccagaaccaatatgtgactacacaccagcatcaggcttctttccctactgttcgttcaccaacggcgagacttccccaactgtgtccatggcagaattagaacaccttgcacagaatatatctaaatcgcatctggaaacctgccaatacttgagagaagagctccagcagataacgtggcagacctttttacaggaagaaattgagaactatcaaaacaagcagcgggaggtgatgtggcaattgtgtgccatcaaaattacagaagctatacagtatgtggtggagtttgccaaacgcattgatggatttatggaactgtgtcaaaatgatcaaattgtgcttctaaaagcaggttctctagaggtggtgtttatcagaatgtgccgtgcctttgactctcagaacaacaccgtgtactttgatgggaagtatgccagccccgacgtcttcaaatccttaggttgtgaagactttattagctttgtgtttgaatttggaaagagtttatgttctatgcacctgactgaagatgaaattgcattattttctgcatttgtactgatgtcagcagatcgctcatggctgcaagaaaaggtaaaaattgaaaaactgcaacagaaaattcagctagctcttcaacacgtcctacagaagaatcaccgagaagatggaatactaacaaagttaatatgcaaggtgtctaccttaagagccttatgtggacgacatacagaaaagctaatggcatttaaagcaatatacccagacattgtgcgacttcattttcctccattatacaaggagttgttcacttcagaatttgagccagcaatgcaaattgatgggtaaatgttatcacctaagcacttctagaatgtctgaagtacaaacatgaaaaacaaacaaaaaaattaaccgagacactttatatggccctgcacagacctggagcgccacacactgcacatcttttggtgatcggggtcaggcaaaggaggggaaacaatgaaaacaaataaaagttgaacttgtttttctca

SEQ ID NO: 235576 - DNA, 1671 bp, Artificial Sequence
  derived and/or modified sequence
atgaacgagggcgcccccggcgacagcgacctggagaccgaggccagagtgccctggagcatcatgggccactgcctgagaaccggccaggccagaatgagcgccacccccacccccgccggcgagggcgccagaagagacgagctgttcggcatcctgcagatcctgcaccagtgcatcctgagcagcggcgacgccttcgtgctgaccggcgtgtgctgcagctggagacagaacggcaagcccccctacagccagaaggaggacaaggaggtgcagaccggctacatgaacgcccagatcgagatcatcccctgcaagatctgcggcgacaagagcagcggcatccactacggcgtgatcacctgcgagggctgcaagggcttcttcagaagaagccagcagagcaacgccacctacagctgccccagacagaagaactgcctgatcgacagaaccagcagaaacagatgccagcactgcagactgcagaagtgcctggccgtgggcatgagcagagacgccgtgaagttcggcagaatgagcaagaagcagagagacagcctgtacgccgaggtgcagaagcacagaatgcagcagcagcagagagaccaccagcagcagcccggcgaggccgagcccctgacccccacctacaacatcagcgccaacggcctgaccgagctgcacgacgacctgagcaactacatcgacggccacacccccgagggcagcaaggccgacagcgccgtgagcagcttctacctggacatccagcccagccccgaccagagcggcctggacatcaacggcatcaagcccgagcccatctgcgactacacccccgccagcggcttcttcccctactgcagcttcaccaacggcgagaccagccccaccgtgagcatggccgagctggagcacctggcccagaacatcagcaagagccacctggagacctgccagtacctgagagaggagctgcagcagatcacctggcagaccttcctgcaggaggagatcgagaactaccagaacaagcagagagaggtgatgtggcagctgtgcgccatcaagatcaccgaggccatccagtacgtggtggagttcgccaagagaatcgacggcttcatggagctgtgccagaacgaccagatcgtgctgctgaaggccggcagcctggaggtggtgttcatcagaatgtgcagagccttcgacagccagaacaacaccgtgtacttcgacggcaagtacgccagccccgacgtgttcaagagcctgggctgcgaggacttcatcagcttcgtgttcgagttcggcaagagcctgtgcagcatgcacctgaccgaggacgagatcgccctgttcagcgccttcgtgctgatgagcgccgacagaagctggctgcaggagaaggtgaagatcgagaagctgcagcagaagatccagctggccctgcagcacgtgctgcagaagaaccacagagaggacggcatcctgaccaagctgatctgcaaggtgagcaccctgagagccctgtgcggcagacacaccgagaagctgatggccttcaaggccatctaccccgacatcgtgagactgcacttcccccccctgtacaaggagctgttcaccagcgagttcgagcccgccatgcagatcgacggctag

SEQ ID NO: 235577 - protein, 523 aa, Artificial Sequence
  derived and/or modified sequence
MESAPAAPDPAASEPGSSGADAAAGSRETPLNQESARKSEPPAPVRRQSYSSTSRGISVTKKTHTSQIEIIPCKICGDKSSGIHYGVITCEGCKGFFRRSQQSNATYSCPRQKNCLIDRTSRNRCQHCRLQKCLAVGMSRDAVKFGRMSKKQRDSLYAEVQKHRMQQQQRDHQQQPGEAEPLTPTYNISANGLTELHDDLSNYIDGHTPEGSKADSAVSSFYLDIQPSPDQSGLDINGIKPEPICDYTPASGFFPYCSFTNGETSPTVSMAELEHLAQNISKSHLETCQYLREELQQITWQTFLQEEIENYQNKQREVMWQLCAIKITEAIQYVVEFAKRIDGFMELCQNDQIVLLKAGSLEVVFIRMCRAFDSQNNTVYFDGKYASPDVFKSLGCEDFISFVFEFGKSLCSMHLTEDEIALFSAFVLMSADRSWLQEKVKIEKLQQKIQLALQHVLQKNHREDGILTKLICKVSTLRALCGRHTEKLMAFKAIYPDIVRLHFPPLYKELFTSEFEPAMQIDG

SEQ ID NO: 235578 - DNA, 10828 bp, Artificial Sequence
  derived and/or modified sequence
ggtaccatagagttgctctgaaaacagaagatagagggagtctcggagctcgccatctccagcgatctctacattgggaaaaaacatggagtcagctccggcagcccccgaccccgccgccagcgagccaggcagcagcggcgcggacgcggccgccggctccagggagaccccgctgaaccaggaatccgcccgcaagagcgagccgcctgccccggtgcgcagacagagctattccagcaccagcagaggtatctcagtaacgaagaagacacatacatctcaaattgaaattattccatgcaagatctgtggagacaaatcatcaggaatccattatggtgtcattacatgtgaaggctgcaagggctttttcaggagaagtcagcaaagcaatgccacctactcctgtcctcgtcagaagaactgtttgattgatcgaaccagtagaaaccgctgccaacactgtcgattacagaaatgccttgccgtagggatgtctcgagatgctgtaaaatttggccgaatgtcaaaaaagcagagagacagcttgtatgcagaagtacagaaacaccggatgcagcagcagcagcgcgaccaccagcagcagcctggagaggctgagccgctgacgcccacctacaacatctcggccaacgggctgacggaacttcacgacgacctcagtaactacattgacgggcacacccctgaggggagtaaggcagactccgccgtcagcagcttctacctggacatacagccttccccagaccagtcaggtcttgatatcaatggaatcaaaccagaaccaatatgtgactacacaccagcatcaggcttctttccctactgttcgttcaccaacggcgagacttccccaactgtgtccatggcagaattagaacaccttgcacagaatatatctaaatcgcatctggaaacctgccaatacttgagagaagagctccagcagataacgtggcagacctttttacaggaagaaattgagaactatcaaaacaagcagcgggaggtgatgtggcaattgtgtgccatcaaaattacagaagctatacagtatgtggtggagtttgccaaacgcattgatggatttatggaactgtgtcaaaatgatcaaattgtgcttctaaaagcaggttctctagaggtggtgtttatcagaatgtgccgtgcctttgactctcagaacaacaccgtgtactttgatgggaagtatgccagccccgacgtcttcaaatccttaggttgtgaagactttattagctttgtgtttgaatttggaaagagtttatgttctatgcacctgactgaagatgaaattgcattattttctgcatttgtactgatgtcagcagatcgctcatggctgcaagaaaaggtaaaaattgaaaaactgcaacagaaaattcagctagctcttcaacacgtcctacagaagaatcaccgagaagatggaatactaacaaagttaatatgcaaggtgtctacattaagagccttatgtggacgacatacagaaaagctaatggcatttaaagcaatatacccagacattgtgcgacttcattttcctccattatacaaggagttgttcacttcagaatttgagccagcaatgcaaattgatgggtaaatgttatcacctaagcacttctagaatgtctgaagtacaaacatgaaaaacaaacaaaaaaattaaccgagacactttatatggccctgcacagacctggagcgccacacactgcacatcttttggtgatcggggtcaggcaaaggaggggaaacaatgaaaacaaataaaagttgaacttgtttttctcatgcatatgatttccattatgcctacagatatggaccctttttctgtcttgacttcttgatcattgacctctgtttacaacaggaggagggtactaaagtcggaggatttccttttcttgtagctcactgcccacagactttctacagagtcaccaatctgtcagtaacaacagagagtccagcaataatcggtgactggtgtgcatagcggaggttgcggcattactttgcacaactagctctttgtttcatgaaggaagtttttattttttcaccgattattgccagtccgcaggatggcatgaaaagggtccatagcagtagcaacaatagcattataatatattacagggtaaatgggcatgaagactatatatagctaaaagagatattgtttatatattgttttaagtaatataaaatgtagttactggtgtagcttttcctgttgaattgataaggcactttcattttgcacctttttctttaaattaaatgctagcgtgttcactgtcgtgtcgcatgtgcaccagaaacacaagtttaactgagaaggcttggaaggtacgttgggaggtatttatgctgctgtttacaaaattatttttaagagactggctggtcatatctagaaatcaccacgttggattttttttttaacatgtgaatttggaattagaaacggaactctccctaaattatactttgctttttggtaagtttaatgatagatgtgtttatgcttcatacaaagttgaatgattgattggcgtggtggacatataccatcatgctcattttttttttttaaagctttttaaaatgccacctcatggaggcgagggggaggagaagctcattttacacaattcagtagttaaatatggactcggtctcaacttggaattcttatgctttgagaacaaatcaacaaccagaatatttattggaatctagcttttattataagaaggacccaaagattatatcctgagcaaatgcacactccccatgtgaggacatgaagtatttactttgtgaatgtttatgttcttggtataatctaggaaccctatgagtttatctcagagtgaactaattctagatttgttgtcaatagatgctataattcaagaatgttgctctccatatttgaaaaacgatggataggagggtgagggaagcatacaatgttgaaccagtttctcttatttaaatattaaatactttaagcctttaaagtgaagttgatgctagctgcaaacatttactcttgtatttatcttcactaggaaactgtggactgtaatttattttattaaatatttagaagattatttggcttgtgtgttcaggtgagaaatactgagttgtttttgtttaatttcatggtttttttttttttaatgatccctagtgggggaaggggaaaggaatagtctgataaacagatgtgcatattttaaaaacaagtgaccttttgggaatgtaggcatttagacgatgattttagtcgcactaggggtgggattcaaactactggtcaaagaccattttgtacagaaaagggaacatctccgatgggtgttaaggtaggagtttccatgcagccctttatgtctgagaaatagtctcctctgccattggggtccctgcggaatcttctacaggaattgcagctcttcacgtcatgctaggttaccagcatgggcttcccagagcacttcactctgtttctaactccactgacttttctgacttgtttcttgagggacttggaaaaggggaaggtattattcacacagatgtgtgtatgaagcctaaataacatccaactttttttccaaaaacatagtaagagtttaaccataaatagaagagtaatattcctttaaatttcttacaggcatgtaaaattttatgtgtttatagagagatgctaactgtcagcatatagtatttatattggggcaagaagggttaaatcaaatctttaatttaagtaagcatagttcctttaaagatcagtagtatttatactctgaaaagagtaccaagcttagttcagttatttattcatccattttttttctattgtttctcctctggggggaaatggtgttttgtttttgtttgagttttgtgttttagttttttggttttggttttgttttgtttttttgtcattcagattcactaaatttggggatggttttattaaagtatattaacttctttttaaccaaagctttctgaatatgaccagcctcaggtgctagcgcattaaagagcaactaaacctaattccagtgtcgatttgtgaaataataaaagctaattgaatttctctaagggtgagagagaacataatgatgaacttaaaaagaaattccttttcccagaagggattctgcatgtacctacaaacaatcatgctctaaccacagtaatagtcatgccatggtgacattgcttttacggtaaaccaagataggtaatatgatgcttcttcccaggtgtttctgaaagaaaagcagcggtggagcttaagagccaagtccactgattgacataataggatggaattgtagacagagacatgctccatgaaacaaggaaacaactgactactatttggatctaagttgggatctgatgttaaacaataaattcagtttaaaaaaaatatggagctcagaaaaggatgtgaaaaactttgcattttcctttcttcattattacaaaaacacctatgtgatgacataaaatacttgggtgatatcagaacaattatccttaatagtttttataattaaagtttcctaaacttcagtctccaatagtcttttaaggattggaaccacatcactgtcagccccgctgctacaatgcctttgtacaatttttttacataaggcaaataaggcttttgtacaaagcctgaataccttctgttccaatggtgtccaaatggttattatattgtgaaaaacctggccttggtcacaatgcaaacaaaagtacagatgaaagtgctttttggacagtttgcaaattgtgttaaagctacggattttttttaaagtgttcagcatcttaacgtgtattaaagctatggatttttttttaaagtcttcagcatcctaattcaccctttctaacttaagaaaaacatgacttaagacactgcttctaagtttggttgttctttatagtgtggatacccagttatctgtgagcgtatgggggtgggctgagggtcaggtgaggaaggagtgtgtgtgtgtgtgtgtgtgtgtgtgtgtgtgtgtgtgatttgcatgtgtatgatgtgtgtgcgtcggaccgcttctaggctactaagtgtcaatggaaaagaaaatgtattcaaaatacttaaatcaaaactagaagatggggaaaaaaagatttattctatacaaagccttgtctggaccactttagagagacttctatttttttaacccttctataaatatttgatggcacttgaaatattcctgcaataaaatgtgatttgtgtaaagaaaaaaagattttgtaatgtgaaacaaagaaagaaagtaatgtaattttctaaaaaaaaaaatacaaacaaacaaactttgtattattttcttgatggaatttgtctatctgtctttggaaaactttttatttcattgaatgtgccatagtagaaatgtgtgtttttagttttagactaaggaatagctagttgttgtgttccgacattccaaaatgcaaaacaacctagtagtatctttcatgaaaaggtttaagtagtatgtaagcttctctcattgttgcttttttgcacatgttcttcattcctctctagtgcaatatgtacatagagcacttgcgggtgtaccttgatccctcagggaaaaatacatatttgtacagttttttggggtttttttgttttttggttttttttgttttgccttttgtttttggctaaggaatgtcgatcgaatcacttgttattgttgaggggcagccagataataatcctaaagccactgtttccaacattgattgtttaaatcatatgtccttccaatgctattattttaagataataataaaaagttattttctgacagttctttgtgctgactggtgaaaaacaagggtaaataagcaccttataattgacttactgtgaatgacaatccatcttggtatcaacgatagaagccctatcattttggagttggggttaagagtcagaaacaatgtgctcagggatctcctaaaactcttaaaacagggtggccagtactactgggacaaattgtgttttttattattaataataatgataataatactatccctccaaggcacaagtgaactatatagaactgcgtgtgtgtaaactctttactctcgtctcattttgttgagtttagaacttgatgtgctcgtcagtcttgtgtttcaaaacactgaataacttccaaagcaaagttatgccagtgtgttcaaaagataaattaataatgtaccagcaaagagcatcattcaaagtatagtccttgcatattccagttaccatttctctaataattaaaatattcatgataaatatatatatagcatcatatgttaaaaactatttcaaattctacatattaaggatgaaaattttaaaatccagtaataagaggagagacctgcctatcagtacagtgatataggtaaaagatgaaatatgtttttaaaataccagcaattaactattgttttcatgggttctcctctagaagcaaaccaaaaattccttcatggaaaacaattcttacttctacatgtgtagtttatatctgatgcattacaagagctaatgtttaaagacaaaacaaaacctgcctgtatgacagcagcaactcgagccaacatttagtgttacatgttatatttttgaaataccgttttgttatcatattccacatattactttccataaagtcagagaagttcaatgtaattgttggctctgattcttccaccttgggatacacattcacaagaagatttatatattttcttactatgatagaggaacataatctgggaaaacttcccatgtctgtaagatgaaaaggatacctttaccatgttgtttttgataataaagaatatggaaaatggtagaaatctctcctctctatgtgtatttgtatatgtgtgtatacacacacacgttgacatttttacataacatgtgattgccacttcttataaagttatgatatagaaccccatgaaaacaactttatattatagatcaaataatgtgcccagaaacgcaattgcaacagtaaatcttgatctattggtaagagtctatgatacaggtcttcattctatccctaaacataatgttagtaaagaggttccatcagattgtattatagagaccttcctattgctatttatttttaagagatgagaagactgactagcaatgtctccacagtgcaattggtttcacttctgggtctgtctgtctgtttgtgtaggtgagatcagtgttgtcaggctctcagaataatttttaaaagaatccagaagcctgacttcacaccaagtagccatcctagatgggcgggggggatctccatgttcaaccaaaccctcagaacttagagcaataaatacattcagtcatttatttataaatgaatgacagaatattcaatccaaatagaaacaaccttttgtcagtgatgcaacataacatggagtcttatattgagaaagtgaatatgaatattttaaatagatgcctaggaaatctgtgtttgctgtttacatttaatgtactttgccacattagcagtaccacacttcttttactttcatccttctaagaactaatgaaagatagcttgctattagctttgacatgttgcacatgccattatgttgttctctaagaacaactaaattctctccagtgttcatgtgtgattcctttttcatcattattactttaatgtggatgaatactatttctaggaacttgattatcactgaacagattgcatatgtaaatgcagataattcttgagcaatatagtgaaaatgatttcacaaaaaaaatccatatgtactgtatacatcttcctgaatccaaaattctcctgttatccacacagtttgaaatctcatattaaacagtggtaaatttttaaacattaggacattagctggctgcttctataaatgtacctgtattgtctgcctgctccttttgtggagatgtgtttttgtattggatgtttgggccaatgggaggcttcaagctacaacatattttcccactttaaataatatttaacatatgacaaaccccagacaaggcttttaatatgtataaagaactgcagtgttaggtggtttatttgcaaactgttttcagtgttgtccatttttatggcacctttaacaatattcttgtttccaaagtacaaaaaaaataggttaaataatctagccataactgaatgtcaagcaataaaacaaatgacttttgtgcatagacttaaaaaatacaaattttagacatctgcatgtaaatgcaatctcttgtttactgctttcttcaacttgagcaatcgattccttatttactattaacttaagaacttgtaacggcctgtaaacattttctctcttactcttctttcaaatttacctgtccctgcttttgagtcataatatttaatgttgttctgcacatctctatacagttaactttttggctttcattctgtatagataagaaaatgttatattataaacagcctactcagtgcaaatatttatctgtttatcaaatccacaatatgctgtataataccggttttactatataatctattttagacatagctgtttagaactagagtgtgctatttttgtgtttttctgatgtgtggtgctagacaagttacttttgtgaacaacaaaaattatcccttttattcctagacaataccacctttgggtcttgttaatttcactgagtataactatatatttgtatatatatacatatatatatatatctacctatgcccaactggcagctgtatcagagtgctggatttgggacatgcttttctctttaaatacataatatcattatataaattattctagagtgtatttaattaggataaaattacttccttagtatggatatttgacatctatagggtgaatttgtttataaatatggctatatggaaacttattagcatttactttatgtttgctacttggctttacagcatatctcctaagctgaaaaataatttgccaggccttcaagatcctaaagaaacttgtttaatggagtaatatacttttttttcttattaaggaattgtattactggcacctaacacagttgtattcttagctcctattatagataatgggcatttacataaaatatcctagatggcttgatggcagaataaacctttcccctcctacctgagtcatgagaaggatggagacgtcctctgccataacatgggccataaagcaaattcgacatgggatgttctgtttcagtatgacctcaaccagttccatgaactgagtgaaggaccttcattttcaaagttatttaataagtagcttaattaagcctttctacccattctcccaagatctactggcattattgaaaagcaaagtttatcaaatatctaactaaggatgtagttaaccttattaaatattgattagaattgttctgtaatattactgaatttgtaagatctttagcaaagatttttgagcaatttataaatgtagagcaaatgtttctgtttactgcactttttgtaactgaaggtgataaattctcaagccatgattattggcttccatgcactgcaatatttatccacaattctagacattttccatttttgtggaagagttgctgttaccttaattataaatgcaattgtgtggttaatgagagctaatgctagtagttaaccttttaaagtggattggctacagttgagggagaaatctcttttaatataaatcacatcattccttaactgcctctcttggaaagagattgaaaccttttttttaaagcacgatttagcatcctaagcttcctgagggtagagattgtatctttttgcgtctgcacaatggctagcacatgtcagcatttgacaattgttaaatgataacaagtgtgccccaattaaaacgtttttcctgggttgttttgttaaatttacaaagtaagccaagccttacggttaacattctcctctacaaccaagtattaaagccacatttaaaaagaccacatgaaatgctgattctaattgtgtgtaggtcttgaggattaagcacacaaatttcacaaacttctgtttgagtaaacaaactcagccttctgtaaatatacatgcaagtttggaaacagtaatactgtacctataaatatatgctgtctgttttgtgtacagtatgtaaaaactccttttctgccacactaaaaatgcaagccatttatgggaatcctaaaactagtattgaactaaaactttgctaatgatctttattagaggatcgtccaacttttcacttaccttgggttttcttttcaattcactcttacactagtctgcttatttccagctgtttattttattgagtcctgaatttaaaaaaaaaatattttgattcattttgtaaatacaagctgtacaaaaaagagagatttaatgttgtcttttaaatactccaattttcattctaatatgaatgttgttatattgtacttagaaactgtacctttaatattacattacctttattaaaagtgcattgaacacatcaattttagatgtgctttatgtactgttatcctataataaaacttcagcttctaatggaa

SEQ ID NO: 235579 - DNA, 1572 bp, Artificial Sequence
  derived and/or modified sequence
atggaatctgccccggccgcaccagatccagctgcctctgaacccggttccagcggcgccgatgctgctgccggtagtcgcgaaacgcctctgaatcaggaaagcgcccgaaagagcgagccaccagcacccgtcaggcggcagtcctattctagtacatctagaggcatctccgtgacaaagaagacccatacctcccagatagagatcatcccctgtaagatttgcggagataagtctagcggaatccactacggtgttatcacttgtgagggatgcaaggggttcttccggcgtagccagcagtctaacgcaacctatagctgccctcggcagaagaattgtttgatagatcgtacatcaaggaaccggtgtcagcactgtcgcttacagaagtgcctagccgtaggcatgagccgcgatgcggttaagttcggaagaatgagtaagaagcagcgcgacagtctgtacgccgaggtacagaagcatcggatgcagcaacagcaacgggaccaccagcagcagccgggcgaagctgagcccttgactcccacttacaatatatccgcaaatggtctaaccgaacttcacgatgatctcagcaattatatagatggtcacacccccgagggtagcaaggcagacagcgctgtgtcctctttctacctggacattcaacctagccctgatcaatcaggactggatatcaacggaatcaaacccgagcctatttgtgattatacacccgcctccggcttctttccttattgctcgttcacaaacggcgagacgtcccctaccgtgtcaatggctgaacttgaacatttggcccaaaatatcagtaaatcacacctggagacctgccaatatctgcgggaggaacttcaacagattacttggcaaactttcttacaagaggaaattgaaaactaccagaacaagcagcgggaagtaatgtggcagctgtgcgcgatcaagatcacagaggctatccagtatgtcgttgagtttgctaaacggattgacggattcatggagctgtgtcagaatgaccagatcgttctccttaaagccgggtcactggaggtggtctttattcggatgtgtcgggccttcgactcccagaacaacacagtctacttcgacgggaagtacgccagccccgatgtgtttaagtcacttggatgtgaggactttatctcattcgtgtttgagttcgggaagagcctttgctctatgcacctgactgaagatgaaatagctcttttttcagcttttgtactcatgtccgcggatagaagctggttgcaggagaaggttaagatcgaaaagctgcagcagaaaattcagctagccctgcagcatgtgttgcagaaaaatcaccgcgaggacgggatcttgaccaaactcatctgtaaggttagcactttacgcgcattgtgcgggaggcacaccgaaaaactaatggctttcaaagctatataccctgatattgtgagactacattttcctccactgtataaggagctgttcacaagtgagtttgagcctgcaatgcagattgacggttag

SEQ ID NO: 235580 - DNA, 1572 bp, Artificial Sequence
  derived and/or modified sequence
atggagagcgccccagctgccccagaccctgctgccagcgagcccggcagcagcggggctgatgctgctgctggcagccgggagacccccctgaaccaggagagcgccaggaagtctgagcccccagcccctgtgcggcggcagagctacagcagcaccagccggggcatctctgtgaccaagaagacccacaccagccagatcgagatcatcccctgcaagatctgtggggacaagagcagcggcatccactatggagtcatcacctgtgagggctgcaagggcttcttccgccgcagccagcagagcaatgccacctacagctgcccccggcagaagaactgcctgattgacaggaccagcaggaaccgctgccagcactgccgcctgcagaagtgcctggccgtgggcatgagcagagatgctgtgaagtttggaaggatgagcaagaagcagagggacagcctgtatgcagaggtgcagaagcacaggatgcagcagcagcagagggaccaccagcagcagcccggggaggccgagcccctgacccccacctacaacatcagcgccaacggcctgacagagctgcatgatgacctgagcaactacattgatggccacaccccagagggcagcaaggctgacagcgctgtgagcagcttctacctggacatccagcccagcccagaccagagcggcctggacatcaatggcatcaagccagagcccatctgtgactacaccccagccagcggcttcttcccctactgcagcttcaccaatggagagaccagccccaccgtgtccatggccgagctggagcacctggcccagaacatcagcaagagccacctggagacctgccagtacctgcgggaggagctgcagcagatcacctggcagaccttcctgcaggaggagattgagaactaccagaacaagcagcgggaggtgatgtggcagctgtgtgccatcaagatcacagaggccatccagtatgtggtggagtttgccaagagaattgatggcttcatggagctgtgccagaatgaccagatcgtgctgctgaaggccggcagcctggaggtggtgttcatccgcatgtgccgggcctttgacagccagaacaacacagtgtactttgatggcaagtatgccagcccagatgtgttcaagagcctgggctgtgaggacttcatcagctttgtgtttgaatttgggaagagcctgtgcagcatgcacctgacagaagatgagatcgccctcttcagcgcctttgtgctgatgtctgctgaccgctcctggctgcaggagaaggtgaagattgagaagctgcagcagaagatccagctggccctgcagcacgtgctgcagaagaaccacagagaagatggcatcctgaccaagctgatctgcaaggtgtccaccctgcgggccctgtgtggccgccacacagagaagctgatggccttcaaggccatctacccagacatcgtgcggctgcacttcccccccctgtacaaggagctgttcaccagcgagtttgagcccgccatgcagattgatggatag

SEQ ID NO: 235581 - DNA, 1572 bp, Artificial Sequence
  derived and/or modified sequence
atggagagcgcccccgccgcccccgaccccgccgccagcgagcccggctctagtggtgctgatgctgccgcgggaagccgggagactcccctgaatcaggagtcagctcggaaatccgagccacccgccccagtgcgccggcagtcctattccagcacatctagaggcatctcagtgacaaagaaaacgcatacatctcagatagaaatcatcccttgtaaaatttgtggcgataagagttcagggatccattacggcgtcatcacatgcgagggatgtaagggatttttccgaagatcacagcagtccaatgcaacatacagctgtcccaggcagaaaaattgtctgatcgacagaacatcacgaaacaggtgtcaacactgtagactacagaagtgtcttgcagtggggatgtctagggacgcagtcaagttcggccgtatgagtaaaaagcagcgggattcattatatgctgaggttcagaagcacagaatgcaacagcagcagagggatcaccaacagcaaccaggggaagctgaaccactgacgcctacttacaacatcagcgcgaatgggctgacagagcttcatgatgacctcagcaactatatcgacgggcacacccctgaggggagtaaggccgactcagccgtgtcatccttctacctagacattcagccaagcccagaccagtcaggcctcgacattaatggcattaaaccagaacccatctgtgactataccccagctagcggcttctttccctattgtagcttcacaaacggcgaaacatctcccactgtctcaatggctgagctcgagcatctagctcagaacatttctaaatcccaccttgaaacatgtcagtacttgcgggaagaactgcagcagataacatggcagaccttcctgcaagaggagattgagaattaccagaacaagcagcgtgaagtcatgtggcagttatgtgccatcaaaatcacggaggcaatccagtacgtggtagagtttgctaaacgcattgatggctttatggagctgtgtcagaacgatcagatagtgctgctcaaagcgggtagcctcgaggtggtcttcatcagaatgtgccgggcttttgactcacagaacaatacagtttactttgatggaaaatacgcaagccccgatgtatttaagtctctcggctgcgaggacttcatatccttcgtgttcgagtttgggaagtcactctgttctatgcatctgaccgaagacgaaatagccctctttagtgcctttgtgctgatgtcagccgaccggtcctggttgcaggagaaagtcaaaattgaaaagctgcaacagaaaattcaactggcactgcagcacgttctgcagaagaaccacagagaggacggaattttgacgaagctaatctgcaaagtaagcacactccgggctctttgcggccgacacacagagaagttgatggccttcaaagctatctatcctgatatcgttagactccacttccctccgctctataaggagttgtttacaagcgaattcgagcccgcaatgcagatcgatggttag

SEQ ID NO: 235582 - DNA, 1572 bp, Artificial Sequence
  derived and/or modified sequence
atggagagcgcgccagcagctccggacccagccgcatctgagccaggctcctccggagccgacgccgctgccggatccagggagaccccgttgaatcaggaatctgcccgaaagtcagagccaccggcaccagtccgcagacaatcctattcaagtacatcccgtggtatttccgttactaagaaaacccataccagccagattgaaatcatcccatgcaaaatctgtggcgacaaatcttccggaatccactatggtgtaatcacctgcgaaggttgtaagggattctttcgacggagccagcagagcaatgccacctacagctgtccaagacaaaaaaattgcctcatagacagaacttcccgcaaccggtgtcagcactgtcggctgcagaagtgcctggctgtgggcatgtctagggacgcagtaaagtttgggcgaatgtcgaaaaagcaaagagactctctctatgccgaggtccagaagcatagaatgcaacagcagcaacgggaccatcagcagcaaccaggagaggcagaaccactaactcctacctacaatatctcagcaaatggcctcaccgagctgcacgacgacctgtctaactacattgatggtcacactcccgaaggctccaaggctgacagtgctgtcagcagtttttacctggacatccaaccttcccccgatcaaagtggcctggacatcaacggcatcaaaccagagccaatttgtgactataccccagccagcggtttcttcccttattgctcattcactaacggcgagacttctcccaccgtgtctatggccgagctcgagcacctggcgcagaacatcagcaaatcacacctagagacgtgccagtatctgcgggaggaactgcagcagattacatggcagacgttcctgcaggaggagattgagaattaccagaacaaacagagggaagtaatgtggcagttgtgcgcaataaagatcactgaggcgatacaatacgtcgtggagtttgccaagagaattgacgggtttatggagctgtgccagaatgatcagattgtcttgctcaaggcaggctcgctggaggtcgtatttattcgaatgtgcagagcctttgacagtcagaataataccgtgtattttgacggcaaatacgccagtcctgacgtcttcaaatcccttggttgcgaagacttcatctcttttgtatttgaattcggcaagagtttgtgttccatgcatctgaccgaagatgaaatcgcactgttcagcgcttttgtgctgatgtctgcagatcgctcatggctccaagagaaagtcaagatcgaaaagttacagcagaaaatccaactggctttgcagcatgtgctacaaaagaaccatcgggaagatggcatcttgaccaaactgatctgtaaggtctctaccctacgtgctctgtgcggacgtcataccgaaaagctgatggcttttaaggcaatctaccccgatatcgtgcgattgcacttccccccactgtacaaggagctgttcaccagcgagtttgaaccagctatgcagatcgatggttag

SEQ ID NO: 235583 - DNA, 10844 bp, Artificial Sequence
  derived and/or modified sequence
ttttttttttttttttggtaccatagagttgctctgaaaacagaagatagagggagtctcggagctcgccatctccagcgatctctacattgggaaaaaacatggagtcagctccggcagcccccgaccccgccgccagcgagccaggcagcagcggcgcggacgcggccgccggctccagggagaccccgctgaaccaggaatccgcccgcaagagcgagccgcctgccccggtgcgcagacagagctattccagcaccagcagaggtatctcagtaacgaagaagacacatacatctcaaattgaaattattccatgcaagatctgtggagacaaatcatcaggaatccattatggtgtcattacatgtgaaggctgcaagggctttttcaggagaagtcagcaaagcaatgccacctactcctgtcctcgtcagaagaactgtttgattgatcgaaccagtagaaaccgctgccaacactgtcgattacagaaatgccttgccgtagggatgtctcgagatgctgtaaaatttggccgaatgtcaaaaaagcagagagacagcttgtatgcagaagtacagaaacaccggatgcagcagcagcagcgcgaccaccagcagcagcctggagaggctgagccgctgacgcccacctacaacatctcggccaacgggctgacggaacttcacgacgacctcagtaactacattgacgggcacacccctgaggggagtaaggcagactccgccgtcagcagcttctacctggacatacagccttccccagaccagtcaggtcttgatatcaatggaatcaaaccagaaccaatatgtgactacacaccagcatcaggcttctttccctactgttcgttcaccaacggcgagacttccccaactgtgtccatggcagaattagaacaccttgcacagaatatatctaaatcgcatctggaaacctgccaatacttgagagaagagctccagcagataacgtggcagacctttttacaggaagaaattgagaactatcaaaacaagcagcgggaggtgatgtggcaattgtgtgccatcaaaattacagaagctatacagtatgtggtggagtttgccaaacgcattgatggatttatggaactgtgtcaaaatgatcaaattgtgcttctaaaagcaggttctctagaggtggtgtttatcagaatgtgccgtgcctttgactctcagaacaacaccgtgtactttgatgggaagtatgccagccccgacgtcttcaaatccttaggttgtgaagactttattagctttgtgtttgaatttggaaagagtttatgttctatgcacctgactgaagatgaaattgcattattttctgcatttgtactgatgtcagcagatcgctcatggctgcaagaaaaggtaaaaattgaaaaactgcaacagaaaattcagctagctcttcaacacgtcctacagaagaatcaccgagaagatggaatactaacaaagttaatatgcaaggtgtctaccttaagagccttatgtggacgacatacagaaaagctaatggcatttaaagcaatatacccagacattgtgcgacttcattttcctccattatacaaggagttgttcacttcagaatttgagccagcaatgcaaattgatgggtaaatgttatcacctaagcacttctagaatgtctgaagtacaaacatgaaaaacaaacaaaaaaattaaccgagacactttatatggccctgcacagacctggagcgccacacactgcacatcttttggtgatcggggtcaggcaaaggaggggaaacaatgaaaacaaataaaagttgaacttgtttttctcatgcatatgatttccattatgcctacagatatggaccctttttctgtcttgacttcttgatcattgacctctgtttacaacaggaggagggtactaaagtcggaggatttccttttcttgtagctcactgcccacagactttctacagagtcaccaatctgtcagtaacaacagagagtccagcaataatcggtgactggtgtgcatagcggaggttgcggcattactttgcacaactagctctttgtttcatgaaggaagtttttattttttcaccgattattgccagtccgcaggatggcatgaaaagggtccatagcagtagcaacaatagcattataatatattacagggtaaatgggcatgaagactatatatagctaaaagagatattgtttatatattgttttaagtaatataaaatgtagttactggtgtagcttttcctgttgaattgataaggcactttcattttgcacctttttctttaaattaaatgctagcgtgttcactgtcgtgtcgcatgtgcaccagaaacacaagtttaactgagaaggcttggaaggtacgttgggaggtatttatgctgctgtttacaaaattatttttaagagactggctggtcatatctagaaatcaccacgttggattttttttttaacatgtgaatttggaattagaaacggaactctccctaaattatactttgctttttggtaagtttaatgatagatgtgtttatgcttcatacaaagttgaatgattgattggcgtggtggacatataccatcatgctcattttttttttttaaagctttttaaaatgccacctcatggaggcgagggggaggagaagctcattttacacaattcagtagttaaatatggactcggtctcaacttggaattcttatgctttgagaacaaatcaacaaccagaatatttattggaatctagcttttattataagaaggacccaaagattatatcctgagcaaatgcacactccccatgtgaggacatgaagtatttactttgtgaatgtttatgttcttggtataatctaggaaccctatgagtttatctcagagtgaactaattctagatttgttgtcaatagatgctataattcaagaatgttgctctccatatttgaaaaacgatggataggagggtgagggaagcatacaatgttgaaccagtttctcttatttaaatattaaatactttaagcctttaaagtgaagttgatgctagctgcaaacatttactcttgtatttatcttcactaggaaactgtggactgtaatttattttattaaatatttagaagattatttggcttgtgtgttcaggtgagaaatactgagttgtttttgtttaatttcatggtttttttttttttaatgatccctagtgggggaaggggaaaggaatagtctgataaacagatgtgcatattttaaaaacaagtgaccttttgggaatgtaggcatttagacgatgattttagtcgcactaggggtgggattcaaactactggtcaaagaccattttgtacagaaaagggaacatctccgatgggtgttaaggtaggagtttccatgcagccctttatgtctgagaaatagtctcctctgccattggggtccctgcggaatcttctacaggaattgcagctcttcacgtcatgctaggttaccagcatgggcttcccagagcacttcactctgtttctaactccactgacttttctgacttgtttcttgagggacttggaaaaggggaaggtattattcacacagatgtgtgtatgaagcctaaataacatccaactttttttccaaaaacatagtaagagtttaaccataaatagaagagtaatattcctttaaatttcttacaggcatgtaaaattttatgtgtttatagagagatgctaactgtcagcatatagtatttatattggggcaagaagggttaaatcaaatctttaatttaagtaagcatagttcctttaaagatcagtagtatttatactctgaaaagagtaccaagcttagttcagttatttattcatccattttttttctattgtttctcctctggggggaaatggtgttttgtttttgtttgagttttgtgttttagttttttggttttggttttgttttgtttttttgtcattcagattcactaaatttggggatggttttattaaagtatattaacttctttttaaccaaagctttctgaatatgaccagcctcaggtgctagcgcattaaagagcaactaaacctaattccagtgtcgatttgtgaaataataaaagctaattgaatttctctaagggtgagagagaacataatgatgaacttaaaaagaaattccttttcccagaagggattctgcatgtacctacaaacaatcatgctctaaccacagtaatagtcatgccatggtgacattgcttttacggtaaaccaagataggtaatatgatgcttcttcccaggtgtttctgaaagaaaagcagcggtggagcttaagagccaagtccactgattgacataataggatggaattgtagacagagacatgctccatgaaacaaggaaacaactgactactatttggatctaagttgggatctgatgttaaacaataaattcagtttaaaaaaaatatggagctcagaaaaggatgtgaaaaactttgcattttcctttcttcattattacaaaaacacctatgtgatgacataaaatacttgggtgatatcagaacaattatccttaatagtttttataattaaagtttcctaaacttcagtctccaatagtcttttaaggattggaaccacatcactgtcagccccgctgctacaatgcctttgtacaatttttttacataaggcaaataaggcttttgtacaaagcctgaataccttctgttccaatggtgtccaaatggttattatattgtgaaaaacctggccttggtcacaatgcaaacaaaagtacagatgaaagtgctttttggacagtttgcaaattgtgttaaagctacggattttttttaaagtgttcagcatcttaacgtgtattaaagctatggatttttttttaaagtcttcagcatcctaattcaccctttctaacttaagaaaaacatgacttaagacactgcttctaagtttggttgttctttatagtgtggatacccagttatctgtgagcgtatgggggtgggctgagggtcaggtgaggaaggagtgtgtgtgtgtgtgtgtgtgtgtgtgtgtgtgtgtgtgatttgcatgtgtatgatgtgtgtgcgtcggaccgcttctaggctactaagtgtcaatggaaaagaaaatgtattcaaaatacttaaatcaaaactagaagatggggaaaaaaagatttattctatacaaagccttgtctggaccactttagagagacttctatttttttaacccttctataaatatttgatggcacttgaaatattcctgcaataaaatgtgatttgtgtaaagaaaaaaagattttgtaatgtgaaacaaagaaagaaagtaatgtaattttctaaaaaaaaaaatacaaacaaacaaactttgtattattttcttgatggaatttgtctatctgtctttggaaaactttttatttcattgaatgtgccatagtagaaatgtgtgtttttagttttagactaaggaatagctagttgttgtgttccgacattccaaaatgcaaaacaacctagtagtatctttcatgaaaaggtttaagtagtatgtaagcttctctcattgttgcttttttgcacatgttcttcattcctctctagtgcaatatgtacatagagcacttgcgggtgtaccttgatccctcagggaaaaatacatatttgtacagttttttggggtttttttgttttttggttttttttgttttgccttttgtttttggctaaggaatgtcgatcgaatcacttgttattgttgaggggcagccagataataatcctaaagccactgtttccaacattgattgtttaaatcatatgtccttccaatgctattattttaagataataataaaaagttattttctgacagttctttgtgctgactggtgaaaaacaagggtaaataagcaccttataattgacttactgtgaatgacaatccatcttggtatcaacgatagaagccctatcattttggagttggggttaagagtcagaaacaatgtgctcagggatctcctaaaactcttaaaacagggtggccagtactactgggacaaattgtgttttttattattaataataatgataataatactatccctccaaggcacaagtgaactatatagaactgcgtgtgtgtaaactctttactctcgtctcattttgttgagtttagaacttgatgtgctcgtcagtcttgtgtttcaaaacactgaataacttccaaagcaaagttatgccagtgtgttcaaaagataaattaataatgtaccagcaaagagcatcattcaaagtatagtccttgcatattccagttaccatttctctaataattaaaatattcatgataaatatatatatagcatcatatgttaaaaactatttcaaattctacatattaaggatgaaaattttaaaatccagtaataagaggagagacctgcctatcagtacagtgatataggtaaaagatgaaatatgtttttaaaataccagcaattaactattgttttcatgggttctcctctagaagcaaaccaaaaattccttcatggaaaacaattcttacttctacatgtgtagtttatatctgatgcattacaagagctaatgtttaaagacaaaacaaaacctgcctgtatgacagcagcaactcgagccaacatttagtgttacatgttatatttttgaaataccgttttgttatcatattccacatattactttccataaagtcagagaagttcaatgtaattgttggctctgattcttccaccttgggatacacattcacaagaagatttatatattttcttactatgatagaggaacataatctgggaaaacttcccatgtctgtaagatgaaaaggatacctttaccatgttgtttttgataataaagaatatggaaaatggtagaaatctctcctctctatgtgtatttgtatatgtgtgtatacacacacacgttgacatttttacataacatgtgattgccacttcttataaagttatgatatagaaccccatgaaaacaactttatattatagatcaaataatgtgcccagaaacgcaattgcaacagtaaatcttgatctattggtaagagtctatgatacaggtcttcattctatccctaaacataatgttagtaaagaggttccatcagattgtattatagagaccttcctattgctatttatttttaagagatgagaagactgactagcaatgtctccacagtgcaattggtttcacttctgggtctgtctgtctgtttgtgtaggtgagatcagtgttgtcaggctctcagaataatttttaaaagaatccagaagcctgacttcacaccaagtagccatcctagatgggcgggggggatctccatgttcaaccaaaccctcagaacttagagcaataaatacattcagtcatttatttataaatgaatgacagaatattcaatccaaatagaaacaaccttttgtcagtgatgcaacataacatggagtcttatattgagaaagtgaatatgaatattttaaatagatgcctaggaaatctgtgtttgctgtttacatttaatgtactttgccacattagcagtaccacacttcttttactttcatccttctaagaactaatgaaagatagcttgctattagctttgacatgttgcacatgccattatgttgttctctaagaacaactaaattctctccagtgttcatgtgtgattcctttttcatcattattactttaatgtggatgaatactatttctaggaacttgattatcactgaacagattgcatatgtaaatgcagataattcttgagcaatatagtgaaaatgatttcacaaaaaaaatccatatgtactgtatacatcttcctgaatccaaaattctcctgttatccacacagtttgaaatctcatattaaacagtggtaaatttttaaacattaggacattagctggctgcttctataaatgtacctgtattgtctgcctgctccttttgtggagatgtgtttttgtattggatgtttgggccaatgggaggcttcaagctacaacatattttcccactttaaataatatttaacatatgacaaaccccagacaaggcttttaatatgtataaagaactgcagtgttaggtggtttatttgcaaactgttttcagtgttgtccatttttatggcacctttaacaatattcttgtttccaaagtacaaaaaaaataggttaaataatctagccataactgaatgtcaagcaataaaacaaatgacttttgtgcatagacttaaaaaatacaaattttagacatctgcatgtaaatgcaatctcttgtttactgctttcttcaacttgagcaatcgattccttatttactattaacttaagaacttgtaacggcctgtaaacattttctctcttactcttctttcaaatttacctgtccctgcttttgagtcataatatttaatgttgttctgcacatctctatacagttaactttttggctttcattctgtatagataagaaaatgttatattataaacagcctactcagtgcaaatatttatctgtttatcaaatccacaatatgctgtataataccggttttactatataatctattttagacatagctgtttagaactagagtgtgctatttttgtgtttttctgatgtgtggtgctagacaagttacttttgtgaacaacaaaaattatcccttttattcctagacaataccacctttgggtcttgttaatttcactgagtataactatatatttgtatatatatacatatatatatatatctacctatgcccaactggcagctgtatcagagtgctggatttgggacatgcttttctctttaaatacataatatcattatataaattattctagagtgtatttaattaggataaaattacttccttagtatggatatttgacatctatagggtgaatttgtttataaatatggctatatggaaacttattagcatttactttatgtttgctacttggctttacagcatatctcctaagctgaaaaataatttgccaggccttcaagatcctaaagaaacttgtttaatggagtaatatacttttttttcttattaaggaattgtattactggcacctaacacagttgtattcttagctcctattatagataatgggcatttacataaaatatcctagatggcttgatggcagaataaacctttcccctcctacctgagtcatgagaaggatggagacgtcctctgccataacatgggccataaagcaaattcgacatgggatgttctgtttcagtatgacctcaaccagttccatgaactgagtgaaggaccttcattttcaaagttatttaataagtagcttaattaagcctttctacccattctcccaagatctactggcattattgaaaagcaaagtttatcaaatatctaactaaggatgtagttaaccttattaaatattgattagaattgttctgtaatattactgaatttgtaagatctttagcaaagatttttgagcaatttataaatgtagagcaaatgtttctgtttactgcactttttgtaactgaaggtgataaattctcaagccatgattattggcttccatgcactgcaatatttatccacaattctagacattttccatttttgtggaagagttgctgttaccttaattataaatgcaattgtgtggttaatgagagctaatgctagtagttaaccttttaaagtggattggctacagttgagggagaaatctcttttaatataaatcacatcattccttaactgcctctcttggaaagagattgaaaccttttttttaaagcacgatttagcatcctaagcttcctgagggtagagattgtatctttttgcgtctgcacaatggctagcacatgtcagcatttgacaattgttaaatgataacaagtgtgccccaattaaaacgtttttcctgggttgttttgttaaatttacaaagtaagccaagccttacggttaacattctcctctacaaccaagtattaaagccacatttaaaaagaccacatgaaatgctgattctaattgtgtgtaggtcttgaggattaagcacacaaatttcacaaacttctgtttgagtaaacaaactcagccttctgtaaatatacatgcaagtttggaaacagtaatactgtacctataaatatatgctgtctgttttgtgtacagtatgtaaaaactccttttctgccacactaaaaatgcaagccatttatgggaatcctaaaactagtattgaactaaaactttgctaatgatctttattagaggatcgtccaacttttcacttaccttgggttttcttttcaattcactcttacactagtctgcttatttccagctgtttattttattgagtcctgaatttaaaaaaaaaatattttgattcattttgtaaatacaagctgtacaaaaaagagagatttaatgttgtcttttaaatactccaattttcattctaatatgaatgttgttatattgtacttagaaactgtacctttaatattacattacctttattaaaagtgcattgaacacatcaattttagatgtgctttatgtactgttatcctataataaaacttcagcttctaatggaa

SEQ ID NO: 235584 - DNA, 1572 bp, Artificial Sequence
  derived and/or modified sequence
atggagagcgcccccgccgcccccgaccccgccgccagcgagcccggcagcagcggcgccgacgccgccgccggcagcagagagacccccctgaaccaggagagcgccagaaagagcgagccccccgcccccgtgagaagacagagctacagcagcaccagcagaggcatcagcgtgaccaagaagacccacaccagccagatcgagatcatcccctgcaagatctgcggcgacaagagcagcggcatccactacggcgtgatcacctgcgagggctgcaagggcttcttcagaagaagccagcagagcaacgccacctacagctgccccagacagaagaactgcctgatcgacagaaccagcagaaacagatgccagcactgcagactgcagaagtgcctggccgtgggcatgagcagagacgccgtgaagttcggcagaatgagcaagaagcagagagacagcctgtacgccgaggtgcagaagcacagaatgcagcagcagcagagagaccaccagcagcagcccggcgaggccgagcccctgacccccacctacaacatcagcgccaacggcctgaccgagctgcacgacgacctgagcaactacatcgacggccacacccccgagggcagcaaggccgacagcgccgtgagcagcttctacctggacatccagcccagccccgaccagagcggcctggacatcaacggcatcaagcccgagcccatctgcgactacacccccgccagcggcttcttcccctactgcagcttcaccaacggcgagaccagccccaccgtgagcatggccgagctggagcacctggcccagaacatcagcaagagccacctggagacctgccagtacctgagagaggagctgcagcagatcacctggcagaccttcctgcaggaggagatcgagaactaccagaacaagcagagagaggtgatgtggcagctgtgcgccatcaagatcaccgaggccatccagtacgtggtggagttcgccaagagaatcgacggcttcatggagctgtgccagaacgaccagatcgtgctgctgaaggccggcagcctggaggtggtgttcatcagaatgtgcagagccttcgacagccagaacaacaccgtgtacttcgacggcaagtacgccagccccgacgtgttcaagagcctgggctgcgaggacttcatcagcttcgtgttcgagttcggcaagagcctgtgcagcatgcacctgaccgaggacgagatcgccctgttcagcgccttcgtgctgatgagcgccgacagaagctggctgcaggagaaggtgaagatcgagaagctgcagcagaagatccagctggccctgcagcacgtgctgcagaagaaccacagagaggacggcatcctgaccaagctgatctgcaaggtgagcaccctgagagccctgtgcggcagacacaccgagaagctgatggccttcaaggccatctaccccgacatcgtgagactgcacttcccccccctgtacaaggagctgttcaccagcgagttcgagcccgccatgcagatcgacggctag

SEQ ID NO: 235585 - protein, 468 aa, Artificial Sequence
  derived and/or modified sequence
MMYFVIAAMKAQIEIIPCKICGDKSSGIHYGVITCEGCKGFFRRSQQSNATYSCPRQKNCLIDRTSRNRCQHCRLQKCLAVGMSRDAVKFGRMSKKQRDSLYAEVQKHRMQQQQRDHQQQPGEAEPLTPTYNISANGLTELHDDLSNYIDGHTPEGSKADSAVSSFYLDIQPSPDQSGLDINGIKPEPICDYTPASGFFPYCSFTNGETSPTVSMAELEHLAQNISKSHLETCQYLREELQQITWQTFLQEEIENYQNKQREVMWQLCAIKITEAIQYVVEFAKRIDGFMELCQNDQIVLLKAGSLEVVFIRMCRAFDSQNNTVYFDGKYASPDVFKSLGCEDFISFVFEFGKSLCSMHLTEDEIALFSAFVLMSADRSWLQEKVKIEKLQQKIQLALQHVLQKNHREDGILTKLICKVSTLRALCGRHTEKLMAFKAIYPDIVRLHFPPLYKELFTSEFEPAMQIDG

SEQ ID NO: 235586 - DNA, 10669 bp, Artificial Sequence
  derived and/or modified sequence
tgtggctcgggcggcggcggcgcggcggcggcagagggggctccggggtcggaccatccgctctccctgcgctctccgcaccgcggcttaaatgatgtattttgtgatcgcagcgatgaaagctcaaattgaaattattccatgcaagatctgtggagacaaatcatcaggaatccattatggtgtcattacatgtgaaggctgcaagggctttttcaggagaagtcagcaaagcaatgccacctactcctgtcctcgtcagaagaactgtttgattgatcgaaccagtagaaaccgctgccaacactgtcgattacagaaatgccttgccgtagggatgtctcgagatgctgtaaaatttggccgaatgtcaaaaaagcagagagacagcttgtatgcagaagtacagaaacaccggatgcagcagcagcagcgcgaccaccagcagcagcctggagaggctgagccgctgacgcccacctacaacatctcggccaacgggctgacggaacttcacgacgacctcagtaactacattgacgggcacacccctgaggggagtaaggcagactccgccgtcagcagcttctacctggacatacagccttccccagaccagtcaggtcttgatatcaatggaatcaaaccagaaccaatatgtgactacacaccagcatcaggcttctttccctactgttcgttcaccaacggcgagacttccccaactgtgtccatggcagaattagaacaccttgcacagaatatatctaaatcgcatctggaaacctgccaatacttgagagaagagctccagcagataacgtggcagacctttttacaggaagaaattgagaactatcaaaacaagcagcgggaggtgatgtggcaattgtgtgccatcaaaattacagaagctatacagtatgtggtggagtttgccaaacgcattgatggatttatggaactgtgtcaaaatgatcaaattgtgcttctaaaagcaggttctctagaggtggtgtttatcagaatgtgccgtgcctttgactctcagaacaacaccgtgtactttgatgggaagtatgccagccccgacgtcttcaaatccttaggttgtgaagactttattagctttgtgtttgaatttggaaagagtttatgttctatgcacctgactgaagatgaaattgcattattttctgcatttgtactgatgtcagcagatcgctcatggctgcaagaaaaggtaaaaattgaaaaactgcaacagaaaattcagctagctcttcaacacgtcctacagaagaatcaccgagaagatggaatactaacaaagttaatatgcaaggtgtctacattaagagccttatgtggacgacatacagaaaagctaatggcatttaaagcaatatacccagacattgtgcgacttcattttcctccattatacaaggagttgttcacttcagaatttgagccagcaatgcaaattgatgggtaaatgttatcacctaagcacttctagaatgtctgaagtacaaacatgaaaaacaaacaaaaaaattaaccgagacactttatatggccctgcacagacctggagcgccacacactgcacatcttttggtgatcggggtcaggcaaaggaggggaaacaatgaaaacaaataaaagttgaacttgtttttctcatgcatatgatttccattatgcctacagatatggaccctttttctgtcttgacttcttgatcattgacctctgtttacaacaggaggagggtactaaagtcggaggatttccttttcttgtagctcactgcccacagactttctacagagtcaccaatctgtcagtaacaacagagagtccagcaataatcggtgactggtgtgcatagcggaggttgcggcattactttgcacaactagctctttgtttcatgaaggaagtttttattttttcaccgattattgccagtccgcaggatggcatgaaaagggtccatagcagtagcaacaatagcattataatatattacagggtaaatgggcatgaagactatatatagctaaaagagatattgtttatatattgttttaagtaatataaaatgtagttactggtgtagcttttcctgttgaattgataaggcactttcattttgcacctttttctttaaattaaatgctagcgtgttcactgtcgtgtcgcatgtgcaccagaaacacaagtttaactgagaaggcttggaaggtacgttgggaggtatttatgctgctgtttacaaaattatttttaagagactggctggtcatatctagaaatcaccacgttggattttttttttaacatgtgaatttggaattagaaacggaactctccctaaattatactttgctttttggtaagtttaatgatagatgtgtttatgcttcatacaaagttgaatgattgattggcgtggtggacatataccatcatgctcattttttttttttaaagctttttaaaatgccacctcatggaggcgagggggaggagaagctcattttacacaattcagtagttaaatatggactcggtctcaacttggaattcttatgctttgagaacaaatcaacaaccagaatatttattggaatctagcttttattataagaaggacccaaagattatatcctgagcaaatgcacactccccatgtgaggacatgaagtatttactttgtgaatgtttatgttcttggtataatctaggaaccctatgagtttatctcagagtgaactaattctagatttgttgtcaatagatgctataattcaagaatgttgctctccatatttgaaaaacgatggataggagggtgagggaagcatacaatgttgaaccagtttctcttatttaaatattaaatactttaagcctttaaagtgaagttgatgctagctgcaaacatttactcttgtatttatcttcactaggaaactgtggactgtaatttattttattaaatatttagaagattatttggcttgtgtgttcaggtgagaaatactgagttgtttttgtttaatttcatggtttttttttttttaatgatccctagtgggggaaggggaaaggaatagtctgataaacagatgtgcatattttaaaaacaagtgaccttttgggaatgtaggcatttagacgatgattttagtcgcactaggggtgggattcaaactactggtcaaagaccattttgtacagaaaagggaacatctccgatgggtgttaaggtaggagtttccatgcagccctttatgtctgagaaatagtctcctctgccattggggtccctgcggaatcttctacaggaattgcagctcttcacgtcatgctaggttaccagcatgggcttcccagagcacttcactctgtttctaactccactgacttttctgacttgtttcttgagggacttggaaaaggggaaggtattattcacacagatgtgtgtatgaagcctaaataacatccaactttttttccaaaaacatagtaagagtttaaccataaatagaagagtaatattcctttaaatttcttacaggcatgtaaaattttatgtgtttatagagagatgctaactgtcagcatatagtatttatattggggcaagaagggttaaatcaaatctttaatttaagtaagcatagttcctttaaagatcagtagtatttatactctgaaaagagtaccaagcttagttcagttatttattcatccattttttttctattgtttctcctctggggggaaatggtgttttgtttttgtttgagttttgtgttttagttttttggttttggttttgttttgtttttttgtcattcagattcactaaatttggggatggttttattaaagtatattaacttctttttaaccaaagctttctgaatatgaccagcctcaggtgctagcgcattaaagagcaactaaacctaattccagtgtcgatttgtgaaataataaaagctaattgaatttctctaagggtgagagagaacataatgatgaacttaaaaagaaattccttttcccagaagggattctgcatgtacctacaaacaatcatgctctaaccacagtaatagtcatgccatggtgacattgcttttacggtaaaccaagataggtaatatgatgcttcttcccaggtgtttctgaaagaaaagcagcggtggagcttaagagccaagtccactgattgacataataggatggaattgtagacagagacatgctccatgaaacaaggaaacaactgactactatttggatctaagttgggatctgatgttaaacaataaattcagtttaaaaaaaatatggagctcagaaaaggatgtgaaaaactttgcattttcctttcttcattattacaaaaacacctatgtgatgacataaaatacttgggtgatatcagaacaattatccttaatagtttttataattaaagtttcctaaacttcagtctccaatagtcttttaaggattggaaccacatcactgtcagccccgctgctacaatgcctttgtacaatttttttacataaggcaaataaggcttttgtacaaagcctgaataccttctgttccaatggtgtccaaatggttattatattgtgaaaaacctggccttggtcacaatgcaaacaaaagtacagatgaaagtgctttttggacagtttgcaaattgtgttaaagctacggattttttttaaagtgttcagcatcttaacgtgtattaaagctatggatttttttttaaagtcttcagcatcctaattcaccctttctaacttaagaaaaacatgacttaagacactgcttctaagtttggttgttctttatagtgtggatacccagttatctgtgagcgtatgggggtgggctgagggtcaggtgaggaaggagtgtgtgtgtgtgtgtgtgtgtgtgtgtgtgtgtgtgtgatttgcatgtgtatgatgtgtgtgcgtcggaccgcttctaggctactaagtgtcaatggaaaagaaaatgtattcaaaatacttaaatcaaaactagaagatggggaaaaaaagatttattctatacaaagccttgtctggaccactttagagagacttctatttttttaacccttctataaatatttgatggcacttgaaatattcctgcaataaaatgtgatttgtgtaaagaaaaaaagattttgtaatgtgaaacaaagaaagaaagtaatgtaattttctaaaaaaaaaaatacaaacaaacaaactttgtattattttcttgatggaatttgtctatctgtctttggaaaactttttatttcattgaatgtgccatagtagaaatgtgtgtttttagttttagactaaggaatagctagttgttgtgttccgacattccaaaatgcaaaacaacctagtagtatctttcatgaaaaggtttaagtagtatgtaagcttctctcattgttgcttttttgcacatgttcttcattcctctctagtgcaatatgtacatagagcacttgcgggtgtaccttgatccctcagggaaaaatacatatttgtacagttttttggggtttttttgttttttggttttttttgttttgccttttgtttttggctaaggaatgtcgatcgaatcacttgttattgttgaggggcagccagataataatcctaaagccactgtttccaacattgattgtttaaatcatatgtccttccaatgctattattttaagataataataaaaagttattttctgacagttctttgtgctgactggtgaaaaacaagggtaaataagcaccttataattgacttactgtgaatgacaatccatcttggtatcaacgatagaagccctatcattttggagttggggttaagagtcagaaacaatgtgctcagggatctcctaaaactcttaaaacagggtggccagtactactgggacaaattgtgttttttattattaataataatgataataatactatccctccaaggcacaagtgaactatatagaactgcgtgtgtgtaaactctttactctcgtctcattttgttgagtttagaacttgatgtgctcgtcagtcttgtgtttcaaaacactgaataacttccaaagcaaagttatgccagtgtgttcaaaagataaattaataatgtaccagcaaagagcatcattcaaagtatagtccttgcatattccagttaccatttctctaataattaaaatattcatgataaatatatatatagcatcatatgttaaaaactatttcaaattctacatattaaggatgaaaattttaaaatccagtaataagaggagagacctgcctatcagtacagtgatataggtaaaagatgaaatatgtttttaaaataccagcaattaactattgttttcatgggttctcctctagaagcaaaccaaaaattccttcatggaaaacaattcttacttctacatgtgtagtttatatctgatgcattacaagagctaatgtttaaagacaaaacaaaacctgcctgtatgacagcagcaactcgagccaacatttagtgttacatgttatatttttgaaataccgttttgttatcatattccacatattactttccataaagtcagagaagttcaatgtaattgttggctctgattcttccaccttgggatacacattcacaagaagatttatatattttcttactatgatagaggaacataatctgggaaaacttcccatgtctgtaagatgaaaaggatacctttaccatgttgtttttgataataaagaatatggaaaatggtagaaatctctcctctctatgtgtatttgtatatgtgtgtatacacacacacgttgacatttttacataacatgtgattgccacttcttataaagttatgatatagaaccccatgaaaacaactttatattatagatcaaataatgtgcccagaaacgcaattgcaacagtaaatcttgatctattggtaagagtctatgatacaggtcttcattctatccctaaacataatgttagtaaagaggttccatcagattgtattatagagaccttcctattgctatttatttttaagagatgagaagactgactagcaatgtctccacagtgcaattggtttcacttctgggtctgtctgtctgtttgtgtaggtgagatcagtgttgtcaggctctcagaataatttttaaaagaatccagaagcctgacttcacaccaagtagccatcctagatgggcgggggggatctccatgttcaaccaaaccctcagaacttagagcaataaatacattcagtcatttatttataaatgaatgacagaatattcaatccaaatagaaacaaccttttgtcagtgatgcaacataacatggagtcttatattgagaaagtgaatatgaatattttaaatagatgcctaggaaatctgtgtttgctgtttacatttaatgtactttgccacattagcagtaccacacttcttttactttcatccttctaagaactaatgaaagatagcttgctattagctttgacatgttgcacatgccattatgttgttctctaagaacaactaaattctctccagtgttcatgtgtgattcctttttcatcattattactttaatgtggatgaatactatttctaggaacttgattatcactgaacagattgcatatgtaaatgcagataattcttgagcaatatagtgaaaatgatttcacaaaaaaaatccatatgtactgtatacatcttcctgaatccaaaattctcctgttatccacacagtttgaaatctcatattaaacagtggtaaatttttaaacattaggacattagctggctgcttctataaatgtacctgtattgtctgcctgctccttttgtggagatgtgtttttgtattggatgtttgggccaatgggaggcttcaagctacaacatattttcccactttaaataatatttaacatatgacaaaccccagacaaggcttttaatatgtataaagaactgcagtgttaggtggtttatttgcaaactgttttcagtgttgtccatttttatggcacctttaacaatattcttgtttccaaagtacaaaaaaaataggttaaataatctagccataactgaatgtcaagcaataaaacaaatgacttttgtgcatagacttaaaaaatacaaattttagacatctgcatgtaaatgcaatctcttgtttactgctttcttcaacttgagcaatcgattccttatttactattaacttaagaacttgtaacggcctgtaaacattttctctcttactcttctttcaaatttacctgtccctgcttttgagtcataatatttaatgttgttctgcacatctctatacagttaactttttggctttcattctgtatagataagaaaatgttatattataaacagcctactcagtgcaaatatttatctgtttatcaaatccacaatatgctgtataataccggttttactatataatctattttagacatagctgtttagaactagagtgtgctatttttgtgtttttctgatgtgtggtgctagacaagttacttttgtgaacaacaaaaattatcccttttattcctagacaataccacctttgggtcttgttaatttcactgagtataactatatatttgtatatatatacatatatatatatatctacctatgcccaactggcagctgtatcagagtgctggatttgggacatgcttttctctttaaatacataatatcattatataaattattctagagtgtatttaattaggataaaattacttccttagtatggatatttgacatctatagggtgaatttgtttataaatatggctatatggaaacttattagcatttactttatgtttgctacttggctttacagcatatctcctaagctgaaaaataatttgccaggccttcaagatcctaaagaaacttgtttaatggagtaatatacttttttttcttattaaggaattgtattactggcacctaacacagttgtattcttagctcctattatagataatgggcatttacataaaatatcctagatggcttgatggcagaataaacctttcccctcctacctgagtcatgagaaggatggagacgtcctctgccataacatgggccataaagcaaattcgacatgggatgttctgtttcagtatgacctcaaccagttccatgaactgagtgaaggaccttcattttcaaagttatttaataagtagcttaattaagcctttctacccattctcccaagatctactggcattattgaaaagcaaagtttatcaaatatctaactaaggatgtagttaaccttattaaatattgattagaattgttctgtaatattactgaatttgtaagatctttagcaaagatttttgagcaatttataaatgtagagcaaatgtttctgtttactgcactttttgtaactgaaggtgataaattctcaagccatgattattggcttccatgcactgcaatatttatccacaattctagacattttccatttttgtggaagagttgctgttaccttaattataaatgcaattgtgtggttaatgagagctaatgctagtagttaaccttttaaagtggattggctacagttgagggagaaatctcttttaatataaatcacatcattccttaactgcctctcttggaaagagattgaaaccttttttttaaagcacgatttagcatcctaagcttcctgagggtagagattgtatctttttgcgtctgcacaatggctagcacatgtcagcatttgacaattgttaaatgataacaagtgtgccccaattaaaacgtttttcctgggttgttttgttaaatttacaaagtaagccaagccttacggttaacattctcctctacaaccaagtattaaagccacatttaaaaagaccacatgaaatgctgattctaattgtgtgtaggtcttgaggattaagcacacaaatttcacaaacttctgtttgagtaaacaaactcagccttctgtaaatatacatgcaagtttggaaacagtaatactgtacctataaatatatgctgtctgttttgtgtacagtatgtaaaaactccttttctgccacactaaaaatgcaagccatttatgggaatcctaaaactagtattgaactaaaactttgctaatgatctttattagaggatcgtccaacttttcacttaccttgggttttcttttcaattcactcttacactagtctgcttatttccagctgtttattttattgagtcctgaatttaaaaaaaaaatattttgattcattttgtaaatacaagctgtacaaaaaagagagatttaatgttgtcttttaaatactccaattttcattctaatatgaatgttgttatattgtacttagaaactgtacctttaatattacattacctttattaaaagtgcattgaacacatcaattttagatgtgctttatgtactgttatcctataataaaacttcagcttctaatggaa

SEQ ID NO: 235587 - DNA, 1407 bp, Artificial Sequence
  derived and/or modified sequence
atgatgtatttcgttatcgccgcaatgaaggctcagatagagattattccatgcaagatctgcggcgataaatcatctggcatccactacggggtcattacttgtgagggttgcaagggctttttcaggcggtcccagcagtccaacgccacatatagctgtccccgccaaaaaaactgtcttattgacagaactagccgcaacagatgtcagcattgccgtctgcagaagtgtctggccgtgggcatgtctagggacgcagtcaaatttggaaggatgtctaagaaacaaagggactccctgtacgcagaggtacagaagcacagaatgcagcagcagcagagagaccatcagcagcagccgggcgaggccgaacccttaacaccaacctacaatattagtgccaatgggttaactgaactgcatgacgacctctccaattatatcgatggccatactccggagggctcaaaagctgattccgctgtttcctctttctacctggacatccagccttcccccgatcaaagcgggctcgatatcaacggcatcaagccagagcccatttgtgactacacaccagcatcagggtttttcccctactgttcatttacgaacggagagacgagcccaacggtcagtatggcggaactcgaacacctcgctcagaatatctccaagtcccatttagaaacatgtcagtatctgagagaagagctccaacagatcacatggcaaacttttctgcaggaagaaattgagaactatcagaacaagcagcgggaagtcatgtggcagctttgcgccattaaaatcacagaagccatacagtacgtggtggaattcgccaagcgaatcgacgggttcatggaactctgccagaacgatcagatagtcctccttaaggccgggagtctcgaagtggtgttcatccgcatgtgccgggcattcgacagtcagaataataccgtgtattttgacggaaagtacgccagccctgatgtctttaagagcttaggatgtgaggacttcatatcatttgtgtttgaattcggcaaatccctgtgtagtatgcatctgaccgaggacgagatagcgctgttctcagccttcgtgctgatgagtgctgaccgttcttggcttcaggagaaagtgaaaattgaaaaactgcagcaaaaaatccaactagcacttcagcatgtgctgcaaaaaaatcaccgagaggatggcatcttgacaaagctgatctgtaaagtgtctactctaagggccttatgcggccgacacacagagaaacttatggctttcaaggccatctatccagatattgttcgcctgcactttcccccactttataaagaactattcacttcagaatttgaacccgccatgcagatcgacggatag

SEQ ID NO: 235588 - DNA, 1407 bp, Artificial Sequence
  derived and/or modified sequence
atgatgtactttgtgattgctgccatgaaggcccagatcgagatcatcccctgcaagatctgtggggacaagagcagcggcatccactacggcgtcatcacctgtgagggctgcaagggcttcttcagaagaagccagcagagcaatgccacctacagctgcccccggcagaagaactgcctgattgacaggaccagcaggaaccgctgccagcactgccgcctgcagaagtgcctggccgtgggcatgagcagagatgctgtgaagtttggccgcatgagcaagaagcagagggacagcctgtatgcagaggtgcagaagcacaggatgcagcagcagcagagggaccaccagcagcagcctggagaggccgagcccctgacccccacctacaacatcagcgccaacggcctgacagagctgcatgatgacctgagcaactacattgatggccacaccccagagggcagcaaggctgacagcgctgtgtcctccttctacctggacatccagcccagcccagaccagagcggcctggacatcaatggcatcaagccagagcccatctgtgactacaccccagccagcggcttcttcccctactgcagcttcaccaacggggagaccagccccaccgtgtccatggccgagctggagcacctggcccagaacatcagcaagagccacctggagacctgccagtacctgcgggaggagctgcagcagatcacctggcagaccttcctgcaggaggagattgagaactaccagaacaagcagcgggaggtgatgtggcagctgtgtgccatcaagatcacagaggccatccagtatgtggtggagtttgccaagagaattgatggcttcatggagctgtgccagaatgaccagatcgtgctgctgaaggccggcagcctggaggtggtgttcatccgcatgtgccgggcctttgacagccagaacaacacagtgtactttgatggcaagtatgccagcccagatgtgttcaagagcctgggctgtgaggacttcatcagctttgtgtttgaatttgggaagagcctgtgcagcatgcacctgacagaagatgaaattgccctcttcagcgcctttgtgctgatgtctgctgaccgctcctggctgcaggagaaggtgaagattgagaagctgcagcagaagatccagctggccctgcagcacgtgctgcagaagaaccaccgggaggatggcatcctgaccaagctgatctgcaaggtgtccaccctgcgggccctgtgtggccgccacacagagaagctgatggccttcaaggccatctacccagacatcgtgcggctgcacttcccccccctgtacaaggagctgttcaccagcgagtttgagcccgccatgcagattgatggatag

SEQ ID NO: 235589 - DNA, 1407 bp, Artificial Sequence
  derived and/or modified sequence
atgatgtacttcgtgatcgccgccatgaaggcccagatcgagatcattccatgcaagatctgcggggacaaaagtagcggtatccactacggcgtaatcacatgtgagggttgcaaggggttcttcagacgctcccagcaaagcaacgcgacctattcctgcccgcggcagaaaaattgtcttatcgaccggaccagccggaaccgatgtcagcactgtcggttgcaaaagtgccttgccgtgggtatgtcccgggatgcagtgaaatttggaagaatgagcaagaaacaacgagacagcctctacgccgaggtccagaaacatcgaatgcagcagcagcagcgggaccaccagcaacagcccggcgaagcagaacctctcacacccacatacaatattagtgccaacgggcttacagaattacatgatgatttgtctaactacatcgatggccacacccccgagggctcaaaagccgatagcgccgttagcagcttctacctggatatccagccttcccctgaccaaagcggcttagatatcaacggtataaagccggagcctatttgtgactatactccggccagcggcttcttcccctattgcagctttaccaatggagagacctcgccaactgtgtctatggccgaacttgagcaccttgcccagaacattagtaagagccacctggaaacctgccagtacctccgtgaagagcttcaacagatcacttggcagacgttcctacaggaagaaattgagaactaccaaaacaagcagagggaggtgatgtggcagctgtgcgctatcaaaatcactgaggccatacaatacgttgtcgaattcgcaaagcggatcgatgggtttatggagctatgccagaatgaccaaatcgttctgctgaaagctgggagtctcgaggtcgtatttatccgcatgtgccgcgccttcgactcgcagaataacacggtctattttgatggaaagtacgcctcacctgacgtgtttaagtcgctgggttgtgaggattttatctccttcgtcttcgagttcggcaaatccctatgttctatgcacctgacagaagatgaaatcgccctattttccgcgttcgtactgatgagtgccgaccgtagctggctacaggagaaggtgaagattgaaaaattgcagcagaagattcaacttgccctccaacacgttctgcagaaaaaccatagagaagacgggattctcacaaagctaatctgtaaggtttccactctacgagccctgtgtgggaggcatactgaaaagttgatggcctttaaggccatctacccggacattgtcaggttacactttccacctctatataaagaactgtttactagcgaatttgagcctgcgatgcaaattgatggctag

SEQ ID NO: 235590 - DNA, 1407 bp, Artificial Sequence
  derived and/or modified sequence
atgatgtatttcgtaatcgccgcaatgaaggctcagattgagattattccatgcaaaatctgtggcgacaagtctagcggaatccactacggggtcattacctgcgaaggctgtaaagggtttttcagaaggtcccagcagagtaatgcgacctatagctgtcccagacaaaagaactgcctcatcgaccggacctcacgaaaccgatgccagcactgtcggttgcaaaaatgtcttgccgtagggatgtcacgcgatgcggtgaaattcggccgtatgagcaaaaaacagcgggattctctgtacgctgaggttcagaagcataggatgcagcagcagcagagggatcatcagcagcagcctggggaggccgagcccttaacccctacgtacaacatatctgctaacggactgaccgaactgcatgacgacctgagtaattacattgacgggcacaccccagaagggtctaaggcagattccgcagtttctagtttctatttggacatccagccttcccccgaccagtctgggctggacatcaatgggattaagcccgaaccaatctgcgattatacacctgcaagtggctttttcccctattgcagtttcaccaatggagaaaccagcccaacagttagtatggccgagcttgaacacttggcacaaaacatttcgaagagtcacctggagacgtgccagtacttacgtgaagagctgcaacagataacttggcagacctttctgcaagaggagattgagaactatcaaaacaaacagagagaggtcatgtggcagctgtgcgcaattaaaatcacagaggccattcagtatgtagttgagtttgctaagcggattgacggcttcatggagctttgtcaaaatgaccagattgttctgctaaaggcgggatctcttgaagtggtgtttatccgaatgtgccgagccttcgattcccagaataatacggtgtattttgatggtaagtacgcctctccagatgttttcaaaagtttggggtgtgaagactttataagcttcgtgttcgagttcggaaaatctctatgctctatgcacctcacagaggacgaaattgccctcttctctgcatttgtcctcatgtctgccgatcgcagctggcttcaggaaaaagtgaagatcgagaagctgcaacagaaaatccagctagctctgcagcacgtcttacaaaagaaccatagggaggacggaatcctgacaaagctaatctgtaaggtgtccacactgagggccctgtgcggtagacacacggaaaaactgatggcctttaaggctatataccccgacattgtgcgactccacttcccacctctgtacaaggagctgttcacctcagaattcgaacccgctatgcagatagatggatag

SEQ ID NO: 235591 - DNA, 1701 bp, Artificial Sequence
  derived and/or modified sequence
tctcggcgggcgggcagctgcggcagctgctgctgtggctcgggcggcggcggcgcggcggcggcagagggggctccggggtcggaccatccgctctccctgcgctctccgcaccgcggcttaaatgatgtattttgtgatcgcagcgatgaaagctcaaattgaaattattccatgcaagatctgtggagacaaatcatcaggaatccattatggtgtcattacatgtgaaggctgcaagggctttttcaggagaagtcagcaaagcaatgccacctactcctgtcctcgtcagaagaactgtttgattgatcgaaccagtagaaaccgctgccaacactgtcgattacagaaatgccttgccgtagggatgtctcgagatgctgtaaaatttggccgaatgtcaaaaaagcagagagacagcttgtatgcagaagtacagaaacaccggatgcagcagcagcagcgcgaccaccagcagcagcctggagaggctgagccgctgacgcccacctacaacatctcggccaacgggctgacggaacttcacgacgacctcagtaactacattgacgggcacacccctgaggggagtaaggcagactccgccgtcagcagcttctacctggacatacagccttccccagaccagtcaggtcttgatatcaatggaatcaaaccagaaccaatatgtgactacacaccagcatcaggcttctttccctactgttcgttcaccaacggcgagacttccccaactgtgtccatggcagaattagaacaccttgcacagaatatatctaaatcgcatctggaaacctgccaatacttgagagaagagctccagcagataacgtggcagacctttttacaggaagaaattgagaactatcaaaacaagcagcgggaggtgatgtggcaattgtgtgccatcaaaattacagaagctatacagtatgtggtggagtttgccaaacgcattgatggatttatggaactgtgtcaaaatgatcaaattgtgcttctaaaagcaggttctctagaggtggtgtttatcagaatgtgccgtgcctttgactctcagaacaacaccgtgtactttgatgggaagtatgccagccccgacgtcttcaaatccttaggttgtgaagactttattagctttgtgtttgaatttggaaagagtttatgttctatgcacctgactgaagatgaaattgcattattttctgcatttgtactgatgtcagcagatcgctcatggctgcaagaaaaggtaaaaattgaaaaactgcaacagaaaattcagctagctcttcaacacgtcctacagaagaatcaccgagaagatggaatactaacaaagttaatatgcaaggtgtctaccttaagagccttatgtggacgacatacagaaaagctaatggcatttaaagcaatatacccagacattgtgcgacttcattttcctccattatacaaggagttgttcacttcagaatttgagccagcaatgcaaattgatgggtaaatgttatcacctaagcacttctagaatgtctgaagtacaaacatgaaaaacaaacaaaaaaattaaccgagacactttatatggccctgcacagacctggagcgccacacactgcacatcttttggtgatcggggtcaggcaaaggaggggaaacaatgaaaacaaataa

SEQ ID NO: 235592 - DNA, 1407 bp, Artificial Sequence
  derived and/or modified sequence
atgatgtacttcgtgatcgccgccatgaaggcccagatcgagatcatcccctgcaagatctgcggcgacaagagcagcggcatccactacggcgtgatcacctgcgagggctgcaagggcttcttcagaagaagccagcagagcaacgccacctacagctgccccagacagaagaactgcctgatcgacagaaccagcagaaacagatgccagcactgcagactgcagaagtgcctggccgtgggcatgagcagagacgccgtgaagttcggcagaatgagcaagaagcagagagacagcctgtacgccgaggtgcagaagcacagaatgcagcagcagcagagagaccaccagcagcagcccggcgaggccgagcccctgacccccacctacaacatcagcgccaacggcctgaccgagctgcacgacgacctgagcaactacatcgacggccacacccccgagggcagcaaggccgacagcgccgtgagcagcttctacctggacatccagcccagccccgaccagagcggcctggacatcaacggcatcaagcccgagcccatctgcgactacacccccgccagcggcttcttcccctactgcagcttcaccaacggcgagaccagccccaccgtgagcatggccgagctggagcacctggcccagaacatcagcaagagccacctggagacctgccagtacctgagagaggagctgcagcagatcacctggcagaccttcctgcaggaggagatcgagaactaccagaacaagcagagagaggtgatgtggcagctgtgcgccatcaagatcaccgaggccatccagtacgtggtggagttcgccaagagaatcgacggcttcatggagctgtgccagaacgaccagatcgtgctgctgaaggccggcagcctggaggtggtgttcatcagaatgtgcagagccttcgacagccagaacaacaccgtgtacttcgacggcaagtacgccagccccgacgtgttcaagagcctgggctgcgaggacttcatcagcttcgtgttcgagttcggcaagagcctgtgcagcatgcacctgaccgaggacgagatcgccctgttcagcgccttcgtgctgatgagcgccgacagaagctggctgcaggagaaggtgaagatcgagaagctgcagcagaagatccagctggccctgcagcacgtgctgcagaagaaccacagagaggacggcatcctgaccaagctgatctgcaaggtgagcaccctgagagccctgtgcggcagacacaccgagaagctgatggccttcaaggccatctaccccgacatcgtgagactgcacttcccccccctgtacaaggagctgttcaccagcgagttcgagcccgccatgcagatcgacggctag

SEQ ID NO: 235593 - protein, 758 aa, Artificial Sequence
  derived and/or modified sequence
MGLADASGPRDTQALLSATQAMDLRRRDYHMERPLLNQEHLEELGRWGSAPRTHQWRTWLQCSRARAYALLLQHLPVLVWLPRYPVRDWLLGDLLSGLSVAIMQLPQGLAYALLAGLPPVFGLYSSFYPVFIYFLFGTSRHISVGTFAVMSVMVGSVTESLAPQALNDSMINETARDAARVQVASTLSVLVGLFQVGLGLIHFGFVVTYLSEPLVRGYTTAAAVQVFVSQLKYVFGLHLSSHSGPLSLIYTVLEVCWKLPQSKVGTVVTAAVAGVVLVVVKLLNDKLQQQLPMPIPGELLTLIGATGISYGMGLKHRFEVDVVGNIPAGLVPPVAPNTQLFSKLVGSAFTIAVVGFAIAISLGKIFALRHGYRVDSNQELVALGLSNLIGGIFQCFPVSCSMSRSLVQESTGGNSQVAGAISSLFILLIIVKLGELFHDLPKAVLAAIIIVNLKGMLRQLSDMRSLWKANRADLLIWLVTFTATILLNLDLGLVVAVIFSLLLVVVRTQMPHYSVLGQVPDTDIYRDVAEYSEAKEVRGVKVFRSSATVYFANAEFYSDALKQRCGVDVDFLISQKKKLLKKQEQLKLKQLQKEEKLRKQAASPKGASVSINVNTSLEDMRSNNVEDCKMMVSSGDKMEDATANGQEDSKAPDGSTLKALGLPQPDFHSLILDLGALSFVDTVCLKSLKNIFHDFREIEVEVYMAACHSPVVSQLEAGHFFDASITKKHLFASVHDAVTFALQHPRPVPDSPVSVTRL

SEQ ID NO: 235594 - DNA, 2277 bp, Artificial Sequence
  derived and/or modified sequence
atgggcctcgccgacgcctccggaccaagggacacgcaggccctgctgagtgctacacaagctatggatctaaggcggagggattaccatatggagcggcccctgctgaatcaagagcacctggaagaactgggcagatggggctccgctcctagaacacatcagtggagaacctggttgcagtgcagcagggctcgcgcatacgctctactgttgcagcacctgcctgtcctggtttggttgccacgttatcccgtgagagactggcttctgggtgatcttcttagtgggctgagcgtggccataatgcagctgccacaaggtctggcctacgcccttctagccgggctcccacctgtgttcggactgtacagcagtttctatccggtgttcatctactttctgttcgggacgtcccgccatatatctgtgggcactttcgctgtcatgagcgtcatggtgggcagtgtgacggagtctctggccccccaggcacttaacgacagcatgatcaacgaaaccgcaagggacgccgccagagtccaggtcgcttccactctttccgtgctggtgggcctgttccaggtggggctcggcttgattcactttggctttgtggtgacgtatcttagtgagcctctggtgagagggtacacgaccgccgcggccgtgcaagtctttgtgtctcagctgaagtatgtcttcggcctgcacctctccagccatagcggccctctgagcctgatttatacagtgctcgaagtatgttggaaactcccacagagtaaggttggaacggttgtgacagcagctgtcgctggggtggttctggtcgtcgtgaaactgctgaacgacaagcttcagcagcagcttcccatgccaatacccggggaacttctgacactgataggggctactggtatttcgtatggcatgggactgaaacatagattcgaagttgatgtggtcgggaacattcccgcagggcttgtaccaccggttgctccaaacacccagctctttagcaaattggttggctcagcctttacgatcgctgtggtgggctttgctatagctattagcttaggtaaaatttttgcgctccgtcatggttatagagtcgactcaaaccaggaactggtcgcactgggactatctaatctcatcggcggtatctttcagtgcttccccgtgtcctgcagcatgtcacgaagtctggtgcaagaatctaccggaggaaatagtcaggtggccggtgcaatcagttcattatttattctgctaatcatcgtcaaacttggtgagctgtttcacgacttgccgaaggctgttctggccgctataatcatcgtgaacctgaaaggcatgttgagacaactgtctgacatgaggtctctgtggaaggcaaacagggccgatctactcatctggctggtgaccttcaccgctaccatacttctcaatctggacttgggcctggtggtcgccgtgatcttctctttactgctggtggtggtccgaacacagatgcctcattacagcgtgttaggtcaggtcccagacacagatatctaccgggacgtcgccgagtatagcgaagctaaggaagtccgaggcgtgaaagtttttcgctcctccgccaccgtttatttcgctaacgccgagttctactccgacgccctcaagcagcggtgcggggtggacgttgattttctgattagccagaagaaaaagttgcttaagaagcaggagcaacttaagctgaaacagctgcagaaggaagagaaactgaggaagcaggccgcttctccgaaaggagcgtcagtgtccatcaatgtgaatacaagcctggaggacatgcggagcaacaacgtcgaagactgtaagatgatggtgagctccggagataagatggaggacgcaaccgccaatggccaagaggactcaaaagctcccgatggtagcacattgaaagccctggggctcccacagcctgattttcacagtctgattttggatcttggggccctttcttttgtcgacaccgtctgcttgaagagtctgaagaacatctttcacgactttcgggagatcgaggtcgaggtttatatggccgcctgccactctccagtcgtttctcagcttgaggctggccacttcttcgacgccagtataacgaaaaagcatttgttcgcaagtgttcatgacgcagtgacatttgccctccagcaccccagaccagtgcccgattccccagtttctgtgacacgactgtag

SEQ ID NO: 235595 - DNA, 2277 bp, Artificial Sequence
  derived and/or modified sequence
atgggcctggctgatgccagcggcccccgggacacccaggccctgctgagcgccacccaggccatggacctgcggcggcgggactaccacatggagcggcccctgctgaaccaggagcacctggaggagctgggccgctggggcagcgcccccaggacccaccagtggaggacctggctgcagtgcagccgggcccgggcctatgccctgctgctgcagcacctgcctgtgctggtgtggctgccccgctaccctgtgcgggactggctgctgggggacctgctgagcggcctgtctgtggccatcatgcagctgccccagggcctggcctatgccctgctggccggcctgccccctgtgtttggcctgtacagcagcttctaccctgtgttcatctacttcctgtttggcaccagccgccacatctctgtgggcacctttgctgtgatgtctgtgatggtgggctctgtgacagagagcctggccccccaggccctgaatgacagcatgatcaatgaaacagccagagatgctgcccgggtgcaggtggccagcaccctgtctgtgctggtgggcctcttccaggtgggcctgggcctcatccactttggatttgtggtgacctacctgtctgagcccctggtgcggggctacaccacagctgctgctgtgcaggtgtttgtgtcccagctgaagtatgtgtttggcctgcacctgagcagccacagcggccccctgagcctcatctacacagtgctggaggtgtgctggaagctgccccagagcaaggtgggcaccgtggtgacagctgctgtggccggcgtggtgctggtggtggtgaagctgctgaatgacaagctgcagcagcagctgcccatgcccatccctggagagctgctgaccctgattggagccaccggcatctcctatggcatgggcctgaagcacagatttgaggtggatgtggtgggcaacatcccagctggcctggtgccccctgtggcccccaacacccagctgttcagcaagctggtgggcagcgccttcaccatcgctgtggtgggctttgccatcgccatcagcctgggcaagatctttgccctgcggcacggctacagagtggacagcaaccaggagctggtggccctgggcctgagcaacctgattggaggcatcttccagtgcttccctgtgtcctgcagcatgagccgcagcctggtgcaggagagcactggaggcaacagccaggtggccggggccatcagcagcctcttcatcctgctgatcatcgtgaagctgggggagctgttccatgacctgcccaaggctgtgctggccgccatcatcatcgtgaacctgaagggcatgctgcggcagctgagtgacatgaggagcctgtggaaggccaacagagctgacctgctgatctggctggtgaccttcaccgccaccatcctgctgaacctggacctgggcctggtggtggccgtcatcttcagcctgctgctggtggtggtgaggacccagatgccccactacagcgtgctgggccaggtgcctgacacagacatctacagagatgtggccgagtacagcgaggccaaggaggtgcggggcgtgaaggtgttccgcagcagcgccaccgtgtactttgccaatgctgagttctacagtgatgccctgaagcagagatgtggggtggatgtggacttcctgatcagccagaagaagaagctgctgaagaagcaggagcagctgaagctgaagcagctgcagaaggaggagaagctgaggaagcaggccgccagccccaagggggcctctgtgtccatcaacgtgaacaccagcctggaggacatgaggagcaacaacgtggaggactgcaagatgatggtgagcagcggggacaagatggaggatgccacagccaacggccaggaggacagcaaggccccagatggcagcaccctgaaggccctgggcctgccccagcctgacttccacagcctcatcctggacctgggcgccctgagctttgtggacacagtgtgcctgaagagcctgaagaacatcttccatgacttccgggagattgaggtggaggtgtacatggccgcctgccacagccctgtggtgtcccagctggaggccggccacttctttgatgccagcatcaccaagaagcacctgtttgcctctgtgcatgatgctgtgacctttgccctgcagcaccccaggcctgtgcctgacagccctgtgtctgtgacccggctgtag

SEQ ID NO: 235596 - DNA, 2277 bp, Artificial Sequence
  derived and/or modified sequence
atgggcctggccgacgccagcggcccccgggacacccaggccctgctttcagccactcaggccatggacctcaggcgcagagattatcatatggaaagacccctgctgaatcaagagcacctggaggagctaggtcgctggggctctgcgccacgcacccatcaatggcggacctggctgcagtgttcaagggctagagcatacgcactgttgctacaacacctgcccgttttggtctggttgcccaggtatccagtacgggactggctgctgggggaccttttgtccggactgagtgtagctatcatgcagctgccccaggggctagcttacgctctcctggcggggctgccccctgtgtttgggctgtactcatctttttaccctgtctttatctattttctatttgggacctcccgccacattagcgtcggtacttttgcagtaatgtcggttatggtgggctctgtgaccgagtccctggccccgcaggcccttaacgactccatgataaatgaaacagcacgggatgccgcccgagtgcaggttgcatcgacactcagtgtgctggtgggactgttccaggtcggccttgggttaattcatttcggcttcgtcgttacatatctatccgagccattagtcagagggtacaccacagccgcggcggtgcaggtgtttgtatcgcagctgaagtatgtcttcgggctccatcttagtagtcatagcggtccgctgagtcttatttacacagtgctggaagtgtgttggaagctgccacagagcaaggtgggcacagtggtaacagcagccgttgccggcgtagttttggtagtcgtaaagctgcttaacgacaaactccagcagcaacttcccatgcctatcccaggagagctcctgactctcataggcgccacgggcatctcctatgggatgggtctcaagcacagattcgaggtcgatgttgtgggaaatatcccagccggtctggtcccgccagtcgcccctaatacccagctgtttagcaagctggttggctctgccttcactattgccgtggtaggctttgccatcgccattagtctgggcaagattttcgctcttagacatggctacagggtggatagcaatcaagaactggttgcactcggcctctcaaatctaattggaggcattttccagtgcttccctgtaagctgttcgatgagtcgtagcctggtacaagagagcacaggcggtaattcacaagtggcaggagcaatctcatcactctttatcctgctcattattgtaaaactcggggaactttttcatgatctccctaaggctgtgttggccgccattatcattgtgaaccttaaagggatgctgagacaactgagcgatatgaggagtctgtggaaagctaacagagcagaccttctgatctggttagtgacctttactgcgaccattctcctgaatctggatctcgggctagttgtggctgtgattttctctctgcttctggtggttgtccggactcaaatgccacactacagcgtgctggggcaggttcctgatacagatatttaccgcgacgtcgcagaatatagtgaggctaaggaggtacggggcgtaaaagtgtttagaagctccgccacggtgtatttcgccaatgcagagttttattccgatgcactgaaacaacggtgtggagtggacgtcgacttcctgatctcccagaagaagaagttgctgaagaagcaagagcagctgaaacttaagcagctgcagaaggaggagaaactgcggaagcaggccgcttcacctaaaggagcctccgtgagcatcaatgtgaatacctcactcgaagatatgcgcagcaacaacgtcgaagactgcaagatgatggtctcaagcggcgacaaaatggaggatgccactgcaaatggacaggaagatagcaaagcccctgacggttcaaccctgaaagcactggggctaccgcagcctgattttcactccctgattctggatttgggcgccctgagtttcgtcgacacagtgtgcctgaaatctctcaagaacatattccacgacttcagagagatcgaggttgaggtttatatggcagcttgccatagccccgtggtgtcacagttggaggccgggcatttttttgacgccagtataactaagaaacacttattcgcctctgtgcacgacgctgtaacattcgcactccagcacccacggcccgtcccagattcacccgttagcgtcaccagactatag

SEQ ID NO: 235597 - DNA, 2277 bp, Artificial Sequence
  derived and/or modified sequence
atgggtctggcagatgctagtgggcctcgagacactcaagctctattgagcgcaacccaggcgatggacctgcgccgtcgtgattaccatatggagcgcccattattgaaccaggagcacttggaggagttaggtcggtggggcagtgcccctcggacacaccagtggagaacttggctgcagtgttcaagggctcgcgcttacgcactgttgttgcaacaccttccagtcctcgtgtggctccctcggtaccccgtgagggattggctcctgggagatttgctctctgggctctcagttgccatcatgcaactaccacagggcctcgcgtacgctttgctggcagggctcccaccagtatttggcttgtacagttccttctatcccgtttttatctactttctgttcggcacttcacgccatataagtgtgggtacctttgcagtgatgtctgtgatggtgggaagcgttacagaatctctggccccacaggcactcaacgacagcatgatcaacgagactgcccgagatgcggcaagagttcaagtggcgtctactctgtccgtcttagtagggttgttccaggtggggctcggactgattcattttggatttgtggtcacgtatctttctgagccactcgtgcgtggctacacgaccgcagcagccgtccaagtcttcgtgagccagctgaagtacgtttttggccttcacttgtctagccactctggccctctgtcgttgatatataccgttctggaagtttgttggaagctgccccaatccaaagtgggcacagtcgtaacagctgctgtggccggtgttgttctcgtggtagtgaagctcctgaatgacaaactgcagcagcagcttccgatgccaataccgggagagctccttacgttgatcggagccacaggcattagctacggaatggggttaaaacatcggttcgaggtggatgtggtcggaaatattcctgccggacttgtcccgccagtggccccaaacacccagctctttagtaaactggttgggtccgccttcacgattgcggtggtaggatttgccattgcaataagtctgggaaagatctttgccttacggcacggttaccgcgttgactcgaatcaggaactcgttgcgttggggctctcgaatctcatcggaggaatttttcagtgtttccctgtgagctgcagcatgagtagatccctggtgcaggaaagtacagggggaaattctcaggtggcgggagccatctcttccctttttattcttctcattatcgtgaagctgggcgaactgttccacgatctaccgaaggccgtgctggccgcaattattatcgttaacctcaaggggatgttgagacagcttagtgatatgcggtcactatggaaggccaatcgcgcagacctgctgatttggttagtgactttcacagctaccattctgctcaatctggatctgggcctcgtggtggcggtgatcttctcactgctgctcgtggtagtacgtactcagatgcctcactattcggtcctcggtcaggtgcccgatacggacatctacagggatgtggccgagtacagcgaggcaaaggaagtgcgcggtgtcaaagtgtttagatcttccgccaccgtttattttgccaatgccgagttctattccgatgccttaaaacaaaggtgtggggtggacgtcgattttcttataagccagaagaagaagctgctgaaaaagcaggaacaattaaaactgaagcaacttcagaaggaggagaagctgcgaaagcaggcagctagtcccaaaggggcttcagtgagcattaatgttaatactagcctcgaagacatgcggtctaacaatgtggaggactgtaagatgatggtctcttctggggataaaatggaagacgcgaccgccaacggccaagaagattctaaggccccagacggctccacactgaaggcccttggcctcccacagccagacttccactcactcatcttggatctaggcgcattatccttcgtcgacactgtctgtcttaagagcttgaagaatatctttcatgactttcgggaaatcgaagtggaggtgtatatggccgcatgtcactcccctgtggtgtcacagctggaggccggacatttctttgatgcatctattacaaagaagcatttattcgcctcggtgcatgatgccgtgacctttgctctgcaacatccaagaccagtgcccgactctcccgtctctgtgactcggctgtag

SEQ ID NO: 235598 - DNA, 2630 bp, Artificial Sequence
  derived and/or modified sequence
ggcctcacccggtcccggcgccgccttccggagcgtagcggcctctagctcgagcagcaggagcagcccgcaccggacaacttgcgagccatggggctggcggatgcgtcgggaccgagggacacacaggcactgctgtctgcaacacaagcaatggacctgcggaggcgagactaccacatggaacggccgctgctgaaccaggagcatttggaggagctggggcgctggggctcagcacctaggacccaccagtggcggacctggttgcagtgctcccgtgctcgggcctatgcccttctgctccaacacctcccggttttggtctggttaccccggtatcctgtgcgtgactggctcctgggtgacctgttatccggcctgagtgtggccatcatgcagcttccgcagggcttggcctacgccctcctggctggattgccccccgtgtttggcctctatagctccttctaccctgtcttcatctacttcctgtttggcacttcccggcacatctccgtggggacctttgctgtcatgtctgtgatggtgggcagtgtgacagaatccctggccccgcaggccttgaacgactccatgatcaatgagacagccagagatgctgcccgggtacaggtggcctccacactcagtgtcctggttggcctcttccaggtggggctgggcctgatccacttcggcttcgtggtcacctacctgtcagaacctcttgtccgaggctataccacagctgcagctgtgcaggtcttcgtctcacagctcaagtatgtgtttggcctccatctgagcagccactctgggccactgtccctcatctatacagtgctggaggtctgctggaagctgccccagagcaaggttggcaccgtggtcactgcagctgtggctggggtggtgctcgtggtggtgaagctgttgaatgacaagctgcagcagcagctgcccatgccgatacccggggagctgctcacgctcatcggggccacaggcatctcctatggcatgggtctaaagcacagatttgaggtagatgtcgtgggcaacatccctgcagggctggtgcccccagtggcccccaacacccagctgttctcaaagctcgtgggcagcgccttcaccatcgctgtggttgggtttgccattgccatctcactggggaagatcttcgccctgaggcacggctaccgggtggacagcaaccaggagctggtggccctgggcctcagtaaccttatcggaggcatcttccagtgcttccccgtgagttgctctatgtctcggagcctggtacaggagagcaccgggggcaactcgcaggttgctggagccatctcttcccttttcatcctcctcatcattgtcaaacttggggaactcttccatgacctgcccaaggcggtcctggcagccatcatcattgtgaacctgaagggcatgctgaggcagctcagcgacatgcgctccctctggaaggccaatcgggcggatctgcttatctggctggtgaccttcacggccaccatcttgctgaacctggaccttggcttggtggttgcggtcatcttctccctgctgctcgtggtggtccggacacagatgccccactactctgtcctggggcaggtgccagacacggatatttacagagatgtggcagagtactcagaggccaaggaagtccggggggtgaaggtcttccgctcctcggccaccgtgtactttgccaatgctgagttctacagtgatgcgctgaagcagaggtgtggtgtggatgtcgacttcctcatctcccagaagaagaaactgctcaagaagcaggagcagctgaagctgaagcaactgcagaaagaggagaagcttcggaaacaggctgcctcccccaagggcgcctcagtttccattaatgtcaacaccagccttgaagacatgaggagcaacaacgttgaggactgcaagatgatggtgagctcaggagataagatggaagatgcaacagccaatggtcaagaagactccaaggccccagatgggtccacactgaaggccctgggcctgcctcagccagacttccacagcctcatcctggacctgggtgccctctcctttgtggacactgtgtgcctcaagagcctgaagaatattttccatgacttccgggagattgaggtggaggtgtacatggcggcctgccacagccctgtggtcagccagcttgaggctgggcacttcttcgatgcatccatcaccaagaagcatctctttgcctctgtccatgatgctgtcacctttgccctccaacacccgaggcctgtccccgacagccctgtttcggtcaccagactctgaacatgctacatcctgcccaagactgcacctctggaggtgcagggcacccttgagaagcccctcacccctaggccgcctccaggtgctacccaggagtcccctccatgtacacacacacaactcagggaaggaggtcctgggactccaagttcagcgctccaggtctgggacagggcctgcatgcagtcaggctggcagtggcgcggtacagggagggaactggtgcatattttagcctcaggaataaagatttgtctgctcaa

SEQ ID NO: 235599 - DNA, 2277 bp, Artificial Sequence
  derived and/or modified sequence
atgggcctggccgacgccagcggccccagagacacccaggccctgctgagcgccacccaggccatggacctgagaagaagagactaccacatggagagacccctgctgaaccaggagcacctggaggagctgggcagatggggcagcgcccccagaacccaccagtggagaacctggctgcagtgcagcagagccagagcctacgccctgctgctgcagcacctgcccgtgctggtgtggctgcccagataccccgtgagagactggctgctgggcgacctgctgagcggcctgagcgtggccatcatgcagctgccccagggcctggcctacgccctgctggccggcctgccccccgtgttcggcctgtacagcagcttctaccccgtgttcatctacttcctgttcggcaccagcagacacatcagcgtgggcaccttcgccgtgatgagcgtgatggtgggcagcgtgaccgagagcctggccccccaggccctgaacgacagcatgatcaacgagaccgccagagacgccgccagagtgcaggtggccagcaccctgagcgtgctggtgggcctgttccaggtgggcctgggcctgatccacttcggcttcgtggtgacctacctgagcgagcccctggtgagaggctacaccaccgccgccgccgtgcaggtgttcgtgagccagctgaagtacgtgttcggcctgcacctgagcagccacagcggccccctgagcctgatctacaccgtgctggaggtgtgctggaagctgccccagagcaaggtgggcaccgtggtgaccgccgccgtggccggcgtggtgctggtggtggtgaagctgctgaacgacaagctgcagcagcagctgcccatgcccatccccggcgagctgctgaccctgatcggcgccaccggcatcagctacggcatgggcctgaagcacagattcgaggtggacgtggtgggcaacatccccgccggcctggtgccccccgtggcccccaacacccagctgttcagcaagctggtgggcagcgccttcaccatcgccgtggtgggcttcgccatcgccatcagcctgggcaagatcttcgccctgagacacggctacagagtggacagcaaccaggagctggtggccctgggcctgagcaacctgatcggcggcatcttccagtgcttccccgtgagctgcagcatgagcagaagcctggtgcaggagagcaccggcggcaacagccaggtggccggcgccatcagcagcctgttcatcctgctgatcatcgtgaagctgggcgagctgttccacgacctgcccaaggccgtgctggccgccatcatcatcgtgaacctgaagggcatgctgagacagctgagcgacatgagaagcctgtggaaggccaacagagccgacctgctgatctggctggtgaccttcaccgccaccatcctgctgaacctggacctgggcctggtggtggccgtgatcttcagcctgctgctggtggtggtgagaacccagatgccccactacagcgtgctgggccaggtgcccgacaccgacatctacagagacgtggccgagtacagcgaggccaaggaggtgagaggcgtgaaggtgttcagaagcagcgccaccgtgtacttcgccaacgccgagttctacagcgacgccctgaagcagagatgcggcgtggacgtggacttcctgatcagccagaagaagaagctgctgaagaagcaggagcagctgaagctgaagcagctgcagaaggaggagaagctgagaaagcaggccgccagccccaagggcgccagcgtgagcatcaacgtgaacaccagcctggaggacatgagaagcaacaacgtggaggactgcaagatgatggtgagcagcggcgacaagatggaggacgccaccgccaacggccaggaggacagcaaggcccccgacggcagcaccctgaaggccctgggcctgccccagcccgacttccacagcctgatcctggacctgggcgccctgagcttcgtggacaccgtgtgcctgaagagcctgaagaacatcttccacgacttcagagagatcgaggtggaggtgtacatggccgcctgccacagccccgtggtgagccagctggaggccggccacttcttcgacgccagcatcaccaagaagcacctgttcgccagcgtgcacgacgccgtgaccttcgccctgcagcaccccagacccgtgcccgacagccccgtgagcgtgaccagactgtag

SEQ ID NO: 235600 - protein, 275 aa, Artificial Sequence
  derived and/or modified sequence
MASFPPRVNEKEIGKLLLNLVDHTEVVRDLTFAPDGSLILVSASRDKTLRVWDLKDDGNMMKVLRGHQNWVYSCAFSPDSSMLCSVGASKAVFLWNMDKYTMIRKLEGHHHDVVACDFSPDGALLATASYDTRVYIWDPHNGDILMEFGHLFPPPTPIFAGGANDRWVRSVSFSHDGLHVASLADDKMVRFWRIDEDYPVQVAPLSNGLCCAFSTDGSVLAAGTHDGSVYFWATPRQVPSLQHLCRMSIRRVMPTQEVQELPIPSKLLEFLSYRI

SEQ ID NO: 235601 - DNA, 828 bp, Artificial Sequence
  derived and/or modified sequence
atggccagcttcccccccagagtgaacgagaaggagatcggcaagctgctgctgaacctggtggaccacaccgaggtggtgagagacctgaccttcgcccccgacggcagcctgatcctggtgagcgccagcagagacaagaccctgagagtgtgggacctgaaggacgacggcaacatgatgaaggtgctgagaggccaccagaactgggtgtacagctgcgccttcagccccgacagcagcatgctgtgcagcgtgggcgccagcaaggccgtgttcctgtggaacatggacaagtacaccatgatcagaaagctggagggccaccaccacgacgtggtggcctgcgacttcagccccgacggcgccctgctggccaccgccagctacgacaccagagtgtacatctgggacccccacaacggcgacatcctgatggagttcggccacctgttccccccccccacccccatcttcgccggcggcgccaacgacagatgggtgagaagcgtgagcttcagccacgacggcctgcacgtggccagcctggccgacgacaagatggtgagattctggagaatcgacgaggactaccccgtgcaggtggcccccctgagcaacggcctgtgctgcgccttcagcaccgacggcagcgtgctggccgccggcacccacgacggcagcgtgtacttctgggccacccccagacaggtgcccagcctgcagcacctgtgcagaatgagcatcagaagagtgatgcccacccaggaggtgcaggagctgcccatccccagcaagctgctggagttcctgagctacagaatctag

SEQ ID NO: 235602 - DNA, 828 bp, Artificial Sequence
  derived and/or modified sequence
atggcatcctttccacctagagttaacgagaaggagattggaaagctgcttctgaacttggtggatcataccgaggtagtgcgggacttgacctttgccccagatggctccctgatcttggtttctgcatcccgagacaagacattgcgtgtatgggacctgaaggatgatggaaatatgatgaaagtacttaggggtcatcagaattgggtgtattcctgcgccttctctcccgatagctccatgctgtgttcagtcggcgcaagtaaagcagtgttcctatggaacatggacaagtacaccatgatccgcaaactggaaggccatcaccacgatgtggtcgcatgtgacttttcaccggatggtgctctgctcgctacagcctcctatgacacacgggtctatatatgggaccctcataacggcgacattctgatggagttcggccacctgttccctccccctacacccattttcgctggcggcgctaatgacagatgggtgagatcagtgagctttagccatgatgggctccacgtcgcgagcctggccgacgacaagatggtgagattttggagaattgatgaggattacccagttcaggtcgctcccctctccaatggactatgttgcgccttttcaacagacggctcagtgttagctgccggtacacatgacggctccgtgtatttttgggcgacaccccgacaggtgccatccctgcaacacctctgtcgcatgagtataagacgggtgatgccaacgcaggaagtgcaggagctgcctatcccgtcgaaactgctggaatttctttcctaccggatctag

SEQ ID NO: 235603 - DNA, 828 bp, Artificial Sequence
  derived and/or modified sequence
atggccagcttccccccccgggtgaatgagaaggagatcggcaagctgctgctgaacctggtggaccacacagaggtggtgcgggacctgacctttgccccagatggcagcctcatcctggtgtctgccagccgggacaagaccctgcgggtgtgggacctgaaggatgatggcaacatgatgaaggtgctgcggggccaccagaactgggtgtacagctgtgccttctccccagacagctccatgctgtgcagcgtgggcgccagcaaggctgtgttcctgtggaacatggacaagtacaccatgatcaggaagctggagggccaccaccatgatgtggtggcctgtgacttctccccagatggagccctgctggccacagccagctatgacaccagggtgtacatctgggacccccacaatggagacatcctgatggagtttggccacctgtttcctccacccacccccatctttgctgggggcgccaatgaccgctgggtgcgctctgtgtccttcagccatgatggcctgcacgtggccagcctggctgatgacaagatggtgcgcttctggagaattgatgaggactaccctgtgcaggtggcccccctgagcaatggcctgtgctgtgccttcagcacagatggctctgtgctggccgccggcacccatgatggctctgtgtacttctgggccaccccccggcaggtgcccagcctgcagcacctgtgcaggatgagcatccggcgggtgatgcccacccaggaggtgcaggagctgcccatccccagcaagctgctggagttcctgagctaccgcatctag

SEQ ID NO: 235604 - DNA, 828 bp, Artificial Sequence
  derived and/or modified sequence
atggccagcttccccccccgggtgaacgagaaggagatcggcaagttgctgttgaaccttgtcgatcacacagaagtagtccgagatctgactttcgccccagatggctccctaattctggtatccgctagccgcgataagacactgcgggtctgggatctgaaagatgatggcaatatgatgaaggtgctacggggccaccaaaactgggtctactcctgtgcattcagcccggatagttctatgttgtgttccgtcggagcctctaaggctgtgttcctgtggaatatggataagtacacaatgatcagaaagttggagggccatcaccacgatgtggtggcgtgtgatttttcacccgacggcgccctgctggcaaccgcgtcatacgacacacgtgtctacatctgggacccacacaatggcgacattctgatggagtttggccacctgttcccgccccctacccccattttcgcaggaggcgcgaacgatagatgggtgcgcagtgtgagcttcagccatgatggtttacacgtcgcatcactggcggatgataaaatggtgagattctggcgcattgatgaggattacccggtacaggttgcgccattgagcaatgggctgtgctgtgctttctctaccgacggttcagtattggctgcaggcactcacgacggctcagtctatttttgggccacccctcgtcaagtcccctccctccagcacctttgcagaatgagtattcgtcgagtgatgccgactcaggaggtccaggagctgcctatccccagcaagctactcgaattccttagctaccgtatatag

SEQ ID NO: 235605 - DNA, 828 bp, Artificial Sequence
  derived and/or modified sequence
atggccagcttcccaccaagagtgaatgagaaagagatcggcaagcttttgctcaatctggtggatcacaccgaggtcgtaagggacctgaccttcgctccggatgggtcacttattcttgtgtccgcttcaagagacaagaccctgcgggtatgggatttgaaggacgatggcaatatgatgaaagtgcttcggggtcaccagaactgggtttactcatgtgctttttctcccgacagttcaatgctatgttcagtgggggctagcaaggccgtcttcctttggaatatggacaaatacacaatgatccgcaagctggaaggacaccaccacgatgtggtggcctgtgacttttcgcctgatggagcactgctggcaacagcctcctacgacacccgcgtgtatatatgggacccacacaatggcgatatcctgatggaattcggccacttgtttccccctcccacaccaatctttgccggaggcgctaatgaccggtgggttcgtagcgtctctttttcccacgatggtctgcacgtggcctccttagccgacgataaaatggtgagattttggcggattgacgaggattatccagtacaagttgctccattgtccaatggattgtgctgcgccttctcaaccgatggaagcgtcctggctgctggcacccatgatggatcagtgtacttctgggccacgccaagacaggttccatctctccagcatttgtgtcggatgtcgattagacgagtcatgccaactcaggaggttcaggagttacctatcccttctaaattactggagtttctgagttacaggatctag

SEQ ID NO: 235606 - DNA, 1611 bp, Artificial Sequence
  derived and/or modified sequence
cggcgctttaggggaactgtcttcctccgcaggcgcgaggctgggtacagggtctattgtctgtggttgactccgtactttggtctgaggccttcgggagctttcccgaggcagttagcagaagccgcagcggccgcccccgcccgtctcctctgtccctgggcccgggagggaccaacttggcgtcacgcccctcagcggtcgccactctcttctctgttgttgggtccgcatcgtattcccggaatcagacggtgccccatagatggccagctttcccccgagggtcaacgagaaagagatcggaaaactcctccttaacttggtagatcatactgaagtggtcagagatttaacttttgctccagatggaagcttgatcctggtgtcagcttcaagagacaaaactctcagagtatgggacctgaaagatgatggaaacatgatgaaagtattgagggggcatcagaattgggtgtacagctgtgcattctctcctgactcttctatgctgtgttcagtcggagccagtaaagcagttttcctttggaatatggataaatacaccatgatacggaaactagaaggacatcaccatgatgtggtagcttgtgacttttctcctgatggagcattactggctactgcatcttatgatactcgagtatatatctgggatccacataatggagacattctgatggaatttgggcacctgtttcccccacctactccaatatttgctggaggagcaaatgaccggtgggtacgatctgtatcttttagccatgatggactgcatgttgcaagccttgctgatgataaaatggtgaggttctggagaattgatgaggattatccagtgcaagttgcacctttgagcaatggtctttgctgtgccttctctactgatggcagtgttttagctgctgggacacatgacggaagtgtgtatttttgggccactccacggcaggtccctagcctgcaacatttatgtcgcatgtcaatccgaagagtgatgcccacccaagaagttcaggagctgccgattccttccaagcttttggagtttctctcgtatcgtatttagaagattctgccttccctagtagtagggactgacagaatacacttaacacaaacctcaagctttactgacttcaattatctgtttttaaagacgtagaagatttatttaatttgatatgttcttgtactgcattttgatcagttgagcttttaaaatattatttatagacaatagaagtatttctgaacatatcaaatataaatttttttaaagatctaactgtgaaaacatacatacctgtacatatttagatataagctgctatatgttgaatggacccttttgcttttctgatttttagttctgacatgtatatattgcttcagtagagccacaatatgtatctttgctgtaaagtgcaaggaaattttaaattctgggacactgagttagatggtaaatactgacttacgaaagttgaattgggtgaggcgggcaaatcacctgaggtcagcagtttgagactagcctggcaaacatgatgaaaccctgtctctactaaaaatacaaaaaaaaaa

SEQ ID NO: 235607 - protein, 663 aa, Artificial Sequence
  derived and/or modified sequence
MTGAKRKKKSMLWSKMHTPQCEDIIQWCRRRLPILDWAPHYNLKENLLPDTVSGIMLAVQQVTQGLAFAVLSSVHPVFGLYGSLFPAIIYAIFGMGHHVATGTFALTSLISANAVERIVPQNMQNLTTQSNTSVLGLSDFEMQRIHVAAAVSFLGGVIQVAMFVLQLGSATFVVTEPVISAMTTGAATHVVTSQVKYLLGMKMPYISGPLGFFYIYAYVFENIKSVRLEALLLSLLSIVVLVLVKELNEQFKRKIKVVLPVDLVLIIAASFACYCTNMENTYGLEVVGHIPQGIPSPRAPPMNILSAVITEAFGVALVGYVASLALAQGSAKKFKYSIDDNQEFLAHGLSNIVSSFFFCIPSAAAMGRTAGLYSTGAKTQVACLISCIFVLIVIYAIGPLLYWLPMCVLASIIVVGLKGMLIQFRDLKKYWNVDKIDWGIWVSTYVFTICFAANVGLLFGVVCTIAIVIGRFPRAMTVSIKNMKEMEFKVKTEMDSETLQQVKIISINNPLVFLNAKKFYTDLMNMIQKENACNQPLDDISKCEQNTLLNSLSNGNCNEEASQSCPNEKCYLILDCSGFTFFDYSGVSMLVEVYMDCKGRSVDVLLAHCTASLIKAMTYYGNLDSEKPIFFESVSAAISHIHSNKASYKLLFDNLDLPTMPPL

SEQ ID NO: 235608 - protein, 207 aa, Artificial Sequence
  derived and/or modified sequence
MTGAKRKKKSMLWSKMHTPQCEDIIQWCRRRLPILDWAPHYNLKENLLPDTVSGIMLAVQQVTQGLAFAVLSSVHPVFGLYGSLFPAIIYAIFGMGHHVATGTFALTSLISANAVERIVPQNMQNLTTQSNTSVLGLSDFEMQRIHVAAAVSFLGGVIQVAMFVLQLGSATFVVTEPVISAMTTGAATHVVTSQVKYLLGMKMPYIS

SEQ ID NO: 235609 - DNA, 1992 bp, Artificial Sequence
  derived and/or modified sequence
atgaccggcgccaagagaaagaagaagagcatgctgtggagcaagatgcacaccccccagtgcgaggacatcatccagtggtgcagaagaagactgcccatcctggactgggccccccactacaacctgaaggagaacctgctgcccgacaccgtgagcggcatcatgctggccgtgcagcaggtgacccagggcctggccttcgccgtgctgagcagcgtgcaccccgtgttcggcctgtacggcagcctgttccccgccatcatctacgccatcttcggcatgggccaccacgtggccaccggcaccttcgccctgaccagcctgatcagcgccaacgccgtggagagaatcgtgccccagaacatgcagaacctgaccacccagagcaacaccagcgtgctgggcctgagcgacttcgagatgcagagaatccacgtggccgccgccgtgagcttcctgggcggcgtgatccaggtggccatgttcgtgctgcagctgggcagcgccaccttcgtggtgaccgagcccgtgatcagcgccatgaccaccggcgccgccacccacgtggtgaccagccaggtgaagtacctgctgggcatgaagatgccctacatcagcggccccctgggcttcttctacatctacgcctacgtgttcgagaacatcaagagcgtgagactggaggccctgctgctgagcctgctgagcatcgtggtgctggtgctggtgaaggagctgaacgagcagttcaagagaaagatcaaggtggtgctgcccgtggacctggtgctgatcatcgccgccagcttcgcctgctactgcaccaacatggagaacacctacggcctggaggtggtgggccacatcccccagggcatccccagccccagagccccccccatgaacatcctgagcgccgtgatcaccgaggccttcggcgtggccctggtgggctacgtggccagcctggccctggcccagggcagcgccaagaagttcaagtacagcatcgacgacaaccaggagttcctggcccacggcctgagcaacatcgtgagcagcttcttcttctgcatccccagcgccgccgccatgggcagaaccgccggcctgtacagcaccggcgccaagacccaggtggcctgcctgatcagctgcatcttcgtgctgatcgtgatctacgccatcggccccctgctgtactggctgcccatgtgcgtgctggccagcatcatcgtggtgggcctgaagggcatgctgatccagttcagagacctgaagaagtactggaacgtggacaagatcgactggggcatctgggtgagcacctacgtgttcaccatctgcttcgccgccaacgtgggcctgctgttcggcgtggtgtgcaccatcgccatcgtgatcggcagattccccagagccatgaccgtgagcatcaagaacatgaaggagatggagttcaaggtgaagaccgagatggacagcgagaccctgcagcaggtgaagatcatcagcatcaacaaccccctggtgttcctgaacgccaagaagttctacaccgacctgatgaacatgatccagaaggagaacgcctgcaaccagcccctggacgacatcagcaagtgcgagcagaacaccctgctgaacagcctgagcaacggcaactgcaacgaggaggccagccagagctgccccaacgagaagtgctacctgatcctggactgcagcggcttcaccttcttcgactacagcggcgtgagcatgctggtggaggtgtacatggactgcaagggcagaagcgtggacgtgctgctggcccactgcaccgccagcctgatcaaggccatgacctactacggcaacctggacagcgagaagcccatcttcttcgagagcgtgagcgccgccatcagccacatccacagcaacaaggccagctacaagctgctgttcgacaacctggacctgcccaccatgccccccctgtag

SEQ ID NO: 235610 - DNA, 1992 bp, Artificial Sequence
  derived and/or modified sequence
atgacaggtgctaaaaggaaaaaaaagtctatgctctggtccaagatgcataccccccaatgtgaggacatcatacagtggtgtcgacggagactgcctattttagactgggccccccactacaacttgaaagagaatcttctgccagacacagtgtctgggatcatgctggcggtgcagcaagtaacacagggactggctttcgcagtgctctcttcggtgcatcctgtgtttggcctctacggaagcctgttccctgcgatcatttatgcaattttcgggatgggtcaccatgtcgctaccggtaccttcgccctaacctctcttatatcagcaaacgccgttgaacgaattgtaccccagaatatgcagaatctcacaacacaatccaacacttctgtgcttggcctctccgacttcgaaatgcagcgaatccacgtggccgcagccgtgtcgtttttgggaggggtaatacaggtcgctatgtttgtgctccagctggggagtgctacgtttgtggtaaccgaacccgtcatatccgctatgactaccggagctgctacgcatgtcgtgacctctcaggttaaatacttgctcgggatgaaaatgccgtacatctccggcccactcggtttcttttatatctatgcctacgtcttcgaaaacattaaatccgtgcgactcgaagctttgctattgtctcttctgagtatcgtcgttcttgtgctcgttaaggagttgaatgagcagtttaagaggaagatcaaagtggtgttgccagtcgacctggttctgattatcgccgcaagtttcgcatgctactgcacgaatatggaaaatacctacggattggaagtggtgggtcatattccgcaaggcattccgagcccccgagctccccccatgaacattctgtccgcggtcattacagaggctttcggagtggccctcgtaggctacgtcgcaagtctcgccttggcccaagggagtgctaagaagtttaagtattctatcgacgacaaccaggaattcttagcccatggcctgtccaatattgtatcttctttcttcttttgcatccctagcgctgccgccatgggtaggactgctggtctctatagcacaggtgcaaaaacgcaggtcgcctgcctgatttcttgcatctttgtccttattgtgatttacgccatcggccccctgctgtattggctcccaatgtgtgtgctcgccagcatcatagtggtgggactgaagggcatgcttatccagttcagagatctgaaaaagtactggaatgttgacaagattgattggggcatctgggttagcacttatgtattcacgatctgtttcgcagcaaacgtggggttgctatttggagtcgtctgtactatagcaattgtgatcggccgattccccagggctatgaccgttagcatcaaaaatatgaaagaaatggaatttaaagttaaaacggagatggactcagaaactctgcagcaggtgaagatcatctccattaataatcctctggtctttctgaacgctaagaaattctacactgacctcatgaacatgattcagaaagagaatgcctgtaatcagcctctggacgatatttccaaatgcgaacagaacacactgttgaatagtttgtctaacggcaattgtaatgaggaggcgagtcaaagttgtcccaacgagaaatgttacctgattttagactgctcagggttcaccttttttgactattctggggtgagcatgctcgtagaggtgtacatggattgtaaggggcgtagtgtggacgttctcctggctcattgcactgcaagtttaattaaggcgatgacgtactacgggaacctggacagcgagaaaccaatctttttcgaatcggtcagtgctgccatatcccacatccacagcaataaagcctcttacaagctgcttttcgacaatctcgacctgccaactatgcctcccttatag

SEQ ID NO: 235611 - DNA, 1992 bp, Artificial Sequence
  derived and/or modified sequence
atgaccggggccaagaggaagaagaagtccatgctgtggagcaagatgcacaccccccagtgtgaggacatcatccagtggtgcagaagaaggctgcccatcctggactgggccccccactacaacctgaaggagaacctgctgcctgacacagtgtctggcatcatgctggccgtgcagcaggtgacccagggcctggcctttgctgtgctgagctctgtgcaccctgtgtttggcctgtatggcagcctcttccctgccatcatctatgccatcttcggcatgggccaccacgtggccaccggcacctttgccctgaccagcctcatcagcgccaatgctgtggagcgcatcgtgccccagaacatgcagaacctgaccacccagagcaacacctctgtgctgggcctgagtgactttgagatgcagaggatccacgtggccgctgctgtgtccttcctgggcggcgtcatccaggtggccatgtttgtgctgcagctgggcagcgccacctttgtggtgacagagcctgtgatcagcgccatgaccaccggggccgccacccacgtggtgaccagccaggtgaagtacctgctgggcatgaagatgccctacatcagcggccccctgggcttcttctacatctatgcctacgtgtttgagaacatcaagtctgtgcggctggaggccctgctgctgagcctgctgagcatcgtggtgctggtgctggtgaaggagctgaatgagcagttcaagaggaagatcaaggtggtgctgcctgtggacctggtgctgatcatcgccgccagctttgcctgctactgcaccaacatggagaacacctacggcctggaggtggtgggccacatcccccagggcatccccagcccccgggccccacccatgaacatcctgtctgctgtgatcacagaggcctttggagtggccctggtgggctacgtggccagcctggccctggcccagggcagcgccaagaagttcaagtacagcattgatgacaaccaggagttcctggcccacggcctgagcaacatcgtgtcctccttcttcttctgcatccccagcgctgctgccatgggccgcacagctggcctgtacagcactggagccaagacccaggtggcctgcctgatcagctgcatctttgtgctgattgtcatctatgccatcggccccctgctgtactggctgcccatgtgtgtgctggccagcatcatcgtggtgggcctgaagggcatgctgatccagttccgggacctgaagaagtactggaatgtggacaagattgactggggcatctgggtgtccacctacgtgttcaccatctgctttgctgccaacgtgggcctgctgtttggagtggtgtgcaccatcgccatcgtgattggccgcttcccccgggccatgacagtgtccatcaagaacatgaaggagatggagttcaaggtgaagacagagatggacagcgagaccctgcagcaggtgaagatcatcagcatcaacaaccccctggtgttcctgaatgccaagaagttctacacagacctgatgaacatgatccagaaggaaaatgcctgcaaccagcccctggatgacatcagcaaatgtgagcagaacaccctgctgaacagcctgagcaatggaaactgcaatgaggaggccagccagagctgccccaatgagaagtgctacctgatcctggactgcagcggcttcaccttctttgactacagcggcgtgtccatgctggtggaggtgtacatggactgcaagggccgctctgtggatgtgctgctggcccactgcacagccagcctcatcaaggccatgacctactacggcaacctggacagcgagaagcccatcttctttgaatctgtgtctgctgccatcagccacatccacagcaacaaggccagctacaagctgctgtttgacaacctggacctgcccaccatgccacccctgtag

SEQ ID NO: 235612 - DNA, 1992 bp, Artificial Sequence
  derived and/or modified sequence
atgaccggcgccaagcggaagaagaagagcatgctgtggagcaagatgcacacacctcaatgcgaagacattatacagtggtgtagacgtaggctcccaatactggattgggccccacattataatctgaaagagaacctcctccccgacacagttagcggcatcatgcttgctgttcaacaggtgactcaaggcttggctttcgccgttttgagctctgtgcatccagtgtttggattatatggcagcctgttccccgccatcatctacgccatcttcggcatgggacatcatgtcgccacagggacatttgccctcacatcactgatcagtgccaacgctgttgagaggatcgttcctcagaacatgcagaacctgaccacccaaagtaatacctccgtgctcggcctttcagatttcgagatgcagagaatccacgtcgcggctgcggtctctttcctgggcggcgtcatccaggtcgcaatgtttgtgctgcaacttggctccgcaacgtttgttgtgacggaaccagtaatttcagctatgactacaggtgctgctacccacgtggtcacttcacaagtcaaatacctgttgggcatgaagatgccctacatctccgggccactgggattcttctacatttatgcttacgtgttcgagaatattaagtctgtgcggctggaggcgctactcctcagcttgctttcaatcgttgtgctggtactcgttaaggaactgaatgagcagtttaagaggaagattaaggtcgtgctgccggttgacctggtcttgatcattgctgcgagcttcgcctgctattgcaccaacatggagaatacgtacggattagaggtggttgggcacattcctcagggaatcccaagcccacgtgccccacccatgaacatcctgtctgcagtcatcacagaggcattcggtgtcgccttggtgggttatgtggcttcactggcactcgcccaggggtctgctaagaagttcaaatatagtattgatgataatcaggagttcctggcccacgggctctcaaacatagttagtagtttttttttctgtattcccagcgccgccgcgatgggcaggaccgcagggttgtacagcacaggcgccaaaacccaggtcgcctgcctaattagctgcatcttcgtgcttattgtaatatatgccatcgggcccctgctgtactggctacctatgtgcgtgctagcttcaataattgtggtgggtctgaaggggatgttaattcaattccgtgatctgaagaagtactggaatgtcgataaaatcgactggggaatctgggtgagcacctatgtctttactatttgctttgccgcgaatgtgggtctgttattcggggtggtgtgcacgattgcgatagttatcgggagattccctcgagctatgaccgtttctatcaaaaacatgaaggaaatggaattcaaggtcaaaactgaaatggattcggaaactcttcagcaggtgaagataatatcaattaataatccgttggtattcctcaacgcaaagaagttttacacagatcttatgaacatgattcaaaaggagaatgcctgcaatcaaccccttgatgacatctcaaagtgcgagcagaacactctcctaaattcactctctaatggcaactgtaacgaggaggcgtcacaaagttgtcccaacgagaagtgttaccttatcctggattgttctggctttacattcttcgactatagtggggtgagcatgctggtggaggtgtacatggactgtaagggccgctcagtcgatgtcctgctggctcattgcactgccagcctcattaaggccatgacctattacggaaatctggattccgagaaacctatcttttttgagtcagtatccgcagccatcagccacattcactctaacaaagcctcatacaagctcttgttcgataatctggacctgccaacaatgcccccgctgtag

SEQ ID NO: 235613 - DNA, 1992 bp, Artificial Sequence
  derived and/or modified sequence
atgacgggcgctaagaggaagaaaaagtctatgttatggtctaagatgcacaccccgcagtgcgaagacatcatccagtggtgcagacgacgattgccaatcttagactgggcaccacactataatctcaaagagaacctgctgcctgataccgtgtcaggaataatgctggcggtgcaacaggtgacacagggcctggccttcgctgtgctgtcatctgtgcaccccgtgttcggtctgtacggcagcctatttccggctatcatctacgcaatctttggcatgggccatcacgtggctacaggcacatttgcactaacctcgctgatttccgctaatgccgtcgagcggatagttccccaaaacatgcagaatctcacgactcagtcaaatacatccgttttgggtctcagtgatttcgagatgcaaagaatccacgtcgccgcagctgtttcctttctggggggagtgatccaggtggccatgttcgttctgcagctgggatcagccacattcgtcgtgacagagccagttattagcgccatgactaccggcgcagcgacccacgtggtgacctcccaggtgaagtatctgctggggatgaaaatgccctacattagcggccctttaggatttttctacatctacgcctatgtgtttgaaaatatcaagtctgtacggcttgaggctctgttgctgtcgcttttaagtatagtcgtgctggttcttgtcaaggagttgaacgaacagtttaaaaggaagattaaagtcgtgctccctgtggatcttgtcctcatcatcgcagcaagctttgcctgttactgcacaaacatggagaacacctatggtctagaagtggtgggacacatccctcagggaatccctagcccacgcgctcccccaatgaacattctgtcggctgtgataacagaagcctttggcgtagctttagtggggtatgtcgctagcctcgcactcgctcagggctccgcaaagaaattcaagtacagcatagatgacaaccaggaatttcttgctcatgggctttctaacatcgtcagttcattcttcttttgcatcccttccgctgccgctatgggccgtaccgccggattgtactccacaggggcaaagacccaggtcgcttgcctgatatcatgtatctttgtgctgatcgttatttacgctattgggccattactgtattggctgccgatgtgtgtgctggcctccataattgtagtcggcctgaaaggtatgttaatccagttcagggacttgaagaaatactggaatgttgacaagattgattggggaatctgggtgtctacatacgtgtttacgatctgtttcgccgctaacgtggggctgctgttcggagtagtctgcaccatcgcgatcgtaatcgggaggttcccacgcgctatgactgtaagcatcaagaatatgaaggagatggaattcaaagtgaaaactgagatggattccgagacacttcagcaagtgaagattataagcatcaataaccccctggtgtttctgaacgcgaaaaagttctacacggatctgatgaacatgatccaaaaagagaatgcctgcaatcagcccctggacgacatatctaagtgcgagcagaataccctattaaattcactctccaatggaaactgtaacgaggaggcatcacaaagctgccctaatgagaagtgctacctcattctcgactgtagcggattcacctttttcgactatagcggagtaagcatgcttgttgaggtgtacatggactgtaaaggcagatctgtggacgtacttcttgcccactgcactgccagcctcatcaaagccatgacctactatgggaatctggactcagagaagcctattttctttgaatctgtctccgccgcaatctctcatatccacagtaacaaggcaagctacaagctgctcttcgacaatctggatctaccaactatgccgcctctctag

SEQ ID NO: 235614 - DNA, 2656 bp, Artificial Sequence
  derived and/or modified sequence
ggcgagagagctgtagaccaacttaacactgaacccattacttttccaagaccagaaaaaaatattacatgaacaggaactacttctccttcagataagaattcaagctttgacattgtaaaccacagacgaattggagcttggcattgaaaggaggtgttctgcaatgattttttttcttgtttagagaagtttacttctacaagaagaaatctgaaaaatgacaggagcaaagaggaaaaagaaaagcatgctttggagcaagatgcataccccccagtgtgaagacattatacagtggtgtagaaggcgactgcccattttggattgggcaccacattacaatctgaaagaaaacttgcttccagacactgtgtctgggataatgttggcagttcaacaggtgacccaaggattggcctttgctgttctctcatctgtgcacccagtgtttggtttatatgggtctctgtttcctgccataatttatgccatatttggaatgggacatcatgttgccacaggcacctttgccttgacatccttaatatcagccaacgccgtggaacggattgtccctcagaacatgcagaatctcaccacacagagtaacacaagcgtgctgggcttatccgactttgaaatgcaaaggatccacgttgctgcagcagtttccttcttgggaggtgtgattcaggtggccatgtttgtgctgcaactgggcagtgccacatttgtggtcacagagcctgtgatcagcgcaatgacaactggggctgccacccatgtggtgacttcacaagtcaaatatctcttgggaatgaaaatgccatatatatccggaccacttggattcttttatatttatgcatatgtttttgaaaacatcaagtctgtgcgactggaagcattgcttttatccttgctgagcattgtggtccttgttcttgttaaagagctgaatgaacagtttaaaaggaaaattaaagttgttcttcctgtagatttagttttgattattgctgcatcatttgcttgttattgcaccaatatggaaaacacatatggattagaagtagttggtcatattccacaaggaattccctcacctagagctcccccgatgaacatcctctctgcggtgatcactgaagctttcggagtggcacttgtaggctatgtggcctcactggctcttgctcaaggatctgccaaaaaattcaaatattcaattgatgacaaccaggaatttttggcccatggcctcagcaatatagtttcttcatttttcttctgcataccaagtgctgctgccatgggaaggacggctggcctgtacagcacaggagcgaagacacaggtggcttgtctaatatcttgcattttcgtccttatagtcatctatgcaataggacctttgctttactggctgcccatgtgtgtccttgcaagcattattgttgtgggactgaagggaatgctaatacagttccgagatttaaaaaaatattggaatgtggataaaatcgattggggaatatgggtcagtacatatgtatttacaatatgctttgctgccaatgtgggactgctgtttggtgttgtttgtaccatagctatagtgataggacgcttcccaagagcaatgactgtaagtataaaaaatatgaaagaaatggaatttaaagtgaagacagaaatggacagtgaaaccctgcagcaggtgaaaattatctcaataaacaacccgcttgttttcctgaatgcaaaaaaattttatactgatttaatgaacatgatccaaaaggaaaatgcctgtaatcagccacttgatgatatcagcaagtgtgaacaaaacacattgcttaattccctatccaatggcaactgcaatgaagaagcttcacagtcctgccctaatgagaagtgttatttaatcctggattgcagtggatttaccttttttgactattctggagtctccatgcttgttgaggtttacatggactgtaaaggcaggagtgtggatgtattgttagcccattgtacagcttccttgataaaagcaatgacgtattatggaaacctagactcagagaaaccaattttttttgaatcggtatctgctgcaataagtcatatccattcaaataaggccagttataaactgttgtttgataacttggatcttccaacaatgccaccgctctgaggattgggtggttgcctatcatttgcaaactgcttacttgtacaacaaatgcttcttccaggatctactgtcctggggacttgaatccacctttctcaaatataaaaactctaaatatggccttttaagttttttctgctctgatatcttgcctctaagcttatattgccatctttggaaatactatttgtagaatctagtgctcacatgatctgaagtgtcaaagttattttacaaatgctgggcttatggtttagttttacaactgttcttagagctttaatttcctgcaatttttccttgagttttgaattgttttgcctttcctcacccctagaataacatttggtgcctcgcagagtcatccctattgtatacaatcagaacagtatgtatttacaaaataataataacactattattattaaatctaacatatattga

SEQ ID NO: 235615 - protein, 190 aa, Artificial Sequence
  derived and/or modified sequence
MEKVPGEMEIERRERSEELSEAERKAVQAMWARLYANCEDVGVAILVRFFVNFPSAKQYFSQFKHMEDPLEMERSPQLRKHACRVMGALNTVVENLHDPDKVSSVLALVGKAHALKHKVEPVYFKILSGVILEVVAEEFASDFPPETQRAWAKLRGLIYSHVTAAYKEVGWVQQVPNATTPPATLPSSGP

SEQ ID NO: 235616 - DNA, 573 bp, Artificial Sequence
  derived and/or modified sequence
atggaaaaggtcccaggagagatggagatcgagcggagggaaaggtccgaagagctgtctgaagccgagagaaaggctgtgcaggcgatgtgggccaggctttatgctaattgtgaagatgtgggtgttgccattctggtgaggttcttcgttaattttcctagtgctaaacagtatttttctcaattcaagcatatggaggatccactggagatggagcggagcccccaactgcggaagcacgcttgcagagtcatgggagcacttaacacagtggttgagaatctgcatgacccagacaaggtcagtagcgtcctggccctcgtcggaaaggctcacgccttgaaacataaggttgagcccgtttactttaagattctcagtggggtcatattagaggtcgttgcagaggagttcgctagcgactttccgccggagacccagagagcgtgggccaagcttcggggactgatttattctcacgtgacggctgcctacaaggaggtgggctgggtgcaacaggtccctaatgctacaactccgccggcaaccttgcccagttctggcccctag

SEQ ID NO: 235617 - DNA, 573 bp, Artificial Sequence
  derived and/or modified sequence
atggagaaggtgcctggagagatggagattgaaagaagagagaggtctgaggagctgtctgaggccgagaggaaggctgtgcaggccatgtgggcccggctgtatgccaactgtgaagatgtgggcgtggccatcctggtgcgcttctttgtgaacttccccagcgccaagcagtacttcagccagttcaagcacatggaggaccccctggagatggagaggagcccccagctgaggaagcacgcctgccgggtgatgggcgccctgaacacagtggtggagaacctgcatgaccctgacaaggtgtcctctgtgctggccctggtgggcaaggcccacgccctgaagcacaaggtggagcctgtgtacttcaagatcctgagcggggtcatcctggaggtggtggccgaggagtttgccagtgacttccccccagagacccagagggcctgggccaagctgcggggcctcatctacagccacgtgacagctgcctacaaggaggtgggctgggtgcagcaggtgcccaatgccaccaccccaccagccaccctgcccagcagcggcccctag

SEQ ID NO: 235618 - DNA, 573 bp, Artificial Sequence
  derived and/or modified sequence
atggagaaggtgcccggcgagatggagatcgagcggcgggagcggagcgaagagctgagtgaagcagaacgtaaggccgtgcaggccatgtgggccagactctatgccaactgcgaagacgtaggagtggccattctcgtgaggtttttcgtgaattttccctctgctaaacagtacttttcccagttcaaacacatggaggatcccctggaaatggagcggagtccacaacttaggaagcacgcatgtcgcgtaatgggggcactgaatactgtggtggaaaatttgcacgaccccgacaaagtgtcatcggtactggctctggtcggaaaggcccatgcccttaaacacaaggtcgaaccagtgtactttaagatcctcagcggagtcatattggaggtggtagcagaggaatttgcctccgattttccccctgagacgcagcgggcctgggcaaagctaagaggcctgatctatagtcatgtaaccgcggcatataaagaggtgggatgggttcagcaggttccaaatgctaccacgcctcccgccaccttgcccagctccgggccctag

SEQ ID NO: 235619 - DNA, 573 bp, Artificial Sequence
  derived and/or modified sequence
atggaaaaggtccccggagaaatggaaatcgaaagacgagaaagatctgaagagctgtcagaggcagagcgcaaggcagtccaggccatgtgggcgagactttacgcaaactgtgaggatgtcggtgtcgctatcctggtgcggtttttcgttaattttccgtcggccaagcagtacttttcacagttcaagcacatggaggaccctctggaaatggaacgttcgccacagctccgtaagcacgcctgtagggtgatgggggctttgaacaccgttgtcgagaatctgcacgatcccgataaggtgtcttccgttctggccctagtgggaaaggcccacgcgctgaaacacaaagtggagcctgtgtattttaaaattctgtctggtgtgattctcgaagtggttgctgaggagtttgccagcgactttccaccggagacgcagcgcgcatgggccaagctgcgcggattgatttactcccacgtaaccgccgcatataaggaggtgggatgggtgcagcaggtaccaaacgccaccaccccccctgccaccctgccctcaagcgggccatag

SEQ ID NO: 235620 - DNA, 1951 bp, Artificial Sequence
  derived and/or modified sequence
cccggcgcgcacagacacacgctccctccctccgcgctctacccctcgcccgcccgccgcgcacgcagccggccccggctcccggcgccccgcgccccgcgccccgcgccccgccaccgccgccgccgagcaaagccgggctgggcttggagctgctcatggagaaagtgccaggcgagatggagatcgagcgcagggagcggagcgaggagctgtccgaggcggagaggaaggcggtgcaggctatgtgggcccggctctatgccaactgcgaggacgtgggggtggccatcctggtgaggttctttgtgaacttcccctcggccaagcagtacttcagccagttcaagcacatggaggatcccctggagatggagcggagcccccagctgcggaagcacgcctgccgagtcatgggggccctcaacactgtcgtggagaacctgcatgaccccgacaaggtgtcctctgtgctcgcccttgtggggaaagcccacgccctcaagcacaaggtggaaccggtgtacttcaagatcctctctggggtcattctggaggtggtcgccgaggaatttgccagtgacttcccacctgagacgcagagagcctgggccaagctgcgtggcctcatctacagccacgtgaccgctgcctacaaggaagtgggctgggtgcagcaggtccccaacgccaccaccccaccggccacactgccctcttcggggccgtaggacccctaactccacccccctccctggcagcacctcgagcagaaggccgagttctgaagaccctccttgacgctccatttctgggtgccaaggaagctggaggaatccctgactcaacttccccgaaggaggcctctgtggcggccagggtccccccctggagctgctgggaggcggcgctggctgcctggatgctgaccccagcgcggcgggcagagcggggcccactcttcttagcttttctactcactgttagagagagacctagctgagcggctggcaggaagcgggacaggtctaggagtcccttagggaataaaccagccccgtttctatcagcccggccagcatgcaggtctccacatcaccatctagagtatcacgcacacatctaccatatatacagatatattctatatacgagctatatataaatatatatatacatatatatatacacacatacatatctagaatgtgtatccgcggcgcccagaagcctcggtttggcccacctgtgagtggggcagggaggggttccggttgtgcagagaacagagtgttctggcaaagaggaaatcccacagcagcgcagaggacctgggcctggaggggcagggctggggcaacccggcttggcggcaaagcccagccccttctcagaccagctccccacattcctgaattccacttccaggcagaaaggagtgggctccccctactccctcagaggaactgactcaccggctgtcctagaatgggcaggggcagagcgaagttctgggtgggatgaccgcactgggggaggggcctcagtccagaaacctcgaccgctagctccacctgccttggccaccagggcagccccgggggatccgggctgctgggcagcaggtcggcgggaccacatgcctgggtctcaccctcagctccgagggccgagggctttccccaccccaccctcctcctggccggcagtcggccctgtctattcatctgcgtcaggcttgccaggggggccccccgtgtgtgccccttggtcacgtgtgtcgtcttcaaggatgttttgctgctgtggctcctgctgtgtcccctcctggcccatcctcatcctcatcttcatcctcatcctcatctgtgcaaccgcccgtcctccttttctagtttctgatgtttgtaaccagacccagctgtgtcattaaacagacccgttcttgctg

SEQ ID NO: 235621 - DNA, 573 bp, Artificial Sequence
  derived and/or modified sequence
atggagaaggtgcccggcgagatggagatcgagagaagagagagaagcgaggagctgagcgaggccgagagaaaggccgtgcaggccatgtgggccagactgtacgccaactgcgaggacgtgggcgtggccatcctggtgagattcttcgtgaacttccccagcgccaagcagtacttcagccagttcaagcacatggaggaccccctggagatggagagaagcccccagctgagaaagcacgcctgcagagtgatgggcgccctgaacaccgtggtggagaacctgcacgaccccgacaaggtgagcagcgtgctggccctggtgggcaaggcccacgccctgaagcacaaggtggagcccgtgtacttcaagatcctgagcggcgtgatcctggaggtggtggccgaggagttcgccagcgacttcccccccgagacccagagagcctgggccaagctgagaggcctgatctacagccacgtgaccgccgcctacaaggaggtgggctgggtgcagcaggtgcccaacgccaccaccccccccgccaccctgcccagcagcggcccctag

SEQ ID NO: 235622 - protein, 913 aa, Artificial Sequence
  derived and/or modified sequence
MADEALAGLDEGALRKLLEVTADLAERRRIRSAIRELQRQELEREEEALASKRFRAERQDNKENWLHSQQREAEQRAALARLAGQLESMNDVEELTALLRSAGEYEERKLIRAAIRRVRAQEIEAATLAGRLYSGRPNSGSREDSKGLAAHRLEQCEVPEREEQEQQAEVSKPTPTPEGTSQDVTTVTLLLRAPPGSTSSSPASPSSSPTPASPEPPLEPAEAQCLTAEVPGSPEPPPSPPKTTSPEPQESPTLPSTEGQVVNKLLSGPKETPAAQSPTRGPSDTKRADVAGPRPCQRSLSVLSPRQPAQNRESTPLASGPSSFQRAGSVRDRVHKFTSDSPMAARLQDGTPQAALSPLPRKAPGPLPHQHHPCLLLQRLLLSGPDTSSRFSKEQRGVAQPLAQLRSCPQEEGPRGRGLAARPLENRAGGPVARSEEPGAPLPVAVGTAEPGGSMKTTFTIEIKDGRGQASTGRVLLPTGNQRAELTLGLRAPPTLLSTSSGGKSTITRVNSPGTLARLGSVTHVTSFSHAPPSSRGGCSIKMEAEPAEPLAAAVEAANGAEQTRVNKAPEGRSPLSAEELMTIEDEGVLDKMLDQSTDFEERKLIRAALRELRQRKRDQRDKERERRLQEARGRPGEGRGNTATETTTRHSQRAADGSAVSTVTKTERLVHSNDGTRTARTTTVESSFVRRSENGSGSTMMQTKTFSSSSSSKKMGSIFDREDQASPRAGSLAALEKRQAEKKKELMKAQSLPKTSASQARKAMIEKLEKEGAAGSPGGPRAAVQRSTSFGVPNANSIKQMLLDWCRAKTRGYEHVDIQNFSSSWSDGMAFCALVHNFFPEAFDYGQLSPQNRRQNFEVAFSSAETHADCPQLLDTEDMVRLREPDWKCVYTYIQEFYRCLVQKGLVKTKKS

SEQ ID NO: 235623 - protein, 915 aa, Artificial Sequence
  derived and/or modified sequence
MADEALAGLDEGALRKLLEVTADLAERRRIRSAIRELQRQELEREEEALASKRFRAERQDNKENWLHSQQREAEQRAALARLAGQLESMNDVEELTALLRSAGEYEERKLIRAAIRRVRAQEIEAATLAGRLYSGRPNSGSREDSKGLAAHRLEQCEVPEREEQEQQAEVSKPTPTPEGTSQDVTTVTLLLRAPPGSTSSSPASPSSSPTPASPEPPLEPAEAQCLTAEVPGSPEPPPSPPKTTSPEPQESPTLPSTEGQVVNKLLSGPKETPAAQSPTRGPSDTKRADVAGPRPCQRSLSVLSPRQPAQNRESTPLASGPSSFQRAGSVRDRVHKFTSDSPMAARLQDGTPQAALSPLTPARLLGPSLTSTTPASSSSGSSSRGPSDTSSRFSKEQRGVAQPLAQLRSCPQEEGPRGRGLAARPLENRAGGPVARSEEPGAPLPVAVGTAEPGGSMKTTFTIEIKDGRGQASTGRVLLPTGNQRAELTLGLRAPPTLLSTSSGGKSTITRVNSPGTLARLGSVTHVTSFSHAPPSSRGGCSIKMEAEPAEPLAAAVEAANGAEQTRVNKAPEGRSPLSAEELMTIEDEGVLDKMLDQSTDFEERKLIRAALRELRQRKRDQRDKERERRLQEARGRPGEGRGNTATETTTRHSQRAADGSAVSTVTKTERLVHSNDGTRTARTTTVESSFVRRSENGSGSTMMQTKTFSSSSSSKKMGSIFDREDQASPRAGSLAALEKRQAEKKKELMKAQSLPKTSASQARKAMIEKLEKEGAAGSPGGPRAAVQRSTSFGVPNANSIKQMLLDWCRAKTRGYEHVDIQNFSSSWSDGMAFCALVHNFFPEAFDYGQLSPQNRRQNFEVAFSSAETHADCPQLLDTEDMVRLREPDWKCVYTYIQEFYRCLVQKGLVKTKKS

SEQ ID NO: 235624 - protein, 940 aa, Artificial Sequence
  derived and/or modified sequence
MADEALAGLDEGALRKLLEVTADLAERRRIRSAIRELQRQELEREEEALASKRFRAERQDNKENWLHSQQREAEQRAALARLAGQLESMNDVEELTALLRSAGEYEERKLIRAAIRRVRAQEIEAATLAGRLYSGRPNSGSREDSKGLAAHRLEQCEVPEREEQEQQAEVSKPTPTPEGTSQDVTTVTLLLRAPPGSTSSSPASPSSSPTPASPEPPLEPAEAQCLTAEVPGSPEPPPSPPKTTSPEPQESPTLPSTEGQVVNKLLSGPKETPAAQSPTRGPSDTKRADVAGPRPCQRSLSVLSPRQPAQNRESTPLASGPSSFQRAGSVRDRVHKFTSDSPMAARLQDGTPQAALSPLTPARLLGPSLTSTTPASSSSGSSSRGPSDTSSRFSKEQRGVAQPLAQLRSCPQEEGPRGRGLAARPLENRAGGPVARSEEPGAPLPVAVGTAEPGGSMKTTFTIEIKDGRGQASTGRVLLPTGNQRAELTLGLRAPPTLLSTSSGGKSTITRVNSPGTLARLGSVTHVTSFSHAPPSSRGGCSIKMEAEPAEPLAAAVEAANGAEQTRVNKAPEGRSPLSAEELMTIEDEGVLDKMLDQSTDFEERKLIRAALRELRQRKRDQRDKERERRLQEARGRPGEGRGNTATETTTRHSQRAADGSAVSTVTKTERLVHSNDGTRTARTTTVESSFVRRSENGSGSTMMQTKTFSSSSSSKKMGSIFDREDQASPRAGSLAALEKRQAEKKKELMKAQSLPKTSASQARKAMIEKLEKEGAAGSPGGPRAAVQRSTSFGVPNANSIKQMLLDWCRAKTRGYEHVDIQNFSSSWSDGMAFCALVHNFFPEAFDYGQLSPQNRRQNFEVAFSSAETHADCPQLLDTEDMVRLREPDWKMLVDCVPLVEVDDMMIMGKKPDPKCVFTYVQSLYNHLRRHELRLRGKNV

SEQ ID NO: 235625 - DNA, 2823 bp, Artificial Sequence
  derived and/or modified sequence
atggcagatgaggcccttgccggcctcgacgagggggcgctccggaaactcctagaggttaccgcagacttggccgagcgtcgccgtataagatccgcgattagagagctgcagaggcaggagctggagagagaggaggaggccttggcctctaagcgcttccgggctgaacggcaagacaacaaggagaactggctgcacagccaacagcgggaggcagagcaacgggcagccctcgccaggctcgcaggacagctggaatcaatgaacgacgtggaagagctgacagccctgttgagatcagcaggcgagtatgaggagcgcaaactgatcagggccgctatccgtcgcgtccgcgcacaggagattgaggcagccacactggccggacgtttatactcaggcagaccaaactccggctctagggaggactctaaggggctggccgcacaccgcttggaacagtgtgaagtgcccgagcgcgaagagcaagagcagcaggcagaagtctcgaaacctacacccacacctgaagggacaagtcaggacgtgaccacagtaactctcctgctgagagcaccccctgggtccacaagctccagtcctgccagcccctctagttctcccactcccgcttccccagaacctccacttgagccagcggaggctcaatgtctgacggctgaagtgccaggttccccagagccaccaccctcaccccctaaaaccaccagccctgaaccacaggagtctcctactctgccatctaccgaagggcaggtagtgaacaaactcctctcaggacccaaagagaccccagcagctcaaagcccaaccagaggaccctctgatacaaagagagccgatgtcgctggccctcgtccgtgtcagagatctctgtctgttttgtctcccaggcagccagcccagaaccgcgaatccacccctttggcctcagggcctagctcttttcagagagccgggagcgtccgcgatagggttcataagtttacaagcgactcccctatggcagctcgcttgcaagacggaactccacaggctgcgctgtctcccctgacaccagcacggctgctgggtccctccctgacttccactactccagcgtcctcatcctccggatcatcctcccggggacctagcgacacaagcagcagattctccaaggagcaaagaggagtggcccagcctttggcacagctgaggtcttgtccacaggaggagggtcccagaggaagaggattggccgcgagaccccttgaaaatagagcaggcggacccgtcgccaggagcgaggaacccggtgcccccttgccggtcgcagtgggcacagcagaaccaggaggctctatgaaaaccacctttacaatcgaaatcaaagatggacgggggcaggcgagcactggccgtgtactcctcccaactggtaaccagagggccgagctgacactagggctgagggccccccccaccctgctgtccacctcttcaggagggaagtccactattacgagagtaaattctcccggcaccctcgctcgcctggggtccgtgactcacgtcacctcgtttagccacgctcctccatcgagccggggaggctgtagcataaaaatggaagccgagccggccgaaccattggcggccgcggtcgaggcagccaatggggcggagcaaacgcgggtcaataaggctcccgagggccggtccccgttgagcgccgaagaactcatgacgatcgaagacgaaggcgtcttggataagatgctcgatcaatctaccgactttgaggagcgcaaactgatcagggcagccctgcgcgaattacgtcagcggaaacgggaccaaagagataaggaacgcgagcgacggctgcaggaggctcgcggacgacccggtgaaggacggggcaacaccgctaccgagacaaccacccgtcattcccagagagcagcagacgggtctgcggtgtctacggtcacgaagaccgaacgccttgttcacagtaacgatggaactcgcacagcaagaaccacaaccgtcgaatcgagcttcgtgaggcgttccgagaacggatcggggtccacaatgatgcagaccaaaactttttcatccagttccagtagtaagaaaatggggagcatcttcgacagggaggaccaggcttctcctagagccggtagtctagccgccctggagaaaagacaggcagagaagaagaaggaattgatgaaggcccagtctctcccaaagacttcagccagccaggccagaaaagccatgattgagaagctcgagaaagaaggagcagcaggctccccaggcggcccaagggcagccgttcagcgctctacatcatttggagttccaaatgcgaattccattaaacagatgctgctggactggtgtagagctaagacgaggggctacgaacacgttgatatacagaacttctcatcttcctggtctgatggcatggcgttttgcgccctagtccacaatttcttccccgaagcctttgactatggacagctctctcctcagaacagacgccagaatttcgaggtggccttctccagcgcagagacccatgctgactgtccacagctgctagacacagaagacatggtgaggctgagagaacctgactggaagatgctggtggactgcgtgcccctcgtggaagtcgatgacatgatgatcatgggtaaaaagccagacccaaagtgtgttttcacttacgtgcagtcactatacaaccatctgcgaaggcacgagctgagattgcgaggcaagaacgtgtag

SEQ ID NO: 235626 - DNA, 2823 bp, Artificial Sequence
  derived and/or modified sequence
atggctgatgaggccctggccggcctggatgagggcgccctgaggaagctgctggaggtgacagctgacctggccgagcggcggcgcatccgcagcgccatccgggagctgcagaggcaggagctggagcgggaggaggaggccctggccagcaagcgcttccgggcagagcggcaggacaacaaggagaactggctgcacagccagcagcgggaggccgagcagagagctgccctggcccggctggccggccagctggagagcatgaatgatgtggaggagctgacagccctgctgcggtctgctggggagtatgaggagaggaagctgatccgggccgccatccggcgggtgcgggcccaggagattgaagctgccaccctggccggccgcctgtacagcggccggcccaacagcggcagccgggaggacagcaagggcctggccgcccaccggctggagcagtgtgaggtgcctgagcgggaggagcaggagcagcaggccgaggtgtccaagcccacccccaccccagagggcaccagccaggatgtgaccaccgtgaccctgctgctgcgggcccctcctggcagcaccagcagcagccctgccagccccagcagcagccccaccccagccagccctgagccccccctggagcctgctgaggcccagtgcctgacagctgaggtgcccggcagccctgagcccccacccagcccccccaagaccaccagccctgagccccaggagagccccaccctgcccagcacagagggccaggtggtgaacaagctgctgagcggccccaaggagaccccagctgcccagagccccacccggggccccagcgacaccaagagagcagatgtggccggcccccggccctgccagaggagcctgtctgtgctgagcccccggcagcctgcccagaaccgggagagcacccccctggccagcggccccagcagcttccagagagctggctctgtgcgggacagagtgcacaagttcaccagtgacagccccatggccgcccggctgcaggacggcaccccccaggccgccctgagccccctgaccccagcccggctgctgggccccagcctgaccagcaccaccccagccagcagcagcagcggcagcagcagccggggccccagcgacaccagcagccgcttcagcaaggagcagaggggcgtggcccagcccctggcccagctgcggagctgcccccaggaggagggcccccggggccggggcctggccgcccggcccctggagaacagagctgggggccctgtggcccggtctgaggagcccggggcccccctgcctgtggccgtgggcacagctgagcccggcggctccatgaagaccaccttcaccatcgagatcaaggatggccggggccaggccagcacaggccgggtgctgctgcccactggaaaccagagagctgagctgaccctgggcctgcgggccccacccaccctgctgagcaccagcagcggcggcaagagcaccatcaccagggtgaacagccctggcaccctggcccggctgggctctgtgacccacgtgaccagcttcagccacgccccacccagcagcagaggaggctgcagcatcaagatggaggccgagcctgctgagcccctggccgctgctgtggaggccgccaatggagctgagcagaccagggtgaacaaggcccctgagggccgcagccccctgtctgctgaggagctgatgaccattgaagatgagggcgtgctggacaagatgctggaccagagcacagactttgaggagaggaagctgatccgggccgccctgcgggagctgcggcagaggaagagggaccagagggacaaggagcgggagcggcggctgcaggaggcccggggccggcctggagagggccggggcaacacagccacagagaccaccaccaggcacagccagagagctgctgatggcagcgctgtgtccacagtgaccaagacagagcggctggtgcacagcaatgatggcaccaggacagcccggaccaccaccgtggagagcagctttgtgagaagaagtgaaaatggaagtggcagcaccatgatgcagaccaagaccttcagcagcagcagcagcagcaagaagatgggcagcatctttgaccgggaggaccaggccagcccccgggccggcagcctggccgccctggagaagaggcaggccgagaagaagaaggagctgatgaaggcccagagcctgcccaagaccagcgccagccaggccaggaaggccatgattgagaagctggagaaggagggcgctgctggcagccctgggggccccagggctgctgtgcagaggagcaccagctttggagtgcccaatgccaacagcatcaagcagatgctgctggactggtgccgggccaagacccggggctatgagcacgtggacatccagaacttcagcagctcctggagcgatggcatggccttctgtgccctggtgcacaacttcttccctgaggcctttgattatggccagctgagcccccagaacagacggcagaactttgaggtggccttcagcagcgctgagacccatgctgactgcccccagctgctggacacagaggacatggtgcggctgcgggagccagactggaagatgctggtggactgtgtgcccctggtggaggtggatgacatgatgatcatgggcaagaagccagaccccaagtgtgtgttcacctacgtgcagagcctgtacaaccacctgcggagacatgagctgcggctgcggggcaagaatgtgtag

SEQ ID NO: 235627 - DNA, 2823 bp, Artificial Sequence
  derived and/or modified sequence
atggccgacgaggccctggccggcctggacgagggcgccctgcggaaacttctcgaagtcaccgccgacctagctgaacgacggcggatcaggagcgcaatacgcgagctccaaagacaggaactggagcgcgaagaagaggcactggccagtaagaggttccgagcagaacggcaggataataaagaaaattggttgcacagtcaacagcgcgaagctgagcagcgagcagctctggctcggcttgcgggacagctggagagcatgaatgatgtggaggaactgaccgccctgctgcgctcagccggggaatacgaagaacgcaagctgattagagctgctataaggcgggtgagggcccaggagattgaagctgcaacattggccgggcgcctgtacagcggtcgaccgaacagtggctcaagggaagattcaaaaggcctagctgctcacagactggagcaatgcgaagtgcctgagagggaagagcaagagcaacaggctgaggtctccaagcctacccccactcctgagggaacaagccaggacgtaacgacagttactcttctgttgagagccccacccggaagcacttctagcagccctgcctcgcccagtagcagccctactccggcttctcccgagcctcctctggagccggcggaggcccaatgcctgacggccgaggtgcctggctcccctgagcctcctccttcacccccaaaaacaactagcccggaaccccaggaaagcccaacgttgccttctaccgaggggcaggtggtcaataagctgctgagtggtccaaaggaaacccctgctgcacagagccccactcgaggtccttctgacaccaaacgggcagatgttgccggcccaaggccttgtcagaggtcactaagcgtgctaagcccccgccaaccggcgcagaatcgggaaagcactccactcgcttccggaccatcctcttttcaacgtgccggtagcgtgcgggaccgtgtccataagttcacgtccgactccccaatggcagctagattgcaagacggaactcctcaagcagctctctcgccgttgaccccggcgcgattactgggtccgagccttaccagtacaacccccgcatcatcgtcctccggatcttcttcccgcggaccctccgacacttcctccagatttagcaaggagcaacgcggagtggcccagcccctcgctcagttgaggtcttgtccgcaagaagagggtcctcgtggaaggggcctggcagcccgccccctagagaatagggcagggggacccgtcgctcggtcagaagagccaggcgcccctttgcccgtcgccgtagggacggcagagccaggcgggagcatgaagacaacctttacgattgaaattaaagatggccgcggccaggctagcacaggtagggtgctgctgcccacgggcaaccagcgggccgagttaactctcggattgcgagcccccccgacccttctctccacatctagtgggggcaagagtactattactcgtgttaattcgcccggcaccctcgctcgacttgggtcggtaacccacgtgacctcattcagccacgcccccccctcttccagaggcggatgtagcattaaaatggaggccgagccggccgagcccttggctgccgcagtcgaagccgcaaacggggccgaacaaactagagtaaataaagccccagaaggcagaagcccgctgtctgctgaggagctgatgacaatcgaggacgaaggcgttctcgataagatgcttgatcagtctacagatttcgaggaaaggaagctgatccgggccgcattacgcgaactcagacaaagaaagcgggaccagcgcgacaaggagcgggaacgccgattgcaggaagcacggggaagaccaggagaagggagaggaaatacagccactgaaaccacaacacgccacagtcagcgcgctgccgatggttcagctgtttcaactgtgactaagaccgagcgcttggtccacagtaacgacggcactagaaccgctcggactacaactgtggaatcctctttcgtccggcgaagtgaaaacggcagcggatccacaatgatgcagaccaagactttctcatccagttcatcatctaagaagatggggagcatatttgaccgtgaagaccaggcaagccctagggctggatcactcgccgcccttgaaaagcggcaggctgagaaaaagaaggagttaatgaaagcccaaagtctgcctaagacctccgcatcccaggctagaaaggccatgatcgagaaactcgaaaaagagggcgctgcggggagcccgggcggtcccagagcagcggtccagcgttccacatccttcggcgtcccaaatgctaattccataaagcaaatgctgcttgactggtgcagagccaagactaggggctatgagcacgtggacatccagaatttctcctcctcatggtcagatggcatggccttttgtgcgctggtacataattttttcccagaggcattcgactatggccagctatccccacagaacagacggcagaactttgaagtcgcattcagtagcgccgaaacgcatgcagactgtccccagctactggacactgaggacatggtacgcctacgggaaccagattggaagatgctggtcgactgtgtcccattggtggaggttgatgacatgatgatcatgggtaagaagccagatcccaaatgcgtctttacttatgtccagtccctctataaccacctgcgccggcatgagctgaggctcagaggcaaaaacgtctag

SEQ ID NO: 235628 - DNA, 2823 bp, Artificial Sequence
  derived and/or modified sequence
atggccgatgaggccctggccggactcgacgaaggtgccttgagaaagctgcttgaggttacagccgatctcgcagagagaaggcgaataagatccgccattcgggagctccagagacaggagctagaaagggaagaggaagcgctcgcttctaagcgattcagggccgagcgacaagacaacaaggagaattggcttcatagccaacagagggaagccgaacaacgggcagccctggccaggctggccggacagctcgaaagtatgaacgatgtggaggagctcactgccttgctgcgcagcgcgggagagtacgaagaaaggaagctcatcagggccgcaatccgcagggtgagagcacaggagatagaggcagcgacactagccggacggctctactccggacgtccaaattccggttctcgcgaggatagtaagggtcttgccgctcacagactggagcagtgcgaagtgccggaaagagaggagcaggagcagcaggcggaagtgtcgaagcctacacccaccccagagggaacctcacaggatgtcactactgtgacgctccttctgcgcgctcctccaggctccaccagctcctcccccgcaagccccagctcatcccccacccctgccagtccagagccccctttagaaccagctgaggcccagtgccttactgcagaggtccctgggtcaccagaaccccctccatctcccccaaaaacaacctcaccagagccacaagagagtccaaccctaccatccactgaaggtcaggtagttaacaaactgcttagcggccctaaggagacacctgccgctcaaagcccaacacgtggcccttctgacacaaagagggcggacgtcgctggaccgagaccctgtcagagatccctttctgtcctctccccaaggcaaccagcgcagaaccgggagtccaccccgctggcgagcggtccgtccagtttccaacgcgctggatcagtccgagatcgggtgcacaaatttacttccgatagccccatggccgcacgactacaggacggtacccctcaagctgctttgagcccgctcactccagccagacttcttgggccatccctcacttcaaccacccctgcatcttcctcatcaggaagttctagccgagggccatccgacacctccagcagattcagtaaggagcagcgaggcgtggctcagccactggctcagttgagatcgtgcccacaggaggaagggcctcgcggtcggggactcgcagccaggcctctagaaaacagagccggtggacccgtcgcgcgttctgaggagcctggcgcacctctgcccgtcgcggtcggtaccgccgagcccggtggctccatgaaaactacctttacgattgaaattaaagacggaagagggcaggcttcaactggaagagtgctccttccaacagggaatcagcgagcggagctcactctgggccttagggcaccccctactcttctgagtacatccagcggagggaagtccacaatcactagggtaaattctcctggcactttagccaggcttggttccgttactcacgtgaccagcttttcacacgctccaccatcttccagaggcggttgctccattaagatggaagcagagcctgcggaaccgctggctgctgctgttgaggccgcaaatggtgccgaacagacccgggttaacaaagcccctgaaggcaggagtcctcttagtgctgaagaattgatgacaatcgaggacgagggtgttctggacaaaatgctggatcagagcactgactttgaggagaggaaactgatccgcgcagctctgcgagagctgagacagcggaaaagggatcagcgggacaaggaaagggaacgacggttgcaggaggctaggggaagacccggtgagggtcgaggcaacacagcaacagaaactacgacccgccattcacagcgcgcagccgatggctccgcagtttccactgtcactaaaactgagcggttagttcactcaaacgatgggacaagaacagcaaggacaacgaccgttgaaagtagtttcgtgagacgatctgagaacgggtcgggctcaacaatgatgcagaccaaaactttctcctcctcctcttcgagcaaaaagatgggtagcatcttcgatcgagaagaccaggcctcacctagggccggaagcttagctgccctggaaaagagacaggcagaaaagaagaaagagctgatgaaagcgcagagccttcctaagacaagcgctagccaggcgcgaaaggcaatgatagaaaagctggaaaaggagggcgctgcaggatcacctggcggtcccagggcagccgtgcagagatccaccagctttggtgtgcccaacgcgaatagcatcaagcagatgttgcttgattggtgtcgtgccaaaacaaggggatatgaacacgtcgacatccagaatttcagctcctcctggtccgatggcatggctttctgtgctttggtgcacaattttttccctgaggcgtttgattacggacagctttcaccccagaaccgtagacagaacttcgaagttgcgttttcaagcgccgaaacgcacgctgattgcccgcagctgctcgacactgaagacatggtgcggctccgcgagcccgactggaaaatgttagttgattgcgtgcccctggtggaggtggacgatatgatgataatgggaaagaagcctgaccctaaatgtgtctttacctacgtccagtcactgtacaaccacctccggagacatgagctgagattaagaggtaaaaacgtttag

SEQ ID NO: 235629 - DNA, 3198 bp, Artificial Sequence
  derived and/or modified sequence
cagaatccaggggacggttgctgagcgggcctgggacagcgggtcgcggcacctccggcctgcgcgtgtctaatccgtctgtcgggtcccgaaagagctaagccgagcctgcgccggacgggtgggctggactgagagaattctctgagctggtgacaggtgccacaggcactggggatctcaccagaaaggaaccgacggagctaggggccagcgagatggcggacgaggccttagctgggctggatgagggagcccttcggaagctgctggaggtcacagcagatctggcagagcggcggcgcatccgctcagccatccgggaactgcagcggcaggagctggagcgcgaggaggaggccctggcatccaagcgtttccgtgccgagcggcaggacaacaaggagaactggctgcactctcagcagcgggaagctgagcagcgggctgccctggcacggctggcagggcagctggagtccatgaacgatgtggaggaattgactgcactgttgcgaagcgctggtgagtatgaggagcgcaagctgatccgagctgccatccgccgtgtacgggctcaggagattgaggctgccaccttggctgggaggttgtacagcgggcgtcccaacagtggctcaagagaggacagcaaggggctagcggcacacaggctggaacagtgtgaggtgccagagcgagaggaacaggaacagcaggcagaggtttcaaagccaacccccacccctgaaggcaccagccaggatgtgaccacagtgacactcctgctgcgagccccacctgggagcacatccagctcacctgcctcacccagcagttcacccacccctgcctctcctgagcctccattggagcctgccgaggcccagtgccttacagctgaggttccaggcagcccagagccaccccccagcccacccaagaccaccagccctgagcctcaggagtctccaacgctccccagcactgagggccaggtggtcaacaagcttctgtctggccccaaagagacccctgctgcccagagccccaccagaggcccctctgacaccaagagagcagacgtggctggaccccgaccctgccaacgctccctgtcggtgctcagcccccgccaaccagcccagaaccgagagtccaccccccttgccagcggaccttcctcattccagcgggctggctctgtgcgggatcgtgtccacaagttcacatctgattctcctatggctgctaggctccaggatggcacaccccaggctgccctaagtcccctgacccccgcaaggctcctgggcccctccctcaccagcaccacccctgcctcctcctccagcggctcctcctctcggggccccagtgatacctcctcccggttcagcaaggagcaacgaggagtagcccagcccctggcccagcttcgaagctgcccccaggaggagggccccagggggcggggcttggctgctaggccccttgaaaacagagcaggggggcctgtggcacgttcagaggagcctggtgccccgctgcccgtggccgtcggcactgccgagccagggggcagtatgaagaccacattcaccatcgagatcaaggacggccgtggccaggcctccacaggccgggtgctgctgcccacaggcaaccagagggcagaactgacactggggctgcgggcgcccccgaccctactcagcaccagtagtgggggcaagagcaccatcacccgtgtcaacagccctgggaccctggctcggctgggcagtgtcactcatgtcaccagcttcagccatgccccccccagtagccgaggaggctgcagcatcaagatggaagcagagccagcagagcctctcgctgcagcagtggaagcggccaatggggctgagcagacccgagtgaacaaagcaccagaagggcggagccctctgagcgctgaggagctgatgactattgaggatgaaggagtcttggacaagatgctggatcagagcacggactttgaagagcggaagctcatccgggctgcacttcgtgagctccgacaaaggaagagagaccagcgggacaaggagcgggaacggcggctgcaggaggcacggggccggccaggggaggggcgcggcaacacagccactgagaccaccacgaggcacagccagcgggcagctgatggctctgctgtcagcactgttaccaagactgagcggctcgtccactccaatgatggcacacggacggcccgcaccaccacagtggagtcgagtttcgtgaggcgctcggagaatggcagtggcagcaccatgatgcaaaccaagaccttctcctcttcctcctcatccaagaagatgggcagcatcttcgaccgcgaggaccaggccagcccacgggccggcagcctggcggcgctcgagaaacggcaggccgagaagaagaaagagctgatgaaggcgcagagtctgcccaagacctcagcctcccaggcgcgcaaggccatgattgagaagctggagaaggagggcgcggccggcagccctggcggaccccgcgcagccgtgcagcgatccaccagcttcggggtccccaacgccaacagcatcaagcagatgctgctggactggtgtcgagccaagactcgcggctacgagcacgtcgacatccagaacttctcctccagctggagtgatgggatggccttctgtgccctggtgcacaacttcttccctgaggccttcgactatgggcagcttagccctcagaaccgacgccagaacttcgaggtggccttctcatctgcggagacccatgcggactgcccgcagctcctggatacagaggacatggtgcggcttcgagagcctgactggaagatgctggtggactgtgtgcccctggtggaggtggacgacatgatgatcatgggcaagaagcctgaccccaagtgtgtcttcacctatgtgcagtcgctctacaaccacctgcgacgccacgaactgcgcctgcgcggcaagaatgtctagcctgcccgcccgcatggccagccagtggcaagctgccgcccccactctccgggcaccgtctcctgcctgtgcgtccgcccaccgctgccctgtctgttgcgacaccctcccccccacatacacacgcagcgttttgataaattattggttttcaacg

SEQ ID NO: 235630 - DNA, 2823 bp, Artificial Sequence
  derived and/or modified sequence
atggccgacgaggccctggccggcctggacgagggcgccctgagaaagctgctggaggtgaccgccgacctggccgagagaagaagaatcagaagcgccatcagagagctgcagagacaggagctggagagagaggaggaggccctggccagcaagagattcagagccgagagacaggacaacaaggagaactggctgcacagccagcagagagaggccgagcagagagccgccctggccagactggccggccagctggagagcatgaacgacgtggaggagctgaccgccctgctgagaagcgccggcgagtacgaggagagaaagctgatcagagccgccatcagaagagtgagagcccaggagatcgaggccgccaccctggccggcagactgtacagcggcagacccaacagcggcagcagagaggacagcaagggcctggccgcccacagactggagcagtgcgaggtgcccgagagagaggagcaggagcagcaggccgaggtgagcaagcccacccccacccccgagggcaccagccaggacgtgaccaccgtgaccctgctgctgagagccccccccggcagcaccagcagcagccccgccagccccagcagcagccccacccccgccagccccgagccccccctggagcccgccgaggcccagtgcctgaccgccgaggtgcccggcagccccgagcccccccccagcccccccaagaccaccagccccgagccccaggagagccccaccctgcccagcaccgagggccaggtggtgaacaagctgctgagcggccccaaggagacccccgccgcccagagccccaccagaggccccagcgacaccaagagagccgacgtggccggccccagaccctgccagagaagcctgagcgtgctgagccccagacagcccgcccagaacagagagagcacccccctggccagcggccccagcagcttccagagagccggcagcgtgagagacagagtgcacaagttcaccagcgacagccccatggccgccagactgcaggacggcaccccccaggccgccctgagccccctgacccccgccagactgctgggccccagcctgaccagcaccacccccgccagcagcagcagcggcagcagcagcagaggccccagcgacaccagcagcagattcagcaaggagcagagaggcgtggcccagcccctggcccagctgagaagctgcccccaggaggagggccccagaggcagaggcctggccgccagacccctggagaacagagccggcggccccgtggccagaagcgaggagcccggcgcccccctgcccgtggccgtgggcaccgccgagcccggcggcagcatgaagaccaccttcaccatcgagatcaaggacggcagaggccaggccagcaccggcagagtgctgctgcccaccggcaaccagagagccgagctgaccctgggcctgagagccccccccaccctgctgagcaccagcagcggcggcaagagcaccatcaccagagtgaacagccccggcaccctggccagactgggcagcgtgacccacgtgaccagcttcagccacgccccccccagcagcagaggcggctgcagcatcaagatggaggccgagcccgccgagcccctggccgccgccgtggaggccgccaacggcgccgagcagaccagagtgaacaaggcccccgagggcagaagccccctgagcgccgaggagctgatgaccatcgaggacgagggcgtgctggacaagatgctggaccagagcaccgacttcgaggagagaaagctgatcagagccgccctgagagagctgagacagagaaagagagaccagagagacaaggagagagagagaagactgcaggaggccagaggcagacccggcgagggcagaggcaacaccgccaccgagaccaccaccagacacagccagagagccgccgacggcagcgccgtgagcaccgtgaccaagaccgagagactggtgcacagcaacgacggcaccagaaccgccagaaccaccaccgtggagagcagcttcgtgagaagaagcgagaacggcagcggcagcaccatgatgcagaccaagaccttcagcagcagcagcagcagcaagaagatgggcagcatcttcgacagagaggaccaggccagccccagagccggcagcctggccgccctggagaagagacaggccgagaagaagaaggagctgatgaaggcccagagcctgcccaagaccagcgccagccaggccagaaaggccatgatcgagaagctggagaaggagggcgccgccggcagccccggcggccccagagccgccgtgcagagaagcaccagcttcggcgtgcccaacgccaacagcatcaagcagatgctgctggactggtgcagagccaagaccagaggctacgagcacgtggacatccagaacttcagcagcagctggagcgacggcatggccttctgcgccctggtgcacaacttcttccccgaggccttcgactacggccagctgagcccccagaacagaagacagaacttcgaggtggccttcagcagcgccgagacccacgccgactgcccccagctgctggacaccgaggacatggtgagactgagagagcccgactggaagatgctggtggactgcgtgcccctggtggaggtggacgacatgatgatcatgggcaagaagcccgaccccaagtgcgtgttcacctacgtgcagagcctgtacaaccacctgagaagacacgagctgagactgagaggcaagaacgtgtag

SEQ ID NO: 235631 - protein, 345 aa, Artificial Sequence
  derived and/or modified sequence
MLAANPGKTPISLLQEYGTRIGKTPVYDLLKAEGQAHQPNFTFRVTVGDTSCTGQGPSKKAAKHKAAEVALKHLKGGSMLEPALEDSSSFSPLDSSLPEDIPVFTAAAAATPVPSVVLTRSPPMELQPPVSPQQSECNPVGALQELVVQKGWRLPEYTVTQESGPAHRKEFTMTCRVERFIEIGSGTSKKLAKRNAAAKMLLRVHTVPLDARDGNEVEPDDDHFSIGVGSRLDGLRNRGPGCTWDSLRNSVGEKILSLRSCSLGSLGALGPACCRVLSELSEEQAFHVSYLDIEELSLSGLCQCLVELSTQPATVCHGSATTREAARGEAARRALQYLKIMAGSK

SEQ ID NO: 235632 - protein, 366 aa, Artificial Sequence
  derived and/or modified sequence
MSEEEQGSGTTTGCGLPSIEQMLAANPGKTPISLLQEYGTRIGKTPVYDLLKAEGQAHQPNFTFRVTVGDTSCTGQGPSKKAAKHKAAEVALKHLKGGSMLEPALEDSSSFSPLDSSLPEDIPVFTAAAAATPVPSVVLTRSPPMELQPPVSPQQSECNPVGALQELVVQKGWRLPEYTVTQESGPAHRKEFTMTCRVERFIEIGSGTSKKLAKRNAAAKMLLRVHTVPLDARDGNEVEPDDDHFSIGVGSRLDGLRNRGPGCTWDSLRNSVGEKILSLRSCSLGSLGALGPACCRVLSELSEEQAFHVSYLDIEELSLSGLCQCLVELSTQPATVCHGSATTREAARGEAARRALQYLKIMAGSK

SEQ ID NO: 235633 - DNA, 1368 bp, Artificial Sequence
  derived and/or modified sequence
gctcttgggttctgtagttttctcgcgatccaaaaggctccgtgcccaaagcaaatgctggccgccaacccaggcaagaccccgatcagccttctgcaggagtatgggaccagaatagggaagacgcctgtgtacgaccttctcaaagccgagggccaagcccaccagcctaatttcaccttccgggtcaccgttggcgacaccagctgcactggtcagggccccagcaagaaggcagccaagcacaaggcagctgaggtggccctcaaacacctcaaaggggggagcatgctggagccggccctggaggacagcagttctttttctcccctagactcttcactgcctgaggacattccggtttttactgctgcagcagctgctaccccagttccatctgtagtcctaaccaggagcccccccatggaactgcagccccctgtctcccctcagcagtctgagtgcaaccccgttggtgctctgcaggagctggtggtgcagaaaggctggcggttgccggagtacacagtgacccaggagtctgggccagcccaccgcaaagaattcaccatgacctgtcgagtggagcgtttcattgagattgggagtggcacttccaaaaaattggcaaagcggaatgcggcggccaaaatgctgcttcgagtgcacacggtgcctctggatgcccgggatggcaatgaggtggagcctgatgatgaccacttctccattggtgtgggctcccgcctggatggtcttcgaaaccggggcccaggttgcacctgggattctctacgaaattcagtaggagagaagatcctgtccctccgcagttgctccctgggctccctgggtgccctgggccctgcctgctgccgtgtcctcagtgagctctctgaggagcaggcctttcacgtcagctacctggatattgaggagctgagcctgagtggactctgccagtgcctggtggaactgtccacccagccggccactgtgtgtcatggctctgcaaccaccagggaggcagcccgtggtgaggctgcccgccgtgccctgcagtacctcaagatcatggcaggcagcaagtgaagccccagctggactcatggatgtgcaccctttgctccctgctctttctgcctctgggctcatgtatctgcgcagctctggtaccctctgtgggtgccatctctacctctgacacagactgcctgccttgaagctgagaaggcacagggcaaggagccaaggaccacagagcctcagccagcccaggatccgtcctcattttattggtgatgatgaatgggaatgaaatcagggggctgtctactagagcctggaataaatatgctgctttgtgga

SEQ ID NO: 235634 - DNA, 1867 bp, Artificial Sequence
  derived and/or modified sequence
tccagctgcgacacagatggcgcgcgggctcttgggttctgtagttttctcgcgatccaaaaggctccgtgcccaagtgagtccttaccgcctccctacccagcggcttcccctccgctagtacgcatgtccacagcttcacggaccgggagagagggggcgcggaaggaaggaggcgggacggtattacaaacaaaaaaatacggccttctcgagaagcgacggcggagggcccgctcctcccagaaggcggtgcagcctgcccgggcgagccacgcacgcagagggttgtggggcggatagctcccctccagatggaggctcacgaagtagggtgggcgggggactccatatcccagcgtgccccgcggcgggccctaccggccgcgactccgggcttggccccggccctagctcgtcggctgtgtattggggcgcgtggaggctgcagtcacggtggcgcccgcggggacggaggagggaatgagtgaagaggagcaaggctccggcactaccacgggctgcgggctgcctagtatagagcaaatgctggccgccaacccaggcaagaccccgatcagccttctgcaggagtatgggaccagaatagggaagacgcctgtgtacgaccttctcaaagccgagggccaagcccaccagcctaatttcaccttccgggtcaccgttggcgacaccagctgcactggtcagggccccagcaagaaggcagccaagcacaaggcagctgaggtggccctcaaacacctcaaaggggggagcatgctggagccggccctggaggacagcagttctttttctcccctagactcttcactgcctgaggacattccggtttttactgctgcagcagctgctaccccagttccatctgtagtcctaaccaggagcccccccatggaactgcagccccctgtctcccctcagcagtctgagtgcaaccccgttggtgctctgcaggagctggtggtgcagaaaggctggcggttgccggagtacacagtgacccaggagtctgggccagcccaccgcaaagaattcaccatgacctgtcgagtggagcgtttcattgagattgggagtggcacttccaaaaaattggcaaagcggaatgcggcggccaaaatgctgcttcgagtgcacacggtgcctctggatgcccgggatggcaatgaggtggagcctgatgatgaccacttctccattggtgtgggctcccgcctggatggtcttcgaaaccggggcccaggttgcacctgggattctctacgaaattcagtaggagagaagatcctgtccctccgcagttgctccctgggctccctgggtgccctgggccctgcctgctgccgtgtcctcagtgagctctctgaggagcaggcctttcacgtcagctacctggatattgaggagctgagcctgagtggactctgccagtgcctggtggaactgtccacccagccggccactgtgtgtcatggctctgcaaccaccagggaggcagcccgtggtgaggctgcccgccgtgccctgcagtacctcaagatcatggcaggcagcaagtgaagccccagctggactcatggatgtgcaccctttgctccctgctctttctgcctctgggctcatgtatctgcgcagctctggtaccctctgtgggtgccatctctacctctgacacagactgcctgccttgaagctgagaaggcacagggcaaggagccaaggaccacagagcctcagccagcccaggatccgtcctcattttattggtgatgatgaatgggaatgaaatcagggggctgtctactagagcctggaataaatatgctgctttgtggatttttaa

SEQ ID NO: 235635 - DNA, 1101 bp, Artificial Sequence
  derived and/or modified sequence
atgagcgaggaggagcagggcagcggcaccaccaccggctgcggcctgcccagcatcgagcagatgctggccgccaaccccggcaagacccccatcagcctgctgcaggagtacggcaccagaatcggcaagacccccgtgtacgacctgctgaaggccgagggccaggcccaccagcccaacttcaccttcagagtgaccgtgggcgacaccagctgcaccggccagggccccagcaagaaggccgccaagcacaaggccgccgaggtggccctgaagcacctgaagggcggcagcatgctggagcccgccctggaggacagcagcagcttcagccccctggacagcagcctgcccgaggacatccccgtgttcaccgccgccgccgccgccacccccgtgcccagcgtggtgctgaccagaagcccccccatggagctgcagccccccgtgagcccccagcagagcgagtgcaaccccgtgggcgccctgcaggagctggtggtgcagaagggctggagactgcccgagtacaccgtgacccaggagagcggccccgcccacagaaaggagttcaccatgacctgcagagtggagagattcatcgagatcggcagcggcaccagcaagaagctggccaagagaaacgccgccgccaagatgctgctgagagtgcacaccgtgcccctggacgccagagacggcaacgaggtggagcccgacgacgaccacttcagcatcggcgtgggcagcagactggacggcctgagaaacagaggccccggctgcacctgggacagcctgagaaacagcgtgggcgagaagatcctgagcctgagaagctgcagcctgggcagcctgggcgccctgggccccgcctgctgcagagtgctgagcgagctgagcgaggagcaggccttccacgtgagctacctggacatcgaggagctgagcctgagcggcctgtgccagtgcctggtggagctgagcacccagcccgccaccgtgtgccacggcagcgccaccaccagagaggccgccagaggcgaggccgccagaagagccctgcagtacctgaagatcatggccggcagcaagtag

SEQ ID NO: 235636 - DNA, 1101 bp, Artificial Sequence
  derived and/or modified sequence
atgtcagaagaagagcagggcagcggtaccaccaccggctgtggcctcccatccatcgagcagatgcttgctgctaaccccgggaaaacccccatctccctgttgcaggagtatggaacgcggatcgggaaaacccccgtgtatgatctgttaaaagctgagggacaagcacaccagcccaacttcacattcagagtgaccgtcggagacacgtcatgtactggtcagggtcccagcaagaaggctgcaaaacacaaggcggcagaggtagctctgaagcatttaaaagggggcagcatgctcgaacccgcactggaagattcctccagcttttcccctctggattcctccctccctgaagatattcccgtgttcaccgccgctgcagcagctacaccagttccctctgtagtgctgacccgatctccacccatggaattgcagcctcccgtgtctcctcagcagtccgagtgtaaccctgttggcgccctgcaggagttggttgttcaaaagggatggcggctgcccgaatacaccgttacacaggagagcggacctgctcatagaaaggaattcaccatgacttgcagagtcgaaagattcatcgaaatcggctctgggacttctaaaaagcttgcgaagcggaacgccgccgcgaaaatgctcctgagggtgcacacagtccccctggacgcacgagatggaaacgaggttgaacctgatgacgatcacttttctatcggtgtggggtctcgattggacggcctcaggaaccgaggtcccgggtgcacatgggattctctgcggaactccgtgggagagaagattctgtctctgcgctcctgtagcttagggtccctgggagccctgggaccagcttgttgtagggttttatcagagctgagcgaggagcaggcttttcacgtgagttacctcgatatcgaggaactaagtctctccggcctgtgtcagtgtttggttgagctcagcacccagcctgcaaccgtatgccacggctcagccacaaccagggaggccgcacggggggaggctgccagacgtgcattgcagtaccttaagataatggccggcagcaaatag

SEQ ID NO: 235637 - DNA, 1101 bp, Artificial Sequence
  derived and/or modified sequence
atgtctgaggaggagcagggcagcggcaccaccaccggctgcggcctgcccagcattgagcagatgctggccgccaaccctgggaagacccccatcagcctgctgcaggagtatggcacccgcatcggcaagacccctgtgtatgacctgctgaaggccgagggccaggcccaccagcccaacttcaccttccgggtgacagtgggggacaccagctgcaccggccagggccccagcaagaaggccgccaagcacaaggctgctgaggtggccctgaagcacctgaagggcggctccatgctggagcccgccctggaggacagcagcagcttcagccccctggacagcagcctgcctgaggacatccctgtgttcaccgctgctgctgctgccacccctgtgcccagcgtggtgctgaccaggagcccccccatggagctgcagccccctgtgagcccccagcagagcgagtgcaaccctgtgggcgccctgcaggagctggtggtgcagaagggctggaggctgcctgagtacacagtgacccaggagagcggccctgcccacaggaaggagttcaccatgacctgccgggtggagcgcttcatcgagatcggcagcggcaccagcaagaagctggccaagagaaatgctgctgccaagatgctgctgcgggtgcacacagtgcccctggatgccagagatggaaatgaggtggagccagatgatgaccacttcagcattggagtgggcagccggctggatggcctgaggaacagaggccctggctgcacctgggacagcctgagaaattctgtgggggagaagatcctgagcctgcggagctgcagcctgggcagcctgggcgccctgggccctgcctgctgccgggtgctgtctgagctgtctgaggagcaggccttccacgtgtcctacctggacatcgaggagctgagcctgagcggcctgtgccagtgcctggtggagctgagcacccagcctgccaccgtgtgccacggcagcgccaccacccgggaggccgcccggggggaggccgcccggcgggccctgcagtacctgaagatcatggccggcagcaagtag

SEQ ID NO: 235638 - DNA, 1101 bp, Artificial Sequence
  derived and/or modified sequence
atgagcgaggaggagcagggcagcggcaccaccaccggctgcggcctcccaagtattgagcagatgctagctgctaatccaggcaagacgcccatatctctcctccaagagtacggaaccagaatcggaaagacccctgtgtatgatttgctgaaagcagaggggcaggcacatcagcccaactttacctttagagttactgttggggacacaagctgtacaggtcagggaccctccaagaaagcagccaagcacaaggctgccgaggtcgccctgaagcacctgaagggcggttccatgctagagcccgctctggaggattctagctcgttctcaccactcgactcctccctgccagaggacatccctgtgtttaccgcggcagcagctgctacaccggtcccctcagtggtgctgactcgcagcccgcctatggagctacaacctccggtgagtccccagcagtcggagtgtaatcccgttggggccctacaggaactcgtggtgcagaaggggtggcgccttcccgaatatacagtaacacaggagagcgggcctgcacaccgaaaagagtttacaatgacctgccgcgtggaacgctttattgagataggctccggtacttccaagaagctggccaaaaggaacgccgcagctaagatgttactcagagtccatactgtccccctcgacgcaagggatggaaacgaagtagaacctgatgatgaccacttctccatcggcgtggggagcagactggatggcttgaggaatcgcggcccggggtgcacttgggacagcttgagaaactccgtcggggagaagattttaagtctgagatcgtgctcactgggtagcctgggtgccctggggccggcatgttgtcgtgtcctctctgagctgtctgaggaacaagcatttcacgtgtcttatctggatatagaggaactttcattgagtggattgtgtcagtgcctcgtagaactatctacacagcccgctaccgtatgtcatggtagcgccaccactagggaagcggccagaggcgaggcggcaagacgagccctccaatatctcaagattatggccggctcaaaatag

SEQ ID NO: 235639 - DNA, 1101 bp, Artificial Sequence
  derived and/or modified sequence
atgtccgaggaggagcagggcagcgggacgactaccgggtgtggccttccttcaattgaacagatgttggcagctaacccaggtaaaactccaatcagcttgctccaggaatatgggacacgcatcggtaagacccctgtctacgatcttctaaaggcggaggggcaggcacatcagcccaatttcactttcagagtaaccgtgggagatactagctgcaccggacagggcccatctaagaaggccgcaaagcataaagcagccgaagtggccctcaagcatttgaaaggtggtagcatgttagaacccgctctcgaggacagcagcagcttcagccctctggatagctcgctgcccgaggacatccctgtcttcacagctgccgcagccgctacccccgtgccatccgttgttctcaccagaagcccccctatggagctgcagccaccggtttcgccacagcagtccgagtgcaaccccgttggcgctctgcaggagcttgttgtgcagaagggatggagactgccagagtacactgttacccaggagagtgggccagcccaccgaaaggaatttaccatgacttgtagagttgagcgttttatagagattggaagcggaaccagcaaaaaactggccaagagaaatgcagcagcgaaaatgctgctgcgggtacatacagtgcccctggatgcaagagacggcaacgaggttgagcccgacgacgatcactttagcattggggtggggagtcgcctggatggcttaaggaaccggggaccagggtgtacctgggatagcctgcgtaattctgtgggagaaaagatcctgagcctccgcagctgttctcttgggagcttgggggctctgggtccggcttgctgccgcgtgctttccgaactgtcagaagaacaggcattccacgtgagctatcttgacatcgaagagcttagtctgagtggtctgtgccagtgtcttgtcgaactcagcacacagccagccacggtctgccacggtagcgctactacaagagaggccgctcgtggagaagcggcacggagagccctccaatacctaaaaataatggccggaagcaagtag

SEQ ID NO: 235640 - DNA, 1402 bp, Artificial Sequence
  derived and/or modified sequence
ctgcctccagctctaaatagtttggggttggcccggttcccagactgcactggaacactgggctttatgcccccacattcagtgcatttgtatagagcaaatgctggccgccaacccaggcaagaccccgatcagccttctgcaggagtatgggaccagaatagggaagacgcctgtgtacgaccttctcaaagccgagggccaagcccaccagcctaatttcaccttccgggtcaccgttggcgacaccagctgcactggtcagggccccagcaagaaggcagccaagcacaaggcagctgaggtggccctcaaacacctcaaaggggggagcatgctggagccggccctggaggacagcagttctttttctcccctagactcttcactgcctgaggacattccggtttttactgctgcagcagctgctaccccagttccatctgtagtcctaaccaggagcccccccatggaactgcagccccctgtctcccctcagcagtctgagtgcaaccccgttggtgctctgcaggagctggtggtgcagaaaggctggcggttgccggagtacacagtgacccaggagtctgggccagcccaccgcaaagaattcaccatgacctgtcgagtggagcgtttcattgagattgggagtggcacttccaaaaaattggcaaagcggaatgcggcggccaaaatgctgcttcgagtgcacacggtgcctctggatgcccgggatggcaatgaggtggagcctgatgatgaccacttctccattggtgtgggctcccgcctggatggtcttcgaaaccggggcccaggttgcacctgggattctctacgaaattcagtaggagagaagatcctgtccctccgcagttgctccctgggctccctgggtgccctgggccctgcctgctgccgtgtcctcagtgagctctctgaggagcaggcctttcacgtcagctacctggatattgaggagctgagcctgagtggactctgccagtgcctggtggaactgtccacccagccggccactgtgtgtcatggctctgcaaccaccagggaggcagcccgtggtgaggctgcccgccgtgccctgcagtacctcaagatcatggcaggcagcaagtgaagccccagctggactcatggatgtgcaccctttgctccctgctctttctgcctctgggctcatgtatctgcgcagctctggtaccctctgtgggtgccatctctacctctgacacagactgcctgccttgaagctgagaaggcacagggcaaggagccaaggaccacagagcctcagccagcccaggatccgtcctcattttattggtgatgatgaatgggaatgaaatcagggggctgtctactagagcctggaataaatatg

SEQ ID NO: 235641 - protein, 887 aa, Artificial Sequence
  derived and/or modified sequence
MSQPRPRYVVDRAAYSLTLFDDEFEKKDRTYPVGEKLRNAFRCSSAKIKAVVFGLLPVLSWLPKYKIKDYIIPDLLGGLSGGSIQVPQGMAFALLANLPAVNGLYSSFFPLLTYFFLGGVHQMVPGTFAVISILVGNICLQLAPESKFQVFNNATNESYVDTAAMEAERLHVSATLACLTAIIQMGLGFMQFGFVAIYLSESFIRGFMTAAGLQILISVLKYIFGLTIPSYTGPGSIVFTFIDICKNLPHTNIASLIFALISGAFLVLVKELNARYMHKIRFPIPTEMIVVVVATAISGGCKMPKKYHMQIVGEIQRGFPTPVSPVVSQWKDMIGTAFSLAIVSYVINLAMGRTLANKHGYDVDSNQEMIALGCSNFFGSFFKIHVICCALSVTLAVDGAGGKSQVASLCVSLVVMITMLVLGIYLYPLPKSVLGALIAVNLKNSLKQLTDPYYLWRKSKLDCCIWVVSFLSSFFLSLPYGVAVGVAFSVLVVVFQTQFRNGYALAQVMDTDIYVNPKTYNRAQDIQGIKIITYCSPLYFANSEIFRQKVIAKTGMDPQKVLLAKQKYLKKQEKRRMRPTQQRRSLFMKTKTVSLQELQQDFENAPPTDPNNNQTPANGTSVSYITFSPDSSSPAQSEPPASAEAPGEPSDMLASVPPFVTFHTLILDMSGVSFVDLMGIKALAKLSSTYGKIGVKVFLVNIHAQVYNDISHGGVFEDGSLECKHVFPSIHDAVLFAQANARDVTPGHNFQGAPGDAELSLYDSEEDIRSYWDLEQEMFGSMFHAETLTALESLSAAGGCYPYRSESLVSPLFTRQALAAMDKPPAHSTPPTSALSLAAEGHLDFQLLRVSQKQKDKYNCAGLLYKLQKVSQSPHGSVSDGVRLSRT

SEQ ID NO: 235642 - protein, 791 aa, Artificial Sequence
  derived and/or modified sequence
MSQPRPRYVVDRAAYSLTLFDDEFEKKDRTYPVGEKLRNAFRCSSAKIKAVVFGLLPVLSWLPKYKIKDYIIPDLLGGLSGGSIQVPQGMAFALLANLPAVNGLYSSFFPLLTYFFLGGVHQMVPGTFAVISILVGNICLQLAPESKFQVFNNATNESYVDTAAMEAERLHVSATLACLTAIIQMGLGFMQFGFVAIYLSESFIRGFMTAAGLQILISVLKYIFGLTIPSYTGPGSIVFTFIDICKNLPHTNIASLIFALISGAFLVLVKELNARYMHKIRFPIPTEMIVVVVATAISGGCKMPKKYHMQIVGEIQRGFPTPVSPVVSQWKDMIGTAFSLAIVSYVINLAMGRTLANKHGYDVDSNQEMIALGCSNFFGSFFKIHVICCALSVTLAVDGAGGKSQVASLCVSLVVMITMLVLGIYLYPLPKSVLGALIAVNLKNSLKQLTDPYYLWRKSKLDCCIWVVSFLSSFFLSLPYGVAVGVAFSVLVVVFQTQFRNGYALAQVMDTDIYVNPKTYNRAQDIQGIKIITYCSPLYFANSEIFRQKVIAKTGMDPQKVLLAKQKYLKKQEKRRMRPTQQRRSLFMKTKTVSLQELQQDFENAPPTDPNNNQTPANGTSVSYITFSPDSSSPAQSEPPASAEAPGEPSDMLASVPPFVTFHTLILDMSGVSFVDLMGIKALAKLSSTYGKIGVKVFLVNIHAQVYNDISHGGVFEDGSLECKHVFPSIHDAVLFAQANARDVTPGHNFQGAPGDAELSLYDSEEDIRSYWDLEQEMFGSMFHAETLTAL

SEQ ID NO: 235643 - DNA, 2664 bp, Artificial Sequence
  derived and/or modified sequence
atgagccagcccagacccagatacgtggtggacagagccgcctacagcctgaccctgttcgacgacgagttcgagaagaaggacagaacctaccccgtgggcgagaagctgagaaacgccttcagatgcagcagcgccaagatcaaggccgtggtgttcggcctgctgcccgtgctgagctggctgcccaagtacaagatcaaggactacatcatccccgacctgctgggcggcctgagcggcggcagcatccaggtgccccagggcatggccttcgccctgctggccaacctgcccgccgtgaacggcctgtacagcagcttcttccccctgctgacctacttcttcctgggcggcgtgcaccagatggtgcccggcaccttcgccgtgatcagcatcctggtgggcaacatctgcctgcagctggcccccgagagcaagttccaggtgttcaacaacgccaccaacgagagctacgtggacaccgccgccatggaggccgagagactgcacgtgagcgccaccctggcctgcctgaccgccatcatccagatgggcctgggcttcatgcagttcggcttcgtggccatctacctgagcgagagcttcatcagaggcttcatgaccgccgccggcctgcagatcctgatcagcgtgctgaagtacatcttcggcctgaccatccccagctacaccggccccggcagcatcgtgttcaccttcatcgacatctgcaagaacctgccccacaccaacatcgccagcctgatcttcgccctgatcagcggcgccttcctggtgctggtgaaggagctgaacgccagatacatgcacaagatcagattccccatccccaccgagatgatcgtggtggtggtggccaccgccatcagcggcggctgcaagatgcccaagaagtaccacatgcagatcgtgggcgagatccagagaggcttccccacccccgtgagccccgtggtgagccagtggaaggacatgatcggcaccgccttcagcctggccatcgtgagctacgtgatcaacctggccatgggcagaaccctggccaacaagcacggctacgacgtggacagcaaccaggagatgatcgccctgggctgcagcaacttcttcggcagcttcttcaagatccacgtgatctgctgcgccctgagcgtgaccctggccgtggacggcgccggcggcaagagccaggtggccagcctgtgcgtgagcctggtggtgatgatcaccatgctggtgctgggcatctacctgtaccccctgcccaagagcgtgctgggcgccctgatcgccgtgaacctgaagaacagcctgaagcagctgaccgacccctactacctgtggagaaagagcaagctggactgctgcatctgggtggtgagcttcctgagcagcttcttcctgagcctgccctacggcgtggccgtgggcgtggccttcagcgtgctggtggtggtgttccagacccagttcagaaacggctacgccctggcccaggtgatggacaccgacatctacgtgaaccccaagacctacaacagagcccaggacatccagggcatcaagatcatcacctactgcagccccctgtacttcgccaacagcgagatcttcagacagaaggtgatcgccaagaccggcatggacccccagaaggtgctgctggccaagcagaagtacctgaagaagcaggagaagagaagaatgagacccacccagcagagaagaagcctgttcatgaagaccaagaccgtgagcctgcaggagctgcagcaggacttcgagaacgccccccccaccgaccccaacaacaaccagacccccgccaacggcaccagcgtgagctacatcaccttcagccccgacagcagcagccccgcccagagcgagccccccgccagcgccgaggcccccggcgagcccagcgacatgctggccagcgtgccccccttcgtgaccttccacaccctgatcctggacatgagcggcgtgagcttcgtggacctgatgggcatcaaggccctggccaagctgagcagcacctacggcaagatcggcgtgaaggtgttcctggtgaacatccacgcccaggtgtacaacgacatcagccacggcggcgtgttcgaggacggcagcctggagtgcaagcacgtgttccccagcatccacgacgccgtgctgttcgcccaggccaacgccagagacgtgacccccggccacaacttccagggcgcccccggcgacgccgagctgagcctgtacgacagcgaggaggacatcagaagctactgggacctggagcaggagatgttcggcagcatgttccacgccgagaccctgaccgccctggagagcctgagcgccgccggcggctgctacccctacagaagcgagagcctggtgagccccctgttcaccagacaggccctggccgccatggacaagccccccgcccacagcaccccccccaccagcgccctgagcctggccgccgagggccacctggacttccagctgctgagagtgagccagaagcagaaggacaagtacaactgcgccggcctgctgtacaagctgcagaaggtgagccagagcccccacggcagcgtgagcgacggcgtgagactgagcagaacctag

SEQ ID NO: 235644 - DNA, 2376 bp, Artificial Sequence
  derived and/or modified sequence
atgagccagcccagacccagatacgtggtggacagagccgcctacagcctgaccctgttcgacgacgagttcgagaagaaggacagaacctaccccgtgggcgagaagctgagaaacgccttcagatgcagcagcgccaagatcaaggccgtggtgttcggcctgctgcccgtgctgagctggctgcccaagtacaagatcaaggactacatcatccccgacctgctgggcggcctgagcggcggcagcatccaggtgccccagggcatggccttcgccctgctggccaacctgcccgccgtgaacggcctgtacagcagcttcttccccctgctgacctacttcttcctgggcggcgtgcaccagatggtgcccggcaccttcgccgtgatcagcatcctggtgggcaacatctgcctgcagctggcccccgagagcaagttccaggtgttcaacaacgccaccaacgagagctacgtggacaccgccgccatggaggccgagagactgcacgtgagcgccaccctggcctgcctgaccgccatcatccagatgggcctgggcttcatgcagttcggcttcgtggccatctacctgagcgagagcttcatcagaggcttcatgaccgccgccggcctgcagatcctgatcagcgtgctgaagtacatcttcggcctgaccatccccagctacaccggccccggcagcatcgtgttcaccttcatcgacatctgcaagaacctgccccacaccaacatcgccagcctgatcttcgccctgatcagcggcgccttcctggtgctggtgaaggagctgaacgccagatacatgcacaagatcagattccccatccccaccgagatgatcgtggtggtggtggccaccgccatcagcggcggctgcaagatgcccaagaagtaccacatgcagatcgtgggcgagatccagagaggcttccccacccccgtgagccccgtggtgagccagtggaaggacatgatcggcaccgccttcagcctggccatcgtgagctacgtgatcaacctggccatgggcagaaccctggccaacaagcacggctacgacgtggacagcaaccaggagatgatcgccctgggctgcagcaacttcttcggcagcttcttcaagatccacgtgatctgctgcgccctgagcgtgaccctggccgtggacggcgccggcggcaagagccaggtggccagcctgtgcgtgagcctggtggtgatgatcaccatgctggtgctgggcatctacctgtaccccctgcccaagagcgtgctgggcgccctgatcgccgtgaacctgaagaacagcctgaagcagctgaccgacccctactacctgtggagaaagagcaagctggactgctgcatctgggtggtgagcttcctgagcagcttcttcctgagcctgccctacggcgtggccgtgggcgtggccttcagcgtgctggtggtggtgttccagacccagttcagaaacggctacgccctggcccaggtgatggacaccgacatctacgtgaaccccaagacctacaacagagcccaggacatccagggcatcaagatcatcacctactgcagccccctgtacttcgccaacagcgagatcttcagacagaaggtgatcgccaagaccggcatggacccccagaaggtgctgctggccaagcagaagtacctgaagaagcaggagaagagaagaatgagacccacccagcagagaagaagcctgttcatgaagaccaagaccgtgagcctgcaggagctgcagcaggacttcgagaacgccccccccaccgaccccaacaacaaccagacccccgccaacggcaccagcgtgagctacatcaccttcagccccgacagcagcagccccgcccagagcgagccccccgccagcgccgaggcccccggcgagcccagcgacatgctggccagcgtgccccccttcgtgaccttccacaccctgatcctggacatgagcggcgtgagcttcgtggacctgatgggcatcaaggccctggccaagctgagcagcacctacggcaagatcggcgtgaaggtgttcctggtgaacatccacgcccaggtgtacaacgacatcagccacggcggcgtgttcgaggacggcagcctggagtgcaagcacgtgttccccagcatccacgacgccgtgctgttcgcccaggccaacgccagagacgtgacccccggccacaacttccagggcgcccccggcgacgccgagctgagcctgtacgacagcgaggaggacatcagaagctactgggacctggagcaggagatgttcggcagcatgttccacgccgagaccctgaccgccctgtag

SEQ ID NO: 235645 - DNA, 2664 bp, Artificial Sequence
  derived and/or modified sequence
atgtcgcagccacggcccagatatgtcgtcgatcgggccgcttattcccttaccctatttgacgatgagtttgagaaaaaagaccgcacctacccagtaggggaaaagcttcgcaatgccttccgctgctcttcagcaaaaatcaaggcagtggttttcggtttgctgcccgtgctgtcttggttgcctaaatataagattaaagactatatcatccctgacttacttggaggccttagcggtgggagcatccaggtgcctcaagggatggcgtttgctctactcgcaaacctgccagccgtgaacgggctatatagctcttttttcccgctgctgacctacttctttctcggaggtgtccaccagatggttcccggaacatttgctgtgatttcaattctcgtcggtaacatctgtttgcagcttgctcccgagagcaagtttcaggtctttaataacgccacgaatgagtcttacgtggatacagcggccatggaggccgagaggttgcacgtctccgccacattagcctgtttgaccgcgatcatccagatggggttggggtttatgcagtttggattcgtggcgatttacctatcagagagttttattcgcgggttcatgacagctgctggtctccagatcttgatttctgtactgaaatacattttcggtctcactatcccttcttacaccgggccagggtccatcgttttcaccttcattgatatatgcaagaacctaccacacactaatatcgcatccctcatctttgccttaatctctggggccttccttgtactcgtaaaagagttgaatgccaggtacatgcataagatccgattccccattccaactgagatgattgtggtagtggtcgccacagccatttcagggggatgtaagatgcccaagaagtatcacatgcaaatcgtcggcgaaatccagagaggctttccgacccctgtgtcgcccgtggtaagtcagtggaaagacatgattggcactgcctttagtctcgccattgtctcatatgtaataaacctggctatgggcaggacactcgccaacaagcacggctacgacgtagatagcaatcaggagatgatcgcccttggctgctctaatttttttggtagtttctttaaaattcatgtgatatgctgcgcactctctgtgacactggcagtcgacggcgcaggcggcaagagtcaagtggcatctttgtgtgtgagcctagtggtgatgataactatgctggtgctaggcatctacctctaccccttgcctaagtctgtcttgggtgctctgatagcggttaacttgaagaactctctgaaacagctgaccgacccgtactacctatggagaaagagcaaactggattgctgcatctgggttgtgagctttttatcttctttttttttgtcacttccttatggcgtcgccgttggagtcgctttcagcgttctagtagtcgtgtttcaaacacagttccggaatggatacgctctcgctcaggtcatggacacagatatttatgtgaatcctaagacgtataatagagcccaggatatccagggcatcaagatcattacatactgcagtcctctgtacttcgcaaactccgagatttttcgacagaaagtgattgctaagacaggaatggatccccagaaagtgttgctggcaaagcaaaaatatctgaagaaacaggagaagcgtagaatgaggcccacacaacagcgcaggtctctttttatgaaaacgaagaccgtgtcactacaggagttgcaacaggattttgaaaatgcgccccctactgatccgaacaataaccagactccagctaacggcacgtcagtgagctacattacttttagccctgacagttcctcgcctgcccaatcagagcctccggcgagcgctgaagctcctggagagccctccgatatgctcgcttccgtcccccccttcgtgaccttccacacactcatcctggatatgtccggagtctcttttgtcgatttgatgggaatcaaagcactggctaagcttagtagcacgtatggcaaaatcggcgtgaaggtcttcttagtgaatatccatgctcaggtatataacgatataagccatgggggggtgtttgaggatggatcactcgagtgcaaacatgtctttccaagcattcacgatgccgtgctctttgctcaagcgaatgcccgcgatgtgacgccaggacataattttcagggcgctccaggcgatgctgaactgtctctgtacgattccgaagaagatatcagatcgtattgggaccttgaacaggagatgtttggatcaatgtttcatgctgaaaccctgacggctctggaaagcctgtccgccgcaggcgggtgttacccttacagatcagagtcattggtttccccattgttcacacgacaggcacttgctgcaatggacaagcccccagctcattctactccccctactagcgccctgagcttagcggccgaagggcacctggattttcagttgttgcgcgtctctcagaagcaaaaggacaaatacaattgtgctggacttctgtataaattgcagaaggtgtcacaatccccgcacggtagcgttagcgatggcgtcaggctcagtagaacatag

SEQ ID NO: 235646 - DNA, 2664 bp, Artificial Sequence
  derived and/or modified sequence
atgagccaacccagaccacgctacgtggttgaccgcgccgcctattctctgacccttttcgacgacgagtttgagaagaaagacaggacttacccagtgggcgagaagctgagaaacgcgtttcggtgtagtagcgccaagatcaaagctgtggtgtttggtctgcttcctgtgttgagttggcttcctaaatacaaaatcaaagactacatcatacctgacctgttgggcgggctgtctggtggatccattcaggtcccccagggaatggccttcgccttgctggccaatctcccggccgtcaatgggctatacagcagtttcttccccttactgacctatttcttcctcggcggagtacatcagatggttcccggcacattcgcagtgatttctattctcgtcgggaatatatgtctgcagctcgcaccggagagtaagtttcaggtttttaataacgcaaccaatgaatcatatgtggatacagccgcaatggaggctgaacgtctccatgtctctgctacgctggcatgcttaacagcaattattcagatggggcttggcttcatgcagttcggtttcgttgccatctacctctctgaaagttttatcaggggattcatgaccgcggctggccttcagattctcataagcgtcctcaaatatatatttggcctcaccatcccaagctacacaggccctggctccatagtgttcacatttatcgatatctgtaagaatttaccacatacgaacatcgcctctttgatttttgcgttgatttccggcgcgttccttgtgctggtgaaggagctgaacgctcgttacatgcacaaaatccggtttcccatcccaactgagatgattgtcgtagtggttgcaacagcaatctctggtggttgtaaaatgcctaaaaaatatcatatgcagatcgtgggtgagatacagcgagggttccccacacctgttagtcccgtggtttcgcaatggaaagatatgatcggcactgcattcagcctagctattgtgtcttatgtcatcaatctggcaatgggaaggaccctcgccaataaacacggctacgacgttgattctaaccaggagatgatcgctctcggttgttctaacttctttgggtcttttttcaagatacacgtgatctgttgcgcgctgtccgtgactttagcggtggacggcgcgggtgggaaaagccaagtggcctcgctgtgtgtgtccctagtggtgatgatcaccatgttagttcttggcatatacctatatccattgccgaaatccgtactaggcgcccttatcgcagtgaaccttaaaaacagtctgaaacagctgacggacccctattacctctggcgtaaatccaagctggactgttgtatctgggtggtgagcttcctgtcaagcttctttctgtctctgccttacggcgtagctgtaggggtcgctttttcagtcctggtcgtcgtattccaaacacagtttagaaacggctacgctttagcgcaggtcatggacaccgacatttacgttaaccctaagacatacaaccgagcccaagacatccagggaatcaagattataacatattgtagcccgctttactttgcaaactcagagatctttaggcaaaaggtgattgcgaaaactggcatggacccacagaaagtgctgttggccaaacagaaatatctcaagaagcaggaaaaaagaagaatgcgccccactcagcagcgaagatccttgttcatgaagacgaagactgtgtccctacaggagctccaacaggattttgagaatgccccgcccacagatcctaataataatcagacacccgcaaacggtacttccgtatcctatatcaccttcagccctgatagctctagcccagcacagtctgagcctccagcctctgcagaagcccccggggaaccttccgatatgcttgcatctgtacccccttttgtgaccttccacacacttattcttgatatgtcaggcgtctctttcgtcgacctaatgggcataaaagcgctagccaaactgtcctcaacctatggaaagattggagtcaaggtgtttttagtgaatatccatgctcaggtctataatgacatttctcacggcggggtcttcgaggacgggagtctggagtgtaaacatgtgttcccatctattcatgacgccgtgctttttgcccaggctaacgctagagatgtgacaccaggccacaattttcagggtgcccccggcgatgcagaattatccttgtacgattccgaggaggatatccgcagctattgggacctggagcaggaaatgtttggatcaatgttccatgccgagactctgaccgccctcgagagtttatccgccgcaggcggatgctacccatacaggagtgaatcactagtgtctcctctgttcacccggcaggctttggctgctatggacaaacctcccgcccatagtacccctccaacttccgcactgagcttagcagcagaaggccacctggacttccaactgctccgggtttctcaaaagcaaaaagataagtataattgcgccggtcttctgtataaactgcagaaagtgtctcaaagccctcacggatctgtgtctgacggcgtacggctgtcaagaacatag

SEQ ID NO: 235647 - DNA, 2376 bp, Artificial Sequence
  derived and/or modified sequence
atgtcccaaccccgcccacgctatgtcgtcgacagggccgcatattccctgacactctttgatgacgagtttgagaaaaaggaccggacatacccagtcggtgagaagctccgcaatgcgttccgatgttcttcagcaaaaatcaaagccgttgtgttcggattgttgcctgtgctgtcttggctccctaaatacaagattaaggattatatcattccagacttactgggcggcctgagtggcggctctattcaggtacctcagggtatggcctttgccctgcttgccaatttgcccgcagttaacggcctgtactcttccttttttcctctcctgacatatttttttctggggggtgttcaccagatggtgccaggtaccttcgctgtgatcagcatcctcgtggggaatatctgtttgcagctagccccagagagtaagtttcaggtcttcaacaacgccacaaatgagagctatgtggataccgctgccatggaggctgaacgcctgcatgtgtcggctaccctggcctgtctgaccgccataattcaaatgggattagggtttatgcagttcggctttgtggccatttatctgagcgaatcgtttattcgaggttttatgactgcggctgggctccagatcttaataagtgttcttaaatatattttcggcctcacaatccccagttacaccggtcccggatctattgtcttcacctttatagacatctgtaagaacttgccccacactaatatagcttccctgattttcgcgttgatctcaggagcgttcttggtgctcgtgaaggagctaaacgcaagatacatgcacaagattcgtttccccataccaaccgagatgatcgtggtggtcgtcgccacagccatctctggagggtgcaagatgccgaaaaaatatcacatgcaaatcgtgggggaaatacagcgtggcttccctacacctgtgtctccagttgtcagccagtggaaagacatgattggcaccgctttttcactcgccatcgtgtcgtatgtcataaacctcgcaatgggccgaacacttgccaacaagcatgggtacgacgtggacagcaatcaggagatgatcgctctcggatgcagtaatttcttcgggtcatttttcaagattcacgttatctgctgcgctctgagcgtgacgttggccgttgatggggcagggggtaaaagtcaagtggcgtctctttgcgtgagtctggtggtcatgatcactatgttagttctgggcatatatctttacccactacccaagtccgtgttgggagccctgatcgctgtgaacctcaagaacagtcttaagcagctgactgatccttactatctgtggcgcaagagtaaactcgactgctgcatctgggtggtgtcttttcttagcagcttcttccttagtctgccgtacggggtcgcggtgggtgttgccttcagcgtcctggtggtggtgtttcaaacccaattcagaaatggctacgcgcttgcacaggtgatggacaccgacatctacgtgaatccaaaaacttataaccgcgcacaagacattcagggcatcaagatcattacatattgttccccactatactttgctaactcagaaatctttcggcagaaagtgatcgccaaaactggtatggacccccagaaggtgctgctggcgaagcagaaatacctcaaaaaacaggagaaaagacgaatgcgccccactcaacagcgacgaagcttgttcatgaagaccaagactgtgtctctgcaggagctgcagcaggacttcgaaaatgcccctcccaccgaccccaataacaaccaaacccccgcgaatggaacatccgtgtcctacattacctttagtccggacagcagctcaccagcccaatctgagccccccgctagcgcggaagcccctggcgagcccagcgatatgctcgccagcgtcccccccttcgtgacttttcacacactgatacttgacatgtccggcgtgtcattcgtcgacctgatgggaatcaaagccctggccaagttgtcctccacttacgggaaaatcggagttaaggtctttctggtgaatattcatgcacaggtctacaatgatatttcccacgggggagtcttcgaggacggaagtctggaatgtaagcacgtgtttccatcgatacacgacgctgtcctgtttgcccaggcgaacgctagggatgtcactcccggccataacttccagggagcccctggggatgccgaactttctctgtatgattccgaggaagacatccgcagctattgggacctggaacaggaaatgtttgggtctatgttccacgccgagactctcacggctctttag

SEQ ID NO: 235648 - DNA, 2664 bp, Artificial Sequence
  derived and/or modified sequence
atgagccagccccggccccgctacgtggtggacagagctgcctacagcctgaccctgtttgatgatgaatttgagaagaaggacaggacctaccctgtgggggagaagctgagaaatgccttccgctgcagcagcgccaagatcaaggctgtggtgtttggcctgctgcctgtgctgtcctggctgcccaagtacaagatcaaggactacatcatcccagacctgctgggcggcctgagcggcggcagcatccaggtgccccagggcatggcctttgccctgctggccaacctgcctgctgtgaatggcctgtacagcagcttcttccccctgctgacctacttcttcctgggcggcgtgcaccagatggtgcccggcacctttgctgtgatcagcatcctggtgggcaacatctgcctgcagctggcccctgagagcaagttccaggtgttcaacaatgccaccaatgaaagctatgtggacacagctgccatggaggccgagcggctgcacgtgtctgccaccctggcctgcctgacagccatcatccagatgggcctgggcttcatgcagtttggatttgtggccatctacctgtctgagagcttcatccggggcttcatgacagctgctggcctgcagatcctgatctctgtgctgaagtacatcttcggcctgaccatccccagctacacaggccctggcagcatcgtgttcaccttcatcgacatctgcaagaacctgccccacaccaacatcgccagcctcatctttgccctgatcagcggggccttcctggtgctggtgaaggagctgaatgcccgctacatgcacaagatccgcttccccatccccacagagatgattgtggtggtggtggccacagccatcagcggcggctgcaagatgcccaagaagtaccacatgcagatcgtgggggagatccagaggggcttccccacccctgtgtcccctgtggtgtcccagtggaaggacatgattggaacagccttcagcctggccatcgtgtcctatgtgatcaacctggccatgggccgcaccctggccaacaagcacggctatgatgtggacagcaaccaggagatgattgccctgggctgcagcaacttcttcggcagcttcttcaagatccacgtgatctgctgtgccctgtctgtgaccctggccgtggatggagctgggggcaagagccaggtggccagcctgtgtgtgtccctggtggtgatgatcaccatgctggtgctgggcatctacctgtaccccctgcccaagtctgtgctgggcgccctgattgctgtgaacctgaagaacagcctgaagcagctgacagacccctactacctgtggaggaagagcaagctggactgctgcatctgggtggtgtccttcctgagcagcttcttcctgagcctgccctacggcgtggccgtgggcgtggccttctctgtgctggtggtggtgttccagacccagttcagaaatggctacgccctggcccaggtgatggacacagacatctacgtgaaccccaagacctacaacagagcccaggacatccagggcatcaagatcatcacctactgcagccccctgtactttgccaacagcgagatcttccggcagaaggtgattgccaagacaggcatggacccccagaaggtgctgctggccaagcagaagtacctgaagaagcaggagaagaggaggatgaggcccacccagcagaggaggagcctcttcatgaagaccaagacagtgtccctgcaggagctgcagcaggactttgaaaatgccccacccacagaccccaacaacaaccagaccccagccaacggcacctctgtgtcctacatcaccttctccccagacagcagcagccctgcccagagcgagcccccagccagcgctgaggcccctggagagcccagcgacatgctggcctctgtgcccccatttgtgaccttccacaccctcatcctggacatgtctggagtgtcctttgtggacctgatgggcatcaaggccctggccaagctgagcagcacctacggcaagattggagtgaaggtgttcctggtgaacatccacgcccaggtgtacaatgacatcagccacggcggcgtgtttgaagatggcagcctggagtgcaagcacgtgttccccagcatccatgatgctgtgctgtttgcccaggccaatgccagagatgtgaccccaggccacaacttccagggcgcccctggagatgctgagctgagcctgtatgacagcgaggaggacatccgcagctactgggacctggagcaggagatgtttggctccatgttccacgccgagaccctgacagccctggagagcctgtctgctgctgggggctgctacccctacagaagtgagagcctggtgagccccctcttcacccggcaggccctggccgccatggacaagcccccagcccacagcaccccacccaccagcgccctgagcctggccgctgagggccacctggacttccagctgctgcgggtgtcccagaagcagaaggacaagtacaactgtgccggcctgctgtacaagctgcagaaggtgtcccagagcccccacggctctgtgtctgatggagtgcggctgagcaggacatag

SEQ ID NO: 235649 - DNA, 2376 bp, Artificial Sequence
  derived and/or modified sequence
atgagccagccccggccccgctacgtggtggacagagctgcctacagcctgaccctgtttgatgatgaatttgagaagaaggacaggacctaccctgtgggggagaagctgagaaatgccttccgctgcagcagcgccaagatcaaggctgtggtgtttggcctgctgcctgtgctgtcctggctgcccaagtacaagatcaaggactacatcatcccagacctgctgggcggcctgagcggcggcagcatccaggtgccccagggcatggcctttgccctgctggccaacctgcctgctgtgaatggcctgtacagcagcttcttccccctgctgacctacttcttcctgggcggcgtgcaccagatggtgcccggcacctttgctgtgatcagcatcctggtgggcaacatctgcctgcagctggcccctgagagcaagttccaggtgttcaacaatgccaccaatgaaagctatgtggacacagctgccatggaggccgagcggctgcacgtgtctgccaccctggcctgcctgacagccatcatccagatgggcctgggcttcatgcagtttggatttgtggccatctacctgtctgagagcttcatccggggcttcatgacagctgctggcctgcagatcctgatctctgtgctgaagtacatcttcggcctgaccatccccagctacacaggccctggcagcatcgtgttcaccttcatcgacatctgcaagaacctgccccacaccaacatcgccagcctcatctttgccctgatcagcggggccttcctggtgctggtgaaggagctgaatgcccgctacatgcacaagatccgcttccccatccccacagagatgattgtggtggtggtggccacagccatcagcggcggctgcaagatgcccaagaagtaccacatgcagatcgtgggggagatccagaggggcttccccacccctgtgtcccctgtggtgtcccagtggaaggacatgattggaacagccttcagcctggccatcgtgtcctatgtgatcaacctggccatgggccgcaccctggccaacaagcacggctatgatgtggacagcaaccaggagatgattgccctgggctgcagcaacttcttcggcagcttcttcaagatccacgtgatctgctgtgccctgtctgtgaccctggccgtggatggagctgggggcaagagccaggtggccagcctgtgtgtgtccctggtggtgatgatcaccatgctggtgctgggcatctacctgtaccccctgcccaagtctgtgctgggcgccctgattgctgtgaacctgaagaacagcctgaagcagctgacagacccctactacctgtggaggaagagcaagctggactgctgcatctgggtggtgtccttcctgagcagcttcttcctgagcctgccctacggcgtggccgtgggcgtggccttctctgtgctggtggtggtgttccagacccagttcagaaatggctacgccctggcccaggtgatggacacagacatctacgtgaaccccaagacctacaacagagcccaggacatccagggcatcaagatcatcacctactgcagccccctgtactttgccaacagcgagatcttccggcagaaggtgattgccaagacaggcatggacccccagaaggtgctgctggccaagcagaagtacctgaagaagcaggagaagaggaggatgaggcccacccagcagaggaggagcctcttcatgaagaccaagacagtgtccctgcaggagctgcagcaggactttgaaaatgccccacccacagaccccaacaacaaccagaccccagccaacggcacctctgtgtcctacatcaccttctccccagacagcagcagccctgcccagagcgagcccccagccagcgctgaggcccctggagagcccagcgacatgctggcctctgtgcccccatttgtgaccttccacaccctcatcctggacatgtctggagtgtcctttgtggacctgatgggcatcaaggccctggccaagctgagcagcacctacggcaagattggagtgaaggtgttcctggtgaacatccacgcccaggtgtacaatgacatcagccacggcggcgtgtttgaagatggcagcctggagtgcaagcacgtgttccccagcatccatgatgctgtgctgtttgcccaggccaatgccagagatgtgaccccaggccacaacttccagggcgcccctggagatgctgagctgagcctgtatgacagcgaggaggacatccgcagctactgggacctggagcaggagatgtttggctccatgttccacgccgagaccctgacagccctgtag

SEQ ID NO: 235650 - DNA, 2664 bp, Artificial Sequence
  derived and/or modified sequence
atgagccagccccggccccggtacgtggtggaccgggccgcctacagtcttactctcttcgatgatgagtttgaaaagaaagaccgtacatatcctgtaggcgagaagttaagaaatgcctttaggtgctcttcagccaagattaaagcagtggtttttggcctgcttcccgtgctcagttggctgcctaagtacaagatcaaagactatatcattccagatttactgggcgggctgtcaggtggatctatacaggttccacaggggatggcctttgctttgctggccaatctcccagccgtgaatggtctgtactcttcctttttcccccttcttacttatttcttcctcggcggtgtccatcaaatggtgcccggtacttttgcagttatttccatcttggtgggaaatatatgtcttcagttggcgcccgagagcaagttccaagttttcaacaatgcaaccaacgaatcatacgtcgacaccgccgcgatggaggccgaaagactccatgtaagtgcaaccctggcttgtctgaccgccattattcagatggggctcggatttatgcaattcgggttcgtcgctatctatctgtcagaatctttcatccggggtttcatgaccgctgcaggattgcagatattaatcagcgtactgaagtatatatttggactgaccataccaagctacacagggcctggcagcattgtcttcacattcattgacatctgtaagaacctgccccatacaaacattgccagcctcatcttcgccctgatctcgggcgccttcctcgtattggtgaaggagctgaacgctcggtatatgcataaaattcggtttcccataccaacagaaatgatcgtggttgtggttgccacagctataagtgggggctgtaaaatgcctaagaaatatcatatgcaaatagtcggtgagatccaacgcgggttccctacacctgtcagtccggtggtttcccagtggaaggatatgatcggaacagcttttagtttggcaatcgtgtcttacgtgatcaatctggctatggggcgcacccttgctaataagcacggttatgatgtcgactctaatcaggagatgatcgcgctcggctgcagcaacttttttggttcattcttcaaaatccatgtgatctgttgtgcactgtctgtcaccttagctgtggatggggccggcggtaaatcacaagtcgccagtctgtgtgtgagcctggttgtgatgatcacaatgctagttctgggcatttatctttatccactgccaaaatcggtgttgggtgccctgatcgcagtgaacctaaagaatagtcttaagcagcttaccgatccatactacttatggaggaaatccaaactggactgctgtatatgggtagtgtcattcctctctagcttcttcctatccctcccgtacggtgtggccgtgggagtggcttttagtgtgcttgttgtggtgtttcaaacccagttccgtaatggatacgccctggcccaggtcatggatacggacatttatgtgaatcccaagacctacaatcgggcccaggatattcagggtattaaaatcataacttactgcagtcctctgtattttgccaacagtgaaatatttcgtcagaaggttatagctaaaactggtatggacccacaaaaggtcctgctggctaaacagaaataccttaagaagcaagaaaagagacgcatgaggcccacccagcagaggcggagcctattcatgaagactaagactgtctccctccaagaacttcagcaagattttgagaatgcaccccccaccgaccccaataataaccagacccccgccaatgggacatcggtgtcgtatatcactttcagtcccgactcaagctcaccagctcagtctgaacccccggcttctgccgaggccccaggcgagccctctgacatgctggcctctgtgccgccattcgtaactttccacacactcatccttgatatgagcggcgtttccttcgtggacctgatgggcatcaaggccctagctaagctaagtagcacctacgggaaaatcggggtaaaggtgttcctcgtcaatatccatgctcaagtctataatgacattagccatggcggagtctttgaggatggatcgctggaatgcaagcatgtcttcccatcaattcacgatgcagtgctctttgctcaagccaatgcccgtgatgtcacaccaggccataacttccagggagctcccggcgacgccgaattaagcctttacgactctgaagaggacatcagaagttactgggacttggagcaggagatgttcggctctatgtttcacgctgaaaccctcaccgcgttagagtcactgtcggctgccgggggttgctacccttatcgttcggagtcattagtgagcccattgttcactaggcaggccctagcagcgatggataaacccccagctcatagcacgcctcctacctccgcgctcagcctggctgctgagggtcacctcgatttccagctgttgcgcgtaagccaaaagcagaaagataaatacaattgtgccggcctgctgtacaagcttcagaaggtctctcaaagccctcatggcagcgtcagcgacggtgtgcgcctgagtaggacatag

SEQ ID NO: 235651 - DNA, 2664 bp, Artificial Sequence
  derived and/or modified sequence
atgagccagccccggccccggtacgtggtggaccgggccgcctactctctgacgctttttgacgacgagtttgaaaagaaggacagaacttatcctgtaggggagaaactgcggaacgcttttagatgctctagcgctaagattaaagctgtggtcttcggcctcctgccagtgctgagttggctccccaagtataaaattaaggactatattattccagatcttcttggaggcctttccggcggctcaattcaggttccccagggcatggcattcgcgctcctggccaacctgcctgctgtgaacgggctgtactcatcctttttccccctactaacatatttcttcttgggcggagtgcaccagatggtgcctggaacttttgctgtgatctctatcctcgtaggcaacatttgcctccagctggcgcctgagtctaagtttcaagtgtttaacaatgcaaccaacgagtcctacgtcgacacagcggccatggaggccgagcgcctccatgtgagcgctactctggcatgtctcacagccatcattcagatgggcttaggtttcatgcagttcggcttcgtcgccatctaccttagcgagagcttcatcaggggcttcatgacagccgccgggcttcagatcctgataagcgtccttaagtatatcttcggcctgactattccttcctatacgggtcccgggtccattgtctttacctttatcgacatttgcaagaatttaccccacaccaatattgcttccttgatcttcgctctgatttcaggcgctttcctcgtcctggtgaaggagttaaacgcccgttatatgcataaaatccggtttcctataccaactgaaatgatagtcgtcgttgtcgctacagccatcagcggagggtgtaaaatgcctaagaaataccacatgcaaatcgttggcgaaatccagcgagggttccctaccccagtcagccctgtcgtctcgcagtggaaagacatgattggtacagcattctctctggctatcgtgtcgtatgtgattaacttggccatggggaggacattggccaataagcatggctacgatgtggactctaaccaggaaatgatcgctctcggatgcagcaatttctttggatccttttttaagatccatgttatctgctgcgccttgtcagtcacactggccgttgacggagcagggggtaagtcccaggttgcttccctgtgtgtgtctctggtagtgatgattaccatgctggtgcttggaatctacctataccctctcccgaagtcagttcttggagcccttatcgctgttaatctgaaaaacagcctgaagcagttaacagatccttattatctgtggaggaagagtaagctggactgttgtatatgggtcgtttcattcctgtctagtttctttctgtccctgccttatggtgtcgccgtaggcgtagcgttctctgtccttgttgttgtgttccaaacacaatttagaaatggatacgctttggcccaagtgatggacactgacatttacgtgaaccccaagacgtacaatagggcccaggatatccaggggatcaagattatcacttactgttcacccttgtactttgcaaatagtgagatatttagacagaaagtgattgccaagactggcatggatccacaaaaggtgctcttggctaaacagaagtacctgaaaaaacaggaaaaaagacgaatgagaccgacgcagcagcggaggagcctctttatgaagaccaagacggtgagtctgcaagaactgcagcaggactttgagaacgcacctcctaccgaccctaataataaccaaacgcccgctaatgggacctcggtgtcatacattacattttcaccggatagctccagtcctgcgcaatctgagcctccggctagcgcagaggcccccggcgagccaagtgacatgctcgcctctgtgcctcccttcgtgacctttcacacactgatccttgatatgtctggagtatcgtttgtcgatctgatgggaatcaaagcgctggccaagctttcaagcacctatggcaagattggcgttaaggtttttctcgtgaatattcacgcacaggtgtataacgatattagccacggtggagtgtttgaggacggcagtctagagtgcaagcacgtcttcccttccatccacgacgctgttctgttcgcccaagcaaacgcacgcgatgtaacccctggccacaacttccagggggctcccggggacgccgagttgagtctttacgactctgaggaggacatccgctcttactgggacttagaacaggagatgtttggtagcatgttccacgccgagactctcactgctcttgagtccctctctgcagcaggagggtgttatccttatcgcagcgaaagcctggttagtcctcttttcacaagacaagccctcgccgctatggacaaaccacccgcccacagtactcctcctaccagcgccctttcactggccgccgaaggccacctggacttccagcttctgcgagtgtcccagaagcaaaaggataaatataactgcgccggcctcctgtacaaactgcagaaagtcagtcaaagtccccatggctccgtgtccgacggagttcgcctttctcgtacatag

SEQ ID NO: 235652 - DNA, 2376 bp, Artificial Sequence
  derived and/or modified sequence
atgagccagccccggccccggtacgtggtggaccgggccgcctactccttgaccttattcgatgatgagtttgaaaagaaagatcggacctaccccgtcggagagaagctgcgaaatgcatttagatgttcttccgccaagatcaaagccgttgtatttggccttcttcctgttctgtcctggcttcccaaatacaaaatcaaggactacatcataccagaccttctcggcggactgtccgggggctccatccaagtgccccagggaatggcctttgccttgctggcaaatttacctgccgtaaacggactttactcctctttctttccactcttaacgtacttctttttgggaggggtacatcaaatggtgcctgggacattcgcggtgatttcaatcttggtgggcaacatttgtctccagctcgcgcccgagtccaaattccaagtgtttaataacgccaccaacgagagctatgtggatactgcagcaatggaggccgaacggctgcacgtgagcgctacattggcatgtctgactgccatcatccagatgggcctgggcttcatgcagtttggattcgtggcaatctatctgagcgaatcctttattcgtggcttcatgacagccgcgggcctccagattcttatttccgttctcaaatatatcttcgggctgactatcccaagctatacaggaccaggctctattgtttttaccttcatcgatatctgcaagaacttacctcatacaaatattgctagcttgatatttgcgctgatctctggcgcattccttgttcttgtaaaggagctcaatgcccgctatatgcataaaatacggtttcctatcccaaccgagatgatagtggtagtggttgcaactgctattagcggtggatgcaagatgcctaaaaaataccacatgcagattgtaggcgagatccagagggggttccctacacctgtatcaccagttgtgtcccagtggaaagatatgattggtacagcatttagcctcgcgatcgtgagctatgtgattaacctcgccatgggtaggacactcgccaataagcatggctacgacgtcgactctaatcaggaaatgatcgcactggggtgtagtaatttcttcgggtctttcttcaagatccatgtgatctgttgtgcactctcagtgaccctggccgttgatggcgcggggggcaagtctcaggtggcttccctgtgtgtgagcttagtggtcatgatcactatgttagtcttagggatctacctctacccacttcctaagtcggtacttggggcattgatcgcggtgaacctgaagaactccttaaagcaactcacagatccctattatttatggagaaaatcaaagcttgattgctgcatttgggtggttagctttctttcatcttttttcctctcattaccttacggggtggcagtgggagtcgctttttctgtgctggtggtcgtgttccagacccaatttaggaacggctacgctctcgcacaagtgatggataccgacatctacgtgaaccctaagacctacaaccgagcccaggatatacagggcatcaaaatcatcacttactgcagtcctctttacttcgcaaatagtgaaatctttaggcagaaagtgattgctaagacaggcatggatccccagaaagtgctattagcgaagcagaaatacttgaaaaaacaggagaaacggaggatgaggccaacacagcagcgcaggtctctttttatgaagacgaaaactgttagtctccaagagctgcaacaggactttgagaacgccccccccacggatccaaataacaaccagaccccagccaacggcacctcggtttcttatattaccttttctccggattcttcttctccagctcaatccgagcccccagcatccgccgaagctccaggcgaacccagcgatatgctggccagcgttccacccttcgtcacttttcataccttgatcctggacatgtctggcgtcagttttgtcgatctgatgggaataaaagctctggctaaactctcgagcacttatggaaaaatcggggtgaaggtttttctagtgaacattcacgcacaagtttacaacgacataagccacggcggagtctttgaggacggctctctggagtgtaaacatgtgtttccatccatccatgatgcagtgctcttcgcgcaggcaaatgcacgtgatgtaacaccagggcataactttcagggcgcaccaggagatgccgaactgtctctgtatgactcagaagaggatattcggagttactgggatcttgagcaggagatgttcggatccatgttccacgcagaaaccctgacagctctctag

SEQ ID NO: 235653 - DNA, 2664 bp, Artificial Sequence
  derived and/or modified sequence
atgagccagccgcgaccacggtatgtggttgatcgggctgcgtatagcctgactctgttcgacgacgagttcgaaaagaaggatcggacgtaccccgtgggagagaagcttcgcaacgcctttcgatgcagcagcgccaaaatcaaagcagtcgtgtttggactgctgccagtccttagctggttgcctaagtataagatcaaggattatataatccccgatctgctgggaggactgagtggcggtagtatccaggtcccacagggaatggcattcgctctgttggctaatctaccagccgtgaatggcctttatagttctttctttccccttttaacctatttcttcctggggggtgttcaccagatggttccaggcacgtttgctgtgatctccattcttgtgggaaacatctgtttgcagctggcgccagaatcaaagttccaggtttttaacaacgccacaaacgagtcttatgtggacactgcagccatggaggcggagcggctacacgtttctgccaccctcgcctgtcttaccgccattattcaaatgggtctgggattcatgcaatttggattcgttgccatatatctatcagaatcatttatccggggtttcatgaccgctgcgggacttcagatactcatctcagtccttaagtatatttttgggctcaccatcccttcttatacaggaccagggagtattgtctttacgttcatagacatctgcaagaatctccctcatactaatatagcttcactgatattcgcccttatcagtggggctttcctggtcctggttaaggaactgaacgcgaggtatatgcacaagataaggtttcctattccaaccgagatgatcgtagttgttgttgccactgcaatcagcggcggttgtaaaatgcctaaaaaataccacatgcagatcgttggagagatacaacgcggttttcccacacctgtgtcaccagttgtgtctcaatggaaggatatgatcggcaccgcctttagccttgctatcgtttcgtacgtgattaacttggccatgggaaggaccctcgccaataaacacggatacgacgtggactctaatcaggagatgatcgccctcggatgttccaatttcttcggctcctttttcaagatacacgtgatctgctgcgccctgtcagtgacccttgccgtggatggcgcaggcggaaaatcccaggttgcttccttgtgtgtatcgctcgtagtgatgatcactatgcttgtcctggggatatacctgtaccccttacccaagtccgtcctgggcgcactcatagctgtcaatcttaaaaatagtcttaagcagcttaccgatccctattacctgtggagaaagtcaaagttggactgctgcatttgggttgtgagcttcctatctagtttttttctgtctctcccttacggcgtggctgttggggtagctttttctgtgttggtcgtcgtttttcagacgcagtttcgaaatggatacgcactcgcccaagttatggatacagatatctatgtcaacccaaaaacttacaaccgcgcacaggacatacaagggataaagatcattacatactgttccccactgtactttgccaacagcgagatcttccggcagaaagttatagcaaagaccgggatggacccgcagaaggtgctcctggccaaacagaaatatctgaaaaaacaggaaaagcgccgtatgagaccaacacaacagaggaggtcactgttcatgaagaccaagaccgttagcttgcaggagctgcaacaggactttgaaaatgctcctccaaccgaccccaacaacaatcagacgcccgctaacgggacttcggtgtcctatatcaccttctcccctgactccagttccccagcccagtccgagccccctgctagtgcagaggcgcctggggagcccagtgacatgctcgcttccgtcccacccttcgtgactttccataccctcatcttggacatgtccggcgtgagcttcgtggatctcatggggataaaagccttggctaagttgtctagtacctatggcaaaattggagtgaaggtgttcctggttaatattcatgcccaggtatacaacgatatttctcacggaggtgtatttgaggacgggtctctcgagtgtaagcacgtgtttcccagtattcacgatgcagtgctgtttgctcaggcaaacgctagggatgtcacacctgggcataacttccagggtgccccaggggacgccgaactgtcgttgtacgacagcgaggaggatattaggagttactgggacttggaacaggagatgttcggctccatgtttcacgccgagactttaactgcactggagtctttgtcggccgcaggcggatgctatccatatcgttccgagagcctcgtcagccccttattcacccgccaggcccttgcagctatggataagcctcctgcccacagcaccccacctacctctgcactgtctctggccgcagagggtcaccttgattttcagttgctcagggtttcacagaaacagaaggacaaatataactgcgccggactcctttataagctccaaaaagtgtcccagtctcctcacggcagcgtaagcgatggagttcgactatctaggacgtag

SEQ ID NO: 235654 - DNA, 2664 bp, Artificial Sequence
  derived and/or modified sequence
atgtctcagccgaggccgagatatgtcgtcgatcgagccgcttattcactaactctgtttgatgatgaattcgaaaagaaggacaggacttacccagttggggaaaagcttagaaatgccttccgctgttcatcagcgaagatcaaggctgtggtctttggccttctcccagttttgtcttggctccccaagtataagatcaaggactacattatacctgatttgcttggcggattgagtggaggctccattcaagtgcctcaggggatggctttcgcactgcttgccaaccttcccgcagtgaatggtctttactccagcttcttccctctcctgacatatttctttttgggcggagtgcaccagatggttccaggaactttcgccgtgatttccattttggtcggcaatatatgtttgcagctggcccctgaatccaagtttcaggtgtttaataacgctactaacgagtcctacgtggacactgctgctatggaagccgagcgtcttcacgtcagtgccactttggcctgcctgacggcaataattcagatgggcctgggattcatgcagtttggttttgtcgccatctatctctcggaatcttttatccggggatttatgacagccgcaggcctacaaattctgatcagtgtcttaaagtacatcttcggactaacaatacccagctatacaggccctggatccatagtgttcacctttatcgacatctgcaagaatctgccacataccaacatcgcgagcctaatattcgctctcatttctggggctttcctggtcctggtgaaagaactaaatgctcgatatatgcacaagattaggtttccgattcccaccgagatgatcgtcgttgtggtggcaaccgccatctcaggcggatgcaagatgcctaaaaaataccatatgcaaattgttggcgagatccaacgaggtttcccgaccccggtgagtcctgtggtttcccaatggaaggacatgattggtactgcgttcagtctagctattgtgagctatgtcatcaatctcgcaatgggacggaccctcgctaataagcatggatacgacgtagacagcaatcaagaaatgattgcactgggctgcagcaactttttcgggagctttttcaagatacacgtgatctgttgtgcattgagtgttacgctggctgtggacggcgcaggaggaaagagtcaagtggcttctttgtgcgttagtcttgttgtgatgattactatgctagttctgggaatatatctgtatccccttccaaaaagtgtgctgggtgctctgattgcagtgaaccttaaaaacagcttgaaacagcttaccgatccatattatttgtggaggaaaagcaagttagattgctgcatctgggtggtgagtttcctgtcgagcttctttttgtctctaccatacggagtcgctgttggtgtggccttcagtgtccttgtagtggtgttccagactcagtttcggaatggctacgctctggcccaggtgatggacacagacatctacgtgaaccccaaaacttacaatagggcgcaggatatccaagggatcaagattatcacatactgttcacctctgtacttcgcaaacagcgagatcttcagacagaaagttatcgccaagaccggtatggatccgcagaaagtactgctcgcaaagcagaagtaccttaaaaagcaggaaaaacggcgaatgcgtccaactcagcagagaagatccctctttatgaagaccaagaccgtctcactacaggaacttcagcaggacttcgagaatgcccctcccacggatccaaacaataaccaaacccctgcgaacgggacctctgtgtcatacatcacctttagccccgactccagttctccagcgcagtccgaacctcccgctagcgccgaggcgcctggggagccctcagacatgttagcgtccgtgccccctttcgtcacatttcacacgctgattctggatatgtcgggcgtgtcctttgtggacctcatgggaattaaagccctggccaaactgtcatcgacatacgggaagatcggtgtgaaagtctttttggtgaacatccacgcccaagtttataatgacataagtcatgggggagtctttgaagacggctctcttgagtgcaagcatgtgttcccgtcaattcacgacgccgtgctattcgctcaggccaacgcaagggatgtgacgccagggcacaatttccagggtgcccctggcgatgcagagctgagcttatatgattcggaagaggacatccgtagttactgggaccttgagcaggagatgttcgggagtatgttccatgctgagacattaaccgccctagaaagtctgtcagcggctggcggatgctatccgtaccggagtgagagcttagtgtcccccttgtttactcggcaggcactcgcggcaatggataaacctcctgcccacagcacaccaccaacatctgccttgtccctcgccgcagaagggcacctggactttcaacttctgcgtgtctcacaaaaacagaaggacaaatataactgcgccggacttctgtataagctgcaaaaagtttcccagagcccccatgggtcagtgtcggacggtgtgagactgtccagaacgtag

SEQ ID NO: 235655 - DNA, 2376 bp, Artificial Sequence
  derived and/or modified sequence
atgagtcaaccaaggcctcgatatgtggtggaccgggcagcttatagcctgactttgtttgatgatgaattcgaaaaaaaggaccgcacctaccccgtcggggaaaagctcaggaatgcctttcgatgttcctccgccaagattaaagccgtcgtctttggtctgctccctgttctgtcctggttgcctaaatataaaattaaggactacattatcccagatttgctcggtggtctatctggaggatcaatccaagtgccccaggggatggcttttgctctgcttgctaacctacctgccgtaaacggtctgtactccagtttcttccccctcctgacctattttttcttggggggagttcaccagatggtccctggtacgtttgcagtgatttcaatccttgtcgggaatatctgcctacaactggcgcctgaatctaagttccaggtgttcaataatgccacaaatgaatcctacgtcgatacagccgctatggaggccgaacggctgcatgtgtctgccactctcgcttgcctgaccgccataatccagatggggctgggctttatgcagttcgggtttgtagccatctatttgtcagaatctttcatcagaggcttcatgacagccgctggactgcaaattctgatatccgtgctaaagtacattttcggcctgaccattcccagctacacaggaccaggcagcatcgtgtttacatttatcgatatctgtaagaacctcccgcacacaaatatcgccagtctcatcttcgccctgatttcaggcgctttcctggtactagtgaaggagctcaacgcccgatacatgcataaaatacggttccccattcccaccgagatgattgtcgtggttgtcgccaccgcgataagcggtgggtgcaaaatgccaaagaagtaccacatgcagatcgtcggggagattcaaagggggttcccaaccccagtttcgcccgtcgtgagccagtggaaggacatgatcgggacggcattcagcctggcaatcgttagctacgttattaacctggccatgggacgcacgcttgccaacaaacacgggtacgatgtagattctaatcaggagatgattgcactcgggtgctctaacttcttcggatctttcttcaaaatccatgtgatttgttgcgcattaagcgtcactttagccgtggacggcgcaggaggaaagagccaagtcgcgagtctttgcgtgtctctggttgttatgatcacaatgctggtccttggaatttacctgtacccccttcctaagtcggtattgggggctctcatcgcagtgaacctcaaaaactctctgaaacagctgaccgatccttattacctttggagaaaatccaagctggattgttgcatctgggttgttagctttctctcttccttcttcctgtctctgccatatggcgttgccgtgggagtcgccttttctgtgcttgtagtagtgttccagactcaattccgtaacggttacgccctggcgcaggtgatggacacggatatctacgtcaatccaaagacatataatcgggcacaagatatacagggcattaagatcattacctactgttcccccctatacttcgccaatagtgagattttcaggcagaaagttattgccaagacaggcatggatccacagaaggttctgcttgcaaagcagaagtacctgaagaagcaggaaaaacggcgaatgagaccgacgcaacaaagacgttctctattcatgaagacaaagacggtctctctacaggagctgcagcaggacttcgaaaatgctccacccactgaccctaataataatcaaacccctgccaatggcaccagtgtcagctacatcacttttagccccgacagctcctcccctgcgcagtctgagcctccagcaagtgcagaggctccgggtgaaccatcagacatgctcgccagtgtcccaccttttgtcacttttcacactctcatcctcgatatgagcggtgtctcatttgtggatttgatgggcatcaaagctctggccaaactctctagcacgtatgggaagataggggtaaaggtcttcctggttaacatccatgcccaggtttataacgacatcagccatggcggtgtattcgaagatggctctctggaatgtaagcatgttttcccctctatccacgacgctgtgctgtttgcccaggcgaacgcaagggacgttacccccggacacaactttcagggcgcacccggagacgcagaactgagtttatatgacagtgaggaagatatccggtcatattgggacttggagcaggaaatgtttggctctatgttccacgcggagacccttacagccttgtag

SEQ ID NO: 235656 - DNA, 4510 bp, Artificial Sequence
  derived and/or modified sequence
atatgagccagcccaggccccgctacgtggtagacagagccgcatactcccttaccctcttcgacgatgagtttgagaagaaggaccggacatacccagtgggagagaaacttcgcaatgccttcagatgttcctcagccaagatcaaagctgtggtgtttgggctgctgcctgtgctctcctggctccccaagtacaagattaaagactacatcattcctgacctgctcggtggactcagcgggggatccatccaggtcccacaaggcatggcatttgctctgctggccaaccttcctgcagtcaatggcctctactcctccttcttccccctcctgacctacttcttcctggggggtgttcaccagatggtgccaggtacctttgccgttatcagcatcctggtgggtaacatctgtctgcagctggccccagagtcgaaattccaggtcttcaacaatgccaccaatgagagctatgtggacacagcagccatggaggctgagaggctgcacgtgtcagctacgctagcctgcctcaccgccatcatccagatgggtctgggcttcatgcagtttggctttgtggccatctacctctccgagtccttcatccggggcttcatgacggccgccggcctgcagatcctgatttcggtgctcaagtacatcttcggactgaccatcccctcctacacaggcccagggtccatcgtctttaccttcattgacatttgcaaaaacctcccccacaccaacatcgcctcgctcatcttcgctctcatcagcggtgccttcctggtgctggtgaaggagctcaatgctcgctacatgcacaagattcgcttccccatccctacagagatgattgtggtggtggtggcaacagctatctccgggggctgtaagatgcccaaaaagtatcacatgcagatcgtgggagaaatccaacgcgggttccccaccccggtgtcgcctgtggtctcacagtggaaggacatgataggcacagccttctccctagccatcgtgagctacgtcatcaacctggctatgggccggaccctggccaacaagcacggctacgacgtggattcgaaccaggagatgatcgctctcggctgcagcaacttctttggctccttctttaaaattcatgtcatttgctgtgcgctttctgtcactctggctgtggatggagctggaggaaaatcccaggtggccagcctgtgtgtgtctctggtggtgatgatcaccatgctggtcctggggatctatctgtatcctctccctaagtctgtgctaggagccctgatcgctgtcaatctcaagaactccctcaagcaactcaccgacccctactacctgtggaggaagagcaagctggactgttgcatctgggtagtgagcttcctctcctccttcttcctcagcctgccctatggtgtggcagtgggtgtcgccttctccgtcctggtcgtggtcttccagactcagtttcgaaatggctatgcactggcccaggtcatggacactgacatttatgtgaatcccaagacctataatagggcccaggatatccaggggattaaaatcatcacgtactgctcccctctctactttgccaactcagagatcttcaggcaaaaggtcatcgccaagacaggcatggacccccagaaagtattactagccaagcaaaaatacctcaagaagcaggagaagcggagaatgaggcccacacaacagaggaggtctctattcatgaaaaccaagactgtctccctgcaggagctgcagcaggactttgagaatgcgccccccaccgaccccaacaacaaccagaccccggctaacggcaccagcgtgtcctatatcaccttcagccctgacagctcctcacctgcccagagtgagccaccagcctccgctgaggcccccggcgagcccagtgacatgctggccagcgtcccacccttcgtcaccttccacaccctcatcctggacatgagtggagtcagcttcgtggacttgatgggcatcaaggccctggccaagctgagctccacctatgggaagatcggcgtgaaggtcttcttggtgaacatccatgcccaggtgtacaatgacattagccatggaggcgtctttgaggatgggagtctagaatgcaagcacgtctttcccagcatacatgacgcagtcctctttgcccaggcaaatgctagagacgtgaccccaggacacaacttccaaggggctccaggggatgctgagctctccttgtacgactcagaggaggacattcgcagctactgggacttagagcaggagatgttcgggagcatgtttcacgcagagaccctgaccgccctagagagcctctcagcagcaggggggtgctacccttacaggagtgagagtctggtgagcccactcttcacccgtcaggccctggccgcaatggacaagcctcctgctcactccaccccacccacctctgccctgtccttggcagctgaaggacaccttgacttccagcttttacgagtgagccaaaaacagaaggacaagtacaactgtgctggcctgctgtacaagcttcaaaaagtgtcccagagcccacacggctcggtgtcagatggtgtcaggctgtcacggacatagggataaacttggttaggactctggcttgccttccccagctgcctcaactctgtctctggcagctctgcacccagggaccatgtgctctccacacccaggagtctaggccttggtaactatgcgccccccctccatcatccccaaggctgcccaaaccaccactgctgtcagcaagcacatcagactctagcctggacagtggccaggaccgtcgagaccaccagagctacctccccggggacagcccactaaggttctgcctcagcctcctgaaacatcactgccctcagaggctgctcccttcccctggaggctggctagaaaccccaaagagggggatgggtagctggcagaatcatctggcatcctagtaatagataccagttattctgcacaaaacttttgggaattcctctttgcacccagagactcagaggggaagagggtgctagtaccaacacagggaaaacggatgggacctgggcccagacagtcccccttgaccccagggcccatcagggaaatgcctccctttggtaaatctgccttatccttctttacctggcaaagagccaatcatgttaactcttccttatcagcctgtggcccagagacacaatggggtccttctgtaggcaaaggtggaagtcctccagggatccgctacatcccctaactgcatgcagatgtggaaaggggctgatccagattgggtcttcctgcacaggaagactctttaacacccttaggacctcaggccatcttctcctatgaagatgaaaataggggttaagttttccatatgtacaaggaggtattgagaggaaccctactgttgacttgaaaataaataggttccatgtgtaagtgttttgtaaaatttcagtggaaatgcacagaaaatcttctggcctctcatcactgcttttctcaagcttcttcagcttaacaaccccttccctaacaggttgggctggcccagcctaggaaaacatccccatttctaacttcagccagacctgcgttgtgtgtctgtgtgttgagtgagctggtcagctaacaagtcttcttagagttaaaggagggggtgctggccaagagccaacacattcttggcccaggagcattgcttttctgtgaattcattatgccatctggctgccaatggaactcaaaacttggaaggcgaaggacaatgttatctgggattcaccgtgcccagcacccgaagtgccaaattccaggaggacaagagccttagccaatgacaactcactctcccctactccacctccttccaagtccagctcaggcccaggaggtgggagaaggtcacagagcctcaggaatttccaagtcagagtcccctttgaaccaagtatctagatcccctgaggacttgatgaagtgatccttaacccccaagtaatcattaacccccagaccagcctcagaactgaaggagattgttgacccagtgacctggagttgaggctcagggagagatctgccacatgtctgagggttgcagagcccgctgtggaggtaagattggaaacacatgaggcagagggaagacattgaagaaaacatctctgctggaatatttggaaaagaacactcttctggacctggttgaagcaggaaagatggaggcaaagtagtgaaataatccagaatttcaatgcttttgaatgttcttagtgatactgacctgtgataatataattcccagggaggactgggaaccttatctcttgagatatttgcataatttatttaatttaagcctcattctccttttgttcattttggtaataaactggatttgaattgtgaacaaa

SEQ ID NO: 235657 - DNA, 4616 bp, Artificial Sequence
  derived and/or modified sequence
gagcagagccctttcacacacctcaggaacacctttcggctgcccgctccccagacacacctgcagccctgcccagccggctttgctcacccactgcttgtaaatgccccagatatgagccagcccaggccccgctacgtggtagacagagccgcatactcccttaccctcttcgacgatgagtttgagaagaaggaccggacatacccagtgggagagaaacttcgcaatgccttcagatgttcctcagccaagatcaaagctgtggtgtttgggctgctgcctgtgctctcctggctccccaagtacaagattaaagactacatcattcctgacctgctcggtggactcagcgggggatccatccaggtcccacaaggcatggcatttgctctgctggccaaccttcctgcagtcaatggcctctactcctccttcttccccctcctgacctacttcttcctggggggtgttcaccagatggtgccaggtacctttgccgttatcagcatcctggtgggtaacatctgtctgcagctggccccagagtcgaaattccaggtcttcaacaatgccaccaatgagagctatgtggacacagcagccatggaggctgagaggctgcacgtgtcagctacgctagcctgcctcaccgccatcatccagatgggtctgggcttcatgcagtttggctttgtggccatctacctctccgagtccttcatccggggcttcatgacggccgccggcctgcagatcctgatttcggtgctcaagtacatcttcggactgaccatcccctcctacacaggcccagggtccatcgtctttaccttcattgacatttgcaaaaacctcccccacaccaacatcgcctcgctcatcttcgctctcatcagcggtgccttcctggtgctggtgaaggagctcaatgctcgctacatgcacaagattcgcttccccatccctacagagatgattgtggtggtggtggcaacagctatctccgggggctgtaagatgcccaaaaagtatcacatgcagatcgtgggagaaatccaacgcgggttccccaccccggtgtcgcctgtggtctcacagtggaaggacatgataggcacagccttctccctagccatcgtgagctacgtcatcaacctggctatgggccggaccctggccaacaagcacggctacgacgtggattcgaaccaggagatgatcgctctcggctgcagcaacttctttggctccttctttaaaattcatgtcatttgctgtgcgctttctgtcactctggctgtggatggagctggaggaaaatcccaggtggccagcctgtgtgtgtctctggtggtgatgatcaccatgctggtcctggggatctatctgtatcctctccctaagtctgtgctaggagccctgatcgctgtcaatctcaagaactccctcaagcaactcaccgacccctactacctgtggaggaagagcaagctggactgttgcatctgggtagtgagcttcctctcctccttcttcctcagcctgccctatggtgtggcagtgggtgtcgccttctccgtcctggtcgtggtcttccagactcagtttcgaaatggctatgcactggcccaggtcatggacactgacatttatgtgaatcccaagacctataatagggcccaggatatccaggggattaaaatcatcacgtactgctcccctctctactttgccaactcagagatcttcaggcaaaaggtcatcgccaagacaggcatggacccccagaaagtattactagccaagcaaaaatacctcaagaagcaggagaagcggagaatgaggcccacacaacagaggaggtctctattcatgaaaaccaagactgtctccctgcaggagctgcagcaggactttgagaatgcgccccccaccgaccccaacaacaaccagaccccggctaacggcaccagcgtgtcctatatcaccttcagccctgacagctcctcacctgcccagagtgagccaccagcctccgctgaggcccccggcgagcccagtgacatgctggccagcgtcccacccttcgtcaccttccacaccctcatcctggacatgagtggagtcagcttcgtggacttgatgggcatcaaggccctggccaagctgagctccacctatgggaagatcggcgtgaaggtcttcttggtgaacatccatgcccaggtgtacaatgacattagccatggaggcgtctttgaggatgggagtctagaatgcaagcacgtctttcccagcatacatgacgcagtcctctttgcccaggcaaatgctagagacgtgaccccaggacacaacttccaaggggctccaggggatgctgagctctccttgtacgactcagaggaggacattcgcagctactgggacttagagcaggagatgttcgggagcatgtttcacgcagagaccctgaccgccctagagagcctctcagcagcaggggggtgctacccttacaggagtgagagtctggtgagcccactcttcacccgtcaggccctggccgcaatggacaagcctcctgctcactccaccccacccacctctgccctgtccttggcagctgaaggacaccttgacttccagcttttacgagtgagccaaaaacagaaggacaagtacaactgtgctggcctgctgtacaagcttcaaaaagtgtcccagagcccacacggctcggtgtcagatggtgtcaggctgtcacggacatagggataaacttggttaggactctggcttgccttccccagctgcctcaactctgtctctggcagctctgcacccagggaccatgtgctctccacacccaggagtctaggccttggtaactatgcgccccccctccatcatccccaaggctgcccaaaccaccactgctgtcagcaagcacatcagactctagcctggacagtggccaggaccgtcgagaccaccagagctacctccccggggacagcccactaaggttctgcctcagcctcctgaaacatcactgccctcagaggctgctcccttcccctggaggctggctagaaaccccaaagagggggatgggtagctggcagaatcatctggcatcctagtaatagataccagttattctgcacaaaacttttgggaattcctctttgcacccagagactcagaggggaagagggtgctagtaccaacacagggaaaacggatgggacctgggcccagacagtcccccttgaccccagggcccatcagggaaatgcctccctttggtaaatctgccttatccttctttacctggcaaagagccaatcatgttaactcttccttatcagcctgtggcccagagacacaatggggtccttctgtaggcaaaggtggaagtcctccagggatccgctacatcccctaactgcatgcagatgtggaaaggggctgatccagattgggtcttcctgcacaggaagactctttaacacccttaggacctcaggccatcttctcctatgaagatgaaaataggggttaagttttccatatgtacaaggaggtattgagaggaaccctactgttgacttgaaaataaataggttccatgtgtaagtgttttgtaaaatttcagtggaaatgcacagaaaatcttctggcctctcatcactgcttttctcaagcttcttcagcttaacaaccccttccctaacaggttgggctggcccagcctaggaaaacatccccatttctaacttcagccagacctgcgttgtgtgtctgtgtgttgagtgagctggtcagctaacaagtcttcttagagttaaaggagggggtgctggccaagagccaacacattcttggcccaggagcattgcttttctgtgaattcattatgccatctggctgccaatggaactcaaaacttggaaggcgaaggacaatgttatctgggattcaccgtgcccagcacccgaagtgccaaattccaggaggacaagagccttagccaatgacaactcactctcccctactccacctccttccaagtccagctcaggcccaggaggtgggagaaggtcacagagcctcaggaatttccaagtcagagtcccctttgaaccaagtatctagatcccctgaggacttgatgaagtgatccttaacccccaagtaatcattaacccccagaccagcctcagaactgaaggagattgttgacccagtgacctggagttgaggctcagggagagatctgccacatgtctgagggttgcagagcccgctgtggaggtaagattggaaacacatgaggcagagggaagacattgaagaaaacatctctgctggaatatttggaaaagaacactcttctggacctggttgaagcaggaaagatggaggcaaagtagtgaaataatccagaatttcaatgcttttgaatgttcttagtgatactgacctgtgataatataattcccagggaggactgggaaccttatctcttgagatatttgcataatttatttaatttaagcctcattctccttttgttcattttggtaataaactggatttgaattgtg

SEQ ID NO: 235658 - DNA, 4799 bp, Artificial Sequence
  derived and/or modified sequence
gagcagagccctttcacacacctcaggaacacctttcggctgcccgctccccagacacacctgcagccctgcccagccggctttgctcacccactgcttgtaaatgccccagatatgagccagcccaggccccgctacgtggtagacagagccgcatactcccttaccctcttcgacgatgagtttgagaagaaggaccggacatacccagtgggagagaaacttcgcaatgccttcagatgttcctcagccaagatcaaagctgtggtgtttgggctgctgcctgtgctctcctggctccccaagtacaagattaaagactacatcattcctgacctgctcggtggactcagcgggggatccatccaggtcccacaaggcatggcatttgctctgctggccaaccttcctgcagtcaatggcctctactcctccttcttccccctcctgacctacttcttcctggggggtgttcaccagatggtgccaggtacctttgccgttatcagcatcctggtgggtaacatctgtctgcagctggccccagagtcgaaattccaggtcttcaacaatgccaccaatgagagctatgtggacacagcagccatggaggctgagaggctgcacgtgtcagctacgctagcctgcctcaccgccatcatccagatgggtctgggcttcatgcagtttggctttgtggccatctacctctccgagtccttcatccggggcttcatgacggccgccggcctgcagatcctgatttcggtgctcaagtacatcttcggactgaccatcccctcctacacaggcccagggtccatcgtctttaccttcattgacatttgcaaaaacctcccccacaccaacatcgcctcgctcatcttcgctctcatcagcggtgccttcctggtgctggtgaaggagctcaatgctcgctacatgcacaagattcgcttccccatccctacagagatgattgtggtggtggtggcaacagctatctccgggggctgtaagatgcccaaaaagtatcacatgcagatcgtgggagaaatccaacgcgggttccccaccccggtgtcgcctgtggtctcacagtggaaggacatgataggcacagccttctccctagccatcgtgagctacgtcatcaacctggctatgggccggaccctggccaacaagcacggctacgacgtggattcgaaccaggagatgatcgctctcggctgcagcaacttctttggctccttctttaaaattcatgtcatttgctgtgcgctttctgtcactctggctgtggatggagctggaggaaaatcccaggtggccagcctgtgtgtgtctctggtggtgatgatcaccatgctggtcctggggatctatctgtatcctctccctaagtctgtgctaggagccctgatcgctgtcaatctcaagaactccctcaagcaactcaccgacccctactacctgtggaggaagagcaagctggactgttgcatctgggtagtgagcttcctctcctccttcttcctcagcctgccctatggtgtggcagtgggtgtcgccttctccgtcctggtcgtggtcttccagactcagtttcgaaatggctatgcactggcccaggtcatggacactgacatttatgtgaatcccaagacctataatagggcccaggatatccaggggattaaaatcatcacgtactgctcccctctctactttgccaactcagagatcttcaggcaaaaggtcatcgccaagacaggcatggacccccagaaagtattactagccaagcaaaaatacctcaagaagcaggagaagcggagaatgaggcccacacaacagaggaggtctctattcatgaaaaccaagactgtctccctgcaggagctgcagcaggactttgagaatgcgccccccaccgaccccaacaacaaccagaccccggctaacggcaccagcgtgtcctatatcaccttcagccctgacagctcctcacctgcccagagtgagccaccagcctccgctgaggcccccggcgagcccagtgacatgctggccagcgtcccacccttcgtcaccttccacaccctcatcctggacatgagtggagtcagcttcgtggacttgatgggcatcaaggccctggccaagctgagctccacctatgggaagatcggcgtgaaggtcttcttggtgaacatccatgcccaggtgtacaatgacattagccatggaggcgtctttgaggatgggagtctagaatgcaagcacgtctttcccagcatacatgacgcagtcctctttgcccaggcaaatgctagagacgtgaccccaggacacaacttccaaggggctccaggggatgctgagctctccttgtacgactcagaggaggacattcgcagctactgggacttagagcaggagatgttcgggagcatgtttcacgcagagaccctgaccgccctgtgagggctcagccagtcctcatgctgcctacagagtgcctggcacttgggacttccataaaggatgagcctggggtcacagggggtgtcgggcggaggaaagtgcatcccccagagcttgggttcctctctcctctccccctctctcctcccttccttccctccccgcatctccagagagagcctctcagcagcaggggggtgctacccttacaggagtgagagtctggtgagcccactcttcacccgtcaggccctggccgcaatggacaagcctcctgctcactccaccccacccacctctgccctgtccttggcagctgaaggacaccttgacttccagcttttacgagtgagccaaaaacagaaggacaagtacaactgtgctggcctgctgtacaagcttcaaaaagtgtcccagagcccacacggctcggtgtcagatggtgtcaggctgtcacggacatagggataaacttggttaggactctggcttgccttccccagctgcctcaactctgtctctggcagctctgcacccagggaccatgtgctctccacacccaggagtctaggccttggtaactatgcgccccccctccatcatccccaaggctgcccaaaccaccactgctgtcagcaagcacatcagactctagcctggacagtggccaggaccgtcgagaccaccagagctacctccccggggacagcccactaaggttctgcctcagcctcctgaaacatcactgccctcagaggctgctcccttcccctggaggctggctagaaaccccaaagagggggatgggtagctggcagaatcatctggcatcctagtaatagataccagttattctgcacaaaacttttgggaattcctctttgcacccagagactcagaggggaagagggtgctagtaccaacacagggaaaacggatgggacctgggcccagacagtcccccttgaccccagggcccatcagggaaatgcctccctttggtaaatctgccttatccttctttacctggcaaagagccaatcatgttaactcttccttatcagcctgtggcccagagacacaatggggtccttctgtaggcaaaggtggaagtcctccagggatccgctacatcccctaactgcatgcagatgtggaaaggggctgatccagattgggtcttcctgcacaggaagactctttaacacccttaggacctcaggccatcttctcctatgaagatgaaaataggggttaagttttccatatgtacaaggaggtattgagaggaaccctactgttgacttgaaaataaataggttccatgtgtaagtgttttgtaaaatttcagtggaaatgcacagaaaatcttctggcctctcatcactgcttttctcaagcttcttcagcttaacaaccccttccctaacaggttgggctggcccagcctaggaaaacatccccatttctaacttcagccagacctgcgttgtgtgtctgtgtgttgagtgagctggtcagctaacaagtcttcttagagttaaaggagggggtgctggccaagagccaacacattcttggcccaggagcattgcttttctgtgaattcattatgccatctggctgccaatggaactcaaaacttggaaggcgaaggacaatgttatctgggattcaccgtgcccagcacccgaagtgccaaattccaggaggacaagagccttagccaatgacaactcactctcccctactccacctccttccaagtccagctcaggcccaggaggtgggagaaggtcacagagcctcaggaatttccaagtcagagtcccctttgaaccaagtatctagatcccctgaggacttgatgaagtgatccttaacccccaagtaatcattaacccccagaccagcctcagaactgaaggagattgttgacccagtgacctggagttgaggctcagggagagatctgccacatgtctgagggttgcagagcccgctgtggaggtaagattggaaacacatgaggcagagggaagacattgaagaaaacatctctgctggaatatttggaaaagaacactcttctggacctggttgaagcaggaaagatggaggcaaagtagtgaaataatccagaatttcaatgcttttgaatgttcttagtgatactgacctgtgataatataattcccagggaggactgggaaccttatctcttgagatatttgcataatttatttaatttaagcctcattctccttttgttcattttggtaataaactggatttgaattgtgaacaaa

SEQ ID NO: 235659 - protein, 224 aa, Artificial Sequence
  derived and/or modified sequence
MDESPEPLQQGRGPVPVRRQRPAPRGLREMLKARLWCSCSCSVLCVRALVQDLLPATRWLRQYRPREYLAGDVMSGLVIGIILVPQAIAYSLLAGLQPIYSLYTSFFANLIYFLMGTSRHVSVGIFSLLCLMVGQVVDRELQLAGFDPSQDGLQPGANSSTLNGSAAMLDCGRDCYAIRVATALTLMTGLYQTSWGRNSFQQHPWQLTQRSDSQELLEEEERSC

SEQ ID NO: 235660 - DNA, 675 bp, Artificial Sequence
  derived and/or modified sequence
atggacgagagccccgagcccctgcagcagggcagaggccccgtgcccgtgagaagacagagacccgcccccagaggcctgagagagatgctgaaggccagactgtggtgcagctgcagctgcagcgtgctgtgcgtgagagccctggtgcaggacctgctgcccgccaccagatggctgagacagtacagacccagagagtacctggccggcgacgtgatgagcggcctggtgatcggcatcatcctggtgccccaggccatcgcctacagcctgctggccggcctgcagcccatctacagcctgtacaccagcttcttcgccaacctgatctacttcctgatgggcaccagcagacacgtgagcgtgggcatcttcagcctgctgtgcctgatggtgggccaggtggtggacagagagctgcagctggccggcttcgaccccagccaggacggcctgcagcccggcgccaacagcagcaccctgaacggcagcgccgccatgctggactgcggcagagactgctacgccatcagagtggccaccgccctgaccctgatgaccggcctgtaccagaccagctggggcagaaacagcttccagcagcacccctggcagctgacccagagaagcgacagccaggagctgctggaggaggaggagagaagctgctag

SEQ ID NO: 235661 - DNA, 675 bp, Artificial Sequence
  derived and/or modified sequence
atggatgagtctcccgagccattacaacaaggtagggggcccgtgcccgtgcgtaggcagcgacctgcccctcggggcctacgggagatgctgaaggcacggctgtggtgcagttgttcttgctccgtcctgtgtgtaagagccctcgtgcaagacctgctcccagcaacaagatggctgcggcagtatagaccacgagaatatttggctggagacgttatgtccggactggtgataggcatcattctggtccctcaagctattgcctactccctcttggcggggctccaaccaatctatagcctgtatacctcattttttgctaatcttatttattttctgatgggcactagtcggcacgtgtccgtgggcattttttccctcttgtgcctgatggtgggccaagtggtggaccgggagctgcagctcgccggctttgacccctctcaagacggcctgcaacccggagccaactcttccaccctcaatggctccgcggccatgctcgactgtggccgcgactgctacgctatccgagtggccaccgccctgaccctcatgaccggtctctaccagacctcctggggccgaaacagctttcagcaacacccatggcagctgacacaacgtagcgatagccaggagctactcgaggaagaagagaggtcctgttag

SEQ ID NO: 235662 - DNA, 675 bp, Artificial Sequence
  derived and/or modified sequence
atggatgagagccctgagcccctgcagcagggccggggccctgtgcctgtgcggcggcagaggcctgccccccggggcctgcgggagatgctgaaggcccggctgtggtgcagctgcagctgcagcgtgctgtgtgtgcgggccctggtgcaggacctgctgcctgccacccgctggctgcggcagtaccggccccgggagtacctggccggagatgtgatgagcggcctggtgattggcatcatcctggtgccccaggccatcgcctacagcctgctggccggcctgcagcccatctacagcctgtacaccagcttctttgccaacctgatctacttcctgatgggcaccagccgccacgtgtctgtgggcatcttcagcctgctgtgcctgatggtgggccaggtggtggaccgggagctgcagctggccggctttgaccccagccaggacggcctgcagcccggggccaacagcagcaccctgaatggatctgctgccatgctggactgtggccgggactgctacgccatccgggtggccacagccctgaccctgatgacaggcctgtaccagacctcctggggcagaaattccttccagcagcacccctggcagctgacccagaggagtgacagccaggagctgctggaggaggaggagaggagctgctag

SEQ ID NO: 235663 - DNA, 675 bp, Artificial Sequence
  derived and/or modified sequence
atggacgagagccccgagcccctgcagcagggccggggccccgtgcctgtgcgccgccagagacctgccccgcgtggcctgagagaaatgctcaaggctcgcctctggtgctcttgtagctgttcagtgttgtgtgtgcgagccctggtgcaggacttgctgcccgccactcgttggctccgccagtatcgtcccagggagtacctggccggtgacgtgatgtctgggctggtgatcgggataatattggtccctcaagccatcgcctacagcctgcttgcgggactgcagcccatctattctctttatacaagcttctttgccaaccttatctattttctaatgggaacaagcagacatgtgtctgtgggcatcttctctcttttgtgtttgatggtcggtcaggtcgtggaccgggaactacagcttgccgggtttgacccctcccaggatggactccagccaggagccaactcttccacgctcaatggttctgctgcaatgctcgactgcggcagggactgttatgcgattagagtggctactgccctcacattaatgactggactttatcagacgtcgtggggcagaaacagcttccagcagcatccgtggcagctcactcaaaggagcgattcccaggagctgctcgaggaggaggagaggtcgtgctag

SEQ ID NO: 235664 - DNA, 675 bp, Artificial Sequence
  derived and/or modified sequence
atggacgagtctccagagcccttgcagcaaggcagagggcctgtgcccgtacgaaggcagcgaccagcgcctcgcggtctgagggagatgctgaaggctcgtctttggtgcagctgctcctgctcggtattgtgcgtacgtgcactggtccaagaccttctgccagcgacgcgatggcttcgccagtacagacccagagagtacttggcgggagatgtgatgagcggcttggtaatcggtattatactggttcctcaggccattgcatacagcctgttggctgggcttcaaccgatctacagcttatatacaagtttcttcgcaaacttgatctattttttgatgggtacatcacgccatgtttcagtaggcatcttcagcctgctgtgcctgatggtcgggcaagtagtggaccgagagctgcagctggccggtttcgatccatcacaggacggactgcaacccggagccaactcatctacacttaacgggtccgcagccatgctcgattgcggccgtgattgttatgccatcagggtggccaccgcccttactctgatgactggtctatatcaaaccagttgggggcgaaacagtttccagcaacacccatggcaattaacgcagcggagcgactctcaggaactgctggaggaagaagagcgatcatgctag

SEQ ID NO: 235665 - DNA, 1111 bp, Artificial Sequence
  derived and/or modified sequence
gggccctgcggtcctcggtggtcttgccagcccctcgtcatcccagggccctccgcgcctgtgaggactccctcaggtcggccacgggacctgacgcaacaggatggacgagtcccctgagcctctgcagcagggcagagggccggtgccggtccgacggcagcgcccagcaccccggggtctgcgtgagatgctgaaggccaggctgtggtgcagctgctcgtgcagtgtgctgtgcgtccgggcgctggtgcaggacctgctccccgccacgcgctggctgcgtcagtaccgcccgcgggagtacctggcaggcgacgtcatgtctgggctggtcatcggcatcatcctggtgccgcaggccatcgcctactcattgctggccgggctgcagcccatctacagcctctatacgtccttcttcgccaacctcatctacttcctcatgggcacctcacggcatgtctccgtgggcatcttcagcctgctttgcctcatggtggggcaggtggtggaccgggagctccagctggccggctttgacccctcccaggacggcctgcagcccggagccaacagcagcaccctcaacggctcggctgccatgctggactgcgggcgtgactgctacgccatccgtgtcgccaccgccctcacgctgatgaccgggctttaccagacgtcctggggtagaaacagcttccagcaacacccatggcaattaacacagaggagtgactcgcaggaacttctggaagaggaggaaagatcttgctgatttaacaggaaatgccgacatcaacgacatcgagaatgcgggaccctcacaccagcctcacgagaagccggtggatacagcttattccagagggaggcttggatcagcacctggggaaaaaaggcagcccctcaacctggccagcctgcagaggagagaagcctgagcaagcgtcctccaaatttcacaacaggctttaccatgtggatgatgtaaccagtcatcagtacatttctgtaaagcaaagcacacttttaaaaaccagccatgctagtgggcctgaggattacctttcgtcttcctctttcctctgtggaagatgatattgcaaaa

SEQ ID NO: 235666 - protein, 740 aa, Artificial Sequence
  derived and/or modified sequence
MGLADASGPRDTQALLSATQAMDLRRRDYHMERPLLNQEHLEELGRWGSAPRTHQWRTWLQCSRARAYALLLQHLPVLVWLPRYPVRDWLLGDLLSGLSVAIMQLPQGLAYALLAGLPPVFGLYSSFYPVFIYFLFGTSRHISVGTFAVMSVMVGSVTESLAPQALNDSMINETARDAARVQVASTLSVLVGLFQVGLGLIHFGFVVTYLSEPLVRGYTTAAAVQVFVSQLKYVFGLHLSSHSGPLSLIYTVLEVCWKLPQSKVGTVVTAAVAGVVLVVVKLLNDKLQQQLPMPIPGELLTLIGATGISYGMGLKHRFEVDVVGNIPAGLVPPVAPNTQLFSKLVGSAFTIAVVGFAIAISLGKIFALRHGYRVDSNQELVALGLSNLIGGIFQCFPVSCSMSRSLVQESTGGNSQVAGAISSLFILLIIVKLGELFHDLPKAVLAAIIIVNLKGMLRQLSDMRSLWKANRADLLIWLVTFTATILLNLDLGLVVAVIFSLLLVVVRTQMPHYSVLGQVPDTDIYRDVAEYSEAKEVRGVKVFRSSATVYFANAEFYSDALKQRCGVDVDFLISQKKKLLKKQEQLKLKQLQKEEKLRKQAGPLLSACLAPQQVSSGDKMEDATANGQEDSKAPDGSTLKALGLPQPDFHSLILDLGALSFVDTVCLKSLKNIFHDFREIEVEVYMAACHSPVVSQLEAGHFFDASITKKHLFASVHDAVTFALQHPRPVPDSPVSVTRL

SEQ ID NO: 235667 - protein, 753 aa, Artificial Sequence
  derived and/or modified sequence
MGLADASGPRDTQALLSATQAMDLRRRDYHMERPLLNQEHLEELGRWGSAPRTHQWRTWLQCSRARAYALLLQHLPVLVWLPRYPVRDWLLGDLLSGLSVAIMQLPQDLLSRLHCYHSTLGLAYALLAGLPPVFGLYSSFYPVFIYFLFGTSRHISVGTFAVMSVMVGSVTESLAPQALNDSMINETARDAARVQVASTLSVLVGLFQVGLGLIHFGFVVTYLSEPLVRGYTTAAAVQVFVSQLKYVFGLHLSSHSGPLSLIYTVLEVCWKLPQSKVGTVVTAAVAGVVLVVVKLLNDKLQQQLPMPIPGELLTLIGATGISYGMGLKHRFEVDVVGNIPAGLVPPVAPNTQLFSKLVGSAFTIAVVGFAIAISLGKIFALRHGYRVDSNQELVALGLSNLIGGIFQCFPVSCSMSRSLVQESTGGNSQVAGAISSLFILLIIVKLGELFHDLPKAVLAAIIIVNLKGMLRQLSDMRSLWKANRADLLIWLVTFTATILLNLDLGLVVAVIFSLLLVVVRTQMPHYSVLGQVPDTDIYRDVAEYSEAKEVRGVKVFRSSATVYFANAEFYSDALKQRCGVDVDFLISQKKKLLKKQEQLKLKQLQKEEKLRKQAGPLLSACLAPQQVSSGDKMEDATANGQEDSKAPDGSTLKALGLPQPDFHSLILDLGALSFVDTVCLKSLKNIFHDFREIEVEVYMAACHSPVVSQLEAGHFFDASITKKHLFASVHDAVTFALQHPRPVPDSPVSVTRL

SEQ ID NO: 235668 - DNA, 2223 bp, Artificial Sequence
  derived and/or modified sequence
atgggattggccgatgcgagcgggccaagagacactcaagccctcctcagcgcaactcaagcaatggacttacgcaggcgtgattatcacatggagcgccccctgctcaatcaagaacatctcgaagagctgggcagatggggaagcgcacctcgcactcaccagtggcgaacctggctgcagtgtagccgagcccgagcttatgctttgctgctacaacacctaccagtattagtttggctcccgaggtaccccgtgcgagattggcttctgggcgatcttctgtctgggctctcagtcgctattatgcagctacctcaggggctcgcatacgcgctcctggccgggctccctccagtcttcggattgtattcatccttttatcccgtgttcatttatttcctgtttggtacaagccggcatataagcgttggaacattcgcagtgatgagtgtgatggtcgggagcgtgacagagagcctcgccccccaggccctcaatgactccatgattaatgagacggcccgggacgccgctcgggtccaagtggcgagtacattaagcgtgctagtgggcctattccaggttgggttggggctgatccacttcggctttgtggttacttacttgagcgaaccactcgtgcgtggatacactactgccgcagcggtgcaggtgttcgtaagtcagctgaaatacgtctttgggcttcacctttcatcccactcaggccctctcagtttgatctatactgtactagaggtgtgctggaagttgccacagagcaaagtcggtaccgttgtgaccgctgccgtggccggagtcgtccttgtggtggttaagctactgaatgataagcttcagcaacagctcccaatgccaattccgggtgagcttttgaccctgattggtgccacggggatttcttacgggatgggactgaagcacagattcgaagtggacgtcgttgggaatatccctgctggattggtcccccctgtcgccccaaatacccagctgttctctaagctagtcggctctgctttcacgattgccgttgttggatttgccatcgcaatatctctggggaagatatttgctctgcggcacggataccgagtcgactcgaaccaagagctggtggcccttggactgtcaaacctcattggaggtatatttcagtgtttcccagtgagctgttcaatgtcaaggagtctagtacaggagtctaccggggggaattcacaggtggcaggcgccatcagttcactctttatcttgctgatcatagtgaaactgggggagctcttccacgatttgcccaaggccgtgcttgctgctatcatcatagtgaatttgaaaggtatgctccgccaactatctgatatgaggagcctatggaaagcaaaccgggccgacctcctaatatggctggtcaccttcacagccactatcctccttaacctcgatttgggacttgtggtagccgtaattttctcgctgttgctagttgttgtgcgaacacaaatgccgcactacagcgtgctagggcaggtgccggacaccgatatatatagagacgtcgcggaatattcggaggcaaaggaggtacggggtgtcaaagtgtttagatccagcgctacggtgtatttcgcaaatgctgaattttattccgatgcactgaagcagaggtgcggcgtggacgtggattttttaatctcccagaaaaaaaaactgctgaagaagcaagaacagctgaagctgaaacagctccagaaggaggaaaaactacgaaagcaagctggaccattgctgagtgcctgcctcgcaccccaacaggtatcctcaggcgataaaatggaagatgctacggcgaacgggcaagaggattccaaggcccctgacgggagtacactaaaagctctgggactaccccagccagacttccacagcctcattctggatctgggagcactctccttcgtggacactgtctgccttaaatcactgaagaatatcttccacgactttagggagattgaggtggaggtgtacatggctgcatgtcacagtccagtcgtctcccagctggaagctggtcactttttcgatgccagcattaccaagaagcacctgtttgcctccgtgcacgatgccgtgacattcgccctgcagcaccctcgtcctgtgcctgatagtcccgtttcggtgactaggctatag

SEQ ID NO: 235669 - DNA, 2262 bp, Artificial Sequence
  derived and/or modified sequence
atgggcctggcagatgccagtggtccccgcgatactcaggcactcctctccgcaacccaggcaatggacctgcggcgtcgggactaccacatggagaggccactgttgaaccaggaacatctggaggagctgggaagatggggatcggcaccacgaacacatcagtggcggacctggctccagtgcagcagggccagagcgtacgcccttcttctgcaacatctgccggttctcgtttggcttccccgttaccctgtgagagactggctgttaggggatttgctttcaggactgtctgtggctatcatgcagctccctcaggacctgctgagccgcctccactgttaccattccacacttggactcgcttatgcccttctggccggcctcccacccgtgttcgggctctattcttccttttaccctgtgttcatctattttctattcggaaccagccgtcacatctcagtgggcactttcgcagtgatgtctgttatggtggggtccgtcactgagagcctggctccacaggcgcttaatgactccatgatcaacgaaactgccagggatgcagcgagagtgcaggtcgcctcaaccctgtccgtccttgttggcctgttccaggtgggactgggcctcatccatttcggcttcgttgtgacatatctgtcggagcccctggtgcggggatatacgaccgctgcagccgtacaggtgtttgtcagccaacttaaatacgtgtttggcttgcacctgtcatcccattctggccctctgtcactcatctataccgttttggaggtctgctggaagctgcctcagtccaaggtggggaccgtcgtcaccgcggcggtggcaggagttgttctggtggtcgttaagctgttgaatgacaagctccagcagcaactcccaatgccaattcccggggagcttctgaccctgattggcgccacgggcatctcctacggtatggggctgaagcaccgcttcgaagttgatgttgttgggaatatccctgccggcttggtcccccccgtggcccctaacacacagctcttcagcaagctcgtgggctctgcttttactattgcagtggtgggcttcgccatcgccatctccctgggcaagattttcgctcttcggcacggttacagggtggactccaatcaggagctggtggctctcggactgtccaacctgataggtgggatattccaatgctttcctgtctcttgttctatgtcccggtccttggtgcaagagagcacaggtggaaattcacaggtggccggcgctatctcctctctctttattttgctgatcattgtgaagctgggagagctattccacgatcttcctaaggccgtgctagccgccatcatcatagttaatctgaagggcatgctcaggcagctttctgacatgcgatcgctatggaaagcaaaccgagccgatctcctgatctggctggtaacatttacagccaccattctgttaaacctggatttgggcctggttgtggccgtcattttttctctgcttctcgtggtcgtccgcactcaaatgcctcactatagcgtgctgggccaggtccctgatacagatatttaccgggacgttgctgaatattccgaagccaaagaggtgcggggtgtgaaagtttttagaagcagcgcaaccgtctactttgctaatgccgagttttacagcgatgctttaaaacaaagatgcggagtggacgtagattttctgatcagtcagaagaagaagctgctaaaaaaacaggaacagcttaagctcaagcaacttcagaaggaggagaagctcagaaaacaggccggcccattgctgtcggcgtgtctggctccccagcaggtgtcttccggtgataaaatggaggacgcgacagcaaatggccaggaggactcaaaggctcctgatggatccactcttaaggccctcggactgccccaacctgatttccactctctcattctggatctgggcgcccttagcttcgtggacaccgtgtgtttaaagtccctgaaaaatatatttcacgacttccgggaaattgaggtcgaggtctatatggcagcctgtcactctccggtcgtttcccagttggaagccggccacttcttcgatgcttctattaccaaaaaacatctgtttgcttcagttcacgacgctgttacatttgccctacaacatcctcggccagtcccggatagcccagtcagcgtcactagactttag

SEQ ID NO: 235670 - DNA, 2223 bp, Artificial Sequence
  derived and/or modified sequence
atgggcctggctgatgccagcggcccccgggacacccaggccctgctgagcgccacccaggccatggacctgcggcggcgggactaccacatggagcggcccctgctgaaccaggagcacctggaggagctgggccgctggggcagcgcccccaggacccaccagtggaggacctggctgcagtgcagccgggcccgggcctatgccctgctgctgcagcacctgcctgtgctggtgtggctgccccgctaccctgtgcgggactggctgctgggggacctgctgagcggcctgtctgtggccatcatgcagctgccccagggcctggcctatgccctgctggccggcctgccccctgtgtttggcctgtacagcagcttctaccctgtgttcatctacttcctgtttggcaccagccgccacatctctgtgggcacctttgctgtgatgtctgtgatggtgggctctgtgacagagagcctggccccccaggccctgaatgacagcatgatcaatgaaacagccagagatgctgcccgggtgcaggtggccagcaccctgtctgtgctggtgggcctcttccaggtgggcctgggcctcatccactttggatttgtggtgacctacctgtctgagcccctggtgcggggctacaccacagctgctgctgtgcaggtgtttgtgtcccagctgaagtatgtgtttggcctgcacctgagcagccacagcggccccctgagcctcatctacacagtgctggaggtgtgctggaagctgccccagagcaaggtgggcaccgtggtgacagctgctgtggccggcgtggtgctggtggtggtgaagctgctgaatgacaagctgcagcagcagctgcccatgcccatccctggagagctgctgaccctgattggagccaccggcatctcctatggcatgggcctgaagcacagatttgaggtggatgtggtgggcaacatcccagctggcctggtgccccctgtggcccccaacacccagctgttcagcaagctggtgggcagcgccttcaccatcgctgtggtgggctttgccatcgccatcagcctgggcaagatctttgccctgcggcacggctacagagtggacagcaaccaggagctggtggccctgggcctgagcaacctgattggaggcatcttccagtgcttccctgtgtcctgcagcatgagccgcagcctggtgcaggagagcactggaggcaacagccaggtggccggggccatcagcagcctcttcatcctgctgatcatcgtgaagctgggggagctgttccatgacctgcccaaggctgtgctggccgccatcatcatcgtgaacctgaagggcatgctgcggcagctgagtgacatgaggagcctgtggaaggccaacagagctgacctgctgatctggctggtgaccttcaccgccaccatcctgctgaacctggacctgggcctggtggtggccgtcatcttcagcctgctgctggtggtggtgaggacccagatgccccactacagcgtgctgggccaggtgcctgacacagacatctacagagatgtggccgagtacagcgaggccaaggaggtgcggggcgtgaaggtgttccgcagcagcgccaccgtgtactttgccaatgctgagttctacagtgatgccctgaagcagagatgtggggtggatgtggacttcctgatcagccagaagaagaagctgctgaagaagcaggagcagctgaagctgaagcagctgcagaaggaggagaagctgaggaagcaggccggccccctgctgagcgcctgcctggccccccagcaggtgagcagcggggacaagatggaggatgccacagccaacggccaggaggacagcaaggccccagatggcagcaccctgaaggccctgggcctgccccagcctgacttccacagcctcatcctggacctgggcgccctgagctttgtggacacagtgtgcctgaagagcctgaagaacatcttccatgacttccgggagattgaggtggaggtgtacatggccgcctgccacagccctgtggtgtcccagctggaggccggccacttctttgatgccagcatcaccaagaagcacctgtttgcctctgtgcatgatgctgtgacctttgccctgcagcaccccaggcctgtgcctgacagccctgtgtctgtgacccggctgtag

SEQ ID NO: 235671 - DNA, 2262 bp, Artificial Sequence
  derived and/or modified sequence
atgggcctggctgatgccagcggcccccgggacacccaggccctgctgagcgccacccaggccatggacctgcggcggcgggactaccacatggagcggcccctgctgaaccaggagcacctggaggagctgggccgctggggcagcgcccccaggacccaccagtggaggacctggctgcagtgcagccgggcccgggcctatgccctgctgctgcagcacctgcctgtgctggtgtggctgccccgctaccctgtgcgggactggctgctgggggacctgctgagcggcctgtctgtggccatcatgcagctgccccaggacctgctgagccggctgcactgctaccacagcaccctgggcctggcctatgccctgctggccggcctgccccctgtgtttggcctgtacagcagcttctaccctgtgttcatctacttcctgtttggcaccagccgccacatctctgtgggcacctttgctgtgatgtctgtgatggtgggctctgtgacagagagcctggccccccaggccctgaatgacagcatgatcaatgaaacagccagagatgctgcccgggtgcaggtggccagcaccctgtctgtgctggtgggcctcttccaggtgggcctgggcctcatccacttcggctttgtggtgacctacctgtctgagcccctggtgcggggctacaccacagctgctgctgtgcaggtgtttgtgtcccagctgaagtatgtgtttggcctgcacctgagcagccacagcggccccctgagcctcatctacacagtgctggaggtgtgctggaagctgccccagagcaaggtgggcaccgtggtgacagctgctgtggccggcgtggtgctggtggtggtgaagctgctgaatgacaagctgcagcagcagctgcccatgcccatccctggagagctgctgaccctcatcggggccaccggcatctcctatggcatgggcctgaagcacagatttgaggtggatgtggtgggcaacatcccagctggcctggtgccccctgtggcccccaacacccagctgttcagcaagctggtgggcagcgccttcaccatcgctgtggtgggctttgccatcgccatcagcctgggcaagatctttgccctgcggcacggctacagagtggacagcaaccaggagctggtggccctgggcctgagcaacctgattggaggcatcttccagtgcttccctgtgtcctgcagcatgagccgcagcctggtgcaggagagcactggaggcaacagccaggtggccggggccatcagcagcctcttcatcctgctgatcatcgtgaagctgggggagctgttccatgacctgcccaaggctgtgctggccgccatcatcatcgtgaacctgaagggcatgctgcggcagctgagtgacatgaggagcctgtggaaggccaacagagctgacctgctgatctggctggtgaccttcaccgccaccatcctgctgaacctggacctgggcctggtggtggccgtcatcttcagcctgctgctggtggtggtgaggacccagatgccccactacagcgtgctgggccaggtgcctgacacagacatctacagagatgtggccgagtacagcgaggccaaggaggtgcggggcgtgaaggtgttccgcagcagcgccaccgtgtactttgccaatgctgagttctacagtgatgccctgaagcagagatgtggggtggatgtggacttcctgatcagccagaagaagaagctgctgaagaagcaggagcagctgaagctgaagcagctgcagaaggaggagaagctgaggaagcaggccggccccctgctgagcgcctgcctggccccccagcaggtgtcctctggggacaagatggaggatgccacagccaacggccaggaggacagcaaggccccagatggcagcaccctgaaggccctgggcctgccccagcctgacttccacagcctcatcctggacctgggcgccctgagctttgtggacacagtgtgcctgaagagcctgaagaacatcttccatgacttccgggagattgaggtggaggtgtacatggccgcctgccacagccctgtggtgtcccagctggaggccggccacttctttgatgccagcatcaccaagaagcacctgtttgcctctgtgcatgatgctgtgacctttgccctgcagcaccccaggcctgtgcctgacagccctgtgtctgtgacccggctgtag

SEQ ID NO: 235672 - DNA, 2223 bp, Artificial Sequence
  derived and/or modified sequence
atgggcctggccgacgccagcggcccccgggacacccaggccctgctcagcgcaacccaggccatggatctgaggcgccgcgactaccacatggagaggcctctgttgaaccaggagcatcttgaggagctaggacgctggggctcagccccgaggactcatcagtggcgtacctggcttcagtgttctcgggcaagggcttacgccctactgctccagcatctgcccgtgttagtctggcttccaaggtatccggtccgtgactggctcctgggagatctgctttcagggctttcagtggctataatgcagctccctcagggcctggcttacgctttgcttgctggtctgcctcccgtgttcggactctactctagtttctacccggtgttcatatattttctgtttggtacttcccgccatatctctgtggggaccttcgccgtgatgtctgtaatggtaggaagcgtgacagagtccctcgcaccacaggctctaaacgactctatgatcaatgaaaccgccagagacgctgcacgcgtgcaggtagccagcaccctctctgttctggttggactgttccaagtgggcctgggtcttatccatttcgggtttgtggtgacatatttgagcgagccccttgtaagaggatatactacggccgctgcggtgcaggtatttgtgagtcaactcaaatatgtgttcggcctccatctgagcagtcacagcggaccactcagtcttatctacacagttcttgaggtgtgctggaagctgccccagtctaaagtcggaacggtggttacagctgccgttgctggggttgtccttgtagtggtaaaactgcttaacgataagcttcaacaacagttacccatgccgatcccaggcgaactgcttaccctgattggcgcaaccggcatatcctatgggatgggcctgaagcatcgtttcgaggtggacgttgtcgggaatatccccgctggacttgtccccccagtggccccgaatacccagttattctccaagctggtaggctctgcattcacaatagcggtggtgggctttgccattgctatctccttaggcaagatattcgcactgagacacgggtacagggtggacagcaaccaagaactagtggcactgggactcagcaatctaattggcggtattttccaatgcttcccggtgtcctgctctatgagccggtccctggtgcaggagtctaccggtgggaactcccaggtggccggtgctatttcatccttattcatactcctgattatcgtaaagctcggtgaactattccacgacctacccaaggccgttctcgcagcaataatcattgtcaacttgaagggaatgctgcgacaactctcggacatgcgttcactctggaaggcgaacagggccgacttgctcatctggctggtgaccttcacagccaccattctgctgaacctcgatttaggtctagtggtggccgttatttttagcctgttattggtcgtggttagaacacagatgccacactattctgtactgggccaggtgccagacactgacatatatcgagacgtggccgaatacagcgaggccaaagaagtccggggcgtaaaagtgttcaggtcatcagcaactgtgtactttgctaatgccgaattttatagtgatgctctaaagcagaggtgtggcgttgatgtggatttcctaatctcacaaaaaaaaaaattgctaaagaagcaggagcagctgaagctcaaacagctgcaaaaggaagaaaagctgcgaaaacaagctgggccattgctctcagcctgcctcgccccccaacaggtttcctccggtgataaaatggaggacgccacagctaacggtcaggaagatagcaaagccccagacggctcaactttgaaagccttgggcctgccgcaacctgactttcacagcctcattctcgaccttggagccctctcatttgtggacaccgtctgtttgaagagcctcaagaatatcttccacgattttcgcgagattgaagtagaggtctacatggcggcctgccacagcccggttgtgagccagttagaagcaggacacttcttcgatgctagcattaccaagaaacatctgttcgccagcgtgcatgatgcagttacatttgcactgcagcatccccgaccagtcccagacagtcccgtgtccgtgactcgcctgtag

SEQ ID NO: 235673 - DNA, 2262 bp, Artificial Sequence
  derived and/or modified sequence
atgggcctggccgacgccagcggcccccgggacacccaggccctgctcagcgcgacccaagcaatggatttgagaaggagggactaccatatggagagacctctgctgaaccaggagcacctagaagagctggggaggtggggatcagctccacgcacgcaccagtggcgaacctggctgcaatgctcgagagcaagagcgtacgcattactgctgcagcacctgcctgtgcttgtgtggctgcctagatatccagtaagggactggctgctaggggatctgctctctgggctgagtgttgccatcatgcagcttcctcaagatcttttgtcccgactgcactgctatcacagcaccctgggcctcgcatatgccctcctggctggactgccacccgtcttcggactctattcctctttctacccagtatttatttacttcctgttcgggacgtcccgtcacatctctgttggcactttcgcggtgatgtccgttatggtaggtagcgtcactgagtccctcgcccctcaggccctgaacgactctatgatcaatgagacagcgagagacgccgcacgcgtccaagtggcctcaacgctcagtgttttggtagggctgttccaggtggggttgggtttgattcattttggctttgtggttacctacctgtccgagccgctggtaaggggatacacgaccgccgcagcagttcaagtgttcgtttctcagctgaagtatgtatttggacttcatctgagttcccattctgggcctctttctctgatttacacagtactcgaggtctgttggaaacttccccagagcaaggtagggactgttgtgactgccgctgtcgcaggcgtggttctggtagtggtgaagctgttgaacgacaaattgcagcagcagctccctatgcccattcccggtgaactgttgaccttgattggggccacaggtatttcatacggaatgggccttaaacaccggttcgaagttgatgttgtggggaacatacctgcaggactggtcccgcctgtggccccaaatacccaacttttcagcaagctcgtgggatctgcctttactattgctgtagtggggttcgccatcgctatcagcctgggcaagattttcgccttgcggcacgggtaccgggtggatagcaaccaggagctggtggccctgggcttatctaatttaattggggggatctttcagtgttttccggtctcttgtagcatgagtcgctctctcgtgcaggaatcgactggcggcaactcgcaagtggcaggtgccatctcctcactcttcattctcctcattatcgtgaagctcggggagttgttccacgacttgcccaaggcagtgctggcggcaatcatcatcgttaacctgaaagggatgctgcgacagttgtcagacatgcgctctctgtggaaagccaaccgcgcagacctgctgatctggttggtgacttttaccgcaaccatcctgctaaacctggatctcggactggtcgtagcagtgatcttctctttgcttctcgttgtcgtgaggacacagatgcctcactacagcgtgttggggcaggtgcccgacacggatatctaccgtgatgtagctgaatattcagaagctaaagaggtccgcggcgttaaggtgttccggagttccgctacagtgtacttcgccaacgcggagttctacagtgacgccctgaaacaaaggtgcggggttgacgtggatttcctgatctcgcaaaaaaaaaagctgctcaagaagcaggagcaactgaagcttaagcagctgcagaaagaagagaaattacgcaaacaagccggtcctctgttgtcagcatgcttagccccacagcaagtgtcctctggagataagatggaggatgcaacggcaaacggccaagaggattctaaagcacctgacgggagcaccttgaaagcgttgggtttacctcaacccgactttcattcactgatactggatctgggcgccctgtccttcgtggacacggtctgtcttaaatccctcaagaacattttccacgactttcgggaaatcgaagttgaagtctatatggccgcttgccactcacctgtcgtctcacagctggaggccgggcacttctttgacgcttcaatcactaaaaagcatctgtttgcatccgtgcatgacgccgtgacattcgctctgcagcatcctaggccggtgcccgatagccccgtttcggtaacgcgtctgtag

SEQ ID NO: 235674 - DNA, 2223 bp, Artificial Sequence
  derived and/or modified sequence
atgggacttgccgacgctagcgggcctcgcgacactcaggccctgctgtctgccactcaggcgatggacctccgaaggagggactatcacatggaacgtccactgcttaaccaggagcacctcgaggagctggggaggtggggcagtgcccctagaacccaccagtggcggacatggcttcagtgctcgcgggctagagcctatgccttgttgcttcagcacttgcccgtcctcgtttggttgccgaggtacccggttagagactggcttctgggcgacctcctgtctggattatcagtggccattatgcagctgccacagggcctggcgtacgcccttctggctggcctgcctcccgtctttggactttacagttcattctaccctgtgttcatctacttcctcttcggtactagtcgtcacatatctgtcggcacatttgctgtaatgagtgtcatggtggggtcagtgactgaatcactggcaccgcaggccttaaacgacagcatgatcaatgagaccgcgagagacgctgccagggtgcaggtggctagcaccctgtcggtgctcgttggcctgttccaggtagggctgggattgatccatttcggattcgtcgtcacctacctgtctgagcccctggtccggggatacactacagccgctgctgttcaggtctttgtgtcccagcttaaatatgtattcggcctccacctgtccagccattcaggaccgctgagcttaatatacactgtgctggaagtatgttggaaactgccacaaagcaaggtgggcacagtcgtaactgcagctgtggctggcgtcgtcctggtcgtggtgaaattactaaacgataagctgcaacagcagctgcccatgccgatacccggtgagcttctgacccttatcggagccaccggaatctcttacggcatgggtttgaaacacagatttgaggtagatgtggtgggcaatatccctgctgggctcgtgcccccagtggcacccaatacacagctattctctaaacttgtaggctcagctttcactatagctgtggtgggattcgctattgccatcagcttgggaaagatcttcgctcttaggcacggctaccgagtggactccaatcaggaactggtagctttaggactttccaatctcattggcggaatctttcagtgctttccagtatcctgcagcatgtcacgcagcctggtgcaagaatccacgggcggtaactctcaggttgccggagctatcagttctttattcatcctacttattatcgtgaagctaggtgagctgtttcatgatttgcctaaggctgtcttggccgctatcataatcgttaatttgaaggggatgctgagacagctaagcgacatgcgtagcctgtggaaggcgaatcgggctgatttgctgatttggctggtcacgtttaccgcgaccatcctccttaatttggacctgggtttagttgtggctgtgatattctccctcttactggtggtcgtccgcactcagatgccccactacagcgtgttaggccaagtccccgataccgacatttatagggatgtcgctgaatattccgaggcaaaggaagttcgcggagtgaaggtctttcggagcagcgccaccgtgtactttgcaaatgcagagttctactcagacgcactgaagcaaagatgtggagtggacgtcgattttctcatcagccagaaaaaaaagttactgaaaaaacaggagcagctcaaattaaagcagcttcaaaaggaagaaaagttgagaaagcaggcgggaccactgctcagtgcctgcctggcacctcagcaggtctcctcgggagataagatggaagacgcaactgctaacggtcaggaagattccaaagcaccggatgggtccactcttaaggccctggggctgccccagcccgactttcactctctgatcctggatctgggagccctctcttttgtggacactgtatgcctgaaaagtcttaaaaatatctttcatgatttccgagagattgaggtggaggtgtatatggctgcttgccactccccggttgtcagtcagttggaagccggacactttttcgatgcaagcatcacaaagaagcatctgttcgcttccgtacacgatgcagtcacattcgctcttcagcatccgagaccggtgccagattcgcctgtctccgtgacacggctgtag

SEQ ID NO: 235675 - DNA, 2262 bp, Artificial Sequence
  derived and/or modified sequence
atgggactggccgatgcatcagggccacgagacacacaagccctcctatctgctacacaggccatggatctgaggcgacgcgactaccacatggagaggccattgcttaatcaggaacacctggaggaactgggccgttggggatccgctcccagaacccaccaatggaggacatggttgcagtgtagcagagcgagggcatatgccttgctcttacagcatcttcccgtgctagtctggctgcctcgctaccctgttcgcgattggctccttggagatctgttgtcgggattgtcagtggcgatcatgcagctaccacaggatcttctgagccgccttcattgttaccattcaaccctgggcctcgcctacgcactgttggcaggccttcccccagtgttcggactttacagttctttttatcccgtgtttatctactttctctttggaacctcccggcacatcagcgtgggcactttcgccgtcatgagtgtaatggtcggaagtgtaactgaatcacttgcaccgcaggccctgaacgacagtatgatcaacgagactgctcgggacgccgcacgagttcaggtggcctcaactctgagtgttctggtggggctcttccaggtgggattaggtctcatacatttcggctttgtagtgacctacctgtccgaaccattggttcgaggctacacgaccgccgcagcggtgcaggttttcgtgtcccagctgaagtacgtttttgggttacatctgagctcccatagtggaccattatcattaatctacacagtactagaagtgtgttggaagctgccccagagcaaggtcggcacagtagtgaccgcagcagtcgcaggtgtggtcctcgtagtggtcaaactgcttaatgacaaactccagcagcaactgccgatgcccatccccggtgaattgctgacacttataggtgcgaccgggatatcgtacggcatgggcttgaagcacagatttgaggtcgatgtggtaggcaacattcccgctgggctcgtccctcctgtggcaccaaacactcagctgttttccaaattggtgggctccgccttcaccattgccgtagtcggtttcgctatcgccatatcattggggaaaatctttgcacttcggcacggatatcgggttgatagcaaccaggaattggtagccctagggctgtcaaacctgatcggcggtattttccagtgtttcccagtgtcctgttctatgagccgcagcctggtgcaagaatcaactggcggaaattcacaggtcgctggagcgatttcttcactctttatcctccttatcatcgtcaaactcggcgagctgttccacgacctccctaaagcagtactggcggctattataatagtaaacctaaagggcatgcttcgccaactgtccgatatgagatctttgtggaaggcaaaccgagccgacctgcttatttggttggtcacctttacagcaacaattctcttaaacctggatctgggtctggtcgtggcagtgattttctctttactgctggtggttgtgcgcacacaaatgcctcactactccgtacttgggcaggtccccgatactgacatttatagagacgtagccgaatacagcgaggcaaaggaagttcgcggagtaaaggtatttcgtagctctgccacagtgtacttcgcgaacgccgagttttactccgatgccctgaagcagcgatgtggggtggacgtggactttctgatttcccagaagaagaaactgctcaaaaagcaagagcagctcaaactcaagcaactgcagaaggaagagaagctgaggaaacaggccggacccttgctcagcgcctgcttggcccctcagcaagtgtccagcggtgacaagatggaggacgctacggccaacggacaggaggacagtaaagcgcctgacggctcaaccctcaaggctctgggactgcctcagcctgatttccacagtctgatcttggatcttggggcactgagctttgtggacaccgtctgtttaaaatccttaaaaaacatattccacgattttcgtgagattgaggtcgaggtgtatatggccgcatgccactctcctgtcgtttctcagttggaagccggtcacttcttcgacgcaagtattactaagaaacacctgttcgcctctgtccacgatgccgtaacgtttgccctgcagcacccacgcccagtccctgacagccccgtgtctgtgacaagactgtag

SEQ ID NO: 235676 - DNA, 2545 bp, Artificial Sequence
  derived and/or modified sequence
ggagcgtagcggcctctagctcgagcagcaggagcagcccgcaccggacaacttgcgagccatggggctggcggatgcgtcgggaccgagggacacacaggcactgctgtctgcaacacaagcaatggacctgcggaggcgagactaccacatggaacggccgctgctgaaccaggagcatttggaggagctggggcgctggggctcagcacctaggacccaccagtggcggacctggttgcagtgctcccgtgctcgggcctatgcccttctgctccaacacctcccggttttggtctggttaccccggtatcctgtgcgtgactggctcctgggtgacctgttatccggcctgagtgtggccatcatgcagcttccgcagggcttggcctacgccctcctggctggattgccccccgtgtttggcctctatagctccttctaccctgtcttcatctacttcctgtttggcacttcccggcacatctccgtggggacctttgctgtcatgtctgtgatggtgggcagtgtgacagaatccctggccccgcaggccttgaacgactccatgatcaatgagacagccagagatgctgcccgggtacaggtggcctccacactcagtgtcctggttggcctcttccaggtggggctgggcctgatccacttcggcttcgtggtcacctacctgtcagaacctcttgtccgaggctataccacagctgcagctgtgcaggtcttcgtctcacagctcaagtatgtgtttggcctccatctgagcagccactctgggccactgtccctcatctatacagtgctggaggtctgctggaagctgccccagagcaaggttggcaccgtggtcactgcagctgtggctggggtggtgctcgtggtggtgaagctgttgaatgacaagctgcagcagcagctgcccatgccgatacccggggagctgctcacgctcatcggggccacaggcatctcctatggcatgggtctaaagcacagatttgaggtagatgtcgtgggcaacatccctgcagggctggtgcccccagtggcccccaacacccagctgttctcaaagctcgtgggcagcgccttcaccatcgctgtggttgggtttgccattgccatctcactggggaagatcttcgccctgaggcacggctaccgggtggacagcaaccaggagctggtggccctgggcctcagtaaccttatcggaggcatcttccagtgcttccccgtgagttgctctatgtctcggagcctggtacaggagagcaccgggggcaactcgcaggttgctggagccatctcttcccttttcatcctcctcatcattgtcaaacttggggaactcttccatgacctgcccaaggcggtcctggcagccatcatcattgtgaacctgaagggcatgctgaggcagctcagcgacatgcgctccctctggaaggccaatcgggcggatctgcttatctggctggtgaccttcacggccaccatcttgctgaacctggaccttggcttggtggttgcggtcatcttctccctgctgctcgtggtggtccggacacagatgccccactactctgtcctggggcaggtgccagacacggatatttacagagatgtggcagagtactcagaggccaaggaagtccggggggtgaaggtcttccgctcctcggccaccgtgtactttgccaatgctgagttctacagtgatgcgctgaagcagaggtgtggtgtggatgtcgacttcctcatctcccagaagaagaaactgctcaagaagcaggagcagctgaagctgaagcaactgcagaaagaggagaagcttcggaaacaggcagggccccttttgtctgcatgtctggctccccagcaggtgagctcaggagataagatggaagatgcaacagccaatggtcaagaagactccaaggccccagatgggtccacactgaaggccctgggcctgcctcagccagacttccacagcctcatcctggacctgggtgccctctcctttgtggacactgtgtgcctcaagagcctgaagaatattttccatgacttccgggagattgaggtggaggtgtacatggcggcctgccacagccctgtggtcagccagcttgaggctgggcacttcttcgatgcatccatcaccaagaagcatctctttgcctctgtccatgatgctgtcacctttgccctccaacacccgaggcctgtccccgacagccctgtttcggtcaccagactctgaacatgctacatcctgcccaagactgcacctctggaggtgcagggcacccttgagaagcccctcacccctaggccgcctccaggtgctacccaggagtcccctccatgtacacacacacaactcagggaaggaggtcctgggactccaagttcagcgctccaggtctgggacagggcctgcatgcagtcaggctggcagtggcgcggtacagggagggaactggtgcatattttagcctcaggaataaagatttgtctgctc

SEQ ID NO: 235677 - DNA, 2584 bp, Artificial Sequence
  derived and/or modified sequence
ggagcgtagcggcctctagctcgagcagcaggagcagcccgcaccggacaacttgcgagccatggggctggcggatgcgtcgggaccgagggacacacaggcactgctgtctgcaacacaagcaatggacctgcggaggcgagactaccacatggaacggccgctgctgaaccaggagcatttggaggagctggggcgctggggctcagcacctaggacccaccagtggcggacctggttgcagtgctcccgtgctcgggcctatgcccttctgctccaacacctcccggttttggtctggttaccccggtatcctgtgcgtgactggctcctgggtgacctgttatccggcctgagtgtggccatcatgcagcttccgcaggatctgctctccaggctgcactgctaccattctaccctaggcttggcctacgccctcctggctggattgccccccgtgtttggcctctatagctccttctaccctgtcttcatctacttcctgtttggcacttcccggcacatctccgtggggacctttgctgtcatgtctgtgatggtgggcagtgtgacagaatccctggccccgcaggccttgaacgactccatgatcaatgagacagccagagatgctgcccgggtacaggtggcctccacactcagtgtcctggttggcctcttccaggtggggctgggcctgatccacttcggcttcgtggtcacctacctgtcagaacctcttgtccgaggctataccacagctgcagctgtgcaggtcttcgtctcacagctcaagtatgtgtttggcctccatctgagcagccactctgggccactgtccctcatctatacagtgctggaggtctgctggaagctgccccagagcaaggttggcaccgtggtcactgcagctgtggctggggtggtgctcgtggtggtgaagctgttgaatgacaagctgcagcagcagctgcccatgccgatacccggggagctgctcacgctcatcggggccacaggcatctcctatggcatgggtctaaagcacagatttgaggtagatgtcgtgggcaacatccctgcagggctggtgcccccagtggcccccaacacccagctgttctcaaagctcgtgggcagcgccttcaccatcgctgtggttgggtttgccattgccatctcactggggaagatcttcgccctgaggcacggctaccgggtggacagcaaccaggagctggtggccctgggcctcagtaaccttatcggaggcatcttccagtgcttccccgtgagttgctctatgtctcggagcctggtacaggagagcaccgggggcaactcgcaggttgctggagccatctcttcccttttcatcctcctcatcattgtcaaacttggggaactcttccatgacctgcccaaggcggtcctggcagccatcatcattgtgaacctgaagggcatgctgaggcagctcagcgacatgcgctccctctggaaggccaatcgggcggatctgcttatctggctggtgaccttcacggccaccatcttgctgaacctggaccttggcttggtggttgcggtcatcttctccctgctgctcgtggtggtccggacacagatgccccactactctgtcctggggcaggtgccagacacggatatttacagagatgtggcagagtactcagaggccaaggaagtccggggggtgaaggtcttccgctcctcggccaccgtgtactttgccaatgctgagttctacagtgatgcgctgaagcagaggtgtggtgtggatgtcgacttcctcatctcccagaagaagaaactgctcaagaagcaggagcagctgaagctgaagcaactgcagaaagaggagaagcttcggaaacaggcagggccccttttgtctgcatgtctggctccccagcaggtgagctcaggagataagatggaagatgcaacagccaatggtcaagaagactccaaggccccagatgggtccacactgaaggccctgggcctgcctcagccagacttccacagcctcatcctggacctgggtgccctctcctttgtggacactgtgtgcctcaagagcctgaagaatattttccatgacttccgggagattgaggtggaggtgtacatggcggcctgccacagccctgtggtcagccagcttgaggctgggcacttcttcgatgcatccatcaccaagaagcatctctttgcctctgtccatgatgctgtcacctttgccctccaacacccgaggcctgtccccgacagccctgtttcggtcaccagactctgaacatgctacatcctgcccaagactgcacctctggaggtgcagggcacccttgagaagcccctcacccctaggccgcctccaggtgctacccaggagtcccctccatgtacacacacacaactcagggaaggaggtcctgggactccaagttcagcgctccaggtctgggacagggcctgcatgcagtcaggctggcagtggcgcggtacagggagggaactggtgcatattttagcctcaggaataaagatttgtctgctc

SEQ ID NO: 235678 - DNA, 2223 bp, Artificial Sequence
  derived and/or modified sequence
atgggcctggccgacgccagcggccccagagacacccaggccctgctgagcgccacccaggccatggacctgagaagaagagactaccacatggagagacccctgctgaaccaggagcacctggaggagctgggcagatggggcagcgcccccagaacccaccagtggagaacctggctgcagtgcagcagagccagagcctacgccctgctgctgcagcacctgcccgtgctggtgtggctgcccagataccccgtgagagactggctgctgggcgacctgctgagcggcctgagcgtggccatcatgcagctgccccagggcctggcctacgccctgctggccggcctgccccccgtgttcggcctgtacagcagcttctaccccgtgttcatctacttcctgttcggcaccagcagacacatcagcgtgggcaccttcgccgtgatgagcgtgatggtgggcagcgtgaccgagagcctggccccccaggccctgaacgacagcatgatcaacgagaccgccagagacgccgccagagtgcaggtggccagcaccctgagcgtgctggtgggcctgttccaggtgggcctgggcctgatccacttcggcttcgtggtgacctacctgagcgagcccctggtgagaggctacaccaccgccgccgccgtgcaggtgttcgtgagccagctgaagtacgtgttcggcctgcacctgagcagccacagcggccccctgagcctgatctacaccgtgctggaggtgtgctggaagctgccccagagcaaggtgggcaccgtggtgaccgccgccgtggccggcgtggtgctggtggtggtgaagctgctgaacgacaagctgcagcagcagctgcccatgcccatccccggcgagctgctgaccctgatcggcgccaccggcatcagctacggcatgggcctgaagcacagattcgaggtggacgtggtgggcaacatccccgccggcctggtgccccccgtggcccccaacacccagctgttcagcaagctggtgggcagcgccttcaccatcgccgtggtgggcttcgccatcgccatcagcctgggcaagatcttcgccctgagacacggctacagagtggacagcaaccaggagctggtggccctgggcctgagcaacctgatcggcggcatcttccagtgcttccccgtgagctgcagcatgagcagaagcctggtgcaggagagcaccggcggcaacagccaggtggccggcgccatcagcagcctgttcatcctgctgatcatcgtgaagctgggcgagctgttccacgacctgcccaaggccgtgctggccgccatcatcatcgtgaacctgaagggcatgctgagacagctgagcgacatgagaagcctgtggaaggccaacagagccgacctgctgatctggctggtgaccttcaccgccaccatcctgctgaacctggacctgggcctggtggtggccgtgatcttcagcctgctgctggtggtggtgagaacccagatgccccactacagcgtgctgggccaggtgcccgacaccgacatctacagagacgtggccgagtacagcgaggccaaggaggtgagaggcgtgaaggtgttcagaagcagcgccaccgtgtacttcgccaacgccgagttctacagcgacgccctgaagcagagatgcggcgtggacgtggacttcctgatcagccagaagaagaagctgctgaagaagcaggagcagctgaagctgaagcagctgcagaaggaggagaagctgagaaagcaggccggccccctgctgagcgcctgcctggccccccagcaggtgagcagcggcgacaagatggaggacgccaccgccaacggccaggaggacagcaaggcccccgacggcagcaccctgaaggccctgggcctgccccagcccgacttccacagcctgatcctggacctgggcgccctgagcttcgtggacaccgtgtgcctgaagagcctgaagaacatcttccacgacttcagagagatcgaggtggaggtgtacatggccgcctgccacagccccgtggtgagccagctggaggccggccacttcttcgacgccagcatcaccaagaagcacctgttcgccagcgtgcacgacgccgtgaccttcgccctgcagcaccccagacccgtgcccgacagccccgtgagcgtgaccagactgtag

SEQ ID NO: 235679 - DNA, 2262 bp, Artificial Sequence
  derived and/or modified sequence
atgggcctggccgacgccagcggccccagagacacccaggccctgctgagcgccacccaggccatggacctgagaagaagagactaccacatggagagacccctgctgaaccaggagcacctggaggagctgggcagatggggcagcgcccccagaacccaccagtggagaacctggctgcagtgcagcagagccagagcctacgccctgctgctgcagcacctgcccgtgctggtgtggctgcccagataccccgtgagagactggctgctgggcgacctgctgagcggcctgagcgtggccatcatgcagctgccccaggacctgctgagcagactgcactgctaccacagcaccctgggcctggcctacgccctgctggccggcctgccccccgtgttcggcctgtacagcagcttctaccccgtgttcatctacttcctgttcggcaccagcagacacatcagcgtgggcaccttcgccgtgatgagcgtgatggtgggcagcgtgaccgagagcctggccccccaggccctgaacgacagcatgatcaacgagaccgccagagacgccgccagagtgcaggtggccagcaccctgagcgtgctggtgggcctgttccaggtgggcctgggcctgatccacttcggcttcgtggtgacctacctgagcgagcccctggtgagaggctacaccaccgccgccgccgtgcaggtgttcgtgagccagctgaagtacgtgttcggcctgcacctgagcagccacagcggccccctgagcctgatctacaccgtgctggaggtgtgctggaagctgccccagagcaaggtgggcaccgtggtgaccgccgccgtggccggcgtggtgctggtggtggtgaagctgctgaacgacaagctgcagcagcagctgcccatgcccatccccggcgagctgctgaccctgatcggcgccaccggcatcagctacggcatgggcctgaagcacagattcgaggtggacgtggtgggcaacatccccgccggcctggtgccccccgtggcccccaacacccagctgttcagcaagctggtgggcagcgccttcaccatcgccgtggtgggcttcgccatcgccatcagcctgggcaagatcttcgccctgagacacggctacagagtggacagcaaccaggagctggtggccctgggcctgagcaacctgatcggcggcatcttccagtgcttccccgtgagctgcagcatgagcagaagcctggtgcaggagagcaccggcggcaacagccaggtggccggcgccatcagcagcctgttcatcctgctgatcatcgtgaagctgggcgagctgttccacgacctgcccaaggccgtgctggccgccatcatcatcgtgaacctgaagggcatgctgagacagctgagcgacatgagaagcctgtggaaggccaacagagccgacctgctgatctggctggtgaccttcaccgccaccatcctgctgaacctggacctgggcctggtggtggccgtgatcttcagcctgctgctggtggtggtgagaacccagatgccccactacagcgtgctgggccaggtgcccgacaccgacatctacagagacgtggccgagtacagcgaggccaaggaggtgagaggcgtgaaggtgttcagaagcagcgccaccgtgtacttcgccaacgccgagttctacagcgacgccctgaagcagagatgcggcgtggacgtggacttcctgatcagccagaagaagaagctgctgaagaagcaggagcagctgaagctgaagcagctgcagaaggaggagaagctgagaaagcaggccggccccctgctgagcgcctgcctggccccccagcaggtgagcagcggcgacaagatggaggacgccaccgccaacggccaggaggacagcaaggcccccgacggcagcaccctgaaggccctgggcctgccccagcccgacttccacagcctgatcctggacctgggcgccctgagcttcgtggacaccgtgtgcctgaagagcctgaagaacatcttccacgacttcagagagatcgaggtggaggtgtacatggccgcctgccacagccccgtggtgagccagctggaggccggccacttcttcgacgccagcatcaccaagaagcacctgttcgccagcgtgcacgacgccgtgaccttcgccctgcagcaccccagacccgtgcccgacagccccgtgagcgtgaccagactgtag

SEQ ID NO: 235680 - DNA, 507 bp, Artificial Sequence
  derived and/or modified sequence
atgaagaataaactggggatttttaggaggagaaacgaatctcccggtgcccccccggccgggaaagcagataaaatgatgaaaagtttcaaaccgaccagtgaggaggctctgaaatggggcgagtcactggagaagcttctggtgcataagtatggactcgccgtctttcaggcctttctgcgcacagagttttctgaggagaacctggaattttggcttgcctgtgaggattttaagaaggtgaaaagccaatccaagatggcatcaaaagcaaagaaaatctttgcagaatacatagccattcaagcgtgtaaagaggttaacctcgactcctacaccagagaacatacaaaggataacttgcagagcgtgacgcgaggctgctttgacttagctcagaagagaatattcggactgatggagaaggacagttaccccaggtttctgagaagcgacctctacctagacttgataaatcagaagaaaatgagccctcctctttag

SEQ ID NO: 235681 - DNA, 507 bp, Artificial Sequence
  derived and/or modified sequence
atgaagaacaagctgggcatcttcagaagaagaaatgaaagccctggggcccccccagctgggaaggctgacaagatgatgaagagcttcaagcccaccagcgaggaggccctgaagtggggcgagagcctggagaagctgctggtgcacaagtatggcctggccgtgttccaggccttcctgaggacagagttcagcgaggagaacctggagttctggctggcctgtgaggacttcaagaaggtgaagagccagagcaagatggccagcaaggccaagaagatctttgctgagtacatcgccatccaggcctgcaaggaggtgaacctggacagctacacccgggagcacaccaaggacaacctgcagagcgtgacccggggctgctttgacctggcccagaagaggatcttcggcctgatggagaaggacagctacccccgcttcctgcggagtgacctgtacctggacctgatcaaccagaagaagatgagcccccccctgtag

SEQ ID NO: 235682 - DNA, 507 bp, Artificial Sequence
  derived and/or modified sequence
atgaagaacaagctgggcatcttccggcggcggaacgagagccccggcgcacctccagcaggcaaagcagataagatgatgaagtcctttaagccaaccagcgaggaagccctgaaatggggtgaatcgttagagaagttgctggtgcacaagtatggattggccgtgttccaagcgttcctgcgcacggaattttccgaagagaacttggagttttggctggcttgcgaggatttcaagaaagtgaagtctcaatctaaaatggcctcaaaggccaagaaaatctttgccgagtacattgccatccaggcgtgcaaggaagtaaacctcgactcctacacaagagagcacactaaggacaacctacagagtgtgacccgaggatgtttcgatctggcgcagaaaagaatctttgggctgatggagaaagattcgtacccacgctttcttcgcagcgatctttatctcgacctgatcaatcagaaaaagatgtctcccccactgtag

SEQ ID NO: 235683 - DNA, 507 bp, Artificial Sequence
  derived and/or modified sequence
atgaaaaacaaactgggtatattccggaggcgcaatgagagtccaggggcacctcccgcaggcaaagcggacaaaatgatgaagagctttaagcctacaagtgaggaagccctgaagtggggggagagtcttgaaaagcttttggtgcacaagtacgggcttgctgtattccaagcctttcttcggacagaattctccgaagaaaacttagagttctggctggcatgtgaggacttcaaaaaggttaagtctcagtcaaagatggcctcgaaggcgaagaaaatttttgccgagtacatcgcaatacaggcctgcaaggaagtgaatttagactcctatacaagagagcataccaaggacaatctccaatctgtgacccgcggatgctttgacttggcacaaaaacgtatttttggcctgatggaaaaggatagttatcctcgttttttaaggtccgatctctatctggatctgattaaccagaaaaagatgagccctccactgtag

SEQ ID NO: 235684 - DNA, 507 bp, Artificial Sequence
  derived and/or modified sequence
atgaagaacaagctgggcatcttcagaagaagaaacgagagccccggcgccccccccgccggcaaggccgacaagatgatgaagagcttcaagcccaccagcgaggaggccctgaagtggggcgagagcctggagaagctgctggtgcacaagtacggcctggccgtgttccaggccttcctgagaaccgagttcagcgaggagaacctggagttctggctggcctgcgaggacttcaagaaggtgaagagccagagcaagatggccagcaaggccaagaagatcttcgccgagtacatcgccatccaggcctgcaaggaggtgaacctggacagctacaccagagagcacaccaaggacaacctgcagagcgtgaccagaggctgcttcgacctggcccagaagagaatcttcggcctgatggagaaggacagctaccccagattcctgagaagcgacctgtacctggacctgatcaaccagaagaagatgagcccccccctgtag

SEQ ID NO: 235685 - protein, 749 aa, Artificial Sequence
  derived and/or modified sequence
MQTSETGSDTGSTVTLQTSVASQAAVPTQVVQQVPVQQQVQQVQTVQQVQHVYPAQVQYVEGSDTVYTNGAIRTTTYPYTETQMYSQNTGGNYFDTQGSSAQVTTVVSSHSMVGTGGIQMGVTGGQLISSSGGTYLIGNSMENSGHSVTHTTRASPATIEMAIETLQKSDGLSTHRSSLLNSHLQWLLDNYETAEGVSLPRSTLYNHYLRHCQEHKLDPVNAASFGKLIRSIFMGLRTRRLGTRGNSKYHYYGIRVKPDSPLNRLQEDMQYMAMRQQPMQQKQRYKPMQKVDGVADGFTGSGQQTGTSVEQTVIAQSQHHQQFLDASRALPEFGEVEISSLPDGTTFEDIKSLQSLYREHCEAILDVVVNLQFSLIEKLWQTFWRYSPSTPTDGTTITESSNLSEIESRLPKAKLITLCKHESILKWMCNCDHGMYQALVEILIPDVLRPIPSALTQAIRNFAKSLEGWLSNAMNNIPQRMIQTKVAAVSAFAQTLRRYTSLNHLAQAARAVLQNTSQINQMLSDLNRVDFANVQEQASWVCQCDDNMVQRLETDFKMTLQQQSTLEQWAAWLDNVMMQALKPYEGRPSFPKAARQFLLKWSFYSSMVIRDLTLRSAASFGSFHLIRLLYDEYMFYLVEHRVAQATGETPIAVMGEFGDLNAVSPGNLDKDEGSEVESEMDEELDDSSEPQAKREKTELSQAFPVGCMQPVLETGVQPSLLNPIHSEHIVTSTQTIRQCSATGNTYTAV

SEQ ID NO: 235686 - DNA, 2250 bp, Artificial Sequence
  derived and/or modified sequence
atgcaaacgtcggaaacagggtcagatacgggctcaactgtgactctgcaaacttccgtagcaagtcaagctgctgtgccaacccaggttgtacagcaagttcccgtgcagcagcaagtgcagcaggttcaaacagtgcaacaggtgcagcacgtgtaccctgcacaggtacagtatgtggaagggtcggacaccgtatataccaatggcgccattagaacaacaacatacccctacaccgagacacagatgtattcccagaacactgggggcaactactttgacactcagggcagttctgcccaagtcacaactgtggtgagttcccacagcatggtgggcacagggggcatccagatgggtgtgacgggcgggcaattaatctcatctagtggcggaacatatctgatcggtaactccatggaaaactcaggccactccgtaacacatactacacgtgctagtccagcaactatcgagatggccatcgaaacccttcaaaagtccgatgggctgtccactcatcggtcctcccttttgaactctcacctccaatggctgttggacaactatgaaaccgcagagggcgtgtccctgccccgcagcaccctgtacaaccactacttgcgccactgccaggagcataagttagatcccgttaacgcagcatcttttggcaaactgatacggagcatcttcatggggctgaggacaaggcggttgggcactcgaggtaattcaaaatatcattattatggcatcagggttaaaccagattcgcccctgaaccgactccaggaggacatgcagtacatggccatgagacaacagccgatgcagcagaaacaacggtacaagccaatgcagaaagtggatggagtggcagacggctttaccggctcaggacagcaaaccggcactagtgtggagcaaactgtcattgcccagtcccaacaccatcagcaatttctggatgccagcagagccttgccagagttcggcgaagtcgagattagttcactgcccgatgggactacttttgaagacatcaaaagcctccaatcactgtaccgtgaacactgcgaggctatcctcgacgtcgtggttaacctgcaattttctctcattgaaaagttgtggcagactttctggcgatatagtcctagcactccgacagacgggaccacaatcaccgagagtagcaatctgtcagagattgagtctaggctgccaaaggccaaactgataactctctgtaagcacgaaagtatcttgaaatggatgtgtaactgcgaccatggcatgtaccaggctttggtcgagatcttgataccagatgtcctgcgcccaatcccatccgctcttacccaggccattagaaacttcgcgaaaagcttagaggggtggctgagcaacgctatgaataacatcccacaaaggatgattcagacaaaggtggcagctgtttctgccttcgcccagacgttgcgccggtacacctctttgaatcatcttgcccaggcagctagagctgtgctgcagaatacttctcagatcaaccaaatgctgtccgacttgaatagggtggactttgcaaatgtacaagaacaagccagctgggtgtgccagtgtgatgataacatggtgcagaggctcgaaactgacttcaaaatgacactgcagcaacagagcacactcgaacaatgggctgcctggctggacaatgtcatgatgcaggccttgaaaccctacgaggggcgtccttcttttcccaaggcggctcgtcaattcctgctcaagtggtctttctactcgagtatggtcattcgcgacctgacactcagaagcgcagccagctttgggtcgttccacctgattcgactcctttacgatgagtacatgttttatttggtggagcacagggttgcacaggcaacaggagaaaccccaatagcagtgatgggcgaatttggtgacttgaatgccgtgagcccaggcaatctcgataaagatgagggttcagaagtggaatctgagatggacgaagagctggatgattcaagcgaacctcaggcaaaaagagagaaaacagagttgagccaagccttcccagtgggctgcatgcagcccgtgcttgagaccggcgtccaaccatctttgctcaatccaatccactcagaacatatagtcacatccacccagactatccgccaatgtagcgccaccggaaatacctataccgccgtgtag

SEQ ID NO: 235687 - DNA, 2250 bp, Artificial Sequence
  derived and/or modified sequence
atgcagaccagcgagaccggcagtgacaccggcagcacagtgaccctgcagacctctgtggccagccaggccgctgtgcccacccaggtggtgcagcaggtgcctgtgcagcagcaggtgcagcaggtgcagacagtgcagcaggtgcagcacgtgtacccagcccaggtgcagtatgtggagggcagtgacacagtgtacaccaatggagccatccgcaccaccacctacccctacacagagacccagatgtacagccagaacacaggaggcaactactttgacacccagggcagcagcgcccaggtgaccaccgtggtgagcagccacagcatggtgggcactggaggcatccagatgggcgtgactggaggccagctgatcagcagcagcggcggcacctacctgattggcaacagcatggagaacagcggccacagcgtgacccacaccacccgggccagccctgccaccatcgagatggccatcgagaccctgcagaagagtgatggcctgagcacccacaggagcagcctgctgaacagccacctgcagtggctgctggacaactatgaaacagctgagggcgtgtccctgcccaggagcaccctgtacaaccactacctgcggcactgccaggagcacaagctggaccctgtgaatgctgccagctttgggaagctgatccgcagcatcttcatgggcctgcggacccggcggctgggcacccggggcaacagcaagtaccactactacggcatccgggtgaagccagacagccccctgaaccggctgcaggaggacatgcagtacatggccatgaggcagcagcccatgcagcagaagcagcgctacaagcccatgcagaaggtggatggagtggctgatggcttcaccggcagcggccagcagacaggcacctctgtggagcagaccgtcatcgcccagagccagcaccaccagcagttcctggatgccagccgggccctgcctgagtttggagaggtggagatcagcagcctgcctgatggcaccacctttgaggacatcaagagcctgcagagcctgtaccgggagcactgtgaggccatcctggatgtggtggtgaacctgcagttcagcctcatcgagaagctgtggcagaccttctggagatacagccccagcacccccacagatggcaccaccatcacagagagcagcaacctgtctgaaattgagagccggctgcccaaggccaagctgatcaccctgtgcaagcatgagagcatcctgaagtggatgtgcaactgtgaccacggcatgtaccaggccctggtggagatcctgatcccagatgtgctgcggcccatccccagcgccctgacccaggccatccggaactttgccaagagcctggagggctggctgagcaatgccatgaacaacatcccccagaggatgatccagaccaaggtggccgctgtgtctgcctttgcccagaccctgcggcgctacaccagcctgaaccacctggcccaggccgcccgggctgtgctgcagaacaccagccagatcaaccagatgctgagtgacctgaacagagtggactttgccaacgtgcaggagcaggcctcctgggtgtgccagtgtgatgacaacatggtgcagaggctggagacagacttcaagatgaccctgcagcagcagagcaccctggagcagtgggccgcctggctggacaacgtgatgatgcaggccctgaagccctatgagggccggcccagcttccccaaggccgcccggcagttcctgctgaagtggagcttctacagctccatggtgatccgggacctgaccctgcggtctgctgccagctttggcagcttccacctgatccggctgctgtatgatgagtacatgttctacctggtggagcaccgggtggcccaggccaccggggagacccccatcgctgtgatgggagaatttggagacctgaatgctgtgtccccaggcaacctggacaaggatgagggcagcgaggtggagagcgagatggatgaggagctggatgacagcagcgagccccaggccaagcgggagaagacagagctgagccaggccttccctgtgggctgcatgcagcctgtgctggagaccggggtgcagcccagcctgctgaaccccatccacagcgagcacatcgtgaccagcacccagaccatccggcagtgcagcgccaccggcaacacctacacagctgtgtag

SEQ ID NO: 235688 - DNA, 9307 bp, Artificial Sequence
  derived and/or modified sequence
cgtgcgagtgtctccctctccctctcgctctctctctctctccctctctctctctcttttgtgagttatagcaaccgttgccttgtgaatcaagcgccatagtcaccgtagtcctggcgactgttacccatcaacaacaactactcctctcctcctcctcctcctcttcctcctcctcctccccaccaccaccatctccatcacccaccaacaacaccacaataatccacagccaaggccacttggtcattctggcattttatggtagagaatacgttgagtttggctctggaaggaatatgagagaccatcatgcagacatcagagactgggtcggacacaggctcgacagtgaccttacaaacatctgtggctagtcaagcagcagtgcctacgcaggtggtacagcaagtaccagtacaacaacaggtacagcaggtacagactgtgcagcaggtacaacatgtctatcccgctcaggtgcagtatgtggaaggaagcgatactgtctataccaatggagcaatccgaacaacaacgtatccttacacagagacacagatgtacagccaaaatactggagggaattactttgatactcaagggagttccgcccaggtgactaccgtggtctcatcccacagtatggtgggcactggtgggattcagatgggcgtcacaggaggacaactcatcagcagctctggaggaacctatctgatcggcaactcaatggagaattctggtcactcagtgacacacacaactcgggcctccccagcgacaattgaaatggcgattgagacgctgcaaaagtctgacggtctgtccactcacagaagctctcttctcaacagccatctccagtggctgttggacaattatgagacagcagaaggagtgagccttcccagaagcactctgtacaaccactaccttcgacactgtcaggaacacaaactggacccagtcaatgctgcctcttttggaaaattaataagatcaatttttatggggctacgaaccaggagattgggcactagaggaaactccaaataccactactatgggattcgtgtcaagccagattcccctcttaatcgtctgcaagaagacatgcagtatatggctatgagacaacaacccatgcaacagaaacaaaggtacaagcctatgcagaaagtggatggggttgcagatggtttcacaggaagtggtcaacagacaggcacatctgttgagcaaactgtaattgcccaaagccaacatcatcaacagtttttagatgcatctcgagcacttccagagtttggagaagttgaaatctcttctctgccagatggtactacctttgaggatatcaagtcactgcagagtctttatagagagcactgtgaggcaatattggacgttgttgtgaatcttcaatttagcctgatagaaaaattgtggcaaacattctggcgctattctccctctactccaactgatggcactaccattaccgaatcgagcaatctgagtgaaatagaaagtcgacttccgaaagcaaagctgataactctgtgcaaacatgagtctatcctgaaatggatgtgtaactgtgaccatgggatgtaccaggctttggtggagattctcatccccgacgtccttagacctattcctagtgccttgacccaagccattcgaaattttgcaaaaagccttgaaggttggctttccaatgccatgaacaatattccacagagaatgatacaaaccaaggttgccgctgtaagtgcctttgcccagactctgcgaagatacacgtcgcttaatcacctggcccaggcagctcgtgcagtgcttcagaacacttcccaaatcaaccagatgcttagtgacctcaaccgtgtcgactttgccaatgtccaggagcaggcttcctgggtgtgccagtgtgatgacaacatggttcagagactagaaacagacttcaagatgactcttcagcagcagagcaccctggagcagtgggctgcgtggcttgacaatgtgatgatgcaagcactgaaaccctatgaaggaagacccagttttcctaaagccgccaggcagtttctgctaaaatggtctttctacagctcaatggttattcgggacttaaccttacgcagtgctgctagctttggctccttccacctgatccgtctactctacgacgaatatatgttttacttagtagaacatcgtgttgctcaggcaacaggagagactcctatagcagtcatgggcgagtttggtgatttaaatgccgtgtctcctggaaatctggataaagatgaaggcagtgaagtagaaagtgaaatggatgaagaactggatgactcttcagagcctcaagccaaaagagagaaaacagagctgagccaggcatttccagtgggctgcatgcagcctgttctcgagactggcgtgcaaccaagcctcctgaatccaattcacagcgagcacattgtcacaagtactcagactatcagacagtgcagcgctacaggaaatacctacactgcagtctaaagaatattaaagcgtatttttccagcttacattaaccctgttgatattgggcttaagttgaaaatttaataagcctgaaggtcgactgttgtcaaattctatctgtgctgaacattaactttttggagttgtgaaatggaatgggtgtatgtattttgccagatctttttttttaacgtaaacaaattatttgcttcttaataatgaattttttcccttagtttcaggtgtcaagaaggatttttacaacacttaatgtcaatgttttgttttcttataattaaaaagtaatttacattttttgtagcttaaaatattttattgttgattgttagtcttggtgtatgatttcatgtgtaagttttttaattagatgcacttctgtgaaatatcaaaagaaatgatttttttgatttacactggaggcatgcccatttggcagcagatgcatcaaatttgcttttgaaaggtgcttttcattggacagaaccataagacactattttgataacattttgagtatggagagagaatacagagcatttttattatagtgctagagggtttggaaggtcatctatttttctctgaggaaaaaatgagctgtacatttatcagttcagagtaaatgacagaattgcaagagattatgctaatatgtacataatttgtgtacataattattaaaccatgttaacaatgcaagcttccgttaaacattgaattttaactattatttgcataccaattcctctgtttaaagactactgattctgtatttgggaccactgcacagatgcattctgctgttaagtgggggctgttatagttagatactgaagcagaaaaaaaagacttgactttttttttttaagtgtacatgctacttatgctgagctggacatacaggaaaccattccatttggatgactttcttttattccaggtctttttcctaatagtagttcaatatgctgctattataaacgagaatttatagaatgcaaggaatgtagcaacctacataacgttatttccttcaaaactatttcctggtttctaaagtatgtggatttaaattgtaaacagaacctgaaggcagtgtaactggcacacctcactgttacttatccccaattctgtaggatttggataggtggctggatggaccattgccattgaagaatgtacatcagggatcatcgtacctcggctattacatggtgccttaaaacagaactgaagctaaggtttagtaaggtttattttgttcatgtgactaactcttcaatccatttgacaaagtgtgcctgtcattttcagattcctgaagtaaggacaggtgacatgttcttcaaaggaaatttagggaaaacaaaggaaaacaaaaagacaaaaatcagtttccctctttgagtgaccgtggatctattttttattcttagagctgaatattacttgattacaaatcagattgcttaagggtgtggaatagcaggctagttttaataccaacttgttaacataaaatcatatatgttttagaccattcttatttagttacaattttagaaagttaacaaagtaagcaggtacttatcgaagtgcatcttttcagtctaaatgtttgtctgtgtgtctaggtgctggtgagtccacatggacacatgagtgcccatggggcaggagtctgctataaagtcagaaggtgagatcctagagagttacacccagccccattttaatttgcatgaaaagccaaggttcttttaagcactcaaattatttaatgattaaaacacaagaaaggcacatctgttcatttaaatagttgtaaaaaactaatcagcaaaaataaatagataataaagccaaaaaaaaggaaagcacaaaatgattgacagattatcaaatgaggcctatattaaacccaagatgtttatctttccagtggtattggggtaaggggggtggggggttggaaagacgaggtgagccagtctgtaaagttagaaataccaaatggcttatcgggtaatacacagtgtatttaagctgttgttgcttaattgcctcagactactcaaataacatcaacaacatttcttaagtaaaatttaaatattttagatgtaattttaaaaactgatccaaattttttattatacaactcactcatatatttgaaagtcttcactagcatagtagcatcaccttcatctaaatgtcatttaaattactgtccccctttttcctcccaaaaagacaatggatttgtaccaaaacacacacaaaaaaggcaaacaaaacatgataatctgcaaaagttcatgtatctacttcattgtgcataggaagtgtttacaggtaaaattaaaatcaaaaattgaaaaaacactcttcattttggctctcctttctgaattttttcagtttcctgtctctacccgccatcctttgagtgatactatatctgtattggaccaaatgtatttactggtttcattttgtttattgaatgactttaaatgtatttattatcattgtttaatttaatgttggatatatttgtatcattacaggaatctggtaataatgggcaaatttagattgatgaggcttagggatcggggatgctccaggattcaacatttcttccaattgttcatggtttgttctaaattaggacagattaagaactaataaaacattattacatttgaacttgactcaataaaaatattctgatctcctttatgaatattaggaatattctttgtgattagtgtaagtagtttggatcaaaacataaaaagaagacctatggtttatgctacttctagttatttgtagttcacagtaaaacatgcacagacatacacacaaacattttcatcaatttcgaatttgaattgtgaaaaatatataagaaaataaaaacaatttatacatttgagcaaattgagcaatcacatttattgcatttatttccctttttcccttttttcactcattgaaagtgtgggttttctaaataatattagacactaacactcaacagatttattcacaaatgacacaagtacacattttaagacttctttgtatttcttgcaattataaccaatcactagtcatgaaatatacctacataaaccaagtcctacactttcagtgaggaagaatgtaaggaaggtatgttgactgttttcaagtttcagaaaagatattttcatatgataggattgagtatcatgggtatagtttgatcttgacatatagtttgaaaatcatactcaaaagatttgcattcatgaaaccagtgaacaatagggtggaatggatgaaccatctccttggaagacagggcccaattttcaattttttctttggctatcaagttgctagtcacttattcaggattttcatccaaactgtgtttggactgactgtataagtcttactgccttttcagaaatctgctttcctttgtgtgatttttcttgtactgtatagcacggtttatgcacctctctttagatggtgtactttaaaaacaaaagtaaaatttagaaaatggttttaacactgcatacctaaaattagtagtgtgcagcattgactgcctttgatttgtagtagacaagtaaaaatgaatacgttcttgtagaatgctgtaaaagttattcaggaatgaatacggttttagtgccgtaatcatgaatctttttatatgaatgcactgtctaaaagtgctaaatgcattttcaaatttttaaaaattcctcagatgatatatttgaaatgtctaaaataatgctgtgcttgaaacattagtgtaaaaggaaaaaaaaaatagtgtcactgtgatgttggtcctccctgtgtggacacaagtagaaagaaaaaacttggcaagtcacctttgtgtacaatttgaggcagtggttatatacaataaattgacctttattatatcccccagacacacacattcttggtgagaaaagaacaaccatccagaaattgagatgagaacttttgtgatctgtatgaatcacagcagatcatgggggaggaggattggcatgcagtgctgttgaaaattgggcttgttgttagatcagaacaacctccatgtatatggttagaacgaatcaattaatggaatcctagtatttctgcaagtttggtgatttttaaaaactggaatagaagcattaattcagtgcttagttctagtattagaaaacccctttgatgtaatgccttgtattaaccctttgagcattgtaagatatacaatgggggacaaaagcctttcagatcatttatttagacttagaccggtaaagtatactctatatccaaatgtctaattatgctgtttttttaaaggggggggtaggaagagaaagtgtttccacgccgaacacttgcattttatatacaactcttaatttttcttcaagagggcttgatatatttattcccaaatattcactgccatctaagtaagtgtactgtttacagaaaaaaaaaatcaacttttctagtatcacaccatagtctctagaaaaggaggacaaatacatgggcctggatagacctatgtcataactgatttctgcacattgaaggtacctagattgcctttaaaaggtataaagaaagggttaagtttcttttttttttgtcttttttttcccaaaatgaatcaaaagatctcatttatttagctttagaaagtacaagtgtaagtaaagccttaggaagaaaggagttcgagtggattaagagaatctgaactctttgggggcagttaggctatttggagttagatcgctcataaaatattgtttgcgaatttcacacagggcataattttatctatgctccaaaactttaatacgttgtcaaaaaattatatatagatagaatggagagcaaagcacttgattttaagctcatctgtcaggagatgctatgactactgcttctgatatctctaaatgtcagtctgcttacaccattgctgattttgttcaagggaatctcttcgtgcacttgattccctctgttccctgcgtgatcgaacatgaaagcagtgttgtctgcagatgtgcttgcgctgccctagctgggtgcaaataagagtgtaacctattctgatgtctggtgaaaggacatccatagcatagtgcaagtatgccgtaaacgttgctttttaggcagtttaggaagtcagaccatgcaaattactcatgtgttaacatgcaatactcaaagggttttaatttaactctcttcttttgaattcttcatgatgatttactgtaaatgcttctcagtttgcatgccttgatcattgctgctagtgattttatgtgccagtagacctgagtttagtttaccaattttacttaaatagtaaaagccacttacaaagtgactgcctaggatttttttttcctttcatttgaaataattgataatatgtttttttaaaaagaaaaatgtgttttgtctcttcttttatttggttctggtttgattctttttctcccctctttcctttgttttttttttttaaataaattatgatgttgggattggaagccctgagtaatgaaaatctttggtaagaattgtttatgtagctcaataacgaggacaacaaatattctttagaagaattttgattctggggaggaaagaaaatataaaaactcccattgactgttgataaccaagtaaatttttccttcagtaaattagtatttttgaagaaacgatcgccttgttttaacttgctaaacaacaattttaaatgacccaataaagaatctattgaactttattcgtttaaaaagcatcttttgtaccaaagcaaatttttttctctactcatttccatcatcaatttggacctatggtggtgaccaatgcattggttacagaaactttaagtgagtgccttgagaaaacttggaaatttgtgcctgaggtggtaaacttttaattaggttaattgtagtgcttaccaatcagtaacttcactatcactcagggctttcgtaccttctaggtaaaacttctttcattgtgtttttttaagatactgtatttttttttaagtgccatcatttaaatttcacttagtaagtggcagattacattattcagtcccacaagcacagaaacatagtaacactaggagatatttgaacatttattttacaatcgactgaatatattatgtaaatgaggtaagcaacttttgtagagattgtatgtgtgagataatgtaatgttcttttccagtttttggactacagttgaataaactttttaattatttaaaaacatctttaccgaataacatgtgatggttttttgtataatgtatttgattttgtaaatacgtatttcctgatgtgatttttgtgagaaatgctaaatcttttagtatatcatgtcctctcaaaattggcaggagctaaataatagtttgtgggcgatttgtattgtgtactgtacaataactggggaacttttataattataaaaatatatattaacttttagtgtgttgtttaaacaaatgactggaacatactaaagatattagtaggatttttctgaatatttcagacttgaactcaggctagctttcttgtgtttttcaaaacaaaatggtgtcttgtcttttaaaatcaataaatttgtttccttgttacaaata

SEQ ID NO: 235689 - DNA, 2250 bp, Artificial Sequence
  derived and/or modified sequence
atgcagaccagcgagaccggcagcgacaccggcagcaccgtgaccctgcagacaagtgtcgcgagccaggctgccgtgcccacgcaagtcgtgcagcaggtgcccgtccagcagcaggtgcagcaggttcagactgtccaacaggttcaacacgtctatcccgcccaggttcagtacgtggaaggttccgacacagtctacacaaatggagctatccgcactaccacctacccctacaccgaaacgcagatgtattctcagaatacgggaggcaactactttgacacccaaggtagctccgctcaggtgactaccgtggtgtcctcccatagcatggtcggcactggcggtattcagatgggggtcactggtgggcaattgattagctcgagcggcgggacatatttaatcggcaattcaatggaaaattctggtcattccgttacccatacaacccgggctagccccgcgaccatagaaatggccatcgagacattgcagaagtccgatggactgtctacccaccgcagcagtctgctgaactcccatctccagtggctcttagataactacgagacagccgaaggagtgtcgctgcctcggtctacactgtataatcattatctgagacactgtcaagaacacaaattagatcctgtgaatgctgcctctttcggtaagttgattcggtctatttttatgggcctccgcaccaggagacttggaacacgcgggaactctaagtatcactactacggaattagggttaagcccgactcaccactcaacagattgcaagaggatatgcaatatatggccatgcggcaacagccaatgcagcagaagcagagatataagcccatgcagaaggtggatggagtcgcggatgggttcaccggctctggccagcagactggcactagcgtggagcagacagtcattgcccaatctcaacaccaccaacagttcctggatgcgtctcgcgccctcccagaattcggggaagtggagatttcctctctgcccgatgggaccacttttgaggacatcaaatcgcttcagagcctgtaccgggagcactgcgaagcgatcttggacgtagtagtgaatttacagttttctctgatcgaaaagttgtggcagaccttttggcgatattcacctagcaccccaaccgacggcacgacaattacagaatcctctaatttgtctgagatcgagtcacggctgcctaaagccaaacttatcactctctgcaaacatgaaagcattctcaagtggatgtgcaactgtgatcatggcatgtatcaggccctggttgagattctgattccagatgtccttcggcctatcccctcagcattaactcaggccatccgcaattttgcaaagagtcttgaaggctggctatcgaatgccatgaataacatcccacagcggatgatccagaccaaggtggcggccgtgtctgcgttcgctcaaaccctccgacgctacactagcttaaatcatctggcccaggccgctcgcgcggtgcttcagaacacttcccagataaatcaaatgctctcagaccttaatagggttgattttgccaatgtccaagaacaggcatcatgggtttgtcagtgcgatgacaacatggtgcagcgcttagaaactgattttaagatgacgctccagcagcagtccaccctggaacaatgggcagcttggctggataacgtgatgatgcaggctctgaaaccatatgagggtcggccttcctttccaaaagctgcacgccagttccttctcaagtggagtttctactcgtctatggtcataagagatctgactctcagatctgctgccagtttcggaagcttccaccttattagactgttgtacgatgagtatatgttctacttagttgagcacagagttgcacaggcaacgggggagaccccaatcgccgtgatgggggagttcggtgatctgaacgctgtcagcccgggaaatctggacaaggatgaaggttcagaggtggagtctgagatggacgaggagttagacgactctagcgaaccacaggcaaagagggagaaaacagagctatcccaggcatttccagttgggtgtatgcagcctgtgctggagaccggagttcagccctccctgctcaaccccatccactcagagcatattgttaccagcacccagactatcaggcagtgctcagctactggcaatacttataccgcagtttag

SEQ ID NO: 235690 - DNA, 2250 bp, Artificial Sequence
  derived and/or modified sequence
atgcagaccagtgaaacgggtagcgacacgggatccacagtgacgttgcagacttccgtcgcttctcaagctgccgttcccacgcaggttgttcagcaggttcccgtgcaacaacaagttcagcaggtgcagacagtccaacaggttcaacatgtgtaccctgcccaggtgcaatacgtggagggcagcgatacagtgtacacaaatggggctatccggaccactacctacccatacaccgagacccaaatgtattcccaaaataccggtgggaactattttgatacacaaggctcctctgcacaggtgaccaccgtagtgtctagccattccatggttggaacaggcggtattcagatgggcgtcaccgggggacagcttatcagctccagcggagggacctaccttatcggcaatagcatggaaaatagcggacattctgtgactcacaccaccagagcaagccccgcaaccatcgaaatggctatagagaccctccagaagtctgatggcttgagcactcacagatcttcactgctgaattcccatttgcaatggctgctggataactacgagactgcggagggggtatcgttgcctaggagcacattatataaccattacctcagacactgtcaggagcataaactcgaccccgtgaacgcagcaagcttcggaaaattaatacggagcatattcatggggctgcggactaggcgcttaggcacaagaggcaactctaaataccactactatggtatccgggtcaaaccagattcgccgctgaatcgcctgcaggaagacatgcagtacatggccatgcgtcagcagccaatgcaacaaaagcagcgttataagccaatgcaaaaggttgacggcgttgccgacggcttcactggctccgggcaacaaacagggaccagcgtggaacagacagtgatcgcccagagtcagcaccaccagcaattcttggacgcctctcgcgcactgcctgagttcggcgaggtcgagatcagctcactccctgacggtaccactttcgaggatatcaaatccctccagagcctgtatcgggaacattgcgaagctattttggatgtcgtggtgaacttacagttttccctcattgaaaagctgtggcagacgttctggagatactcccctagcacccccactgatggcacaaccatcacagaatccagtaacctgagcgaaattgaaagtcgtctgcctaaggctaagctgatcacactatgtaaacacgagagtatcctcaagtggatgtgtaactgcgatcatgggatgtaccaggcactggtagaaatactgatcccggatgtgctaaggcccatccctagcgctctaacgcaagcaattcgtaatttcgcaaagagcttggagggatggcttagtaatgcgatgaacaacatcccacagaggatgatccaaaccaaagtggccgcagtgagcgcgtttgcacaaaccctgcgacggtacacgtccctgaaccatttggcccaagctgcaagggcagtgctgcaaaatacctctcagataaatcagatgctttccgatctaaaccgcgttgactttgcgaacgtccaagaacaagctagttgggtgtgtcagtgcgatgataacatggtgcagcgtctggagaccgatttcaagatgaccttacagcagcagagcacgttggaacagtgggcagcttggctggacaatgttatgatgcaggccctaaagccgtacgaagggaggccctccttccctaaggctgcgagacagtttctactgaagtggtcgttttatagcagcatggtgatccgcgatctgacattgcgctcagcggcaagcttcggatcttttcaccttataagactcttgtatgacgaatatatgttttacctcgtcgagcacagggtggcccaagccaccggcgaaacccccatcgccgtgatgggcgaattcggggacctcaacgcggtttccccgggtaacctggataaagacgaggggagcgaagttgagtcagagatggacgaagagcttgacgactcatctgaaccccaggccaaacgcgaaaaaacagagttatcccaggcttttcccgtcggctgcatgcaacccgtactcgagaccggcgtgcaaccttccctcctgaatccaatccactccgaacatatcgtgaccagcactcagactattagacagtgctctgccacagggaacacatatacagcagtatag

SEQ ID NO: 235691 - DNA, 2250 bp, Artificial Sequence
  derived and/or modified sequence
atgcagaccagcgagaccggcagcgacaccggcagcaccgtgaccctgcagaccagcgtggccagccaggccgccgtgcccacccaggtggtgcagcaggtgcccgtgcagcagcaggtgcagcaggtgcagaccgtgcagcaggtgcagcacgtgtaccccgcccaggtgcagtacgtggagggcagcgacaccgtgtacaccaacggcgccatcagaaccaccacctacccctacaccgagacccagatgtacagccagaacaccggcggcaactacttcgacacccagggcagcagcgcccaggtgaccaccgtggtgagcagccacagcatggtgggcaccggcggcatccagatgggcgtgaccggcggccagctgatcagcagcagcggcggcacctacctgatcggcaacagcatggagaacagcggccacagcgtgacccacaccaccagagccagccccgccaccatcgagatggccatcgagaccctgcagaagagcgacggcctgagcacccacagaagcagcctgctgaacagccacctgcagtggctgctggacaactacgagaccgccgagggcgtgagcctgcccagaagcaccctgtacaaccactacctgagacactgccaggagcacaagctggaccccgtgaacgccgccagcttcggcaagctgatcagaagcatcttcatgggcctgagaaccagaagactgggcaccagaggcaacagcaagtaccactactacggcatcagagtgaagcccgacagccccctgaacagactgcaggaggacatgcagtacatggccatgagacagcagcccatgcagcagaagcagagatacaagcccatgcagaaggtggacggcgtggccgacggcttcaccggcagcggccagcagaccggcaccagcgtggagcagaccgtgatcgcccagagccagcaccaccagcagttcctggacgccagcagagccctgcccgagttcggcgaggtggagatcagcagcctgcccgacggcaccaccttcgaggacatcaagagcctgcagagcctgtacagagagcactgcgaggccatcctggacgtggtggtgaacctgcagttcagcctgatcgagaagctgtggcagaccttctggagatacagccccagcacccccaccgacggcaccaccatcaccgagagcagcaacctgagcgagatcgagagcagactgcccaaggccaagctgatcaccctgtgcaagcacgagagcatcctgaagtggatgtgcaactgcgaccacggcatgtaccaggccctggtggagatcctgatccccgacgtgctgagacccatccccagcgccctgacccaggccatcagaaacttcgccaagagcctggagggctggctgagcaacgccatgaacaacatcccccagagaatgatccagaccaaggtggccgccgtgagcgccttcgcccagaccctgagaagatacaccagcctgaaccacctggcccaggccgccagagccgtgctgcagaacaccagccagatcaaccagatgctgagcgacctgaacagagtggacttcgccaacgtgcaggagcaggccagctgggtgtgccagtgcgacgacaacatggtgcagagactggagaccgacttcaagatgaccctgcagcagcagagcaccctggagcagtgggccgcctggctggacaacgtgatgatgcaggccctgaagccctacgagggcagacccagcttccccaaggccgccagacagttcctgctgaagtggagcttctacagcagcatggtgatcagagacctgaccctgagaagcgccgccagcttcggcagcttccacctgatcagactgctgtacgacgagtacatgttctacctggtggagcacagagtggcccaggccaccggcgagacccccatcgccgtgatgggcgagttcggcgacctgaacgccgtgagccccggcaacctggacaaggacgagggcagcgaggtggagagcgagatggacgaggagctggacgacagcagcgagccccaggccaagagagagaagaccgagctgagccaggccttccccgtgggctgcatgcagcccgtgctggagaccggcgtgcagcccagcctgctgaaccccatccacagcgagcacatcgtgaccagcacccagaccatcagacagtgcagcgccaccggcaacacctacaccgccgtgtag

SEQ ID NO: 235692 - protein, 670 aa, Artificial Sequence
  derived and/or modified sequence
MGETEKRIETHRIRCLSKLKMFLLAITCAFVSKTLSGSYMNSMLTQIERQFNIPTSLVGFINGSFEIGNLLLIIFVSYFGTKLHRPIMIGIGCVVMGLGCFLKSLPHFLMNQYEYESTVSVSGNLSSNSFLCMENGTQILRPTQDPSECTKEVKSLMWVYVLVGNIVRGMGETPILPLGISYIEDFAKFENSPLYIGLVETGAIIGPLIGLLLASFCANVYVDTGFVNTDDLIITPTDTRWVGAWWFGFLICAGVNVLTAIPFFFLPNTLPKEGLETNADIIKNENEDKQKEEVKKEKYGITKDFLPFMKSLSCNPIYMLFILVSVIQFNAFVNMISFMPKYLEQQYGISSSDAIFLMGIYNLPPICIGYIIGGLIMKKFKITVKQAAHIGCWLSLLEYLLYFLSFLMTCENSSVVGINTSYEGIPQDLYVENDIFADCNVDCNCPSKIWDPVCGNNGLSYLSACLAGCETSIGTGINMVFQNCSCIQTSGNSSAVLGLCDKGPDCSLMLQYFLILSAMSSFIYSLAAIPGYMVLLRCMKSEEKSLGVGLHTFCTRVFAGIPAPIYFGALMDSTCLHWGTLKCGESGACRIYDSTTFRYIYLGLPAALRGSSFVPALIILILLRKCHLPGENASSGTELIETKVKGKENECKDIYQKSTVLKDDELKTKL

SEQ ID NO: 235693 - protein, 13 aa, Artificial Sequence
  derived and/or modified sequence
MGETEKRIETHRI

SEQ ID NO: 235694 - protein, 51 aa, Artificial Sequence
  derived and/or modified sequence
MGETEKRIETHRIRCLSKLKMFLLAITCAFVSKTLSGSYMNSMLTQIERQF

SEQ ID NO: 235695 - protein, 99 aa, Artificial Sequence
  derived and/or modified sequence
MGETEKRIETHRIRCLSKLKMFLLAITCAFVSKTLSGSYMNSMLTQIERQFNIPTSLVGFINGSFEIGNLLLIIFVSYFGTKLHRPIMIGIGCVVMGLG

SEQ ID NO: 235696 - protein, 147 aa, Artificial Sequence
  derived and/or modified sequence
MGETEKRIETHRIRCLSKLKMFLLAITCAFVSKTLSGSYMNSMLTQIERQFNIPTSLVGFINGSFEIGNLLLIIFVSYFGTKLHRPIMIGIGCVVMGLGCFLKSLPHFLMNQYEYESTVSVSGNLSSNSFLCMENGTQILRPTQDPS

SEQ ID NO: 235697 - protein, 88 aa, Artificial Sequence
  derived and/or modified sequence
MGETEKRIETHRIRCLSKLKMFLLAITCAFVSKTLSGSYMNSMLTQIERQFNIPTSLVGFINGSFEIGNLLLIIFVSYFGTKLHRPIM

SEQ ID NO: 235698 - protein, 91 aa, Artificial Sequence
  derived and/or modified sequence
MGETEKRIETHRIRCLSKLKMFLLAITCAFVSKTLSGSYMNSMLTQIERQFNIPTSLVGFINGSFEIGNLLLIIFVSYFGTKLHRPIMIGI

SEQ ID NO: 235699 - protein, 137 aa, Artificial Sequence
  derived and/or modified sequence
MGETEKRIETHRIRCLSKLKMFLLAITCAFVSKTLSGSYMNSMLTQIERQFNIPTSLVGFINGSFEIGNLLLIIFVSYFGTKLHRPIMIGIGCVVMGLGCFLKSLPHFLMNQYEYESTVSVSGNLSSNSFLCMENGT

SEQ ID NO: 235700 - protein, 538 aa, Artificial Sequence
  derived and/or modified sequence
MENGTQILRPTQDPSECTKEVKSLMWVYVLVGNIVRGMGETPILPLGISYIEDFAKFENSPLYIGLVETGAIIGPLIGLLLASFCANVYVDTGFVNTDDLIITPTDTRWVGAWWFGFLICAGVNVLTAIPFFFLPNTLPKEGLETNADIIKNENEDKQKEEVKKEKYGITKDFLPFMKSLSCNPIYMLFILVSVIQFNAFVNMISFMPKYLEQQYGISSSDAIFLMGIYNLPPICIGYIIGGLIMKKFKITVKQAAHIGCWLSLLEYLLYFLSFLMTCENSSVVGINTSYEGIPQDLYVENDIFADCNVDCNCPSKIWDPVCGNNGLSYLSACLAGCETSIGTGINMVFQNCSCIQTSGNSSAVLGLCDKGPDCSLMLQYFLILSAMSSFIYSLAAIPGYMVLLRCMKSEEKSLGVGLHTFCTRVFAGIPAPIYFGALMDSTCLHWGTLKCGESGACRIYDSTTFRYIYLGLPAALRGSSFVPALIILILLRKCHLPGENASSGTELIETKVKGKENECKDIYQKSTVLKDDELKTKL

SEQ ID NO: 235701 - DNA, 2013 bp, Artificial Sequence
  derived and/or modified sequence
atgggcgagaccgagaagagaatcgagacccacagaatcagatgcctgagcaagctgaagatgttcctgctggccatcacctgcgccttcgtgagcaagaccctgagcggcagctacatgaacagcatgctgacccagatcgagagacagttcaacatccccaccagcctggtgggcttcatcaacggcagcttcgagatcggcaacctgctgctgatcatcttcgtgagctacttcggcaccaagctgcacagacccatcatgatcggcatcggctgcgtggtgatgggcctgggctgcttcctgaagagcctgccccacttcctgatgaaccagtacgagtacgagagcaccgtgagcgtgagcggcaacctgagcagcaacagcttcctgtgcatggagaacggcacccagatcctgagacccacccaggaccccagcgagtgcaccaaggaggtgaagagcctgatgtgggtgtacgtgctggtgggcaacatcgtgagaggcatgggcgagacccccatcctgcccctgggcatcagctacatcgaggacttcgccaagttcgagaacagccccctgtacatcggcctggtggagaccggcgccatcatcggccccctgatcggcctgctgctggccagcttctgcgccaacgtgtacgtggacaccggcttcgtgaacaccgacgacctgatcatcacccccaccgacaccagatgggtgggcgcctggtggttcggcttcctgatctgcgccggcgtgaacgtgctgaccgccatccccttcttcttcctgcccaacaccctgcccaaggagggcctggagaccaacgccgacatcatcaagaacgagaacgaggacaagcagaaggaggaggtgaagaaggagaagtacggcatcaccaaggacttcctgcccttcatgaagagcctgagctgcaaccccatctacatgctgttcatcctggtgagcgtgatccagttcaacgccttcgtgaacatgatcagcttcatgcccaagtacctggagcagcagtacggcatcagcagcagcgacgccatcttcctgatgggcatctacaacctgccccccatctgcatcggctacatcatcggcggcctgatcatgaagaagttcaagatcaccgtgaagcaggccgcccacatcggctgctggctgagcctgctggagtacctgctgtacttcctgagcttcctgatgacctgcgagaacagcagcgtggtgggcatcaacaccagctacgagggcatcccccaggacctgtacgtggagaacgacatcttcgccgactgcaacgtggactgcaactgccccagcaagatctgggaccccgtgtgcggcaacaacggcctgagctacctgagcgcctgcctggccggctgcgagaccagcatcggcaccggcatcaacatggtgttccagaactgcagctgcatccagaccagcggcaacagcagcgccgtgctgggcctgtgcgacaagggccccgactgcagcctgatgctgcagtacttcctgatcctgagcgccatgagcagcttcatctacagcctggccgccatccccggctacatggtgctgctgagatgcatgaagagcgaggagaagagcctgggcgtgggcctgcacaccttctgcaccagagtgttcgccggcatccccgcccccatctacttcggcgccctgatggacagcacctgcctgcactggggcaccctgaagtgcggcgagagcggcgcctgcagaatctacgacagcaccaccttcagatacatctacctgggcctgcccgccgccctgagaggcagcagcttcgtgcccgccctgatcatcctgatcctgctgagaaagtgccacctgcccggcgagaacgccagcagcggcaccgagctgatcgagaccaaggtgaagggcaaggagaacgagtgcaaggacatctaccagaagagcaccgtgctgaaggacgacgagctgaagaccaagctgtag

SEQ ID NO: 235702 - DNA, 42 bp, Artificial Sequence
  derived and/or modified sequence
atgggcgagaccgagaagagaatcgagacccacagaatctag

SEQ ID NO: 235703 - DNA, 156 bp, Artificial Sequence
  derived and/or modified sequence
atgggcgagaccgagaagagaatcgagacccacagaatcagatgcctgagcaagctgaagatgttcctgctggccatcacctgcgccttcgtgagcaagaccctgagcggcagctacatgaacagcatgctgacccagatcgagagacagttctag

SEQ ID NO: 235704 - DNA, 300 bp, Artificial Sequence
  derived and/or modified sequence
atgggcgagaccgagaagagaatcgagacccacagaatcagatgcctgagcaagctgaagatgttcctgctggccatcacctgcgccttcgtgagcaagaccctgagcggcagctacatgaacagcatgctgacccagatcgagagacagttcaacatccccaccagcctggtgggcttcatcaacggcagcttcgagatcggcaacctgctgctgatcatcttcgtgagctacttcggcaccaagctgcacagacccatcatgatcggcatcggctgcgtggtgatgggcctgggctag

SEQ ID NO: 235705 - DNA, 444 bp, Artificial Sequence
  derived and/or modified sequence
atgggcgagaccgagaagagaatcgagacccacagaatcagatgcctgagcaagctgaagatgttcctgctggccatcacctgcgccttcgtgagcaagaccctgagcggcagctacatgaacagcatgctgacccagatcgagagacagttcaacatccccaccagcctggtgggcttcatcaacggcagcttcgagatcggcaacctgctgctgatcatcttcgtgagctacttcggcaccaagctgcacagacccatcatgatcggcatcggctgcgtggtgatgggcctgggctgcttcctgaagagcctgccccacttcctgatgaaccagtacgagtacgagagcaccgtgagcgtgagcggcaacctgagcagcaacagcttcctgtgcatggagaacggcacccagatcctgagacccacccaggaccccagctag

SEQ ID NO: 235706 - DNA, 267 bp, Artificial Sequence
  derived and/or modified sequence
atgggcgagaccgagaagagaatcgagacccacagaatcagatgcctgagcaagctgaagatgttcctgctggccatcacctgcgccttcgtgagcaagaccctgagcggcagctacatgaacagcatgctgacccagatcgagagacagttcaacatccccaccagcctggtgggcttcatcaacggcagcttcgagatcggcaacctgctgctgatcatcttcgtgagctacttcggcaccaagctgcacagacccatcatgtag

SEQ ID NO: 235707 - DNA, 276 bp, Artificial Sequence
  derived and/or modified sequence
atgggcgagaccgagaagagaatcgagacccacagaatcagatgcctgagcaagctgaagatgttcctgctggccatcacctgcgccttcgtgagcaagaccctgagcggcagctacatgaacagcatgctgacccagatcgagagacagttcaacatccccaccagcctggtgggcttcatcaacggcagcttcgagatcggcaacctgctgctgatcatcttcgtgagctacttcggcaccaagctgcacagacccatcatgatcggcatctag

SEQ ID NO: 235708 - DNA, 414 bp, Artificial Sequence
  derived and/or modified sequence
atgggcgagaccgagaagagaatcgagacccacagaatcagatgcctgagcaagctgaagatgttcctgctggccatcacctgcgccttcgtgagcaagaccctgagcggcagctacatgaacagcatgctgacccagatcgagagacagttcaacatccccaccagcctggtgggcttcatcaacggcagcttcgagatcggcaacctgctgctgatcatcttcgtgagctacttcggcaccaagctgcacagacccatcatgatcggcatcggctgcgtggtgatgggcctgggctgcttcctgaagagcctgccccacttcctgatgaaccagtacgagtacgagagcaccgtgagcgtgagcggcaacctgagcagcaacagcttcctgtgcatggagaacggcacctag

SEQ ID NO: 235709 - DNA, 1617 bp, Artificial Sequence
  derived and/or modified sequence
atggagaacggcacccagatcctgagacccacccaggaccccagcgagtgcaccaaggaggtgaagagcctgatgtgggtgtacgtgctggtgggcaacatcgtgagaggcatgggcgagacccccatcctgcccctgggcatcagctacatcgaggacttcgccaagttcgagaacagccccctgtacatcggcctggtggagaccggcgccatcatcggccccctgatcggcctgctgctggccagcttctgcgccaacgtgtacgtggacaccggcttcgtgaacaccgacgacctgatcatcacccccaccgacaccagatgggtgggcgcctggtggttcggcttcctgatctgcgccggcgtgaacgtgctgaccgccatccccttcttcttcctgcccaacaccctgcccaaggagggcctggagaccaacgccgacatcatcaagaacgagaacgaggacaagcagaaggaggaggtgaagaaggagaagtacggcatcaccaaggacttcctgcccttcatgaagagcctgagctgcaaccccatctacatgctgttcatcctggtgagcgtgatccagttcaacgccttcgtgaacatgatcagcttcatgcccaagtacctggagcagcagtacggcatcagcagcagcgacgccatcttcctgatgggcatctacaacctgccccccatctgcatcggctacatcatcggcggcctgatcatgaagaagttcaagatcaccgtgaagcaggccgcccacatcggctgctggctgagcctgctggagtacctgctgtacttcctgagcttcctgatgacctgcgagaacagcagcgtggtgggcatcaacaccagctacgagggcatcccccaggacctgtacgtggagaacgacatcttcgccgactgcaacgtggactgcaactgccccagcaagatctgggaccccgtgtgcggcaacaacggcctgagctacctgagcgcctgcctggccggctgcgagaccagcatcggcaccggcatcaacatggtgttccagaactgcagctgcatccagaccagcggcaacagcagcgccgtgctgggcctgtgcgacaagggccccgactgcagcctgatgctgcagtacttcctgatcctgagcgccatgagcagcttcatctacagcctggccgccatccccggctacatggtgctgctgagatgcatgaagagcgaggagaagagcctgggcgtgggcctgcacaccttctgcaccagagtgttcgccggcatccccgcccccatctacttcggcgccctgatggacagcacctgcctgcactggggcaccctgaagtgcggcgagagcggcgcctgcagaatctacgacagcaccaccttcagatacatctacctgggcctgcccgccgccctgagaggcagcagcttcgtgcccgccctgatcatcctgatcctgctgagaaagtgccacctgcccggcgagaacgccagcagcggcaccgagctgatcgagaccaaggtgaagggcaaggagaacgagtgcaaggacatctaccagaagagcaccgtgctgaaggacgacgagctgaagaccaagctgtag

SEQ ID NO: 235710 - DNA, 2013 bp, Artificial Sequence
  derived and/or modified sequence
atgggcgaaaccgaaaagcgaatcgagactcataggatacgttgcctgagtaaacttaaaatgttcttactggccattacctgcgcatttgttagcaaaaccctgtccggatcgtacatgaactccatgttgacccagatcgaaaggcagttcaatattccgacctccctcgttgggttcatcaacggcagcttcgagataggcaacctgctgctgatcatttttgtttcttactttggtaccaagctgcaccgtccaatcatgatcggaatcggttgcgtggtgatggggctgggatgcttccttaagtcccttccacactttttaatgaaccagtacgagtatgaatctacagtgtcggtctcagggaacctgtcgtccaacagttttctgtgcatggagaacggtacacaaatcctgcgccccacccaggatccatccgaatgcaccaaggaggtgaagagtctgatgtgggtctacgtgctggtcggcaatattgtgcggggtatgggcgagacaccgattctgcctttggggatttcttatatcgaagatttcgccaaatttgagaacagccccctgtacataggcctagtcgagacgggcgctatcataggtccactcatcgggcttctcctggcgtctttctgtgccaatgtctacgtagatacaggttttgttaacaccgacgatttgattatcacaccaacagatactcgttgggtaggcgcatggtggtttggatttctgatctgcgcgggtgtgaatgtcttgacagctatcccttttttttttctgcctaatacactgccaaaagaggggttagagaccaatgccgatataattaaaaacgaaaacgaggataagcagaaagaagaggtcaagaaggagaaatacggcattaccaaggatttcctgcccttcatgaaaagcctgagctgtaaccccatctatatgctattcatcctggtgtctgttatacagttcaacgcattcgtgaacatgattagtttcatgcctaaatacctcgagcaacagtacggcatttcctcatcagatgctatcttcctgatgggcatttataatctcccacctatatgcatcggctatataatcgggggtctgataatgaagaagttcaaaatcacagtaaagcaggccgcccacatcggatgttggttaagcttgctggaatacctgctctacttcctatcgtttctcatgacctgcgagaactcctctgtggtggggattaatacctcttatgaaggaattccacaggatctgtacgtcgaaaatgatatattcgccgattgtaacgtcgattgtaactgtccaagcaaaatctgggatcctgtctgcggaaataatgggctttcttatctgtccgcgtgcctggctggatgcgagacctccattggtacaggaataaacatggtgttccagaactgttcctgtatccagactagtggtaattcctccgctgtactgggtttgtgcgacaagggccccgactgctccctgatgctgcagtattttctgattctctccgcaatgtcgtctttcatttatagcctcgccgccatccccggatatatggtattgctgcgctgcatgaagtctgaggaaaaatccctgggggtgggactgcatactttttgtacacgtgtctttgcgggcatccccgcacccatatactttggcgctctgatggattccacgtgtctccattggggaacgctcaaatgcggagaaagtggcgcctgccgcatttacgacagtaccacttttaggtatatctacctcggtttgcccgcggcattaaggggctcatctttcgtgcctgccttgatcatcttgattctgttgagaaagtgccaccttcctggagagaacgcttcttccggaactgagttaatcgaaacaaaggtcaagggaaaggagaatgaatgcaaggatatctatcaaaaaagtacagtgttaaaagacgatgaactgaagactaaactgtag

SEQ ID NO: 235711 - DNA, 42 bp, Artificial Sequence
  derived and/or modified sequence
atgggagaaaccgaaaaaagaatcgaaacacatagaatttag

SEQ ID NO: 235712 - DNA, 156 bp, Artificial Sequence
  derived and/or modified sequence
atgggagaaactgaaaagcggatcgaaacacacaggatcaggtgcttaagtaaactcaagatgttcctactcgccatcacttgcgccttcgtcagcaagactcttagcggctcttacatgaattccatgctcacccaaattgagcgacaattttag

SEQ ID NO: 235713 - DNA, 300 bp, Artificial Sequence
  derived and/or modified sequence
atgggcgaaaccgagaaacggattgagactcacagaataaggtgccttagcaaactcaaaatgttcctgctggccataacctgtgcttttgtcagcaagaccctcagtggtagttacatgaattcgatgctgactcagattgagcggcagtttaacatccccacatcacttgtgggattcatcaatggctctttcgagataggcaacttgcttctcattatattcgtaagctattttggcacgaagttacaccgcccaataatgattggcattggctgtgtggttatgggtctgggttag

SEQ ID NO: 235714 - DNA, 444 bp, Artificial Sequence
  derived and/or modified sequence
atgggtgagacggagaaaaggatcgagacccaccggatccgctgcctatctaaactgaaaatgttcctgctcgctattacatgcgctttcgtgtcgaagaccctttccggttcatatatgaacagtatgctgacgcagattgaaagacaatttaatatccccacatctctggtcgggttcattaacggttcctttgaaataggaaacctcttactgattatctttgtcagctattttggcaccaaattacaccggcccatcatgatcggaatcgggtgtgttgtgatggggctaggatgttttctcaagtcgctacctcattttctgatgaatcagtatgagtacgagagcacagtgagcgtttctggcaatctgtccagcaacagcttcttatgcatggagaacgggactcaaatcctccgccccacccaggacccgtcatag

SEQ ID NO: 235715 - DNA, 267 bp, Artificial Sequence
  derived and/or modified sequence
atgggagagaccgagaaacggatcgagactcaccgcataagatgcctatccaaactcaaaatgttccttctcgctattacttgcgcatttgtgtcgaaaaccctttctggcagttatatgaacagcatgctaactcagattgaacgccaatttaatatcccaacctctttagtggggtttataaacggtagctttgaaatcggaaatctgttgctaataatcttcgtctcttatttcggaactaaacttcaccgaccaataatgtag

SEQ ID NO: 235716 - DNA, 276 bp, Artificial Sequence
  derived and/or modified sequence
atgggagaaactgagaagcgcatagagacacataggatacgatgcctaagcaaactgaagatgtttttgctggcaatcacatgcgctttcgttagcaagacattgagcgggtcatacatgaattccatgctaacacaaattgaacggcagtttaacatccccacatctctggtaggattcatcaatgggtcatttgaaattgggaatttgctgctgatcatttttgtatcctacttcggcacgaagctgcatcgaccaatcatgatcggaatttag

SEQ ID NO: 235717 - DNA, 2013 bp, Artificial Sequence
  derived and/or modified sequence
atgggggaaacagaaaagaggattgaaacccaccggataagatgcctgagtaaactaaaaatgttcttgcttgccatcacctgtgccttcgtgagtaagacgctgagtggaagctatatgaatagtatgttgacacaaattgagagacagtttaacattccaacatctctcgtgggcttcattaacggctcattcgagataggaaatttacttctgatcatctttgtttcctacttcggaacaaaactccatagacctattatgattggaattggctgcgtggtgatgggcttgggctgttttctcaaatccttgcctcactttctgatgaatcagtacgagtatgaatccacagtatccgtgagcggcaacctatccagcaattcatttctttgtatggagaacggtacgcagatcctacgccctacccaggacccaagtgagtgtacaaaagaggttaagtcacttatgtgggtgtatgtgctggtgggtaatatcgtgcgcggcatgggagaaacaccgatcctgcctctgggaatctcctacatagaagacttcgcgaagtttgaaaacagccctctctacattggcttagtagagactggcgcgataatcggaccattaataggtctgctgctggcttccttttgcgcaaacgtttacgtggacacgggcttcgtgaacacggatgacctgatcattacgcctacggacacccgctgggtgggcgcctggtggtttggatttctcatctgcgccggggtaaatgtgctaacagctataccattcttctttctccctaacactctacctaaggagggccttgagaccaatgccgacatcattaagaacgagaatgaggataagcagaaggaggaagttaaaaaagagaagtatggcatcaccaaagattttctgccctttatgaagtctctctcatgtaacccaatatatatgctgttcatactcgtgagcgtcatccagttcaatgcctttgttaacatgataagttttatgcccaagtacctcgagcagcaatatggcatctcttcgtctgatgcgatctttctcatggggatttacaatctcccacccatctgcatcggttatatcattggcgggcttatcatgaagaaatttaagattactgtgaagcaggccgcccatataggatgttggttatcccttctcgaatatttgctctacttcctgagttttttgatgacctgcgaaaactcatcagtggtcgggattaacacctcctatgaaggaattccacaggacttatacgtggagaacgacatttttgccgactgcaatgtggactgtaactgtccaagcaaaatttgggaccccgtttgcggcaataacggcctctcatatcttagcgcatgcctagccggatgcgaaacctcaattggcactgggattaacatggtttttcagaactgctcgtgcattcagacgagtggcaacagtagcgctgtgcttggactgtgtgataaaggtcccgattgctctttgatgctgcagtacttcttgatcctctccgccatgtcaagttttatttacagtttagccgctatcccagggtatatggtgctgctccgatgcatgaaaagcgaagagaagtcacttggagtaggtctgcacactttttgcaccagagttttcgcaggcattcctgctcctatctatttcggggcactgatggattctacgtgcctccactgggggacgttgaaatgtggggagtcgggcgcctgcagaatatatgacagtacaaccttccggtacatctatttgggcctcccagctgcgcttagaggaagcagtttcgtgcccgctcttattattctgatcctgctgcgtaagtgtcatcttcccggggagaacgccagtagtggaacagaactaatcgagaccaaggtgaaaggcaaggagaacgagtgcaaagacatctaccaaaagtcgactgtgctgaaagacgatgaacttaagacgaagctctag

SEQ ID NO: 235718 - DNA, 414 bp, Artificial Sequence
  derived and/or modified sequence
atgggtgagaccgaaaaacgaattgagacacaccgaattcggtgcttgtccaaactgaaaatgttcctgcttgctattacatgtgcttttgtatccaagacactcagcgggtcgtacatgaactctatgctcactcagatcgagagacagtttaatatcccaacatctctagtgggtttcattaatgggagtttcgagattggtaacttgctattgatcattttcgtgagttatttcggaaccaaattacaccgaccgataatgattgggattggatgtgttgtcatgggcctggggtgttttctcaagtctctgccacatttcctcatgaatcagtatgagtatgagagcaccgtgtctgtctccggtaacctttcctcaaacagttttctgtgcatggaaaacggtacgtag

SEQ ID NO: 235719 - DNA, 1617 bp, Artificial Sequence
  derived and/or modified sequence
atggagaacggcacacagatactcagacccacccaggaccccagcgaatgcacaaaagaggtcaagagcttaatgtgggtatatgtgctggttggcaacattgtacggggaatgggcgagactccaatcctcccccttggaataagctatatagaggatttcgctaaattcgagaatagcccgctgtatatcggtctggtcgaaaccggcgctattatcggtccattaataggcctccttctagcctcgttttgtgcaaacgtgtacgtggatactggtttcgttaataccgatgacttgattatcacccccaccgacacaaggtgggtgggggcttggtggtttgggtttttaatctgcgccggcgtgaatgtattaacagcaatcccttttttctttctccctaacaccctgccaaaagagggcctggagaccaatgctgacattattaagaatgagaatgaggataagcaaaaggaagaagttaaaaaagaaaagtacggaattactaaggattttctgccattcatgaaaagcttatcttgtaaccccatttatatgttatttattctggtttcagtgattcaattcaacgccttcgttaacatgatctcttttatgcctaagtacctcgagcagcaatatggtatttcaagttctgatgctatttttctgatgggtatttataacttaccacctatctgtatcggctacattatcggcggccttataatgaaaaaatttaagatcacggtcaagcaagccgcacatattgggtgctggctgtctctgctggagtacctcttgtatttcctgtccttcttgatgacgtgcgagaactcctcagtagttggtatcaataccagctacgaaggtatccctcaagatctctacgtggaaaatgacatttttgctgattgcaacgtggactgcaactgtccttccaaaatttgggaccccgtctgtgggaataatggcctgagctatctcagcgcctgtttagcagggtgtgaaactagtattgggacaggcataaatatggtttttcagaactgtagctgtatccagacgagcggaaactcttcggcagtgctgggcctatgcgataaggggcccgattgctcgctcatgctgcagtactttctcattctctctgcgatgagcagctttatctactcccttgcagccattcccggctacatggtactgttgaggtgtatgaaaagcgaggagaagtcgttgggcgttggactgcataccttttgcactagggtgtttgccggaattccagcacctatctacttcggcgctctcatggactctacttgtctgcattggggtacactcaagtgtggcgagagtggtgcctgcagaatctacgatagtaccacctttaggtacatttacttgggactaccagctgccctgagaggtagctctttcgtgcccgccttgatcatcctgatcctgcttcggaagtgtcatctgcctggtgagaatgcctcctcgggaactgagctgatcgagactaaagtcaagggtaaagaaaatgagtgtaaggacatttatcagaaaagcaccgtgctgaaagatgatgaactcaagactaaactgtag

SEQ ID NO: 235720 - DNA, 1617 bp, Artificial Sequence
  derived and/or modified sequence
atggagaatggcacccaaatacttaggccaacccaggatccaagcgaatgtaccaaagaggtgaagtctctgatgtgggtatatgtgttggtcggaaacatcgtgagaggaatgggtgagacaccaattctgcctctcggaatatcctacatcgaagatttcgccaaattcgaaaacagccccctgtacattggattggtcgagacgggggccatcattggaccattgatcgggcttcttctagcatccttctgcgcgaatgtgtacgtggataccggctttgtcaacacggacgacctcataataacgcccactgacacacgatgggtcggggcctggtggttcggcttcttaatctgcgctggggtgaacgtcttaaccgccatccctttcttttttttaccaaatacgctgccaaaagaaggattagaaacaaatgcagatatcatcaaaaacgagaacgaagataagcagaaggaagaggtaaaaaaggagaaatatggaattactaaagatttcctccccttcatgaagagcctgtcttgcaaccccatctatatgctcttcatcctggttagcgttatccaattcaatgcgtttgtgaatatgatctccttcatgcccaaatacttagagcagcagtatggaatcagctcaagtgacgctatcttcctgatgggcatctacaatttacctccaatttgtattggctatataatcggcggcctaataatgaagaaattcaagatcacagtgaagcaggcagcgcacatcggctgctggctcagtctgttggagtatttgttgtattttctttcgtttctgatgacctgcgagaactcttccgtggtgggtattaataccagctatgaaggaatcccccaagatctttacgttgagaatgatattttcgccgattgcaatgtggattgtaattgtccctctaagatctgggaccccgtgtgcggcaataacggtctgagttacctgagcgcttgcctagccggatgtgagaccagcattggaaccgggatcaacatggtctttcagaactgctcatgcattcagaccagcgggaacagcagtgccgtgcttgggctgtgcgataagggtccggattgctcccttatgcttcagtatttcctgattctgtccgcaatgtctagcttcatatacagtctggccgcgattcctggttatatggtgctgctgcgatgcatgaaatccgaagaaaagagcctgggcgtcggcctgcacaccttctgcacacgcgtgttcgcaggcattccagcccccatttattttggcgccctgatggactccacatgtcttcattggggtacactgaaatgtggggagagtggggcatgccgaatctacgattccacaacattcaggtacatctatcttggcctgcccgcggccttgcgcgggagttccttcgttcccgctctgataattttgattctgctccgtaagtgtcatcttccaggggagaacgcttccagtggtacagagttgatcgagactaaggtgaaaggcaaggaaaatgagtgcaaggatatatatcagaagagcaccgtcttgaaggatgacgagctcaaaacaaaactgtag

SEQ ID NO: 235721 - DNA, 2013 bp, Artificial Sequence
  derived and/or modified sequence
atgggagaaacagagaagagaattgagacccaccgcatccgctgcctgagcaagctgaagatgttcctgctggccatcacctgtgcctttgtgtccaagaccctgagcggcagctacatgaacagcatgctgacccagatcgagcggcagttcaacatccccaccagcctggtgggcttcatcaatggcagctttgaaattggcaacctgctgctgatcatctttgtgtcctacttcggcaccaagctgcaccggcccatcatgattggaattggctgtgtggtgatgggcctgggctgcttcctgaagagcctgccccacttcctgatgaaccagtatgaatatgagagcacagtgtctgtgtctggcaacctgagcagcaacagcttcctgtgcatggagaatggcacccagatcctgcggcccacccaggaccccagcgagtgcaccaaggaggtgaagagcctgatgtgggtgtatgtgctggtgggcaacatcgtgcggggcatgggagagacccccatcctgcccctgggcatctcctacatcgaggactttgccaagtttgagaacagccccctgtacatcggcctggtggagactggagccatcatcggccccctgattggcctgctgctggccagcttctgtgccaacgtgtatgtggacaccggctttgtgaacacagatgacctgatcatcacccccacagacacccgctgggtgggcgcctggtggtttggcttcctgatctgtgccggcgtgaatgtgctgacagccatccccttcttcttcctgcccaacaccctgcccaaggagggcctggagaccaatgctgacatcatcaagaatgaaaatgaagacaagcagaaggaggaggtgaagaaggagaagtatggcatcaccaaggacttcctgcccttcatgaagagcctgagctgcaaccccatctacatgctgttcatcctggtgtctgtcatccagttcaatgcctttgtgaacatgatctccttcatgcccaagtacctggagcagcagtatggcatcagcagcagtgatgccatcttcctgatgggcatctacaacctgccccccatctgcatcggctacatcatcggcggcctcatcatgaagaagttcaagatcaccgtgaagcaggccgcccacatcggctgctggctgagcctgctggagtacctgctgtacttcctgtccttcctgatgacctgtgagaacagctctgtggtgggcatcaacaccagctatgagggcatcccccaggacctgtatgtggagaatgacatctttgctgactgcaatgtggactgcaactgccccagcaagatctgggaccctgtgtgtggcaacaacggcctgagctacctgagcgcctgcctggccggctgtgagaccagcattggaacaggcatcaacatggtgttccagaactgcagctgcatccagaccagcggcaacagcagcgctgtgctgggcctgtgtgacaagggccctgactgcagcctgatgctgcagtacttcctgatcctgagcgccatgagcagcttcatctacagcctggccgccatccctggctacatggtgctgctgcgctgcatgaagtctgaggagaagagcctgggcgtgggcctgcacaccttctgcaccagggtgtttgctggcatcccagcccccatctactttggagccctgatggacagcacctgcctgcactggggcaccctgaagtgtggggagagcggggcctgccgcatctatgacagcaccaccttccgctacatctacctgggcctgcctgctgccctgcggggcagcagctttgtgcctgccctgatcatcctgatcctgctgaggaagtgccacctgcctggagaaaatgccagcagcggcacagagctgattgagaccaaggtgaagggcaaggaaaatgaatgcaaggacatctaccagaagagcacagtgctgaaggatgatgagctgaagaccaagctgtag

SEQ ID NO: 235722 - DNA, 42 bp, Artificial Sequence
  derived and/or modified sequence
atgggagaaacagagaagagaattgagacccaccgcatctag

SEQ ID NO: 235723 - DNA, 156 bp, Artificial Sequence
  derived and/or modified sequence
atgggagaaacagagaagagaattgagacccaccgcatccgctgcctgagcaagctgaagatgttcctgctggccatcacctgtgcctttgtgtccaagaccctgagcggcagctacatgaacagcatgctgacccagatcgagcggcagttctag

SEQ ID NO: 235724 - DNA, 300 bp, Artificial Sequence
  derived and/or modified sequence
atgggagaaacagagaagagaattgagacccaccgcatccgctgcctgagcaagctgaagatgttcctgctggccatcacctgtgcctttgtgtccaagaccctgagcggcagctacatgaacagcatgctgacccagatcgagcggcagttcaacatccccaccagcctggtgggcttcatcaatggcagctttgaaattggcaacctgctgctgatcatctttgtgtcctacttcggcaccaagctgcaccggcccatcatgattggaattggctgtgtggtgatgggcctgggctag

SEQ ID NO: 235725 - DNA, 444 bp, Artificial Sequence
  derived and/or modified sequence
atgggagaaacagagaagagaattgagacccaccgcatccgctgcctgagcaagctgaagatgttcctgctggccatcacctgtgcctttgtgtccaagaccctgagcggcagctacatgaacagcatgctgacccagatcgagcggcagttcaacatccccaccagcctggtgggcttcatcaatggcagctttgaaattggcaacctgctgctgatcatctttgtgtcctacttcggcaccaagctgcaccggcccatcatgattggaattggctgtgtggtgatgggcctgggctgcttcctgaagagcctgccccacttcctgatgaaccagtatgaatatgagagcacagtgtctgtgtctggcaacctgagcagcaacagcttcctgtgcatggagaatggcacccagatcctgcggcccacccaggaccccagctag

SEQ ID NO: 235726 - DNA, 267 bp, Artificial Sequence
  derived and/or modified sequence
atgggagaaacagagaagagaattgagacccaccgcatccgctgcctgagcaagctgaagatgttcctgctggccatcacctgtgcctttgtgtccaagaccctgagcggcagctacatgaacagcatgctgacccagatcgagcggcagttcaacatccccaccagcctggtgggcttcatcaatggcagctttgaaattggcaacctgctgctgatcatctttgtgtcctacttcggcaccaagctgcaccggcccatcatgtag

SEQ ID NO: 235727 - DNA, 276 bp, Artificial Sequence
  derived and/or modified sequence
atgggagaaacagagaagagaattgagacccaccgcatccgctgcctgagcaagctgaagatgttcctgctggccatcacctgtgcctttgtgtccaagaccctgagcggcagctacatgaacagcatgctgacccagatcgagcggcagttcaacatccccaccagcctggtgggcttcatcaatggcagctttgaaattggcaacctgctgctgatcatctttgtgtcctacttcggcaccaagctgcaccggcccatcatgattggcatctag

SEQ ID NO: 235728 - DNA, 414 bp, Artificial Sequence
  derived and/or modified sequence
atgggagaaacagagaagagaattgagacccaccgcatccgctgcctgagcaagctgaagatgttcctgctggccatcacctgtgcctttgtgtccaagaccctgagcggcagctacatgaacagcatgctgacccagatcgagcggcagttcaacatccccaccagcctggtgggcttcatcaatggcagctttgaaattggcaacctgctgctgatcatctttgtgtcctacttcggcaccaagctgcaccggcccatcatgattggaattggctgtgtggtgatgggcctgggctgcttcctgaagagcctgccccacttcctgatgaaccagtatgaatatgagagcacagtgtctgtgtctggcaacctgagcagcaacagcttcctgtgcatggagaatggcacctag

SEQ ID NO: 235729 - DNA, 1617 bp, Artificial Sequence
  derived and/or modified sequence
atggagaatggcacccagatcctgcggcccacccaggaccccagcgagtgcaccaaggaggtgaagagcctgatgtgggtgtatgtgctggtgggcaacatcgtgcggggcatgggagagacccccatcctgcccctgggcatctcctacatcgaggactttgccaagtttgagaacagccccctgtacatcggcctggtggagactggagccatcatcggccccctgattggcctgctgctggccagcttctgtgccaacgtgtatgtggacaccggctttgtgaacacagatgacctgatcatcacccccacagacacccgctgggtgggcgcctggtggtttggcttcctgatctgtgccggcgtgaatgtgctgacagccatccccttcttcttcctgcccaacaccctgcccaaggagggcctggagaccaatgctgacatcatcaagaatgaaaatgaagacaagcagaaggaggaggtgaagaaggagaagtatggcatcaccaaggacttcctgcccttcatgaagagcctgagctgcaaccccatctacatgctgttcatcctggtgtctgtcatccagttcaatgcctttgtgaacatgatctccttcatgcccaagtacctggagcagcagtatggcatcagcagcagtgatgccatcttcctgatgggcatctacaacctgccccccatctgcatcggctacatcatcggcggcctcatcatgaagaagttcaagatcaccgtgaagcaggccgcccacatcggctgctggctgagcctgctggagtacctgctgtacttcctgtccttcctgatgacctgtgagaacagctctgtggtgggcatcaacaccagctatgagggcatcccccaggacctgtatgtggagaatgacatctttgctgactgcaatgtggactgcaactgccccagcaagatctgggaccctgtgtgtggcaacaacggcctgagctacctgagcgcctgcctggccggctgtgagaccagcattggaacaggcatcaacatggtgttccagaactgcagctgcatccagaccagcggcaacagcagcgctgtgctgggcctgtgtgacaagggccctgactgcagcctgatgctgcagtacttcctgatcctgagcgccatgagcagcttcatctacagcctggccgccatccctggctacatggtgctgctgcgctgcatgaagtctgaggagaagagcctgggcgtgggcctgcacaccttctgcaccagggtgtttgctggcatcccagcccccatctactttggagccctgatggacagcacctgcctgcactggggcaccctgaagtgtggggagagcggggcctgccgcatctatgacagcaccaccttccgctacatctacctgggcctgcctgctgccctgcggggcagcagctttgtgcctgccctgatcatcctgatcctgctgaggaagtgccacctgcctggagaaaatgccagcagcggcacagagctgattgagaccaaggtgaagggcaaggaaaatgaatgcaaggacatctaccagaagagcacagtgctgaaggatgatgagctgaagaccaagctgtag

SEQ ID NO: 235730 - DNA, 2013 bp, Artificial Sequence
  derived and/or modified sequence
atgggcgagaccgagaagcggatcgagacccaccggatccggtgcttatctaaactgaaaatgtttctgctggccatcacgtgtgcttttgtctcgaagaccctctcagggtcttacatgaattcaatgcttacacagatcgagaggcagttcaatatccctaccagcctggttgggttcattaatggctccttcgaaatcgggaatctattgctaattatatttgtgtcgtactttggaactaaactgcaccgccccataatgatcgggatcgggtgcgtggtgatgggcctgggttgcttcctgaagtctcttccccattttctgatgaatcagtatgagtacgagagcacagtatctgtctcagggaacctctcctctaacagtttcctttgtatggagaatggcacccagatcctgcgacctacacaggacccatctgagtgtacaaaggaagtcaagagcttaatgtgggtgtacgtgcttgtcgggaacattgtgcggggcatgggcgagacccccatccttcccctgggcatcagttatattgaggacttcgctaaattcgaaaactcaccgctctatattggactggtggagactggcgctatcatcggcccattgattgggctgttactcgcatctttctgtgccaacgtttatgtcgatacagggtttgtgaacacggacgaccttatcataacccctaccgacacgaggtgggttggagcctggtggttcggcttcctcatatgtgcgggtgtcaatgtgctgacagctatcccattttttttcctccctaacacactgcccaaagaggggcttgagactaacgctgacattattaagaacgagaacgaagacaaacaaaaggaggaggtcaagaaagagaaatacggaatcactaaggacttcctgccatttatgaagtcgctgtcttgtaacccaatctacatgctgttcattttagtgtccgtcatccagttcaacgctttcgtgaacatgattagtttcatgccgaagtatctggagcagcagtacggcattagctcctccgatgccatatttctcatgggaatctacaatttgcccccgatttgcattggctatatcattggcggcctgatcatgaagaaattcaagatcaccgtgaagcaggctgctcatataggctgttggttgtctcttctcgagtatctcctatactttctgagttttttgatgacatgcgaaaattcttcggttgtagggatcaataccagctacgagggcattcctcaagatctctacgttgagaacgacatatttgccgactgtaacgttgattgtaattgcccgtccaaaatttgggacccggtctgtgggaacaacggcctctcttacctctctgcctgtctcgctggttgtgagaccagtatcggaacggggatcaatatggtatttcagaactgctcatgcatccaaacctccgggaattcatcagcagtgctcgggttatgtgataaaggccctgactgtagcctgatgctacagtacttcctgatcctgagcgccatgtcttctttcatatacagcttggcagccatccccgggtacatggtactcctgcgctgtatgaagtccgaagaaaagtcgttgggcgtcggattgcacacattttgcacccgggtgttcgctggcatcccggctcctatttacttcggggccctaatggactctacatgcctacattgggggaccctgaagtgtggagagagtggagcttgtcgcatttatgatagcaccacctttaggtacatttacttgggccttcccgcagccttgcgcgggtcatcctttgtgcccgccctgatcattcttatcctcttaagaaaatgtcatctccccggcgagaacgccagcagtggcaccgagctgattgaaacgaaggttaagggcaaggagaacgaatgcaaagatatataccaaaaatccacggtgcttaaagacgacgaactgaagaccaagctgtag

SEQ ID NO: 235731 - DNA, 42 bp, Artificial Sequence
  derived and/or modified sequence
atgggcgagaccgagaagcggatcgagacccaccggatctag

SEQ ID NO: 235732 - DNA, 156 bp, Artificial Sequence
  derived and/or modified sequence
atgggcgagaccgagaagcggatcgagacccaccggatccggtgcctttccaagcttaagatgttcctgctagccatcacttgcgcctttgtgtcaaaaactctgtcgggatcctacatgaactctatgctgacccagattgagcgacagttttag

SEQ ID NO: 235733 - DNA, 300 bp, Artificial Sequence
  derived and/or modified sequence
atgggcgagaccgagaagcggatcgagacccaccggatccggtgcctgagcaagctgaagatgtttcttttggctatcacctgcgcattcgtatcgaagacacttagtggctcctacatgaactcgatgctgactcagatcgaacgccagtttaacattcctacaagccttgtgggctttattaatggctcattcgagatcggtaatctgctgctgattatcttcgtttcctatttcggcaccaagctccataggcccattatgattggcattggatgcgtggtcatgggactgggctag

SEQ ID NO: 235734 - DNA, 444 bp, Artificial Sequence
  derived and/or modified sequence
atgggcgagaccgagaagcggatcgagacccaccggatccggtgccttagcaagctgaaaatgttcttgctggctataacatgcgcttttgtttcgaaaactctgagcgggagctacatgaactcaatgctaacccagattgagaggcaatttaacattcccacttccctggtcggctttatcaatggatccttcgaaatcgggaatcttctgctcatcatcttcgtttcttacttcggaaccaaattacacagacccataatgataggaattggatgtgtggtgatgggcctcggctgtttcctgaaatctctgccccacttcctgatgaaccaatacgaatacgagtctaccgtctccgtgagcgggaacctttcgagcaactctttcctgtgcatggagaacggcacccagatcctccgaccgacccaggatccctcttag

SEQ ID NO: 235735 - DNA, 267 bp, Artificial Sequence
  derived and/or modified sequence
atgggcgagaccgagaagcggatcgagacccaccggatccggtgcctctccaagctgaagatgtttctgctggctatcacctgtgctttcgtgtctaaaactctttccggtagctatatgaattcaatgctgacgcagatcgagagacagttcaacattcctacttctctcgtaggattcataaatggctcctttgagattggtaacctgctccttattatttttgtgtcctatttcggcactaagcttcaccggccaatcatgtag

SEQ ID NO: 235736 - DNA, 276 bp, Artificial Sequence
  derived and/or modified sequence
atgggcgagaccgagaagcggatcgagacccaccggatccggtgcctctcaaagctgaaaatgtttctgttggcaatcacctgcgctttcgtgtcaaaaactctctccggcagttatatgaactcaatgctgacacagatagagcggcagttcaatattccaacatccctggtgggatttataaacggttcctttgaaatcggaaacctgctgctcatcatcttcgtctcctactttggcaccaaattacacaggcctatcatgatcggaatttag

SEQ ID NO: 235737 - DNA, 2013 bp, Artificial Sequence
  derived and/or modified sequence
atgggcgagaccgagaagcggatcgagacccaccggatccggtgcctgtctaaattgaagatgttccttctggccataacatgtgcattcgtctccaagaccctgagcggcagctacatgaatagtatgctgacgcagattgaaagacagtttaatattcccacttccctcgtgggctttataaatggttccttcgagatcgggaacttactcctcatcattttcgtgagttacttcgggacgaagcttcatagacctatcatgattgggatcggatgtgtcgtgatggggctgggatgctttctgaagagtttgcctcatttcctaatgaaccagtatgagtacgagtctactgtgagtgtgagcggcaaccttagcagcaactcattcttgtgcatggaaaatggcacccagattttgcggccaactcaggatcccagcgagtgcaccaaggaggtgaagtccctgatgtgggtctacgtactcgtgggtaacattgtcagggggatgggagagacgcccatattgccgctcggcatttcctacatcgaggacttcgccaaatttgagaattcaccactttacattggactggttgaaactggtgctataattggccctctgataggtctacttttagcatccttttgcgccaacgtttacgtagataccggatttgtgaatacagacgacctgattattacccccacagatactcgctgggtgggcgcctggtggttcggcttcctcatatgcgcaggcgtgaacgtgttaaccgcaatcccttttttcttcctcccaaacaccttgcctaaggagggtctggagactaacgcagacatcatcaagaacgagaacgaagacaagcagaaagaggaggtgaaaaaggaaaagtatggaatcacaaaggacttcctcccctttatgaaaagcctatcatgcaatcccatctatatgctcttcatcctagtcagcgtcatccaatttaacgcctttgttaatatgatatcattcatgcctaaatacctggaacagcagtacgggatttcatctagcgacgcaatcttccttatgggaatctacaaccttcctccaatttgcatcgggtatataattggggggctcatcatgaaaaagtttaagatcactgtgaaacaggcagcacacatcgggtgttggttgagcctgttggaatatctgctatatttcttgtcattcctgatgacttgcgaaaattcttctgtggtgggcataaacacaagttacgagggcatcccacaggacttatatgtggagaatgacatttttgccgattgcaacgtggattgcaactgcccgtctaaaatatgggatccggtctgtggtaacaatgggctaagctacctctcggcctgtcttgctggctgtgagacctccatagggaccggaataaatatggttttccagaattgctcttgcatacagacaagtgggaactcttcagcggttctgggcctctgcgacaaaggcccagactgttccctcatgctccagtatttcctcatacttagtgctatgtcttccttcatatacagtttggccgcaatccccggttacatggtgctcctccggtgtatgaagagcgaggagaagtcactgggtgtgggactgcataccttttgtaccagagtgttcgccggaatcccagcacccatctactttggagcgttaatggactccacttgtctacattggggcacattgaagtgtggtgagagcggcgcctgcagaatttacgactctactacgtttagatacatttacttgggcctccccgcagctctgcgaggcagctcctttgtgcctgccctgatcatactgattctgctccgcaagtgtcaccttcccggggagaatgcaagcagtggtaccgagttaattgagaccaaggtgaaaggaaaggagaacgagtgcaaagatatttatcaaaaatctacagtgctgaaggacgacgagctcaagaccaagctatag

SEQ ID NO: 235738 - DNA, 414 bp, Artificial Sequence
  derived and/or modified sequence
atgggcgagaccgagaagcggatcgagacccaccggatccggtgcctatcaaagcttaaaatgttcctattggcgataacgtgtgcctttgtgtccaaaaccctgtctgggagttacatgaattctatgctgacccaaatagaaagacagtttaacattcccaccagcttggtgggattcataaacggctcgttcgagattggaaacctactgctgataatctttgtcagctactttggcactaaactgcaccgtccaatcatgatcgggatcgggtgtgttgtcatgggcctgggttgcttcctgaagtctctgccccacttcctcatgaatcagtatgaatacgaatcaacagtgtctgtgtctggaaaccttagcagcaatagctttctgtgtatggagaacggaacttag

SEQ ID NO: 235739 - DNA, 1617 bp, Artificial Sequence
  derived and/or modified sequence
atggagaacggcacccagatcctgcggcccacccaggaccccagcgagtgcaccaaggaagtgaagtcactgatgtgggtatatgtgctcgtgggcaatatcgtgcgcgggatgggtgaaacccctattcttccgctggggatctcatacattgaagacttcgctaaattcgagaattctcctctttatatcggtttggtagaaacgggagccattatcggtcctctgatcggcttgttgctggcttcattctgtgctaacgtttacgtggacaccggatttgttaacactgatgatcttatcataaccccaacggatactcgctgggttggagcttggtggtttggatttctgatatgtgccggcgtaaacgtcctcaccgccattcccttctttttcttgccgaatacgctccccaaagaggggctggagacaaatgccgacatcatcaaaaacgagaacgaagataaacagaaggaagaggtaaaaaaagagaagtacgggattacaaaggacttcttgcctttcatgaaatccctctcttgcaatcctatctatatgctcttcattctggtgtctgtgatccagtttaatgcatttgtcaacatgatttcatttatgccaaagtatcttgagcaacagtacgggatcagtagctccgacgctatcttcctgatgggaatctacaacctacccccaatttgcatcggctatatcataggcgggttgattatgaagaagttcaagatcactgtgaagcaggctgctcacattgggtgctggttgtcacttttggagtacctcttgtatttcctcagtttcctcatgacatgcgagaattctagcgttgtcggcatcaacacatcctacgaggggatacctcaggatctatatgtggaaaatgatatcttcgctgactgcaatgttgattgcaattgtccaagtaagatctgggatccagtttgtggcaacaacggactgagctacctgagtgcatgtttagctggctgtgaaaccagtatcggaaccggaatcaacatggtattccagaactgcagttgcatccagacatccgggaattccagcgcggttctgggtttgtgcgacaagggcccagactgttccctaatgctgcagtactttcttatactgagcgcgatgagctcctttatctattcactggctgcaatcccaggctatatggtgctgcttcgatgcatgaagagtgaggagaaatcgttaggtgtggggttgcacacgttttgtacacgggtgttcgctggtatcccggctcctatctattttggagccctgatggatagcacctgtctacactggggtacgctgaaatgcggggaatcgggcgcctgcagaatctacgactccacgactttccggtatatatatttaggactgccagcggccctgcggggatccagcttcgtcccagctcttataattcttattctgttacgcaaatgccatcttcctggagaaaatgcatcctccggaacggaattgattgagaccaaggtcaaaggtaaagaaaacgagtgcaaagatatttatcagaagtccacagtgttgaaggatgacgaattgaagacgaagctatag

SEQ ID NO: 235740 - DNA, 1617 bp, Artificial Sequence
  derived and/or modified sequence
atggagaacggcacccagatcctgcggcccacccaggaccccagcgaatgcacgaaggaagttaagtcacttatgtgggtctacgttctggtgggtaatattgtccgcgggatgggggagactcctatcctccctcttggaatctcatacattgaggacttcgccaaatttgagaattcaccgctctacatcggactcgttgagaccggagcaatcatcggccccctgattggtctgctgctcgccagcttttgtgctaatgtgtatgttgatacaggattcgttaacacagatgatctcatcatcacccctactgatactcgttgggtcggggcgtggtggttcggatttctgatctgtgctggtgtgaacgtgctcactgccatcccctttttcttcctgcccaacaccctccctaaagagggcctcgaaacaaatgccgacattattaagaacgaaaacgaagataagcagaaggaagaagtgaagaaagaaaaatatggaatcacgaaggacttcctcccctttatgaagtccctttcgtgcaatcccatttacatgctgtttatccttgtgtccgttatacaattcaacgcattcgtgaatatgatttcgttcatgcccaaatatcttgaacagcagtatggaatctcaagtagcgacgcaatcttcctaatggggatttataaccttccccctatatgcatcgggtacattattggcggattgataatgaagaaattcaagataaccgttaagcaagccgcacatattggttgctggctcagtctattggaatacctgttgtatttcctgagtttcttaatgacctgcgagaacagctccgtggtgggcataaatacgagctatgagggaatcccacaagacctctatgtggagaacgatatattcgccgattgtaacgttgactgcaattgcccctcgaaaatctgggaccctgtttgcggcaacaatgggctatcctacctgagcgcctgcctggctggatgtgagacttcaatcggaacaggtattaatatggtattccaaaactgttcatgtatacagacaagcggcaactcttctgctgtgctcggactatgtgacaagggacctgattgcagcctgatgttacagtattttctcatactttcagccatgtcttcttttatttatagcctcgcagctattccgggatacatggtgttgcttagatgcatgaaatccgaagagaagagtttaggagttggcctgcataccttctgcactcgagtctttgcaggtatccctgcgcccatctattttggagctctaatggacagtacatgtttacactggggtaccttgaagtgtggcgaatccggcgcctgccggatttatgactcaaccactttcaggtacatatatctgggtctaccggcggccctccgtggcagttcattcgtacccgcactcatcatcttgatcctcctgaggaaatgtcatctgccaggtgaaaatgcgagcagtggcaccgagcttatcgagaccaaggtcaaaggaaaggagaatgagtgtaaggatatttaccagaaatccacagtccttaaggacgatgagctcaaaaccaagctctag

SEQ ID NO: 235741 - DNA, 2013 bp, Artificial Sequence
  derived and/or modified sequence
atgggcgaaactgagaagcggatcgaaactcatagaattcgttgtctctcgaagctgaaaatgttccttctcgcaataacctgtgcattcgttagtaaaacgctgagcggcagctacatgaactcaatgctgacccaaatcgaacgccagtttaatattcccactagtctcgtgggttttattaatggttctttcgagatagggaatttgctgctgataattttcgtatcctatttcggaactaaacttcaccgcccaatcatgattggcattggatgtgtggtcatgggactgggatgcttcctcaaatctctgccccactttctgatgaatcaatatgagtacgaaagtactgtctctgtatccgggaacctgagctcaaattcctttctgtgtatggaaaatggaacccagattttgaggcccacgcaggatccatcggaatgcacgaaagaagtgaaatccctcatgtgggtttacgtcctagtggggaacatagttagaggtatgggagagactccgatattacctttgggtatctcctacattgaggatttcgcaaaattcgagaattcaccactgtacattggcctcgtcgagaccggggcaatcattggacctctgatcgggctgctgctagcctcgttttgtgctaatgtgtacgttgacaccggattcgtaaatactgatgacctaatcatcacgccaacagacactcggtgggtgggagcttggtggttcggatttctcatctgcgcaggggtgaatgtcttaacagcaattcccttctttttcctccccaatacgcttcccaaggagggattagagacaaatgccgatattatcaagaacgaaaacgaggacaagcaaaaggaagaagtgaagaaagagaagtacggaataaccaaagactttctccctttcatgaagtctctgtcttgtaatccgatttacatgctgttcatcctggtgagcgtaatccagttcaacgcctttgtgaacatgatatcctttatgccaaagtacctcgagcagcagtatggcataagctcttccgatgcgattttcctgatggggatatataacctaccacctatctgtatcgggtatataattggcggtctcataatgaaaaagtttaagattacagtgaagcaggcggctcacatcggctgttggctttccctgttggagtacctgctatatttcctgtccttcctcatgacatgtgaaaattcctcagtcgtgggaataaacacgtcctacgagggtattccacaggacctgtatgtcgagaatgacattttcgcagattgcaatgtcgattgtaattgtccatcgaagatttgggaccccgtctgcggcaataacggcctcagctatctgagcgcctgtttagccggttgtgaaaccagtatcggcaccggcatcaatatggtatttcaaaactgcagctgtattcagactagtggaaactcaagcgcagtgttaggtctgtgcgataagggccctgattgtagccttatgctgcagtactttctgatactctcagcaatgagttcatttatatactctctcgccgctattcctggctatatggtacttctccgatgcatgaaatccgaggaaaagtctctgggcgtggggttgcataccttctgcaccagagtgttcgccggaatacccgctccaatatacttcggcgctctaatggatagcacctgcctgcactggggcacacttaaatgcggggaatccggcgcatgccgcatctacgattccactaccttccgatacatttaccttgggctgcctgccgctctacgaggatcctcattcgtccctgccctaataattctgatcctgctgaggaaatgtcacctcccaggggagaacgcctcctccggtaccgagctgatagagactaaagtgaaagggaaggaaaatgagtgcaaagatatttatcaaaagtctactgtactaaaagatgatgagctgaagactaagttatag

SEQ ID NO: 235742 - DNA, 42 bp, Artificial Sequence
  derived and/or modified sequence
atgggcgaaaccgagaaaaggatcgagactcaccgcatttag

SEQ ID NO: 235743 - DNA, 156 bp, Artificial Sequence
  derived and/or modified sequence
atgggcgagactgagaaaagaatcgagacccacagaattcgatgcttgagcaaacttaaaatgtttttgctggccataacgtgtgctttcgtgagcaaaaccctgagtggtagctacatgaactccatgttgacccaaatcgagaggcagttctag

SEQ ID NO: 235744 - DNA, 300 bp, Artificial Sequence
  derived and/or modified sequence
atgggggagacagaaaagcgaattgagacccaccgtatccgatgtttgtctaaactgaaaatgtttcttttggcaattacttgcgcctttgtctctaagaccctttcaggatcctatatgaactcgatgctgacccagatcgagcggcagttcaacattccaacatctctggttgggttcatcaatggttcttttgaaatcggcaacctcctcctgataatcttcgtgagctacttcggaaccaaactgcaccggcctatcatgattggtatcgggtgcgtggtgatggggttaggttag

SEQ ID NO: 235745 - DNA, 444 bp, Artificial Sequence
  derived and/or modified sequence
atgggcgaaaccgagaaaaggatcgagacacataggattcgttgtctgtcaaaactgaagatgttcctcttagccatcacctgtgcttttgtttcaaagacactctccggctcttatatgaatagcatgctcacgcagatagagagacaattcaatattcctaccagcctcgtcgggttcatcaatggcagttttgaaattggcaaccttctgttaattatttttgtctcgtattttgggactaaactgcacaggcccattatgatcggaattggctgcgtcgttatggggttgggctgcttcctaaagtcactgcctcactttttgatgaatcagtacgagtatgaaagtactgtctcggtgagcgggaatctctcctctaatagcttcctctgcatggaaaatgggacccagatccttcgacccactcaggatccatcctag

SEQ ID NO: 235746 - DNA, 267 bp, Artificial Sequence
  derived and/or modified sequence
atgggagagaccgaaaaaagaatagagactcacagaatcaggtgcctgagcaagctcaagatgttcttacttgccatcacttgtgccttcgtcagcaagacactgagcgggtcctacatgaactccatgctgacccaaattgagcgacagtttaacattccaacctccctggtcggatttatcaatgggagtttcgagatcgggaacttgctgctgattatctttgtgtcttattttggtacaaagctacaccgcccaattatgtag

SEQ ID NO: 235747 - DNA, 276 bp, Artificial Sequence
  derived and/or modified sequence
atgggagagacagagaagcgaattgagacccatcgcatcaggtgtctgtcaaagctgaagatgtttctcctggcaatcacttgcgcctttgtgtctaaaaccttaagcggatcttacatgaattccatgttaacccagatagagcgccagtttaacattccaacaagtctggtggggttcatcaacggctctttcgaaattggcaacctcttgctgattatttttgtgagctactttgggactaagttacaccggccaatcatgatcggcatctag

SEQ ID NO: 235748 - DNA, 2013 bp, Artificial Sequence
  derived and/or modified sequence
atgggagagaccgaaaaacgaattgagacccacagaatacgatgcctgtccaaactcaagatgttcttactcgccattacatgcgcttttgtaagcaaaaccctatctggctcctacatgaatagcatgcttacccagattgagcggcaattcaacatacctacctccctcgtgggctttattaacggatcgtttgagatcggtaatctgctactgatcatttttgtgtcatattttggcactaagctgcaccgcccaattatgatcggaatagggtgtgtcgttatgggcttagggtgtttcctgaaaagccttccccacttcctgatgaaccagtatgaatatgaaagcacagttagcgtgtctgggaacttgtcctccaattcctttctgtgtatggaaaatggtacccagatcctcagacctacccaggatccatcagaatgtacgaaagaggttaagtccctgatgtgggtttatgtcctagtgggcaacatagtccggggaatgggcgagaccccaattctgcctctgggcatcagctacattgaagactttgccaaatttgagaattcccccctgtacatcggactggtggagactggagccatcattggacctctaattggccttctcttggcatcattttgtgcaaatgtgtacgtcgacacgggtttcgtcaacactgatgacctcataattactcccacagatactcgatgggttggtgcgtggtggttcggcttcctcatctgcgccggtgttaacgtgctgaccgcaattccctttttctttttgcctaacaccctgcctaaggagggactagagacaaacgcggatattatcaaaaacgagaatgaagacaagcaaaaagaagaggtcaaaaaggaaaaatatggcattacaaaggactttctgcctttcatgaagtcccttagctgcaatcctatatatatgctcttcatccttgtttccgtgatccagttcaacgccttcgtaaatatgatttcttttatgccaaagtacttagaacagcagtacggaattagcagctccgacgctatttttcttatgggtatctacaatctgcccccaatctgcattggttacatcatcggtggcttgattatgaaaaaattcaagatcactgtcaaacaggctgcacatataggttgctggctatccttacttgaatacctactgtacttcctctccttcctcatgacttgtgaaaatagctctgttgtgggaattaatacgtcatatgagggaatacctcaggatctgtatgtggagaacgacattttcgccgattgtaacgtcgattgcaattgtcccagtaagatttgggacccagtatgcgggaacaacggactctcctatctgtctgcctgcctggctggctgtgaaacaagcatcggaaccggaatcaatatggtgtttcaaaactgcagctgcatccaaacttccggcaatagttcagcggtgctggggctatgtgacaaaggtccggactgctcgctgatgctccagtactttctgatcttatctgcaatgtctagcttcatctatagtttagcagcaatccccggttatatggttctgctgcgctgtatgaagtccgaagagaagagtctgggcgtaggtttacatactttctgtacaagggtttttgctgggatacccgcaccgatctattttggggctcttatggacagcacatgtctccactggggaactctcaagtgcggcgaatccggcgcttgcaggatatatgatagcaccacattcagatatatatatctggggctgccagccgctttaaggggcagctcctttgtccccgcactcatcatactgatactgctgagaaagtgccacctgcccggagagaacgcatcttccggcacagagctcatcgaaacaaaggtcaagggcaaagaaaacgagtgcaaggatatttaccaaaagagcactgtactcaaggacgacgagctaaagacaaaactttag

SEQ ID NO: 235749 - DNA, 414 bp, Artificial Sequence
  derived and/or modified sequence
atgggggagacggagaaacgcatagaaactcaccggatccgatgcttatctaaactgaagatgttcttactggcgatcacctgtgctttcgtctccaagaccctgagcggaagttatatgaactctatgctaactcagatagaaagacaattcaatataccaacctcgctggtcggctttataaacggctcattcgagatcggcaatctcctactaatcattttcgtctcctacttcggcaccaagttgcatcgcccaatcatgattggtatcggttgcgtggtaatgggtctgggttgcttcctcaagagcctgcctcactttttgatgaatcagtacgagtacgaatctacagtctctgtgtcaggtaatctctcatctaattcctttctttgcatggagaatggaacctag

SEQ ID NO: 235750 - DNA, 1617 bp, Artificial Sequence
  derived and/or modified sequence
atggaaaacggcacacagattttgcgaccaacacaggatccgagtgagtgcacaaaagaagtcaaatccctgatgtgggtgtacgtgttggtgggcaacatcgtaagaggcatgggcgaaactcctattctgcctctgggaattagctacatcgaggactttgccaagttcgaaaactctccactgtatataggattggtggagaccggtgccataatcggccctctgatcgggttgctgcttgccagcttttgcgcaaacgtctatgtggacaccggcttcgtaaataccgacgacctcatcataactcccactgatactcggtgggttggtgcttggtggtttggatttctaatttgtgccggagtgaacgtactgactgctatccccttcttctttttgccgaatacattgcctaaagaaggtctcgagacaaatgccgacattattaaaaatgagaatgaggacaagcagaaggaagaagtcaagaaggagaagtatggcattaccaaggatttcttgcctttcatgaaaagtctgtcatgcaacccaatatacatgctgtttatactcgtgtctgtaattcagtttaatgcattcgtgaatatgatctcttttatgcccaaatacttggagcagcaatacgggattagcagttcagacgccatatttctgatgggcatttacaacctacccccaatttgcatcgggtacattatcggagggctgattatgaaaaagttcaagatcacagtgaagcaggcagcccatatcggttgttggctgtcactgctggaatatcttctctatttcctgagctttctgatgacatgtgagaacagttctgtcgtgggaattaacacaagttacgaaggcattccacaggacttatatgttgagaatgacatcttcgctgattgtaacgttgactgcaactgcccaagtaagatttgggatcccgtttgtgggaataacggactgtcttacttaagtgcatgtttggccggttgtgagacctcaatcggcaccggtattaacatggtgtttcagaattgctcgtgcatccagacctccggcaatagctccgccgtcctggggctttgtgataaaggacccgattgttctctgatgctccagtattttttgattctgtcagcgatgtcaagcttcatctacagcctcgcagcaatcccagggtatatggtgctgttaaggtgcatgaagagcgaggagaagtctctgggggttggtcttcatacattttgcacccgagtcttcgcaggcatccctgctcctatctacttcggagcactgatggattctacatgtctacactggggcaccctgaaatgtggcgaatcgggagcttgccgaatctacgatagcactactttccggtacatctaccttggactgccagcagctttacggggaagctcctttgttcctgctcttatcattctgatcttgctgcgaaagtgtcatctgcctggagagaacgcatctagtggcacggaactcattgaaactaaggtaaagggcaaggagaacgagtgcaaggacatctaccaaaagagtacagtgctaaaggatgatgaactgaaaacgaaactgtag

SEQ ID NO: 235751 - DNA, 1617 bp, Artificial Sequence
  derived and/or modified sequence
atggagaacgggacacagatcctgaggcctacccaagatcctagcgagtgcacaaaagaagtgaagtcgctgatgtgggtatatgtcctggtggggaacatcgtgaggggcatgggcgagacccctattcttcccctggggatctcatacatcgaggacttcgctaagttcgagaatagccccctttatattggactggtcgaaaccggggcaatcattggccctctgatcgggctcctcctggcttcattttgcgctaacgtgtatgtagacacagggttcgtcaatacggacgatttgattatcacccccactgatacgcggtgggtcggagcttggtggttcggctttctcatatgtgccggagttaacgttctaaccgccatcccgtttttcttcctgccaaatacacttcccaaagaaggtctcgaaacgaatgcagatattatcaagaacgaaaacgaagataaacagaaagaggaggtgaaaaaagagaaatacggaatcaccaaggattttctgccctttatgaagtcgctatcttgcaatccaatctacatgttattcatcctggtatcagtaatacaatttaacgcctttgtgaacatgatctccttcatgcccaaatatctggaacagcagtatggaatatcctcctcagatgcaatcttcctgatgggcatctacaacctgcctcctatctgcattggttatattattggcggtctcattatgaaaaagttcaagatcaccgtaaagcaggccgctcatataggctgttggttaagtttgcttgagtacctgctgtattttctctccttcctcatgacctgtgaaaactcctccgttgttggaatcaatacatcttatgaggggatcccccaggatctgtacgtagagaacgacatatttgccgactgcaacgtggactgtaattgtccatcaaagatctgggatcccgtgtgtggcaataatggactctcatatttgagtgcatgtttagctggctgcgagacttcaatcggtaccgggatcaacatggtcttccagaactgctcctgtattcagaccagcggcaacagtagcgccgtgctcggcctttgtgataaaggcccagattgttcattaatgctacagtactttttaatcctgtctgccatgagttcttttatttattccctggccgcaattcccggatacatggttctgctgcggtgtatgaagtcagaagagaagtctctcggtgttggattacacaccttctgcaccagagtgttcgcgggtatacctgccccaatttacttcggagccctgatggacagcacctgtttacactgggggacgcttaaatgcggggaaagcggcgcttgtcgaatttacgactcaacgacctttcgatatatctacctgggacttcctgccgctctacggggatcctccttcgtgcccgctctcatcatcctgattctgcttcgcaagtgtcacctgcccggtgagaacgcttcatctggtacagagttgattgagacaaaagtaaagggtaaagagaacgaatgcaaagacatataccagaaaagcacagtactgaaggacgacgaattgaaaactaagttatag

SEQ ID NO: 235752 - DNA, 7682 bp, Artificial Sequence
  derived and/or modified sequence
ctcgctgctgccttgcagtttgatctcagactgctgtgctagcaatcagcgagactccatgggcgtaggaccctccgagccaggtgcgggatataatcttgtggcgcgccgttttttaagcctgttggaagagcgcagtattcgggtgggagtgacccgattttccaggtgcgtccgtcacccctttctttgactcagaaagggaactccctgaccccttgagcttcccaagtgaggcaatgcctcaccctgctttggcttgcgcacggtgcgcgcacccactgacctgcgcccattgtctggcactccctagtgagatgaacccggtacctcagatggaaatgcagaaatcacccgtcttctgcgtcgctcacgctgggagctgtgcaccggagctgttcctatttggccatcttggctcctctccccttgttcctgattttaatgggactaccttggttatttcacagcacacttacggtgctttgtgaagtgcctgctatgttactatcatcatcttcctgacaagatggtgctgtagaaatctttgcatattgctatgggcttccaagaaaaactacctcgaaggaaaacaaagacaagatgacgatcattctaatgagaagaattataatatgacatgcacactctttacaaagggtagaagtaagacatatcaagatttaaaacataaatagcttggaacaccctgaagagcaacatgggagaaactgagaaaagaattgaaacccatagaataagatgtctttccaagttgaagatgtttctgttggcaataacatgtgcatttgtatccaaaacactgtctggatcttatatgaattccatgctcacacaaatagagagacaattcaacatcccaacatctctagttggattcattaatggaagctttgagattggaaatcttttgttgattatatttgtgagttattttggaaccaaactgcatagacctataatgattggcattggatgtgtggttatgggcttaggctgtttcttaaaatcactacctcatttcctcatgaaccaatatgaatatgaatctacagtttcagtttcaggcaacttgtcctcaaacagtttcttgtgtatggaaaatggaacccagattttaagaccaacgcaggatccatcagagtgtacaaaggaagttaaatcattaatgtgggtgtacgtcctagtaggcaatattgtacgtggaatgggtgaaactcccatcctgcctttgggtatttcctatatagaagattttgccaaatttgaaaattctcctttatatattgggcttgtagaaacaggagctattattggtcctttgattggacttttgttggcatcattctgtgcaaatgtttatgttgacactggatttgtgaacacagatgatctgatcataactcccactgacactcgttgggtcggtgcatggtggtttggctttctgatttgtgcaggagttaacgtgctcactgccattccttttttctttttgcccaacacacttccaaaggaaggactagagactaatgctgacatcattaaaaatgaaaatgaagacaaacaaaaagaagaggtcaagaaggaaaaatatggaatcactaaagattttctacctttcatgaaaagtctttcctgcaatccaatttatatgcttttcatacttgtaagtgtgatacagttcaatgcattcgttaacatgatctccttcatgcctaaatacctagaacagcaatatggaatatcatcttcagatgcaatctttctaatgggtatttataacttacctccaatatgtattggatatataattggtggtttaattatgaagaagttcaagattactgtcaaacaagctgcccacataggatgttggttatccttacttgagtatcttctctattttttatcttttctcatgacttgtgaaaattcttcagttgttggaataaatacctcttatgaaggaattccacaagatttatatgtggaaaatgacatctttgctgattgcaatgtggattgcaactgtccatctaaaatatgggatcctgtgtgtggaaacaatggcttgtcatatctgtcagcttgtcttgctggttgtgagacatccattggaacgggaataaacatggtgttccaaaattgcagctgtattcaaacatcaggaaattcatctgcagttcttgggctgtgcgacaaaggacctgactgttccttgatgctccagtacttcctaatcttgtcagcgatgagcagtttcatttattctttggctgccatacctggatatatggttctcttgaggtgtatgaaatctgaagagaagtcccttggtgtgggattacatacattttgcacaagagtatttgctggcattcctgcacctatatattttggcgctttaatggattccacatgtttacactggggaactttgaaatgtggtgagtcaggggcatgcaggatatatgattccaccaccttcagatacatctacctcggattgccggcagcactaagaggatcaagctttgttccagccttaatcatcttaattcttttgaggaagtgtcatctacctggtgaaaatgcctcttcaggaacagagcttatagagacaaaagtcaaagggaaggaaaatgagtgcaaagatatataccaaaagtccacggttttgaaagatgatgaattgaaaactaaattgtaattgtcctattatattacttttttcagaattagagaacatgctgtacaacttaattgttttaaaaatcagtagagatataatagataactttttcttgtctttaagaacctaaaaaacctcttaactcaaaataataaaatgttcactaatgatatttctaaggtatcagtgacacttgagttttcctaggagggacatcaataacagccccctaaagaagattcttagagccagctttatttttatgttgaaacagcaatttcccttaattcatcgaagtaagggtgtacttcctacatctccttctactaatacttctaaaaattttctgttatgaaaacctatttaattccactaaatttgttctttgatattggaattattcagatgcctaaattctcattctgttatgtgaagatttaaatattttattcaagtttatcgcttccatgtgagagaagcctacatcttcttattctatttaggaatcgttctttaactcttcttattcattctaggcatgactcctatataatagattactcataaatataccctcctactttcaattttttcttttctttattactcatacatttgctcaatttgtacagaatactgacaaacttaagcaggttattaaacatcatgaggcaaagattgttggattttttttcagtaattcaaatccagtgactaaagtttttcttacaaacaagtgtctgaatcaaaggatgaaaggacaatattataaaaactccagttcttaaaggctgtttgtaatgtcagatattgtcaaagaaccactttctaagattcaggactctttagaccgatgtttatatcacccattgtgtcctaaggtagaacacaaacactaattttcccaaaataatcttagacaatagcttctgttatgaaacagaggttagtaaaggctaaggtacatattaaaagctaaatctacttatattattattttgtaaattatggataaaattaaaaattgaaggattttagacatagaagaggacttattgattaatatagggcttctggtaaaagagaatagaatgaacagacaaatacctgtttgtctactccttactctccttcctgttgaaatgacagtcaatatataagaatgacataaatccctaatggatgaagagaatggagtaaggaagggtgggagaagtgggtgtcaatacactatggttatttatgtgtactataaatggagtgagagtgtctgcagggatacaacagagtggaggaagctgaaatacagaatatacctagaaggagcctggaatggaagtgtgaaactgagttgccagttcaaagtgtgagttggtagctggacagaaagcaggccagttaactgaaggactttgtacagatgctttacaggttaatatgatttcctaaatgatcagatgcatcatatgaaaaaagaaagcaaatgagaagagaaaggctgtatagaacaggtttagggggaaggatgaaaagttaagtttcagtttcatgaagtttgagacttcaactctgggcatataaaaaataaccaaggttcaaaccaagactggctttgaaacaagagagaggaactaaaatcattggaaagggggagtttaactttgatgtaggtatgactgcagcagtgagatatcgtattaagatctgatgacatgaaatttggagccacttcctttgtggtgggaggaagtgaggagaatggcctggaaactaaaacaaggagaagagacttacctatattcacagagcagcaagaaaaagtaaacagccactgcatgagaaggtttcaggggaatcagattttgctgagtgtgcgatggtgaagagaatgctcatttctgaactggaatctgagctaaaaagaagcaaataggatatatatggaagttagacttatggaaattagaagaaggggaatgagagatagtttggaattctgtggctatttaggtgactgacataaatgggggcagaggacataatgaggttagttcttacggattcaaggcagatagtgttggtgaaacagtgagtgtcaaaattaggcgaggtggtgactgggctccctgatgacctcttgtcgtggagcaaaactgaataagcaaaaacttactcaagctcctgaggcccattcatcatccctattgatagatttgaggtgatctgagaaagctgagtcttgctttgtggacaattcacccacttgaactccctcaatggagcatcataggcccagagagacatggctatggacttagtaccttggcatcacttttatcccctcatggaggagatggcattttactctgaaaacatagggttctcctttgacacttcttggtgggagaaagcaggtcagagaaagtgggtgttggagtgctttgggatccctcatgacctcttttgttggtatacatgaagcctgggagtttagttcttattctgagcacttgtactactctcatgagggtagagataatggcatagcggacagacatggagaagagaaacaagagaacaggtagtgagaagtcgagagtcagtaattttcttacttaatattgtggggatcttacttaatacataaagttaatgaaactagaaatagtggtttaatatattacttataattcaaaaattaacctatatttacagatgcttacacagtttctttgtgaatccacctatggttttattttaattaattttttattgcaaagcaatgaaatgttgctttgtggagccagatagcattacagcaggtaaatgggtttctgctagatctccacattattggggagatgctcgaagacctcagaatatacacacccttaaggttcaagggctggggttgagctctccataaggaacttttcctcctcccagaagggcgatcattgtgtatatagacatggagacagaaccagaatgacttctgtgggtggaaatagtgccatcagaatcatttattattatgaaataaatattatttatctacattgaaaaaatactactcctcctaaaatcattaacttttcctcagatgattttaagaaatttgagtaatagcacacgaagtggtaaagacccttagtctttctggtatattagaaaagccttttaatcagtctctggaaggacactagggattgcagctgaataaatatattaagaataacaaatcagttcaacaaggagtagagtctgaagtgggattttccgtggaaattctcttatgtctgtactaacaataagaaagacaagacaaagactaagtaattaaagaaaagctcgaaatgttttgtaaccaaaagcttgaaatgttatgtaaccagaatgttatgtaaccagagctgttagatcagatactggctgattcataggtgaacgtcctctttgtgggtcctctcatgcatccccattttcagaatgtaaataatttggctttgtagcccttccaaaaagggtactatcccacttctcctggcataaatcatacattgactgaacgttcaccatctaaaaatcactcatgctccttgaaccaaggtgattatcagagacagctcctggtagaagaggttgtagatgttaaaagagtatgatttctatataagaaaatatagaaattgacagaatggttcttatttactgggcctggagaattcctgttctggcattcttagatccctcaaatttattaccaaggggaaaaggaaaaagaggcaagtaggcagtagggtaagctgttgtttgcttgccaaggaactggagagtgcaggtttcaagacaccttgaggaaattctcctgagcccttagccaagagaagagagcagaaaatgcttttctgtagaatcccaagaggcataaaagaggatgagtaactgggtcctgtgccaagttcccaacccctaagccttcccaacatggagaaactacaccagtgtttaaaagtttctaggttggaggaacaaacttgagcatcaagggcagatgatttgttaacacagtcctgtgcagagggctccttcagaaggcatcccctgtgacccaaacacagtgagcaccttctactttctggccttatgccatcaatgcatccagctgcaatctatcctcaaacctggaatccatctcttgacttcccagccagaccaccttccatcccttcactgtgtcccaccctgcccagaatgcatgctgttctcccagagtctcatggaaataaggccttgcactgaaataggctgtgggaaacaaaaggataagcaggtctggaccagtctgtaatggtagcaggtgaaaacaacttacggaaaaacacatgaattcattaggaaataaggtgacagatccccagctgctgaagaactagaatgtctattacactcatacaattgatgttttattttaatacaccagagctaccacacaaaacttccttccatgtgaaaggctccagataaaattctgccatccctcctctcctcatgtcctcctgctcagacccaccttcatgcccctaaaccaatctgcatcatgcctgtttcagagagtcatgggaagatgggcagtgcctccattgtcaccattccccacacctctgcacacttctgccccttcccctctagacgccacaacttcacagtcttactgttgtaaatattcctgcacagttagtaatgatcaaatgatcctgtggtcagaggcctctttggcagtgtcttcttacccttaagaaaggtcatgaaatccagaaggggcaacctttccaggagagctttggagtcatttctgtgtgagacactattgcataatcctgtaagattgcttttatatttaaggaatgatgttacttaacaaatgaacaaaaaaaattgcaaataaattttttaacaatgttta

SEQ ID NO: 235753 - DNA, 702 bp, Artificial Sequence
  derived and/or modified sequence
agcaatcagcgagactccatgggcgtaggaccctccgagccaggtgcgggatataatcttgtggcgcgccgttttttaagcctgttggaagagcgcagtattcgggtgggagtgacccgattttccaggtgcgtccgtcacccctttctttgactcagaaagggaactccctgaccccttgagcttcccaagtgaggcaatgcctcaccctgctttggcttgcgcacggtgcgcgcacccactgacctgcgcccattgtctggcactccctagtgagatgaacccggtacctcagatggaaatgcagaaatcacccgtcttctgcgtcgctcacgctgggagctgtgcaccggagctgttcctatttggccatcttggctcctctccccttgttcctgattttaatgggactaccttggttatttcacagcacacttacggtgctttgtgaagtgcctgctatgttactatcatcatcttcctgacaagatgaagtaagacatatcaagatttaaaacataaatagcttggaacaccctgaagagcaacatgggagaaactgagaaaagaattgaaacccatagaataagatgtctttccaagttgaagatgtttctgttggcaataacatgtgcatttgtatccaaaacactgtctggatcttatatgaattccatgctcacacaaatagagagacaattc

SEQ ID NO: 235754 - DNA, 448 bp, Artificial Sequence
  derived and/or modified sequence
ttatttgatgtaccttttgaaatagaaaaccaacaactaaatcttctctaacaccatgattttctaatctgtattaaagcgttccagggtagaagtaagacatatcaagatttaaaacataaatagcttggaacaccctgaagagcaacatgggagaaactgagaaaagaattgaaacccatagaataagatgtctttccaagttgaagatgtttctgttggcaataacatgtgcatttgtatccaaaacactgtctggatcttatatgaattccatgctcacacaaatagagagacaattcaacatcccaacatctctagttggattcattaatggaagctttgagattggaaatcttttgttgattatatttgtgagttattttggaaccaaactgcatagacctataatgattggcattggatgtgtggttatgggcttaggctg

SEQ ID NO: 235755 - DNA, 580 bp, Artificial Sequence
  derived and/or modified sequence
gatgtaccttttgaaatagaaaaccaacaactaaatcttctctaacaccatgattttctaatctgtattaaagcgttccagaagtaagacatatcaagatttaaaacataaatagcttggaacaccctgaagagcaacatgggagaaactgagaaaagaattgaaacccatagaataagatgtctttccaagttgaagatgtttctgttggcaataacatgtgcatttgtatccaaaacactgtctggatcttatatgaattccatgctcacacaaatagagagacaattcaacatcccaacatctctagttggattcattaatggaagctttgagattggaaatcttttgttgattatatttgtgagttattttggaaccaaactgcatagacctataatgattggcattggatgtgtggttatgggcttaggctgtttcttaaaatcactacctcatttcctcatgaaccaatatgaatatgaatctacagtttcagtttcaggcaacttgtcctcaaacagtttcttgtgtatggaaaatggaacccagattttaagaccaacgcaggatccatcag

SEQ ID NO: 235756 - DNA, 562 bp, Artificial Sequence
  derived and/or modified sequence
gagactccgtgggcgtaggaccctcagagccagtgagatgaacccggtacctcagatggaaatgcagaaatcacccgtcttctgcgtcgctcacgctgggagctgtagaccggagctgttcctattcggccatcttgggggagctcgagattattaaccaaaaaatttcctgtccaaaagctgtgttctttagtgggaaagtcttgcagaactcccctctgaactaatactggaagcaaagaagtaagacatatcaagatttaaaacataaatagcttggaacaccctgaagagcaacatgggagaaactgagaaaagaattgaaacccatagaataagatgtctttccaagttgaagatgtttctgttggcaataacatgtgcatttgtatccaaaacactgtctggatcttatatgaattccatgctcacacaaatagagagacaattcaacatcccaacatctctagttggattcattaatggaagctttgagattggaaatcttttgttgattatatttgtgagttattttggaaccaaactgcatagacctataatg

SEQ ID NO: 235757 - DNA, 569 bp, Artificial Sequence
  derived and/or modified sequence
aagattataacctgctttatgcaaccatcagagccaaagaaacttaaccaaaggtttaaaacttacataaacaaagattcttttatttacaactctgcttctctgatgaacaagaagctgcagcttacacgtttgaggtgccttattcatactggctactcaatatgtaattttttaaaaaatctgttggtcttacagtatggaagcaaaaatgaatggtgatgttggtgaatgctaagaagtaagacatatcaagatttaaaacataaatagcttggaacaccctgaagagcaacatgggagaaactgagaaaagaattgaaacccatagaataagatgtctttccaagttgaagatgtttctgttggcaataacatgtgcatttgtatccaaaacactgtctggatcttatatgaattccatgctcacacaaatagagagacaattcaacatcccaacatctctagttggattcattaatggaagctttgagattggaaatcttttgttgattatatttgtgagttattttggaaccaaactgcatagacctataatgattggcatt

SEQ ID NO: 235758 - DNA, 7211 bp, Artificial Sequence
  derived and/or modified sequence
tttgaaatagaaaaccaacaactaaatcttctctaacaccatgattttctaatctgtattaaagcgttccaggtatttttgtaatgcaatggatttcaattatgttgttcattttcagcacttacttcaaaagaatgatgctttacaattttgtagttaatttaacatatttttttgtttgcttgaaagggtagaagtaagacatatcaagatttaaaacataaatagcttggaacaccctgaagagcaacatgggagaaactgagaaaagaattgaaacccatagaataagatgtctttccaagttgaagatgtttctgttggcaataacatgtgcatttgtatccaaaacactgtctggatcttatatgaattccatgctcacacaaatagagagacaattcaacatcccaacatctctagttggattcattaatggaagctttgagattggaaatcttttgttgattatatttgtgagttattttggaaccaaactgcatagacctataatgattggcattggatgtgtggttatgggcttaggctgtttcttaaaatcactacctcatttcctcatgaaccaatatgaatatgaatctacagtttcagtttcaggcaacttgtcctcaaacagtttcttgtgtatggaaaatggaacccagattttaagaccaacgcaggatccatcagagtgtacaaaggaagttaaatcattaatgtgggtgtacgtcctagtaggcaatattgtacgtggaatgggtgaaactcccatcctgcctttgggtatttcctatatagaagattttgccaaatttgaaaattctcctttatatattgggcttgtagaaacaggagctattattggtcctttgattggacttttgttggcatcattctgtgcaaatgtttatgttgacactggatttgtgaacacagatgatctgatcataactcccactgacactcgttgggtcggtgcatggtggtttggctttctgatttgtgcaggagttaacgtgctcactgccattccttttttctttttgcccaacacacttccaaaggaaggactagagactaatgctgacatcattaaaaatgaaaatgaagacaaacaaaaagaagaggtcaagaaggaaaaatatggaatcactaaagattttctacctttcatgaaaagtctttcctgcaatccaatttatatgcttttcatacttgtaagtgtgatacagttcaatgcattcgttaacatgatctccttcatgcctaaatacctagaacagcaatatggaatatcatcttcagatgcaatctttctaatgggtatttataacttacctccaatatgtattggatatataattggtggtttaattatgaagaagttcaagattactgtcaaacaagctgcccacataggatgttggttatccttacttgagtatcttctctattttttatcttttctcatgacttgtgaaaattcttcagttgttggaataaatacctcttatgaaggaattccacaagatttatatgtggaaaatgacatctttgctgattgcaatgtggattgcaactgtccatctaaaatatgggatcctgtgtgtggaaacaatggcttgtcatatctgtcagcttgtcttgctggttgtgagacatccattggaacgggaataaacatggtgttccaaaattgcagctgtattcaaacatcaggaaattcatctgcagttcttgggctgtgcgacaaaggacctgactgttccttgatgctccagtacttcctaatcttgtcagcgatgagcagtttcatttattctttggctgccatacctggatatatggttctcttgaggtgtatgaaatctgaagagaagtcccttggtgtgggattacatacattttgcacaagagtatttgctggcattcctgcacctatatattttggcgctttaatggattccacatgtttacactggggaactttgaaatgtggtgagtcaggggcatgcaggatatatgattccaccaccttcagatacatctacctcggattgccggcagcactaagaggatcaagctttgttccagccttaatcatcttaattcttttgaggaagtgtcatctacctggtgaaaatgcctcttcaggaacagagcttatagagacaaaagtcaaagggaaggaaaatgagtgcaaagatatataccaaaagtccacggttttgaaagatgatgaattgaaaactaaattgtaattgtcctattatattacttttttcagaattagagaacatgctgtacaacttaattgttttaaaaatcagtagagatataatagataactttttcttgtctttaagaacctaaaaaacctcttaactcaaaataataaaatgttcactaatgatatttctaaggtatcagtgacacttgagttttcctaggagggacatcaataacagccccctaaagaagattcttagagccagctttatttttatgttgaaacagcaatttcccttaattcatcgaagtaagggtgtacttcctacatctccttctactaatacttctaaaaattttctgttatgaaaacctatttaattccactaaatttgttctttgatattggaattattcagatgcctaaattctcattctgttatgtgaagatttaaatattttattcaagtttatcgcttccatgtgagagaagcctacatcttcttattctatttaggaatcgttctttaactcttcttattcattctaggcatgactcctatataatagattactcataaatataccctcctactttcaattttttcttttctttattactcatacatttgctcaatttgtacagaatactgacaaacttaagcaggttattaaacatcatgaggcaaagattgttggattttttttcagtaattcaaatccagtgactaaagtttttcttacaaacaagtgtctgaatcaaaggatgaaaggacaatattataaaaactccagttcttaaaggctgtttgtaatgtcagatattgtcaaagaaccactttctaagattcaggactctttagaccgatgtttatatcacccattgtgtcctaaggtagaacacaaacactaattttcccaaaataatcttagacaatagcttctgttatgaaacagaggttagtaaaggctaaggtacatattaaaagctaaatctacttatattattattttgtaaattatggataaaattaaaaattgaaggattttagacatagaagaggacttattgattaatatagggcttctggtaaaagagaatagaatgaacagacaaatacctgtttgtctactccttactctccttcctgttgaaatgacagtcaatatataagaatgacataaatccctaatggatgaagagaatggagtaaggaagggtgggagaagtgggtgtcaatacactatggttatttatgtgtactataaatggagtgagagtgtctgcagggatacaacagagtggaggaagctgaaatacagaatatacctagaaggagcctggaatggaagtgtgaaactgagttgccagttcaaagtgtgagttggtagctggacagaaagcaggccagttaactgaaggactttgtacagatgctttacaggttaatatgatttcctaaatgatcagatgcatcatatgaaaaaagaaagcaaatgagaagagaaaggctgtatagaacaggtttagggggaaggatgaaaagttaagtttcagtttcatgaagtttgagacttcaactctgggcatataaaaaataaccaaggttcaaaccaagactggctttgaaacaagagagaggaactaaaatcattggaaagggggagtttaactttgatgtaggtatgactgcagcagtgagatatcgtattaagatctgatgacatgaaatttggagccacttcctttgtggtgggaggaagtgaggagaatggcctggaaactaaaacaaggagaagagacttacctatattcacagagcagcaagaaaaagtaaacagccactgcatgagaaggtttcaggggaatcagattttgctgagtgtgcgatggtgaagagaatgctcatttctgaactggaatctgagctaaaaagaagcaaataggatatatatggaagttagacttatggaaattagaagaaggggaatgagagatagtttggaattctgtggctatttaggtgactgacataaatgggggcagaggacataatgaggttagttcttacggattcaaggcagatagtgttggtgaaacagtgagtgtcaaaattaggcgaggtggtgactgggctccctgatgacctcttgtcgtggagcaaaactgaataagcaaaaacttactcaagctcctgaggcccattcatcatccctattgatagatttgaggtgatctgagaaagctgagtcttgctttgtggacaattcacccacttgaactccctcaatggagcatcataggcccagagagacatggctatggacttagtaccttggcatcacttttatcccctcatggaggagatggcattttactctgaaaacatagggttctcctttgacacttcttggtgggagaaagcaggtcagagaaagtgggtgttggagtgctttgggatccctcatgacctcttttgttggtatacatgaagcctgggagtttagttcttattctgagcacttgtactactctcatgagggtagagataatggcatagcggacagacatggagaagagaaacaagagaacaggtagtgagaagtcgagagtcagtaattttcttacttaatattgtggggatcttacttaatacataaagttaatgaaactagaaatagtggtttaatatattacttataattcaaaaattaacctatatttacagatgcttacacagtttctttgtgaatccacctatggttttattttaattaattttttattgcaaagcaatgaaatgttgctttgtggagccagatagcattacagcaggtaaatgggtttctgctagatctccacattattggggagatgctcgaagacctcagaatatacacacccttaaggttcaagggctggggttgagctctccataaggaacttttcctcctcccagaagggcgatcattgtgtatatagacatggagacagaaccagaatgacttctgtgggtggaaatagtgccatcagaatcatttattattatgaaataaatattatttatctacattgaaaaaatactactcctcctaaaatcattaacttttcctcagatgattttaagaaatttgagtaatagcacacgaagtggtaaagacccttagtctttctggtatattagaaaagccttttaatcagtctctggaaggacactagggattgcagctgaataaatatattaagaataacaaatcagttcaacaaggagtagagtctgaagtgggattttccgtggaaattctcttatgtctgtactaacaataagaaagacaagacaaagactaagtaattaaagaaaagctcgaaatgttttgtaaccaaaagcttgaaatgttatgtaaccagaatgttatgtaaccagagctgttagatcagatactggctgattcataggtgaacgtcctctttgtgggtcctctcatgcatccccattttcagaatgtaaataatttggctttgtagcccttccaaaaagggtactatcccacttctcctggcataaatcatacattgactgaacgttcaccatctaaaaatcactcatgctccttgaaccaaggtgattatcagagacagctcctggtagaagaggttgtagatgttaaaagagtatgatttctatataagaaaatatagaaattgacagaatggttcttatttactgggcctggagaattcctgttctggcattcttagatccctcaaatttattaccaaggggaaaaggaaaaagaggcaagtaggcagtagggtaagctgttgtttgcttgccaaggaactggagagtgcaggtttcaagacaccttgaggaaattctcctgagcccttagccaagagaagagagcagaaaatgcttttctgtagaatcccaagaggcataaaagaggatgagtaactgggtcctgtgccaagttcccaacccctaagccttcccaacatggagaaactacaccagtgtttaaaagtttctaggttggaggaacaaacttgagcatcaagggcagatgatttgttaacacagtcctgtgcagagggctccttcagaaggcatcccctgtgacccaaacacagtgagcaccttctactttctggccttatgccatcaatgcatccagctgcaatctatcctcaaacctggaatccatctcttgacttcccagccagaccaccttccatcccttcactgtgtcccaccctgcccagaatgcatgctgttctcccagagtctcatggaaataaggccttgcactgaaataggctgtgggaaacaaaaggataagcaggtctggaccagtctgtaatggtagcaggtgaaaacaacttacggaaaaacacatgaattcattaggaaataaggtgacagatccccagctgctgaagaactagaatgtctattacactcatacaattgatgttttattttaatacaccagagctaccacacaaaacttccttccatgtgaaaggctccagataaaattctgccatccctcctctcctcatgtcctcctgctcagacccaccttcatgcccctaaaccaatctgcatcatgcctgtttcagagagtcatgggaagatgggcagtgcctccattgtcaccattccccacacctctgcacacttctgccccttcccctctagacgccacaacttcacagtcttactgttgtaaatattcctgcacagttagtaatgatcaaatgatcctgtggtcagaggcctctttggcagtgtcttcttacccttaagaaaggtcatgaaatccagaaggggcaacctttccaggagagctttggagtcatttctgtgtgagacactattgcataatcctgtaagattgcttttatatttaaggaatgatgttacttaacaaatgaacaaaaaaaattgcaaataaattttttaacaatgttt

SEQ ID NO: 235759 - DNA, 717 bp, Artificial Sequence
  derived and/or modified sequence
gttcccaagattataacctgctttatgcaaccatcagagccaaagaaacttaaccaaaggtttaaaacttacataaacaaagattcttttatttacaactctgcttctctgatgaacaagaagctgcagcttacacgtttgaggtgccttattcatactggctactcaatatgtaattttttaaaaaatctgttggtcttacagtatggaagcaaaaatgaatggtgatgttggtgaatgctaagggtagaagtaagacatatcaagatttaaaacataaatagcttggaacaccctgaagagcaacatgggagaaactgagaaaagaattgaaacccatagaataagatgtctttccaagttgaagatgtttctgttggcaataacatgtgcatttgtatccaaaacactgtctggatcttatatgaattccatgctcacacaaatagagagacaattcaacatcccaacatctctagttggattcattaatggaagctttgagattggaaatcttttgttgattatatttgtgagttattttggaaccaaactgcatagacctataatgattggcattggatgtgtggttatgggcttaggctgtttcttaaaatcactacctcatttcctcatgaaccaatatgaatatgaatctacagtttcagtttcaggcaacttgtcctcaaacagtttcttgtgtatggaaaatggaac

SEQ ID NO: 235760 - DNA, 2008 bp, Artificial Sequence
  derived and/or modified sequence
cttttgaaatagaaaaccaacaactaaatcttctctaacaccatgattttctaatctgtattaaagcgttccagggtagaagtaagacatatcaagatttaaaacataaatagcttggaacaccctgaagagcaacatgggagaaactgagaaaagaattgaaacccatagaataagatgtctttccaagttgaagatatgaatatgaatctacagtttcagtttcaggcaacttgtcctcaaacagtttcttgtgtatggaaaatggaacccagattttaagaccaacgcaggatccatcagagtgtacaaaggaagttaaatcattaatgtgggtgtacgtcctagtaggcaatattgtacgtggaatgggtgaaactcccatcctgcctttgggtatttcctatatagaagattttgccaaatttgaaaattctcctttatatattgggcttgtagaaacaggagctattattggtcctttgattggacttttgttggcatcattctgtgcaaatgtttatgttgacactggatttgtgaacacagatgatctgatcataactcccactgacactcgttgggtcggtgcatggtggtttggctttctgatttgtgcaggagttaacgtgctcactgccattccttttttctttttgcccaacacacttccaaaggaaggactagagactaatgctgacatcattaaaaatgaaaatgaagacaaacaaaaagaagaggtcaagaaggaaaaatatggaatcactaaagattttctacctttcatgaaaagtctttcctgcaatccaatttatatgcttttcatacttgtaagtgtgatacagttcaatgcattcgttaacatgatctccttcatgcctaaatacctagaacagcaatatggaatatcatcttcagatgcaatctttctaatgggtatttataacttacctccaatatgtattggatatataattggtggtttaattatgaagaagttcaagattactgtcaaacaagctgcccacataggatgttggttatccttacttgagtatcttctctattttttatcttttctcatgacttgtgaaaattcttcagttgttggaataaatacctcttatgaaggaattccacaagatttatatgtggaaaatgacatctttgctgattgcaatgtggattgcaactgtccatctaaaatatgggatcctgtgtgtggaaacaatggcttgtcatatctgtcagcttgtcttgctggttgtgagacatccattggaacgggaataaacatggtgttccaaaattgcagctgtattcaaacatcaggaaattcatctgcagttcttgggctgtgcgacaaaggacctgactgttccttgatgctccagtacttcctaatcttgtcagcgatgagcagtttcatttattctttggctgccatacctggatatatggttctcttgaggtgtatgaaatctgaagagaagtcccttggtgtgggattacatacattttgcacaagagtatttgctggcattcctgcacctatatattttggcgctttaatggattccacatgtttacactggggaactttgaaatgtggtgagtcaggggcatgcaggatatatgattccaccaccttcagatacatctacctcggattgccggcagcactaagaggatcaagctttgttccagccttaatcatcttaattcttttgaggaagtgtcatctacctggtgaaaatgcctcttcaggaacagagcttatagagacaaaagtcaaagggaaggaaaatgagtgcaaagatatataccaaaagtccacggttttgaaagatgatgaattgaaaactaaattgtaattgtcctattatattacttttttcagaattagagaacatgctgtacaacttaattgttttaaaaatcagtagagatataatagataactttttcttgtctttaagaacctaaaaaacctcttaactcaaaataa

SEQ ID NO: 235761 - DNA, 2382 bp, Artificial Sequence
  derived and/or modified sequence
gtcacccctttctttgactcagaaagggaactccctgaccccttgagcttcccaagtgaggcaatgcctcaccctgctttggcttgcgcacggtgcgcgcacccactgacctgcgcccattgtctggcactccctagtgagatgaacccggtacctcagatggaaatgcagaaatcacccgtcttctgcgtcgctcacgctgggagctgtgcaccggagctgttcctatttggccatcttggctcctctccccttgttcctgattttaatgggactaccttggttatttcacagcacacttacggtgctttgtgaagtgcctgctatgttactatcatcatcttcctgacaagatgaagtaagacatatcaagatttaaaacataaatagcttggaacaccctgaagagcaacatgggagaaactgagaaaagaattgaaacccatagaataagatgtctttccaagttgaagatgtttctgttggcaataacatgtgcatttgtatccaaaacactgtctggatcttatatgaattccatgctcacacaaatagagagacaattcaacatcccaacatctctagttggattcattaatggaagctttgagattgatatgaatatgaatctacagtttcagtttcaggcaacttgtcctcaaacagtttcttgtgtatggaaaatggaacccagattttaagaccaacgcaggatccatcagagtgtacaaaggaagttaaatcattaatgtgggtgtacgtcctagtaggcaatattgtacgtggaatgggtgaaactcccatcctgcctttgggtatttcctatatagaagattttgccaaatttgaaaattctcctttatatattgggcttgtagaaacaggagctattattggtcctttgattggacttttgttggcatcattctgtgcaaatgtttatgttgacactggatttgtgaacacagatgatctgatcataactcccactgacactcgttgggtcggtgcatggtggtttggctttctgatttgtgcaggagttaacgtgctcactgccattccttttttctttttgcccaacacacttccaaaggaaggactagagactaatgctgacatcattaaaaatgaaaatgaagacaaacaaaaagaagaggtcaagaaggaaaaatatggaatcactaaagattttctacctttcatgaaaagtctttcctgcaatccaatttatatgcttttcatacttgtaagtgtgatacagttcaatgcattcgttaacatgatctccttcatgcctaaatacctagaacagcaatatggaatatcatcttcagatgcaatctttctaatgggtatttataacttacctccaatatgtattggatatataattggtggtttaattatgaagaagttcaagattactgtcaaacaagctgcccacataggatgttggttatccttacttgagtatcttctctattttttatcttttctcatgacttgtgaaaattcttcagttgttggaataaatacctcttatgaaggaattccacaagatttatatgtggaaaatgacatctttgctgattgcaatgtggattgcaactgtccatctaaaatatgggatcctgtgtgtggaaacaatggcttgtcatatctgtcagcttgtcttgctggttgtgagacatccattggaacgggaataaacatggtgttccaaaattgcagctgtattcaaacatcaggaaattcatctgcagttcttgggctgtgcgacaaaggacctgactgttccttgatgctccagtacttcctaatcttgtcagcgatgagcagtttcatttattctttggctgccatacctggatatatggttctcttgaggtgtatgaaatctgaagagaagtcccttggtgtgggattacatacattttgcacaagagtatttgctggcattcctgcacctatatattttggcgctttaatggattccacatgtttacactggggaactttgaaatgtggtgagtcaggggcatgcaggatatatgattccaccaccttcagatacatctacctcggattgccggcagcactaagaggatcaagctttgttccagccttaatcatcttaattcttttgaggaagtgtcatctacctggtgaaaatgcctcttcaggaacagagcttatagagacaaaagtcaaagggaaggaaaatgagtgcaaagatatataccaaaagtccacggttttgaaagatgatgaattgaaaactaaattgtaattgtcctattatattacttttttcagaattagagaacatgctgtacaacttaattgttttaaaaatcagtagagatataatagataact

SEQ ID NO: 235762 - DNA, 204 bp, Artificial Sequence
  derived and/or modified sequence
atgtttcatttgtgtaaactcaatcccagctacctgaaaattacatgcggaaagcggtctaagcagatcactccgacatactaccctagtcgcttgccacccgtgaaacggaaatttagtgtttacgacgccaagctgaccattgtgcacttatctactttttctatcgaggatttcccgctctatctctccatggccggctag

SEQ ID NO: 235763 - DNA, 204 bp, Artificial Sequence
  derived and/or modified sequence
atgttccacctctgcaaactgaacccaagctacctgaaaataacctgcggaaaaaggtccaaacaaatcacacccacatattacccaagcagactgcctcctgtaaagcgtaaattttcggtctacgatgctaaactcaccattgtccatctgtctacgttttccattgaagatttccccctatacctttctatggcagggtag

SEQ ID NO: 235764 - protein, 698 aa, Artificial Sequence
  derived and/or modified sequence
MQNSEGGADSPASVALRPSAAAPPVPASPQRVLVQAASSNPKGAQMQPISLPRVQQVPQQVQPVQHVYPAQVQYVEGGDAVYTNGAIRTAYTYNPEPQMYAPSSTASYFEAPGGAQVTVAASSPPAVPSHSMVGITMDVGGSPIVSSAGAYLIHGGMDSTRHSLAHTSRSSPATLQWLLDNYETAEGVSLPRSSLYNHYLRHCQEHKLDPVNAASFGKLIRSVFMGLRTRRLGTRGNSKYHYYGIRLKPDSPLNRLQEDTQYMAMRQQPMHQKPRYRPAQKTDSLGDSGSHSGLHSTPEQTMAVQSQHHQQYIDVSHVFPEFPAPDLGSFLLQDGVTLHDVKALQLVYRRHCEATVDVVMNLQFHYIEKLWLSFWNSKASSSDGPTSLPASDEDPEGAVLPKDKLISLCQCDPILRWMRSCDHILYQALVEILIPDVLRPVPSTLTQAIRNFAKSLEGWLTNAMSDFPQQVIQTKVGVVSAFAQTLRRYTSLNHLAQAARAVLQNTSQINQMLSDLNRVDFANVQEQASWVCQCEESVVQRLEQDFKLTLQQQSSLDQWASWLDSVVTQVLKQHAGSPSFPKAARQFLLKWSFYSSMVIRDLTLRSAASFGSFHLIRLLYDEYMFYLVEHRVAEATGETPIAVMGEFNDLASLSLTLLDKDDMGDEQRGSEAGPDARSLGEPLVKRERSDPNHSLQGI

SEQ ID NO: 235765 - DNA, 2097 bp, Artificial Sequence
  derived and/or modified sequence
atgcaaaacagcgaagggggcgccgattcccctgccagcgtggctctgcgcccttcagcagctgctccgcccgtccccgctagcccacaacgggtgctggtgcaggctgcttcatctaatcccaaaggagcccagatgcagccgatatctctccccagggtccagcaggtgccccagcaggtacagcctgtgcagcacgtctacccagcccaggtacagtatgtggaaggtggggacgctgtgtacactaacggcgcaatccgaacagcatacacttataaccccgagccgcaaatgtacgctccctccagcacggctagctacttcgaagctccaggtggcgctcaagtcacagtcgccgcgtcgtctccacccgccgtaccatcccatagcatggttgggatcaccatggatgttggcggtagtcccatcgtgtctagcgccggagcctacctcatacacgggggtatggactcaactcggcactctttggctcacacctctagatcatcaccggcaacacttcagtggctgttagataactacgaaactgccgaaggcgtctccctgcccagatcctccctatataatcactacctgagacattgccaggaacataagctggatccagtcaatgccgccagctttgggaagttgatcagatcagtgttcatgggcctcagaacaagacggcttggaacgcgtgggaattctaagtaccactactacggcatcagacttaagcctgattcccctctgaatcgcctgcaagaagacacgcagtacatggccatgaggcagcagcctatgcatcagaagccaaggtatagacccgctcagaagacagattccctcggggactctgggagccactctgggcttcattcaactccagagcaaactatggcagttcagtcacagcatcaccaacagtatattgacgtcagccacgtcttcccggagtttcctgctcctgatctcgggagttttctacttcaggatggcgtgactctccacgacgtgaaggcactgcagttggtgtatcgccgtcactgtgaggcaaccgtcgatgtggtcatgaacctgcaattccactatattgaaaagctgtggctgagcttctggaattcaaaagcctccagcagtgacgggcccaccagcctccctgcttctgacgaagatccagaaggagcagtcctccccaaggacaaactaatctccctgtgtcagtgcgacccaattctgaggtggatgagatcatgcgaccacatcttataccaagctttggtggagattctgatcccagatgtcctgaggccggtcccgtctactcttacccaagccattaggaattttgcaaagtcgctggaaggatggctgaccaacgctatgagcgattttcctcaacaagttatccagacaaaggtgggcgtggtatctgccttcgcccagactttacggcggtacacttccttaaatcacctcgcccaagctgccagggcggtcctgcagaatacctcccaaattaaccagatgctctctgacctcaaccgtgtggacttcgcaaacgtccaagaacaggcttcctgggtctgccagtgtgaagaaagcgtggtgcagcggctcgaacaggatttcaagctaacactgcagcagcaatccagcctagaccaatgggcctcgtggctggactctgtggttacacaggtgctgaagcagcatgctgggagtccttcttttccaaaggcagcacggcaatttttgttgaagtggtcattttatagcagtatggttatccgtgacctgacactgaggagtgccgctagtttcggatcatttcatcttatcagactgttgtatgacgagtacatgttttatctggtagagcaccgggtggctgaagccaccggtgagacaccgatcgccgttatgggtgaattcaatgacctcgcatctctcagcctgactttactagataaggacgacatgggtgatgagcagcgaggctcagaagccggacccgacgcccggagccttggggaaccgttggtgaagagagagagatccgacccaaaccactccctgcagggcatctag

SEQ ID NO: 235766 - DNA, 2097 bp, Artificial Sequence
  derived and/or modified sequence
atgcagaactccgaaggtggggccgactctcccgcctccgtcgcccttcgaccttccgccgctgcgccccccgtccctgccagcccgcaaagagtccttgtccaggccgcctcaagtaaccctaagggggcccaaatgcaaccaatctctctccccagggtgcagcaagtgccgcagcaggtccagccagtgcaacatgtttatcccgctcaagtacaatatgtggaggggggagatgccgtgtacaccaacggggccatccggaccgcatacacatacaacccagagccacaaatgtacgctccctcctccaccgcctcttactttgaggcaccgggaggagctcaagtcaccgtagccgcctcctccccccctgccgtaccctcccattccatggttggcataacaatggacgtcggcggctcccccatagtatcttcagcaggagcatatctgatccatggaggaatggactcaacacggcactccctggctcacacctcacgcagtagcccagcaactttgcaatggctcttggataactatgagactgccgagggcgtgagcctgccacgcagcagcctttacaatcactacctgagacactgccaggaacataaacttgaccctgtgaatgcagcaagcttcggaaaattgatcaggagtgtgtttatgggactcaggaccagaaggcttggcacacgcgggaactctaagtaccactattatggaatacggttgaagcctgatagcccattgaaccgtctgcaggaggacacacagtacatggcgatgcgccagcagccaatgcaccagaagccccggtatcggcccgctcagaaaacggactctcttggggactccggatcacatagcggactccattcgacaccagagcagaccatggctgtccagagtcagcaccatcagcagtatatagacgtgtcccacgtgttcccggagttccccgcgcccgatttgggatcgttcctgctccaggacggggtcacgctgcacgatgtgaaggctctgcagcttgtttataggagacactgtgaagccacagtagacgttgtcatgaatctccagttccattatatcgagaaactttggttgtccttttggaattctaaggcaagcagctctgatgggcccacttcgctcccggcctccgatgaggaccccgagggtgctgtgctgccaaaagacaaactgatctcactttgccagtgcgacccgatcctacggtggatgcgatcttgtgatcatattctgtatcaggccttggtggaaatcctgattcccgacgtactgaggcccgtgccttccactctcactcaggccattcgcaacttcgccaaatcattggaagggtggctcaccaatgctatgagcgacttcccccagcaggtgattcagacaaaggttggtgtggtgtctgcttttgctcagaccctgcgccgttatactagtcttaaccacttggctcaagcagctagggccgtgctccagaatacctcacagattaaccagatgctatcagatctgaaccgcgtagatttcgcaaatgtacaggagcaagcttcctgggtttgccagtgcgaagagagtgtggttcagcggctggagcaggactttaagctgaccctccagcaacagtcgtcccttgaccaatgggcctcatggcttgactccgttgtgactcaggtgctgaagcaacatgccggcagtccatccttccccaaggctgctcgacaatttctgctgaagtggtctttttacagtagtatggttatccgggatttaaccctgagaagtgccgcttcttttgggtctttccacctgatccgcctgctgtatgacgaatacatgttctatttagtggagcacagggtggccgaggcaacaggagagacccccatcgctgtgatgggcgaatttaacgatctcgcttctctttctctgactctgttggataaagatgatatgggagacgagcaacgcggaagcgaagctggcccagatgctagatcactcggtgagccattagtgaagagggagagatctgaccctaatcacagtctccaggggatttag

SEQ ID NO: 235767 - DNA, 2097 bp, Artificial Sequence
  derived and/or modified sequence
atgcagaacagcgagggcggcgctgacagccctgcctctgtggccctgcggcccagcgctgctgcccctcctgtgcctgccagcccccagagggtgctggtgcaggccgccagcagcaaccccaagggggcccagatgcagcccatcagcctgccccgggtgcagcaggtgccccagcaggtgcagcctgtgcagcacgtgtacccagcccaggtgcagtatgtggagggcggagatgctgtgtacaccaacggggccatcagaacagcctacacctacaaccctgagccccagatgtatgcccccagcagcacagccagctactttgaggcccctgggggcgcccaggtgacagtggccgccagcagccccccagctgtgcccagccacagcatggtgggcatcaccatggatgtgggcggcagccccatcgtgtcctctgctggggcctacctgatccacggcggcatggacagcaccaggcacagcctggcccacaccagccgcagcagccctgccaccctgcagtggctgctggacaactatgaaacagctgagggcgtgtccctgcccaggagcagcctgtacaaccactacctgcggcactgccaggagcacaagctggaccctgtgaatgctgccagctttgggaagctgatccgcagcgtcttcatgggcctgcggacccggcggctgggcacccggggcaacagcaagtaccactactacggcatccggctgaagccagacagccccctgaaccggctgcaggaggacacccagtacatggccatgaggcagcagcccatgcaccagaagccccgctacagacctgcccagaagacagacagcctgggggacagcggcagccacagcggcctgcacagcaccccagagcagaccatggctgtgcagagccagcaccaccagcagtacattgatgtgagccacgtgtttcctgagttccctgccccagacctgggcagcttcctgctgcaggatggagtgaccctgcatgatgtgaaggccctgcagctggtgtacagaagacactgtgaggccaccgtggatgtggtgatgaacctgcagttccactacatcgagaagctgtggctgtccttctggaacagcaaggccagcagcagtgatggccccaccagcctgcctgccagtgatgaagatcctgagggcgctgtgctgcccaaggacaagctgatcagcctgtgccagtgtgaccccatcctgcgctggatgaggagctgtgaccacatcctgtaccaggccctggtggagatcctgatcccagatgtgctgcggcctgtgcccagcaccctgacccaggccatccggaactttgccaagagcctggagggctggctgaccaatgccatgtctgacttcccccagcaggtgatccagaccaaggtgggcgtggtgtctgcctttgcccagaccctgcggcgctacaccagcctgaaccacctggcccaggccgcccgggctgtgctgcagaacaccagccagatcaaccagatgctgagtgacctgaacagagtggactttgccaacgtgcaggagcaggcctcctgggtgtgccagtgtgaggagagcgtggtgcagaggctggagcaggacttcaagctgaccctgcagcagcagagcagcctggaccagtgggcctcctggctggacagcgtggtgacccaggtgctgaagcagcacgccggcagccccagcttccccaaggccgcccggcagttcctgctgaagtggagcttctacagctccatggtgatccgggacctgaccctgcggtctgctgccagctttggcagcttccacctgatccggctgctgtatgatgagtacatgttctacctggtggagcaccgggtggccgaggccaccggggagacccccatcgctgtgatgggagagttcaatgacctggccagcctgagcctgaccctgctggacaaggatgacatgggagatgagcagaggggcagcgaggccggcccagatgcccggagcctgggggagcccctggtgaagcgggagaggagtgaccccaaccacagcctgcagggcatctag

SEQ ID NO: 235768 - DNA, 2097 bp, Artificial Sequence
  derived and/or modified sequence
atgcagaacagcgagggcggcgccgacagccccgccagcgtggccctcagaccctccgccgctgccccccctgtccctgcttcaccacagcgggtgctggtgcaagcagcctcatcgaaccctaagggagctcaaatgcagcctatttctctccctcgagtgcagcaggtccctcaacaggtgcagccagtccagcatgtgtatccagctcaggtgcaatacgtggaagggggcgatgcagtctacacaaacggggcaataaggaccgcgtatacctataaccccgaacctcagatgtatgccccaagcagcacagcgagctattttgaggcaccgggaggagctcaggtgacagtcgcggcctctagcccccccgccgtgcccagccatagcatggtcggaatcacaatggatgtgggcgggagccctattgtaagttccgctggcgcctatcttatccacgggggaatggattcgacgaggcatagccttgcccatacttccagatcttcccctgccaccctgcagtggctcctagacaactacgagaccgcagagggagtaagcctcccgcgttcaagcctctataaccactatctgcggcattgccaggaacataagctcgatccagtcaacgcggccagctttggcaaactcatccgtagtgtattcatgggcttgaggactcgccgcctggggacccggggaaacagcaaataccactattacggcatccggttaaagccggatagcccgttaaataggctgcaggaggacactcagtacatggccatgcgccagcaacctatgcatcagaagccaagataccggccggcccagaaaacggattccttaggggattccgggagccactcggggctgcattccacaccggagcaaaccatggccgttcaatcgcagcaccaccagcagtacatcgatgtgtcccatgtctttccggaattcccagcgcccgatttaggctccttcctcctgcaggacggggtgacactccatgacgtgaaagcactgcagctggtataccggcggcactgcgaagcgaccgtcgacgtagtgatgaacctgcagtttcattacattgagaagttgtggctcagtttttggaattctaaagctagcagtagcgacggacctaccagtcttccggctagtgacgaggatcctgaaggcgcagtgctgccaaaagataagctgatctctctttgtcagtgcgaccctattcttaggtggatgagatcatgcgatcacattctctaccaggcacttgtcgagatcttgatcccagatgtcctgagacccgtgccctctacattaactcaggctatacgcaatttcgcaaaatccctcgaaggctggctgactaacgccatgtccgattttccgcaacaggtgatacaaactaaagtgggagtagtcagtgctttcgcgcagaccctcaggcggtacacaagcctcaaccacctggctcaggcggcacgcgccgtgttgcagaatacttcccagattaatcaaatgctttccgatctcaatcgcgtggattttgcaaatgttcaggagcaagcttcttgggtctgccaatgtgaggagtccgtagtgcagaggcttgaacaggattttaaactcaccttacaacagcagtcttcccttgatcaatgggcctcttggttggacagtgtggttacacaagtcttgaagcagcatgccggatctccctcgtttccaaaggccgcacggcagttccttctgaaatggtctttttactcctccatggtgattcgcgatctgaccctgcggtccgctgcgtcgttcggctcatttcacctcatccgcctgctctatgacgaatacatgttttatcttgtagagcacagggtggccgaggccacgggggaaactcctattgccgttatgggcgaatttaacgaccttgcctcattaagtcttacgctcctcgacaaggatgacatgggcgatgagcaacgcggctccgaagctgggcccgacgccaggagtctcggggaaccacttgtcaaacgtgagagaagcgatccaaatcattctctgcaagggatctag

SEQ ID NO: 235769 - DNA, 2097 bp, Artificial Sequence
  derived and/or modified sequence
atgcagaacagcgagggcggcgccgacagccccgccagcgtggccctgcgcccctccgcagccgctccacctgtccccgcgtcaccacagcgggtgctagtgcaagccgctagcagcaatcccaaaggagcgcaaatgcagcccatttccctgccaagagttcagcaggtacctcaacaggtgcaacctgtgcagcatgtctacccagctcaggtgcagtatgtcgagggcggcgatgctgtgtatacgaatggggcgattagaactgcgtatacttataaccccgaaccccaaatgtatgctccaagttctacggctagttactttgaggctcccggcggcgcacaagtgacggtagccgccagttcccctcccgcggtcccctcgcactcaatggtgggaataacaatggacgttggaggtagccccattgtgtcctcggccggcgcctaccttatccatggcggcatggacagtacacgtcattccctcgcacacacctccagatcctcccctgccacacttcagtggcttttggacaactatgaaaccgccgaaggggtcagtctcccacggtcttccctgtacaaccattatctgcggcattgccaggagcataagctggaccctgtcaacgctgcttcattcggcaagctaattcggagcgtcttcatgggtcttcgcacccgaaggctgggtacccgaggaaatagtaagtaccactattatggtattaggcttaagccagacagtccccttaacaggctgcaagaagatactcagtacatggctatgcgtcagcaacccatgcaccagaaacctagatacagacccgcacagaaaacagattcactgggggattccggcagccactctggcctgcacagcaccccggagcagacgatggccgtccagtctcagcaccaccagcagtacatcgacgtaagtcacgtttttccagagtttcctgcccctgatcttggcagtttcctgttgcaagatggcgtgactctgcacgatgtgaaggctcttcagctggtgtatcgtaggcattgcgaggccactgtcgatgtcgttatgaacctgcagtttcattatattgagaaactgtggctgagcttctggaactctaaggccagcagctctgatggacctacttccctgccggcaagtgacgaggatccggagggtgccgtgctgcccaaggataagctgatctccctgtgtcagtgtgaccccatcctgcggtggatgaggagctgtgaccacatcttatatcaggcgctggtggagattctcatccccgatgtgctacggcccgtcccctctaccttaactcaggccatccggaacttcgctaaatctcttgaaggatggttaacaaacgcaatgtctgatttccctcagcaagtcatccaaacaaaggtgggagtggtgtccgcctttgcgcagaccttgcgtaggtatacatccttgaaccatctggcccaagcagcgcgagccgtcctccaaaacacgtcccagattaatcagatgcttagcgatctaaatcgcgtggacttcgccaatgtgcaggaacaggcgtcttgggtgtgccagtgtgaggaaagcgtggtacaaaggctcgaacaagactttaagctcaccctccaacagcaaagctctcttgatcaatgggcctcttggttagattctgtcgtgactcaggtcctgaaacagcatgccggttctccaagttttcctaaagctgcaaggcaattcttgctcaagtggagcttttattcttctatggtgatccgcgatctcaccctgcggtccgccgcctcttttgggtccttccatctgatcagactgctatacgatgaatacatgttttatttggtggaacacagggtcgccgaggcaaccggggagactccaatagcagtgatgggcgaattcaatgatctcgcatccctctcactgacactgctcgataaggacgatatgggagacgagcagaggggaagcgaagccggtcccgacgcgcggtctctcggcgagcccctagtaaagcgagagcgatccgaccctaaccacagcctgcagggcatttag

SEQ ID NO: 235770 - DNA, 2097 bp, Artificial Sequence
  derived and/or modified sequence
atgcagaactcagagggtggagccgacagtcccgcatctgtagcccttcggccaagcgccgcagctccccctgtgcctgcctccccacagcgcgtattagttcaggcagcgtcctcaaacccaaagggggctcagatgcagccaatctccctcccacgggtgcagcaggtcccacagcaggttcagcccgtgcaacacgtctatcccgctcaagtccagtatgtcgaaggaggggacgcagtctatactaatggagctattaggacagcctatacctataatcccgaaccccaaatgtacgcaccttcttcgacagcttcttatttcgaggccccaggcggtgctcaggtcaccgtcgcagcgtccagccccccagcagtgcccagtcactctatggtcggaattacaatggatgtcgggggaagccctattgtttcctctgccggagcctacctgatccacgggggtatggatagtacacgtcatagcctggctcacacctcccgatcctctccggctaccctgcagtggctcctagacaactacgagactgccgaaggcgtgagcctcccccgtagttctttgtacaaccactatctacgccactgtcaggagcacaagctcgacccagtaaatgcagcttcctttggcaaattgattcgctcagtatttatgggccttaggacgcggcgtctcggaacacgaggcaattccaaatatcattactatggtataagattgaagcccgatagcccactgaatcggctacaggaagacacacagtatatggccatgcgtcagcagccgatgcatcagaagccgagatatcggccagcacagaaaactgactcactcggggattctggctctcattcgggtctccattccaccccggagcagactatggctgtccaatctcaacaccatcaacagtacattgatgtctctcacgtgttccctgagtttcctgctcctgatctgggcagtttcctgctacaggatggtgtgactcttcatgacgtgaaagctttacagctggtatacaggcggcattgtgaggctacagttgacgtcgtcatgaacctgcagtttcactacattgagaaactctggctgagtttttggaattctaaggccagctcttcggatggccctacttccttgcctgcatcagacgaggatcccgagggagcagtcctccctaaggacaagctgattagcttgtgtcagtgcgatcctatcctccggtggatgcggagctgtgaccacattctctaccaagctcttgtggagatcctgattccagatgttctgaggccagtgcccagcactctgactcaggcaatccgcaactttgccaaaagcttagagggctggctcacaaatgccatgagcgacttcccccagcaagtaattcagacgaaggtgggagtggtgtccgctttcgcccaaacccttcgccgatatacgagtttgaatcatttggcgcaggctgccagggccgtgttacaaaatacctctcagattaaccagatgctcagtgatctcaacagagtcgactttgcaaacgtccaagagcaggcttcctgggtgtgtcaatgcgaggaaagtgtggtgcagaggttagaacaggatttcaaactgactctccagcagcaatccagcttagatcagtgggcctcttggcttgatagtgtggtgacgcaggtgttgaagcaacacgcaggttctcctagtttcccaaaggccgcacgtcagtttctcctgaagtggtcattctactcaagtatggttataagagatcttacccttagatcagcggcatcatttggcagctttcaccttattcgactcttatatgatgagtacatgttctatctggttgaacatagggttgcagaggctaccggagagactcctatcgcagtaatgggcgagtttaatgatcttgcgagtctcagcctgacgctgttggacaaagacgatatgggggatgagcaaagaggttcagaagccggtcccgatgctagaagcctcggcgagccccttgtcaagagagagcggagcgaccccaatcattctctgcagggaatctag

SEQ ID NO: 235771 - DNA, 2097 bp, Artificial Sequence
  derived and/or modified sequence
atgcagaattctgaaggcggtgcggactctccagcgtctgtcgcacttcgtccaagcgctgctgcacccccagtgcccgcaagcccacaaagggtgcttgtgcaggcagctagctccaacccaaagggcgcacagatgcagcctattagcttgccgcgtgtgcagcaagtacctcagcaggtgcagccagtgcaacacgtctacccggctcaggtccagtacgtggagggcggagacgccgtctatacaaatggggctatcaggacagcttatacttacaatccagagccacaaatgtacgctccctccagcaccgcatcctactttgaagctccgggtggcgctcaggtgaccgtggcagcttccagcccccctgcggtccctagccactcaatggtcggtataactatggacgtggggggttccccaatagtgtcatccgccggagcctacctaatacatggtggcatggatagcactcgccacagtctggcccacacctctagaagctctcctgcaaccctacagtggctcctcgataattatgaaaccgctgagggagttagcctgcccagatcttctctttacaatcattatctccggcattgccaggagcataaattagacccggtgaatgccgcatcctttggcaaacttataagaagcgtcttcatgggacttcgaacaaggaggctggggaccaggggaaacagcaaatatcactattatggtattcggttaaaaccagatagcccgcttaacaggctccaggaagacacgcagtatatggccatgaggcaacagccgatgcatcagaaaccaaggtatagacccgctcagaaaaccgactccctgggtgactccggatcacatagtggactgcactccactcctgagcaaactatggcagtacagtcacagcaccatcagcagtatattgatgtttcacatgtgttcccagagttcccagctccagatctgggcagctttctgctgcaggacggtgtgaccttgcacgatgttaaggcactgcagttagtataccgcaggcattgcgaagccacagtggacgtggtaatgaatctgcagtttcattatatagagaaactctggttgtccttttggaactctaaagcaagctcttcagatgggcctacctccctgcctgcgagtgacgaggatcccgagggagccgtgcttcccaaggacaaactgatttccctgtgccagtgcgatccaatattgagatggatgcgctcatgcgaccatatcttataccaggctctcgtcgaaatcctgattccagacgtgctcaggccagttcccagcactcttacccaggctatccggaactttgccaagtccctggagggttggttaacgaacgctatgtctgatttcccgcagcaggtgatccagactaaggtcggcgtggtgtcggctttcgctcagaccttgcggaggtataccagcctcaaccatctggcccaagcggctagagccgtcctgcagaatacaagtcagattaaccaaatgctgagtgatctcaatcgagtcgattttgccaatgtgcaggagcaggcatcctgggtgtgccaatgtgaggagtccgtggtccagcggctggagcaagactttaagttgacactgcagcagcagagcagtcttgatcaatgggctagctggttggactcggtcgtgacacaagtcctcaagcagcatgctggttctccctctttccctaaggcagccaggcagttccttttgaaatggagtttttacagttcaatggttatcagggacctcaccctgcgctctgcggctagtttcgggtcttttcacttaatccgccttctctatgacgaatatatgttttatttggtggaacatagagtggctgaagcaaccggagaaacacccatagcagttatgggcgaattcaacgatctggcctctctctctttaaccctactggacaaggatgacatgggcgatgagcagaggggttctgaagccggaccagatgccaggagcctgggggagcccctcgtgaaaagagagcgctctgatcccaaccatagccttcaaggaatctag

SEQ ID NO: 235772 - DNA, 2578 bp, Artificial Sequence
  derived and/or modified sequence
gaggagcggccgccgccgccaccgccgccgccatagagactgtagccgtggagactgttacttaccaacggggaccaacacgcagcagccgctgccgccgccgcgggagccgctgcccgaactcccggcccgaactccagacctgagcatgcagaattccgagggtggagcggattcgccagcgtccgtggctctgcgtccctcggcggcagccccgcctgtgccagcctccccgcagagggtgttggtccaggcagccagctccaatcccaaaggggcccagatgcagccgatctccctccccagagttcagcaggtaccccagcaggtgcagccggtgcagcacgtgtatcctgcccaggtgcagtacgtggaagggggagacgccgtctacaccaatggagccatacgaacagcctacacctacaaccccgagcctcagatgtacgcccccagcagcacggcttcttacttcgaggccccaggcggtgcccaggtgaccgtggcagcctcgtccccgccagcggtcccctcccacagcatggtgggcatcaccatggatgtcggggggagccccatcgtctccagcgcgggagcctatctcatccacggggggatggacagcaccagacactccctggcccacacctcccgctcatcgcccgccacgctccagtggctgttggataattatgaaacagcggaaggtgtgagtctccccagaagttctctttacaaccactaccttcggcactgccaggagcacaagctagacccagtgaacgccgcctccttcgggaaactgatccgttctgtgtttatggggctgagaacgcggcggctgggcaccaggggcaactcgaagtaccattactatgggattcgtctgaagccggactcaccactgaaccggctgcaggaggacacgcagtacatggccatgcggcagcagcccatgcaccagaagcccaggtaccggccagcccagaagacggacagcctcggggacagcggctcccacagcggcctgcacagcactccggaacagaccatggccgtgcagagccagcaccaccagcagtacatagatgtctcccacgtcttccccgagttcccagcgcccgacctgggcagcttcctgctgcaggacggcgtcacactgcacgacgtcaaggccctgcagctggtgtacagacggcactgcgaggcaactgtagatgtggtgatgaacctccagttccactacatcgagaagctgtggctctccttctggaactctaaggcctcctccagcgacggccccacctctcttcctgccagtgacgaagaccccgagggcgccgtcctgcccaaggacaagcttatctccctgtgtcagtgcgaccccatcctcaggtggatgaggagctgcgaccacatcctctaccaggcgctggtggagattctcatccccgacgtgctgaggccggtccccagtaccttgacacaggccatccgtaactttgccaagagcttggaaggctggttgacaaatgccatgagtgacttcccacaacaggtcatccagaccaaggtgggcgtcgtcagtgccttcgcccagacgctgcggcgctacacgtccctcaaccacctggcgcaggcggcccgggcggtgctgcagaacacgtcccagatcaaccagatgctcagcgacctcaaccgcgtggactttgccaacgtgcaggagcaggcctcgtgggtgtgccagtgcgaggagagtgtggtgcagcggctggagcaggatttcaagctgaccctgcagcagcagagctccctggaccagtgggccagctggctggacagtgtggtcacccaggtcctgaagcagcatgccggcagccccagcttccccaaggccgcccggcagttcttgctgaaatggtccttttacagctccatggtgatccgggacctgaccctgcgcagcgctgccagcttcggctccttccacctcatccgcctgctctacgacgagtacatgttctacctggtggagcaccgcgtcgcggaggccaccggagagacgccgatcgctgtgatgggagagttcaacgatctcgcctctctgtcgctgacgctgctcgacaaagatgacatgggcgatgagcagcgtggcagcgaggcgggcccagacgcccgcagcctgggtgagcccctggtaaagcgggagcgcagtgaccccaaccactccctgcagggcatctagcagccccggccggcgcctcctcgaggttccaaaagatgccgcctggtcactctgggaacctggatttcaccggctccaccaaattagtgcctcttagatgatgtgatgtttactttgactcaagcgggggctcccggggtcagtgttcaagaaggaaagcagttgttgaagctacagaagcccaggccagggctcccactggctgtagctgtgctctgggtccccaggtccctgcgcagccaccagggccccaccagaccatgggttccttattctggacaaaccctcctctgctggaaccctggactttggccccagtccctttaagagctg

SEQ ID NO: 235773 - DNA, 4037 bp, Artificial Sequence
  derived and/or modified sequence
gcgagcgtgggcgggccgttaggaaggtggggcgcggagcctggtaaccgttgccggtaacaacgccccgccccgtcgggcgggcgggctgcgcgaggctggctggcggcgggagccggaggaggagcggccgccgccgccaccgccgccgccatagagactgtagccgtggagactgttacttaccaacggggaccaacacgcagcagccgctgccgccgccgcgggagccgctgcccgaactcccggcccgaactccagacctgagcatgcagaattccgagggtggagcggattcgccagcgtccgtggctctgcgtccctcggcggcagccccgcctgtgccagcctccccgcagagggtgttggtccaggcagccagctccaatcccaaaggggcccagatgcagccgatctccctccccagagttcagcaggtaccccagcaggtgcagccggtgcagcacgtgtatcctgcccaggtgcagtacgtggaagggggagacgccgtctacaccaatggagccatacgaacagcctacacctacaaccccgagcctcagatgtacgcccccagcagcacggcttcttacttcgaggccccaggcggtgcccaggtgaccgtggcagcctcgtccccgccagcggtcccctcccacagcatggtgggcatcaccatggatgtcggggggagccccatcgtctccagcgcgggagcctatctcatccacggggggatggacagcaccagacactccctggcccacacctcccgctcatcgcccgccacgctccagtggctgttggataattatgaaacagcggaaggtgtgagtctccccagaagttctctttacaaccactaccttcggcactgccaggagcacaagctagacccagtgaacgccgcctccttcgggaaactgatccgttctgtgtttatggggctgagaacgcggcggctgggcaccaggggcaactcgaagtaccattactatgggattcgtctgaagccggactcaccactgaaccggctgcaggaggacacgcagtacatggccatgcggcagcagcccatgcaccagaagcccaggtaccggccagcccagaagacggacagcctcggggacagcggctcccacagcggcctgcacagcactccggaacagaccatggccgtgcagagccagcaccaccagcagtacatagatgtctcccacgtcttccccgagttcccagcgcccgacctgggcagcttcctgctgcaggacggcgtcacactgcacgacgtcaaggccctgcagctggtgtacagacggcactgcgaggcaactgtagatgtggtgatgaacctccagttccactacatcgagaagctgtggctctccttctggaactctaaggcctcctccagcgacggccccacctctcttcctgccagtgacgaagaccccgagggcgccgtcctgcccaaggacaagcttatctccctgtgtcagtgcgaccccatcctcaggtggatgaggagctgcgaccacatcctctaccaggcgctggtggagattctcatccccgacgtgctgaggccggtccccagtaccttgacacaggccatccgtaactttgccaagagcttggaaggctggttgacaaatgccatgagtgacttcccacaacaggtcatccagaccaaggtgggcgtcgtcagtgccttcgcccagacgctgcggcgctacacgtccctcaaccacctggcgcaggcggcccgggcggtgctgcagaacacgtcccagatcaaccagatgctcagcgacctcaaccgcgtggactttgccaacgtgcaggagcaggcctcgtgggtgtgccagtgcgaggagagtgtggtgcagcggctggagcaggatttcaagctgaccctgcagcagcagagctccctggaccagtgggccagctggctggacagtgtggtcacccaggtcctgaagcagcatgccggcagccccagcttccccaaggccgcccggcagttcttgctgaaatggtccttttacagctccatggtgatccgggacctgaccctgcgcagcgctgccagcttcggctccttccacctcatccgcctgctctacgacgagtacatgttctacctggtggagcaccgcgtcgcggaggccaccggagagacgccgatcgctgtgatgggagagttcaacgatctcgcctctctgtcgctgacgctgctcgacaaagatgacatgggcgatgagcagcgtggcagcgaggcgggcccagacgcccgcagcctgggtgagcccctggtaaagcgggagcgcagtgaccccaaccactccctgcagggcatctagcagccccggccggcgcctcctcgaggttccaaaagatgccgcctggtcactctgggaacctggatttcaccggctccaccaaattagtgcctcttagatgatgtgatgtttactttgactcaagcgggggctcccggggtcagtgttcaagaaggaaagcagttgttgaagctacagaagcccaggccagggctcccactggctgtagctgtgctctgggtccccaggtccctgcgcagccaccagggccccaccagaccatgggttccttattctggacaaaccctcctctgctggaaccctggactttggccccagtccctttaagagctgaaagggctgtgctgagagcactggcctctgcactcaactggaaccaattttcaccatgattttaaaaattaaaaaaacctggcagagcccgactagaaagggacggcctctcccctcctacctgccaccgctggggaggcacagagctcgccagcgtccctggagtcccctcaggaatggaaagtggagtgcccttgtctggtagcaccatgtgggagggacccagctgggcgcagcgccctgtggccttttagatccagacctccctgccggatgccccgaggcgggaggccggctgtgctgcaggaacccatctccagatgccaaaggacttgaggggcagctgacaatcgctgtgtcccggcagatccgcagctcgaaaaagaacaagccacagaaacgggctcgctcgtgccaggacacagcagtgtctttcaaaaaatcaaaaccagaagttttatcagcagcaggaaggatgtgggactctgtccaagttcaccgtcaccatcaagccactggctgtggaaggagtttgtccaacagggtcagtgtcacagccacaacttcagaaagcagccatcccgcgtgtcgtccaaacagcagtgcctgcgtcccgctccacggagtcttccagaacacctccctctgaactaatcccggagcaccccacccccagcgagtcccacctggacctcttcaaagtcaaaactcttctctcgggacaaacaaatattcgggactttcgaagccctgaacttgagacaccaagtttgtctccatggaaacacgtagccgctgcagttggacagctgcgtgctggagttctgtccccaaaccaactgcagagaagaaagacgagcctcggcccaggacgcgatttctaacgaaatgcaatagttttctctttttggaaaaatgtttataccaatagttttgtgcgctaattgttattagaacgtttcttatgaatgtgtacattgcagtatattcagtcccaaatgttttgttctcattcacacagaaggtactaatgtcagctcacgtggcctttaaaaacctacttccccgcccgcaggagctcagagcatcgctgggcctgcgccagagtgaggggtgcaggaagacaaagacgcgtgctcactttagaaacgaaaagctgggaataatcacactgtttgtctggtcgtatagcccaaaccttagttgaaatcagacagaaagaatgtctttaaaatatacatctcctctccttggagacactgaagctcacagttaacggattgtaatgcccggcttttcctcactcctggtaaccaatacaagctggtttctgcctta

SEQ ID NO: 235774 - DNA, 2097 bp, Artificial Sequence
  derived and/or modified sequence
atgcagaacagcgagggcggcgccgacagccccgccagcgtggccctgagacccagcgccgccgccccccccgtgcccgccagcccccagagagtgctggtgcaggccgccagcagcaaccccaagggcgcccagatgcagcccatcagcctgcccagagtgcagcaggtgccccagcaggtgcagcccgtgcagcacgtgtaccccgcccaggtgcagtacgtggagggcggcgacgccgtgtacaccaacggcgccatcagaaccgcctacacctacaaccccgagccccagatgtacgcccccagcagcaccgccagctacttcgaggcccccggcggcgcccaggtgaccgtggccgccagcagcccccccgccgtgcccagccacagcatggtgggcatcaccatggacgtgggcggcagccccatcgtgagcagcgccggcgcctacctgatccacggcggcatggacagcaccagacacagcctggcccacaccagcagaagcagccccgccaccctgcagtggctgctggacaactacgagaccgccgagggcgtgagcctgcccagaagcagcctgtacaaccactacctgagacactgccaggagcacaagctggaccccgtgaacgccgccagcttcggcaagctgatcagaagcgtgttcatgggcctgagaaccagaagactgggcaccagaggcaacagcaagtaccactactacggcatcagactgaagcccgacagccccctgaacagactgcaggaggacacccagtacatggccatgagacagcagcccatgcaccagaagcccagatacagacccgcccagaagaccgacagcctgggcgacagcggcagccacagcggcctgcacagcacccccgagcagaccatggccgtgcagagccagcaccaccagcagtacatcgacgtgagccacgtgttccccgagttccccgcccccgacctgggcagcttcctgctgcaggacggcgtgaccctgcacgacgtgaaggccctgcagctggtgtacagaagacactgcgaggccaccgtggacgtggtgatgaacctgcagttccactacatcgagaagctgtggctgagcttctggaacagcaaggccagcagcagcgacggccccaccagcctgcccgccagcgacgaggaccccgagggcgccgtgctgcccaaggacaagctgatcagcctgtgccagtgcgaccccatcctgagatggatgagaagctgcgaccacatcctgtaccaggccctggtggagatcctgatccccgacgtgctgagacccgtgcccagcaccctgacccaggccatcagaaacttcgccaagagcctggagggctggctgaccaacgccatgagcgacttcccccagcaggtgatccagaccaaggtgggcgtggtgagcgccttcgcccagaccctgagaagatacaccagcctgaaccacctggcccaggccgccagagccgtgctgcagaacaccagccagatcaaccagatgctgagcgacctgaacagagtggacttcgccaacgtgcaggagcaggccagctgggtgtgccagtgcgaggagagcgtggtgcagagactggagcaggacttcaagctgaccctgcagcagcagagcagcctggaccagtgggccagctggctggacagcgtggtgacccaggtgctgaagcagcacgccggcagccccagcttccccaaggccgccagacagttcctgctgaagtggagcttctacagcagcatggtgatcagagacctgaccctgagaagcgccgccagcttcggcagcttccacctgatcagactgctgtacgacgagtacatgttctacctggtggagcacagagtggccgaggccaccggcgagacccccatcgccgtgatgggcgagttcaacgacctggccagcctgagcctgaccctgctggacaaggacgacatgggcgacgagcagagaggcagcgaggccggccccgacgccagaagcctgggcgagcccctggtgaagagagagagaagcgaccccaaccacagcctgcagggcatctag

SEQ ID NO: 235775 - protein, 185 aa, Artificial Sequence
  derived and/or modified sequence
MPRLFFFHLLGVCLLLNQFSRAVADSWMEEVIKLCGRELVRAQIAICGMSTWSKRSLSQEDAPQTPRPVAEIVPSFINKDTETINMMSEFVANLPQELKLTLSEMQPALPQLQQHVPVLKDSSLLFEEFKKLIRNRQSEAADSSPSELKYLGLDTHSRKKRQLYSALANKCCHVGCTKRSLARFC

SEQ ID NO: 235776 - DNA, 555 bp, Artificial Sequence
  derived and/or modified sequence
atgcccagactctttttcttccatctgttaggcgtgtgtctcctgctgaatcaattctccagagcagttgcagattcctggatggaagaggtcataaaactttgcggacgggagctggtaagggctcagattgctatatgtggcatgtccacttggtcaaagagatcgcttagccaagaagatgcaccccagacccctcgtccagtggccgagatagttccgagctttataaacaaggacacagagaccatcaacatgatgtccgaattcgtcgccaatttacctcaggaattgaagctcacattgagtgagatgcaacccgctctaccgcagttgcaacaacatgtgcccgtgctgaaggatagctccctactgtttgaagaattcaaaaagcttatccgcaatcgacagagcgaggcagcggactccagcccttccgagctcaaatatttgggtttagatacccatagtcggaagaagagacagctctattccgccctcgctaataagtgttgccatgtcggttgtaccaagcgctcccttgcccgtttttgt

SEQ ID NO: 235777 - DNA, 555 bp, Artificial Sequence
  derived and/or modified sequence
atgccaaggctgttcttcttccatctcctgggcgtgtgccttcttctgaatcagttctccagagccgtcgcagattcctggatggaggaagtcatcaagctatgtggcagggaactggtgagagcccagatcgctatatgtggaatgtctacctggtcaaaacgcagcctgtcccaagaagacgctccacagacccctcgtccagtggcggagatcgttcccagctttattaacaaagacacggaaactataaacatgatgtccgagtttgtcgcgaatctcccgcaggagcttaagctgactctctctgagatgcagcctgctctccctcaactgcagcagcacgttcctgtactcaaggactctagcttgcttttcgaagaattcaaaaagttgattagaaatcgacagtctgaggccgccgattcctcaccttccgagctgaagtatctgggcctggatacccatagcagaaaaaagagacaattatactccgctcttgctaacaagtgctgtcacgtgggctgtacaaaacgaagtctggcacggttttgt

SEQ ID NO: 235778 - DNA, 555 bp, Artificial Sequence
  derived and/or modified sequence
atgccacgcttgtttttcttccatctcctgggggtatgcttgcttctgaatcaattttcccgtgccgtcgccgacagctggatggaggaggtgatcaagttgtgtggacgcgaattggtgcgcgcacagatagcaatttgtggtatgtccacctggagcaagcgctccctgtcgcaggaggacgcacctcaaactcctaggcctgtggcggaaattgtgccctcctttatcaataaggataccgaaacgattaacatgatgtcggaatttgtggcgaacctcccacaagagcttaagctgaccctgtcggaaatgcagccagcactcccacaactgcaacagcacgtgccggtacttaaagattcgagcctgcttttcgaagaattcaagaaactgattcggaatcgtcagtcagaggcagcggatagctcgccctccgaacttaagtacctgggcctcgatactcacagtcgaaagaagcgacagttgtactccgccctcgcaaacaagtgttgccatgtcggatgtactaaacggtcgctcgcaagattttgc

SEQ ID NO: 235779 - DNA, 555 bp, Artificial Sequence
  derived and/or modified sequence
atgccgagacttttcttttttcacctccttggagtttgcctgcttctgaatcaattttcgcgtgctgtggccgatagctggatggaagaggtaatcaaactgtgtggaagagagctggtccgcgcacagatcgctatctgcggtatgtctacatggtccaagagatccctcagtcaggaagacgcacctcagacccccagacctgtcgccgagatcgttccgtcctttatcaacaaggacacagagaccatcaatatgatgtccgaatttgtcgcaaacctgcctcaagagctgaagctgaccttgtccgaaatgcagccggcccttccacagctgcagcagcacgtaccagtcctcaaggattcgtctctgctcttcgaagaattcaaaaagctcatcaggaatcgccagtcagaggcagcagactcaagcccttccgaactgaagtacctcggcctggacacacacagtaggaaaaagcgacagttgtattcagctcttgctaataagtgttgccatgtgggctgtacgaagagatccctagccaggttctgt

SEQ ID NO: 235780 - DNA, 555 bp, Artificial Sequence
  derived and/or modified sequence
atgcccagactattttttttccacttgctgggcgtctgtcttttgctgaatcaattttccagggccgtcgcagactcatggatggaggaggtcatcaaactctgtgggagagaactagtgcgcgcacagattgctatttgtggtatgagcacctggtctaaacgctcactcagtcaggaggacgctcctcagaccccccgccccgtggctgaaatcgtgccgtcattcataaataaagacacagagaccatcaacatgatgtcggagttcgtagcgaatctacctcaggagctgaaacttacactgtctgaaatgcagccagctttgccacagctccagcagcatgtacctgtgctcaaagattcgtcacttcttttcgaggagtttaaaaagttgatccggaacagacaaagtgaggcggccgattcatcccccagcgagctgaagtacctcggcctagatacgcactcccgcaagaagagacagctctactcggcgcttgctaacaagtgctgccacgtaggctgtactaagaggtccctggcccggttctgt

SEQ ID NO: 235781 - DNA, 555 bp, Artificial Sequence
  derived and/or modified sequence
atgccgcgtctctttttctttcatctacttggtgtgtgtttgcttttaaaccagttttctagggctgtggctgattcctggatggaagaagttatcaagctttgcggaagagagttggttagagctcagatagccatatgcggtatgtctacatggtcaaagaggagtctctctcaagaggatgcaccccaaacacccaggcctgttgctgagattgttcctagcttcattaacaaggatactgaaactattaacatgatgagcgaatttgttgccaaccttcctcaggaacttaaactgaccctatcagagatgcagccggcccttccacagttgcagcaacatgtgccagtgctcaaagatagttcactactcttcgaggagttcaaaaagctcataagaaaccgacaaagtgaggctgctgattccagtccttcggaattaaagtatctgggtttggatacccactcacgaaagaagcgacagttatactctgcattggcaaacaagtgctgtcacgtgggttgtactaagcgtagccttgcaaggttctgt

SEQ ID NO: 235782 - DNA, 555 bp, Artificial Sequence
  derived and/or modified sequence
atgccacggctctttttcttccacttgctgggagtgtgcctgctcctgaaccaattttcaagagcagtcgcagattcgtggatggaagaagtcattaaactttgcggccgtgaactcgtgcgtgcacagatcgccatctgtggaatgtccacgtggtcgaagcgctccctcagtcaggaagatgctccacaaactcctcggccagtggccgagatcgtcccctctttcattaacaaggacactgaaacgattaacatgatgtcggagtttgtggctaacctgccacaagaactgaaactgactctgtctgagatgcaacctgcgcttccacaactgcaacaacatgtgcctgtgttgaaggattcatcgcttctttttgaggagtttaagaagttgattagaaatcgccagtcggaggcagcggattcaagcccatccgaactgaaatacctgggtcttgatacgcacagcagaaagaagaggcaactctactccgcactggcaaacaagtgttgccacgtgggatgtactaagaggtccttggcccgattttgt

SEQ ID NO: 235783 - DNA, 555 bp, Artificial Sequence
  derived and/or modified sequence
atgccaagattatttttttttcatcttttaggagtttgtttattattaaatcagttttcaagagcagttgctgatagttggatggaagaagttataaaattatgtggaagagaactagtaagagctcaaattgcaatatgtggtatgagtacatggtctaaaagatcacttagtcaggaggatgctccacaaactccacgaccagttgctgaaattgttccatcatttattaataaagacacagaaactataaatatgatgtctgaattcgtagctaatttaccacaagaattaaaacttactctttctgaaatgcaaccagcattaccacaattacaacaacatgtaccagtattaaaagattcaagtcttcttttcgaagaatttaaaaaacttattcgtaatagacaatctgaagctgcagatagttccccttctgaacttaagtatttaggtttagatacacattcgagaaaaaaacgtcaattatattcagctttagcaaataagtgttgtcatgttggatgtacgaaaagatctcttgcaagattctgt

SEQ ID NO: 235784 - DNA, 555 bp, Artificial Sequence
  derived and/or modified sequence
atgcccagactgttcttttttcacctgctgggtgtgtgcctgctgctgaatcagttttcgagagctgtggcagatagctggatggaagaggtgatcaagctgtgtgggcgagagctcgtgcgcgcacaaatcgccatttgtgggatgtccacctggtcaaaacgatcgctttcccaagaagatgcaccgcagactccaagacctgtcgccgaaattgttcctagcttcataaacaaggataccgaaactattaacatgatgtcggagtttgtggccaaccttccacaggaactgaagctcaccctctccgaaatgcaaccagccctgccacaacttcaacagcatgtgccagttcttaaggattcatcgctgctctttgaggagtttaagaaactcattcgaaatcggcaatcagaagcagccgatagctccccttcagaactgaagtacctcggtcttgatactcactcgagaaaaaagcgccagctgtattcggcgcttgcgaacaagtgctgtcatgtgggttgcaccaaacgctccctcgcgcgtttctgc

SEQ ID NO: 235785 - DNA, 555 bp, Artificial Sequence
  derived and/or modified sequence
atgccgcgcctgttctttttccatcttcttggagtgtgccttctcctcaaccagttctcccgcgccgtggcggattcctggatggaggaagtcataaagctgtgtggaagggagctggttcgcgcccagattgccatctgcgggatgtccacctggtcgaaacgttctctgtcacaggaggacgcgccgcagacgccgcgccctgtggcagagatcgtgccgagcttcatcaataaggatactgagacgatcaacatgatgagcgagtttgtcgccaacctcccacaggagctcaaactgaccttgtcagagatgcaacccgccctcccacagttgcaacagcacgtgcccgtgctcaaggatagcagcctcctgtttgaggagttcaagaaactcatccgcaatcggcaatctgaagcagccgattcgtccccgtcagaactcaagtacctgggccttgatactcattcccgcaagaaaagacagctgtactcggctctggcaaacaaatgctgccacgtcggatgcactaagcgctcactcgcccgcttctgc

SEQ ID NO: 235786 - DNA, 555 bp, Artificial Sequence
  derived and/or modified sequence
atgcctcgcctgttcttcttccacctcctgggagtgtgcctcttgttgaaccagttttctagggcggtcgcggacagctggatggaagaggtcattaagttgtgcggccgcgagcttgtgagagcgcagatcgctatttgcggcatgtctacttggtctaaacgttcgcttagccaagaggacgccccccaaaccccgcgcccagtggccgaaatcgtgccgtcgttcatcaataaagacactgaaactatcaatatgatgagcgaattcgtggccaacttgccgcaagagctgaagctcaccctgtcagagatgcagccagcccttccgcaacttcagcagcacgttccggttctgaaagactcgtctctgttgttcgaagagtttaagaagctgatcagaaacagacagtcggaggccgctgatagctccccatccgaactgaagtaccttggcctggatacccactcccgcaaaaagcgccagctctacagcgcgctggccaacaagtgctgtcacgtgggatgtacgaagaggtcgctcgcacgattctgc

SEQ ID NO: 235787 - DNA, 555 bp, Artificial Sequence
  derived and/or modified sequence
atgcctagactgttcttttttcaccttctgggcgtctgccttctgctgaatcagttcagcagggcagttgccgattcttggatggaggaggtcattaaactgtgcgggcgcgagctggtgcgagcgcagatcgctatttgtggcatgagtacatggtccaaacgctctctgtctcaggaagacgcacctcaaacccccagaccagtagccgagatcgtgcccagctttattaacaaggacactgagactatcaacatgatgagcgagttcgtcgccaacctcccacaggagctgaagcttacacttagcgagatgcagcccgctcttccccaattgcaacagcacgttccagtcctgaaagatagcagtcttctcttcgaggagtttaagaagctgattcggaatagacagagcgaggccgccgatagcagcccgtcagaactgaagtacctggggctcgacactcatagcaggaaaaagaggcagctttattccgcactggcaaataaatgctgtcacgtgggttgtactaaaaggagcctcgcccgcttttgt

SEQ ID NO: 235788 - DNA, 555 bp, Artificial Sequence
  derived and/or modified sequence
atgccgcgcctgttcttcttccacctcctgggcgtgtgtctgttgctcaaccaattctccagagcggtggcagattcttggatggaagaggtgatcaaactgtgtggaagggaactcgtgagggcgcaaatcgctatctgcggaatgtcaacttggtcgaagcgcagcctgtcgcaggaggacgctccccaaacgccaaggccggtcgccgagattgtgccttcctttatcaataaggacaccgaaaccatcaacatgatgtcggaattcgtcgcaaacctccctcaagaactgaagctgaccctcagcgagatgcagcctgcattgccgcagctgcaacaacacgtgccagtgctcaaggactcgtcgctgctgttcgaggagtttaagaagctcatccgcaaccggcagagcgaggctgccgattcgtcgccgtcggaactgaagtacttgggactcgacactcatagccgcaaaaaacgccaactgtactcggcattggcgaataagtgctgccatgtgggctgcaccaagcggtccctcgctcggttctgc

SEQ ID NO: 235789 - DNA, 555 bp, Artificial Sequence
  derived and/or modified sequence
atgccacgcctctttttctttcaccttctaggcgtctgtttgctgctaaatcaattttctcgggccgttgcggatagctggatggaggaggtaattaagctgtgcgggcgggagctggtcagagcgcaaatcgctatctgcggaatgagcacatggtcaaagaggtccctatctcaagaagacgctccccaaaccccacgccctgtggctgagatcgtgccaagctttatcaataaggataccgagaccattaatatgatgagcgagttcgtggccaacctaccccaggagctgaagttaaccttatccgagatgcagcccgcgctgccccagctccagcagcacgtgcctgtccttaaggacagctccctgctctttgaagaatttaagaagttgattcgaaaccgccagagcgaggccgcggattcaagtcctagcgaattgaagtacctggggctcgacacccattccagaaagaagagacagctgtatagcgcgttggccaacaagtgctgccacgtggggtgcactaaacgtagcctagcaagattctgt

SEQ ID NO: 235790 - DNA, 555 bp, Artificial Sequence
  derived and/or modified sequence
atgcctcgcctgttcttttttcatctgctgggggtgtgccttctcctgaaccaattttccagagcagtggccgattcatggatggaagaggtgattaagctgtgcggacgggagctggtccgagctcagattgcaatatgcggtatgagcacctggagcaagcggtcgctttcacaagaggacgcgccacagaccccacgccctgttgccgaaatcgtgccttcctttatcaataaagacactgaaacgatcaacatgatgtccgagttcgtggccaacctcccccaagaattgaaacttactctttcggaaatgcagcccgcactgcctcaacttcagcagcatgtcccagtgcttaaggactcatcgcttctctttgaggagtttaagaaacttattagaaacagacaatctgaggcagcagattcgtcgccgtcggaacttaagtacttggggctggacactcattcgagaaagaaaagacagctttactcagctttggcaaataagtgttgtcatgtcggctgtaccaaacgctccttggcacggttttgt

SEQ ID NO: 235791 - DNA, 555 bp, Artificial Sequence
  derived and/or modified sequence
atgccacggctgttcttcttccatctcttaggcgtgtgcctgctactgaatcagttctctcgggcagttgctgactcctggatggaagaggttatcaaattatgtggcagagagctggttcgcgcccagatcgccatctgtggaatgtccacttggagcaaacggagcctgtctcaggaagatgcaccccagaccccgaggcccgtcgccgaaatagttccctcctttattaacaaggacacagagacgatcaatatgatgtcggaatttgtcgccaacttgccacaggagctgaagttgactctgagcgagatgcagcccgctctgccccagctacagcaacacgtgcccgtccttaaggattcaagcttactgtttgaggaatttaagaagctgatccgaaaccgacagagtgaggcagccgatagcagcccctccgaattaaagtaccttggtttagacactcattcccggaaaaagagacagctttactctgccctggccaataaatgctgccatgtgggctgcaccaaaagatcattggcaagattctgt

SEQ ID NO: 235792 - DNA, 555 bp, Artificial Sequence
  derived and/or modified sequence
atgccacgcctgttctttttccatctgctcggggtgtgcctcttgctgaaccagtttagcagagcggtggccgactcctggatggaggaagtgatcaagctctgcggaagggaactcgttagggcccagatcgccatctgcggaatgtcaacgtggtccaagcggtctttgtcccaagaagatgcacctcagactcccagaccggtggctgagatcgtccctagcttcatcaataaagacacggagactatcaatatgatgagcgaattcgtggctaatctgcctcaggaactcaaactcaccctgtcggagatgcaaccggcgcttccgcagctgcagcagcatgttccggtgctgaaggactcctctctgctgtttgaagaattcaaaaagttgatccggaatcggcaaagcgaagctgccgattcctcgccgagcgagctcaagtacctgggactggatacccatagtcggaaaaagcgccaactgtacagcgcgttggccaacaagtgctgccacgtgggctgcactaagagatcgctcgctcgtttctgc

SEQ ID NO: 235793 - DNA, 555 bp, Artificial Sequence
  derived and/or modified sequence
atgccgcgattgttctttttccacctgttaggcgtctgcctgctcttaaaccagtttagccgagctgtggccgactcctggatggaagaagtgataaaactgtgcgggcgagagctagtgcgagcccagatcgcaatttgcggaatgagcacctggtccaagaggagcctgtcccaggaggacgctccccagacccctaggcccgttgccgagattgtgccgagcttcattaataaggacacagagactatcaatatgatgagtgaattcgttgccaatctgccccaggaacttaaattgacactgtcggagatgcagccagcgctgccccagcttcagcagcacgttcccgtcctcaaggattccagcctcctcttcgaagagttcaaaaagctgatcagaaatagacagtcagaggccgccgatagctctccctcagaactcaaatatctggggttagacacccattcccgaaagaaacggcaactttactccgccctcgcaaacaagtgttgccatgtgggctgtacgaagcgtagccttgcgaggttctgc

SEQ ID NO: 235794 - DNA, 555 bp, Artificial Sequence
  derived and/or modified sequence
atgccacgtctcttcttcttccacctgctgggagtgtgcttgcttctcaaccagttctcgagggctgtggcggattcttggatggaggaggtcatcaaattatgcgggagagaattagttagggcccagatagctatctgcggaatgagtacctggagtaaaaggtccctgagccaggaggacgctccccagactcctcggccagtggctgagatcgtgccgtcctttatcaataaggatacggaaactatcaatatgatgtcagagttcgtcgcaaatctccctcaggaactgaagctgacgctgtccgaaatgcagcctgcactccctcagctgcagcaacacgtgcctgtcctcaaagactcgtctctcctgtttgaagaattcaaaaagctgatacgcaacaggcagtctgaagcagccgatagcagccctagtgagctcaagtatctgggccttgatacacactcgagaaagaagcgccagctgtattccgccctggcaaacaagtgctgtcacgttgggtgtactaaacgatccctcgcaaggttctgc

SEQ ID NO: 235795 - DNA, 555 bp, Artificial Sequence
  derived and/or modified sequence
atgccccgccttttcttcttccatcttctcggggtgtgcctactcctcaatcagttttcccgtgctgttgcggactcctggatggaggaagtgatcaagctgtgtggccgcgagctggttcgggcccaaatcgccatctgcggcatgtccacttggtctaagaggagtctctcccaggaggacgccccgcagactccccggccggtcgcggagattgttccaagtttcattaacaaggacactgagaccatcaacatgatgtctgagttcgttgctaatttgccccaggaactcaagctcacattgtccgagatgcagcccgcgctgccccagctacagcagcatgtgcccgtgcttaaagactccagtctccttttcgaggagtttaagaagctgatccggaatcgacagtcggaggccgctgactctagtccttccgaacttaagtacctgggtctcgatacgcactctcgcaagaaacgacagctgtacagcgccttggcgaacaagtgctgccatgttggctgtactaagagatcgcttgcacgcttctgt

SEQ ID NO: 235796 - DNA, 555 bp, Artificial Sequence
  derived and/or modified sequence
atgcctagactgttcttttttcaccttctcggcgtgtgccttttgctgaatcagttcagtcgcgccgttgcggattcatggatggaggaagtaatcaaactgtgtggcagagaattagtccgagcccaaatcgccatatgcggcatgagtacatggtcaaagagatctctcagccaggaggatgctcctcagacaccacgccctgtggccgaaatcgtgccatccttcatcaataaggacaccgagactatcaacatgatgtcagagttcgtcgctaatctgccccaggagttgaagctgaccttgagtgaaatgcagcctgctcttccccagctgcagcagcacgtgcccgtcctcaaggatagcagtttgctcttcgaagaatttaagaaactcattcgcaatcgccaatctgaggcggccgactccagtccctctgagctcaagtaccttggcctcgatacacactccaggaagaagcggcagctctacagtgcactagccaacaaatgttgtcacgtaggatgcaccaaaagatcattagctaggttttgc

SEQ ID NO: 235797 - DNA, 555 bp, Artificial Sequence
  derived and/or modified sequence
atgccacgcctttttttctttcacttgctgggcgtctgcctgcttctgaaccagttctcaagggccgtggccgactcctggatggaggaggtgatcaagctgtgtggcagggagcttgtgagggcacagatcgcaatttgcggcatgtctacatggagtaagagatcactgagtcaggaggacgcccctcaaactccacgccctgtggctgaaatcgttcccagcttcatcaataaggacaccgagacaattaacatgatgtcagagttcgtggccaatcttccccaggagttgaagcttactctttccgagatgcagcccgccctgccccagctccagcagcatgttccagttctcaaggactctagtctgttgttcgaggagtttaaaaaacttataagaaatcgccagtccgaggcagccgattcatctcctagcgaactcaagtacttgggcctggatacccattctcgcaaaaaacgccagctctatagcgctctcgccaacaagtgctgccatgttggctgcacaaaacgctccctggctcgcttttgc

SEQ ID NO: 235798 - DNA, 555 bp, Artificial Sequence
  derived and/or modified sequence
atgcctcgtttgttcttttttcatctcttgggagtgtgtctcctccttaatcaattctctagagcggttgccgactcgtggatggaggaagtcattaagttgtgcggaagagaactcgtgagagctcagattgctatttgtggaatgagtacttggtctaaacgatcgttatcgcaagaggatgccccacaaactcctagaccggttgcggagattgttccatcatttattaataaggatacagaaaccattaacatgatgtctgagttcgtggcgaatttgccgcaagaacttaagttgacactttcagagatgcaaccagcacttccacaactccagcagcatgtacctgtcctcaaagattctagtctgcttttcgaagagttcaaaaaacttatacgcaatagacagtccgaagcagctgactcgtctccaagcgagctgaaatatttaggactagacactcattcacgaaaaaagcgccaattatactctgcgctcgcaaataagtgctgccacgtcggatgtacaaaacgaagcttagcacgtttctgc

SEQ ID NO: 235799 - DNA, 555 bp, Artificial Sequence
  derived and/or modified sequence
atgcctagactcttcttcttccaccttctgggggtatgtttacttctgaaccagttttctcgggcagtggcggattcttggatggaagaagtgataaaactctgtgggcgggaacttgtgcgggctcagattgccatctgcgggatgtccacttggtcaaaacggtcactttctcaggaagacgcaccccagacaccaaggccagttgctgaaatagtgccatctttcataaataaagacacagaaacaataaacatgatgagtgaatttgtagccaacctgccacaggaattaaaactcacactctctgaaatgcagccggcgcttcctcagctccagcagcatgttcccgtactcaaagattcctctttattattcgaagaatttaagaaactaatcaggaaccgacagtctgaagccgctgattcctccccttctgaactcaaatatcttgggcttgatacacattccaggaagaagcggcagctgtattccgccttagctaacaaatgctgtcacgtgggatgcacaaaaaggtcacttgcccgattctgc

SEQ ID NO: 235800 - DNA, 555 bp, Artificial Sequence
  derived and/or modified sequence
atgcctagactgttcttctttcaccttctgggagtgtgcctcctcctgaaccagtttagccgggcggtcgccgattcgtggatggaggaggtcattaagctgtgtggacgcgaactcgttcgcgcccaaatcgcaatctgcgggatgtccacgtggtcgaaacggagcctgtcgcaggaggacgccccgcagacgccgcggcccgtggctgaaattgttccttcgttcatcaacaaggatacggaaaccatcaacatgatgagcgaattcgtggcaaatctgccccaggaactgaaacttaccctctcggaaatgcaaccggcgcttccacagctccagcagcatgtgccggtcctgaaggactcttcgctgctgttcgaagagtttaagaagctgatcagaaaccgacagtccgaagcggcagactcatccccatccgagctgaagtacctgggtttggacactcactccagaaagaagcgccaactttactccgctctggccaataagtgctgccatgtcggatgtaccaagcgcagcctggcaagattctgt

SEQ ID NO: 235801 - DNA, 555 bp, Artificial Sequence
  derived and/or modified sequence
atgccacgccttttcttcttccacctgcttggtgtttgtctgctccttaaccaattttcacgcgctgtggcagattcctggatggaagaggtcattaaactgtgtggtcgggaactggtccgcgcacagatagcaatctgcggcatgtcgacctggagcaagagaagcctttcgcaagaagatgccccacagactccacggccagttgctgagattgtgccctcattcataaacaaggataccgaaactattaacatgatgtctgaatttgtggcaaacctgcctcaagagcttaagttgaccctgtcggaaatgcagcccgctctgcctcagcttcagcagcatgtccctgtgctcaaggacagctcactgctgttcgaggagttcaagaagctgattcgaaatagacaatcagaagccgccgattcatccccgtccgagctcaagtacctgggactcgacactcatagccggaagaaaaggcaactttactcagcgctcgccaataagtgttgccatgtggggtgtaccaaacggtccctcgcgaggttttgt

SEQ ID NO: 235802 - DNA, 555 bp, Artificial Sequence
  derived and/or modified sequence
atgccccgccttttctttttccatcttcttggagtctgcctcctcctgaaccagtttagccgggcggttgccgacagttggatggaggaggtcattaaattgtgtggtagagagttggttagagcccagattgcgatttgtggcatgagtacctggtctaagcgctccttgtcacaagaagacgcgcctcagactcctcggcctgtggcggagattgtgccatcatttatcaacaaggataccgagacaattaacatgatgtcagaatttgtggccaatctgcctcaggaactgaagctgacccttagtgaaatgcagccagccctgccccagctgcaacagcatgtccctgtgctgaaggattcttccctgctatttgaggaattcaaaaaactgatccgcaatcgtcagtccgaggctgcagactcctccccatcagagctgaaatacctggggctggatacccactcgcggaagaaacgacagttgtatagcgccctcgcgaacaaatgttgtcacgtgggttgtacgaaaaggtctctggcaagattttgt

SEQ ID NO: 235803 - DNA, 555 bp, Artificial Sequence
  derived and/or modified sequence
atgcctcgtcttttcttctttcaccttcttggcgtgtgtcttttgctgaatcaattttcaagagcagtcgcagactcctggatggaagaagtcatcaaactgtgcggtagagagctggtgcgtgcacagatcgctatttgtggaatgtctacctggtcgaaacggtcactgagccaagaagatgcgccccagacccctcggccagtggctgagatcgtgccttcttttatcaacaaggatacggaaactataaacatgatgtccgaattcgtggcaaaccttcctcaggagctcaaactgactctgtcggaaatgcaacccgcgctgccgcaattgcaacagcacgtgcctgtcctgaaagattcatccctcctctttgaagagttcaagaagctcatcagaaaccgccaatcggaggccgcggatagcagcccgtccgaactcaagtacctcggtctggacacccactcgcggaaaaagcgccaactctactccgcactggccaataagtgttgtcacgttggctgcaccaaaagatccctcgcaaggttttgt

SEQ ID NO: 235804 - DNA, 555 bp, Artificial Sequence
  derived and/or modified sequence
atgccaaggttgttcttctttcatttgctaggcgtgtgcctcttactcaatcagttcagcagggccgtcgccgacagctggatggaggaggtcataaagctttgcggaagggagctcgtgcgggcccaaatcgcgatctgcggcatgagcacttggagtaaacgctccctatctcaggaggatgctccgcagactccaaggcccgtcgctgaaattgtgccctcttttatcaacaaggacacagagacaatcaatatgatgagcgagtttgtcgctaacctgccgcaagaattgaagcttacgctgagcgaaatgcaaccagcgctgccacaactgcagcaacacgtgccagtgctaaaggattcctctttactgtttgaagagtttaagaagttgatccgtaatagacagtctgaagcagccgattcctccccctcagaattgaaataccttggcctggacacccacagccgtaagaagcgtcagctctacagcgctctcgctaataagtgctgccacgtgggctgcaccaagcgatcactagcgcgattctgc

SEQ ID NO: 235805 - DNA, 555 bp, Artificial Sequence
  derived and/or modified sequence
atgcccaggttgtttttcttccacttgcttggagtctgcctgctgttgaatcagttctcccgcgctgttgctgatagttggatggaggaagtgataaagttgtgtgggcgcgaactggtcagagcacagattgctatctgcggtatgagcacgtggtcaaagaggtcactctcacaggaagacgcaccccagacccctcgacctgtggccgaaattgtccctagctttatcaacaaggataccgagaccatcaacatgatgtcagagttcgtggctaatcttcctcaagagctgaagcttacgttgagtgagatgcagccggcactcccacagctccaacagcatgtgcccgtcctgaaagatagctctctgcttttcgaagaattcaaaaagctgatccgaaatcggcagtccgaagcggctgacagcagccctagtgaattgaaatatcttgggctcgacacccacagtaggaaaaaaagacagctctattctgccctggccaacaagtgctgtcacgtcggctgtactaagagaagtctcgcgcgattttgt

SEQ ID NO: 235806 - DNA, 555 bp, Artificial Sequence
  derived and/or modified sequence
atgccgagactctttttcttccatcttcttggggtctgcctgttgctgaatcaatttagccgtgccgtggccgatagttggatggaagaggttataaaactgtgtggacgggagctggtccgggcacagattgcgatctgtggaatgtctacctggagtaagcgcagcctctcgcaggaggacgcccctcagactcctaggcccgtggcggaaattgtcccctcttttataaataaagatacagagacaattaacatgatgagcgagttcgtcgctaacctgccccaggaattaaaactgaccttaagcgaaatgcagcctgccctccctcagctccagcagcacgtgccggtcctgaaggattctagtttactgttcgaggaattcaagaagcttatcaggaaccggcagtccgaggctgccgatagctcaccaagtgagttgaaatacctgggccttgacacccacagtcgcaaaaagaggcagctgtatagcgcccttgctaataagtgttgccacgttggctgtacgaaaagaagcctggcaagattctgc

SEQ ID NO: 235807 - DNA, 555 bp, Artificial Sequence
  derived and/or modified sequence
atgccaaggttattcttctttcatctgctgggggtgtgtctcctgttgaatcagttttctcgagcggtcgcagatagctggatggaggaagtgatcaaactttgcggacgagagcttgtacgggcacagatcgctatttgcggcatgtccacctggtcaaagcggtcgttgtcccaggaagatgccccccagactcccagaccagtggctgagatcgttcccagcttcattaacaaggatacagagactattaacatgatgtcagagtttgtggcgaatttgccacaggagctaaagctcactttaagcgagatgcaaccagcactgcctcagctccagcaacacgtcccggtactgaaggattcgtcgctactcttcgaagaatttaaaaaactcatcaggaatcgtcaatcggaagccgcggactccagtcccagtgagctgaaatatcttgggcttgatactcattcccgtaagaaacgccagctgtactcggctctcgctaacaagtgttgtcatgtcggatgcaccaagcgatccttagcacgcttttgc

SEQ ID NO: 235808 - DNA, 555 bp, Artificial Sequence
  derived and/or modified sequence
atgccaaggctgtttttttttcacttacttggggtctgcctcctcctgaatcagttttctcgggccgtggctgatagttggatggaagaagtgatcaagttgtgcgggcgcgaattagttcgcgcccagattgccatctgtggcatgagtacctggtctaaacgctccttgagtcaagaagatgcaccccaaacccctcgacctgtggccgagatcgtcccatccttcataaataaggatacggaaacaatcaatatgatgagcgaattcgttgccaatctgccgcaggagttgaaactgacgttgtctgaaatgcagcctgcgttaccacagctgcaacaacacgttcccgtgctaaaggacagctcactactattcgaggagttcaagaaattgattaggaataggcaatctgaggctgccgacagcagcccatccgaacttaagtatttaggacttgacactcatagcaggaaaaagcgccagctgtactccgccttggctaataaatgttgtcacgtgggctgcacaaaacggagtctggcccgtttttgc

SEQ ID NO: 235809 - DNA, 555 bp, Artificial Sequence
  derived and/or modified sequence
atgccgcggctgttcttcttccacctgctgggagtgtgcctgctcctcaatcagttctcccgggcagtggccgactcatggatggaagaggtcatcaagctgtgtggccgggaactcgtcagagcccagattgccatctgtggcatgtcaacctggtccaaacgctccttgagtcaggaagatgcgcctcagacgccacgtcccgtggcggaaatcgtgccgtcgtttatcaacaaagatactgaaaccatcaatatgatgtcagaattcgtggctaacctgcctcaagagctgaaacttaccctctcagagatgcagcctgccctgccacagcttcagcagcacgtgccggtgttgaaggactcctcgctccttttcgaagagttcaagaagctgatccggaaccgccaatcggaggcggccgacagcagcccttcggagctgaagtacctcgggctggacactcactcacggaaaaagcggcagctttactccgccctggctaataagtgctgtcacgtcggatgcacgaaacggtcgctggcccggttctgc

SEQ ID NO: 235810 - DNA, 555 bp, Artificial Sequence
  derived and/or modified sequence
atgccgcggctcttcttctttcatttgctcggcgtctgcctcctacttaatcagttctctcgagcagtcgcggactcttggatggaggaagtgatcaaattgtgtgggcgcgagcttgtgcgagctcagatcgccatctgtggcatgtctacctggtcgaagcgatctctatcacaggaggatgcccctcaaacgccgaggcctgtcgctgagatcgtcccatcgttcatcaataaagacaccgagacgatcaatatgatgtccgagttcgttgctaatctgccccaggaactcaaactcaccctcagtgaaatgcagcccgcgctccctcaactgcagcagcacgtccctgttctgaaagacagctcgcttttgttcgaggagttcaagaagttaatccgaaaccggcagtctgaagcagctgattcttccccgagcgagctgaaatacttaggtctcgatacacattcacgaaagaagaggcagctgtattcagcgctcgcaaataagtgctgccatgttggatgcacgaagcgatcgcttgcccggttttgc

SEQ ID NO: 235811 - DNA, 555 bp, Artificial Sequence
  derived and/or modified sequence
atgccgcgactgtttttcttccatcttcttggtgtctgtctgctgctgaaccaattctcgcgcgccgtggcggattcctggatggaagaagtgatcaagctgtgtgggcgagaactcgtgcgggcacaaatcgctatttgcgggatgagcacgtggtctaagcggagcctgtcgcaagaggatgccccccaaactcctcgtccggtggcagaaatcgtgccgtcctttatcaacaaggacaccgaaactatcaacatgatgagcgaattcgtcgctaaccttccacaagaactcaagctgacgctttcagagatgcagcccgcactgccacaactgcagcagcatgtccctgtgcttaaggattcctcgttgctgtttgaagaattcaagaagctcattaggaacagacagagcgaagccgcagatagctccccttcagagctcaagtacctgggacttgacacccattcgagaaagaagagacagctctactccgcactggcaaataagtgttgtcacgtgggttgcaccaagaggtccctcgcacgcttttgt

SEQ ID NO: 235812 - DNA, 555 bp, Artificial Sequence
  derived and/or modified sequence
atgcctagactgtttttctttcatctcctgggggtgtgcttgcttctcaaccagttcagccgggccgtcgccgacagctggatggaggaagtgatcaagttatgcgggagggaacttgttcgcgcacagatcgccatctgcggaatgtctacatggtcaaaaagatcactctcccaggaggatgctccccaaacaccccgtccagtggctgaaattgttccttcttttatcaacaaggatacagagaccatcaacatgatgagtgagtttgtagctaatctgcctcaagaattgaaactgactctgtctgagatgcaaccggcattacctcagttacagcagcacgtgcctgtgctcaaggatagcagcctgctttttgaggaatttaagaagttgatacgcaatagacagtccgaagctgctgatagctctccatctgagctcaaatacctcgggctggatacacattccagaaaaaagcggcagttatacagcgcgcttgccaacaagtgttgccatgtaggatgtaccaaacgatccctcgcgagattttgc

SEQ ID NO: 235813 - DNA, 555 bp, Artificial Sequence
  derived and/or modified sequence
atgccaagactgttcttttttcacctgcttggagtttgcttgctactgaaccagttctcccgcgccgtcgccgattcctggatggaagaggttatcaaattgtgcggtcgggagctggtgcgggctcagatagcaatatgtgggatgagtacgtggagtaaacggagtctctcacaggaagacgccccccagacaccccgcccggtggccgaaatcgttcccagcttcatcaacaaagacactgaaactataaacatgatgagcgagtttgtcgcaaacctgccacaggagttgaagctgaccctctccgaaatgcagcctgctctaccccaattacagcagcatgtcccagtgctgaaggactcttctctgttgtttgaggaattcaaaaagttgattcgaaacagacagtccgaggccgcggactcatcgcccagtgagcttaaatacctgggccttgacacgcactcacggaaaaagcggcagctctacagtgccctagctaacaaatgttgtcatgtagggtgcacaaagagaagcctagctcgattttgt

SEQ ID NO: 235814 - DNA, 555 bp, Artificial Sequence
  derived and/or modified sequence
atgccccggttgttcttctttcaccttctaggagtgtgcctgctccttaatcagttcagccgggccgtggcagattcgtggatggaagaggtgatcaaactatgtggccgagagctcgtcagggcccagattgcaatctgtggcatgtctacctggagtaaacgctcgttgtctcaggaggacgccccacagacacctaggcccgtggccgagattgtcccctcttttattaacaaagacactgaaacgattaacatgatgagcgagttcgttgctaacctgcctcaagagcttaagttaaccctcagtgagatgcagcccgcgcttccccaactgcaacagcatgtccctgtccttaaggattctagcctgctgtttgaggaatttaagaagctcatacgcaaccggcagtccgaagcggctgattccagtcctagcgaactgaagtatctgggtcttgacacccatagcagaaagaagcgccagctgtatagcgcgctggcaaacaagtgttgccatgtcgggtgtacaaagaggagcctggcacggttttgc

SEQ ID NO: 235815 - DNA, 555 bp, Artificial Sequence
  derived and/or modified sequence
atgccgcgcctgttctttttccacttgctgggagtgtgtttgctcctgaaccagtttagccgggccgtcgccgactcctggatggaagaggtgatcaagctctgcggaagagaactcgtccgagctcaaatcgccatctgtgggatgagcacctggtccaagaggtcgctgagccaagaagatgcaccccagaccccgcgcccagtggcggaaatcgtgccatcgttcatcaataaggacaccgagactattaacatgatgtcagagttcgttgctaatctcccgcaggaactgaaactgacgctgtccgagatgcagccagccctccctcagttgcagcagcacgtcccggtgctgaaggattcgagtctgctcttcgaggagttcaagaaactcatccgtaaccgccaatctgaagcagcggactcatccccctcggaattgaagtacctcggcctggacactcatagtcgcaagaaacgccaactctactccgccctcgcaaacaaatgctgccatgtgggatgcactaagcgctctctggcacggttttgc

SEQ ID NO: 235816 - DNA, 555 bp, Artificial Sequence
  derived and/or modified sequence
atgccaaggctttttttcttccatttgcttggagtatgcctgctgcttaatcagttcagcagagcagtggcagacagctggatggaggaagtcatcaagctctgtggccgggaactcgttagggcccagatcgcgatctgcggcatgagcacctggtctaagcgctcgctgtcacaagaagatgccccccaaaccccaagacctgtggcagagatcgtgccttccttcattaacaaggataccgagacaatcaatatgatgagcgaatttgtagcaaatcttccccaggaactgaagctgacactctctgagatgcagcccgccctgccacagttgcaacaacacgttcctgtgctaaaagactcctccctgctattcgaagaattcaagaagttgatccggaaccgacagagtgaggccgccgacagttccccttccgaactgaaatacctgggactggacactcacagcagaaagaagagacagctctattccgcccttgcaaataagtgttgccacgttggctgtacaaagagaagcctagcaaggttctgc

SEQ ID NO: 235817 - DNA, 555 bp, Artificial Sequence
  derived and/or modified sequence
atgcctcggctgttcttctttcatctgcttggggtctgccttctccttaaccaattcagcagagcagtcgcggattcatggatggaggaagtgataaagttgtgtgggcgcgagctggtgagagcacaaattgccatttgcggcatgagcacttggtcgaagagatcgttgtcgcaagaggacgcaccacagacccccaggcctgtggcagaaattgtcccatcgttcattaacaaggacaccgaaactattaacatgatgtccgaatttgtggcaaaccttcctcaggaactgaagctgactctctccgagatgcaacctgccctcccgcagctccaacagcatgtccctgtccttaaagactcgtcgcttctctttgaagagttcaaaaaacttattagaaaccgacaatcagaagccgcagattcgtcgccaagcgaacttaagtacctgggactggacactcattcccgtaagaaaaggcaactttactcggcactggccaataagtgttgccatgttggatgtacgaaacgctccctggctcgcttctgc

SEQ ID NO: 235818 - DNA, 555 bp, Artificial Sequence
  derived and/or modified sequence
atgccccgtttgtttttctttcacctgctcggagtgtgtctcttgcttaatcagttcagtcgtgctgtcgcagattcatggatggaagaggtaatcaaactctgcgggcgtgaactcgtccgggcccaaatcgccatttgcggcatgtccacctggagcaagaggtccttgtctcaggaggatgcaccacagacaccgcgccctgtcgccgaaattgttccttctttcatcaacaaagatacagagacgattaacatgatgagcgaatttgtagccaatctacctcaggaactgaagctgacactatcggaaatgcagcctgcattgcctcagctgcaacaacatgtgccagtgctaaaggactcctccctgctattcgaagagtttaagaaactgatcaggaatcggcagagtgaggccgccgatagctctccgagcgaacttaagtatctgggactggatacccattcacgaaaaaaacgccagctctactctgctctggctaataaatgctgccacgtgggatgcacaaaaaggagcctggcgcgtttctgt

SEQ ID NO: 235819 - DNA, 555 bp, Artificial Sequence
  derived and/or modified sequence
atgccaaggctattcttcttccacctgctgggagtgtgtctgctgctgaaccagttctcgcgtgcagtcgcagattcctggatggaagaagtcatcaaattgtgcggtcgggagttggtccgcgcacaaatcgcaatttgtggtatgagcacatggagtaagcggtcactcagccaagaggatgcgccacagacaccccgtcctgttgcagagatcgttccatccttcataaataaagacaccgagacaattaacatgatgtccgaattcgtagctaacctgccacaggagctgaaactgaccctgagtgagatgcaaccagccctccctcagctacagcagcatgtgcccgtgttgaaggacagctctctgctgtttgaggagtttaagaagcttattagaaatcggcagagcgaagccgccgattctagtccaagtgaactgaagtacctgggtctcgatacccatagccgaaagaagcgccagctgtattccgccctggccaacaagtgctgtcatgttggttgcaccaagaggtctctggcgcggttctgc

SEQ ID NO: 235820 - DNA, 555 bp, Artificial Sequence
  derived and/or modified sequence
atgccccgtctgtttttctttcatctccttggtgtctgtctgctgctcaaccagttttcccgggcagtcgcagatagctggatggaagaagtgattaagttgtgcgggcgggagcttgttcgcgcccaaatcgccatttgtggaatgtccacctggtccaagaggtcactctcgcaagaagatgctccacagacccctcgacctgtggctgagattgtgcccagcttcataaacaaggacacggaaaccattaacatgatgtcagaattcgtggccaacctgccgcaggaactgaagctcaccttgtccgaaatgcagccagctctcccacagctgcaacaacacgtgccagtgcttaaggattcctcactgctttttgaagagtttaagaagctgatcaggaacagacaatcggaagcagcagactcctcgccatccgagctgaagtatctgggattggatactcattcgaggaaaaagcgacagctttacagcgcattggcaaacaaatgctgtcatgtcggatgtactaaaagatccctggcacgcttttgt

SEQ ID NO: 235821 - DNA, 555 bp, Artificial Sequence
  derived and/or modified sequence
atgccccgactgttcttttttcacctcctgggagtgtgcctccttttgaatcaattcagcagagctgtcgcagacagttggatggaggaagtgattaagctgtgcggacgggagctcgtgagagcgcaaattgcgatatgtgggatgtcgacttggtcaaagcgttcactctcgcaggaagatgcacctcaaactcctagacctgtggcagaaatcgtcccgtcttttatcaacaaggataccgaaactattaacatgatgtcagagtttgtcgcaaatctgccccaggaacttaaacttaccctttccgagatgcaaccagcactgccgcagttgcaacaacatgttccagtactgaaagattcctcccttctgtttgaagaattcaaaaagttgattcggaacagacagagcgaagccgcagactccagccctagtgagctgaagtacctgggcttggatacgcacagccgaaagaaacgacagctttactcggccctcgctaacaagtgttgccatgtaggttgtaccaagcgctcactggcccgcttttgt

SEQ ID NO: 235822 - DNA, 555 bp, Artificial Sequence
  derived and/or modified sequence
atgccccgtcttttcttcttccacctgctgggtgtgtgtctgctccttaatcaattcagccgggccgtcgcggattcatggatggaggaagtgattaagttgtgcggaagggaactggtgcgggcacagatcgccatctgcggcatgtctacgtggtcaaagcggtcgctgtcgcaggaggatgcgccacagacgccaagaccggtggcagaaatcgtaccatcgtttatcaacaaggacaccgaaactatcaacatgatgtcggagtttgtcgcgaatttgccgcaagaactcaagctgactctgagcgaaatgcagcctgcactccctcaactgcagcagcatgtgcccgttctcaaagacagcagtctgctgttcgaagaattcaaaaaactcatccgcaatagacagtcggaggcagcggattcctcaccgtctgagcttaaatacctgggtctggacacccacagcagaaaaaagcgtcaactctacagcgctctggctaacaagtgttgccatgtgggatgcaccaagcgatccctcgcccgcttttgc

SEQ ID NO: 235823 - DNA, 555 bp, Artificial Sequence
  derived and/or modified sequence
atgccacgccttttctttttccatctcctgggagtgtgccttctgctgaaccagttcagcagagctgtggcagattcctggatggaagaagtgattaaactttgtggaagagaactggtccgcgcacagatcgcaatatgtggcatgtcgacttggtccaagcggtcgctctctcaggaggatgcgcctcagactccaagaccagtcgcagagattgtgccatccttcattaacaaggacaccgagacgatcaacatgatgtcggaatttgtggccaatctgccccaggagttgaagctgacgctttcggagatgcaacctgccctcccccaattgcaacagcacgtccccgttctcaaagattccagccttttgtttgaggagttcaaaaaacttattcgcaaccgacagagcgaagccgcagattcatcccctagcgaactcaaatacctgggtctggatacccactctaggaagaaacgacaactctactcggcgttggccaataagtgttgccacgtggggtgtactaaacgtagcttggccagattctgc

SEQ ID NO: 235824 - DNA, 555 bp, Artificial Sequence
  derived and/or modified sequence
atgccaagactgttctttttccaccttcttggagtgtgtctgctccttaaccaattttcgcgcgctgtggctgactcttggatggaagaagtcattaagttgtgcggccgggagctggtgcgcgcccagattgctatatgtgggatgtcgacatggagcaaacgctccctcagccaggaggacgccccccagactcctaggcccgtagccgagattgttccaagttttatcaataaggatacggaaaccatcaacatgatgtcagaatttgttgccaatcttccacaggagttgaagttgaccctttccgagatgcaacctgcgctcccacagttgcagcagcatgtccctgttctgaaggacagtagcctgctcttcgaggagttcaagaaattaatccgaaaccggcagagcgaagcagcagactcaagcccctcagaacttaaatatttaggtctcgacactcattcaaggaaaaagagacaactttactcagctctcgccaataaatgttgccatgttggttgcactaaacggagtcttgcgaggttctgt

SEQ ID NO: 235825 - DNA, 555 bp, Artificial Sequence
  derived and/or modified sequence
atgccccgcttgttcttttttcatcttttaggcgtgtgcctccttttaaaccaattcagtcgggctgtggcggattcctggatggaagaagttataaagctctgcggtcgtgaactggtacgggcgcagatcgccatctgcggcatgtccacctggtcaaaaaggtcattatcccaggaggatgcaccgcaaactcctagacctgtagctgaaatcgtgccttctttcatcaataaagacacagaaacgattaacatgatgtcagagttcgtggccaaccttcctcaggagctgaaactgacactgagtgagatgcaaccagccttgccacagctgcaacagcacgtgccagtgctgaaggattcctcactcctgttcgaggaattcaaaaagctgattcgcaatagacagtctgaggccgccgactcatcgccgagcgagctaaagtacctcgggctggacacacattctcgcaaaaaacggcagttatatagtgctctcgccaataagtgttgtcacgtcggctgcaccaaaagaagcctggctcggttttgc

SEQ ID NO: 235826 - DNA, 555 bp, Artificial Sequence
  derived and/or modified sequence
atgccacgattgttctttttccatcttctgggagtctgtcttttgctcaaccagttttccagagcagtcgcagattcgtggatggaggaagtgataaagctctgtgggcgtgaacttgtgcgggctcagattgcgatttgtgggatgtccacgtggtccaaacggtccctgtcacaggaagatgcaccacaaactccaaggccggtggcagaaatcgtgccatcgtttatcaataaagacactgaaactatcaacatgatgtccgaatttgtggcaaaccttccacaagaacttaaactgacgctctcggaaatgcagcccgccctcccacagcttcaacagcatgtgcctgtcctcaaggatagctcgctcttgttcgaagaattcaaaaagctgatcagaaacagacaatccgaggccgcagattcgtcgccgtccgagctcaagtacctgggcctggacacccattcccggaagaagagacaactgtactcagccctggcaaacaaatgctgccacgtggggtgtaccaagaggtcactggcacgattctgc

SEQ ID NO: 235827 - DNA, 555 bp, Artificial Sequence
  derived and/or modified sequence
atgccacgcctgttctttttccacttgcttggagtgtgcttgctgcttaaccagttctcgcgtgctgtggctgactcctggatggaggaagtcattaaactttgtggacgggaactggtgcgagcgcaaatcgcgatttgcggaatgtccacctggagtaagcgctcgctatcccaggaggatgcaccgcaaacaccacgcccagtggctgagatcgtgccatcgttcattaacaaggataccgaaacgataaacatgatgagcgagtttgtggcaaacctgccccaagagcttaagctgacgctgagcgaaatgcagcccgcccttccccagctgcagcagcacgtgcccgtcctgaaggatagttcgttgctgttcgaagagttcaaaaagctgatccgcaatcgccagtccgaagcggccgattcttctccaagcgagctaaagtacctcggcctggatacacactcccgcaagaaacgccaactgtactcggcattggcgaacaaatgttgtcacgttggatgtacaaagcgttcgttggcgagattttgt

SEQ ID NO: 235828 - DNA, 555 bp, Artificial Sequence
  derived and/or modified sequence
atgcctagactctttttcttccatctccttggagtttgccttcttcttaaccagttttcacgggccgtggccgattcctggatggaagaggtcattaaactctgtggtagagagctcgtgcgagcgcagattgcaatttgtggaatgtccacttggtccaagagatcattgtcgcaggaagatgctcctcagacccctaggccggtcgccgaaatcgtgcccagcttcatcaacaaggataccgaaaccataaacatgatgtcagaattcgtcgcaaatctgccacaagaattgaaacttaccctgtccgagatgcaacccgcattgccacagctgcagcagcatgtgcctgtgctcaaggacagttcgctcctgtttgaggagtttaagaaacttattcgtaacagacaatccgaagcagcagatagctcgccatcagaattgaaatacttgggactggacacccatagccgcaagaagagacagctctactccgctctcgcaaacaagtgttgtcatgttggctgcaccaaaagaagcctcgcccgcttttgt

SEQ ID NO: 235829 - DNA, 555 bp, Artificial Sequence
  derived and/or modified sequence
atgcctaggctgttcttttttcacctgcttggtgtgtgcctgcttctgaaccagttcagccgcgccgttgcggatagctggatggaagaagtcatcaagctctgtgggcgggaacttgtgagagctcagattgcaatatgtggaatgtcaacctggtccaaaaggtcgctctcccaagaggatgcaccccagacgcctcgtccagtcgcggaaattgtgccgtcgttcattaacaaagataccgagacgatcaatatgatgagcgaattcgtcgctaacttgccacaagagctgaagctgactttgtcagaaatgcaacctgccctcccacaacttcaacaacatgtgccggtcttgaaagactcatcgcttctttttgaagaattcaagaagctcatccgcaatcgtcaatcagaagccgctgatagctccccttccgaattgaagtaccttggtcttgatactcacagcagaaagaagcgtcaactgtactccgcactcgccaataagtgttgtcacgtgggctgcaccaagagatcactggcaagattctgc

SEQ ID NO: 235830 - DNA, 555 bp, Artificial Sequence
  derived and/or modified sequence
atgccaagactgtttttttttcacctcttgggagtgtgtctgctcctaaaccagtttagccgcgccgttgccgattcctggatggaggaggttattaagctttgcggtcgtgaactggtgagagctcagattgctatatgtgggatgagtacctggtctaagagatctctttcgcaggaagacgcaccccagacgcctagacctgttgctgagatcgtgccctcttttatcaataaagatacggaaacgataaatatgatgtcagaatttgtggcaaacctgcctcaggagcttaagttgactttgtcagaaatgcagccagcactgcctcaactacagcagcatgtgccggtgttgaaggattccagcctcctctttgaggaatttaaaaagctgatcaggaaccgacagtccgaggccgccgacagttccccttccgagctgaagtacctcggcttggacacccattccagaaagaaaaggcagctgtactctgccctggctaacaaatgctgccacgtgggatgcaccaaacgcagtctggccaggttctgc

SEQ ID NO: 235831 - DNA, 555 bp, Artificial Sequence
  derived and/or modified sequence
atgcctagactctttttctttcacctcctgggagtttgcctgctccttaaccagttctctcgcgcggtcgcggactcctggatggaggaggtgatcaagctctgtggccgagaacttgtcagggcccaaattgccatctgcggaatgtctacctggtcaaagcgaagcctctcccaggaggacgccccgcaaacccctcgcccggtcgccgaaattgtgccttcctttatcaacaaggatacggaaactatcaacatgatgagcgagttcgtcgcgaatctgccgcaggagctgaaactgaccctgtcagaaatgcaaccggcactgccacagttgcaacagcacgtcccagtgctgaaggattccagcttgctgttcgaagaattcaaaaagctgatccgcaaccggcagtccgaagcagcagatagcagccctagcgaacttaagtacctgggactggatacccacagcaggaaaaagagacagctgtacagcgccctcgccaacaaatgctgtcatgtgggatgtactaaaagatcactcgctcggttctgc

SEQ ID NO: 235832 - DNA, 555 bp, Artificial Sequence
  derived and/or modified sequence
atgccaagactgttctttttccatttgctcggagtgtgccttcttttgaatcagtttagcagagcagtggccgattcatggatggaagaggtcattaagctgtgtggaagagagctggtgagggcacaaattgcgatctgcggcatgagcacttggtctaagaggagcctgtcccaggaggacgctcctcagacgcccaggccggtggccgagatagtgccgagctttatcaacaaagacaccgagactataaacatgatgagtgaatttgtcgcaaacctcccccaagaactcaagctcaccctctccgaaatgcaacctgccctgccccaattgcagcagcatgtgccagttcttaaagattcctccctgctgttcgaagaattcaagaaacttattcgcaatagacaatcggaagcagcagatagtagcccctccgaacttaagtacctcggtctggatacccactcacgcaagaagaggcaactctacagcgcccttgcaaacaaatgctgtcatgtaggttgtactaagcgctcgctggctagattttgc

SEQ ID NO: 235833 - DNA, 555 bp, Artificial Sequence
  derived and/or modified sequence
atgccccgtttattttttttccatcttttgggcgtttgcttactgctcaatcagttctcgagggccgttgccgattcatggatggaggaagtcataaaattatgcggcagagaattggtgcgagcacagatcgcgatatgcggaatgtcgacctggtcaaagaggtcgcttagccaggaggacgcgccacagacaccacgaccagtggcggaaattgttccttcctttataaacaaggataccgaaacaatcaacatgatgtccgaatttgtggcgaacctaccacaggaactgaaactcactctatcggaaatgcagcctgcactgccccagctgcaacaacatgtccctgtcctcaaggacagtagtttgctgttcgaggagttcaaaaagcttataagaaacaggcagtccgaagccgcggactcttctccttccgaattgaagtacttggggctggatacacactctaggaagaagcgtcagctttacagtgcattggctaacaagtgttgccacgtgggatgtactaaacggtcgctggctaggttctgt

SEQ ID NO: 235834 - DNA, 555 bp, Artificial Sequence
  derived and/or modified sequence
atgccgcggctgttcttcttccaccttctcggcgtgtgtctcctccttaaccaatttagcagggccgtggcggacagctggatggaggaggtcatcaaactgtgcggtcgcgagctggtgcgggcccagattgcgatctgcggaatgtcgacctggtccaaacgctccctgagccaggaggacgccccacagacccctaggccagtcgctgaaattgtcccttcattcatcaataaggacaccgaaactatcaatatgatgtctgagtttgttgctaacctgccgcaggaactgaaactgactctgtcagaaatgcaaccggcactcccccagctgcagcaacacgtgccagtgctgaaggattcctccctcctgttcgaagaattcaagaagctgatcagaaacagacaatcggaagcagcggattcgtcgccgtccgagttgaagtacttgggacttgacacgcattcgcgaaaaaagcggcagctctactcagccctcgccaacaagtgctgccatgtggggtgtactaagcgcagcttggcacgcttttgc

SEQ ID NO: 235835 - DNA, 555 bp, Artificial Sequence
  derived and/or modified sequence
atgccgcggctcttcttcttccacctcctcggggtctgcctgttgctgaatcagttctcgagagccgtcgccgattcctggatggaggaggtgatcaaactgtgcggacgcgaactggtgcgtgcacagatcgcaatttgcgggatgtccacctggtccaagagaagcctgtcgcaagaagatgcacctcagaccccgcgcccggtggccgaaatcgtcccatccttcatcaataaggacactgaaactatcaacatgatgtcggagttcgtcgccaaccttccacaagaactgaagctgaccctgtcggagatgcagccagccctgccgcagcttcagcaacacgtgccagtgctcaaggactcgagcctgctctttgaagaattcaagaagctgatccgcaaccgccagtccgaggccgctgactcctccccttcagaattgaaatacttgggactggacacccattcgagaaaaaagaggcaactctactcggcgctcgcgaacaagtgttgtcacgtgggatgtaccaagcgctcgctggcgcgtttttgc

SEQ ID NO: 235836 - DNA, 555 bp, Artificial Sequence
  derived and/or modified sequence
atgccccggctcttcttcttccatctccttggggtttgcctcctgctgaatcaattctctagggcagtcgccgactcctggatggaggaagtgatcaagctgtgcggacgagagctcgtgcgcgcacaaatcgccatttgcggcatgagcacttggagcaaaagatcattgtcccaggaggacgcgccgcagacgccgcggccggtggcggagatcgtgccttcttttatcaacaaggacactgaaaccatcaatatgatgtcggaattcgtggccaacctgccacaggaactcaagctgactctgtccgaaatgcagccagccctgccgcaactgcaacaacacgtgcctgtccttaaggattcatctctcctgtttgaggaattcaaaaagctcattaggaacaggcagtccgaagccgcagattcatcaccatcggagctcaagtacctcggactggacacccactcccgcaaaaagcggcagctctactcggcccttgctaacaagtgctgccacgtcggatgtaccaaacgctcacttgctcggttctgt

SEQ ID NO: 235837 - DNA, 555 bp, Artificial Sequence
  derived and/or modified sequence
atgcctagactgttcttttttcatctgctcggggtttgtctactgctgaaccagttcagccgagccgtagcggattcttggatggaagaggtgatcaagttgtgtggccgcgaactggtacgcgcccagattgctatctgtgggatgtctacctggagcaaacgtagcctcagccaggaagacgccccccagacgccccggccagtggcggagatcgtgcccagttttattaacaaagacactgaaactataaacatgatgagtgagttcgtggccaaccttccacaggaacttaaacttaccttaagcgagatgcaaccggcattaccccagctccagcaacatgtgcccgtgcttaaagattcttccctcctgttcgaggagtttaaaaaacttattcggaacagacagagtgaggcagcagacagctcaccatcagagctcaaataccttggcctcgacactcatagccgaaaaaagcggcaattgtattctgccctggcaaacaagtgttgtcacgtagggtgtactaaacggtcccttgcaagattctgc

SEQ ID NO: 235838 - DNA, 555 bp, Artificial Sequence
  derived and/or modified sequence
atgccaaggctattcttctttcaccttcttggagtatgtctgcttctgaaccagttttcacgggccgtcgctgatagttggatggaagaagtcataaaattatgcggacgggaactcgtgagggcacagattgcaatctgcggaatgagtacatggagtaaacgaagtctttcacaggaggacgcacctcagacacccagacccgtagcagaaatagtcccttctttcattaacaaagacacagaaacaattaatatgatgtcggaattcgtagctaatctccctcaggaactgaaattaactttatctgagatgcagccagccctcccccagctccagcagcatgttcccgtactcaaagatagttcccttcttttcgaagaatttaagaaactcatacgcaatcgccagtccgaagcggctgattcgtctccttcagagctcaaatatctcggacttgatactcattctagaaaaaaaagacagctatatagtgccctcgcgaacaaatgttgtcatgtagggtgcactaagcggtccctcgctagattctgt

SEQ ID NO: 235839 - DNA, 555 bp, Artificial Sequence
  derived and/or modified sequence
atgccgaggctgtttttctttcacttgctgggagtgtgcctgctgctgaaccagtttagccgcgctgtcgcggactcctggatggaggaggttatcaagctctgtggacgcgagttggtccgggcgcagatcgctatctgtggaatgtcgacgtggtcaaaacggtcgctgtcccaggaagatgccccccagactcctcggccagtggctgagattgtgccatcgtttatcaacaaggacaccgagactatcaatatgatgtcagaattcgtcgcgaatctgccacaggaactgaagctgaccctgtcggaaatgcagcccgcattgcctcaactccaacagcacgtgcctgtcctcaaggacagctcgctgctgttcgaagagttcaaaaaactcatccgcaataggcagtcggaggcagcagattcttcgccgtcagagcttaagtacttgggcctcgacacccatagcagaaagaaacggcagctgtactccgctctggcgaacaaatgctgccatgtgggatgcactaagagatccctggcccggttctgt

SEQ ID NO: 235840 - DNA, 555 bp, Artificial Sequence
  derived and/or modified sequence
atgccaaggctcttttttttccatctgcttggagtgtgtctcttgcttaatcagttttcacgcgcagtagccgattcatggatggaggaggtgatcaagttgtgtggacgcgagctggtgcgtgcccagattgctatctgtggtatgtcaacttggtccaaaaggtcactgagtcaggaagatgcccctcagactccaaggcctgtcgctgagattgtacccagctttattaacaaggacactgagacaatcaatatgatgtccgaattcgtggcaaatctcccccaggagcttaaattgactctgtctgagatgcagccagcattgcctcaactgcaacagcacgtacccgtcctgaaagactctagccttctttttgaggagttcaagaagctgatccgtaatcgtcagtctgaagctgcagacagctctccctccgagttgaaatacctgggattggatacacactcccgtaagaaacgtcagctgtacagcgctttggcaaacaagtgctgccacgtgggatgtaccaagaggagtttggcccgcttctgt

SEQ ID NO: 235841 - DNA, 555 bp, Artificial Sequence
  derived and/or modified sequence
atgccgcgactatttttttttcatttattaggtgtatgtttattactaaatcaattttcgcgtgcggttgcggattcgtggatggaagaagtaataaaactatgtggtcgagaattagtacgtgcgcaaatagcgatatgtggtatgtcgacgtggtcgaaacgttcgttatcgcaagaagatgcgccgcaaacgccgcgtccggttgcggaaatagtaccgtcgtttataaataaagatacggaaacgataaatatgatgtcggaatttgttgcgaatttaccgcaagaactaaaattaacgctatcggaaatgcaaccggcgctaccgcaattacaacaacatgttccggttctaaaagattcgtcgctattatttgaagaatttaaaaaattaatacgtaatcgacaatcggaagcggcggattcgtcgccgtcggaattaaaatatctaggtctagatacgcattcgcgtaaaaaacgtcaattatattcggcgttagcgaataaatgttgtcatgttggttgtacgaaacgttcgctagcgcgattttgt

SEQ ID NO: 235842 - DNA, 555 bp, Artificial Sequence
  derived and/or modified sequence
atgccccggctttttttttttcacttgttgggtgtctgccttctcttgaaccaattttcaagggcagttgctgacagctggatggaagaagtgatcaaactctgcggtagggaattggtgagagctcagatagcgatctgtggaatgagtacatggagtaaaaggtctctctcccaagaggacgcacctcagacccctcggcctgtggccgagatcgtgccaagcttcattaacaaggacaccgagacaatcaatatgatgagtgagttcgttgcaaatttaccacaggagttgaaacttacactgagcgaaatgcagcctgctctgccccaacttcagcaacacgtccccgtgctgaaagattcatctttgctgttcgaagaatttaaaaagttgattagaaaccgacaaagtgaagctgcggacagcagcccatctgaactgaaatatctgggtctggatacgcactctagaaagaaaaggcaactgtacagtgctctggcaaacaagtgttgtcacgtggggtgcaccaagaggagtctggccaggttttgc

SEQ ID NO: 235843 - DNA, 555 bp, Artificial Sequence
  derived and/or modified sequence
atgccacgactgtttttcttccacctgctcggggtgtgtctgctgctcaaccaattctcacgtgctgtggcggacagttggatggaagaagtaatcaagctgtgtggcagagaattagtgcgcgcacagatagctatctgtggcatgtcaacctggtccaaacggtccctgtctcaggaagacgctccccagacgccaagacctgtcgccgaaatagtgcctagcttcatcaataaagacaccgagaccattaatatgatgtctgagttcgtcgccaatctgccccaggagctgaagctcacactgagtgaaatgcaaccagctttaccacaactccagcagcacgtgccagtgctcaaagattcctccctcctttttgaagagtttaagaagctgatcaggaatcgccagtccgaagccgccgattccagcccgtcggagcttaaatatctggggctggatactcatagtcggaaaaagagacaactatattcagcccttgcaaataaatgctgccacgttggctgcaccaaacgctctcttgcccggttctgt

SEQ ID NO: 235844 - DNA, 555 bp, Artificial Sequence
  derived and/or modified sequence
atgcctagactgttttttttccatctactcggggtatgtctcctcctcaatcagttcagcagggccgtggcagacagttggatggaggaggtaatcaaactgtgtggccgcgagctcgtgagggcccaaattgccatatgtgggatgtcaacttggtcaaagcgtagtctgagccaggaggatgctcctcagaccccaaggccagtggccgaaattgttccctctttcataaataaggatactgagaccataaacatgatgagcgagttcgtggctaaccttcctcaggaactgaagctgacactaagtgaaatgcagcctgcactgccacagttacagcagcatgtgcccgtccttaaggactccagtttactgttcgaggagttcaaaaagctgatccggaataggcaatcagaagccgccgatagcagcccaagcgagctcaaatatttgggcttggatacccattccaggaaaaaacgccaactctattccgccctcgcaaataaatgttgccacgtggggtgtactaaaaggagcctggcaaggttctgc

SEQ ID NO: 235845 - DNA, 555 bp, Artificial Sequence
  derived and/or modified sequence
atgccaaggctgttttttttccacctgctgggcgtttgtctcttgcttaaccaattctctagagccgtcgccgacagttggatggaggaggttatcaaactgtgtgggcgagaactggtcagagcccagatagcgatttgcgggatgagcacctggtctaaacggagcctgtcccaggaagacgccccccagacccctcggcccgtcgccgagatcgtaccttcctttataaataaggacaccgagactattaatatgatgtctgagtttgtggcaaatcttccgcaggaactgaagctgactctctccgaaatgcagcctgccttgccgcaactgcagcaacacgtgcctgtgctgaaggactcctcactgttgttcgaggaattcaaaaagctgatccgcaacaggcagagcgaggccgccgactctagtccgtctgagcttaaatatctgggcctggacacacactcacgaaaaaagagacaactgtacagtgccttggctaataagtgctgccacgtggggtgcacaaaaagatccttggctcgcttctgc

SEQ ID NO: 235846 - DNA, 555 bp, Artificial Sequence
  derived and/or modified sequence
atgcctcgcctatttttctttcaccttctcggcgtgtgtctgctgctcaaccagtttagccgagctgttgctgattcctggatggaggaggtgatcaagttatgcgggcgggaacttgtacgggcgcaaattgcgatctgcggaatgtctacctggtcaaagaggagcctaagccaggaggacgcaccacaaacaccacgccctgtcgccgaaattgtcccctccttcattaataaagataccgaaactattaacatgatgagcgaatttgtagctaatttgccacaggagctgaaactgaccctaagcgagatgcagcctgcccttccgcagcttcagcagcacgtgcctgtgcttaaggactcctccctgttgttcgaggagttcaagaaactgatccggaataggcaaagtgaagccgccgattcttcaccaagcgagcttaagtatctgggacttgacacccactccagaaagaagcgccagctgtactccgctctcgctaacaaatgttgccatgttggctgcacaaaaaggagtcttgcgagattctgt

SEQ ID NO: 235847 - DNA, 555 bp, Artificial Sequence
  derived and/or modified sequence
atgccaagactgttctttttccacctcctgggagtgtgtctgctcctgaaccagttcagtcgggcggtcgcagactcgtggatggaggaggtgatcaagttgtgcggccgtgaactcgtccgcgcacaaatcgctatctgtggtatgagcacttggtcaaagcggtcgctctcacaagaggacgcgccgcagactccgcgccctgtcgccgaaatcgtgccatccttcatcaacaaggataccgaaaccatcaacatgatgtccgaattcgtggcgaatctcccgcaagaactcaagctcactttgagcgaaatgcagcctgcactgccccagctgcagcagcatgtcccggtgctgaaggacagctcgctcctgtttgaggaattcaaaaagctgatccgcaatcggcagtcggaagccgctgactcgagcccgtcagagctgaagtacctgggactggacacccacagccggaagaagcgccaactctatagcgcgctggcgaacaaatgctgccacgtgggatgcactaagcggtccctggcgcggttctgt

SEQ ID NO: 235848 - DNA, 555 bp, Artificial Sequence
  derived and/or modified sequence
atgccgaggctattcttcttccatctgctgggagtctgcttgcttctcaatcagttcagccgggctgtcgccgatagctggatggaggaagtgattaaactgtgtggacgtgagcttgttcgggcccagatcgcaatctgcggaatgagtacatggagtaagagatcactatcccaggaggacgccccccagacccccaggcctgtggccgagattgtgccgtccttcattaacaaggacacagagacaatcaacatgatgagcgagttcgtagcaaacctgccacaagaacttaagctgacactgtccgaaatgcagccagcactccctcaacttcaacagcatgtacccgttctgaaggatagcagccttctatttgaggagtttaagaagctcatccgtaatcggcagtccgaggcagctgactcaagccctagcgaattaaagtacctgggtctagatactcattctaggaagaaaagacagctctatagtgctttggctaacaaatgttgtcatgtcggatgcactaagagaagcttagcccgcttttgt

SEQ ID NO: 235849 - DNA, 555 bp, Artificial Sequence
  derived and/or modified sequence
atgccgcggctgttcttcttccacctgctgggggtgtgcctgctgctgaaccagttttcgagagccgtcgccgactcgtggatggaagaggtgatcaagctgtgcggtcgagaacttgtcagggcccagatcgcaatatgtggaatgtccacttggtccaagaggtccctctcacaggaggatgctcctcaaacgcctagaccggttgcggaaatcgtgccgagctttatcaataaagacaccgagactatcaacatgatgtcagaattcgtggcaaatctcccgcaggaactgaagctcactctcagcgagatgcaacccgccctgccacagttgcagcagcacgtgcccgtccttaaggattcatccctgttgttcgaggaattcaagaaattgattcgcaacagacaatccgaagcagccgactcgtcaccgtctgaactgaaatatctgggcctcgacacccacagccggaagaagaggcagttgtactcggcactggcaaacaagtgttgccatgtaggatgcaccaaacgtagccttgcgcgcttttgc

SEQ ID NO: 235850 - DNA, 555 bp, Artificial Sequence
  derived and/or modified sequence
atgcctcgactgtttttttttcacttactcggtgtgtgccttttactgaaccagttctcccgcgccgtagccgacagctggatggaagaggtgatcaagctctgtggtcgagagctggtgcgcgcgcagatcgcgatttgcggtatgtccacctggtctaaacgctcactgtcacaggaggacgccccgcagacaccgaggccagttgccgagatcgtgccttccttcattaacaaagacactgagacaattaatatgatgagcgagttcgtggcaaatctgcctcaggagctgaagttgaccctgagcgagatgcaaccagctctgccacaactgcagcagcacgtgccagttctgaaggatagctctcttcttttcgaggaatttaagaagctgatccgtaacaggcaaagcgaggcagccgattctagccccagcgagctgaaatacctgggcctggacacccacagtcggaagaagcgacagctgtacagcgcactggctaataagtgctgtcacgttggctgtactaaacgcagcttggcacgcttttgc

SEQ ID NO: 235851 - DNA, 555 bp, Artificial Sequence
  derived and/or modified sequence
atgccgagattgtttttcttccaccttctgggagtttgtttgctcctcaatcagtttagccgagcagtagctgactcctggatggaggaagtcatcaaactgtgtggccgggagctagtgcgcgctcagatcgccatctgcggtatgtctacgtggagtaaaagatccctttcgcaggaagatgcccctcagacaccgagacctgtcgctgagatcgtaccgagcttcatcaacaaagatactgagacgataaacatgatgtccgaatttgtcgccaatctgcctcaagagctgaagctaacactgtccgaaatgcagccagctcttcctcagctccagcaacacgtgccagtcctaaaggacagcagtctactgttcgaagagtttaaaaagcttattaggaacaggcagtccgaggccgccgattcctccccctcagagctaaaatacctaggtctggacactcattccaggaagaaacgccagctttactctgctctggcaaataagtgctgccacgtggggtgcacaaagcggtccctagcccgcttctgc

SEQ ID NO: 235852 - DNA, 555 bp, Artificial Sequence
  derived and/or modified sequence
atgccgcgactattcttctttcatctccttggcgtttgtttgctgcttaatcagttttctagggcagttgcagacagctggatggaagaggtgatcaagctctgcggacgggagctcgttagggcacagatcgcgatatgcggcatgtcaacctggtctaagcgatctctgagtcaagaggatgccccgcagacccccaggccagtcgctgagatcgttccgtccttcatcaataaggacacggagacaatcaacatgatgtccgagtttgtggccaaccttcctcaggagttgaagctaacgctttcagagatgcagcccgccctccctcaactgcagcagcacgtgccagtgcttaaggactcgtccctgctattcgaagaatttaagaaactgattaggaacaggcagtccgaggccgccgatagcagtcccagcgagctgaaatacttagggctggacacgcacagccgtaagaaacggcaactatactctgccttggcaaataagtgctgtcatgtggggtgtaccaagcgaagtcttgcacgcttctgc

SEQ ID NO: 235853 - DNA, 555 bp, Artificial Sequence
  derived and/or modified sequence
atgcctagactcttcttttttcacttgctcggagtgtgtctgcttcttaaccagttcagccgcgcagtggccgacagctggatggaggaagtgattaaactttgtggcagggaactggtgcgcgcccagatagctatttgcggaatgtcgacttggtcgaagagatcactcagccaagaggacgcgcctcaaacccctcgccctgtcgccgaaatagtgccatccttcattaacaaagatacggaaactattaacatgatgtccgaatttgtcgcaaatctgccacaggaactgaagctgactctttctgagatgcagccagcactgccacagctccaacaacatgtgccagtgctgaaggattcctcgctgctgtttgaagaattcaaaaaacttattagaaacaggcagtcggaggcagcagattcaagcccaagcgaactgaagtacttgggactggacactcatagcagaaagaaaagacaactttactcagcacttgcgaataagtgctgtcatgtgggatgcactaagcgcagccttgccagattttgt

SEQ ID NO: 235854 - DNA, 555 bp, Artificial Sequence
  derived and/or modified sequence
atgccccgccttttctttttccacctgctgggagtgtgcctccttctgaaccaattctcacgcgctgtcgccgatagctggatggaggaagtgattaagctgtgcggtcgcgaactggtccgggcccagatcgctatatgcggcatgagcacttggtcgaaaagatcgctctcgcaagaggacgcgcctcagactcctagaccagttgctgaaatcgtgccttcattcattaacaaagacactgaaaccatcaatatgatgtcagaattcgtagctaacctgccgcaggagctgaaactcaccctgagcgagatgcagccggcgctgccccaattgcaacaacatgtgccagtcctcaaagattcctccttgctctttgaagaattcaagaagttgatcaggaatagacagagcgaagcagcggactcgagcccatccgagctgaagtacctgggtcttgacacccattcacggaagaagcggcagctgtactctgccctggccaataagtgctgtcacgtgggatgcacgaaacgctcactcgcgcggttctgc

SEQ ID NO: 235855 - DNA, 555 bp, Artificial Sequence
  derived and/or modified sequence
atgcctaggctattcttttttcacctcctgggcgtgtgtctcctactaaatcaattctccagagccgtagcagacagctggatggaggaggtgattaaactttgcggaagggaactggtgcgcgcacaaattgctatctgtggaatgagtacgtggtctaagcggagcttatcacaggaggatgctccccaaacccctcggcccgttgcagaaatcgtaccatctttcattaacaaggatacggaaaccataaacatgatgtcagagttcgttgcaaatctgcctcaagaactcaagctgaccctcagcgagatgcagcctgcactgccacagctccagcagcacgtgccggtgctaaaggacagtagtctgttgttcgaagagttcaagaagcttattcgcaacagacagtccgaagcagcagattcatctccatcagaattgaagtacttagggcttgatactcactctagaaagaaaagacagctatatagcgcactggcgaataaatgctgccacgttggttgcaccaagcgctctcttgctcgattttgt

SEQ ID NO: 235856 - DNA, 555 bp, Artificial Sequence
  derived and/or modified sequence
atgccgagactgttctttttccatctgctgggggtgtgcctgctcctgaaccagtttagccgcgcggtggcggattcgtggatggaagaagtcatcaaactgtgtggaagggagctcgtgagagcacaaattgcgatctgtggaatgtcaacctggagcaagaggtccctgtcccaggaggacgcaccccagactccccggccggtcgcggagattgtgccttcattcatcaacaaagatacggaaactatcaatatgatgtccgagtttgtggccaacctgccgcaggagctcaagttgactctgtcggaaatgcagccggccctgcctcaactgcagcagcatgtgccggtgctcaaagatagcagcctgctttttgaagagttcaagaagttgatccggaacagacaatcggaggccgctgatagctccccgtcagagctgaagtacctgggcctggacactcattcacgcaagaagcgccaactgtacagcgccctggccaataagtgctgccacgtgggatgcactaagagatcgctcgctcgcttctgc

SEQ ID NO: 235857 - DNA, 555 bp, Artificial Sequence
  derived and/or modified sequence
atgccgcgtttattcttcttccacctgcttggtgtatgtctgctgttgaaccagttttctcgcgcagttgccgactcgtggatggaggaagtaatcaaattgtgtggccgagagttagtccgggcacaaatcgctatctgtggaatgtcaacatggtctaaaagaagtctgtctcaagaggatgctccacaaacaccgcgaccggtggcggagattgttccttcgtttattaacaaggacacagagactatcaatatgatgtcagaatttgtcgctaacctgccacaagaattgaaattgacgctctcggaaatgcaacctgcactgccccagttgcagcaacatgtgccggtgctgaaagatagttctttattatttgaagagtttaaaaaactcatcagaaatcgccagtccgaagcggcggattcgtccccgtcggaattaaaatatctcggccttgacacacattcgagaaaaaaacgtcagttgtattccgctttagcaaacaaatgttgtcacgtaggatgtacgaaacgttccttagcaaggttttgt

SEQ ID NO: 235858 - DNA, 555 bp, Artificial Sequence
  derived and/or modified sequence
atgccgcgcctgttcttctttcacctcttgggagtgtgcctgctgctgaatcaattctcgcgggctgtggccgactcttggatggaggaggtgattaagctctgcggcagagaactggtgcgggcccaaatcgccatctgtgggatgtccacttggagcaagagatcgctttcccaggaagatgcgccgcaaacccctcggcctgtcgccgagatcgtcccatcctttatcaacaaggacactgaaaccatcaatatgatgtcggagttcgtcgccaacctcccgcaagagctcaaactgacgctcagcgagatgcagcctgcgttgccccaactgcaacagcatgtccccgtcctcaaggacagctcgctgctgttcgaagaattcaagaagctgatcagaaaccggcaatcagaggccgcagacagctcgccgtccgaactcaagtacctgggcctggatacccactcacgcaaaaagagacaactctactccgcactcgccaacaaatgctgccacgtgggatgcaccaagaggtcactggcacgcttctgc

SEQ ID NO: 235859 - DNA, 555 bp, Artificial Sequence
  derived and/or modified sequence
atgccgcgcctgttcttctttcatctgctgggagtctgcctgctgctgaaccagttctctcgagcggtcgccgattcctggatggaagaggtgatcaaactgtgtgggcgggaacttgtgcgcgcgcaaattgccatctgcggtatgtcgacttggtcgaagcggtcgctgtcccaggaagatgcgccgcagactccgcgccctgtggctgagatcgtcccttcgtttatcaacaaggataccgaaactatcaatatgatgtcagaattcgtggcaaatctcccgcaagagctgaagctcactctgagcgagatgcaaccggcgttgcctcagcttcaacagcatgtgccagtgctgaaggatagctcgctgctctttgaggagttcaaaaagctcatcagaaatcgccaatccgaggcggctgactcatcgccgtcggaactgaagtacctcggactcgacactcactcacgcaagaaacggcagctgtactcggccctggcaaacaagtgctgccacgtcggctgcacgaagcgctcactggcccgcttttgc

SEQ ID NO: 235860 - DNA, 555 bp, Artificial Sequence
  derived and/or modified sequence
atgcctaggctgtttttctttcaccttctgggtgtttgccttcttctgaaccagttttcaagagccgtggcagattcgtggatggaggaagtgataaagctctgtggcagggagctcgtccgagctcaaatagccatttgcggcatgtccacctggtcaaagcgatctctgtcgcaagaggatgcgccgcaaacccctagaccagtggcggagatcgtcccttcgttcatcaataaagacaccgaaaccatcaacatgatgagcgaatttgtggccaaccttccgcaagaactgaaacttactttgtccgagatgcaacctgcacttccacagcttcagcagcatgtgccggtgctcaaggacagctctctcctgttcgaagaattcaaaaaacttatcagaaatcggcagtcggaggcagcagattcatcgccctctgaacttaagtacctcggacttgacactcatagtcggaagaagagacaactttacagcgcattggctaataagtgttgccacgtggggtgtaccaagcgttcacttgcaaggttttgt

SEQ ID NO: 235861 - DNA, 555 bp, Artificial Sequence
  derived and/or modified sequence
atgcctcgattatttttttttcatctgctcggagtgtgcttgctccttaatcagttttctcgggcggttgcggattcttggatggaggaggtcattaagctgtgtgggcgggagttggtccgcgcacaaatcgcaatttgtggaatgtctacctggagcaagcgcagcttgtctcaggaagatgctccgcagaccccacgacccgtcgccgagatcgtcccaagtttcataaacaaggatactgagaccattaacatgatgagcgagttcgtggctaacttgccccaggagctgaagcttacactttccgagatgcagccagcattaccacaactgcaacagcatgttcccgtgctaaaggattcatccctcctgttcgaagagttcaagaaactgatcagaaatcgccaaagcgaggccgcagactccagcccttcggagctgaaatatttgggtctggatacacacagcagaaagaagcggcagttgtactccgcactagcaaataagtgttgccacgtaggctgcacgaagaggtctctggcgcgattttgt

SEQ ID NO: 235862 - DNA, 558 bp, Artificial Sequence
  derived and/or modified sequence
atgcccagactgttcttcttccacctgctgggcgtgtgcctgctgctgaaccagttcagcagagccgtggccgacagctggatggaggaggtgatcaagctgtgcggcagagagctggtgagagcccagatcgccatctgcggcatgagcacctggagcaagagaagcctgagccaggaggacgccccccagacccccagacccgtggccgagatcgtgcccagcttcatcaacaaggacaccgagaccatcaacatgatgagcgagttcgtggccaacctgccccaggagctgaagctgaccctgagcgagatgcagcccgccctgccccagctgcagcagcacgtgcccgtgctgaaggacagcagcctgctgttcgaggagttcaagaagctgatcagaaacagacagagcgaggccgccgacagcagccccagcgagctgaagtacctgggcctggacacccacagcagaaagaagagacagctgtacagcgccctggccaacaagtgctgccacgtgggctgcaccaagagaagcctggccagattctgctag

SEQ ID NO: 235863 - DNA, 704 bp, Artificial Sequence
  derived and/or modified sequence
gggaaataagagagaaaagaagagtaagaagaaatataagagccaccatgcctcgcttgttcttcttccatctgttgggagtctgcctcctcttgaatcagttcagcagggcggtcgccgactcatggatggaggaggtgatcaaactctgcggtagggaactcgtaagagcgcagatcgccatttgcgggatgtccacatggtcgaagagatcgctttcacaagaggatgcaccccaaacgcctcgccccgtcgccgagattgtcccgtcgtttatcaataaggacacggagactatcaacatgatgtcagaatttgtggcgaaccttccgcaagaactgaagcttacgctgagcgagatgcagcccgcactgccgcagctccagcagcacgtgccagtgttgaaagattcgtcgttgctctttgaggagttcaagaaattgattcgaaaccgccagtccgaagcggctgactcctcacccagcgaacttaagtatctgggacttgatacccattcgagaaagaaacggcagttgtactcggcgctcgcgaataagtgttgtcacgtagggtgcacaaaacggtccctggcacggttttgttgataataggctgccttctgcggggcttgccttctggccatgcccttcttctctcccttgcacctgtacctcttggtctttgaataaagcctgagtaggaag

SEQ ID NO: 235864 - DNA, 558 bp, Artificial Sequence
  derived and/or modified sequence
atgcccagactgtttttctttcacttactgggagtgtgcctgctccttaatcagttttctagagctgtggctgattcatggatggaagaagtaattaagctgtgtggaagggagcttgtccgagcccagatagctatatgtgggatgtcaacatggtctaaacgatctttatcacaggaggacgccccacaaaccccccgacccgtcgcggaaattgtgcccagctttataaacaaagacactgagactataaatatgatgagtgaattcgtcgcaaatttgccccaagagctgaagcttacccttagcgagatgcagccagcgctgccccagctgcagcaacatgtccctgtactgaaagattccagccttctgtttgaggagttcaagaagctgattagaaatcgtcagtctgaagcagccgactccagccccagcgaactaaagtacttagggttagatacccacagccggaaaaaaaggcagttgtattctgctctggctaataaatgttgccacgtgggatgcactaagcgcagtttggccaggttctgttag

SEQ ID NO: 235865 - DNA, 558 bp, Artificial Sequence
  derived and/or modified sequence
atgcccaggctcttcttcttccacctgctgggcgtgtgcctgctgctgaaccagttcagcagagctgtggccgacagctggatggaggaggtgatcaagctgtgtggccgggagctggtgcgggcccagatcgccatctgtggcatgagcacctggagcaagaggagcctgagccaggaggatgccccccagacccccaggcctgtggccgagatcgtgcccagcttcatcaacaaggacacagagaccatcaacatgatgtctgaatttgtggccaacctgccccaggagctgaagctgaccctgtctgagatgcagcctgccctgccccagctgcagcagcacgtgcctgtgctgaaggacagcagcctgctgtttgaggagttcaagaagctgatccggaaccggcagagcgaggccgctgacagcagccccagcgagctgaagtacctgggcctggacacccacagcaggaagaagaggcagctgtacagcgccctggccaacaagtgctgccacgtgggctgcaccaagaggagcctggcccgcttctgctag

SEQ ID NO: 235866 - DNA, 558 bp, Artificial Sequence
  derived and/or modified sequence
atgccccggctgttcttcttccacctgctgggcgtgtgcctgctgcttaaccagttctcccgcgccgtcgctgatagttggatggaggaagtgattaagctgtgtggaagagagctggtcagagcacaaatcgcaatttgtgggatgagcacctggtccaaaagaagccttagtcaggaagatgcacctcagactccacgaccagtcgcagagatcgtgccctctttcattaacaaggacaccgagacgatcaatatgatgagcgaatttgtggctaacctgccccaagaactgaaactgactttgtcagaaatgcagccagccttgccacagctccagcagcacgtgccggtgctgaaagactctagcctcctgttcgaagagttcaagaagctgattcggaatcggcagtctgaagccgccgacagcagcccgtccgaactgaaatacctgggcctggacacacacagtcgcaagaagaggcagctctactccgcactggctaataaatgctgccatgtgggttgtacaaagcggagtctggcacgtttttgctag

SEQ ID NO: 235867 - DNA, 558 bp, Artificial Sequence
  derived and/or modified sequence
atgcctagacttttctttttccacctactgggggtgtgcctgctgctgaaccagtttagcagggccgtggccgactcatggatggaggaggtcatcaaactgtgcggcagagaacttgtccgtgcacagatagccatatgcggcatgtccacctggtccaaaagatctctgtctcaagaggacgcgcctcagacgcctcgcccagtagcagaaattgttccaagctttatcaacaaagatacagagaccatcaacatgatgagcgaattcgttgctaacttaccacaggaactcaagttaacactgagcgagatgcagccagcccttcctcaactgcagcagcatgtgccagttctcaaggactcatctctgctgttcgaggaattcaaaaaactgattcggaacaggcagtccgaggcggcagatagctctcccagtgaacttaagtatctggggttagacacgcacagtagaaaaaagcgtcagctgtatagcgcactggccaacaagtgctgtcacgttggttgcaccaagcggtccttggccaggttctgttag

SEQ ID NO: 235868 - DNA, 889 bp, Artificial Sequence
  derived and/or modified sequence
atgcctcgcctgttttttttccacctgctaggagtctgtttactactgaaccaattttccagagcagtcgcggactcatggatggaggaagttattaaattatgcggccgcgaattagttcgcgcgcagattgccatttgcggcatgagcacctggagcaaaaggtctctgagccaggaagatgctcctcagacacctagaccagtggcaggtgattttattcaaacagtctcactgggaatctcaccggacggagggaaagcactgagaacaggaagctgcttcacccgagagttccttggtgccctttccaaattgtgccatccttcatcaacaaagatacagaaaccataaatatgatgtcagaatttgttgctaatttgccacaggagctgaagttaaccctgtctgagatgcagccagcattaccacagctacaacaacatgtacctgtattaaaagattccagtcttctctttgaagaatttaagaaacttattcgcaatagacaaagtgaagccgcagacagcagtccttcagaattaaaatacttaggcttggatactcattctcgaaaaaagagacaactctacagtgcattggctaataaatgttgccatgttggttgtaccaaaagatctcttgctagattttgctgagatgaagctaattgtgcacatctcgtataatattcacacatattcttaatgacatttcactgatgcttctatcaggtcccatcaattcttagaatatctaagaatctttgttagatattaggtcccatcaattcttagaatatctaaacatctttgttgatgtttagatttttttatttgatgtgtaagaaaatgttctttgtgtgattaaatgacacatttttttgctg

SEQ ID NO: 235869 - DNA, 1177 bp, Artificial Sequence
  derived and/or modified sequence
tcaaatttgtttctgtgtgtgtaaaaggaaaggcttcatatctaaaatgactttacctcagtatactaaattgtttgagggtaatgaatgagaagaacacaactgtaaaagggccaaggacagagggatgggcaaatgaaggaaaggcagagagggagaccaagagctgagggggaaaattctgtggaggggtgtgggaaaggggtggagctggcacccttgccttaaaagctgagtgatagcccaagggatacaaaagaccgcttgagccgggtagggaaagcagcctaaagcccgggacaggcacacaggcccaggtgtgtaggccacagcagctgcagtcctgaaaggctgcaacgtcccgacctccaggagagaccaggcccaggatgcctcgcctgttttttttccacctgctaggagtctgtttactactgaaccaattttccagagcagtcgcggactcatggatggaggaagttattaaattatgcggccgcgaattagttcgcgcgcagattgccatttgcggcatgagcacctggagcaaaaggtctctgagccaggaagatgctcctcagacacctagaccagtggcagaaattgtgccatccttcatcaacaaagatacagaaaccataaatatgatgtcagaatttgttgctaatttgccacaggagctgaagttaaccctgtctgagatgcagccagcattaccacagctacaacaacatgtacctgtattaaaagattccagtcttctctttgaagaatttaagaaacttattcgcaatagacaaagtgaagccgcagacagcagtccttcagaattaaaatacttaggcttggatactcattctcgaaaaaagagacaactctacagtgcattggctaataaatgttgccatgttggttgtaccaaaagatctcttgctagattttgctgagatgaagctaattgtgcacatctcgtataatattcacacatattcttaatgacatttcactgatgcttctatcaggtcccatcaattcttagaatatctaagaatctttgttagatattaggtcccatcaattcttagaatatctaaacatctttgttgatgtttagatttttttatttgatgtgtaagaaaatgttctttgtgtgattaaatgacacatttttttgctg

SEQ ID NO: 235870 - RNA, 704 nt, Artificial Sequence
  derived and/or modified sequence
gggaaauaagagagaaaagaagaguaagaagaaauauaagagccaccaugccucgcuuguucuucuuccaucuguugggagucugccuccucuugaaucaguucagcagggcggucgccgacucauggauggaggaggugaucaaacucugcgguagggaacucguaagagcgcagaucgccauuugcgggauguccacauggucgaagagaucgcuuucacaagaggaugcaccccaaacgccucgccccgucgccgagauugucccgucguuuaucaauaaggacacggagacuaucaacaugaugucagaauuuguggcgaaccuuccgcaagaacugaagcuuacgcugagcgagaugcagcccgcacugccgcagcuccagcagcacgugccaguguugaaagauucgucguugcucuuugaggaguucaagaaauugauucgaaaccgccaguccgaagcggcugacuccucacccagcgaacuuaaguaucugggacuugauacccauucgagaaagaaacggcaguuguacucggcgcucgcgaauaaguguugucacguagggugcacaaaacggucccuggcacgguuuuguugauaauaggcugccuucugcggggcuugccuucuggccaugcccuucuucucucccuugcaccuguaccucuuggucuuugaauaaagccugaguaggaag

SEQ ID NO: 235871 - protein, 2454 aa, Artificial Sequence
  derived and/or modified sequence
MTAEPMSESKLNTLVQKLHDFLAHSSEESEETSSPPRLAMNQNTDKISGSGSNSDMMENSKEEGTSSSEKSKSSGSSRSKRKPSIVTKYVESDDEKPLDDETVNEDASNENSENDITMQSLPKEDGLHGIVSCTACGQQVNHFQKDSIYRHPSLQVLICKNCFKYYMSDDISRDSDGMDEQCRWCAEGGNLICCDFCHNAFCKKCILRNLGRKELSTIMDENNQWYCYICHPEPLLDLVTACNSVFENLEQLLQQNKKKIKVDSEKSNKVYEHTSRFSPKKTSSNCNGEEKKLDDSCSGSVTYSYSALIVPKEMIKKAKKLIETTANMNSSYVKFLKQATDNSEISSATKLRQLKAFKSVLADIKKAHLALEEDLNSEFRAMDAVNKEKNTKEHKVIDAKFETKARKGEKPCALEKKDISKSEAKLSRKQVDSEHMHQNVPTEEQRTNKSTGGEHKKSDRKEEPQYEPANTSEDLDMDIVSVPSSVPEDIFENLETAMEVQSSVDHQGDGSSGTEQEVESSSVKLNISSKDNRGGIKSKTTAKVTKELYVKLTPVSLSNSPIKGADCQEVPQDKDGYKSCGLNPKLEKCGLGQENSDNEHLVENEVSLLLEESDLRRSPRVKTTPLRRPTETNPVTSNSDEECNETVKEKQKLSVPVRKKDKRNSSDSAIDNPKPNKLPKSKQSETVDQNSDSDEMLAILKEVSRMSHSSSSDTDINEIHTNHKTLYDLKTQAGKDDKGKRKRKSSTSGSDFDTKKGKSAKSSIISKKKRQTQSESSNYDSELEKEIKSMSKIGAARTTKKRIPNTKDFDSSEDEKHSKKGMDNQGHKNLKTSQEGSSDDAERKQERETFSSAEGTVDKDTTIMELRDRLPKKQQASASTDGVDKLSGKEQSFTSLEVRKVAETKEKSKHLKTKTCKKVQDGLSDIAEKFLKKDQSDETSEDDKKQSKKGTEEKKKPSDFKKKVIKMEQQYESSSDGTEKLPEREEICHFPKGIKQIKNGTTDGEKKSKKIRDKTSKKKDELSDYAEKSTGKGDSCDSSEDKKSKNGAYGREKKRCKLLGKSSRKRQDCSSSDTEKYSMKEDGCNSSDKRLKRIELRERRNLSSKRNTKEIQSGSSSSDAEESSEDNKKKKQRTSSKKKAVIVKEKKRNSLRTSTKRKQADITSSSSSDIEDDDQNSIGEGSSDEQKIKPVTENLVLSSHTGFCQSSGDEALSKSVPVTVDDDDDDNDPENRIAKKMLLEEIKANLSSDEDGSSDDEPEEGKKRTGKQNEENPGDEEAKNQVNSESDSDSEESKKPRYRHRLLRHKLTVSDGESGEEKKTKPKEHKEVKGRNRRKVSSEDSEDSDFQESGVSEEVSESEDEQRPRTRSAKKAELEENQRSYKQKKKRRRIKVQEDSSSENKSNSEEEEEEKEEEEEEEEEEEEEEEDENDDSKSPGKGRKKIRKILKDDKLRTETQNALKEEEERRKRIAEREREREKLREVIEIEDASPTKCPITTKLVLDEDEETKEPLVQVHRNMVIKLKPHQVDGVQFMWDCCCESVKKTKKSPGSGCILAHCMGLGKTLQVVSFLHTVLLCDKLDFSTALVVCPLNTALNWMNEFEKWQEGLKDDEKLEVSELATVKRPQERSYMLQRWQEDGGVMIIGYEMYRNLAQGRNVKSRKLKEIFNKALVDPGPDFVVCDEGHILKNEASAVSKAMNSIRSRRRIILTGTPLQNNLIEYHCMVNFIKENLLGSIKEFRNRFINPIQNGQCADSTMVDVRVMKKRAHILYEMLAGCVQRKDYTALTKFLPPKHEYVLAVRMTSIQCKLYQYYLDHLTGVGNNSEGGRGKAGAKLFQDFQMLSRIWTHPWCLQLDYISKENKGYFDEDSMDEFIASDSDETSMSLSSDDYTKKKKKGKKGKKDSSSSGSGSDNDVEVIKVWNSRSRGGGEGNVDETGNNPSVSLKLEESKATSSSNPSSPAPDWYKDFVTDADAEVLEHSGKMVLLFEILRMAEEIGDKVLVFSQSLISLDLIEDFLELASREKTEDKDKPLIYKGEGKWLRNIDYYRLDGSTTAQSRKKWAEEFNDETNVRGRLFIISTKAGSLGINLVAANRVIIFDASWNPSYDIQSIFRVYRFGQTKPVYVYRFLAQGTMEDKIYDRQVTKQSLSFRVVDQQQVERHFTMNELTELYTFEPDLLDDPNSEKKKKRDTPMLPKDTILAELLQIHKEHIVGYHEHDSLLDHKEEEELTEEERKAAWAEYEAEKKGLTMRFNIPTGTNLPPVSFNSQTPYIPFNLGALSAMSNQQLEDLINQGREKVVEATNSVTAVRIQPLEDIISAVWKENMNLSEAQVQALALSRQASQELDVKRREAIYNDVLTKQQMLISCVQRILMNRRLQQQYNQQQQQQMTYQQATLGHLMMPKPPNLIMNPSNYQQIDMRGMYQPVAGGMQPPPLQRAPPPMRSKNPGPSQGKSM

SEQ ID NO: 235872 - DNA, 7365 bp, Artificial Sequence
  derived and/or modified sequence
atgacagctgagccaatgtctgagtctaaactgaacacacttgtgcagaagttgcacgactttttagcccatagttctgaagaaagcgaggaaacttcaagccccccacgactcgctatgaaccagaacactgacaaaatcagtgggtctgggtcaaacagtgatatgatggagaactccaaggaagagggcactagttcttccgaaaagtccaagtcttccggatctagcaggagtaagcggaaacccagcattgttacaaagtatgttgaaagtgacgacgaaaaaccgctggacgatgaaaccgtgaacgaggatgcctctaacgaaaattcagagaacgacatcacaatgcagtcccttcctaaagaggacggcctgcatggtatcgtcagttgcacagcatgtggccagcaggtcaatcactttcaaaaagattccatttatcggcatcccagtctccaagtgctgatttgcaaaaattgttttaaatactacatgtctgacgatatctccagggacagcgacgggatggatgagcagtgccgatggtgcgccgagggcggcaacctgatttgctgcgatttctgccataatgcgttttgcaagaaatgtattctaagaaatttaggccgaaaggagctcagtacaattatggacgagaacaatcagtggtactgctacatttgtcatccggaaccattgctggaccttgtgacagcctgtaactctgtgttcgagaatcttgagcagcttttacagcaaaacaagaagaaaataaaagtggactctgaaaagtcaaacaaggtttacgagcacacatctagatttagtcctaagaaaacctcctccaactgcaatggtgaggaaaaaaaacttgatgatagttgcagcggtagcgtgacctattcctactccgccctcattgtaccaaaggagatgataaagaaagcaaagaagcttatcgagacgactgcaaacatgaacagctcgtatgttaaattcctgaagcaggccaccgacaactcagaaatcagtagtgcaactaagctgcgacaattgaaggcttttaagtccgttctcgccgatatcaaaaaggcgcatttagccctcgaagaggacctcaactccgagttcagggcgatggacgccgtcaataaggagaagaacacgaaagagcataaagtcatagacgcaaaatttgaaactaaggcgagaaagggtgagaagccctgcgctctggaaaaaaaagacatcagtaagagtgaggccaaactgagcaggaagcaggtcgacagcgaacacatgcaccagaatgtccccacagaagagcaacgcactaataagagtaccgggggggaacacaaaaagtccgacaggaaggaggaaccccagtacgaacccgccaatacatcggaagatctggacatggatatcgtgtcagtaccctcctccgtacctgaggacattttcgaaaatctcgaaacggctatggaggtgcagtcatctgtcgaccaccagggggacggctcctctggcacagagcaggaggttgagtcatcttccgtgaagctgaatatcagtagtaaagacaataggggagggataaagtcgaaaaccaccgctaaggtgaccaaagaactgtatgttaagctgacacctgtttccctttccaattcgcccattaagggagccgactgccaggaggtaccccaagacaaagatggatacaagagttgcggcctgaacccaaagctggagaagtgtggccttggccaagaaaacagcgacaatgagcaccttgtggagaacgaggtctctctgctgctggaagagtcagacctgcgtagatctcccagagtcaagaccacgcccctccgacggccaacagaaactaaccctgtgactagcaattccgatgaggagtgtaatgaaacagtgaaggaaaagcagaagctcagcgtgccggtccggaagaaggacaagcgcaattcaagtgacagcgccatcgataatcctaaacctaataaactgcctaaaagcaaacaaagcgaaaccgtagatcagaacagcgattctgatgagatgcttgccattctcaaagaggtcagcaggatgtcccatagttcgtcctcagataccgatattaacgaaattcataccaatcacaagacactatacgatctgaagacacaagcaggtaaggatgataaaggaaaacgaaaacgcaaatcaagcacttccggcagcgactttgataccaagaagggcaagtccgcgaaatctagcattatttctaagaagaaacgtcagacccaatccgaaagctctaattacgacagcgagctggagaaggaaattaaatcaatgagtaagatcggagccgcacgcaccaccaagaagaggattcccaacacaaaggatttcgattcctccgaagacgaaaaacattctaaaaagggtatggataaccaaggtcataaaaatttgaagaccagccaggaggggtctagcgatgacgcagagcgcaagcaagagcgggagaccttctcgagtgctgaaggcacagtcgacaaggataccactatcatggagctccgtgataggctgccgaagaagcagcaagcctcagcttcaacagacggcgtggataaattatcaggcaaggagcagtcttttacaagtctggaggtgcggaaggtcgctgaaactaaagaaaagtcaaaacacctgaagactaaaacatgcaagaaagtgcaagacgggctttccgatatcgcggaaaagtttttgaagaaagaccaaagcgacgagaccagcgaagacgacaagaaacaaagtaaaaaggggactgaggaaaagaagaagccaagcgattttaagaaaaaggtgataaagatggagcaacagtacgagagttcctctgacggtactgagaagttgcctgaacgcgaggagatttgccattttcccaaaggtatcaagcagattaaaaatgggaccacagacggcgaaaaaaagtcaaaaaaaattagagacaaaacaagtaaaaagaaggacgagcttagtgactacgctgagaaatcaactggtaagggcgacagttgcgattcctcagaagacaaaaagtctaaaaatggggcctatggccgcgaaaagaagaggtgcaagctcctgggtaaaagttcaagaaaacggcaggattgcagttccagtgacacggaaaagtattcgatgaaggaggatggctgcaatagctctgacaagcggctgaagcgaattgagctgagagagcggagaaacctgtcgtccaagagaaacaccaaggagattcagtccgggtcgtccagctccgatgcagaggaatcaagcgaggataataaaaagaaaaagcagcggacgagctctaaaaagaaggctgtgatcgtgaaggagaagaagcggaactctcttagaacatccactaaacgaaagcaggcggacataacatccagcagttcctcagacatcgaagatgatgatcagaattctataggagagggatcatctgatgaacagaagataaagcctgttacagagaatctggtcctgtcatctcacactggcttctgtcagtcttcaggcgacgaggccctgagcaaatccgtgcccgttaccgtagacgatgacgatgacgacaacgacccagagaaccgtatcgccaaaaagatgctccttgaggagataaaagcgaacttgtcatctgatgaggatggctcaagcgatgatgaacccgaggagggaaaaaagcgaaccgggaaacagaacgaagagaatcctggagacgaggaggcaaaaaaccaggtgaatagcgagtctgattccgatagcgaggagtctaagaagccgaggtacagacaccggctcctcaggcataaattaaccgttagcgatggagagagcggagaagaaaagaagaccaagcctaaggagcataaagaggttaaaggccgtaacaggcgcaaggtatcttcagaggactccgaggacagtgacttccaagagtctggggtgtccgaagaagtgagcgagagcgaggatgagcagcgcccgcgtacccgcagcgccaaaaaagctgagcttgaagaaaaccaacgttcttataagcagaagaaaaaaaggaggcgcattaaggtgcaagaagattcatcctccgagaacaagtcgaacagtgaagaagaggaggaggagaaagaggaggaagaagaagaggaagaggaagaggaggaggaggaagaagacgaaaatgacgattcaaaaagccccggtaagggccgcaaaaagatcagaaagattttaaaggatgacaaattgcggaccgagacccaaaacgccttaaaggaggaggaggagagacgtaaacgcatcgcagagcgggagcgggaacgagagaaattgcgcgaggttatcgagatcgaggacgcgtcccccactaagtgccccatcaccactaaactcgtgctggatgaagatgaggagacaaaggagcccttagtccaggtgcacagaaatatggtcatcaagctcaagcctcaccaggtcgatggcgtgcaattcatgtgggactgttgctgcgaatcggtcaaaaaaaccaaaaaatctcccggctccggatgcatcctggcgcactgtatggggttaggcaaaacactgcaggtcgtgagcttcctccatacggtgctcttgtgtgataaactggacttttccacagctctcgtcgtttgtcctttgaacacagcattaaattggatgaatgagttcgagaagtggcaagaaggacttaaagacgatgaaaagctggaggtctccgagctagctaccgtcaagaggccacaggagcgatcatatatgctgcagcgctggcaggaggatggcggggttatgattattgggtacgaaatgtatcgtaatttagcccaggggcgaaacgtcaagagcagaaagctgaaggaaattttcaacaaggcgttggtcgatccagggcccgacttcgtggtatgcgatgaggggcatattctgaaaaacgaggcatcggctgtgtctaaggcaatgaatagtattcggagcagaaggagaatcatcctcactggcacgcctctccagaataacctcatcgaatatcattgcatggtgaatttcataaaggaaaaccttctcggttccataaaagagttccgcaaccgattcataaatccaatacaaaatggacagtgcgctgattctaccatggtcgatgtgcgtgttatgaagaaacgcgcccacattctgtatgaaatgctcgctggctgtgttcagcgtaaggattatacagctttgaccaagttcttgccacccaagcacgaatatgttttggcagtgaggatgaccagcatacagtgcaagctctatcagtactaccttgatcacttaactggcgtggggaataatagcgagggtgggcgggggaaagccggcgccaagctgtttcaggactttcagatgctcagcagaatatggacccacccctggtgcctgcagctagattatatctcgaaagagaacaagggttacttcgatgaggactctatggatgagtttatcgccagcgactccgacgaaacttctatgagtctcagcagcgatgactacacgaaaaagaagaaaaagggcaagaaggggaaaaaggattcaagttcatctggatccggcagtgataatgatgtggaggtaatcaaagtctggaatagccggtcccgcggagggggggagggtaatgtagacgagacagggaacaacccgtcagtttccctgaagctggaagaatccaaggcaactagctccagtaatccaagcagcccagctcctgattggtacaaggatttcgtgactgacgccgatgcggaagtgctcgagcactctgggaaaatggtcttattattcgagatcttgcggatggcggaagagattggcgacaaggtgttggtgttttcacagtccctaattagtctggaccttatcgaagattttctagaactggcgtcccgggagaaaacagaggataaggacaaaccactgatatacaagggagaggggaagtggctgcggaatatcgattattatcgcctagacggatcaaccacagcgcaatcacgcaagaaatgggccgaagaatttaatgacgaaacaaatgttagagggcgattatttatcatatctacgaaggccgggtcactcggtatcaatctcgtcgccgccaaccgcgtgatcatcttcgatgcaagctggaatccttcatatgatatccaatctatcttcagggtgtatcggtttgggcagacaaaacctgtgtacgtttacaggttcctggcacagggaaccatggaagataagatctacgataggcaggtcactaagcagtcactctcctttcgcgtggtggaccagcaacaagtggaaaggcatttcacaatgaacgagttgacagaactgtatacattcgaaccagatctgctggatgaccccaattccgaaaaaaagaagaagagggacactccaatgttaccgaaagacaccatcctcgcggagctgctgcagatccataaagagcacattgtcggctaccacgaacacgacagtttattggatcacaaagaggaggaggagctgacagaggaggaacggaaagccgcgtgggctgaatacgaagctgagaaaaagggactgactatgaggtttaacatcccaacaggcactaatctgccacccgtctcctttaattcccaaacgccatatataccatttaatttgggagcactaagtgccatgagtaaccaacagcttgaagacctcatcaaccaaggccgcgagaaggtggtcgaggccacgaattctgtgaccgctgtaaggatccagcctctggaagacattatcagtgctgtctggaaggaaaacatgaatttgagcgaagcccaggtgcaggctctcgcactctcaaggcaagctagccaggaactggacgttaaaaggagagaagccatctacaatgacgtgctcaccaagcagcagatgctcatttcatgcgtccaacgaatcttgatgaatcgacgtctccagcagcagtacaaccagcaacagcaacagcaaatgacatatcagcaggccacattgggccaccttatgatgcctaagcctccaaatttgattatgaatccgagtaattatcagcaaatcgacatgagaggaatgtaccagccagtcgctggagggatgcagccaccaccactacagagagcaccaccccctatgcgtagtaagaaccctggaccatcccaggggaagtccatgtag

SEQ ID NO: 235873 - DNA, 7365 bp, Artificial Sequence
  derived and/or modified sequence
atgacagctgagcccatgtctgagagcaagctgaacaccctggtgcagaagctgcatgacttcctggcccacagcagcgaggagagcgaggagaccagcagccccccccggctggccatgaaccagaacacagacaagatcagcggcagcggcagcaacagcgacatgatggagaacagcaaggaggagggcaccagcagcagcgagaagagcaagagcagcggcagcagccgcagcaagaggaagcccagcatcgtgaccaagtatgtggagagtgatgatgagaagcccctggatgatgagaccgtgaatgaagatgccagcaatgaaaattctgaaaatgacatcaccatgcagagcctgcccaaggaggatggcctgcacggcatcgtgtcctgcacagcctgtggccagcaggtgaaccacttccagaaggacagcatctaccgccaccccagcctgcaggtgctgatctgcaagaactgcttcaagtactacatgtctgatgacatcagccgggacagtgatggcatggatgagcagtgccgctggtgtgccgagggcggcaacctgatctgctgtgacttctgccacaatgccttctgcaagaagtgcatcctgaggaacctgggcaggaaggagctgagcaccatcatggatgagaacaaccagtggtactgctacatctgccaccctgagcccctgctggacctggtgacagcctgcaacagcgtgtttgagaacctggagcagctgctgcagcagaacaagaagaagatcaaggtggacagcgagaagagcaacaaggtgtatgagcacaccagccgcttcagccccaagaagaccagcagcaactgcaatggagaggagaagaagctggatgacagctgcagcggctctgtgacctacagctacagcgccctgattgtgcccaaggagatgatcaagaaggccaagaagctgattgagaccacagccaacatgaacagcagctatgtgaagttcctgaagcaggccacagacaacagcgagatcagcagcgccaccaagctgcggcagctgaaggccttcaagtctgtgctggccgacatcaagaaggcccacctggccctggaggaggacctgaacagcgagttccgggccatggatgctgtgaacaaggagaagaacaccaaggagcacaaggtgattgatgccaagtttgagaccaaggccaggaaaggagagaagccctgtgccctggagaagaaggacatcagcaagtctgaggccaagctgagcaggaagcaggtggacagcgagcacatgcaccagaatgtgcccacagaggagcagaggaccaacaagagcactggaggagagcacaagaagagtgacaggaaggaggagccccagtatgagcccgccaacaccagcgaggacctggacatggacatcgtgtctgtgcccagctctgtgcctgaggacatctttgagaacctggagacagccatggaggtgcagagctctgtggaccaccagggagatggcagcagcggcacagagcaggaggtggagagcagctctgtgaagctgaacatcagcagcaaggacaacagaggaggcatcaagagcaagaccacagccaaggtgaccaaggagctgtatgtgaagctgacccctgtgtccctgagcaacagccccatcaagggagctgactgccaggaggtgccccaggacaaggatggctacaagagctgtggcctgaaccccaagctggagaagtgtggcctgggccaggagaacagcgacaatgagcacctggtggagaatgaggtgtccctgctgctggaggagagtgacctgcggcgcagcccccgggtgaagaccacccccctgcggcggcccacagagaccaaccctgtgaccagcaacagtgatgaggagtgcaatgagaccgtgaaggagaagcagaagctgtctgtgcctgtgaggaagaaggacaagaggaacagcagtgacagcgccatcgacaaccccaagcccaacaagctgcccaagagcaagcagagcgagaccgtggaccagaacagcgacagtgatgagatgctggccatcctgaaggaggtgtccaggatgagccacagcagcagcagtgacacagacatcaatgagatccacaccaaccacaagaccctgtatgacctgaagacccaggccggcaaggatgacaagggcaagaggaagaggaagagcagcaccagcggcagtgactttgacaccaagaagggcaagagcgccaagagcagcatcatcagcaagaagaagaggcagacccagagcgagagcagcaactatgattctgagctggagaaggagatcaagtccatgagcaagattggagctgcccggaccaccaagaagaggatccccaacaccaaggactttgacagcagtgaagatgagaagcacagcaagaagggcatggacaaccagggccacaagaacctgaagaccagccaggagggcagcagtgatgatgctgagaggaagcaggagcgggagaccttcagcagcgctgagggcaccgtggacaaggacaccaccatcatggagctgcgggaccggctgcccaagaagcagcaggccagcgccagcacagatggagtggacaagctgagcggcaaggagcagagcttcaccagcctggaggtgaggaaggtggccgagaccaaggagaagagcaagcacctgaagaccaagacctgcaagaaggtgcaggacggcctgagtgacattgctgagaagttcctgaagaaggaccagagtgatgagaccagtgaagatgacaagaagcagagcaagaagggcacagaggagaagaagaagcccagcgacttcaagaagaaggtgatcaagatggagcagcagtatgagagcagcagtgatggaacagagaagctgcctgagcgggaggagatctgccacttccccaagggcatcaagcagatcaagaatggcaccacagatggagagaagaagagcaagaagatccgggacaagaccagcaagaagaaggatgagctgagtgactatgcagagaagagcacaggcaagggggacagctgtgacagcagcgaggacaagaagagcaagaatggagcctacggccgggagaagaagcgctgcaagctgctgggcaagagcagcaggaagaggcaggactgcagcagcagtgacacagagaagtacagcatgaaggaggatggctgcaacagcagtgacaagaggctgaagagaattgagctgcgggagaggaggaacctgagcagcaagaggaacaccaaggagatccagagcggcagcagcagcagtgatgctgaggagagcagcgaggacaacaagaagaagaagcagaggaccagcagcaagaagaaggccgtcatcgtgaaggagaagaagaggaacagcctgcggaccagcaccaagaggaagcaggccgacatcaccagcagcagcagcagtgacattgaagatgatgaccagaacagcatcggggagggcagcagtgatgagcagaagatcaagcctgtgacagagaacctggtgctgagcagccacacaggcttctgccagagcagtggagatgaggccctgagcaagtctgtgcctgtgacagtggatgatgatgatgatgacaatgaccctgagaacagaattgccaagaagatgctgctggaggagatcaaggccaacctgagcagtgatgaagatggcagcagtgatgatgagcctgaggagggcaagaagaggacaggcaagcagaatgaagaaaatcctggagatgaggaggccaagaaccaggtgaacagcgagagtgacagcgacagcgaggagagcaagaagccccgctaccgccaccggctgctgcggcacaagctgactgtgtctgatggagagagcggggaggagaagaagaccaagcccaaggagcacaaggaggtgaagggcaggaacagaaggaaggtgtccagtgaagattctgaggacagcgacttccaggagagcggcgtgtctgaggaggtgtctgagagtgaagatgagcagaggcccaggaccaggtctgccaagaaggccgagctggaggagaaccagaggagctacaagcagaagaagaagagaagacgcatcaaggtgcaggaggacagcagcagcgagaacaagagcaacagcgaggaggaggaggaggagaaggaggaggaggaggaggaggaggaggaggaggaggaggaggaggaggatgaaaatgatgacagcaagagccctggaaaaggaaggaagaagatcaggaagatcctgaaggatgacaagctgaggacagagacccagaatgccctgaaggaggaggaggagaggaggaagagaattgctgagcgggagcgggagcgggagaagctgcgggaggtgattgaaattgaagatgccagccccaccaagtgccccatcaccaccaagctggtgctggatgaagatgaggagaccaaggagcccctggtgcaggtgcacaggaacatggtgatcaagctgaagccccaccaggtggatggagtgcagttcatgtgggactgctgctgtgagagcgtgaagaagaccaagaagagccctggcagcggctgcatcctggcccactgcatgggcctgggcaagaccctgcaggtggtgtccttcctgcacacagtgctgctgtgtgacaagctggacttcagcacagccctggtggtgtgccccctgaacacagccctgaactggatgaatgaatttgagaagtggcaggagggcctgaaggatgatgagaagctggaggtgtctgagctggccaccgtgaagaggccccaggagaggagctacatgctgcagcgctggcaggaggatggaggagtgatgatcatcggctatgagatgtacagaaacctggcccagggcagaaatgtgaagagcaggaagctgaaggagatcttcaacaaggccctggtggaccccggccctgactttgtggtgtgtgatgagggccacatcctgaagaatgaggccagcgctgtgtccaaggccatgaacagcatccgcagcagaagacgcatcatcctgaccggcacccccctgcagaacaacctgattgagtaccactgcatggtgaacttcatcaaggagaacctgctgggcagcatcaaggagttcaggaaccgcttcatcaaccccatccagaatggccagtgtgccgacagcaccatggtggatgtgcgggtgatgaagaagagggcccacatcctgtatgagatgctggccggctgtgtgcagaggaaggactacacagccctgaccaagttcctgccccccaagcatgaatatgtgctggccgtgaggatgaccagcatccagtgcaagctgtaccagtactacctggaccacctgactggagtgggcaacaacagcgagggcggccggggcaaggccggggccaagctgttccaggacttccagatgctgagccgcatctggacccacccctggtgcctgcagctggactacatcagcaaagaaaataaaggctactttgatgaggacagcatggatgagttcatcgccagtgacagtgatgagacctccatgagcctgagcagtgatgactacaccaagaagaagaagaagggcaagaagggcaagaaggacagcagcagcagcggcagcggcagtgacaatgatgtggaggtgatcaaggtgtggaacagccgcagccggggcggcggggagggcaatgtggatgaaacaggcaacaaccccagcgtgtccctgaagctggaggagagcaaggccaccagcagcagcaaccccagcagccctgccccagactggtacaaggactttgtgacagatgctgatgctgaggtgctggagcacagcggcaagatggtgctgctgtttgagatcctgaggatggccgaggagattggagacaaggtgctggtgttcagccagagcctcatcagcctggacctgattgaggacttcctggagctggccagccgggagaagacagaggacaaggacaagcccctcatctacaagggggagggcaagtggctgagaaatattgactactaccgcctggatggcagcaccacagcccagagcaggaagaagtgggccgaggagttcaatgatgagaccaacgtgcggggccgcctcttcatcatcagcaccaaggccggcagcctgggcatcaacctggtggccgccaacagagtcatcatctttgatgcctcctggaaccccagctatgacatccagagcatcttccgggtgtaccgcttcggccagaccaagcctgtgtatgtgtaccgcttcctggcccagggcaccatggaggacaagatctatgaccggcaggtgaccaagcagagcctgtccttccgggtggtggaccagcagcaggtggagcggcacttcaccatgaatgagctgacagagctgtacacctttgagccagacctgctggatgaccccaacagcgagaagaagaagaagagggacacccccatgctgcccaaggacaccatcctggccgagctgctgcagatccacaaggagcacatcgtgggctaccacgagcatgacagcctgctggaccacaaggaggaggaggagctgacagaggaggagaggaaggccgcctgggccgagtatgaggccgagaagaagggcctgaccatgaggttcaacatccccaccggcaccaacctgccccctgtgtccttcaacagccagaccccctacatccccttcaacctgggcgccctgagcgccatgagcaaccagcagctggaggacctgatcaaccagggccgggagaaggtggtggaggccaccaacagcgtgacagctgtgcgcatccagcccctggaggacatcatctctgctgtgtggaaggagaacatgaacctgtctgaggcccaggtgcaggccctggccctgagccggcaggccagccaggagctggatgtgaagaggcgggaggccatctacaatgatgtgctgaccaagcagcagatgctgatcagctgtgtgcagaggatcctgatgaacagaaggctgcagcagcagtacaaccagcagcagcagcagcagatgacctaccagcaggccaccctgggccacctgatgatgcccaagccacccaacctgatcatgaaccccagcaactaccagcagattgacatgaggggcatgtaccagcctgtggccggcggcatgcagcccccacccctgcagagggcccccccacccatgaggagcaagaaccctggccccagccagggcaagtccatgtag

SEQ ID NO: 235874 - DNA, 7365 bp, Artificial Sequence
  derived and/or modified sequence
atgaccgccgagcccatgagcgagagcaagctgaacaccctggtgcaaaagctccacgattttctggctcattcttccgaagagagcgaggaaacaagttcgccaccaaggctggcgatgaatcagaacactgataagatctctgggagcgggtcaaatagcgatatgatggagaactctaaggaggaggggacctcatcgtcggagaagtcgaagagttccggatctagtaggagcaaacggaaaccatccattgtgaccaaatacgttgaaagcgatgacgaaaagcccttggacgacgagacggtcaacgaagatgcttcaaatgagaactccgaaaatgatataaccatgcagtctctccccaaagaggacggattgcacggcatcgtgagctgtacggcctgcggccaacaggtcaaccactttcagaaagattcaatttatcgacacccctcgctgcaggtgctgatctgcaagaactgtttcaagtactacatgtccgacgatatctcacgggacagcgacgggatggacgagcaatgtcgatggtgcgctgaagggggcaatcttatatgctgtgatttttgccacaatgccttctgtaagaaatgtattcttcggaatctgggtaggaaagaattgagtacaatcatggacgagaacaatcagtggtactgctatatatgtcaccctgagccgttactcgatctggtaacggcttgcaacagcgttttcgaaaatcttgagcagctgctacagcagaataaaaaaaaaataaaggtggacagcgagaaaagtaacaaggtctatgaacacacgagcagattctcacccaaaaagacatcctcaaactgcaacggcgaggaaaagaagttagacgacagctgcagcggcagcgtgacctactcttactccgctctcattgtgccgaaggaaatgatcaagaaagccaagaagctgatcgaaaccaccgctaacatgaacagcagttacgtgaagttccttaaacaagccacggataattcagaaatctcttcagccactaaactgaggcaactcaaagcattcaagtcagtcctggcagacattaagaaggcccacttagctctggaggaagaccttaatagcgagttccgtgccatggacgctgtgaacaaagaaaagaataccaaggaacacaaggtcattgacgccaaatttgagaccaaagctagaaaaggagagaagccatgtgctctcgaaaaaaaagacatcagcaagtccgaggctaaattaagtaggaagcaagttgacagcgagcacatgcatcagaacgtaccaaccgaagaacagaggaccaataaaagcactggcggcgagcacaagaagtccgatcgaaaggaggagcctcagtacgaaccagccaatacttccgaggatctggacatggatatcgtgagcgtgccaagctctgtgcccgaagatatcttcgaaaacctagaaaccgccatggaggtccagagttccgttgaccaccagggggatggcagcagtggcactgagcaggaggtcgagtcgagcagtgtaaagctcaacatctcctctaaagataatcgcggcggcatcaagtcgaaaactacagccaaagttacaaaggagttatatgtgaagctgacacctgtcagcttgtcgaacagtcctatcaaaggggccgactgccaagaggtgccccaagacaaggatggctacaagtcctgcggccttaaccccaagttagagaagtgcggcctgggacaggagaactccgataacgagcacctagttgaaaacgaggtgtctttactgctggaagagagtgatcttaggcgcagccccagggtgaagaccactcctctgaggcgccccactgagactaaccccgtgacttcgaatagcgacgaagagtgcaacgagacagtgaaagaaaagcaaaaacttagcgtgcctgtgcgtaagaaagataagagaaacagcagcgactctgctattgacaacccaaaacctaataaactgccaaagtccaaacagtccgaaaccgtcgaccaaaactccgattctgacgagatgttggctatcttgaaagaagtatccaggatgagtcactccagttcgtcagacaccgacattaatgaaatccacaccaatcacaaaacactatacgatctgaagactcaggctgggaaggatgacaagggtaagcgcaaaaggaagtcaagcacttcaggatccgatttcgacacgaagaaaggtaagagcgccaagagctctattatatctaaaaaaaaaaggcagacgcagtctgaaagcagcaattacgacagcgagctggaaaaggagatcaaatcaatgagcaaaattggcgcagccaggacaactaaaaagcgcattcctaacaccaaggactttgatagctccgaggacgagaaacattctaagaaaggaatggacaaccagggacataagaatctgaaaacatctcaggaaggaagctccgatgatgccgagaggaagcaggaaagagaaactttttcatctgctgagggaacagtggacaaagacaccacgattatggaattgcgcgatagattgccaaagaagcaacaggcaagcgcttccactgacggagtggataagttgtccgggaaggagcagtcttttactagtctggaggtcaggaaagttgctgaaactaaggagaaaagcaagcacctcaagactaagacctgtaagaaagtgcaggatgggctatctgacatcgccgaaaagtttctgaagaaggatcagtctgacgaaacctccgaggacgacaagaagcagtcaaagaaaggcaccgaggaaaagaagaaaccctccgactttaaaaagaaggtcatcaagatggaacagcagtacgagagctccagtgatggcaccgaaaagcttcccgagcgcgaggagatttgccatttccccaaaggtattaaacagatcaaaaacggaacaaccgacggggaaaagaaaagtaaaaaaatcagagataagaccagtaaaaagaaggatgaactcagcgattacgcagagaaatcgacgggtaagggcgattcctgtgattccagtgaagataaaaaatctaagaacggtgcttacggcagagaaaaaaaacgctgcaaattgttgggaaaatcttccagaaaaagacaggactgctcaagctcagacactgagaaatactctatgaaagaagacggttgcaacagcagtgataaaaggctgaagcgaattgagctgcgtgagcgccggaacttatcgtcaaaacggaacacaaaggaaatacaatcaggctcctcctccagtgacgcggaagagagcagtgaggacaataaaaagaagaaacagaggacctcaagcaaaaagaaggcggtaatcgtgaaggaaaaaaagaggaatagcttgcgtacatctaccaagaggaaacaggccgacatcactagcagctcaagcagtgatatcgaagacgatgatcagaacagcataggcgaaggcagctctgacgaacagaagatcaagccagtgaccgagaacctggttctatcatcccacaccgggttctgtcagtcgtcaggtgatgaagctctgtccaagtccgtgcccgtgactgttgacgacgatgatgatgacaatgatccagagaatcgcattgcaaagaaaatgttactcgaggaaataaaagcgaatttatccagtgacgaagatggctctagcgacgatgagcccgaagaagggaaaaagcgcaccgggaaacaaaatgaggaaaatccaggagacgaggaggcaaaaaaccaggtgaattccgaatccgattccgattcagaagagtccaagaaaccaagatatagacatagactgctgaggcacaagctgaccgtttcagatggagagagcggagaagaaaaaaaaacgaaaccaaaggaacacaaggaggtgaagggcagaaacaggcgcaaagtgtctagcgaggacagtgaagactctgacttccaggaaagtggtgtcagtgaggaggttagcgagtctgaggacgagcagaggccccgcactcgatctgcaaagaaagctgagctcgaagagaaccaacgctcctacaagcagaagaagaagcgccggagaattaaggtgcaggaggacagtagctcagaaaataagtcaaacagcgaggaagaggaagaggaaaaagaggaggaagaggaggaagaggaagaagaggaggaagaggaggaagacgaaaacgacgattctaagtcaccaggaaagggtaggaagaaaattcggaaaatactcaaggatgataaattgagaacggagacgcagaatgcactgaaggaagaagaagagcgccgaaaacggatcgccgaaagggagcgggagcgggaaaagctgagggaggtaattgaaatcgaggatgcctcccctacaaaatgtcctataactaccaagttggtgttggatgaggacgaggaaactaaggagccactggtgcaggtccataggaacatggtcatcaagctcaaaccccatcaagtggatggggtacagttcatgtgggactgctgctgcgagagcgtgaagaaaaccaaaaaaagtcctggtagtggatgtattctcgctcactgtatggggttaggcaagaccctccaggtggtcagtttcctgcacaccgtgcttctgtgcgacaagctggacttttcgaccgctctggtcgtgtgtccattaaacacagccctaaactggatgaacgagtttgagaagtggcaggaggggcttaaggatgatgagaaattggaagtgagtgagctggcaacagtgaagaggcctcaagagcggtcttacatgctgcaaagatggcaagaggacgggggggtgatgataatcggttacgaaatgtaccgtaatctggcccaagggagaaatgtaaaatctcggaagttgaaggaaattttcaacaaagctctcgtagatccagggcctgacttcgtggtgtgcgatgaaggtcacattctgaagaatgaggcctccgcagtttccaaggctatgaattccattagatctagaaggcggattatacttacaggtacccccctccagaataatctgatcgagtaccactgtatggtgaattttataaaggagaatctattgggatccatcaaggaatttcggaacagattcataaatcccatacagaatggtcagtgcgccgacagcaccatggtggacgtgcgtgtgatgaaaaagagagcgcacatcctgtacgagatgttagccggttgtgtgcagcgcaaggactacacggccctgacaaaattcctcccacctaaacatgaatacgtgcttgctgttagaatgacaagtattcagtgtaaactctatcaatactacctagatcacctgacaggggtcggcaacaattccgaggggggtagggggaaggctggagcaaagctatttcaggatttccaaatgctcagccgcatctggactcatccttggtgccttcagttggattatatttcaaaagagaacaaagggtacttcgacgaggactcgatggacgagtttattgcctccgatagcgatgagactagcatgtcgctgtcctccgacgactatactaagaaaaaaaagaagggcaaaaagggcaagaaagatagcagctcctcaggcagtggctcagacaacgatgtggaagtcattaaagtgtggaactcccggagtagggggggaggtgaaggcaatgtcgacgagactggcaacaacccgtcagtgtcacttaaactggaagaatcaaaagccacgtcatcaagtaacccttcctctcctgctcctgattggtacaaagacttcgtgactgacgctgacgccgaagtcctggagcactccgggaagatggtactgctttttgaaatcctccgcatggcagaagaaatcggagataaggtgctcgtgttctcacagagcctgatctcgctcgacctgatcgaagacttccttgaacttgcgagcagagaaaagaccgaagacaaggacaaaccactgatttacaaaggcgagggaaaatggcttagaaacatagattattaccgactcgacgggagcaccacagcgcagagcaggaaaaaatgggccgaagagttcaatgacgagaccaacgtgcgcggacgcctcttcataatctcaacaaaggccggctctcttgggattaacctcgtggctgcaaatcgggtgatcatctttgacgccagttggaacccatcctatgatatccagtccattttccgcgtgtataggttcgggcagaccaagcctgtctacgtatatcgtttcctagctcaaggaaccatggaagacaaaatatacgatcggcaggtgaccaaacagtcactgagttttcgcgtcgtggatcagcagcaggtggagcggcattttactatgaacgaactgaccgaactctatacgtttgaaccagaccttctcgatgaccccaatagtgagaaaaagaagaagagagacactcccatgcttccaaaggataccatcctcgccgagctgctacagatccataaggagcatattgtggggtatcatgagcacgacagtctgcttgaccataaagaagaagaggagctcacagaggaagaaagaaaagcagcgtgggcagagtacgaggcagaaaagaaaggactgactatgagattcaatatccccacagggactaatctacctccagtgagttttaattctcagaccccctacatcccttttaacctgggcgcacttagcgctatgagcaaccagcagttagaggatctgatcaatcagggacgcgagaaggtggtcgaggctacaaattctgtaacagcagtgcggattcagcccttagaagacatcatcagtgccgtctggaaggagaatatgaatctttcagaggcacaggttcaggctcttgcactcagtagacaagcctcccaggagctggatgtgaaacgcagagaggcgatatataacgacgtgctgaccaaacagcagatgctcattagctgcgtgcaaaggatccttatgaacaggcggctacaacagcaatataaccagcagcagcagcagcagatgacctaccagcaggctaccttaggccaccttatgatgcccaagccacctaatttgattatgaatccttccaattatcagcagatcgacatgcgcggaatgtaccagccagtagccggcggcatgcaacccccgcctttgcagcgtgcccctcctcctatgcgaagcaagaacccaggccccagtcagggcaaaagcatgtag

SEQ ID NO: 235875 - DNA, 7364 bp, Artificial Sequence
  derived and/or modified sequence
atgaccgcagagcccatgagcgagtctaagttgaacactcttgtgcaaaagctccacgattttcttgcacactccagtgaggagagcgaagagacatccagtcctccacggctggccatgaaccagaacacggacaagatcagtggcagtgggagtaattccgacatgatggagaatagtaaagaggagggcacatcctccagtgagaaatccaagagctctgggtccagtcgctctaaacgaaagccatctatcgttaccaagtacgtggaaagcgatgacgagaagcctctggatgacgaaacagtgaatgaagacgccagtaacgaaaacagtgagaacgatatcacaatgcagagcctgcctaaagaggacgggctgcatggtattgtaagttgcaccgcatgcgggcaacaggtgaaccactttcagaaggacagcatttaccgtcacccgagccttcaggtgcttatttgcaaaaattgcttcaagtactacatgagcgacgatatttcacgggattccgacgggatggatgaacagtgtcgatggtgcgctgagggcggaaacctcatttgctgtgacttttgccacaatgccttctgcaagaagtgtatcttacgtaacctcggcagaaaagaactttccactattatggatgaaaacaatcagtggtactgctacatttgtcatccagagcctttgctcgacttggtcaccgcttgtaatagtgtgtttgagaacctcgagcagctcctgcagcagaacaagaagaagatcaaggtggactctgagaaatctaataaggtgtacgaacatacgtctcggttctctcccaaaaagacttcctcgaattgtaatggggaagaaaaaaaattggacgatagttgttccggctctgttacttacagctacagtgctctgatagtccctaaggagatgatcaagaaggctaaaaagctgattgaaacaaccgccaacatgaactcatcctacgtcaaattcctcaaacaggccaccgataactcagagatcagttctgctaccaagcttcgacaactcaaggccttcaagtcggtcctggccgatatcaaaaaggcccatctcgcactcgaggaggacctgaactccgagtttcgagctatggatgccgtcaataaagagaagaacaccaaagagcacaaggtgattgacgctaaattcgagacaaaagccaggaaaggggaaaaaccatgtgcccttgagaagaaggatattagcaaatctgaggcgaagctcagtagaaaacaggtggattcagagcatatgcatcagaatgttcctactgaagaacagaggactaataagagcacaggtggcgagcacaaaaagtcagaccgcaaagaggagcctcagtacgagccagctaacacatccgaagacctagacatggacatagtgtctgttcctagttcagttccagaagatatttttgagaatctggaaaccgccatggaagtgcagtcctcagtcgatcaccaaggtgatggttcctctggcacagagcaggaggtcgaaagcagcagcgtgaaactgaacatatccagcaaggataacaggggtggcatcaaatccaaaaccaccgccaaggtcaccaaggagctgtatgtgaagcttacacctgttagtcttagcaattcaccaattaagggtgcagattgccaagaggtacctcaggacaaggatgggtataagagctgtggtctcaacccgaaactggagaaatgtggcctgggccaggagaactccgataacgagcatctcgtcgaaaacgaagtctccttgctgctggaggaatcagacctccggagatcgcccagagtgaagacaacaccactgagacggcctaccgaaacaaaccctgtaacctctaactccgatgaagaatgtaatgaaacggttaaagagaagcagaagctgagtgtgcctgtgcgcaaaaaagataaaaggaacagctccgatagtgcaatcgacaatccgaagcccaataagttgcctaagagcaagcagagcgagaccgtggatcaaaattcagatagtgatgagatgctggccattttgaaggaagtgagcagaatgtctcactctagctcaagtgataccgacattaacgagatacatactaatcacaaaactttatacgatttgaagacccaagcgggaaaagacgataagggtaagcggaaaagaaaaagtagtacatctggctccgactttgatacaaagaagggtaaatctgccaagagcagcatcatatcaaagaaaaagagacagacacagtctgagtcctctaattatgattcagagctggaaaaggagattaagtcaatgtccaagattggagccgctagaactacaaaaaagcggatccctaatactaaggactttgatagttccgaggatgaaaagcattccaagaagggcatggacaatcagggccacaagaatctgaagacctctcaggaaggaagtagcgatgatgcagagcgaaagcaggagagggagacattttcatcagccgaaggcaccgtagacaaagacacgacaatcatggaactgcgcgatagattgccaaaaaagcagcaggcctctgcctctaccgatggggtggacaaactgagcggaaaagagcaatccttcacttccttagaggtgaggaaggtcgctgagactaaggagaagagcaaacacctcaagacaaagacatgtaaaaaagtacaggacggtctgtcagacatcgctgagaaatttttaaaaaaggatcagtctgatgaaacttcagaggacgataagaaacaatccaaaaaggggacagaagagaagaaaaagccatccgattttaaaaaaaaggtcatcaagatggagcaacaatacgagtcttcaagcgatggtactgaaaagctcccggagagagaggagatttgccactttccaaagggaatcaagcagatcaagaacggcactacagatggtgaaaaaaagagcaaaaagatccgcgacaaaacctctaagaagaaggacgaactgtccgattatgccgaaaagagcacaggaaaaggcgactcttgcgactcatccgaggacaagaaaagtaagaacggggcttacggccgagaaaagaagcgatgcaaattgttggggaagtcttctaggaaacgacaagactgctcgtcctctgatacggagaaatattccatgaaagaggatggctgcaattctagcgataaacggcttaagagaatagaattacgggaaaggcgcaacctgagttccaagagaaataccaaggagatccaatcagggtcaagctccagtgacgcagaggagtcttctgaggacaacaaaaagaagaaacagaggacctcttcaaagaaaaaagcagtcatcgtgaaagagaagaagcgaaattcccttagaactagcacaaagcgaaaacaggcagatatcacctcaagttcctcctcagatatcgaagatgacgaccaaaactctattggcgagggctcctctgacgaacagaaaatcaagcccgttaccgagaaccttgtcctgtcctcccataccggcttctgtcagagcagcggcgatgaggctctatccaagagcgtgccggtgacagttgatgacgatgacgatgataacgatcctgagaatcggattgctaagaagatgctgctggaggagataaaggcaaacctgtccagtgacgaggacggctcttcagatgatgagcccgaggaggggaagaagaggacaggaaaacagaacgaagagaaccccggagatgaagaggccaaaaaccaggtaaactctgagagcgacagcgactccgaagaaagtaagaagcccaggtaccggcacagactgctccgccataaacttactgtatccgacggcgaatctggtgaggagaaaaaaacaaaaccaaaggaacacaaagaggtgaaaggtcgtaacaggcgaaaggtgtcgtctgaggactccgaggactctgacttccaggaatctggagtgtctgaagaagtatctgaatcggaggatgagcaacgcccacgaacccgctcagccaagaaggcggaactggaagagaatcaacggtcctacaagcagaaaaaaaaaaggcggagaataaaggtgcaggaggactcgtcgtcagaaaataagagcaattctgaggaagaagaagaggagaaagaggaggaagaggaggaagaggaagaagaggaggaagaggaagaagacgagaacgatgatagcaaatcccctggcaaaggccgaaagaaaatccgcaagatcctgaaagatgataagctcaggaccgagacccagaatgccctcaaggaagaggaagagaggaggaagaggatagcagagagagaacgcgagcgcgagaaactacgagaggtaatcgagattgaggacgccagcccaactaagtgtcccatcaccacaaagctggtgctggatgaggacgaggagacaaaggagcccctggtgcaggttcatcgaaacatggtgattaaactcaagccacaccaggttgacggggtgcaattcatgtgggactgttgttgcgaatccgtcaagaaaaccaaaaagtcaccaggctcaggatgtattcttgcccactgtatgggcctggggaaaaccctccaggtcgtgtcattcttacacaccgtcttgttgtgcgataaactcgatttctctacagcgcttgtcgtttgccccttaaacaccgctcttaactggatgaacgagttcgagaaatggcaggaagggctgaaggacgacgagaaacttgaagtcagtgagctggcgaccgtaaagcgacctcaggagcgctcctatatgctgcagcgatggcaggaggatggcggagtgatgattataggatatgagatgtaccggaatctggcccagggcagaaacgtgaagagcagaaagctgaaagagatctttaataaggctctagtggaccctggacctgatttcgttgtatgcgacgagggtcacatcctgaagaacgaggcgagtgccgtctccaaggctatgaacagcatccgaagcagacgcaggattattctgacagggacccccctgcagaataaccttatcgaataccattgcatggttaacttcattaaagagaatcttctggggtctattaaagagttcaggaacaggtttataaatccaatacagaacggccaatgcgcggactcaaccatggtcgacgttagagtgatgaaaaagagagctcacatactctatgagatgctcgccggatgcgtgcagcgcaaggactataccgcactcacgaaattccttccccctaagcatgagtacgtgcttgcagtcagaatgaccagtattcaatgtaaactgtaccagtactaccttgaccacctcaccggagtgggaaacaattcagagggcggacggggtaaggccggtgctaaactgtttcaggatttccagatgctgtcccgcatctggacacatccatggtgcctgcagctggattatataagtaaggagaacaagggttatttcgatgaagactctatggacgaattcatcgccagcgactccgatgaaacctcaatgtcactttcatcagatgattataccaaaaagaaaaaaaaaggtaagaagggtaaaaaggattcaagttcctctggatctggcagcgataacgacgttgaggtcattaaagtctggaatagccgatcgcgtggaggcggagagggcaatgtcgacgagaccggtaataatccatcagtatcactgaagcttgaagagtcaaaagctacttcctcttcgaacccctcctccccggcacctgactggtataaagacttcgtgaccgacgccgacgctgaggtgctcgagcatagcggtaagatggtcctgctatttgagattctgcgtatggccgaagagattggagacaaggtgctggtgttcagccagtctctcatctcgctcgacttaattgaggatttcttggagctggccagcagggaaaaaacagaggataaggataaaccgctaatttacaaaggcgaaggtaagtggctcagaaatatagattactacaggcttgatggctctactactgctcagtcacgtaagaagtgggcagaggagtttaacgatgagacgaatgtcaggggcagactctttatcatcagtactaaagctggcagtctgggcataaacttggtcgcagccaatagggttattatttttgacgccagctggaaccctagttatgatattcagagtatctttcgggtgtacagattcggccagacaaaacccgtatacgtataccgattcctggctcaggggacaatggaagacaaaatttacgaccgccaggtaacaaaacagtctctaagttttcgtgtggtcgatcagcaacaagtcgagagacatttcactatgaacgaattaacagagctgtacacattcgagccagacctgctcgacgacccaaattctgaaaagaaaaaaaaaagagatacacctatgcttccgaaggataccatcctggccgagctgctgcaaatccacaaggaacatattgtgggatatcatgagcacgactctcttttagatcacaaagaagaggaggagcttacagaagaggagcgtaaagccgcatgggcagaatatgaggctgagaagaaggggctaaccatgaggttcaacatccctactggcaccaacctgccaccagttagtttcaacagtcaaactccatacattccctttaatctgggcgctctgtctgccatgtccaatcaacaactagaggacctgatcaaccagggcagagagaaggtcgtcgaggccacaaactccgtgaccgcagtcaggatccagccccttgaagacattatctccgccgtgtggaaagaaaacatgaacctgtcagaggctcaagtgcaggctctggctttatcccggcaggcctcccaggaactcgacgtgaagcggagggaggctatctacaatgacgtgctaacaaaacagcagatgctcatctcatgtgtgcagaggatcctcatgaacagacgcttgcagcaacaatacaatcagcagcagcagcaacaaatgacctaccagcaggcaactcttggccacttaatgatgcccaaaccccctaacctgatcatgaatccctcaaattatcagcagatcgacatgagagggatgtaccagcccgtggctggagggatgcaacctccacccctacaaagggccccacctcccatgcgctccaagaaccccggaccatcacaggggaaatctatgta

SEQ ID NO: 235876 - DNA, 11031 bp, Artificial Sequence
  derived and/or modified sequence
ctcggcccaacaaaatggcggcggcagcggtgtcgctttgtttccgcggctcctgcggcggtggcagtggtagcggcctttgagctgtggggaggttccagcagcagctacagtgacgactaagactccagtgcatttctatcgtaaccgggcgcgggggagcgcagatcggcgcccagcaatcacagaagccgacaaggcgttcaagcgaaaacatgaccgctgagcccatgagtgaaagcaagttgaatacattggtgcagaagcttcatgacttccttgcacactcatcagaagaatctgaagaaacaagttctcctccacgacttgcaatgaatcaaaacacagataaaatcagtggttctggaagtaactctgatatgatggaaaacagcaaggaagagggaactagctcttcagaaaaatccaagtcttcaggatcgtcacgatcaaagaggaaaccttcaattgtaacaaagtatgtagaatcagatgatgaaaaacctttggatgatgaaactgtaaatgaagatgcgtctaatgaaaattcagaaaatgatattactatgcagagcttgccaaaagaagatgggcttcatgggattgtgagctgcactgcttgtggacaacaggtcaatcattttcaaaaagattccatttatagacacccttcattgcaagttcttatttgtaagaattgctttaagtattacatgagtgatgatattagccgtgactcagatggaatggatgaacaatgtaggtggtgtgcggaaggtggaaacttgatttgttgtgacttttgccataatgctttctgcaagaaatgcattctacgcaaccttggtcgaaaggagttgtccacaataatggatgaaaacaaccaatggtattgctacatttgtcacccagagcctttgttggacttggtcactgcatgtaacagcgtatttgagaatttagaacagttgttgcagcaaaataagaagaagataaaagttgacagtgaaaagagtaataaagtatatgaacatacatccagattttctccaaagaagactagttcaaattgtaatggagaagaaaagaaattagatgattcctgttctggctctgtaacctactcttattccgcactaattgtgcccaaagagatgattaagaaggcaaaaaaactgattgagaccacagccaacatgaactccagttatgttaaatttttaaagcaggcaacagataattcagaaatcagttctgctacaaaattacgtcagcttaaggcttttaagtctgtgttggctgatattaagaaggctcatcttgcattggaagaagacttaaattccgagtttcgagcgatggatgctgtaaacaaagagaaaaataccaaagagcataaagtcatagatgctaagtttgaaacaaaagcacgaaaaggagaaaaaccttgtgctttggaaaagaaggatatttcaaagtcagaagctaaactttcaagaaaacaggtagatagtgagcacatgcatcagaatgttccaacagaggaacaaagaacaaataaaagtaccggtggtgaacataagaaatctgatagaaaagaagaacctcaatatgaacctgccaacacttctgaagatttagacatggatattgtgtctgttccttcctcagttccagaagacatttttgagaatcttgagactgctatggaagttcagagttcagttgatcatcaaggggatggcagcagtggaactgaacaagaagtggagagttcatctgtaaaattaaatatttcttcaaaagacaacagaggaggtattaaatcaaaaactacagctaaagtaacaaaagaattatatgttaaactcactcctgtttccctttctaattccccaattaaaggtgctgattgtcaggaagttccacaagataaagatggctataaaagttgtggtctgaaccccaagttagagaaatgtggacttggacaggaaaacagtgataatgagcatttggttgaaaatgaagtttcattacttttagaggaatctgatcttcgaagatccccacgtgtaaagactacacccttgaggcgaccgacagaaactaaccctgtaacatctaattcagatgaagaatgtaatgaaacagttaaggagaaacaaaaactatcagttccagtgagaaaaaaggataagcgtaattcttctgacagtgctatagataatcctaagcctaataaattgccaaaatctaagcaatcagagactgtggatcaaaattcagattctgatgaaatgctagcaatcctcaaagaggtgagcaggatgagtcacagttcttcttcagatactgatattaatgaaattcatacaaaccataagactttgtatgatttaaagactcaggcggggaaagatgataaaggaaaaaggaaacgaaaaagttctacatctggctcagattttgatactaaaaagggcaaatcagctaagagctctataatttctaaaaagaaacgacaaacccagtctgagtcttctaattatgactcagaattagaaaaagagataaagagcatgagtaaaattggtgctgccagaaccaccaaaaaaagaattccaaatacaaaagattttgactcttctgaagatgagaaacacagcaaaaaaggaatggataatcaagggcacaaaaatttgaagacctcacaagaaggatcatctgatgatgctgaaagaaaacaagagagagagactttctcttcagcagaaggcacagttgataaagacacgaccatcatggaattaagagatcgacttcctaagaagcagcaagcaagtgcttccactgatggtgtcgataagctttctgggaaagagcagagttttacttctttggaagttagaaaagttgctgaaactaaagaaaagagcaagcatctcaaaaccaaaacatgtaaaaaagtacaggatggcttatctgatattgcagagaaattcctaaagaaagaccagagcgatgaaacttctgaagatgataaaaagcagagcaaaaagggaactgaagaaaaaaagaaaccttcagactttaagaaaaaagtaattaaaatggaacaacagtatgaatcttcatctgatggcactgaaaagttacctgagcgagaagaaatttgtcattttcctaagggcataaaacaaattaagaatggaacaactgatggagaaaagaaaagtaaaaaaataagagataaaacttctaaaaagaaggatgaattatctgattatgctgagaagtcaacagggaaaggagatagttgtgactcttcagaggataaaaagagtaagaatggagcatatggtagagagaagaaaaggtgcaagttgcttggaaagagttcaaggaagagacaagattgttcatcatctgatactgagaaatattccatgaaagaagatggttgtaactcttctgataagagactgaaaagaatagaattgagggaaagaagaaatttaagttcaaagagaaatactaaggaaatacaaagtggctcatcatcatctgatgctgaggaaagttctgaagataataaaaagaagaagcaaagaacttcatctaaaaagaaggcagtcattgtcaaggagaaaaagagaaactccctaagaacaagcactaaaaggaagcaagctgacattacatcctcatcttcttctgatatagaagatgatgatcagaattctataggtgagggaagcagcgatgaacagaaaattaagcctgtgactgaaaatttagtgctgtcttcacatactggattttgccaatcttcaggagatgaagccttatctaaatcagtgcctgtcacagtggatgatgatgatgacgacaatgatcctgagaatagaattgccaagaagatgcttttagaagaaattaaagccaatctttcctctgatgaggatggatcttcagatgatgagccagaagaagggaaaaaaagaactggaaaacaaaatgaagaaaacccaggagatgaggaagcaaaaaatcaagtcaattctgaatcagattcagattctgaagaatctaagaagccaagatacagacataggcttttgcggcacaaattgactgtgagtgacggagaatctggagaagaaaaaaagacaaagcctaaagagcataaagaagtcaaaggcagaaacagaagaaaggtgagcagtgaagattcagaagattctgattttcaggaatcaggagttagtgaagaagttagtgaatccgaagatgaacagcggcccagaacaaggtctgcaaagaaagcagagttggaagaaaatcagcggagctataaacagaaaaagaaaaggcgacgtattaaggttcaagaagattcatccagtgaaaacaagagtaattctgaggaagaagaggaggaaaaagaagaggaggaggaagaggaggaggaggaggaagaggaggaggaagatgaaaatgatgattccaagtctcctggaaaaggcagaaagaaaattcggaagattcttaaagatgataaactgagaacagaaacacaaaatgctcttaaggaagaggaagagagacgaaaacgtattgctgagagggagcgtgagcgagaaaaattgagagaggtgatagaaattgaagatgcttcacccaccaagtgtccaataacaaccaagttggttttagatgaagatgaagaaaccaaagaacctttagtgcaggttcatagaaatatggttatcaaattgaaaccccatcaagtagatggtgttcagtttatgtgggattgctgctgtgagtctgtgaaaaaaacaaagaaatctccaggttcaggatgcattcttgcccactgtatgggccttggtaagactttacaggtggtaagttttcttcatacagttcttttgtgtgacaaactggatttcagcacggcgttagtggtttgtcctcttaatactgctttgaattggatgaatgaatttgagaagtggcaagagggattaaaagatgatgagaagcttgaggtttctgaattagcaactgtgaaacgtcctcaggagagaagctacatgctgcagaggtggcaagaagatggtggtgttatgatcataggctatgagatgtatagaaatcttgctcaaggaaggaatgtgaagagtcggaaacttaaagaaatatttaacaaagctttggttgatccaggccctgattttgttgtttgtgatgaaggccatattctaaaaaatgaagcatctgctgtttctaaagctatgaattctatacgatcaaggaggaggattattttaacaggaacaccacttcaaaataacctaattgagtatcattgtatggttaattttatcaaggaaaatttacttggatccattaaggagttcaggaatagatttataaatccaattcaaaatggtcagtgtgcagattctaccatggtagatgtcagagtgatgaaaaaacgtgctcacattctctatgagatgttagctggatgtgttcagaggaaagattatacagcattaacaaaattcttgcctccaaaacacgaatatgtgttagctgtgagaatgacttctattcagtgcaagctctatcagtactacttagatcacttaacaggtgtgggcaataatagtgaaggtggaagaggaaaggcaggtgcaaagcttttccaagattttcagatgttaagtagaatatggactcatccttggtgtttgcagctagactacattagcaaagaaaataagggttattttgatgaagacagtatggatgaatttatagcctcagattctgatgaaacctccatgagtttaagctccgatgattatacaaaaaagaagaaaaaagggaaaaaggggaaaaaagatagtagctcaagtggaagtggcagtgacaatgatgttgaagtgattaaggtctggaattcaagatctcggggaggtggtgaaggaaatgtggatgaaacaggaaacaatccttctgtttctttaaaactggaagaaagtaaagctacttcttcttctaatccaagcagcccagctccagactggtacaaagattttgttacagatgctgatgctgaggttttagagcattctgggaaaatggtacttctctttgaaattcttcgaatggcagaggaaattggggataaagtccttgttttcagccagtccctcatatctctggacttgattgaagattttcttgaattagctagtagggagaagacagaagataaagataaaccccttatttataaaggtgaggggaagtggcttcgaaacattgactattaccgtttagatggttccactactgcacagtcaaggaagaagtgggctgaagaatttaatgatgaaactaatgtgagaggacgattatttatcatttctactaaagcaggatctctaggaattaatctggtagctgctaatcgagtaattatattcgacgcttcttggaatccatcttatgacatccagagtatattcagagtttatcgctttggacaaactaagcctgtttatgtatataggttcttagctcagggaaccatggaagataagatttatgatcggcaagtaactaagcagtcactgtcttttcgagttgttgatcagcagcaggtggagcgtcattttactatgaatgagcttactgaactttatacttttgagccagacttattagatgaccctaattcagaaaagaagaagaagagggatactcccatgctgccaaaggataccatacttgcagagctccttcagatacataaagaacacattgtaggataccatgaacatgattctcttttggaccacaaagaagaagaagagttgactgaagaagaaagaaaagcagcttgggctgagtatgaagcagagaagaagggactgaccatgcgtttcaacataccaactgggaccaatttaccccctgtcagtttcaactctcaaactccttatattcctttcaatttgggagccctgtcagcaatgagtaatcaacagctggaggacctcattaatcaaggaagagaaaaagttgtagaagcaacaaacagtgtgacagcagtgaggattcaacctcttgaggatataatttcagctgtatggaaggagaacatgaatctctcagaggcccaagtacaggcgttagcattaagtagacaagccagccaggagcttgatgttaaacgaagagaagcaatctacaatgatgtattgacaaaacaacagatgttaatcagctgtgttcagcgaatacttatgaacagaaggctccagcagcagtacaatcagcagcaacagcaacaaatgacttatcaacaagcaacactgggtcacctcatgatgccaaagcccccaaatttgatcatgaatccttctaactaccagcagattgatatgagaggaatgtatcagccagtggctggtggtatgcagccaccaccattacagcgtgcaccacccccaatgagaagcaaaaatccaggaccttcccaagggaaatcaatgtgattttgcactaaaagcttaatggattgttaaaatcatagaaagatcttttatttttttaggaatcaatgacttaacagaactcaactgtataaatagtttggtccccttaaatgccaatcttccatattagttttactttttttttttttaaatagggcataccatttcttcctgacatttgtcagtgatgttgcctagaatcttcttacacacgctgagtacagaagatatttcaaattgttttcagtgaaaacaagtccttccataatagtaacaactccacagatttcctctctaaatttttatgcctgcttttagcaaccataaaattgtcataaaattaataaatttaggaaagaataaagatttatatattcattctttacatataaaaacacacagctgagttcttagagttgattcctcaagttatgaaatacttttgtacttaatccatttcttgattaaagtgattgaaatggttttaatgttcttttgactgaagtctgaaactgggctcctgctttattgtctctgtgactgaaagttagaaactgagggttatctttgacacagaattgtgtgcaatattcttaaatactactgctctaaaagttggagaagtcttgcagttatcttagcattgtataaacagccttaagtatagcctaagaagagaattcctttttcttctttagtccttctgccattttttattttcagttatatgtgctgaaataattactggtaaaatttcagggttgtggattatcttccacacatgaattttctctctcctggcacgaatataaagcacatctcttaactgcatggtgccagtgctaatgcttcatcctgttgctggcagtgggatgtggacttagaaaatcaagttctagcattttagtaggttaacactgaagttgtggttgttaggttcacaccctgttttataaacaacatcaaaatggcagaaccattgctgactttaggttcacatgaggaatgtacttttaacaattcccagtactatcagtattgtgaaataattcctctgaaagataagaatcactggcttctatgcgcttcttttctctcatcatcatgttcttttaccccagtttccttacatttttttaaattgtttcagagtttgttttttttttagtttagattgtgaggcaattattaaatcaaaattaattcatccaatacccctttactagaagttttactagaaaatgtattacattttattttttcttaatccagttctgcaaaaatgacctataaatttattcatgtacaattttggttacttgaattgttaaagaaaacattgtttttgactatgggagtcaactcaacatggcagaaccatttttgagatgatgatacaacaggtagtgaaacagcttaagaattccaaaaaaaaaaaaaaaaaaaaaaaaaagaaaactgggtttgggctttgctttaggtatcactggattagaatgagtttaacattagctaaaactgctttgagttgtttggatgattaagagattgccatttttatcttggaagaactagtggtaaaacatccaagagcactaggattgtgatacagaatttgtgaggtttggtggatccacgcccctctcccccactttcccatgatgaaatatcactaataaatcctgtatatttagatattatgctagccatgtaatcagatttatttaattgggtggggcaggtgtgtatttactttagaaaaaatgaaaaagacaagatttatgagaaatatttgaaggcagtacactctggccaactgttaccagttggtatttctacaagttcagaatattttaaacctgatttactagacctgggaattttcaacatggtctaattatttactcaaagacatagatgtgaaaattttaggcaaccttctaaatctttttcaccatggatgaaactataacttaaagaataatacttagaagggttaattggaaatcagagtttgaaataaaacttggaccactttgtatacactcttctcacttgacattttagctatataatatgtactttgagtataacatcaagctttaacaaatatttaaagacaaaaaaatcacgtcagtaaaatactaaaaggctcatttttatatttgttttagatgttttaaatagttgcaatggattaaaaatgatgatttaaaatgttgcttgtaatacagttttgcctgctaaattctccacattttgtaacctgttttatttctttgggtgtaaagcgtttttgcttagtattgtgatattgtatatgttttgtcccagttgtatagtaatgtttcagtccatcatccagctttggctgctgaaatcatacagctgtgaagacttgcctttgtttctgttagactgcttttcagttctgtattgagtatcttaagtactgtagaaaagatgtcacttcttcctttaaggctgttttgtaatatatataaggactggaattgtgtttttaaagaaaagcattcaagtatgacaatatactatctgtgttttcaccattcaaagtgctgtttagtagttgaaacttaaactatttaatgtcatttaataaagtgaccaaaatgtgttgtgctctttattgtattttcacagctttgaaaatctgtgcacatactgtttcatagaaaatgtatagcttttgttgtcctatataatggtggttcttttgcacatttagttatttaatattgagaggtcacgaagtttggttattgaatctgttatatactaaattctgtaaagggagatctctcatctcaaaaagaatttacataccaggaagtccatgtgtgtttgtgttagttttggatgtctttgtgtaatccagccccatttcctgtttcccaacagctgtaacactcattttaagtcaagcagggctaccaacccacacttgatagaaaagctgcttaccattcagaagcttccttattacctggcctccaaatgagctgaatattttgtagccttcccttagctatgttcattttccctccattatcataaaatcagatcgatatttatgtgccccaaacaaaactttaagagcagttacattctgtcccagtagcccttgtttcctttgagagtagcatgttgtgaggctatagagacttattctaccagtaaaacaggtcaatccttttacatgtttattatactaaaaattatgttcagggtatttactactttatttcaccagactcagtctcaagtgacttggctatctccaaatcagatctacccttagagaataaacatttttctaccgttattttttttcaagtctataatctgagccagtcccaaaggagtgatcaagtttcagaaatgctttcatcttcacaacattttatatatactattatatggggtgaat

SEQ ID NO: 235877 - DNA, 7365 bp, Artificial Sequence
  derived and/or modified sequence
atgaccgccgagcccatgagcgagagcaagctgaacaccctggtgcagaagctgcacgacttcctggcccacagcagcgaggagagcgaggagaccagcagcccccccagactggccatgaaccagaacaccgacaagatcagcggcagcggcagcaacagcgacatgatggagaacagcaaggaggagggcaccagcagcagcgagaagagcaagagcagcggcagcagcagaagcaagagaaagcccagcatcgtgaccaagtacgtggagagcgacgacgagaagcccctggacgacgagaccgtgaacgaggacgccagcaacgagaacagcgagaacgacatcaccatgcagagcctgcccaaggaggacggcctgcacggcatcgtgagctgcaccgcctgcggccagcaggtgaaccacttccagaaggacagcatctacagacaccccagcctgcaggtgctgatctgcaagaactgcttcaagtactacatgagcgacgacatcagcagagacagcgacggcatggacgagcagtgcagatggtgcgccgagggcggcaacctgatctgctgcgacttctgccacaacgccttctgcaagaagtgcatcctgagaaacctgggcagaaaggagctgagcaccatcatggacgagaacaaccagtggtactgctacatctgccaccccgagcccctgctggacctggtgaccgcctgcaacagcgtgttcgagaacctggagcagctgctgcagcagaacaagaagaagatcaaggtggacagcgagaagagcaacaaggtgtacgagcacaccagcagattcagccccaagaagaccagcagcaactgcaacggcgaggagaagaagctggacgacagctgcagcggcagcgtgacctacagctacagcgccctgatcgtgcccaaggagatgatcaagaaggccaagaagctgatcgagaccaccgccaacatgaacagcagctacgtgaagttcctgaagcaggccaccgacaacagcgagatcagcagcgccaccaagctgagacagctgaaggccttcaagagcgtgctggccgacatcaagaaggcccacctggccctggaggaggacctgaacagcgagttcagagccatggacgccgtgaacaaggagaagaacaccaaggagcacaaggtgatcgacgccaagttcgagaccaaggccagaaagggcgagaagccctgcgccctggagaagaaggacatcagcaagagcgaggccaagctgagcagaaagcaggtggacagcgagcacatgcaccagaacgtgcccaccgaggagcagagaaccaacaagagcaccggcggcgagcacaagaagagcgacagaaaggaggagccccagtacgagcccgccaacaccagcgaggacctggacatggacatcgtgagcgtgcccagcagcgtgcccgaggacatcttcgagaacctggagaccgccatggaggtgcagagcagcgtggaccaccagggcgacggcagcagcggcaccgagcaggaggtggagagcagcagcgtgaagctgaacatcagcagcaaggacaacagaggcggcatcaagagcaagaccaccgccaaggtgaccaaggagctgtacgtgaagctgacccccgtgagcctgagcaacagccccatcaagggcgccgactgccaggaggtgccccaggacaaggacggctacaagagctgcggcctgaaccccaagctggagaagtgcggcctgggccaggagaacagcgacaacgagcacctggtggagaacgaggtgagcctgctgctggaggagagcgacctgagaagaagccccagagtgaagaccacccccctgagaagacccaccgagaccaaccccgtgaccagcaacagcgacgaggagtgcaacgagaccgtgaaggagaagcagaagctgagcgtgcccgtgagaaagaaggacaagagaaacagcagcgacagcgccatcgacaaccccaagcccaacaagctgcccaagagcaagcagagcgagaccgtggaccagaacagcgacagcgacgagatgctggccatcctgaaggaggtgagcagaatgagccacagcagcagcagcgacaccgacatcaacgagatccacaccaaccacaagaccctgtacgacctgaagacccaggccggcaaggacgacaagggcaagagaaagagaaagagcagcaccagcggcagcgacttcgacaccaagaagggcaagagcgccaagagcagcatcatcagcaagaagaagagacagacccagagcgagagcagcaactacgacagcgagctggagaaggagatcaagagcatgagcaagatcggcgccgccagaaccaccaagaagagaatccccaacaccaaggacttcgacagcagcgaggacgagaagcacagcaagaagggcatggacaaccagggccacaagaacctgaagaccagccaggagggcagcagcgacgacgccgagagaaagcaggagagagagaccttcagcagcgccgagggcaccgtggacaaggacaccaccatcatggagctgagagacagactgcccaagaagcagcaggccagcgccagcaccgacggcgtggacaagctgagcggcaaggagcagagcttcaccagcctggaggtgagaaaggtggccgagaccaaggagaagagcaagcacctgaagaccaagacctgcaagaaggtgcaggacggcctgagcgacatcgccgagaagttcctgaagaaggaccagagcgacgagaccagcgaggacgacaagaagcagagcaagaagggcaccgaggagaagaagaagcccagcgacttcaagaagaaggtgatcaagatggagcagcagtacgagagcagcagcgacggcaccgagaagctgcccgagagagaggagatctgccacttccccaagggcatcaagcagatcaagaacggcaccaccgacggcgagaagaagagcaagaagatcagagacaagaccagcaagaagaaggacgagctgagcgactacgccgagaagagcaccggcaagggcgacagctgcgacagcagcgaggacaagaagagcaagaacggcgcctacggcagagagaagaagagatgcaagctgctgggcaagagcagcagaaagagacaggactgcagcagcagcgacaccgagaagtacagcatgaaggaggacggctgcaacagcagcgacaagagactgaagagaatcgagctgagagagagaagaaacctgagcagcaagagaaacaccaaggagatccagagcggcagcagcagcagcgacgccgaggagagcagcgaggacaacaagaagaagaagcagagaaccagcagcaagaagaaggccgtgatcgtgaaggagaagaagagaaacagcctgagaaccagcaccaagagaaagcaggccgacatcaccagcagcagcagcagcgacatcgaggacgacgaccagaacagcatcggcgagggcagcagcgacgagcagaagatcaagcccgtgaccgagaacctggtgctgagcagccacaccggcttctgccagagcagcggcgacgaggccctgagcaagagcgtgcccgtgaccgtggacgacgacgacgacgacaacgaccccgagaacagaatcgccaagaagatgctgctggaggagatcaaggccaacctgagcagcgacgaggacggcagcagcgacgacgagcccgaggagggcaagaagagaaccggcaagcagaacgaggagaaccccggcgacgaggaggccaagaaccaggtgaacagcgagagcgacagcgacagcgaggagagcaagaagcccagatacagacacagactgctgagacacaagctgaccgtgagcgacggcgagagcggcgaggagaagaagaccaagcccaaggagcacaaggaggtgaagggcagaaacagaagaaaggtgagcagcgaggacagcgaggacagcgacttccaggagagcggcgtgagcgaggaggtgagcgagagcgaggacgagcagagacccagaaccagaagcgccaagaaggccgagctggaggagaaccagagaagctacaagcagaagaagaagagaagaagaatcaaggtgcaggaggacagcagcagcgagaacaagagcaacagcgaggaggaggaggaggagaaggaggaggaggaggaggaggaggaggaggaggaggaggaggaggaggacgagaacgacgacagcaagagccccggcaagggcagaaagaagatcagaaagatcctgaaggacgacaagctgagaaccgagacccagaacgccctgaaggaggaggaggagagaagaaagagaatcgccgagagagagagagagagagagaagctgagagaggtgatcgagatcgaggacgccagccccaccaagtgccccatcaccaccaagctggtgctggacgaggacgaggagaccaaggagcccctggtgcaggtgcacagaaacatggtgatcaagctgaagccccaccaggtggacggcgtgcagttcatgtgggactgctgctgcgagagcgtgaagaagaccaagaagagccccggcagcggctgcatcctggcccactgcatgggcctgggcaagaccctgcaggtggtgagcttcctgcacaccgtgctgctgtgcgacaagctggacttcagcaccgccctggtggtgtgccccctgaacaccgccctgaactggatgaacgagttcgagaagtggcaggagggcctgaaggacgacgagaagctggaggtgagcgagctggccaccgtgaagagaccccaggagagaagctacatgctgcagagatggcaggaggacggcggcgtgatgatcatcggctacgagatgtacagaaacctggcccagggcagaaacgtgaagagcagaaagctgaaggagatcttcaacaaggccctggtggaccccggccccgacttcgtggtgtgcgacgagggccacatcctgaagaacgaggccagcgccgtgagcaaggccatgaacagcatcagaagcagaagaagaatcatcctgaccggcacccccctgcagaacaacctgatcgagtaccactgcatggtgaacttcatcaaggagaacctgctgggcagcatcaaggagttcagaaacagattcatcaaccccatccagaacggccagtgcgccgacagcaccatggtggacgtgagagtgatgaagaagagagcccacatcctgtacgagatgctggccggctgcgtgcagagaaaggactacaccgccctgaccaagttcctgccccccaagcacgagtacgtgctggccgtgagaatgaccagcatccagtgcaagctgtaccagtactacctggaccacctgaccggcgtgggcaacaacagcgagggcggcagaggcaaggccggcgccaagctgttccaggacttccagatgctgagcagaatctggacccacccctggtgcctgcagctggactacatcagcaaggagaacaagggctacttcgacgaggacagcatggacgagttcatcgccagcgacagcgacgagaccagcatgagcctgagcagcgacgactacaccaagaagaagaagaagggcaagaagggcaagaaggacagcagcagcagcggcagcggcagcgacaacgacgtggaggtgatcaaggtgtggaacagcagaagcagaggcggcggcgagggcaacgtggacgagaccggcaacaaccccagcgtgagcctgaagctggaggagagcaaggccaccagcagcagcaaccccagcagccccgcccccgactggtacaaggacttcgtgaccgacgccgacgccgaggtgctggagcacagcggcaagatggtgctgctgttcgagatcctgagaatggccgaggagatcggcgacaaggtgctggtgttcagccagagcctgatcagcctggacctgatcgaggacttcctggagctggccagcagagagaagaccgaggacaaggacaagcccctgatctacaagggcgagggcaagtggctgagaaacatcgactactacagactggacggcagcaccaccgcccagagcagaaagaagtgggccgaggagttcaacgacgagaccaacgtgagaggcagactgttcatcatcagcaccaaggccggcagcctgggcatcaacctggtggccgccaacagagtgatcatcttcgacgccagctggaaccccagctacgacatccagagcatcttcagagtgtacagattcggccagaccaagcccgtgtacgtgtacagattcctggcccagggcaccatggaggacaagatctacgacagacaggtgaccaagcagagcctgagcttcagagtggtggaccagcagcaggtggagagacacttcaccatgaacgagctgaccgagctgtacaccttcgagcccgacctgctggacgaccccaacagcgagaagaagaagaagagagacacccccatgctgcccaaggacaccatcctggccgagctgctgcagatccacaaggagcacatcgtgggctaccacgagcacgacagcctgctggaccacaaggaggaggaggagctgaccgaggaggagagaaaggccgcctgggccgagtacgaggccgagaagaagggcctgaccatgagattcaacatccccaccggcaccaacctgccccccgtgagcttcaacagccagaccccctacatccccttcaacctgggcgccctgagcgccatgagcaaccagcagctggaggacctgatcaaccagggcagagagaaggtggtggaggccaccaacagcgtgaccgccgtgagaatccagcccctggaggacatcatcagcgccgtgtggaaggagaacatgaacctgagcgaggcccaggtgcaggccctggccctgagcagacaggccagccaggagctggacgtgaagagaagagaggccatctacaacgacgtgctgaccaagcagcagatgctgatcagctgcgtgcagagaatcctgatgaacagaagactgcagcagcagtacaaccagcagcagcagcagcagatgacctaccagcaggccaccctgggccacctgatgatgcccaagccccccaacctgatcatgaaccccagcaactaccagcagatcgacatgagaggcatgtaccagcccgtggccggcggcatgcagcccccccccctgcagagagcccccccccccatgagaagcaagaaccccggccccagccagggcaagagcatgtag

SEQ ID NO: 235878 - protein, 241 aa, Artificial Sequence
  derived and/or modified sequence
MAVFLQLLPLLLSRAQGNPGASLDGRPGDRVNLSCGGVSHPIRWVWAPSFPACKGLSKGRRPILWASSSGTPTVPPLQPFVGRLRSLDSGIRRLELLLSAGDSGTFFCKGRHEDESRTVLHVLGDRTYCKAPGPTHGSVYPQLLIPLLGAGLVLGLGALGLVWWLHRRLPPQPIRPLPRFAPLVKTEPQRPVKEEEPKIPGDLDQEPSLLYADLDHLALSRPRRLSTADPADASTIYAVVV

SEQ ID NO: 235879 - protein, 241 aa, Artificial Sequence
  derived and/or modified sequence
MAVFLQLLPLLLSRAQGNPGASLDGRPGDRVNLSCGGVSHPIRWVWAPSFPACKGLSKGRRPILWASSSGTPTVPPLQPFVGRLRSLDSGIRRLELLLSAGDSGTFFCKGRHEDESRTVLHVLGDRTYCKAPGPTHGSVYPQLLIPLLGAGLVLGLGALGLVWWLHRRLPPQPIGPLPRFAPLVKTEPQRPVKEEEPKIPGDLDQEPSLLYADLDHLALSRPRRLSTADPADASTIYAVVV

SEQ ID NO: 235880 - DNA, 833 bp, Artificial Sequence
  derived and/or modified sequence
atggctgtgtttctgcagctgctaccgctgctgctctcgagggcccaagggaaccctggggcttctctggacggccgccctggggaccgggtgaatctctcctgcggaggagtctctcatcccatccgctgggtctgggcacccagcttcccggcctgcaagggcctgtccaaaggacgccgaccgatcctgtgggcctcttcgagcgggacccccaccgtgcctcccctccagcctttcgtcggccgcctacgctccctggactctggtatccggcggctggagctcctcttgagcgcgggggactcgggcacttttttctgcaagggccgccacgaggacgagagccgtacagtgcttcacgtgctgggggacaggacctattgcaaggcccccgggcctacccatgggtccgtgtatccccagctcctgatcccgctgctgggcgctgggttggtgctcggactgggagctttgggcctggtctggtggctgcacaggcgcctgcccccgcaaccgattcgaccactccctagatttgctccacttgtgaaaaccgagccccagaggccagtaaaggaggaagagcccaagattccaggggacctggaccaggaaccgagcctgctctatgcggatctggaccatctagccctcagcaggccccgccggctgtccacagcggaccctgctgatgcctccaccatctatgcagttgtagtttgaagggaagcccttactccaaacctcccaagctaggggatcccagctccccataatccctctcccctccttggttcctcacctggaagaggaaggcaccatggtataga

SEQ ID NO: 235881 - DNA, 2362 bp, Artificial Sequence
  derived and/or modified sequence
atggctgtgtttctgcagctgctaccgctgctgctctcgagggcccaagggaaccctggggcttctctggacggccgccctggggaccgggtgaatctctcctgcggaggagtctctcatcccatccgctgggtctgggcacccagcttcccggcctgcaagggcctgtccaaaggacgccgaccgatcctgtgggcctcttcgagcgggacccccaccgtgcctcccctccagcctttcgtcggccgcctacgctccctggactctggtatccggcggctggagctcctcttgagcgcgggagactcgggcacttttttctgcaagggccgccacgaggacgagagccgtacagtgcttcacgtgctgggggacaggacctattgcaaggcccccgggcctacccatgggtccgtgtatccccagctcctgatcccgctgctgggcgctgggttggtgctcggactgggagctttgggcctggtctggtggctgcacaggcgcctgcccccgcaaccgattcgaccactccctagatttgctccacttgtgaaaaccgagccccagaggccagtaaaggaggaagagcccaagattccaggggacctggaccaggaaccgagcctgctctatgcggatctggaccatctagccctcagcaggccccgccggctgtccacagcggaccctgctgatgcctccaccatctatgcagttgtagtttgaagggaagcccttactccaaacctcccaagctaggggatcccagctccccataatccctctcccctccttggttcctcacctggaagaggaaggcaccatggtatagaaataagtgctagactgggagttgggagacctgggttccaggctgtctctgccactggtcttacttctaaacttactcccatctctcctataacctccatgtctccctcaccaccagtgtcctctctatacccaatcaagccctagctccttttttttttttttttgagacggagtctcgctctgttgcccaggctggagtgcagtgacaccatctccctcactgcaagctccgcctgccgggttcacaccattctcctgcctcaggctcctgagtagctgggactacaggcgcccgccaccacgcccagctaattttttgtatttttagtagagacggggtttcactgtgttagccaggatggtcttgatctgctaacctcgtgatccacccgccccggcctcccaaagtgctaggattacaggtgtgagccaccgcgcccggcctgattctttaagctgtttttctttgttgctggtgttttctttttggactcctcttccttgctccatatccctacagtatttcccaccattctaggtttgtccctttctcttcttctgggacactctcatcaacagtcagtcctcagccccctcctctgcaaatgacactcagaactctctctggctcagatctcagatttgggattaacaaacttccacttagacattctgcctgactgacctcaggcatttcgcactctgaatgtcaaacccaactcattgtcatctctgaagctgctcacttaattctcctctgtattctctttaacaacccagttgcccaacccagaaactgggagtcacgcagacctcctttctctcttactcccacacaatgagccatgaagtccagtctttctatcttaacatcactgtcaaacccacactgtattccatgcccagcgctgccacgtgaatgtactctgctcacttccttcctggattacccatagccccacctcatcctcctacccttgctttcctccctgaagtcagagagatcctactcaagagataactgctcctgacagcccttattacagaactgaagtactctccttagcttcagctctgtgcccacgtgccttggctttggatacaaggtactacagcactttgtccactctccaggcttacctgtgtcattccacatgcacatcttagaaaatgccagccttagagaattctccctagccccaaaatgtctttgcccagtgcaattccttcttcctgtattacccctttccctccttcacactatctgcctggctaattcttatttatccttagttcaagtatggccttttctgggaaggtgaccctccttggccaccccttgcatatactttgatgccctagggcacaccccctttatttccctcatagaaacagccttctgtaaattgttccatgacaacctgtatttcaatttgtaagaaatttgcatgtactgtgagctccccaacgtcaggagactgacccttttgatatcattgctaagcctcattaaatgaatgaatgaaaa

SEQ ID NO: 235882 - DNA, 2362 bp, Artificial Sequence
  derived and/or modified sequence
atggctgtgtttctgcagctgctaccgctgctgctctcgagggcccaagggaaccctggggcttctctggacggccgccctggggaccgggtgaatctctcctgcggaggagtctctcatcccatccgctgggtctgggcacccagcttcccggcctgcaagggcctgtccaaaggacgccgaccgatcctgtgggcctcttcgagcgggacccccaccgtgcctcccctccagcctttcgtcggccgcctacgctccctggactctggtatccggcggctggagctcctcttgagcgcgggggactcgggcacttttttctgcaagggccgccacgaggacgagagccgtacagtgcttcacgtgctgggggacaggacctattgcaaggcccccgggcctacccatgggtccgtgtatccccagctcctgatcccgctgctgggcgctgggttggtgctcggactgggagctttgggcctggtctggtggctgcacaggcgcctgcccccgcaaccgattcgaccactccctagatttgctccacttgtgaaaaccgagccccagaggccagtaaaggaggaagagcccaagattccaggggacctggaccaggaaccgagcctgctctatgcggatctggaccatctagccctcagcaggccccgccggctgtccacagcggaccctgctgatgcctccaccatctatgcagttgtagtttgaagggaagcccttactccaaacctcccaagctaggggatcccagctccccataatccctctcccctccttggttcctcacctggaagaggaaggcaccatggtatagaaataagtgctagactgggagttgggagacctgggttccaggctgtctctgccactggtcttacttctaaacttactcccatctctcctataacctccatgtctccctcaccaccagtgtcctctctatacccaatcaagccctagctccttttttttttttttttgagacggagtctcgctctgttgcccaggctggagtgcagtgacaccatctccctcactgcaagctccgcctgccgggttcacaccattctcctgcctcaggctcctgagtagctgggactacaggcgcccgccaccacgcccagctaattttttgtatttttagtagagacggggtttcactgtgttagccaggatggtcttgatctgctaacctcgtgatccacccgccccggcctcccaaagtgctaggattacaggtgtgagccaccgcgcccggcctgattctttaagctgtttttctttgttgctggtgttttctttttggactcctcttccttgctccatatccctacagtatttcccaccattctaggtttgtccctttctcttcttctgggacactctcatcaacagtcagtcctcagccccctcctctgcaaatgacactcagaactctctctggctcagatctcagatttgggattaacaaacttccacttagacattctgcctgactgacctcaggcatttcgcactctgaatgtcaaacccaactcattgtcatctctgaagctgctcacttaattctcctctgtattctctttaacaacccagttgcccaacccagaaactgggagtcacgcagacctcctttctctcttactcccacacaatgagccatgaagtccagtctttctatcttaacatcactgtcaaacccacactgtattccatgcccagcgctgccacgtgaatgtactctgctcacttccttcctggattacccatagccccacctcatcctcctacccttgctttcctccctgaagtcagagagatcctactcaagagataactgctcctgacagcccttattacagaactgaagtactctccttagcttcagctctgtgcccacgtgccttggctttggatacaaggtactacagcactttgtccactctccaggcttacctgtgtcattccacatgcacatcttagaaaatgccagccttagagaattctccctagccccaaaatgtctttgcccagtgcaattccttcttcctgtattacccctttccctccttcacactatctgcctggctaattcttatttatccttagttcaagtatggccttttctgggaaggtgaccctccttggccaccccttgcatatactttgatgccctagggcacaccccctttatttccctcatagaaacagccttctgtaaattgttccatgacaacctgtatttcaatttgtaagaaatttgcatgtactgtgagctccccaacgtcaggagactgacccttttgatatcattgctaagcctcattaaatgaatgaatgaaaa

SEQ ID NO: 235883 - DNA, 726 bp, Artificial Sequence
  derived and/or modified sequence
atggccgtgttcctgcagctgctgcccctgctgctgagcagagcccagggcaaccccggcgccagcctggacggcagacccggcgacagagtgaacctgagctgcggcggcgtgagccaccccatcagatgggtgtgggcccccagcttccccgcctgcaagggcctgagcaagggcagaagacccatcctgtgggccagcagcagcggcacccccaccgtgccccccctgcagcccttcgtgggcagactgagaagcctggacagcggcatcagaagactggagctgctgctgagcgccggcgacagcggcaccttcttctgcaagggcagacacgaggacgagagcagaaccgtgctgcacgtgctgggcgacagaacctactgcaaggcccccggccccacccacggcagcgtgtacccccagctgctgatccccctgctgggcgccggcctggtgctgggcctgggcgccctgggcctggtgtggtggctgcacagaagactgcccccccagcccatcagacccctgcccagattcgcccccctggtgaagaccgagccccagagacccgtgaaggaggaggagcccaagatccccggcgacctggaccaggagcccagcctgctgtacgccgacctggaccacctggccctgagcagacccagaagactgagcaccgccgaccccgccgacgccagcaccatctacgccgtggtggtgtag

SEQ ID NO: 235884 - DNA, 726 bp, Artificial Sequence
  derived and/or modified sequence
atggccgtgtttctgcagctcttaccattactcctgtccagagcccagggcaatcccggggcctcactggatgggcgaccaggcgacagagtgaatctgagctgcggcggagtgagccacccaatcagatgggtatgggcaccttcattcccggcatgtaaaggactatctaagggtagacgacccatactctgggccagctccagcgggacccctaccgtgcctcctttgcagccattcgtgggcaggttacggagtttggattctgggattcggcggcttgagctcctgctgtctgccggagattccgggacgttcttttgtaagggccgccacgaggatgaaagccgaacagtacttcacgttcttggcgacagaacttactgcaaagcgccaggacccacacacgggagtgtctacccccagctgctcattcctctgcttggtgccgggttagtcctcggcctgggggcgctgggtcttgtgtggtggctgcaccgtaggctaccacctcagccaatccgtccacttccccgcttcgcaccgctggtgaagaccgagcctcagaggccagtgaaagaggaagaaccaaaaatcccgggtgatcttgaccaggaaccttccttgctatacgcagaccttgaccacctggctctgagcagacctaggcggctgagcacagccgacccggcagacgcaagtaccatttacgcagtagtcgtctag

SEQ ID NO: 235885 - DNA, 726 bp, Artificial Sequence
  derived and/or modified sequence
atggccgtgttcctccagctattgcctcttctcctatctagagcgcaaggcaatcccggcgcaagcctcgatggcagacctggcgatcgtgtgaacctgtcgtgtgggggggtgtcacatcccatccgctgggtatgggccccttcgtttcccgcttgcaaaggcctgtccaaagggcgtagaccgatcctgtgggcctcttctagcggcacccccaccgtgccgcccctacagccgttcgttgggaggctgcggagtttggattcagggatcaggagactggagctgttgctgtccgcaggggatagtgggacattcttttgtaagggcaggcatgaagatgaatcccggactgtcctgcatgtgctaggggatagaacttattgcaaagctcccgggccaacccatggctccgtgtacccccagctgttaattcccctcttgggggcagggttggtgttaggtctaggggcccttggcctagtgtggtggcttcacaggcgactcccacctcaacccatacggcctttgccacgctttgcccctctcgtgaaaacggagcctcagaggcccgtgaaggaagaagaacctaagatccccggcgatctagatcaagagcctagcctcctttatgccgatctggaccatctggccctgtcccgccccagacgcctgtctaccgcagatccagcagatgccagtactatctatgccgtcgtcgtgtag

SEQ ID NO: 235886 - DNA, 726 bp, Artificial Sequence
  derived and/or modified sequence
atggccgtgtttctgcagctgttgcccttactgttgtcaagggcccaaggcaaccctggtgcgtccctggacgggcggcccggcgacagagttaacctctcatgtggtggcgtcagtcatcctattcgctgggtgtgggccccctcttttcccgcctgcaagggtctatctaaaggcaggaggccaatactgtgggcatcgagctcaggcacacccaccgttccccccctgcagccatttgttggacggctgagatcactcgattctggaatccggaggctcgagcttcttttatctgccggagatagcggaacttttttctgtaaaggcaggcatgaagatgaaagccgcaccgtgctccacgtcctgggtgacaggacctattgcaaggcccccggcccaacacacggctccgtgtaccctcagctgctcataccactactaggcgccggactcgtgctcggtctgggtgcacttggcctcgtgtggtggctacatcggaggcttcctcctcagccaattcgcccattacctcggtttgcgcccctggtaaagactgagccccagcggccggtaaaggaggaagaaccgaagatcccgggggatctggaccaggaaccatccctcttgtatgccgacttggaccatctggccctgtcacggcctaggcgcctcagtacagcagaccccgccgacgcctctaccatctacgccgtcgtggtttag

SEQ ID NO: 235887 - DNA, 726 bp, Artificial Sequence
  derived and/or modified sequence
atggcagtcttcctccagctgctgcccttactgctgtcaagagctcaagggaacccaggtgctagccttgacggcaggcctggggaccgcgtgaacttaagttgtggaggcgtatctcatcccatcagatgggtctgggcccctagtttccctgcttgcaaggggctgtcaaaaggacggaggcctatcctttgggcgtcgtcctctggtaccccaaccgtgcctccactgcagccattcgtcggccgattgagaagcctggactccggaatcaggaggctcgagcttctgctctctgcaggggacagtggaactttcttctgtaaaggtagacatgaggacgagtcgcgtacagtactacatgtcctgggcgacaggacctattgcaaggcccccggaccgacccacgggtccgtgtacccgcagctcctgatccccttgcttggagccggattggtgcttggactgggggcgttagggcttgtgtggtggttgcatagacggttacctccccagccaattcggccactacctagatttgccccgttagtcaagaccgagcctcagagaccggtgaaggaggaggagcccaagatccctggcgatctggaccaagagccaagcctgctatacgctgacctggaccacttggctctgtcacgccctcgacggttgtcaaccgccgatcctgcagacgctagcaccatatacgccgtggttgtctag

SEQ ID NO: 235888 - DNA, 726 bp, Artificial Sequence
  derived and/or modified sequence
atggccgtctttctgcagctcctccctctgctgctgtctagagcacagggtaacccgggggcctcccttgatggaaggcccggggatcgcgtgaatctcagctgcgggggggtgtctcatccgatccgatgggtgtgggccccctctttcccagcctgtaaaggactctccaagggacgccgtccaatcctgtgggcctctagcagtgggactccaacagtccccccattgcagccattcgttggccggttgcgctctctcgattcaggaatcaggcggttggaactgttgctatctgccggcgatagcggaaccttcttttgtaaggggagacacgaggatgagtctcggacagtgctgcatgtactgggagacaggacttattgtaaagcgcccggtccgacacacgggagcgtatatccacagcttctcatccctctacttggtgccgggctggttctgggattaggcgccttaggacttgtatggtggcttcacaggagactccctccacagcccataaggccgctgcccaggtttgctccattagttaaaactgagcctcagcggcccgtgaaggaagaggagccaaagattcccggcgacctggaccaggaaccttccctcctttacgccgatctcgatcacctcgcgctcagcagaccccgtcgactttcaaccgccgaccctgcggatgcctcgacaatatatgccgtcgtcgtgtag

SEQ ID NO: 235889 - DNA, 726 bp, Artificial Sequence
  derived and/or modified sequence
atggctgtgtttctgcagttgctgcccttgcttctgtccagggctcagggtaaccctggcgcctccctcgatggccggcctggcgaccgggttaaccttagttgcgggggcgtctcgcacccaatccgctgggtctgggccccttcctttcctgcgtgtaagggccttagcaaggggaggagacctatactgtgggcctctagctctggcacgcctacggtccctcctcttcagccatttgtgggaagactccgctctctggattctggaattcgaagattggaactgctcctgagcgcaggggactccggaaccttcttctgcaagggcagacatgaggatgaatctcgaacagtattgcatgttctaggtgaccgcacctactgtaaagctccggggccgacccacgggagtgtgtatcctcagctgctgatcccccttctcggcgccggcctggtcttaggccttggcgccttgggactggtttggtggctgcacaggcgtctgcctccccagccgattaggcctcttcccagatttgcgcccctggtcaagacagagccccaacgcccagtgaaggaggaggagcccaagatccccggggatcttgaccaagaaccaagtttactctatgcggatctggaccacctcgccctgtctcgaccaaggcggcttagcaccgccgatcccgccgatgcatctacaatttacgccgtggtggtgtag

SEQ ID NO: 235890 - DNA, 726 bp, Artificial Sequence
  derived and/or modified sequence
atggctgtgttcctgcagctgctgcccctgctgctgagccgggcccagggcaaccctggggccagcctggatggccggcctggggacagagtgaacctgagctgtggcggcgtgagccaccccatccgctgggtgtgggcccccagcttccctgcctgcaagggcctgagcaagggccggcggcccatcctgtgggccagcagcagcggcacccccaccgtgccccccctgcagccctttgtgggccgcctgcggagcctggacagcggcatccggcggctggagctgctgctgtctgctggggacagcggcaccttcttctgcaagggcagacatgaagatgagagcaggacagtgctgcacgtgctgggggacaggacctactgcaaggcccctggccccacccacggctctgtgtacccccagctgctgatccccctgctgggcgccggcctggtgctgggcctgggcgccctgggcctggtgtggtggctgcaccggcggctgcccccccagcccatccggcccctgcccaggtttgcccccctggtgaagacagagccccagaggcctgtgaaggaggaggagcccaagatccctggggacctggaccaggagcccagcctgctgtatgctgacctggaccacctggccctgagccggccccggcggctgagcacagctgaccctgcagatgccagcaccatctatgctgtggtggtgtag

SEQ ID NO: 235891 - DNA, 726 bp, Artificial Sequence
  derived and/or modified sequence
atggccgtgttcctgcagctgctgcccctgctgctgagccgggcccaaggcaacccaggcgcatcactggatgggagaccaggtgatcgggtaaatctgtcctgcggaggtgtgagtcatcctattaggtgggtatgggcaccatcattccccgcctgtaagggcctgtccaaaggtcgccgacccatcctgtgggcctcctcgtcgggaacacccaccgtgcctccactgcagccttttgttgggcggctgcggtcactcgattcaggcattcgcaggcttgagttgctcctgtccgctggggacagtgggactttcttttgcaagggccgacatgaagacgagagccgcaccgtgttacacgtgctgggagataggacgtactgcaaggctcctgggccaacacatggctccgtatatccgcagcttctgatccctcttcttggagccggcctcgtgttagggttaggcgccctggggttggtgtggtggctgcataggaggcttccaccacagccaatccgaccattgcctcgatttgctcctctggtcaagaccgaaccccagagacctgtgaaggaggaggagccgaaaatccccggggacttggatcaggaaccttctttactctatgcagatctggatcaccttgccctgagtcgccccagacgactgtccaccgctgatccagcagacgcatcaacgatctatgctgtcgtggtttag

SEQ ID NO: 235892 - DNA, 726 bp, Artificial Sequence
  derived and/or modified sequence
atggccgtgttcctgcagctgctgcccctgctgctgagccgggcccagggaaatcccggcgctagcctcgatggtcgcccaggcgaccgtgtaaacctatcatgtggaggcgtgagccaccccattagatgggtttgggctcctagctttccagcgtgcaaaggtctctcaaaggggcgtcgaccaattctttgggcctccagctcaggaactcccactgtgcctccactgcagccattcgtgggccggctgcgctccctggactcaggtatccgacggctcgagctgctgttgtctgccggcgactctggcaccttcttttgcaaggggcggcacgaagatgaaagtcggaccgttctacacgtcttgggcgacaggacctactgtaaggctcctgggcccactcacggatccgtttacccacagctactgatacccctcctcggtgccggcttggtgctggggctgggtgctctggggctggtatggtggctccatcgccggctgcccccccagcccatcaggcccttgcccagattcgctcctctggtgaaaacggagccgcaaagacccgtcaaggaagaggaacctaaaatccctggtgatctggaccaagagccttcgctgctgtatgccgatttagatcacctggcactttctaggcctcgccgtctgtccacggccgatcccgcagacgcctcaacgatatatgctgttgtcgtctag

SEQ ID NO: 235893 - DNA, 726 bp, Artificial Sequence
  derived and/or modified sequence
atggccgtgttcctgcagctgctgcccctgctgctgagccgggcccaggggaatccaggagcttcgctcgatggacgtccaggagatagggtcaacctaagctgtggcggcgtttctcacccaattcgatgggtttgggctccaagctttcccgcctgcaagggtttgtcaaaagggcggcggcctatcctatgggctagctcatccggaacacccacagttccaccactccaaccgttcgtggggcggctgagaagtctggatagcgggattcgtagactggagctgctgctgagcgccggcgatagtggcacctttttctgcaaggggcggcacgaggacgagagtcgtacagtgctccatgtactgggcgaccgcacctattgtaaagcccccgggcccacgcacggcagcgtctacccacagctgctgattccactgctgggagccggcttggttctaggtctgggcgctcttggcctagtctggtggctacacagaaggctgcctccgcagccgatcaggcctctgccccgcttcgcccctctggttaagactgagccccagcggcctgtgaaggaggaggagcctaagatcccaggagatttggatcaggagccctccctgctttacgcagacctcgatcatcttgctctaagccgaccacggcgactcagtacagctgacccggcagatgcctcaaccatatatgcggtggtggtttag

SEQ ID NO: 235894 - DNA, 726 bp, Artificial Sequence
  derived and/or modified sequence
atggccgtgttcctgcagctgctgcccctgctgctgagccgggcccagggcaaccctggtgcctccctggatgggcggccgggagaccgtgttaatctgtcttgcggcggcgtgtcacacccaatcaggtgggtctgggccccctcttttcctgcctgtaagggactgagcaaaggccggcgccccattctctgggcctcaagcagcggtacccctactgttccccccctgcagccatttgttgggcggctccgaagcctcgactctggcattagacggctagagctcctcctgtcagccggagattcgggaacattcttttgtaaaggtagacacgaagacgagtcccgcacagtgcttcatgtcttaggtgatcggacttactgcaaagctcccggtcctacccacggaagtgtctatccacagctcctgatccctctgctgggtgccggcctggtgctggggctgggtgctttggggctcgtctggtggctgcaccgcagactgcctcctcagccaatccgaccgcttccccgctttgcccccttggtgaagaccgaaccccaaagacctgttaaggaagaggaacctaagattcctggagatctcgatcaggagcctagtctgctgtatgcagatttagaccacctggcgcttagtagaccccggagactatcgaccgccgacccagccgacgcctctaccatttatgcggtggtggtgtag

SEQ ID NO: 235895 - DNA, 726 bp, Artificial Sequence
  derived and/or modified sequence
atggccgtgttcctgcagctgctgcccctgctgctgagccgggcccaaggaaatccaggggcctccctggacgggcgcccaggcgacagagtgaacctgagctgtggcggggtgagtcatccaataaggtgggtttgggcccccagctttccggcatgcaaaggcttgtcgaaaggacggagacccatcttgtgggcatctagcagcggcaccccaactgttcctcctcttcagccgtttgtgggccgtcttcgaagtctggattctggtatccgacgactcgaacttctcctgagcgctggggattccgggactttcttttgtaagggccgtcatgaggatgaaagtcgaaccgtgctccacgtgttaggcgatagaacatactgtaaagcgccggggccaacccacggaagtgtctatccacaattgctcataccattgctaggcgcggggctggtgctaggattgggagcacttggactggtttggtggctgcatcggagattaccgcctcagcccatcaggccactccccagattcgcacccctggtcaagaccgaaccacagcgacccgtaaaagaggaggagccaaaaatccccggtgacctcgaccaggagccttcccttctgtacgccgatttagaccatctggctctgagtaggcctcgacgtctgagcactgccgaccccgctgacgctagcaccatctatgccgttgtagtttag

SEQ ID NO: 235896 - DNA, 726 bp, Artificial Sequence
  derived and/or modified sequence
atggccgtgttcctgcagctgctgcccctgctgctgagccgggcccagggaaacccgggtgcctcgctcgatggacgtcccggtgaccgggttaatctgagctgcgggggggtatcccatcctatccgatgggtgtgggctccgtctttcccagcatgcaagggcctgtccaagggaaggagaccaattctttgggctagttcatccggtacccctaccgtgccgccactccagccatttgttggaagactcaggagtttagattcagggataagaagactggaactgctacttagtgctggtgatagtggcactttcttttgtaagggccggcatgaggacgagagccgaaccgtgctgcacgttctgggtgaccgcacttactgcaaagccccaggaccgacccacgggtctgtgtaccctcaactcctgatccctttacttggagccggtcttgttctggggttgggagctttgggccttgtatggtggctgcacagacgcctgcccccccagcccatccgacctctcccgcgcttcgcccccctggttaagaccgagcctcagcggcccgtcaaagaggaggagcccaaaatccctggagacctggaccaggaacccagcctactctacgccgacttggatcatctcgcgttgtctaggccacgtaggctcagcacggccgatccggccgacgcctctaccatctacgcggtcgtcgtttag

SEQ ID NO: 235897 - DNA, 726 bp, Artificial Sequence
  derived and/or modified sequence
atggcggtgttcttgcagcttctcccgctacttctcagccgcgctcaggggaatcccggagcatcattggacggcagaccgggagatagggttaatcttagctgcggcggtgtgtcccacccaatccggtgggtctgggcgccatcattccccgcttgtaaaggactgagcaaaggacgcaggcccatactctgggcctccagctcagggacacctaccgtgcctcctttacagccttttgtcgggagactgcgcagcttggattcgggcattagacgcctcgaacttcttttaagcgccggagactctggcacctttttctgcaagggcagacacgaggatgagagcagaaccgtgttgcacgtgctgggagaccggacatactgcaaggcaccaggacctactcacggttcggtgtatcctcagctcctcatccccctgttgggcgcaggcctagtattaggccttggcgctcttgggctggtctggtggctccataggcgcctgccccctcagcctatccggcctctccccagatttgctccgctcgtcaagacagaaccacagcggcctgtgaaagaggaggaaccgaagatacccggtgacctcgatcaggagccatcactcttgtatgctgaccttgaccatctggcactgtcaagacccagaaggctgtcaaccgccgaccctgcagatgcctctactatctatgctgtagtggtgtag

SEQ ID NO: 235898 - DNA, 726 bp, Artificial Sequence
  derived and/or modified sequence
atggcggtcttcctccagcttcttcctctgctgctgagccgcgctcaaggcaatcccggtgcctcactggacgggagacccggtgatcgagtgaatttgtcctgtggcggtgtcagtcatcctattcgctgggtttgggcaccatcttttccggcatgcaaaggtctgagcaaaggcaggagacctattctgtgggcaagttcatcaggaacacccacagtacccccactgcaacccttcgtcggaagactcaggagccttgactccggtataaggcgcctggagctgttactctcagccggtgacagtggaacctttttctgcaaaggcagacatgaggacgagtcgcgcacggttctgcacgtgcttggtgataggacatactgcaaagccccaggccctacccatggctctgtctacccccagctcttgattccccttttgggcgctggtctagtactggggttgggggctctcggactggtgtggtggctacatagaaggttgccacctcaacccatccgccctctccctcgtttcgcacctcttgtgaaaacagaaccccagcgcccagtgaaagaagaggagcccaaaataccgggagaccttgatcaggagcccagtctcttatacgcagacttagatcacttggctcttagtaggcctagacgactgtcgacagcagatcccgctgacgcatccaccatctacgcggtggtcgtctag

SEQ ID NO: 235899 - DNA, 726 bp, Artificial Sequence
  derived and/or modified sequence
atggctgtgtttctccagctgcttccgctgctattgtctcgcgctcagggaaatcccggagcaagtcttgatgggagacctggagacagggtgaatctaagttgtggcggagtgagccaccctataagatgggtgtgggccccttcctttcctgcgtgtaaaggcctctcgaaaggaaggcggcctatactatgggcctctagctccggtaccccgaccgtgccacctctgcagccatttgtcgggcgtctgagatccttggatagcggaataagacgattggaactgcttctgagtgcgggtgatagtggcaccttcttttgtaagggcaggcacgaggacgagtctcgcacagtcttgcacgttttgggagacagaacatattgcaaggcacccggacctacccatgggtccgtgtaccctcagctcctcattcctctcctgggcgcaggattggtgctgggtctgggtgcactaggactggtctggtggctacacagaagattgccaccacagcccattaggcctctccctagattcgccccattagtgaagactgagcctcagaggccggtgaaggaagaggagcctaaaatccccggagacctggatcaggagccatccttgttgtacgctgatctagaccatctcgccctgtcaagacctaggaggttgagcactgctgatcccgcagatgcgtctacaatatatgccgtggtggtttag

SEQ ID NO: 235900 - DNA, 726 bp, Artificial Sequence
  derived and/or modified sequence
atggctgtctttcttcaactgcttccactgttgttaagtagggcccaggggaatcccggagccagtctagacggacgccctggagatagggtcaatttgagttgcggcggagtgtcacacccaatccggtgggtctgggctcctagcttcccagcttgtaaaggactgtcaaagggcagaaggccgatactgtgggcctcttccagtggcacacctacggtgcccccactccagccttttgttgggaggctcaggtccctggattccggcatcagaaggctagaactcctcttaagtgccggagattctgggacttttttctgtaagggtaggcacgaggatgagagcaggaccgtgctgcacgtgctcggtgaccgaacttattgtaaggctccgggacctacccacggaagtgtatatccgcagctattgatccccttgttgggagctgggttagtgctcggactaggggctctgggcctcgtctggtggcttcaccgacggctcccccctcagccaataaggccccttcctagattcgccccattggtgaagacagaaccacagagacccgttaaggaagaagagcctaagattccgggagacctggaccaggagccctccctgctgtatgctgacctcgatcacctcgccctgtcacgacctcggaggctgagcaccgccgatcctgccgatgcctcaacaatctatgccgtggtagtttag

SEQ ID NO: 235901 - DNA, 726 bp, Artificial Sequence
  derived and/or modified sequence
atggccgtgttcttacagctattgcccctcttgctgtctcgcgctcaggggaatccaggagctagtctggatggacgaccaggggaccgcgtgaacctgagttgcgggggagtgagccatcctatcagatgggtctgggctccctcatttcccgcatgcaaaggcctttctaaagggcgacggccaatcctatgggcgtcttcgagtggaaccccaacagttcccccattgcagccgttcgtaggcaggctgcgttcactggattccggcatccgcagactcgaactcctgctttcagccggagattctggcaccttcttttgcaagggtcggcatgaggatgagagtcgaacagtgctgcatgtgctgggcgaccggacttattgtaaagcacctgggcctacccatggtagtgtatatccccagctgctgatccccttactaggtgcgggacttgtcctgggcctgggcgctctgggcctggtgtggtggctgcaccggagactgccccctcagcctatcagacccttgccgaggttcgctcccctcgtgaaaactgaaccgcagcgcccagttaaagaggaggaaccaaaaatccccggagacctagatcaggagcccagtcttctttatgccgatctggaccatcttgcattgagtaggcccaggcgccttagcaccgccgaccctgccgatgctagtaccatctatgctgtggtcgtgtag

SEQ ID NO: 235902 - DNA, 726 bp, Artificial Sequence
  derived and/or modified sequence
atggccgtgttcctgcagctattaccccttctattatctcgggcacagggcaaccccggagcctccctggacggcaggcctggggatcgggtcaacctgtcttgcggtggagtgtctcatcccatccggtgggtatgggcacccagctttccggcttgtaaggggcttagcaagggcagacggcctatcctgtgggcctcctcctcaggtacacctacggtgccccctctgcaaccgtttgtagggcgactgaggtcgctggattcaggaatacggagactggaactgctcctgagcgcaggcgattctggcactttcttctgtaagggccgacacgaagatgagtctcggactgtcctacacgtgctgggagaccgtacatattgcaaggcacctgggccaacccacggatcagtctacccacagctgttgattccccttttgggtgccggactggttctaggccttggagccctggggctggtctggtggctgcacagacgactccctccccagcccatccgtcccctgcctcgcttcgcaccactcgtgaaaaccgagcctcaaagacccgtgaaagaggaagagccaaagattcccggagatctggatcaggagccttctctcctctatgccgaccttgatcacctggcacttagcaggcctagaagattgagtaccgctgaccccgctgatgcttccacaatttacgccgtggtggtatag

SEQ ID NO: 235903 - DNA, 2362 bp, Artificial Sequence
  derived and/or modified sequence
atggctgtgtttctgcagctgctaccgctgctgctctcgagggcccaagggaaccctggggcttctctggacggccgccctggggaccgggtgaatctctcctgcggaggagtctctcatcccatccgctgggtctgggcacccagcttcccggcctgcaagggcctgtccaaaggacgccgaccgatcctgtgggcctcttcgagcgggacccccaccgtgcctcccctccagcctttcgtcggccgcctacgctccctggactctggtatccggcggctggagctcctcttgagcgcgggggactcgggcacttttttctgcaagggccgccacgaggacgagagccgtacagtgcttcacgtgctgggggacaggacctattgcaaggcccccgggcctacccatgggtccgtgtatccccagctcctgatcccgctgctgggcgctgggttggtgctcggactgggagctttgggcctggtctggtggctgcacaggcgcctgcccccgcaaccgattggaccactccctagatttgctccacttgtgaaaaccgagccccagaggccagtaaaggaggaagagcccaagattccaggggacctggaccaggaaccgagcctgctctatgcggatctggaccatctagccctcagcaggccccgccggctgtccacagcggaccctgctgatgcctccaccatctatgcagttgtagtttgaagggaagcccttactccaaacctcccaagctaggggatcccagctccccataatccctctcccctccttggttcctcacctggaagaggaaggcaccatggtatagaaataagtgctagactgggagttgggagacctgggttccaggctgtctctgccactggtcttacttctaaacttactcccatctctcctataacctccatgtctccctcaccaccagtgtcctctctatacccaatcaagccctagctccttttttttttttttttgagacggagtctcgctctgttgcccaggctggagtgcagtgacaccatctccctcactgcaagctccgcctgccgggttcacaccattctcctgcctcaggctcctgagtagctgggactacaggcgcccgccaccacgcccagctaattttttgtatttttagtagagacggggtttcactgtgttagccaggatggtcttgatctgctaacctcgtgatccacccgccccggcctcccaaagtgctaggattacaggtgtgagccaccgcgcccggcctgattctttaagctgtttttctttgttgctggtgttttctttttggactcctcttccttgctccatatccctacagtatttcccaccattctaggtttgtccctttctcttcttctgggacactctcatcaacagtcagtcctcagccccctcctctgcaaatgacactcagaactctctctggctcagatctcagatttgggattaacaaacttccacttagacattctgcctgactgacctcaggcatttcgcactctgaatgtcaaacccaactcattgtcatctctgaagctgctcacttaattctcctctgtattctctttaacaacccagttgcccaacccagaaactgggagtcacgcagacctcctttctctcttactcccacacaatgagccatgaagtccagtctttctatcttaacatcactgtcaaacccacactgtattccatgcccagcgctgccacgtgaatgtactctgctcacttccttcctggattacccatagccccacctcatcctcctacccttgctttcctccctgaagtcagagagatcctactcaagagataactgctcctgacagcccttattacagaactgaagtactctccttagcttcagctctgtgcccacgtgccttggctttggatacaaggtactacagcactttgtccactctccaggcttacctgtgtcattccacatgcacatcttagaaaatgccagccttagagaattctccctagccccaaaatgtctttgcccagtgcaattccttcttcctgtattacccctttccctccttcacactatctgcctggctaattcttatttatccttagttcaagtatggccttttctgggaaggtgaccctccttggccaccccttgcatatactttgatgccctagggcacaccccctttatttccctcatagaaacagccttctgtaaattgttccatgacaacctgtatttcaatttgtaagaaatttgcatgtactgtgagctccccaacgtcaggagactgacccttttgatatcattgctaagcctcattaaatgaatgaatgaaaa

SEQ ID NO: 235904 - DNA, 726 bp, Artificial Sequence
  derived and/or modified sequence
atggccgtgttcctgcagctgctgcccctgctgctgagcagagcccagggcaaccccggcgccagcctggacggcagacccggcgacagagtgaacctgagctgcggcggcgtgagccaccccatcagatgggtgtgggcccccagcttccccgcctgcaagggcctgagcaagggcagaagacccatcctgtgggccagcagcagcggcacccccaccgtgccccccctgcagcccttcgtgggcagactgagaagcctggacagcggcatcagaagactggagctgctgctgagcgccggcgacagcggcaccttcttctgcaagggcagacacgaggacgagagcagaaccgtgctgcacgtgctgggcgacagaacctactgcaaggcccccggccccacccacggcagcgtgtacccccagctgctgatccccctgctgggcgccggcctggtgctgggcctgggcgccctgggcctggtgtggtggctgcacagaagactgcccccccagcccatcggccccctgcccagattcgcccccctggtgaagaccgagccccagagacccgtgaaggaggaggagcccaagatccccggcgacctggaccaggagcccagcctgctgtacgccgacctggaccacctggccctgagcagacccagaagactgagcaccgccgaccccgccgacgccagcaccatctacgccgtggtggtgtag

SEQ ID NO: 235905 - DNA, 726 bp, Artificial Sequence
  derived and/or modified sequence
atggctgtgttccttcagttgctccccctgctgttaagccgcgcccagggtaatccaggcgccagcctcgatggccgacccggcgatcgggtgaatctgagctgtggaggagtcagccatcccatcagatgggtctgggcaccatcatttcctgcctgcaaaggcttatccaaaggacggaggccaatactgtgggcaagctcaagcggaactcccaccgtgccgccgctgcagcctttcgtgggtaggctgagaagcctcgacagcggtatccgcagactggagctgctgctgagtgcaggcgacagcgggacattcttttgtaagggtcgccatgaggatgaatcccgcaccgtactacatgtgctgggcgacaggacatactgcaaggccccaggccccactcacggctctgtgtacccccagctactgatccctctcctgggggccggccttgtgctcgggctgggggccctcggcctggtgtggtggttgcacagaagactgccgcctcagcccatcggaccccttccccggtttgcccccttggtgaagactgagccccagcggccggtgaaggaagaggagcccaaaattcccggcgacttggatcaagaaccatctttactttacgccgatttggaccatctggctttgagtcgccccagacgcctctcgacggccgatcctgctgacgccagtaccatttacgcggtggtggtgtag

SEQ ID NO: 235906 - DNA, 726 bp, Artificial Sequence
  derived and/or modified sequence
atggctgtgttcctgcagctgctgcccctgctgctgagccgggcccagggcaaccctggggccagcctggatggccggcctggggacagagtgaacctgagctgtggcggcgtgagccaccccatccgctgggtgtgggcccccagcttccctgcctgcaagggcctgagcaagggccggcggcccatcctgtgggccagcagcagcggcacccccaccgtgccccccctgcagccctttgtgggccgcctgcggagcctggacagcggcatccggcggctggagctgctgctgtctgctggggacagcggcaccttcttctgcaagggcagacatgaagatgagagcaggacagtgctgcacgtgctgggggacaggacctactgcaaggcccctggccccacccacggctctgtgtacccccagctgctgatccccctgctgggcgccggcctggtgctgggcctgggcgccctgggcctggtgtggtggctgcaccggcggctgcccccccagcccatcggccccctgcccaggtttgcccccctggtgaagacagagccccagaggcctgtgaaggaggaggagcccaagatccctggggacctggaccaggagcccagcctgctgtatgctgacctggaccacctggccctgagccggccccggcggctgagcacagctgaccctgcagatgccagcaccatctatgctgtggtggtgtag

SEQ ID NO: 235907 - DNA, 726 bp, Artificial Sequence
  derived and/or modified sequence
atggccgtgttcctgcagctgctgcccctgctgctgagccgggcccagggaaatccgggcgcctcactcgacgggaggccaggcgaccgggtgaatcttagctgtggtggggtgagccatcccatcagatgggtgtgggctccgtcattccccgcttgcaaaggattgagcaaaggtagaagaccaattctgtgggccagcagttctgggacgcccaccgtgccacccctgcaacccttcgtgggaaggctacggagcttggacagtgggattaggagattggaactattgttgtcagccggtgatagcggcacattcttttgcaagggtcgccatgaggatgagtcacgcaccgtgctgcacgtgcttggagatcgaacctactgcaaagcccccggccctacgcacggaagtgtgtatccccagctgctgatccccttgctgggcgccggtcttgtgttggggctgggcgccctggggcttgtatggtggttgcatagacgactgcctccacagccgatcggccctctcccaaggttcgccccactcgtaaagacggaacctcagcgaccagtgaaagaggaggaacctaagatccccggtgatctggaccaagagccctctttactgtatgcagatctcgaccaccttgcactcagccggcctagacgcctcagcaccgcagacccagctgatgcgagcaccatctatgctgtggtggtatag

SEQ ID NO: 235908 - DNA, 726 bp, Artificial Sequence
  derived and/or modified sequence
atggctgtcttcctgcagttactcccactgctcctgagtcgcgcacagggaaatcccggagcctctctcgacggccgtcccggagacagagtcaacctaagctgcggaggcgtaagccatccgattaggtgggtctgggcgccttcatttcctgcttgtaaaggacttagcaagggtagaagaccaatcctgtgggccagttcctccggaactccaactgttcctcctcttcaacccttcgtgggacgccttcggtcactagactctggcatccgacggctggagctcctgctgtctgccggtgactcaggtaccttcttttgtaagggaagacacgaagacgagtctcgcactgtgctgcatgtgttaggcgacagaacgtactgcaaagcaccgggtcctacccatggaagtgtgtaccctcagctgctgatcccacttttgggcgcaggcctcgtattaggcctgggagctctcggcctggtgtggtggctgcaccggagattgcccccacagccaataggccctctcccccgattcgctcctttggtgaaaactgaaccccagagacctgtaaaagaagaggaacctaagattcccggtgatttggaccaggaacctagccttctctatgccgacctggaccacctggcactcagccggccaagacgcctttcaacagccgatccggctgatgcctccaccatctatgcagttgtggtctag

SEQ ID NO: 235909 - protein, 217 aa, Artificial Sequence
  derived and/or modified sequence
MAVFLQLLPLLLSRAQGNPGASLDGRPGDRVNLSCGGVSHPIRWVWAPSFPACKGLSKGRRPILWASSSGTPTVPPLQPFVGRLRSLDSGIRRLELLLSAGDSGTFFCKGRHEDESRTVLHVLGDRTYCKAPGPTHGACPRNRFDHSLDLLCPPHIAPLVKTEPQRPVKEEEPKIPGDLDQEPSLLYADLDHLALSRPRRLSTADPADASTIYAVVV

SEQ ID NO: 235910 - protein, 217 aa, Artificial Sequence
  derived and/or modified sequence
MAVFLQLLPLLLSRAQGNPGASLDGRPGDRVNLSCGGVSHPIRWVWAPSFPACKGLSKGRRPILWASSSGTPTVPPLQPFVGRLRSLDSGIRRLELLLSAGDSGTFFCKGRHEDESRTVLHVLGDRTYCKAPGPTHGACPRNRLDHSLDLLCPPHIAPLVKTEPQRPVKEEEPKIPGDLDQEPSLLYADLDHLALSRPRRLSTADPADASTIYAVVV

SEQ ID NO: 235911 - DNA, 668 bp, Artificial Sequence
  derived and/or modified sequence
accacatcctaaccatggctgtgtttctgcagctgctaccgctgctgctctcgagggcccaagggaaccctggggcttctctggacggccgccctggggaccgggtgaatctctcctgcggaggagtctctcatcccatccgctgggtctgggcacccagcttcccggcctgcaagggcctgtccaaaggacgccgaccgatcctgtgggcctcttcgagcgggacccccaccgtgcctcccctccagcctttcgtcggccgcctacgctccctggactctggtatccggcggctggagctcctcttgagcgcgggggactcgggcacttttttctgcaagggccgccacgaggacgagagccgtacagtgcttcacgtgctgggggacaggacctattgcaaggcccccgggcctacccatggcgcctgcccccgcaaccgattcgaccactccctagatttgctctgtcccccccacatagctccacttgtgaaaaccgagccccagaggccagtaaaggaggaagagcccaagattccaggggacctggaccaggaaccgagcctgctctatgcggatctggaccatctagccctcagcaggccccgccggctgtccacagcggaccctgctgatgcctccaccatctatgcagttgtagtttga

SEQ ID NO: 235912 - DNA, 2290 bp, Artificial Sequence
  derived and/or modified sequence
atggctgtgtttctgcagctgctaccgctgctgctctcgagggcccaagggaaccctggggcttctctggacggccgccctggggaccgggtgaatctctcctgcggaggagtctctcatcccatccgctgggtctgggcacccagcttcccggcctgcaagggcctgtccaaaggacgccgaccgatcctgtgggcctcttcgagcgggacccccaccgtgcctcccctccagcctttcgtcggccgcctacgctccctggactctggtatccggcggctggagctcctcttgagcgcgggagactcgggcacttttttctgcaagggccgccacgaggacgagagccgtacagtgcttcacgtgctgggggacaggacctattgcaaggcccccgggcctacccatggcgcctgcccccgcaaccgattcgaccactccctagatttgctctgtcccccccacatagctccacttgtgaaaaccgagccccagaggccagtaaaggaggaagagcccaagattccaggggacctggaccaggaaccgagcctgctctatgcggatctggaccatctagccctcagcaggccccgccggctgtccacagcggaccctgctgatgcctccaccatctatgcagttgtagtttgaagggaagcccttactccaaacctcccaagctaggggatcccagctccccataatccctctcccctccttggttcctcacctggaagaggaaggcaccatggtatagaaataagtgctagactgggagttgggagacctgggttccaggctgtctctgccactggtcttacttctaaacttactcccatctctcctataacctccatgtctccctcaccaccagtgtcctctctatacccaatcaagccctagctccttttttttttttttttgagacggagtctcgctctgttgcccaggctggagtgcagtgacaccatctccctcactgcaagctccgcctgccgggttcacaccattctcctgcctcaggctcctgagtagctgggactacaggcgcccgccaccacgcccagctaattttttgtatttttagtagagacggggtttcactgtgttagccaggatggtcttgatctgctaacctcgtgatccacccgccccggcctcccaaagtgctaggattacaggtgtgagccaccgcgcccggcctgattctttaagctgtttttctttgttgctggtgttttctttttggactcctcttccttgctccatatccctacagtatttcccaccattctaggtttgtccctttctcttcttctgggacactctcatcaacagtcagtcctcagccccctcctctgcaaatgacactcagaactctctctggctcagatctcagatttgggattaacaaacttccacttagacattctgcctgactgacctcaggcatttcgcactctgaatgtcaaacccaactcattgtcatctctgaagctgctcacttaattctcctctgtattctctttaacaacccagttgcccaacccagaaactgggagtcacgcagacctcctttctctcttactcccacacaatgagccatgaagtccagtctttctatcttaacatcactgtcaaacccacactgtattccatgcccagcgctgccacgtgaatgtactctgctcacttccttcctggattacccatagccccacctcatcctcctacccttgctttcctccctgaagtcagagagatcctactcaagagataactgctcctgacagcccttattacagaactgaagtactctccttagcttcagctctgtgcccacgtgccttggctttggatacaaggtactacagcactttgtccactctccaggcttacctgtgtcattccacatgcacatcttagaaaatgccagccttagagaattctccctagccccaaaatgtctttgcccagtgcaattccttcttcctgtattacccctttccctccttcacactatctgcctggctaattcttatttatccttagttcaagtatggccttttctgggaaggtgaccctccttggccaccccttgcatatactttgatgccctagggcacaccccctttatttccctcatagaaacagccttctgtaaattgttccatgacaacctgtatttcaatttgtaagaaatttgcatgtactgtgagctccccaacgtcaggagactgacccttttgatatcattgctaagcctcattaaatgaatgaatgaaaa

SEQ ID NO: 235913 - DNA, 2290 bp, Artificial Sequence
  derived and/or modified sequence
atggctgtgtttctgcagctgctaccgctgctgctctcgagggcccaagggaaccctggggcttctctggacggccgccctggggaccgggtgaatctctcctgcggaggagtctctcatcccatccgctgggtctgggcacccagcttcccggcctgcaagggcctgtccaaaggacgccgaccgatcctgtgggcctcttcgagcgggacccccaccgtgcctcccctccagcctttcgtcggccgcctacgctccctggactctggtatccggcggctggagctcctcttgagcgcgggggactcgggcacttttttctgcaagggccgccacgaggacgagagccgtacagtgcttcacgtgctgggggacaggacctattgcaaggcccccgggcctacccatggcgcctgcccccgcaaccgattcgaccactccctagatttgctctgtcccccccacatagctccacttgtgaaaaccgagccccagaggccagtaaaggaggaagagcccaagattccaggggacctggaccaggaaccgagcctgctctatgcggatctggaccatctagccctcagcaggccccgccggctgtccacagcggaccctgctgatgcctccaccatctatgcagttgtagtttgaagggaagcccttactccaaacctcccaagctaggggatcccagctccccataatccctctcccctccttggttcctcacctggaagaggaaggcaccatggtatagaaataagtgctagactgggagttgggagacctgggttccaggctgtctctgccactggtcttacttctaaacttactcccatctctcctataacctccatgtctccctcaccaccagtgtcctctctatacccaatcaagccctagctccttttttttttttttttgagacggagtctcgctctgttgcccaggctggagtgcagtgacaccatctccctcactgcaagctccgcctgccgggttcacaccattctcctgcctcaggctcctgagtagctgggactacaggcgcccgccaccacgcccagctaattttttgtatttttagtagagacggggtttcactgtgttagccaggatggtcttgatctgctaacctcgtgatccacccgccccggcctcccaaagtgctaggattacaggtgtgagccaccgcgcccggcctgattctttaagctgtttttctttgttgctggtgttttctttttggactcctcttccttgctccatatccctacagtatttcccaccattctaggtttgtccctttctcttcttctgggacactctcatcaacagtcagtcctcagccccctcctctgcaaatgacactcagaactctctctggctcagatctcagatttgggattaacaaacttccacttagacattctgcctgactgacctcaggcatttcgcactctgaatgtcaaacccaactcattgtcatctctgaagctgctcacttaattctcctctgtattctctttaacaacccagttgcccaacccagaaactgggagtcacgcagacctcctttctctcttactcccacacaatgagccatgaagtccagtctttctatcttaacatcactgtcaaacccacactgtattccatgcccagcgctgccacgtgaatgtactctgctcacttccttcctggattacccatagccccacctcatcctcctacccttgctttcctccctgaagtcagagagatcctactcaagagataactgctcctgacagcccttattacagaactgaagtactctccttagcttcagctctgtgcccacgtgccttggctttggatacaaggtactacagcactttgtccactctccaggcttacctgtgtcattccacatgcacatcttagaaaatgccagccttagagaattctccctagccccaaaatgtctttgcccagtgcaattccttcttcctgtattacccctttccctccttcacactatctgcctggctaattcttatttatccttagttcaagtatggccttttctgggaaggtgaccctccttggccaccccttgcatatactttgatgccctagggcacaccccctttatttccctcatagaaacagccttctgtaaattgttccatgacaacctgtatttcaatttgtaagaaatttgcatgtactgtgagctccccaacgtcaggagactgacccttttgatatcattgctaagcctcattaaatgaatgaatgaaaa

SEQ ID NO: 235914 - DNA, 654 bp, Artificial Sequence
  derived and/or modified sequence
atggccgtgttcctgcagctgctgcccctgctgctgagcagagcccagggcaaccccggcgccagcctggacggcagacccggcgacagagtgaacctgagctgcggcggcgtgagccaccccatcagatgggtgtgggcccccagcttccccgcctgcaagggcctgagcaagggcagaagacccatcctgtgggccagcagcagcggcacccccaccgtgccccccctgcagcccttcgtgggcagactgagaagcctggacagcggcatcagaagactggagctgctgctgagcgccggcgacagcggcaccttcttctgcaagggcagacacgaggacgagagcagaaccgtgctgcacgtgctgggcgacagaacctactgcaaggcccccggccccacccacggcgcctgccccagaaacagattcgaccacagcctggacctgctgtgccccccccacatcgcccccctggtgaagaccgagccccagagacccgtgaaggaggaggagcccaagatccccggcgacctggaccaggagcccagcctgctgtacgccgacctggaccacctggccctgagcagacccagaagactgagcaccgccgaccccgccgacgccagcaccatctacgccgtggtggtgtag

SEQ ID NO: 235915 - DNA, 654 bp, Artificial Sequence
  derived and/or modified sequence
atggccgtctttctgcagctgctccccctcctgctgagccgcgcgcaaggcaatcccggagcaagtctggacggtcgaccaggcgaccgtgtcaatctgagttgtgggggggtaagccatccaatccgttgggtgtgggcccccagtttccccgcctgcaaggggctatccaaaggccgaagacctatactttgggcttcgagcagcggcaccccgacagtgccccctctgcagccgttcgtgggccgtttacgctccctggactcaggcatacgtcggctggagcttctactgagtgccggagactccggcaccttcttctgtaaaggacgccacgaggacgaaagtagaaccgttttacacgtgctgggcgacaggacctattgtaaggcacctggcccaactcacggggcttgcccccggaataggttcgaccactctctggatttgctctgtccaccacacatcgctccccttgttaaaaccgaaccccagaggccagtcaaagaggaggagcccaagattccaggcgatttagatcaggagccttccctgttgtatgccgatctggaccacctggctttatctaggccacggaggctctcaactgctgatcctgctgacgcctccactatctatgccgtcgttgtctag

SEQ ID NO: 235916 - DNA, 654 bp, Artificial Sequence
  derived and/or modified sequence
atggctgttttcctgcaactgctccctctccttctgtcaagagcacaggggaatcctggggccagcctggatggccgccccggcgaccgtgtcaatttatcttgtggaggcgtctcccaccccatccgttgggtatgggcgccatctttcccagcttgtaagggcctgtcaaagggacggcggccaattctatgggcatccagtagtggcactcctactgtcccaccactccagccctttgtggggcggttgcgctctctagactcagggatacgacggctggaactgctgttgtccgctggcgatagtggtactttcttctgcaagggaaggcatgaggacgagagcaggactgtcctgcacgtcctgggtgatcgaacttattgcaaggcaccaggccctacccacggggcatgcccacggaataggttcgaccattccttagatttgttatgcccaccccatattgcacccctggttaagaccgaacctcagagaccggttaaggaagaagaacctaagatccccggcgacctagaccaggaaccaagtctgctttacgccgacctggatcacctcgctcttagtcgtcctcgtcgcctctcaactgccgacccagcggacgcctctactatatacgccgtggttgtgtag

SEQ ID NO: 235917 - DNA, 654 bp, Artificial Sequence
  derived and/or modified sequence
atggccgtctttctccagctgctacccctccttcttagtagggcccaaggtaacccaggcgcatccctggacggtaggcccggcgatcgtgtgaatctctcttgcggcggggtctcccatccaattcggtgggtgtgggccccatctttccccgcctgcaaaggtctcagtaaggggaggaggccaatcctctgggccagcagttccggcactcccacggttccgccactgcagccgttcgtggggaggctgcgcagcctcgatagcggaataagaagactagagcttttgctttccgcgggcgacagtggaaccttcttttgtaagggccgccatgaggatgagagccggaccgtgttacatgttctcggcgaccggacttactgcaaagccccgggcccaacacatggtgcgtgtccgaggaatcgatttgatcattcgttggatttactctgtcccccccatatcgccccgcttgtgaaaacagagccccagcggcctgtgaaagaagaagagcctaagattcccggtgacctagatcaggaacctagcttgttgtacgccgatctggatcatctagctctcagtcgtcctcgtcgcctgtctactgcagatcctgccgatgccagtaccatttatgccgtggttgtttag

SEQ ID NO: 235918 - DNA, 654 bp, Artificial Sequence
  derived and/or modified sequence
atggcagtctttttacagttattgcccctgctcttaagcagggcccagggcaatcccggcgcctcattggacgggcgtccaggcgaccgcgtgaaccttagctgcgggggagtttctcacccaattcgctgggtgtgggctcctagctttcctgcatgtaaaggactcagtaagggtaggcggcccatcctctgggcaagctcatcgggtacaccaacagtcccccccctgcagccatttgttggacgattgcgcagcctcgattccgggatccggagactcgaactcctcctgtcagccggggatagcggcaccttcttttgcaaaggccggcatgaagacgaaagtagaaccgtgctccacgtgctgggggatcgaacctactgtaaagcccccggacccactcacggcgcttgtccgcggaataggttcgatcactcgctggatctgttgtgccccccacatattgctcccctggtgaaaaccgagccgcagcggccagttaaggaggaggagcccaagatccccggggatctagatcaggagccaagtctgctgtacgctgatcttgatcacctggctctgagtagaccccggcgcctgtccacggccgacccggccgatgccagcacaatttacgcagtcgtggtgtag

SEQ ID NO: 235919 - DNA, 654 bp, Artificial Sequence
  derived and/or modified sequence
atggccgtcttcctccagctgcttccactcctgctctctcgcgcacaggggaacccgggtgcttcactggacggccggccaggcgaccgtgtcaacttgagctgcggcggtgtcagtcatccaattcggtgggtttgggctccatcgtttcccgcctgtaaagggctgagcaaaggccggcgcccgatcctctgggcgtcttcttccggcactcctacagtgccacctctgcagccatttgtgggacgccttcggagccttgatagtgggatcaggaggctcgaactgttgctgagtgccggagatagcggtacattcttctgcaaaggaaggcatgaagatgagtctagaaccgtactgcatgttctgggcgatcgtacttactgcaaggccccaggaccaacacacggcgcctgccctcgcaataggtttgatcactccctcgatctactgtgtcctccgcacatcgcccctttagtgaagaccgagcctcaaaggccagtcaaggaggaagagccaaaaatcccaggcgatctggatcaggaaccatctctgttatacgccgatctcgatcacttggccctcagccgaccacgccggctgagcactgctgaccctgccgacgctagcactatttacgcggtggtcgtctag

SEQ ID NO: 235920 - DNA, 654 bp, Artificial Sequence
  derived and/or modified sequence
atggctgtcttcctgcaacttctgccgctgctgctctcccgtgctcaggggaacccgggcgcttctctggatgggcgacctggagacagagttaacttgagctgcggcggagttagccacccaattcgctgggtatgggcacctagcttccctgcctgtaaggggctgtctaaaggccggagacccattctctgggccagctcgtccgggacacccactgtgccacctctgcagcctttcgtcggcagactgagatccctggactccggaattcgacgactagaactcctgttaagcgcaggagattcaggcacgttcttctgtaaaggacgccacgaggatgaatcacggaccgtcctgcacgtactgggtgataggacctactgtaaggcacctgggccaacacacggggcgtgccccagaaaccgatttgatcacagcctggatctgctgtgtccaccccatatcgcaccactagtcaagaccgaaccacagcgcccggtaaaagaggaagagcctaagattcccggggatctcgaccaggagccgagcctactgtacgctgacttggatcacctggcccttagcaggccacgtcgcctatctactgccgacccagccgacgctagcaccatatacgctgtcgtggtgtag

SEQ ID NO: 235921 - DNA, 654 bp, Artificial Sequence
  derived and/or modified sequence
atggctgtgttcctgcagctgctgcccctgctgctgagccgggcccagggcaaccctggggccagcctggatggccggcctggggacagagtgaacctgagctgtggcggcgtgagccaccccatccgctgggtgtgggcccccagcttccctgcctgcaagggcctgagcaagggccggcggcccatcctgtgggccagcagcagcggcacccccaccgtgccccccctgcagccctttgtgggccgcctgcggagcctggacagcggcatccggcggctggagctgctgctgtctgctggggacagcggcaccttcttctgcaagggcagacatgaagatgagagcaggacagtgctgcacgtgctgggggacaggacctactgcaaggcccctggccccacccacggggcctgccccaggaacagatttgaccacagcctggacctgctgtgccccccccacatcgcccccctggtgaagacagagccccagaggcctgtgaaggaggaggagcccaagatccctggggacctggaccaggagcccagcctgctgtatgctgacctggaccacctggccctgagccggccccggcggctgagcacagctgaccctgcagatgccagcaccatctatgctgtggtggtgtag

SEQ ID NO: 235922 - DNA, 654 bp, Artificial Sequence
  derived and/or modified sequence
atggccgtgttcctgcagctgctgcccctgctgctgagccgggcccaaggaaacccaggcgcttccctcgatgggcggcccggagacagggtcaacctctcttgcggaggcgtgtcacacccaatacggtgggtctgggcgccctccttccccgcttgcaagggcctgtcaaagggccgccggcctatcctgtgggcttcatcttcgggcacaccgacggtccccccactgcagccgttcgtcgggcgcctgcggagccttgactccgggattagacgtcttgagttgctgctgagcgctggggactcagggacatttttttgcaaggggcgacacgaggatgaaagcagaaccgtgctgcacgtactaggggatcggacatactgcaaggcccctggtcccactcacggtgcttgcccgcggaaccgtttcgatcattcacttgacctgctgtgccctcctcacatcgcaccattggtgaagacggagccacagcggccggttaaagaagaagaaccaaagatccctggcgatctcgaccaggagccctctttactatatgctgacctcgatcacctggctctctctagaccccgaaggctatcgacggctgaccccgcagatgcaagcaccatttatgccgtggtcgtctag

SEQ ID NO: 235923 - DNA, 654 bp, Artificial Sequence
  derived and/or modified sequence
atggccgtgttcctgcagctgctgcccctgctgctgagccgggcccagggaaatccgggtgctagcctggacggaaggccgggtgacagagtgaatttgtcctgtggtggggtaagccaccccatcagatgggtctgggccccgtcattcccagcctgcaagggactgtctaagggtcgtcggcccattctctgggcctcaagctctggaaccccaacagttccacccctccagccatttgtcggtagattgcggtctctggacagcggtatcagacgcctggagttgctgttgtccgccggcgattctggcacattcttctgcaaaggccgacacgaggacgaaagtcgaacagtactgcacgtgctcggggatcggacatattgtaaggctcctggcccaacacacggggcctgtccccgaaatagatttgaccactcactcgatttactgtgtcctccacacattgctcctttggtgaaaaccgagcctcagcggcctgtgaaggaagaggaacccaagatacccggcgacctcgatcaggaaccttctttgctctacgccgatctggatcatctcgccctgtcccgcccccgccggctgtccacagccgacccagctgacgcctccactatttacgccgtcgtcgtgtag

SEQ ID NO: 235924 - DNA, 654 bp, Artificial Sequence
  derived and/or modified sequence
atggccgtgttcctgcagctgctgcccctgctgctgagccgggcccagggaaaccccggtgcctccttagacgggcgtcccggagatcgggtcaacctgtcgtgcggcggtgtctcacaccccatccggtgggtgtgggctcccagctttcctgcttgtaagggattatcaaaagggcgccgcccaattctgtgggcaagctcctcggggaccccgacggtcccgccgcttcagccttttgtcggcagattacgctctctggacagcgggatacgacgcttggagctcttgctgtctgccggagacagtggaacgttcttctgcaaaggtcgccacgaagatgagagtaggaccgtgctccacgtgctcggcgaccgaacctactgtaaagccccaggacctacacatggagcatgccctaggaatcggtttgatcatagtctggatcttctttgtccccctcatatcgcccctctggtcaaaaccgagccacagagaccagttaaagaggaagagcctaagattccaggagacctggaccaagagccaagtctcctatatgcagatctggatcatctggcactttcaaggcccagaagactgtctacagcagacccagccgacgcctcaactatctacgcagttgtggtatag

SEQ ID NO: 235925 - DNA, 654 bp, Artificial Sequence
  derived and/or modified sequence
atggccgtgttcctgcagctgctgcccctgctgctgagccgggcccaaggcaacccgggcgccagcttggacgggcgtcctggcgaccgcgttaatctgagttgcggcggcgtttcccacccaatccgatgggtgtgggctccaagcttccccgcatgcaaaggcctgtccaaggggagaaggccaattctttgggcttcaagctcaggtacgcccactgtcccaccactgcaaccttttgtgggcaggcttaggagcctagactccggcatccgccgtctcgaattgttgctgtccgctggggacagtggcacattcttttgtaaggggcggcatgaggatgaatccaggaccgttctgcatgtgctaggcgaccggacctattgtaaagctccaggaccaactcacggtgcctgtccgcggaataggtttgaccattctctggatctgctttgccctccacacattgcaccactggtgaagactgaacctcaacggccagtaaaagaggaggagcccaaaatcccaggggacctggaccaggagccgtctttgctgtatgctgacctggaccatctggccctgtcacgcccccgtcggttgtcaaccgcggacccggccgatgcatcaaccatatacgccgtggtggtctag

SEQ ID NO: 235926 - DNA, 654 bp, Artificial Sequence
  derived and/or modified sequence
atggccgtgttcctgcagctgctgcccctgctgctgagccgggcccaaggcaatcctggagcctcactagatggtaggcccggagaccgggtgaacctgtcctgtgggggagttagtcatccgatccgctgggtctgggcaccctctttccccgcctgtaagggcctaagtaagggccgcagacctattctttgggcctccagcagcggcacacccacagtgcctcctctacagccatttgttggccgcctgagaagtctggattcaggcatcagacggctggagctgttactgtccgctggagatagtggcacctttttctgcaagggacggcacgaagatgaatctcgcaccgtcttacacgttctgggtgacagaacctactgtaaggcccctggaccaacgcacggcgcctgccctcggaatagattcgaccacagccttgaccttctctgcccgccacacatcgccccgctggtgaaaacagagccccagaggcccgtgaaggaggaggaacccaagattccaggagatttggatcaggagccatccctcttatacgccgacctggaccacctggccttgagcagaccaaggcgcctgagcactgcagaccctgccgatgcgtcaactatctatgccgtggtggtatag

SEQ ID NO: 235927 - DNA, 654 bp, Artificial Sequence
  derived and/or modified sequence
atggccgtgttcctgcagctgctgcccctgctgctgagccgggcccaggggaatccaggtgcttctctcgacgggaggcccggcgaccgggtcaacctgtcttgcggaggtgtgtctcacccaattaggtgggtctgggccccatcattccctgcttgcaagggactgtccaaggggagaaggcccatcctgtgggccagtagcagtggaacccctacagtgcctcctctacaaccattcgttggtaggcttaggtccctagatagtggaataaggcggttggagctgctcctgtctgccggtgactccggcacttttttttgcaaaggacgtcacgaggacgagagtcggaccgttctccacgtcttgggagacagaacctactgtaaagctccaggtcccacacatggagcatgccctagaaaccgctttgaccacagcctagatcttctttgtccacctcacattgcaccgttggtaaaaactgagccacagcgccccgtgaaggaggaggagcctaaaatccccggtgatctcgatcaggagcctagtctgctgtacgctgatttggaccatctggccctttctcggcctagacggctgagtacagctgatcccgcagatgcttctaccatctatgcagtggtggtgtag

SEQ ID NO: 235928 - DNA, 654 bp, Artificial Sequence
  derived and/or modified sequence
atggccgtgttcctccaattgctccccctgctactgtccagagcgcagggtaatcctggagccagcctcgatgggaggcctggcgatagggttaacctctcttgcgggggagtgtctcatcccatccgatgggtctgggcgccaagcttcccggcttgtaagggtctatcaaagggacgaagaccaatactgtgggccagttcttccggcacccctacggtgcccccactgcagccgtttgttgggagattacgctcactagactctggcattagaaggctagaactgctgctcagtgccggagattctggtacatttttttgcaagggccgtcatgaagatgagagtcggaccgtgctacacgtcctgggggataggacatactgcaaagccccaggtccaacgcacggtgcttgcccgaggaacagattcgaccactccctggatttgttgtgcccacctcatatcgcaccgttagtaaaaacagagccacaaagaccagtgaaggaagaggaacccaagatcccaggggacttggatcaagaacccagtctgctctacgccgacttggatcacctggccctaagcagacctagaaggcttagcaccgccgatcctgcggatgcaagcaccatttatgccgtggttgtctag

SEQ ID NO: 235929 - DNA, 654 bp, Artificial Sequence
  derived and/or modified sequence
atggcagtgttcctccaattgctgcctctgcttttgagccgggctcagggcaacccgggagcctcattagacggtaggcccggtgatcgagtcaacctaagctgtggtggcgtctctcaccccattcggtgggtgtgggccccatcctttcccgcttgtaagggcttgagcaagggacgacggccaatcctttgggcttcttcaagcggcactcctactgtgcctcccttgcagccctttgtaggacgcctccggagcttggactcgggtattcgtcgcctagagctgctgcttagcgccggagattccggaacgtttttctgcaaagggagacatgaagatgagagtcgaacagtgctccacgttttaggggatagaacatactgcaaagcccctggaccgacacatggggcttgccctagaaaccgctttgatcacagcctggacctcctgtgtccacctcacatcgcaccactcgtcaaaactgaacctcagagacctgtgaaagaggaagagcctaagattcccggagacctggatcaggagcctagcctgctctatgctgacttagaccaccttgctctgtctcggccacgaaggctgagcaccgccgatccggctgacgcctcgactatttatgccgttgtggtatag

SEQ ID NO: 235930 - DNA, 654 bp, Artificial Sequence
  derived and/or modified sequence
atggccgtgttcctgcagctgctgcccctgctgctgagccgagctcaaggcaatccaggcgctagtttggatggcaggcctggagacagagtcaatttgagctgcggtggagtgtctcacccaatccggtgggtctgggcaccaagctttcccgcatgcaaggggctgagcaaaggtcggagaccaatactctgggcatcatccagcggtacgccgacagtcccccctctgcagccctttgttggaaggctccggtctctcgacagcggaattagaagactggaactgctgctctctgccggtgacagcggtacattcttttgcaaaggtaggcacgaggatgaaagtagaacagtattgcatgtgcttggcgatagaacctactgcaaagccccaggtcctacacatggcgcatgtcccaggaatcgctttgatcatagtctggacctgctgtgcccaccccatatagcccctctcgtcaaaaccgagcctcagcgccctgtgaaagaagaggaaccaaaaatacccggagatcttgaccaggaaccctctctcctctacgctgatttggatcacctggcactctctaggccacgaagactaagcaccgctgacccagccgatgcatctactatttatgctgtggttgtctag

SEQ ID NO: 235931 - DNA, 654 bp, Artificial Sequence
  derived and/or modified sequence
atggccgtgttcctccagctgctgcctctactgctgagtcgggctcaggggaatcccggtgcttccttagacgggagaccgggtgatcgcgtgaatctgtcttgcggcggtgtctcccatcctatccgctgggtgtgggctccaagcttccccgcatgtaaaggcctctctaaaggacgcaggcccatcctctgggcctcatccagtgggacacccactgtgcccccactccaaccttttgtcggacgcctccgcagtttggactcaggaattcgccgtctcgagcttcttctgtctgcaggggacagtggaaccttcttttgtaagggcagacatgaggatgagagtcggaccgtccttcatgtgctaggggaccgaacatattgcaaagccccaggccctactcacggtgcttgcccgcgaaaccgattcgaccatagtcttgacctgctgtgtccgccacacatcgcccctcttgtcaaaactgaaccccagcgaccagtcaaagaggaggagccaaaaatacctggagacctggaccaagaacctagcctgctgtacgctgatttggatcaccttgcgttgagccggcctagacggctgtccaccgccgatcccgcagacgccagtaccatttacgcagtggttgtctag

SEQ ID NO: 235932 - DNA, 654 bp, Artificial Sequence
  derived and/or modified sequence
atggccgtgttcctgcagctactccctctactgctctctcgcgctcaaggtaatcccggagcctctcttgatggtcgcccaggcgaccgggtaaatttaagctgtggcggagtctcccacccaatacggtgggtgtgggccccttctttcccggcatgtaagggcctctctaaaggcagacgtcccatcctgtgggcttcatctagcgggactccaacagtgccccctctccagccctttgtgggaaggttgagatcactggattcaggcatccgcaggttagagctccttctctctgcaggcgattccggtacgtttttttgcaaaggcagacatgaagatgaaagcaggaccgttctacatgtcttaggagaccggacatactgtaaagccccaggccctactcacggagcctgcccacggaataggttcgaccattcactcgacttattatgtccccctcatatcgctcccctggtcaagaccgagccccagcgaccagtaaaggaggaggaacctaagatccctggggaccttgaccaggaaccatcacttttatacgccgacctcgaccacttggccctctctcgtcctcggagactgagtacagctgatcctgctgacgcgtctaccatctatgccgtagtggtttag

SEQ ID NO: 235933 - DNA, 654 bp, Artificial Sequence
  derived and/or modified sequence
atggctgttttcctccagctgttgcccctgttactctccagagcacagggaaatccaggggcaagcttagatggccgacctggcgatcgcgtcaatctgtcatgtggaggcgttagtcatccaattcggtgggtgtgggccccatcctttcctgcatgtaagggcttaagcaagggacggagaccaattctgtgggcaagctcaagtggtaccccaactgtcccaccactccagccttttgtgggtcgtttgcggtcattggattccggaatcaggaggttagagctgcttctgtccgccggagattctgggacatttttttgtaaggggaggcatgaggatgagtcgagaactgtgctccacgttctgggggatcgcacatactgtaaggctcccggtccaacacatggtgcctgccccagaaaccgcttcgatcatagcttagacctgctatgcccacctcacattgcaccattggtgaagaccgagcctcagcgaccagtgaaggaggaggagcctaaaatacctggggacctggaccaggaaccctccctcctctacgcggatctcgaccatcttgccctgtctcggcctcggagactaagcaccgctgaccctgccgacgcttcaactatctacgctgtcgtcgtgtag

SEQ ID NO: 235934 - DNA, 2290 bp, Artificial Sequence
  derived and/or modified sequence
atggctgtgtttctgcagctgctaccgctgctgctctcgagggcccaagggaaccctggggcttctctggacggccgccctggggaccgggtgaatctctcctgcggaggagtctctcatcccatccgctgggtctgggcacccagcttcccggcctgcaagggcctgtccaaaggacgccgaccgatcctgtgggcctcttcgagcgggacccccaccgtgcctcccctccagcctttcgtcggccgcctacgctccctggactctggtatccggcggctggagctcctcttgagcgcgggggactcgggcacttttttctgcaagggccgccacgaggacgagagccgtacagtgcttcacgtgctgggggacaggacctattgcaaggcccccgggcctacccatggcgcctgcccccgcaaccgattggaccactccctagatttgctctgtcccccccacatagctccacttgtgaaaaccgagccccagaggccagtaaaggaggaagagcccaagattccaggggacctggaccaggaaccgagcctgctctatgcggatctggaccatctagccctcagcaggccccgccggctgtccacagcggaccctgctgatgcctccaccatctatgcagttgtagtttgaagggaagcccttactccaaacctcccaagctaggggatcccagctccccataatccctctcccctccttggttcctcacctggaagaggaaggcaccatggtatagaaataagtgctagactgggagttgggagacctgggttccaggctgtctctgccactggtcttacttctaaacttactcccatctctcctataacctccatgtctccctcaccaccagtgtcctctctatacccaatcaagccctagctccttttttttttttttttgagacggagtctcgctctgttgcccaggctggagtgcagtgacaccatctccctcactgcaagctccgcctgccgggttcacaccattctcctgcctcaggctcctgagtagctgggactacaggcgcccgccaccacgcccagctaattttttgtatttttagtagagacggggtttcactgtgttagccaggatggtcttgatctgctaacctcgtgatccacccgccccggcctcccaaagtgctaggattacaggtgtgagccaccgcgcccggcctgattctttaagctgtttttctttgttgctggtgttttctttttggactcctcttccttgctccatatccctacagtatttcccaccattctaggtttgtccctttctcttcttctgggacactctcatcaacagtcagtcctcagccccctcctctgcaaatgacactcagaactctctctggctcagatctcagatttgggattaacaaacttccacttagacattctgcctgactgacctcaggcatttcgcactctgaatgtcaaacccaactcattgtcatctctgaagctgctcacttaattctcctctgtattctctttaacaacccagttgcccaacccagaaactgggagtcacgcagacctcctttctctcttactcccacacaatgagccatgaagtccagtctttctatcttaacatcactgtcaaacccacactgtattccatgcccagcgctgccacgtgaatgtactctgctcacttccttcctggattacccatagccccacctcatcctcctacccttgctttcctccctgaagtcagagagatcctactcaagagataactgctcctgacagcccttattacagaactgaagtactctccttagcttcagctctgtgcccacgtgccttggctttggatacaaggtactacagcactttgtccactctccaggcttacctgtgtcattccacatgcacatcttagaaaatgccagccttagagaattctccctagccccaaaatgtctttgcccagtgcaattccttcttcctgtattacccctttccctccttcacactatctgcctggctaattcttatttatccttagttcaagtatggccttttctgggaaggtgaccctccttggccaccccttgcatatactttgatgccctagggcacaccccctttatttccctcatagaaacagccttctgtaaattgttccatgacaacctgtatttcaatttgtaagaaatttgcatgtactgtgagctccccaacgtcaggagactgacccttttgatatcattgctaagcctcattaaatgaatgaatgaaaa

SEQ ID NO: 235935 - DNA, 654 bp, Artificial Sequence
  derived and/or modified sequence
atggccgtgttcctgcagctgctgcccctgctgctgagcagagcccagggcaaccccggcgccagcctggacggcagacccggcgacagagtgaacctgagctgcggcggcgtgagccaccccatcagatgggtgtgggcccccagcttccccgcctgcaagggcctgagcaagggcagaagacccatcctgtgggccagcagcagcggcacccccaccgtgccccccctgcagcccttcgtgggcagactgagaagcctggacagcggcatcagaagactggagctgctgctgagcgccggcgacagcggcaccttcttctgcaagggcagacacgaggacgagagcagaaccgtgctgcacgtgctgggcgacagaacctactgcaaggcccccggccccacccacggcgcctgccccagaaacagactggaccacagcctggacctgctgtgccccccccacatcgcccccctggtgaagaccgagccccagagacccgtgaaggaggaggagcccaagatccccggcgacctggaccaggagcccagcctgctgtacgccgacctggaccacctggccctgagcagacccagaagactgagcaccgccgaccccgccgacgccagcaccatctacgccgtggtggtgtag

SEQ ID NO: 235936 - DNA, 654 bp, Artificial Sequence
  derived and/or modified sequence
atggcggttttcctccagctgctgcccctgctcctgagccgcgcacagggaaacccaggggcttcactggatggccggccaggggatagggtgaacctgagctgcgggggtgtgtcacaccctattagatgggtctgggctccaagttttcctgcttgtaagggactgagtaaagggcgcagacccattttatgggcatcctcgagcggtacacctactgttcccccattacagcctttcgtgggtagactccgatctctcgacagtggaatcaggagactggagctgctcctgagcgccggggactccggtacattcttttgtaaagggagacacgaagatgagtctagaaccgtgctccatgtactaggcgatagaacctactgcaaggcccccgggcccacccacggagcctgtccaaggaacaggttggaccattcactggatttgctctgccccccacatatcgcccctctggtgaaaactgagcctcaaagacccgtgaaagaagaggagccaaaaatccccggcgacttggatcaggagcccagcctgctgtatgcggacctagatcacctggcactgtcacgtcctcgtcgcctttcgacggctgatcctgctgatgcttccacaatctatgctgtcgtcgtgtag

SEQ ID NO: 235937 - DNA, 654 bp, Artificial Sequence
  derived and/or modified sequence
atggctgtgttcctgcagctgctgcccctgctgctgagccgggcccagggcaaccctggggccagcctggatggccggcctggggacagagtgaacctgagctgtggcggcgtgagccaccccatccgctgggtgtgggcccccagcttccctgcctgcaagggcctgagcaagggccggcggcccatcctgtgggccagcagcagcggcacccccaccgtgccccccctgcagccctttgtgggccgcctgcggagcctggacagcggcatccggcggctggagctgctgctgtctgctggggacagcggcaccttcttctgcaagggcagacatgaagatgagagcaggacagtgctgcacgtgctgggggacaggacctactgcaaggcccctggccccacccacggggcctgccccaggaaccggctggaccacagcctggacctgctgtgccccccccacatcgcccccctggtgaagacagagccccagaggcctgtgaaggaggaggagcccaagatccctggggacctggaccaggagcccagcctgctgtatgctgacctggaccacctggccctgagccggccccggcggctgagcacagctgaccctgcagatgccagcaccatctatgctgtggtggtgtag

SEQ ID NO: 235938 - DNA, 654 bp, Artificial Sequence
  derived and/or modified sequence
atggccgtgttcctgcagctgctgcccctgctgctgagccgggcccaaggtaaccccggcgcctccttagacggccgaccaggcgacagagtgaacctgtcctgcggcggcgtcagccatccgatccgctgggtatgggcgcccagttttccagcctgtaaggggctctctaaagggcgccgccctatcctatgggcatcatcatccggaactcccacagtgcccccgctgcagccattcgtggggagactgagaagcctcgattctggcatacgaaggctggagctgctcctctccgccggcgactcaggcactttcttttgcaagggacgccacgaagatgaaagtcggactgtactgcacgtcttaggtgatagaacctattgcaaggctcccggaccaacccacggtgcctgccccaggaatagactggatcattctctggatttactgtgcccgcctcacatcgctcccctggttaagacagagccccagaggcccgtgaaagaagaggaacctaagatccccggggatctcgatcaggagcccagcttattatacgcagacctcgatcacctggccctaagtaggcctcggcgattaagcacagcagatccggccgatgcctctaccatctacgcggttgttgtttag

SEQ ID NO: 235939 - DNA, 654 bp, Artificial Sequence
  derived and/or modified sequence
atggccgtgtttcttcagttgctccctcttctgctcagtagggctcagggaaaccctggggctagtctggatggcaggccgggagatcgcgtgaacctcagctgcggaggcgtttcccaccctattcgatgggtctgggctccatcctttccagcttgcaaaggccttagcaaagggagacgcccaattttgtgggcgtcctcctctggaaccccgacggtgcctccacttcagccatttgtgggcaggttgagatccctggacagtggaatacggagattggagttactcttgtctgcgggtgactcagggacatttttctgtaaggggaggcacgaggacgagtcaaggaccgtgctccacgtcctcggtgatagaacttactgtaaggccccagggccaactcatggcgcatgtcctcgtaaccgcttagaccactctctggacctgctttgtccaccacacatagctcccctcgtgaaaactgagccacagcggcctgtcaaggaggaggaacctaagatcccgggagatttagaccaggaaccgtctttgctttatgccgacttggatcatctggccctgtcccggccacggcgacttagcaccgcggatcccgctgatgcctccaccatatatgcggtcgtggtgtag

SEQ ID NO: 235940 - protein, 193 aa, Artificial Sequence
  derived and/or modified sequence
MAVFLQLLPLLLSRAQGNPGASLDGRPGDRVNLSCGGVSHPIRWVWAPSFPACKGLSKGRRPILWASSSGTPTVPPLQPFVGRLRSLDSGIRRLELLLSAGDSGTFFCKGRHEDESRTVLHVLGDRTYCKAPGPTHALSPPHSSTCENRAPEASKGGRAQDSRGPGPGTEPALCGSGPSSPQQAPPAVHSGPC

SEQ ID NO: 235941 - DNA, 613 bp, Artificial Sequence
  derived and/or modified sequence
atggctgtgtttctgcagctgctaccgctgctgctctcgagggcccaagggaaccctggggcttctctggacggccgccctggggaccgggtgaatctctcctgcggaggagtctctcatcccatccgctgggtctgggcacccagcttcccggcctgcaagggcctgtccaaaggacgccgaccgatcctgtgggcctcttcgagcgggacccccaccgtgcctcccctccagcctttcgtcggccgcctacgctccctggactctggtatccggcggctggagctcctcttgagcgcgggggactcgggcacttttttctgcaagggccgccacgaggacgagagccgtacagtgcttcacgtgctgggggacaggacctattgcaaggcccccgggcctacccatgctctgtcccccccacatagctccacttgtgaaaaccgagccccagaggccagtaaaggaggaagagcccaagattccaggggacctggaccaggaaccgagcctgctctatgcggatctggaccatctagccctcagcaggccccgccggctgtccacagcggaccctgctgatgcctccaccatctatgcagttgtagtttga
